United States Patent Application Publication US 2025/0084491 A1 - sequence listing, part 42

SEQ ID NO: 804718 - DNA, 75 bp, synthetic construct
  source 1..75: mol_type = other DNA
atgcaagagaaaagcgacaacgttgtcagccactatgtctttgaagcacctgtgcggatatggcactggctgacg

SEQ ID NO: 804719 - DNA, 75 bp, synthetic construct
  source 1..75: mol_type = other DNA
ctggcaaaacgtccgagtgccgatataggccataaccccatcgcccaggcggcgatgttcggctatttcctgatg

SEQ ID NO: 804720 - DNA, 75 bp, synthetic construct
  source 1..75: mol_type = other DNA
aaatgtcgggccaggaagtccgcgatcgcgtgaaggcgatgatgatgaaagtcggtttgttacccaacctgataa

SEQ ID NO: 804721 - DNA, 75 bp, synthetic construct
  source 1..75: mol_type = other DNA
ttgttctctttccgccgggaacgtttggtgatgaactgtcgacacggctggcctggcgtttacatggtgcaagca

SEQ ID NO: 804722 - DNA, 75 bp, synthetic construct
  source 1..75: mol_type = other DNA
gcctggcgtgtacatggcgccagtatctgtcaggtgatttcattcgatatatcaaccgcaagcgtgcgcaaatct

SEQ ID NO: 804723 - DNA, 75 bp, synthetic construct
  source 1..75: mol_type = other DNA
acgtatctgttctatatgggttacatcaggttaattcacttcagcgccgggatgatttttaccgtggtcttgctg

SEQ ID NO: 804724 - DNA, 75 bp, synthetic construct
  source 1..75: mol_type = other DNA
ataaaacactctccaggaaacccggggcggttcacttcagcgccgggatggtttttaccgtggttttgctgatgc

SEQ ID NO: 804725 - DNA, 75 bp, synthetic construct
  source 1..75: mol_type = other DNA
acagataaagaaaatagttcctcatccggataccgccttgcatgcatactgttcaggacagagtaaaaaacgtga

SEQ ID NO: 804726 - DNA, 75 bp, synthetic construct
  source 1..75: mol_type = other DNA
tatgatcatcactggctttgcgctgtacagcgaacacagccagtacgctatttttgcgccgttccgttatgtggt

SEQ ID NO: 804727 - DNA, 75 bp, synthetic construct
  source 1..75: mol_type = other DNA
ctgacgacacggtgatctccacgatggttaatggttaccgcagtcataaatttggcaaaatgagcaacaaggagc

SEQ ID NO: 804728 - DNA, 75 bp, synthetic construct
  source 1..75: mol_type = other DNA
atgcaacagaaaagtgacaacgttgtcagccattatgtctttgaagcgccggtccgtatctggcactggctgaca

SEQ ID NO: 804729 - DNA, 75 bp, synthetic construct
  source 1..75: mol_type = other DNA
taggtaaagagttgctgggcatgaagcccgatgaatggcgtgccgttcgcagtgatattcagatgattttccagg

SEQ ID NO: 804730 - DNA, 75 bp, synthetic construct
  source 1..75: mol_type = other DNA
cttttgatctctcttacctgcgctgtattccggaaatggtcattatgaccccgagcgatgaaaacgaatgtcgcc

SEQ ID NO: 804731 - DNA, 75 bp, synthetic construct
  source 1..75: mol_type = other DNA
gtttgaagagctgggctttaactacatcggcccggttgacggtcacgatgtgctggggcttatcaccacgcttaa

SEQ ID NO: 804732 - DNA, 75 bp, synthetic construct
  source 1..75: mol_type = other DNA
ctccactttcctgcaacgcgcctatgatcaggtgctgcatgacgtggcgattcaaaagcttccggtcctgttcgc

SEQ ID NO: 804733 - DNA, 75 bp, synthetic construct
  source 1..75: mol_type = other DNA
ccaatccagaatcgacccgttatctcactttcctgaaagggcgagtagggcgcaaagtggctgatttctttatgg

SEQ ID NO: 804734 - DNA, 75 bp, synthetic construct
  source 1..75: mol_type = other DNA
tgagcagaaccttgagctggtgctgcgcgattcattgctggaaccgacggaaaccgtcgttgagatggtggcgga

SEQ ID NO: 804735 - DNA, 75 bp, synthetic construct
  source 1..75: mol_type = other DNA
gggcgatatccgtcctgatatgctggtggtcctcaacgacaacgaaatgtcgatttccgaaaatgtcggcgcgct

SEQ ID NO: 804736 - DNA, 75 bp, synthetic construct
  source 1..75: mol_type = other DNA
ccgagcgatgaaaacgaatgtcgccagatgctctataccggctatcactataacgatggcccgtcagcggtgcgc

SEQ ID NO: 804737 - DNA, 75 bp, synthetic construct
  source 1..75: mol_type = other DNA
gctactgctactgctactgctactgctactgctactgctactgctactgctactgctactgctcttctttttcct

SEQ ID NO: 804738 - DNA, 75 bp, synthetic construct
  source 1..75: mol_type = other DNA
aagtcctcctcgaaatcgctgacctgaaagtgcactttgaaatcaaagatggcaaacagtggttctggcaacccg

SEQ ID NO: 804739 - DNA, 75 bp, synthetic construct
  source 1..75: mol_type = other DNA
aacgctacgctggtcgatatgcgttttgtgaaaccgcttgatgaagcgttaattctggaaatggccgccagccat

SEQ ID NO: 804740 - DNA, 75 bp, synthetic construct
  source 1..75: mol_type = other DNA
cgatttccgaaaatgtcggcgcgctcaacaaccatctggcgcagctgctttccggtaagctttactcttcgctgc

SEQ ID NO: 804741 - DNA, 75 bp, synthetic construct
  source 1..75: mol_type = other DNA
cctgccaagctattcaaaaatttttggcgactggttgtgcgaaaccgcagcaaaagacaacaagctgatggcgat

SEQ ID NO: 804742 - DNA, 75 bp, synthetic construct
  source 1..75: mol_type = other DNA
tccaccctggtattcggcttttttgcccgcttactggcgctacgccttaagctgggattaccggtcttttactac

SEQ ID NO: 804743 - DNA, 75 bp, synthetic construct
  source 1..75: mol_type = other DNA
tccaccctggtcttcggtttctttgcccgtttactggcgctacgtcttaagctgggattaccggtcttttactac

SEQ ID NO: 804744 - DNA, 75 bp, synthetic construct
  source 1..75: mol_type = other DNA
ttaggccactatccgctcggttgggtcaagcatccggaatatgtgattattgttgccacagccgccgtactgacc

SEQ ID NO: 804745 - DNA, 75 bp, synthetic construct
  source 1..75: mol_type = other DNA
tgcaggaggcgcgggctcaatatcgtctgaccgatgccgaccgttacccacagctcaatggcgatggcagcggca

SEQ ID NO: 804746 - DNA, 75 bp, synthetic construct
  source 1..75: mol_type = other DNA
aagctgccgcaagcgcaggcagcaaacagcgacagcttgcaaagcgttaaattaccggcgggtttgtcatcgcaa

SEQ ID NO: 804747 - DNA, 75 bp, synthetic construct
  source 1..75: mol_type = other DNA
tttgtgtggctcttgcgttaaccggttgttcactggcaccggattatcagcgtccggcaatgcctgtgccgcaac

SEQ ID NO: 804748 - DNA, 75 bp, synthetic construct
  source 1..75: mol_type = other DNA
cagcaggcaacccacagagtacacgccgtccgatgctgacccggcaagaccttgaggcggcaaaggctcgcaata

SEQ ID NO: 804749 - DNA, 75 bp, synthetic construct
  source 1..75: mol_type = other DNA
gcctgccagcaagccagcatcccatctggtagcctctacggggtgccagcatgggatgctggcaggctccggccg

SEQ ID NO: 804750 - DNA, 75 bp, synthetic construct
  source 1..75: mol_type = other DNA
ctgccgaagcacaactggataaagcagagcgacagaacgtgcgccagcaggtttatagctactgtaatgagcagc

SEQ ID NO: 804751 - DNA, 75 bp, synthetic construct
  source 1..75: mol_type = other DNA
tccaccctggtattcggcttttttgcccgtttactggcgctacgtcttaagctgggattaccggtcttttactac

SEQ ID NO: 804752 - DNA, 75 bp, synthetic construct
  source 1..75: mol_type = other DNA
gtggacccatacaccgatttgcaccccagcaaatgtagcgttattgttaccttccttgctacagagttcgacaga

SEQ ID NO: 804753 - DNA, 75 bp, synthetic construct
  source 1..75: mol_type = other DNA
gtggacccatacagtgacttgcctcaatataatccagactataacatgccttatagtcttcggaacatcatcgcg

SEQ ID NO: 804754 - DNA, 75 bp, synthetic construct
  source 1..75: mol_type = other DNA
aagagaataaaaattgcaatatgtggtggacccatacactgtgttgtaatgacaacgtttcgcggctattcttga

SEQ ID NO: 804755 - DNA, 75 bp, synthetic construct
  source 1..75: mol_type = other DNA
atgcaattgaatatagtttccaatataattacagacataaaatactcaggcaacaacaaaaaaatatttaaaata

SEQ ID NO: 804756 - DNA, 75 bp, synthetic construct
  source 1..75: mol_type = other DNA
aatttgtttaatcaaagaatggctgaatatctggtgctgtataacagcaaaaggccacataaatcactcgaactg

SEQ ID NO: 804757 - DNA, 75 bp, synthetic construct
  source 1..75: mol_type = other DNA
aagagaataaaaattgcaatatgtggtggacccatacaccctacccagctcaaatggtactggcacagaataaga

SEQ ID NO: 804758 - DNA, 75 bp, synthetic construct
  source 1..75: mol_type = other DNA
gggcgctgttttatcgttctcgaagagttgcgttggggggcatttggcgatgcctgtcgtctgggaagcccgtaa

SEQ ID NO: 804759 - DNA, 75 bp, synthetic construct
  source 1..75: mol_type = other DNA
aaactggcgtcgatgctggatcccggtcatctggcactgacgcagatcgcgcagcatctggcgctgctgcaaaaa

SEQ ID NO: 804760 - DNA, 75 bp, synthetic construct
  source 1..75: mol_type = other DNA
atgaacataatttgtcgggaatgccgtaacagcgaatcaatgcaacgtgtactggcgttctatcggggtaatttt

SEQ ID NO: 804761 - DNA, 75 bp, synthetic construct
  source 1..75: mol_type = other DNA
ctcccccagcaaattgccgccttgtatgagtggttttcagcccgttgtcgctggaaggaaaaggcgttaacgcaa

SEQ ID NO: 804762 - DNA, 75 bp, synthetic construct
  source 1..75: mol_type = other DNA
ggggatgccacgactctgttcagcgcagcgtttggtgggggcaatggtcgaggaaatcttctctgtaaatttggc

SEQ ID NO: 804763 - DNA, 75 bp, synthetic construct
  source 1..75: mol_type = other DNA
aaacagcccgtttgctggtcagtaacccaacgctggcaaactgtcgcgctggggatgccacggctctgctcagca

SEQ ID NO: 804764 - DNA, 75 bp, synthetic construct
  source 1..75: mol_type = other DNA
gcgcggtgcatattctgctggtttctaatgtcgcgcaaagctatttcaatcagcagctggcgtatgcgcaattgc

SEQ ID NO: 804765 - DNA, 75 bp, synthetic construct
  source 1..75: mol_type = other DNA
ggaggctgcaggacccgatgcctccctgaagtcacgggatgtggccgcgctcgatacccgcaagtcgaaagaagc

SEQ ID NO: 804766 - DNA, 75 bp, synthetic construct
  source 1..75: mol_type = other DNA
ccgtgacggtgaactgcgcaaactgtcgacctggacggctcacaaggaggcggtggcgctggttgataacgtata

SEQ ID NO: 804767 - DNA, 75 bp, synthetic construct
  source 1..75: mol_type = other DNA
ggaagggctgacatcgggacaacgaaatgccacccgtatgatcctggaaacccgggacaggttcacgctggttca

SEQ ID NO: 804768 - DNA, 75 bp, synthetic construct
  source 1..75: mol_type = other DNA
acgtggccccaagcggttgcgtggcacttagagcagatgacaaagttagaaaaagccttaaaaggaccgctgcaa

SEQ ID NO: 804769 - DNA, 75 bp, synthetic construct
  source 1..75: mol_type = other DNA
gcccctggaaccccggggccatgaccggtgggcgggtatgggctgaacctgcgccggtggctccggtaccgcagg

SEQ ID NO: 804770 - DNA, 75 bp, synthetic construct
  source 1..75: mol_type = other DNA
cgtatgccatcgcgctggaaggggtggccggtggtcgggaacagatggccagctttgagtctgcctatgtggctt

SEQ ID NO: 804771 - DNA, 75 bp, synthetic construct
  source 1..75: mol_type = other DNA
cagtgctgaccggcaacctgattgtggcgaaatttaaccacgataccaaccgcaaccaggagcctcagattcata

SEQ ID NO: 804772 - DNA, 75 bp, synthetic construct
  source 1..75: mol_type = other DNA
tggtcgtgcggtttccagcggtgatactgatcagctgcagtctattgcccccggtcagcctttccggcttatgca

SEQ ID NO: 804773 - DNA, 75 bp, synthetic construct
  source 1..75: mol_type = other DNA
aagcggtcaacagactacattctgagttgggaatgggatttgaagagcggcgggtattccgacgatataaaggga

SEQ ID NO: 804774 - DNA, 75 bp, synthetic construct
  source 1..75: mol_type = other DNA
accgctgtcagtaataccctgaccctgaaagatgaaaagggagaatcactgaatctcaaagtctccgccgttgat

SEQ ID NO: 804775 - DNA, 75 bp, synthetic construct
  source 1..75: mol_type = other DNA
cagcagcaggacagattgcagcaaattgaacgggatatggtccgggatctgacccgggaaaaaacactcggaggc

SEQ ID NO: 804776 - DNA, 75 bp, synthetic construct
  source 1..75: mol_type = other DNA
aaaacacaacgggaagttccttctccggaagcgccagctggaccaaatgttgacgatatagttacgcaggctatt

SEQ ID NO: 804777 - DNA, 75 bp, synthetic construct
  source 1..75: mol_type = other DNA
tataaagaattcattacaattaaagataaagtctgtttgggagctaatcaaaggaatgtagataaattacattat

SEQ ID NO: 804778 - DNA, 75 bp, synthetic construct
  source 1..75: mol_type = other DNA
catcaccaaagccagcatcgacacactgacccgctacgctcacgcctgcggcatcaagaaacctgtcattgccct

SEQ ID NO: 804779 - DNA, 75 bp, synthetic construct
  source 1..75: mol_type = other DNA
atgaaactggtaagccataaagaactgcataacgagtggatgcaggacgacgaatatcgcgctgcatggcaggaa

SEQ ID NO: 804780 - DNA, 75 bp, synthetic construct
  source 1..75: mol_type = other DNA
ctaccatttcacgcatggaaaagaacgcatcacggatgagtattgatacactggttcgctatgccagagcatgtg

SEQ ID NO: 804781 - DNA, 75 bp, synthetic construct
  source 1..75: mol_type = other DNA
aaaatggcgatctcctgctggaaataatccgcaaatacgggcgcacatgccgccgctaccagtttgaagtgatta

SEQ ID NO: 804782 - DNA, 75 bp, synthetic construct
  source 1..75: mol_type = other DNA
caaggttcgctgaataacaacggttatattgtgaatgccggagattcgttagcgattaaaggattccgcaaagat

SEQ ID NO: 804783 - DNA, 75 bp, synthetic construct
  source 1..75: mol_type = other DNA
gcattactgaacctgctggcttatgaccgggatataacccgttttgatggtgaaccgttgcctctgttccgcaaa

SEQ ID NO: 804784 - DNA, 75 bp, synthetic construct
  source 1..75: mol_type = other DNA
attctgcggttgatcaccggctggcagaactgaccatgaacaaactttacgatcgcgttcccgcttctgtctgga

SEQ ID NO: 804785 - DNA, 75 bp, synthetic construct
  source 1..75: mol_type = other DNA
atgacacagggctggcgggaggataaatgcccgtctgaccgcgcggggaaaacaccgcgcgtcggtggcgctgaa

SEQ ID NO: 804786 - DNA, 75 bp, synthetic construct
  source 1..75: mol_type = other DNA
ctcctttcttttttggtccttgggttgaacttgaaaatcatactggtgatatcgcgtacactgtctattttgata

SEQ ID NO: 804787 - DNA, 75 bp, synthetic construct
  source 1..75: mol_type = other DNA
ctgaactactacaaagaaaacgaagcttacctgcaaggccagctgggcaacccgaaaggcgaagatcagccgaac

SEQ ID NO: 804788 - DNA, 75 bp, synthetic construct
  source 1..75: mol_type = other DNA
aatagaccttgatgaggtgagttcaattaatgagttaaaatactttatgtacgatgtgttgaaaaaagagattga

SEQ ID NO: 804789 - DNA, 75 bp, synthetic construct
  source 1..75: mol_type = other DNA
tctgcctggttacactgagctattagctcatgtggaaagaattgaaaggcagattcatgaacaaattggcagctg

SEQ ID NO: 804790 - DNA, 75 bp, synthetic construct
  source 1..75: mol_type = other DNA
cctggcggcccttcaggccacccgctacggtgacgacccgctgatgctggtccttgccgccgaccatatcatcaa

SEQ ID NO: 804791 - DNA, 75 bp, synthetic construct
  source 1..75: mol_type = other DNA
tagcggcgacgcgtgggtacacaacagcgaaaactgctacatcaacagcgacgagaagctagtggcggccattgg

SEQ ID NO: 804792 - DNA, 75 bp, synthetic construct
  source 1..75: mol_type = other DNA
aacggcagcgacttcatcagcattccgcatgacattttctgcgagtgcccggacgagtccgtggactacgcggtg

SEQ ID NO: 804793 - DNA, 75 bp, synthetic construct
  source 1..75: mol_type = other DNA
caattctggcagttctgggtgtagcgtctaatgccatggctgcgccaaacacggggaccgtaaactttacgggta

SEQ ID NO: 804794 - DNA, 75 bp, synthetic construct
  source 1..75: mol_type = other DNA
attaacttctcccgcgagccagctcgccgtaacgaatttattattggcgtggcgtatgattccgatatcgatcag

SEQ ID NO: 804795 - DNA, 75 bp, synthetic construct
  source 1..75: mol_type = other DNA
cggagtgcgccaaaacacgtcctgtgctggaagggagtttcagacacgccgtttcttgcctgaaagtcgatccgc

SEQ ID NO: 804796 - DNA, 75 bp, synthetic construct
  source 1..75: mol_type = other DNA
tgcagggaagactggtgacatttggtattgtgcctaccggtccggaaacgggatatggttatattcaccgtgggc

SEQ ID NO: 804797 - DNA, 75 bp, synthetic construct
  source 1..75: mol_type = other DNA
ttctaaaggtcagcctgtagaattgaattcagatgcagcatccgaatatacattgactgatggcactaacaaaat

SEQ ID NO: 804798 - DNA, 75 bp, synthetic construct
  source 1..75: mol_type = other DNA
ccgcgccgattacggttcgttattgttagttggtcagcgcacatcgcagggttggcaaggcgatatcattccatt

SEQ ID NO: 804799 - DNA, 75 bp, synthetic construct
  source 1..75: mol_type = other DNA
ggcggtggttattaatctgactgaaagcctgtggattggcgtggcagcggggttgctgctgggcattctctgtgg

SEQ ID NO: 804800 - DNA, 75 bp, synthetic construct
  source 1..75: mol_type = other DNA
cgattacggcggctataaagatgactccggcgtacatcatctgaacgtgctggacttccagcgtcagatccgcac

SEQ ID NO: 804801 - DNA, 75 bp, synthetic construct
  source 1..75: mol_type = other DNA
ctgattaaaggcgacgacgaaccgatctatcttcctgcagatgcggaagtaccgtataaccgcattattttcgct

SEQ ID NO: 804802 - DNA, 75 bp, synthetic construct
  source 1..75: mol_type = other DNA
cctcttttgaatacaacgtaacaggtggtattaagtcattcgactatgcagcaaaaatgatgcggccagcaacag

SEQ ID NO: 804803 - DNA, 75 bp, synthetic construct
  source 1..75: mol_type = other DNA
cgctgtcagtaccgattctggcagtggtgttcatcctgtcatttatcgctgctattactgaagttccggtcgcgt

SEQ ID NO: 804804 - DNA, 75 bp, synthetic construct
  source 1..75: mol_type = other DNA
caggccttccgcctcgtcctgctgccgctgtcagtaccgattctggcagtggtgttcatcctgtcatttatcgct

SEQ ID NO: 804805 - DNA, 75 bp, synthetic construct
  source 1..75: mol_type = other DNA
atcagttccggcgtgatttttcactggtatgtgcagtaccacgcagtaagcccaccagtaaagagaaagcacagg

SEQ ID NO: 804806 - DNA, 75 bp, synthetic construct
  source 1..75: mol_type = other DNA
gctccggcacccgtttatatccgatcacccagggcgtgtctaaacagctgttgccgatttacgataaaccgatga

SEQ ID NO: 804807 - DNA, 75 bp, synthetic construct
  source 1..75: mol_type = other DNA
cttcggggttgtggagttcgatgagaactttaaggcgctgtccatcgaggaaaaaccgctgaagccgaaatcgga

SEQ ID NO: 804808 - DNA, 75 bp, synthetic construct
  source 1..75: mol_type = other DNA
gggcgggattgcgctgcacgtctggacgattaaaggttatttcgaaaccatcgacagttcgctggaagaagcggc

SEQ ID NO: 804809 - DNA, 75 bp, synthetic construct
  source 1..75: mol_type = other DNA
accacctcattcagcgcaactaccttcggcgacgatatggcctcgctgctgccgcgcctgccgctgactctcgat

SEQ ID NO: 804810 - DNA, 75 bp, synthetic construct
  source 1..75: mol_type = other DNA
cgcgactacctggatggggcatccagcaatattacgtcactttattactcaaatgggcactagcattattcatta

SEQ ID NO: 804811 - DNA, 75 bp, synthetic construct
  source 1..75: mol_type = other DNA
gcatcttcatttgacgggagatatttcggcgcggtcacaaagtcacagattatttctacgatattacctgtaatg

SEQ ID NO: 804812 - DNA, 75 bp, synthetic construct
  source 1..75: mol_type = other DNA
tgtacgccaaaggcgagcaggttcggatggtgttaatcgatcccgtgtgccgacaggatttctgttgcgaaaacc

SEQ ID NO: 804813 - DNA, 75 bp, synthetic construct
  source 1..75: mol_type = other DNA
ctgcggctacctggacgggctggcccagcagttttccacccttgatgcgccgaaaacgctctctgtcgcctgggg

SEQ ID NO: 804814 - DNA, 75 bp, synthetic construct
  source 1..75: mol_type = other DNA
acgacctgcgggatattgagcaggcgacgctcgaataccccggcatccagcaggccagagcggaaataaccgaac

SEQ ID NO: 804815 - DNA, 75 bp, synthetic construct
  source 1..75: mol_type = other DNA
tcgttccagaaccatcacggtggtcgatgaacaaccgcaaggtatggatatggacccgacctgttcactgtttac

SEQ ID NO: 804816 - DNA, 75 bp, synthetic construct
  source 1..75: mol_type = other DNA
gcaaagatcctatctggtcatccgtagccgtatatcgtcagcgtatgccagctactgaagagatgaaggcccagg

SEQ ID NO: 804817 - DNA, 75 bp, synthetic construct
  source 1..75: mol_type = other DNA
gctatcgtgccacagagaaaatgctttacgcagcgctccaagaaaaacataaagacgccgactacgtttatattc

SEQ ID NO: 804818 - DNA, 75 bp, synthetic construct
  source 1..75: mol_type = other DNA
atcattgctaattatcaatctctggaaggtacgctcgcaccgctgggccatcctacggttaacggtgaattcgtt

SEQ ID NO: 804819 - DNA, 75 bp, synthetic construct
  source 1..75: mol_type = other DNA
atgccacatcacattgttattgttgaagatgagccggttacccaggcgcgattacaatcctacttcactcaggag

SEQ ID NO: 804820 - DNA, 75 bp, synthetic construct
  source 1..75: mol_type = other DNA
accaaaccgctggagctgcgcgaactggtggtacgagtgaaaaatctgctctggcgaatcgacctcgcgcgacag

SEQ ID NO: 804821 - DNA, 75 bp, synthetic construct
  source 1..75: mol_type = other DNA
ctggaagcactggagaaaggagaaagcaaagatcctatctggtcgtccgtcgctgtatatcgtcagcgtatgcca

SEQ ID NO: 804822 - DNA, 75 bp, synthetic construct
  source 1..75: mol_type = other DNA
ggttgttgacgatggcgagtgcggtgcgggtactgtatccggcgctggcaatcaactggcagatgtcggcggcgc

SEQ ID NO: 804823 - DNA, 75 bp, synthetic construct
  source 1..75: mol_type = other DNA
gttttggtttgttgattatcggcgtgttgttgctgctggtgctggtggagttgcgacgttttcgccagacgccgc

SEQ ID NO: 804824 - DNA, 75 bp, synthetic construct
  source 1..75: mol_type = other DNA
caatgctgcaaacgcaaaccccggaagcgatgttagggcggattaacggtttgtggacggcgcaaaacgtgacgg

SEQ ID NO: 804825 - DNA, 75 bp, synthetic construct
  source 1..75: mol_type = other DNA
gccgcgccgatggcaaccaacgcagcaagcgaaggtaaaaaaggcgaagtaccagactttaacacttatttctaa

SEQ ID NO: 804826 - DNA, 75 bp, synthetic construct
  source 1..75: mol_type = other DNA
gtgaaaaaagaattaattcaggttaataccaaattaaccgctaataccatacgtcgggaaacgtataacgggcgc

SEQ ID NO: 804827 - DNA, 75 bp, synthetic construct
  source 1..75: mol_type = other DNA
ccgggaatattacccggaagctgaaattatcgctaattaccagtcactggagggtacacttgccccgctgggcca

SEQ ID NO: 804828 - DNA, 75 bp, synthetic construct
  source 1..75: mol_type = other DNA
atatttggtgtccactattctttcaggaatttcaggatctgccagacggtgctgagacgacgcttacgaatcagc

SEQ ID NO: 804829 - DNA, 75 bp, synthetic construct
  source 1..75: mol_type = other DNA
cactggaagcccagaccggcgacctctggcgcgacgtgcgctgggccattgccgatattcagggcgcaccgcgca

SEQ ID NO: 804830 - DNA, 75 bp, synthetic construct
  source 1..75: mol_type = other DNA
gttgtatttttctacacagacccttatgaagaggaaatggtctatctcaatacagatctaaagagctatgcggag

SEQ ID NO: 804831 - DNA, 75 bp, synthetic construct
  source 1..75: mol_type = other DNA
gtggtgttttactataccgatccttatgaagaagagattgtgtacttgaacacagacctcaaaagctatgctcaa

SEQ ID NO: 804832 - DNA, 75 bp, synthetic construct
  source 1..75: mol_type = other DNA
ggatcgacattctaaaaccatcactgtggtggatggacaacctgaaggcattgatatgcccccaacctgttcact

SEQ ID NO: 804833 - DNA, 75 bp, synthetic construct
  source 1..75: mol_type = other DNA
cacaatatgagcctcgtaatgcctcactcactgagcaggtggcccatcatctggagttcgtgagggctgccgcca

SEQ ID NO: 804834 - DNA, 75 bp, synthetic construct
  source 1..75: mol_type = other DNA
cgtgaacggcgaaagtgtcaacgtgcaccgcttccgccttgcggtgtatgccgccacccgcgccctgatactgga

SEQ ID NO: 804835 - DNA, 75 bp, synthetic construct
  source 1..75: mol_type = other DNA
gtgcctttcgatggcgatgtgggatacctgatcaacaatgaacaagtgaatatcaatcaagggcatatcacgctg

SEQ ID NO: 804836 - DNA, 75 bp, synthetic construct
  source 1..75: mol_type = other DNA
gtgcctttcgatggcgatgtggaatacctgatcaacaatgaacacgtaagtatcaatcaaggccatatcacgctg

SEQ ID NO: 804837 - DNA, 75 bp, synthetic construct
  source 1..75: mol_type = other DNA
gttgttctggtgcagtttccagatatgtcactgcctgccgtttgtgggattggatccatgctcggcattgcaggt

SEQ ID NO: 804838 - DNA, 75 bp, synthetic construct
  source 1..75: mol_type = other DNA
gatatgtccgagtatatggaacgccataccgtcagccgtctgattggtgcgcctccgggatacgttggttttgat

SEQ ID NO: 804839 - DNA, 75 bp, synthetic construct
  source 1..75: mol_type = other DNA
ccgtctcgacaacattatctggttcgatcatctgtcaaccgacgtgatccatcaggtagtggataaattcatcgt

SEQ ID NO: 804840 - DNA, 75 bp, synthetic construct
  source 1..75: mol_type = other DNA
aggacaacctgaaaaaaccgctcgctaacgaactgctgtttggctcgctggtggacggcggccaggtcaccgttg

SEQ ID NO: 804841 - DNA, 75 bp, synthetic construct
  source 1..75: mol_type = other DNA
acggatttaacccgaatatcctttacttccgaccggaagaaggagagcgactggaggccattctgactgatattg

SEQ ID NO: 804842 - DNA, 75 bp, synthetic construct
  source 1..75: mol_type = other DNA
acaaatcacacagtgttgcttattctttaatcagctatcagtctatgtggttaaagacacactaccctgctgagt

SEQ ID NO: 804843 - DNA, 75 bp, synthetic construct
  source 1..75: mol_type = other DNA
acggatttaacccgaatatcctgtacttccgaccggaagaaggagagcgactggaggccattctggctgatatcg

SEQ ID NO: 804844 - DNA, 75 bp, synthetic construct
  source 1..75: mol_type = other DNA
caggatatgcgcattacccctgaaacattgcgtattcaggccgcgattgccagagatgctggtcgtgatcgcctg

SEQ ID NO: 804845 - DNA, 75 bp, synthetic construct
  source 1..75: mol_type = other DNA
atgaataccgatgcaattgagtcgatggtcagggacgtgttgaaccgcatgaacagtttacaggatgcagctcct

SEQ ID NO: 804846 - DNA, 75 bp, synthetic construct
  source 1..75: mol_type = other DNA
tgagcgttgttatcaggccagaatttgtgccgcttttgtccgtgaagctgcggaactctatgtcgagcgtaaaaa

SEQ ID NO: 804847 - DNA, 75 bp, synthetic construct
  source 1..75: mol_type = other DNA
actcatgacgcggatggcggctgaaatgggcttaggtgatgaactaatccgccccagcattggtattaagccgaa

SEQ ID NO: 804848 - DNA, 75 bp, synthetic construct
  source 1..75: mol_type = other DNA
ttctggctattgcggacgatcttgaaaagcgttatcaggccaaaatttgtgctgcatttgtacgtgaagcggcgg

SEQ ID NO: 804849 - DNA, 75 bp, synthetic construct
  source 1..75: mol_type = other DNA
ctttcctgaaggggttgaccctctctggtgtagccggaagtcttggcgtatggagcttcaatgcacgttccagtc

SEQ ID NO: 804850 - DNA, 75 bp, synthetic construct
  source 1..75: mol_type = other DNA
tgtggtagtcgttcaaccgcactatttaacaataagagtaaaccatcagatctgattggtcgtaaggagtacttc

SEQ ID NO: 804851 - DNA, 75 bp, synthetic construct
  source 1..75: mol_type = other DNA
gcctcacgtccgtttgagatgaaccccaaacgttcggctgagattaacgtgctcatgacacggatggcggctgaa

SEQ ID NO: 804852 - DNA, 75 bp, synthetic construct
  source 1..75: mol_type = other DNA
ataaatcacactccgttgcttattcattaatcagctatcagtccatgtggttaaagacacattaccctgctgagt

SEQ ID NO: 804853 - DNA, 75 bp, synthetic construct
  source 1..75: mol_type = other DNA
cactgagcgccaaagtgactgattacccgctggcaaataaacacccagaatgggtcaaaacggcaaccaataaaa

SEQ ID NO: 804854 - DNA, 75 bp, synthetic construct
  source 1..75: mol_type = other DNA
ttgtccaataataactcagctgtcagtaatgtttatgaaaagatggacaaacagcaactgggatatgtgatggca

SEQ ID NO: 804855 - DNA, 75 bp, synthetic construct
  source 1..75: mol_type = other DNA
gcgaaatcgctgcaggcgatggatttcagcaccatcactgataaagtctcatataacgccattgaatggcccgtc

SEQ ID NO: 804856 - DNA, 75 bp, synthetic construct
  source 1..75: mol_type = other DNA
ggatggaggttatcatctgaccagtgttcaggctgaacgtgatgaacttaaaaacagtatactgaagaaatgcgg

SEQ ID NO: 804857 - DNA, 75 bp, synthetic construct
  source 1..75: mol_type = other DNA
tgaagcctcgcagcaggatattgttccgggcattctgggactgggatgtgcccgtaatgtaatcgttgtagggga

SEQ ID NO: 804858 - DNA, 75 bp, synthetic construct
  source 1..75: mol_type = other DNA
aaccaggtcgcttcgttaaaagcagaaattaatgagctgaatattgagtataaatacctgcagcaatggcagagt

SEQ ID NO: 804859 - DNA, 75 bp, synthetic construct
  source 1..75: mol_type = other DNA
agaaagtattaaaggaatctgattttaaaattttactggagcgcctgacatcatggtctgtgctttatttaaaac

SEQ ID NO: 804860 - DNA, 75 bp, synthetic construct
  source 1..75: mol_type = other DNA
ctaacgagaaacatcgtgatatctgcgagaagaagtggaatatccgagcggcaccattccggcgaaaatcggtct

SEQ ID NO: 804861 - DNA, 75 bp, synthetic construct
  source 1..75: mol_type = other DNA
tggctggcgtacaggcagcggctgaaattctgcgtggtgaaccggaaggcgcaatggcggcgcgaattgcacagg

SEQ ID NO: 804862 - DNA, 75 bp, synthetic construct
  source 1..75: mol_type = other DNA
tcccaacgccagcaggtacggcaatttttactggacaccgcgttgcagcgtatggataacgagcgtggtttcaat

SEQ ID NO: 804863 - DNA, 75 bp, synthetic construct
  source 1..75: mol_type = other DNA
tcgatgactaccacaaagcacgcggtctgcgctggccggtggtgaacggtaaagaaacgcagtggcgttacagcg

SEQ ID NO: 804864 - DNA, 75 bp, synthetic construct
  source 1..75: mol_type = other DNA
cgacaaagtgaaagtggtttctcgccgtggcgaagtgatctcgattgtcgaaacgcgcggtcgtaaccgtccgcc

SEQ ID NO: 804865 - DNA, 75 bp, synthetic construct
  source 1..75: mol_type = other DNA
acttcttcagcaagcacgttaacctgcgcaaaggggcgacggacatcggctacggtttacgtccgacccatccgc

SEQ ID NO: 804866 - DNA, 75 bp, synthetic construct
  source 1..75: mol_type = other DNA
gcattaagttttccgatgccgcacctgtgctgctgaaatacggtgagcgactcagaatcacgctggtcaacgata

SEQ ID NO: 804867 - DNA, 75 bp, synthetic construct
  source 1..75: mol_type = other DNA
gatggaggctggatcggctggatgatcaaacctctgggccgctggtcgttaatcatggaaatcgatgaaggtttt

SEQ ID NO: 804868 - DNA, 75 bp, synthetic construct
  source 1..75: mol_type = other DNA
gtcgggtcatggggctggcgaataaaggctggataaagggcaccccgcaggatggaggctggatcggctggatga

SEQ ID NO: 804869 - DNA, 75 bp, synthetic construct
  source 1..75: mol_type = other DNA
tatcgcctggcagactgctggcgcgccgtcgaaagagagttgggcattcagtgcgttaggtgttctcggtaacga

SEQ ID NO: 804870 - DNA, 75 bp, synthetic construct
  source 1..75: mol_type = other DNA
gtcactttggtcgtgaacatttcccgtgggaaaaaaccgacaaagcgcagctgctgcgcgatgctgccggtctga

SEQ ID NO: 804871 - DNA, 75 bp, synthetic construct
  source 1..75: mol_type = other DNA
gtggcggtgcgttctctggtaaagatccatcaaaagtggaccgctccgcagcctacgcggcacgttatgtagcga

SEQ ID NO: 804872 - DNA, 75 bp, synthetic construct
  source 1..75: mol_type = other DNA
gctgtggctatgggaaggcaaagcggaaagctatggctgggggagtaattcaacacaggaagcgcagttctccgt

SEQ ID NO: 804873 - DNA, 75 bp, synthetic construct
  source 1..75: mol_type = other DNA
ttccaacgcggtgaatcgcctgatgatctcccgtaaaatcgatgccactgttgctgattttctttctgcattagt

SEQ ID NO: 804874 - DNA, 75 bp, synthetic construct
  source 1..75: mol_type = other DNA
tacgacaacaacgtggtggagatggcgaaggacgtgaagccttctgagcgcggtgagctggagatcaccaccctg

SEQ ID NO: 804875 - DNA, 75 bp, synthetic construct
  source 1..75: mol_type = other DNA
cggtttcgcctggctggatacgggcacccacgacagcctgatggacgcgtcgcagtttattcacaccattgagaa

SEQ ID NO: 804876 - DNA, 75 bp, synthetic construct
  source 1..75: mol_type = other DNA
ctagttcgccacttaacccgccgtctgatttggggcgttttagcgccgaaaaccagctactggcctgtttccggg

SEQ ID NO: 804877 - DNA, 75 bp, synthetic construct
  source 1..75: mol_type = other DNA
aaaaaccaacccaacctgagaaacaaaatttaatttctcggctggcaaatcgaacctacaactattataagaatc

SEQ ID NO: 804878 - DNA, 75 bp, synthetic construct
  source 1..75: mol_type = other DNA
ttcagtccgaagatcgtattttaaaagatcgtgaaattaccgtgcgcctgcatgaacttggcgcatcctcggtta

SEQ ID NO: 804879 - DNA, 75 bp, synthetic construct
  source 1..75: mol_type = other DNA
taccgagaaagtgccttctgaacaactgactctgctggtacgtgagttctttgacctgcgtccatacggtctgat

SEQ ID NO: 804880 - DNA, 75 bp, synthetic construct
  source 1..75: mol_type = other DNA
ttgttaatgaacttgctaaagtaggtgataaatattctgtcggtctaggacagatttatgttggtaactttaaag

SEQ ID NO: 804881 - DNA, 75 bp, synthetic construct
  source 1..75: mol_type = other DNA
tatattgatctggctaataacgctgtgaataaaatctattctgttccggctatgaaaccagtgggggcaggggat

SEQ ID NO: 804882 - DNA, 75 bp, synthetic construct
  source 1..75: mol_type = other DNA
aattctgtgcctgttaataacactttacggcgtggggtggtttatcaacaaccagagggtgtacaattgcagtcg

SEQ ID NO: 804883 - DNA, 75 bp, synthetic construct
  source 1..75: mol_type = other DNA
aaagatgttgaaagtaaaagctggggagcgatggcaacctatatccctgcagatcagattgccatggtgaggatc

SEQ ID NO: 804884 - DNA, 75 bp, synthetic construct
  source 1..75: mol_type = other DNA
aatgaaagagctgtctttctctacatttaatctcaaaagactagataaagaaatagaattcatctattccactct

SEQ ID NO: 804885 - DNA, 75 bp, synthetic construct
  source 1..75: mol_type = other DNA
tctggctgtcgatgtttgtactcagggacatggtttcggtaaatggcttctgagtgatgccattcatcggattgc

SEQ ID NO: 804886 - DNA, 75 bp, synthetic construct
  source 1..75: mol_type = other DNA
tataataagaagaataaaatccaaacgggattacgtcacaaccgattacatcatcatcaacaaccatcacttcca

SEQ ID NO: 804887 - DNA, 75 bp, synthetic construct
  source 1..75: mol_type = other DNA
tggatagaagaaaaccgtgctggcattgaggcattaaaccgttttgtggaagataccgggattttttcagatgat

SEQ ID NO: 804888 - DNA, 75 bp, synthetic construct
  source 1..75: mol_type = other DNA
gtcactttggtcgcgagcatttcccgtgggaaaaaaccgacaaagcgcagctactgcgcgatgccgccggtctga

SEQ ID NO: 804889 - DNA, 75 bp, synthetic construct
  source 1..75: mol_type = other DNA
atgcatgacaaattactgatgtggcatcaggactggcagaaaagccaggaattgccaggcgcgccgcaacttgtg

SEQ ID NO: 804890 - DNA, 75 bp, synthetic construct
  source 1..75: mol_type = other DNA
caaagaaaatgacaaacggtactatagctgtaaatgaattagaatttcttttgcctaaacttctatcatctatca

SEQ ID NO: 804891 - DNA, 75 bp, synthetic construct
  source 1..75: mol_type = other DNA
gaatcaccgccgactacatcatcatcgataatcaccatttccacagcgacgctaacagccgcatccagcagctct

SEQ ID NO: 804892 - DNA, 75 bp, synthetic construct
  source 1..75: mol_type = other DNA
tgaccgaaagtgaagtggcggtggctgggaacagtaaattccgcttcgtgggggctgatgccttctcgccagaag

SEQ ID NO: 804893 - DNA, 75 bp, synthetic construct
  source 1..75: mol_type = other DNA
ggtaagcagtgctgcagaagtgtatatccgcaaaatggagcgggcaggaaaagccacacattcgctggggctgaa

SEQ ID NO: 804894 - DNA, 75 bp, synthetic construct
  source 1..75: mol_type = other DNA
gcgcataaacagcttctggctctgcagcagcgcatcagcgacctggacgggaaaaaactgacggcagatgaaaag

SEQ ID NO: 804895 - DNA, 75 bp, synthetic construct
  source 1..75: mol_type = other DNA
cttcagcggtatgggaaatagtctggcaacctttgtgactaccggcaagttcagcttcaagtcttttacttcatc

SEQ ID NO: 804896 - DNA, 75 bp, synthetic construct
  source 1..75: mol_type = other DNA
gtctccgtaaagggtaagccctattatttcaattatggttttgccgatattcaggcaaaacagccggtcactgaa

SEQ ID NO: 804897 - DNA, 75 bp, synthetic construct
  source 1..75: mol_type = other DNA
gcttatcgaaatcccgttagtcaggcatttgcattacgttctattataaaaatagctcaggaggtaaaaaaggat

SEQ ID NO: 804898 - DNA, 75 bp, synthetic construct
  source 1..75: mol_type = other DNA
gacgacggtgatacatatgttaatataggacagcgttttacattacgagactcttgtgaaaacggggatggtaca

SEQ ID NO: 804899 - DNA, 75 bp, synthetic construct
  source 1..75: mol_type = other DNA
ttttttgcttttgcaaaaggcgcgggtgtgatgggggaagcgggacctgaagccattctgccattgcgtcgtggt

SEQ ID NO: 804900 - DNA, 75 bp, synthetic construct
  source 1..75: mol_type = other DNA
gtttaaaaatgaaattccccgtatcaaaaaccttctgaatggtgcagccagcgatgcagaacggtcttctgcccg

SEQ ID NO: 804901 - DNA, 75 bp, synthetic construct
  source 1..75: mol_type = other DNA
cgtatagtagtcgttgaaggttcgaatccgtataagcggcttttaaaacaaatttggtttttgaattatttgaaa

SEQ ID NO: 804902 - DNA, 75 bp, synthetic construct
  source 1..75: mol_type = other DNA
acgtcagcggtaccagacacagttcagcctgcagcaaaaatatcagcagcagatggagcaactggagcgtgacag

SEQ ID NO: 804903 - DNA, 75 bp, synthetic construct
  source 1..75: mol_type = other DNA
cagttaaggggattggttcggcgtttggctgggggagtgcagcaactgccagtgtgacgcccaatgctgatggtg

SEQ ID NO: 804904 - DNA, 75 bp, synthetic construct
  source 1..75: mol_type = other DNA
aaagatgaactgattcaggcactgacgctgctggatgtaaaacagcaggagcttcagaaacagacggcactcaac

SEQ ID NO: 804905 - DNA, 75 bp, synthetic construct
  source 1..75: mol_type = other DNA
gggtgcggtttctgtggcgaaaaaagagatggcgctgaatgatccggcggcaaaataccagccggagctggctct

SEQ ID NO: 804906 - DNA, 75 bp, synthetic construct
  source 1..75: mol_type = other DNA
gtggggaaagacatggtgcgcgatcagcgctacttctcactcgccacgcgtatcgccgcagagatgggggcgcag

SEQ ID NO: 804907 - DNA, 75 bp, synthetic construct
  source 1..75: mol_type = other DNA
atcatcaagacctactatgtcgataaaggttttgagcgcatcgccgcaggctgcccggttccgattgttatcgcc

SEQ ID NO: 804908 - DNA, 75 bp, synthetic construct
  source 1..75: mol_type = other DNA
gcagagaacgccttacggggagtggccgtaggccggaaaaactggctctgtgtgtcacgaaggagtacttatggc

SEQ ID NO: 804909 - DNA, 75 bp, synthetic construct
  source 1..75: mol_type = other DNA
aacgttactttttcatcacgctgggtctggctgtttctgcttggctggggcgcatgctgtgccagcaacggccac

SEQ ID NO: 804910 - DNA, 75 bp, synthetic construct
  source 1..75: mol_type = other DNA
ggcctttgatgggccgccgtggtcgtctcagtttaatgctgtacgccacattggtcggctggtcgcgcatcgcgg

SEQ ID NO: 804911 - DNA, 75 bp, synthetic construct
  source 1..75: mol_type = other DNA
gtcgcggatcgtgtgctgcgtggacaggttgttgatttccttgacttccattggcgacttgcgcactggcccgcc

SEQ ID NO: 804912 - DNA, 75 bp, synthetic construct
  source 1..75: mol_type = other DNA
aaatcaatcactcagcgcaagtgagcaaaaataatttgcaatattgcttgactcgcttttttgtcatggcgtatc

SEQ ID NO: 804913 - DNA, 75 bp, synthetic construct
  source 1..75: mol_type = other DNA
acaaaatacggctggtaaatatttgaaatattctctttacgatgccggtaaatctggtttgactaacacagagtt

SEQ ID NO: 804914 - DNA, 75 bp, synthetic construct
  source 1..75: mol_type = other DNA
acctcggcttctcaggaaaagggtatctggatggagttgtggtaaatgcagacacgagaaaacctgaaagtgtaa

SEQ ID NO: 804915 - DNA, 75 bp, synthetic construct
  source 1..75: mol_type = other DNA
tcaagaccggggcatttcacgcggcaattgcggcgggcgtcccgattattcccgtgtgcgtctctacaacttcga

SEQ ID NO: 804916 - DNA, 75 bp, synthetic construct
  source 1..75: mol_type = other DNA
cgctggtttcccaatttgccagtctgtcaaccctgttacgtctcgccaccacgtttgacagcgttgtagtgaggc

SEQ ID NO: 804917 - DNA, 75 bp, synthetic construct
  source 1..75: mol_type = other DNA
caagcgggtagccgctatatttccgtaatgcggtttttttgtgcccgtaattccaccctaccccgtattatggcg

SEQ ID NO: 804918 - DNA, 75 bp, synthetic construct
  source 1..75: mol_type = other DNA
taaatcatgtgattgacattggagaaataaaaccaaaatttaaagaagtgattccaaagcaaattgattgtttca

SEQ ID NO: 804919 - DNA, 75 bp, synthetic construct
  source 1..75: mol_type = other DNA
gggactttattgccgtgatcggcagaatgcaggatatcaacaccgttcgtcaggtaaaagcggcattgttgtcat

SEQ ID NO: 804920 - DNA, 75 bp, synthetic construct
  source 1..75: mol_type = other DNA
aagagaaacgtaaagctggagtgctgaccaaaaacacaacgccagtcagtgatgatgaaatggtgcaaagcggac

SEQ ID NO: 804921 - DNA, 75 bp, synthetic construct
  source 1..75: mol_type = other DNA
atgcacgaacagtacgataacagtatgtgttatatcgtatgtgccacagggtggtttttcctggtgttaagtaac

SEQ ID NO: 804922 - DNA, 75 bp, synthetic construct
  source 1..75: mol_type = other DNA
aatcataaaagtacggctattcatttactaaaagaagtggataatggtccagataaaatagttgaaattattaag

SEQ ID NO: 804923 - DNA, 75 bp, synthetic construct
  source 1..75: mol_type = other DNA
aaaaactatatgtagcgggcgatgtatttcaaaatatatttatgccgattaatgataacgtgaatcgagcagata

SEQ ID NO: 804924 - DNA, 75 bp, synthetic construct
  source 1..75: mol_type = other DNA
tatttgaagtactttctgttggtgatgccgatttcagtaagttggaggttgaaactaaagaaagtagaataattg

SEQ ID NO: 804925 - DNA, 75 bp, synthetic construct
  source 1..75: mol_type = other DNA
tatttccccttggttatcctggcaaaaagtggagcaaacgggatttctggcatcaatggctttggcccgttcccg

SEQ ID NO: 804926 - DNA, 75 bp, synthetic construct
  source 1..75: mol_type = other DNA
atgggatatttacatattgatggtagaggcatgaagccaaatggagggagccgtcataaccctcttgaagctgaa

SEQ ID NO: 804927 - DNA, 75 bp, synthetic construct
  source 1..75: mol_type = other DNA
aatttctttttttcattatggcacctgtgttgttctgaggtgagcatatcacctctgttcaggtggccaaattca

SEQ ID NO: 804928 - DNA, 75 bp, synthetic construct
  source 1..75: mol_type = other DNA
atcaatgcggccgtgctgttcatcggtttcggcggctcacaatggacacgggaatttgcaatagccccgcttcgc

SEQ ID NO: 804929 - DNA, 75 bp, synthetic construct
  source 1..75: mol_type = other DNA
tttaaccggtagccaggccgcgtgtaaagcagcctgtaacgcctttaccgatgcagtgctggaaatcgcgcgtaa

SEQ ID NO: 804930 - DNA, 75 bp, synthetic construct
  source 1..75: mol_type = other DNA
atattaccgtggtgacggataaaaactgcaatatagcgcatgtcgatgatgataagcgtcaggagaaacaacatc

SEQ ID NO: 804931 - DNA, 75 bp, synthetic construct
  source 1..75: mol_type = other DNA
tgactaaagatcccttttctggaatgtatagatatatatgtcattattacgaaattccattcggtggtttcggaa

SEQ ID NO: 804932 - DNA, 75 bp, synthetic construct
  source 1..75: mol_type = other DNA
gtcagtggaacgacgatgcagaactgaacttcggcaacggcaacttcaacgttcgctctaccggctggggtggtt

SEQ ID NO: 804933 - DNA, 75 bp, synthetic construct
  source 1..75: mol_type = other DNA
tcctgccctgcaacaagaaatgctgcgacgtgtcagtaaacgttatgacgatgtagaagtgatcatcaaatccac

SEQ ID NO: 804934 - DNA, 75 bp, synthetic construct
  source 1..75: mol_type = other DNA
atcaaacagttactgtttataaacttcatcctgagacgaatgagtttattggtagtgataacgcttttattcccg

SEQ ID NO: 804935 - DNA, 75 bp, synthetic construct
  source 1..75: mol_type = other DNA
caagaggaaaagaatttaatccgcctggatacgcggcatcttttcgatgctaatactgtctggttgggactgaag

SEQ ID NO: 804936 - DNA, 75 bp, synthetic construct
  source 1..75: mol_type = other DNA
taatacattgcatttttttgctgcttataaaactataaaaaatgatgtacaaccaggagaagcgaatgcttcagt

SEQ ID NO: 804937 - DNA, 75 bp, synthetic construct
  source 1..75: mol_type = other DNA
cacaaaggcggagttatcccgcgtggagatagtcgagctgctcagtccggagttggaaaaatttcacaatatcgg

SEQ ID NO: 804938 - DNA, 75 bp, synthetic construct
  source 1..75: mol_type = other DNA
tacacagactacccgcacaggaagcatggccgaaaattttttcggccctctggcccctgtttgcagaaccgatca

SEQ ID NO: 804939 - DNA, 75 bp, synthetic construct
  source 1..75: mol_type = other DNA
gaaggtgctagggtgcagccgtggcacaatcagtagcgcaataaaacgtaaatcccggcaattatccagtgagta

SEQ ID NO: 804940 - DNA, 75 bp, synthetic construct
  source 1..75: mol_type = other DNA
ggtgtgggaaccggtagcaacaggatcgcttagcctggttaacatccgagtttcagacgttgccaatataacgct

SEQ ID NO: 804941 - DNA, 75 bp, synthetic construct
  source 1..75: mol_type = other DNA
gctcgaagctcccggccagttatgaggtaaacgccgtgtcgtttgatcactataacggcgtggcaactgtctatt

SEQ ID NO: 804942 - DNA, 75 bp, synthetic construct
  source 1..75: mol_type = other DNA
tggcttttcggcgggttaggcctttacgaaacaggggggggcgttgtgtttccccctttttggggtgggttgggg

SEQ ID NO: 804943 - DNA, 75 bp, synthetic construct
  source 1..75: mol_type = other DNA
aacatggccgggcgttgtgcattccccctgtttgcgctggtcagcggctgcaacatggcaggcaaaaccctgcgt

SEQ ID NO: 804944 - DNA, 75 bp, synthetic construct
  source 1..75: mol_type = other DNA
acaaatggaatgaagatgccaaaaaaaatgcagatatcttgtttggcgcatcagaacaatctgctctggctatca

SEQ ID NO: 804945 - DNA, 75 bp, synthetic construct
  source 1..75: mol_type = other DNA
ctggaaaatcagccagatgctgatgtctggataacctgggctgactgggcagccagtaaccccggtatcggtgat

SEQ ID NO: 804946 - DNA, 75 bp, synthetic construct
  source 1..75: mol_type = other DNA
aactgcgtagcctgtcggcgaggctataccggaaccagattggcgataagtttgctcaacgtcttctcgggcata

SEQ ID NO: 804947 - DNA, 75 bp, synthetic construct
  source 1..75: mol_type = other DNA
atccccttctttggtcagttgtactggctaaccggcaacttattgatcgacagaaataaccgcactaaagctcac

SEQ ID NO: 804948 - DNA, 75 bp, synthetic construct
  source 1..75: mol_type = other DNA
ggctgcccattgtcgttcgataatggaacaaaaaatcgccgagctcgataaagaagtcgcagagcgcgaagccgc

SEQ ID NO: 804949 - DNA, 75 bp, synthetic construct
  source 1..75: mol_type = other DNA
gcaatacttcaggaactggcgtttgggaggatattgccggacgtaaggggaatatagaaactgtcgccgcaatcc

SEQ ID NO: 804950 - DNA, 75 bp, synthetic construct
  source 1..75: mol_type = other DNA
cagatgtttttctggcctatctggcggagcgcggcgtcgataaaacgatcctcaaaaaactctgtatcgataatc

SEQ ID NO: 804951 - DNA, 75 bp, synthetic construct
  source 1..75: mol_type = other DNA
aagatggcaaattgctggctgccgtcaaccagacgctggtgagttttgaccattcgctgactgacggcgacgaag

SEQ ID NO: 804952 - DNA, 75 bp, synthetic construct
  source 1..75: mol_type = other DNA
ctttccccgaaaacagtatctaagtattttacaaaggcgagaaatgcatctggactctcatttgatggagacccg

SEQ ID NO: 804953 - DNA, 75 bp, synthetic construct
  source 1..75: mol_type = other DNA
cagggcagagagtaggcgatttatgcagaatgaaatggtcagacataaacgacaaccatcttcacattgagcagg

SEQ ID NO: 804954 - DNA, 75 bp, synthetic construct
  source 1..75: mol_type = other DNA
cgtgaggcaatagccgaggggcatgtggctacgaatccggtaacagcaacccgcacagcaaagccagaagtaagg

SEQ ID NO: 804955 - DNA, 75 bp, synthetic construct
  source 1..75: mol_type = other DNA
gtcagcttgggaagaaatgacctgcttattcgcaccttccctaacacttcctcatgaacatctgttcaacgatct

SEQ ID NO: 804956 - DNA, 75 bp, synthetic construct
  source 1..75: mol_type = other DNA
atcaacacgcagggacaccacgggcatggtgatgatatgcagtgctatcccatgccggaaacgcttcacgatctg

SEQ ID NO: 804957 - DNA, 75 bp, synthetic construct
  source 1..75: mol_type = other DNA
atcccgaatgtcaccgttctggcgattaatcaccgccattgtgaccgccccggtgatgtggcttaaagacgttct

SEQ ID NO: 804958 - DNA, 75 bp, synthetic construct
  source 1..75: mol_type = other DNA
gctgtgacggtgttcgtcagaaatctggccaacctgacagatgacgaacggaacagcctgaaggctggcattgaa

SEQ ID NO: 804959 - DNA, 75 bp, synthetic construct
  source 1..75: mol_type = other DNA
cgtgacactgcctgccggggttgaaagcgggctggttcccgtcacggcgaccggcaccggcagcggctataacct

SEQ ID NO: 804960 - DNA, 75 bp, synthetic construct
  source 1..75: mol_type = other DNA
gctgccgctggcgtgctgcgattcttcaagctgaatgcggcggatgtggtcgtcgtgcctgccggaacactggtg

SEQ ID NO: 804961 - DNA, 75 bp, synthetic construct
  source 1..75: mol_type = other DNA
atgcaggaacatattgattatcagattgagaaatatcagttcagggccaggaatgagtctccgcgactgatgcgc

SEQ ID NO: 804962 - DNA, 75 bp, synthetic construct
  source 1..75: mol_type = other DNA
aagatggctattcgccggtggtacgtgactatgacaccggcctaccgacgcaaggagtgaaagtggaagagaaaa

SEQ ID NO: 804963 - DNA, 75 bp, synthetic construct
  source 1..75: mol_type = other DNA
tggcatctcgacggtcatgactatttcggcactggcgagtgtccgccggagtgggacgctgattactggttcgat

SEQ ID NO: 804964 - DNA, 75 bp, synthetic construct
  source 1..75: mol_type = other DNA
gtggcgatgaatattcacatgccgggctggcttcgtcgcggtgatgaagtactcgacattgtgggtgatgctgcc

SEQ ID NO: 804965 - DNA, 75 bp, synthetic construct
  source 1..75: mol_type = other DNA
cagtctgcagaatgacttatccggcgtgccggatagcttcagttacagtcttgcgacgcgaatacggcgggcgga

SEQ ID NO: 804966 - DNA, 75 bp, synthetic construct
  source 1..75: mol_type = other DNA
gcgtcgcttttgatctcgacggtacgctggtcgacagtgctcccggtcttgctgctgcggtagatatggcgctgt

SEQ ID NO: 804967 - DNA, 75 bp, synthetic construct
  source 1..75: mol_type = other DNA
ggagcggcgacaggtcgatacacctgtcagccatattgacttactgccgacaatgatggcgctggcagatattga

SEQ ID NO: 804968 - DNA, 75 bp, synthetic construct
  source 1..75: mol_type = other DNA
acgctggtgagttttgaccatccgctgactgacggcgacgaagtggctttcttcccgccggtaaccggaggttaa

SEQ ID NO: 804969 - DNA, 75 bp, synthetic construct
  source 1..75: mol_type = other DNA
tcagcgtgtgtttgtcactaactggcctcacgggttcggcggttacggaagcggtggccgtggtggtcgcacccg

SEQ ID NO: 804970 - DNA, 75 bp, synthetic construct
  source 1..75: mol_type = other DNA
tttgaagaaatcaagaatgagatgcgccgggtgcttaactggcacgatgcggcggataaatccggggagcttgat

SEQ ID NO: 804971 - DNA, 75 bp, synthetic construct
  source 1..75: mol_type = other DNA
ttattgctgtccgggccacaaccgctggcacttccggccccacgcactgttcccgcattaccagcaccgaaacca

SEQ ID NO: 804972 - DNA, 75 bp, synthetic construct
  source 1..75: mol_type = other DNA
agggcgcgatgcatggctgggatttacccactgcacagggggcttcgttacagttcaaacagatgtttgcccgtc

SEQ ID NO: 804973 - DNA, 75 bp, synthetic construct
  source 1..75: mol_type = other DNA
tcagaacgctgtcagaacagtcaaaaggtgcacaggccagtgcgatgaactcctgggacgggatgttcgcccaga

SEQ ID NO: 804974 - DNA, 75 bp, synthetic construct
  source 1..75: mol_type = other DNA
ttaccccgccagccgttattgctgtccgggccacagccgctggcattacctgcaccacgccctgttctggcatta

SEQ ID NO: 804975 - DNA, 75 bp, synthetic construct
  source 1..75: mol_type = other DNA
attccgcaaccgcagcagcgcgaggcgaccgaccgtccgttattaccggcggagcacaatgcgctcaaacagctg

SEQ ID NO: 804976 - DNA, 75 bp, synthetic construct
  source 1..75: mol_type = other DNA
gcaaccgctgcttaatccttttccaccgatgatggacacgttgcaaaatatggcaacgcgtcccgcgctgtggat

SEQ ID NO: 804977 - DNA, 75 bp, synthetic construct
  source 1..75: mol_type = other DNA
gacttctgcacaggccgaggatatccttaaccagctctatcagcggcgggtgaaaggcattgaaccgcgtaatat

SEQ ID NO: 804978 - DNA, 75 bp, synthetic construct
  source 1..75: mol_type = other DNA
cagaactactgcgggaactgacagttcagcgcgtttttgtgactaactggcccaacgggttcggtggatatggcg

SEQ ID NO: 804979 - DNA, 75 bp, synthetic construct
  source 1..75: mol_type = other DNA
cccatgaaaaagcaggcgcaattggcagtacagccggtgcatggctcggcggtgccgttggcagccttgccggac

SEQ ID NO: 804980 - DNA, 75 bp, synthetic construct
  source 1..75: mol_type = other DNA
aagttattctgtccgccaacttttggcccaattgggggagtatttacgtctgggaaataatcgtcaggccgtcac

SEQ ID NO: 804981 - DNA, 75 bp, synthetic construct
  source 1..75: mol_type = other DNA
agctactctttcaacccaacactttcacagtcgctgggcggcccggaagatttctatatgttccagctagggctg

SEQ ID NO: 804982 - DNA, 75 bp, synthetic construct
  source 1..75: mol_type = other DNA
gcgttatgggtggtgagtgtttcatcgttttaactaaagaaaacaatgagttaaatgtttctatcctgtctgctg

SEQ ID NO: 804983 - DNA, 75 bp, synthetic construct
  source 1..75: mol_type = other DNA
cgcagaatgctaaacgcttctctcgtaacggtcgctttaacttccgtgaactgctggtaatggctgaacgtgagc

SEQ ID NO: 804984 - DNA, 75 bp, synthetic construct
  source 1..75: mol_type = other DNA
tccttcatcggtgaacgtgtacgaatcccagcggaacgagtgctgcattactttatccccagcacagccgaagcc

SEQ ID NO: 804985 - DNA, 75 bp, synthetic construct
  source 1..75: mol_type = other DNA
ccggaaggggcaacgatcaaggcaattcagagcgccaaagcggtgatgactttaacagcttcaatgatgcgatgt

SEQ ID NO: 804986 - DNA, 75 bp, synthetic construct
  source 1..75: mol_type = other DNA
tagtttaggtctggttggtgatcgcattgatggacagcttcaacaagacaccattaccggaaccttcaataaggc

SEQ ID NO: 804987 - DNA, 75 bp, synthetic construct
  source 1..75: mol_type = other DNA
tccctgcgtggtgtgactgacttcctgccagtgattaaggatatcgcacatcaagacgcattccgcgaaactgcg

SEQ ID NO: 804988 - DNA, 75 bp, synthetic construct
  source 1..75: mol_type = other DNA
tgcggccaatatcatgatccttgttgtgctgctgagcgtaagaggcaatgtagcgcggctggttgatgcactgag

SEQ ID NO: 804989 - DNA, 75 bp, synthetic construct
  source 1..75: mol_type = other DNA
cgtggcgaatactatttttctttccgtgctggtggccgtcagaggcaacgttgcacgtctggttgatcatctgag

SEQ ID NO: 804990 - DNA, 75 bp, synthetic construct
  source 1..75: mol_type = other DNA
gttcgcaatgacgtttatctcaacaacttacaggcgaactattttgccgacttaggcaacggtttctatggccag

SEQ ID NO: 804991 - DNA, 75 bp, synthetic construct
  source 1..75: mol_type = other DNA
acgcaacggaaagattaacttccttgagtgcttaaagctgatggaaaaagagcgtgtgatgggcggtgatgcgtt

SEQ ID NO: 804992 - DNA, 75 bp, synthetic construct
  source 1..75: mol_type = other DNA
ttagacctcgcgttacgtctattgaaccgatcaaagatattcagagtgaagttctgttaatagaaagcggattga

SEQ ID NO: 804993 - DNA, 75 bp, synthetic construct
  source 1..75: mol_type = other DNA
tcctttactggcgaacgtgtacgaatcccggcggaaagagtgctgcattactttatccctggtacagccgacgca

SEQ ID NO: 804994 - DNA, 75 bp, synthetic construct
  source 1..75: mol_type = other DNA
atgttgacctcaataacaggccacgacagcgtattgctgcgtgccgacgatcccctgatcgacatgaactacatc

SEQ ID NO: 804995 - DNA, 75 bp, synthetic construct
  source 1..75: mol_type = other DNA
tggataatttcgggagcttgagagaggcagcaaaccgcacacaggcggatatggggatagaaatcgcaaaatctg

SEQ ID NO: 804996 - DNA, 75 bp, synthetic construct
  source 1..75: mol_type = other DNA
cgctggtgctgtgttacatcctctatgtggcaacccataccgaagtagcagcaccagcagcgatagtggagatga

SEQ ID NO: 804997 - DNA, 75 bp, synthetic construct
  source 1..75: mol_type = other DNA
atgttgacctcaatgacaggccacgactgcgtgttgctgcgtgccgacgatcccctgatcgacatgtactacatc

SEQ ID NO: 804998 - DNA, 75 bp, synthetic construct
  source 1..75: mol_type = other DNA
tcatttccctaaacccatcaaactggggcgtagcagccgctggtacaaaagtgaagtggagcagtggatgcagca

SEQ ID NO: 804999 - DNA, 75 bp, synthetic construct
  source 1..75: mol_type = other DNA
atgttgacctcaatgacaggccacgacagcgtgttgctgcgtgccgacgatcccctgatcgacatgaactacatc

SEQ ID NO: 805000 - DNA, 75 bp, synthetic construct
  source 1..75: mol_type = other DNA
gcgcatttatacggtcaggtggcaggtattgctcgcgcttttaacttcaccccgatgtactggaaaaaataccgt

SEQ ID NO: 805001 - DNA, 75 bp, synthetic construct
  source 1..75: mol_type = other DNA
ccgacgatcccctgatcgacatgaactacatcaccagtttcactggcatgacagataaatggttttacaagctga

SEQ ID NO: 805002 - DNA, 75 bp, synthetic construct
  source 1..75: mol_type = other DNA
ctggtagatgacggtgttatcgaatggaatgacccggaggttgtgagggcgctcaggggggcattaaaacacgga

SEQ ID NO: 805003 - DNA, 75 bp, synthetic construct
  source 1..75: mol_type = other DNA
cgctggtgctgtgttacatcctctatgtggcaacccataccgaagtggcagtaccagcggcgattgtggagatga

SEQ ID NO: 805004 - DNA, 75 bp, synthetic construct
  source 1..75: mol_type = other DNA
cacgacagcgtattgctgcgtgccgacgatcccctgatcgacatgaactacatcaccagtttcaccggtatgacc

SEQ ID NO: 805005 - DNA, 75 bp, synthetic construct
  source 1..75: mol_type = other DNA
gggcgcagcagtcgctggtacaaaagcgaagtggagcagtggatgcagcagcgaatagaggaatcacgaggagca

SEQ ID NO: 805006 - DNA, 75 bp, synthetic construct
  source 1..75: mol_type = other DNA
ggtgatgttgcagccattggcaaatggcttaaacacaacccggattacgccatcatggacgaacgggcaaaagat

SEQ ID NO: 805007 - DNA, 75 bp, synthetic construct
  source 1..75: mol_type = other DNA
cggcgcggaatgcaaaacacgccggatatgcgcgaacgcgttcgccatcaccagctacaggcgctggcgctactg

SEQ ID NO: 805008 - DNA, 75 bp, synthetic construct
  source 1..75: mol_type = other DNA
ctgccgtcaactgagctgattttcatcgccgcgctgtttcacgatatcgccaaaggacgcggcggcgaccactcc

SEQ ID NO: 805009 - DNA, 75 bp, synthetic construct
  source 1..75: mol_type = other DNA
aacctctgtgtaatattccggaagcgcgaaaactgtttttgagcattctgcgtcaccccggagcggtgcggcgcg

SEQ ID NO: 805010 - DNA, 75 bp, synthetic construct
  source 1..75: mol_type = other DNA
ctcgcgtgaaacacaactggttgcctggctggttcgccagcacttgctgatgtccgtaaccgcccaacgtcgcga

SEQ ID NO: 805011 - DNA, 75 bp, synthetic construct
  source 1..75: mol_type = other DNA
caaacaccgctctccccacccttcccggccaaccgcagaatccgtgtgtctggcctcgtgacgaattaaccgttt

SEQ ID NO: 805012 - DNA, 75 bp, synthetic construct
  source 1..75: mol_type = other DNA
ccacacgccacgcgtggtggcaccgagatttttatctggagcccggaccgtccttacttgtttgccgctgtttgt

SEQ ID NO: 805013 - DNA, 75 bp, synthetic construct
  source 1..75: mol_type = other DNA
ccgggataagcggtttttattatgcgaccttcccctcgtatactatgatctgtttgttacatgcactttgggctg

SEQ ID NO: 805014 - DNA, 75 bp, synthetic construct
  source 1..75: mol_type = other DNA
tgtctttactaccgtttatttcttcctgcccggtgagtcgagctacgtcacgattgcgctggcgaatatggttgc

SEQ ID NO: 805015 - DNA, 75 bp, synthetic construct
  source 1..75: mol_type = other DNA
gtgtgtgattgtcggtatttcattttcactaatgctggttgctctttttctgtccctcgcctgggtgatgttgtc

SEQ ID NO: 805016 - DNA, 75 bp, synthetic construct
  source 1..75: mol_type = other DNA
gtgttgcgaaggcgtttatatccagacatcaccgacacaataaacctccggtggtgcataaattcagtattggtc

SEQ ID NO: 805017 - DNA, 75 bp, synthetic construct
  source 1..75: mol_type = other DNA
ccttatcgccgcactggtcctccagcgtgtgaatcgtaaaagtaaaaatcaagtcaatgaaatcactgaaaacaa

SEQ ID NO: 805018 - DNA, 75 bp, synthetic construct
  source 1..75: mol_type = other DNA
gccggttatcaggatgttttcctgttcatgttggtttgcgcattcatcggccttatcgccgcactggtcctccag

SEQ ID NO: 805019 - DNA, 75 bp, synthetic construct
  source 1..75: mol_type = other DNA
acgtggaaaaatataacgagtgggtgaaaaatttttctgagcagatttttaaaattactggcgacgagaatgcgg

SEQ ID NO: 805020 - DNA, 75 bp, synthetic construct
  source 1..75: mol_type = other DNA
ggccagaaattggcgcgtggtcactggtatttgttgatgaggtcagcggcgaaacatggcaggacaacaaaccga

SEQ ID NO: 805021 - DNA, 75 bp, synthetic construct
  source 1..75: mol_type = other DNA
atgtcctgccacaaatggctctcacgtcatcccaggttcttgatctgcttaatcacgtgtttttaaaacgtgcag

SEQ ID NO: 805022 - DNA, 75 bp, synthetic construct
  source 1..75: mol_type = other DNA
ttaaatccttcaccgggagtaccgggttggttttaatggcgttcttaattgtgctcctgcttatctggctggtga

SEQ ID NO: 805023 - DNA, 75 bp, synthetic construct
  source 1..75: mol_type = other DNA
ctctgaaggcgcaggcgaaaacctgtttgaagtgaaagacggtgtgctgttcaccccaccgttcacctcctccgc

SEQ ID NO: 805024 - DNA, 75 bp, synthetic construct
  source 1..75: mol_type = other DNA
gcgtaaacccgccagcgggatactcaaccgacgtgattatcgccgctttcccgtggggagcgtatctgggcgcag

SEQ ID NO: 805025 - DNA, 75 bp, synthetic construct
  source 1..75: mol_type = other DNA
aagcctgaccagagagaaaattatcgatggcaaactgattgataatggctatttaatttttgatttatcactatt

SEQ ID NO: 805026 - DNA, 75 bp, synthetic construct
  source 1..75: mol_type = other DNA
atgccgaataacacaactgatataggcaaaaccgatgaccttggattcgacgcctctcgtgtcgtgccaacagct

SEQ ID NO: 805027 - DNA, 75 bp, synthetic construct
  source 1..75: mol_type = other DNA
ttttgtgggcgcaaatattacatagcggtaaattatcgtctttagggcaatcatttattgaatcgctgttttata

SEQ ID NO: 805028 - DNA, 75 bp, synthetic construct
  source 1..75: mol_type = other DNA
gaagatgcccgatattaccagtgtgcacaacggttgtactgcggcgagggggaaagtctgcttgccgagctctgc

SEQ ID NO: 805029 - DNA, 75 bp, synthetic construct
  source 1..75: mol_type = other DNA
tgtagcggcaaaaatcgccgagcaagaaggcattgccgaagatggctatcgtttgatcatgaacaccaaccgtca

SEQ ID NO: 805030 - DNA, 75 bp, synthetic construct
  source 1..75: mol_type = other DNA
gtcaatgatgtgtctgccgaacacgagcaggcgctggggcgcatgattaccgtcgcggcaaaaatcgccaggcaa

SEQ ID NO: 805031 - DNA, 75 bp, synthetic construct
  source 1..75: mol_type = other DNA
cgtcgcctccttttgagcacgataaaacctatcgggcaggttgagcaaccaacgactccggtaacgaagatttca

SEQ ID NO: 805032 - DNA, 75 bp, synthetic construct
  source 1..75: mol_type = other DNA
tgtagacggtattcaggttggtgaaggccgttgtggcccggttaccaaacgcattcagcaagccttcttcggcct

SEQ ID NO: 805033 - DNA, 75 bp, synthetic construct
  source 1..75: mol_type = other DNA
aagaaaacatttccaattgttatttggcggcagcagatcgaaagaagctgtatgaatttaaatatcagataattg

SEQ ID NO: 805034 - DNA, 75 bp, synthetic construct
  source 1..75: mol_type = other DNA
cgaccgtaaattatgacgggaaaaaattcacgtatccggtcgctgatgagtggccgggattctccaactttatgg

SEQ ID NO: 805035 - DNA, 75 bp, synthetic construct
  source 1..75: mol_type = other DNA
tgttccccaaatcaataatcaagagaaccctattgggaacttcctgaatttggattcaggcgggcgtgatgcaat

SEQ ID NO: 805036 - DNA, 75 bp, synthetic construct
  source 1..75: mol_type = other DNA
ggaatcagagcctgaatcaacagagcgatatcagttaaccgacatagatggagaagatgcttttatccgtattgg

SEQ ID NO: 805037 - DNA, 75 bp, synthetic construct
  source 1..75: mol_type = other DNA
agcatttctttgttttcgactctgaacagcatcgttatgccttaaatgtccgagaggtgattttccaccaattct

SEQ ID NO: 805038 - DNA, 75 bp, synthetic construct
  source 1..75: mol_type = other DNA
gttttaaagaaaccattaaatgcggtttttcctggtaacgatactttattgcaaaaagtgcgcaaccaaagtagc

SEQ ID NO: 805039 - DNA, 75 bp, synthetic construct
  source 1..75: mol_type = other DNA
tccacaaacccagcaaggggacattggcgcgaaagatatcccctcctggcggcgaatatgcaaagttttactcaa

SEQ ID NO: 805040 - DNA, 75 bp, synthetic construct
  source 1..75: mol_type = other DNA
ctctgaaggtgcgggcgaaaacctgtttgaagtgaaagatggtgtgctgttcaccccaccgttcacctcatccgc

SEQ ID NO: 805041 - DNA, 75 bp, synthetic construct
  source 1..75: mol_type = other DNA
tcgcgctggatgtgaatggctacatctctgaaggtgcaggcgaaaacctgtttgaagtgaaagacggcgtgctgt

SEQ ID NO: 805042 - DNA, 75 bp, synthetic construct
  source 1..75: mol_type = other DNA
aaagtacactcgccacacgctacatgcgtgactcattcccagcagaatgggtaatccagtgcgcccttgaaacgg

SEQ ID NO: 805043 - DNA, 75 bp, synthetic construct
  source 1..75: mol_type = other DNA
aataaaatcgccatttatttgcactggtatcagaaaaaaggcatcgaagttccacaaacccagcaaggggacatt

SEQ ID NO: 805044 - DNA, 75 bp, synthetic construct
  source 1..75: mol_type = other DNA
tgtaacccactgtataatataatgtatcaggcaggcgttcctctgcgtcatatgcgaatttgcgaaccttttggc

SEQ ID NO: 805045 - DNA, 75 bp, synthetic construct
  source 1..75: mol_type = other DNA
ttatccagctggaacaaccactctggagcctgaaaacgcatggcaaaaatggaatggcagtaaatgggaggatga

SEQ ID NO: 805046 - DNA, 75 bp, synthetic construct
  source 1..75: mol_type = other DNA
caccacgataaagccacaggcaataaaagcgggatttgtggcgatttttgattcagagaagcaaagatggatttc

SEQ ID NO: 805047 - DNA, 75 bp, synthetic construct
  source 1..75: mol_type = other DNA
tgcgtcgtggtgctgacggtaagctgggggttgtggcggatattgggggttcaggtatggcgatgttttccccgc

SEQ ID NO: 805048 - DNA, 75 bp, synthetic construct
  source 1..75: mol_type = other DNA
tgggcgtaaatggtcgggcatcacgccagaaaagttcatgcagcaagtggatacttacatcagatggtataacga

SEQ ID NO: 805049 - DNA, 75 bp, synthetic construct
  source 1..75: mol_type = other DNA
aagtatcagccagtgaaatcgccaggcgtattggtgtcagtcgtgcggtattgtataaatggaaagataaaatta

SEQ ID NO: 805050 - DNA, 75 bp, synthetic construct
  source 1..75: mol_type = other DNA
actcgctcgctgggttaatgaactttatcccgacagacgacgtatatttaccagtaaggccaacccggttgcgcc

SEQ ID NO: 805051 - DNA, 75 bp, synthetic construct
  source 1..75: mol_type = other DNA
ttttttgcttttgcaaaaggcgcgggtgtgatgggagaagcggggcctgaagccattctgccattgcgtcgtggt

SEQ ID NO: 805052 - DNA, 75 bp, synthetic construct
  source 1..75: mol_type = other DNA
tgatctggcaaaaatcatgtcgcagatggccatgatgcaggcggtgaaggggattggttcggcgtttggctgggg

SEQ ID NO: 805053 - DNA, 75 bp, synthetic construct
  source 1..75: mol_type = other DNA
agtctgcaacagaaatatcagcagcaaatggagcaactggagcgtgacagtaaacagaaaggaacatacggctca

SEQ ID NO: 805054 - DNA, 75 bp, synthetic construct
  source 1..75: mol_type = other DNA
cgtccgacgttttttgcttttgcaaaaggcgcgggtgtgatgggggaagcgggacctgaagccattctgccattg

SEQ ID NO: 805055 - DNA, 75 bp, synthetic construct
  source 1..75: mol_type = other DNA
aaagggacatataacacggatgactacagaaaggccgagcaggcgctgacggagagcctgaaccgacaactgaat

SEQ ID NO: 805056 - DNA, 75 bp, synthetic construct
  source 1..75: mol_type = other DNA
tgtttatcagtctgctgatttgagtcgctacagtggcacggtggttaaccgtccgacgttttttgcttttgcaaa

SEQ ID NO: 805057 - DNA, 75 bp, synthetic construct
  source 1..75: mol_type = other DNA
tatcccgacagacgacgtatatttaccagtaaggccaacccggttgtgccctttgaaccagaagtcaaacgtcag

SEQ ID NO: 805058 - DNA, 75 bp, synthetic construct
  source 1..75: mol_type = other DNA
gcgcgtatgtttagcattctcccggatagcctgaaagatggtagcgaaggggtatgctttaattttggtggaaac

SEQ ID NO: 805059 - DNA, 75 bp, synthetic construct
  source 1..75: mol_type = other DNA
gatcaggattttgtgagggccatgatgaaaagcgggatggatttagaaaatatccacgaagatgatcttaaggtt

SEQ ID NO: 805060 - DNA, 75 bp, synthetic construct
  source 1..75: mol_type = other DNA
tgattcataacccgacagatcacccacgtatgtctgcggaagagctgaagtttatctctgaaaatggcgcggtgg

SEQ ID NO: 805061 - DNA, 75 bp, synthetic construct
  source 1..75: mol_type = other DNA
ggtgttgtgacgccattttcggcgcaggttaatgctatcaaaatgtcattgcgtaagctggaaattaatggcaaa

SEQ ID NO: 805062 - DNA, 75 bp, synthetic construct
  source 1..75: mol_type = other DNA
acacagcgccggagctgacaaagcaccttcagagaaccgagtcagcaatacgaagccgcattcgtcttttgctct

SEQ ID NO: 805063 - DNA, 75 bp, synthetic construct
  source 1..75: mol_type = other DNA
ctcaaaagtttggaagtgataatcacattgacccgactcacatcgctttaaattatggtttcgcgcagaactgct

SEQ ID NO: 805064 - DNA, 75 bp, synthetic construct
  source 1..75: mol_type = other DNA
caagtggatacttacatcagatggtataacgagcggcgtataaaattatcgccgggtgcagtcagccccaaaatg

SEQ ID NO: 805065 - DNA, 75 bp, synthetic construct
  source 1..75: mol_type = other DNA
cactatgctggatagcgctgtcgaaacgttaaatgctggcgaacgaccggtgatacacagtgacagaggtgggca

SEQ ID NO: 805066 - DNA, 75 bp, synthetic construct
  source 1..75: mol_type = other DNA
tgcggagaaatcggaccggctccggataaccttatcgccagagattttaaggcggagcaacctaatcagaaatgg

SEQ ID NO: 805067 - DNA, 75 bp, synthetic construct
  source 1..75: mol_type = other DNA
tatgcgctttatgctcggcttctcggaagcgccatcattcccggcgaacgcccgtattgtcgccgcctggttccc

SEQ ID NO: 805068 - DNA, 75 bp, synthetic construct
  source 1..75: mol_type = other DNA
gctctcttttgattataaagagcgtaaggatttaaaaaccgccgggaccaaaatctacacacttcatggtgtgga

SEQ ID NO: 805069 - DNA, 75 bp, synthetic construct
  source 1..75: mol_type = other DNA
actcaacctcttcaccagtgatgaactttacgatcgccgtaatgacctaaatgaaatgcataatctgatcgatga

SEQ ID NO: 805070 - DNA, 75 bp, synthetic construct
  source 1..75: mol_type = other DNA
tggaggtgatatcgccatggtggcgaaagctgccgcgcaaatggaacgttcagtggggcagtctgtcagcgacac

SEQ ID NO: 805071 - DNA, 75 bp, synthetic construct
  source 1..75: mol_type = other DNA
acaaagcctgagaagaagacaccgcctccgttgccgcctttctgccaggcgctactggatgagcacgtgatctaa

SEQ ID NO: 805072 - DNA, 75 bp, synthetic construct
  source 1..75: mol_type = other DNA
ggtgctgattggcgatatggggatgcccgctggtgggcgtttcaacggcggtcacgccagccaccagaccggact

SEQ ID NO: 805073 - DNA, 75 bp, synthetic construct
  source 1..75: mol_type = other DNA
ccgaaaacacgctggacctccgcgcagctcttgcgcccgcaagcactggacttagtttcccgcgacggtaaacac

SEQ ID NO: 805074 - DNA, 75 bp, synthetic construct
  source 1..75: mol_type = other DNA
atcggtttagaattaaatccagaatcagatgttacctacgatattagcaaagtctatgctgacataaaaaaatca

SEQ ID NO: 805075 - DNA, 75 bp, synthetic construct
  source 1..75: mol_type = other DNA
agctattattcgcgcagcaaataagttaagaccgggatcacaagcagagattgattatgccttggaggggggcgt

SEQ ID NO: 805076 - DNA, 75 bp, synthetic construct
  source 1..75: mol_type = other DNA
tatgtgtgaaggggttttcccggattacagagctagaacaaccaaagagcttgaagaggaacgcaataacgcttt

SEQ ID NO: 805077 - DNA, 75 bp, synthetic construct
  source 1..75: mol_type = other DNA
tgatcttaagccgtaagaaactcccggacgatcaggcacaaaaagttggcgagctgttaacgctgctctgggatg

SEQ ID NO: 805078 - DNA, 75 bp, synthetic construct
  source 1..75: mol_type = other DNA
ttgcgtgatattcacactttacagtgggtggcccgccgccattttggcgcaacatcgctggatgaaatggtcggg

SEQ ID NO: 805079 - DNA, 75 bp, synthetic construct
  source 1..75: mol_type = other DNA
tcgcgctaactattttgtccgccacagcccaagtcagctggcctggcacgcaagacatttattgcagcatgattt

SEQ ID NO: 805080 - DNA, 75 bp, synthetic construct
  source 1..75: mol_type = other DNA
gtggtgctgacggtaagctggggggtgtggcggatattgggggttcaggtatggcgatgttttccccgcagtaca

SEQ ID NO: 805081 - DNA, 75 bp, synthetic construct
  source 1..75: mol_type = other DNA
agcgtgtgcatgagctggcaaactggctgcgcgaagcgggcatcaacaactgctatctcgaaggtgagatggtac

SEQ ID NO: 805082 - DNA, 75 bp, synthetic construct
  source 1..75: mol_type = other DNA
gccgcgggtgaaaaaacgccatcgcgacaccaaaaatattggtaagcgccgtaaaccaagcggaacgggcgtgcc

SEQ ID NO: 805083 - DNA, 75 bp, synthetic construct
  source 1..75: mol_type = other DNA
agcaacaactggatgcgctgcaagagcgaaaacgccagcaggatttgcaggatgcaaaagagcaggctgagcgaa

SEQ ID NO: 805084 - DNA, 75 bp, synthetic construct
  source 1..75: mol_type = other DNA
ggcgaagaaatttccgtggactaaggcgtccaccacggtggaatacgatcagcaacaactggatgcgctacaaga

SEQ ID NO: 805085 - DNA, 75 bp, synthetic construct
  source 1..75: mol_type = other DNA
ggtccggctgccctgaaggtggtttatgacctcgggaaaaaagctgcagcggactttatgcaacagcagtcccgt

SEQ ID NO: 805086 - DNA, 75 bp, synthetic construct
  source 1..75: mol_type = other DNA
tatgcaggcggtgaaggggattggttcggcgtttggctgggggagcgcatccgctgccagtgtgacgcccaatgc

SEQ ID NO: 805087 - DNA, 75 bp, synthetic construct
  source 1..75: mol_type = other DNA
gggcattatgccggagtcactgccgggcagctgtgggtgctcagtcgtgctatttccgggaatggtatcacgcaa

SEQ ID NO: 805088 - DNA, 75 bp, synthetic construct
  source 1..75: mol_type = other DNA
gggcctgaggctatcctgcccttgcgcaggggggttgacggtaagctgggtgttgtggcagcgacctgtggttcg

SEQ ID NO: 805089 - DNA, 75 bp, synthetic construct
  source 1..75: mol_type = other DNA
aggtaaactgaatttcaaatcctttaccgcctcgcttctttccgacctggcaaaaatcatggcgcagatggccat

SEQ ID NO: 805090 - DNA, 75 bp, synthetic construct
  source 1..75: mol_type = other DNA
cagtctgtcagcgacaccatcagtcagtttaagcgactgaaggatgacccggtaaatgcagccaggacgctggat

SEQ ID NO: 805091 - DNA, 75 bp, synthetic construct
  source 1..75: mol_type = other DNA
ggaatggtatcacgcaacatgctgcagccagtgcgctggctcaggcggttggcagcggtgcatttcgtggaggtg

SEQ ID NO: 805092 - DNA, 75 bp, synthetic construct
  source 1..75: mol_type = other DNA
gctgggaaaggcctggtatgacggtcagaaggagggggaggtgtttaatcgtcagctggcgttgacagggcatta

SEQ ID NO: 805093 - DNA, 75 bp, synthetic construct
  source 1..75: mol_type = other DNA
gccagacagtcagcaggcattgccacggaaaggatgacagaagcgcataaacagcttctggctctgcagcagcgc

SEQ ID NO: 805094 - DNA, 75 bp, synthetic construct
  source 1..75: mol_type = other DNA
gacatcagcgtgaaattgcgcgtattaatgccatgcagtacgcagatcagtcggtcagggacgcagcgatacagc

SEQ ID NO: 805095 - DNA, 75 bp, synthetic construct
  source 1..75: mol_type = other DNA
tgtctgactggtggaagcagttctgggatgcggccatgaacattggtcgggaagattcccttgatgcgcagattg

SEQ ID NO: 805096 - DNA, 75 bp, synthetic construct
  source 1..75: mol_type = other DNA
agcgggctggttcccgtcacggcgaccggcaccggcagcggctataaccttgcgccaggctattaccggatctta

SEQ ID NO: 805097 - DNA, 75 bp, synthetic construct
  source 1..75: mol_type = other DNA
cctgctgccgccggtgctaaaagataaattcatctgcgatcgtccactggaggttcgtccggtagagtttcataa

SEQ ID NO: 805098 - DNA, 75 bp, synthetic construct
  source 1..75: mol_type = other DNA
ccttctgccgccagtattgaaagataaatttatttgcgatcgtccgctggaagtgcgtcctgtagagtttcataa

SEQ ID NO: 805099 - DNA, 75 bp, synthetic construct
  source 1..75: mol_type = other DNA
gcaccgctggatgcgctgacgcatgcggaagtgctcattgatgacgagcagtttgatgaaatcaatattgtgcgc

SEQ ID NO: 805100 - DNA, 75 bp, synthetic construct
  source 1..75: mol_type = other DNA
cgacaaacctttccgtccggtcaataaagaacagactctggcagcggtgagtctactggaaaaagcgcgctatag

SEQ ID NO: 805101 - DNA, 75 bp, synthetic construct
  source 1..75: mol_type = other DNA
gtccgcctggtcgtcgagcgtgaacgtgaaatcaaagcgttcgtcccggaagagttctgggaagtggacgccagc

SEQ ID NO: 805102 - DNA, 75 bp, synthetic construct
  source 1..75: mol_type = other DNA
ttgcagagccaccggataagcgccgtcgtgacctggacaatatcctgaaggcaccactggatgtactgacgcatg

SEQ ID NO: 805103 - DNA, 75 bp, synthetic construct
  source 1..75: mol_type = other DNA
acccaccgacggtgaacacctactggcgtcgtcgtggcagcacatattttgtatcaaaagcaggggagcgttatc

SEQ ID NO: 805104 - DNA, 75 bp, synthetic construct
  source 1..75: mol_type = other DNA
atttgatgaaatcaatgttgtacgtggtcagccagtatctggtggacggctggagataaaaattacagaggtggg

SEQ ID NO: 805105 - DNA, 75 bp, synthetic construct
  source 1..75: mol_type = other DNA
cattgagctggaaaatcgcggctggcagaaatcagcggggatgaaatattttacgccgtttgaaccagcgcaaat

SEQ ID NO: 805106 - DNA, 75 bp, synthetic construct
  source 1..75: mol_type = other DNA
aaattattgcagagccaccggataagcgccgtcgtgacctggacaatatcctgaaggcaccactggatgcactga

SEQ ID NO: 805107 - DNA, 75 bp, synthetic construct
  source 1..75: mol_type = other DNA
cgagcagtttgatgaaatcaatattgtgcgcggtcagcttgttcctggtgggcggttggggataaaaatcacaga

SEQ ID NO: 805108 - DNA, 75 bp, synthetic construct
  source 1..75: mol_type = other DNA
tgccttatccgccgacggtgaatacttactggcgacgtcgtggcaacacatattttgtatcaaaagtcggtgagc

SEQ ID NO: 805109 - DNA, 75 bp, synthetic construct
  source 1..75: mol_type = other DNA
gtctactggaaaaagcgcgctatagcgtactggaacgtgaagacaaaccgactaccagcaagccaggcgctcctt

SEQ ID NO: 805110 - DNA, 75 bp, synthetic construct
  source 1..75: mol_type = other DNA
gtcaccgatcgcctggaagaaaatttccgtgagttaatgaactacgactttaccgcgcagatggaaaacagcctc

SEQ ID NO: 805111 - DNA, 75 bp, synthetic construct
  source 1..75: mol_type = other DNA
aaaactctcaagaagcgcacgaagcgattcgtccttctgacgtcaatgtaatggcagaatcgctgaaagatatgg

SEQ ID NO: 805112 - DNA, 75 bp, synthetic construct
  source 1..75: mol_type = other DNA
gttcgcctggtggtcgagcgtgaacgagaaattaaagcgttcgtaccggaagagttctgggaggtggatgccagc

SEQ ID NO: 805113 - DNA, 75 bp, synthetic construct
  source 1..75: mol_type = other DNA
ttcgccagcagcggctgaaattaaacctgtccggaaggctggcgataaagattattgcagagccaccggataagc

SEQ ID NO: 805114 - DNA, 75 bp, synthetic construct
  source 1..75: mol_type = other DNA
tgccttacccgccaacggtgaacacttactggcgacgtcgtggcagcacatattttgtatcaaaagtcggtgagc

SEQ ID NO: 805115 - DNA, 75 bp, synthetic construct
  source 1..75: mol_type = other DNA
gcgctgcgcgcaaaacgtcgttgcccgaaatgcggcacggcgatggacagctatctcatcgatccgaaacgtaag

SEQ ID NO: 805116 - DNA, 75 bp, synthetic construct
  source 1..75: mol_type = other DNA
cacttacatgcgtaccgactccactaacctgagtcaggacgcggtaaatatggttcgcggttatatcagcgataa

SEQ ID NO: 805117 - DNA, 75 bp, synthetic construct
  source 1..75: mol_type = other DNA
ttattacctctacgctgcaacaagctgccagcacccgtcttggatttggcgtgaaaaaaaccatgatgatggcgc

SEQ ID NO: 805118 - DNA, 75 bp, synthetic construct
  source 1..75: mol_type = other DNA
gataaagctgaaaaagatccggaagaggggggtatgcgcccgaaccagatggttctgaccagcattgactgcccg

SEQ ID NO: 805119 - DNA, 75 bp, synthetic construct
  source 1..75: mol_type = other DNA
ggcgatggacagctatctcatcgatccgaaacgtaagttgcatgtctgtggtaataacccaacctgcgacggtta

SEQ ID NO: 805120 - DNA, 75 bp, synthetic construct
  source 1..75: mol_type = other DNA
ccgtgctccgctggtggaagaactttatcgcttccgcgatcgtctgccggaaaaattgcgttatctggccgatgc

SEQ ID NO: 805121 - DNA, 75 bp, synthetic construct
  source 1..75: mol_type = other DNA
taccgcgcagatggaaaacagcctcgaccaggtggcaaatcacgaagcagagtggaaagctgtactggatcactt

SEQ ID NO: 805122 - DNA, 75 bp, synthetic construct
  source 1..75: mol_type = other DNA
tgcatggccggatgcgcagcgggtgaacttttaccttgccgggcgcgcgccacacacaccggtagagaccgcgtc

SEQ ID NO: 805123 - DNA, 75 bp, synthetic construct
  source 1..75: mol_type = other DNA
ggccgttctccggctgaaaacagcacggaaaatgctcctcaacccgtagagcaaccagagccggttcagcccgga

SEQ ID NO: 805124 - DNA, 75 bp, synthetic construct
  source 1..75: mol_type = other DNA
atgccagaaattaaaggcaccgtcactgaagacctggttaaacaggctctgtattccggtgaagtaaataaatta

SEQ ID NO: 805125 - DNA, 75 bp, synthetic construct
  source 1..75: mol_type = other DNA
acgccagaagaaattcgtactttgatgcagatagcagagctaacaggaagcaaagcagccacactgaccggtctg

SEQ ID NO: 805126 - DNA, 75 bp, synthetic construct
  source 1..75: mol_type = other DNA
gctcaccgcctgcgatgacaaatcggcggaaaacgccgccgccatgacgcctgaggtcggtgtcgtcacactctc

SEQ ID NO: 805127 - DNA, 75 bp, synthetic construct
  source 1..75: mol_type = other DNA
gttggcgagtctgttcgggtactcactgggcggtttgtcgatcactatcgacgttggtcgctactggaacctgcc

SEQ ID NO: 805128 - DNA, 75 bp, synthetic construct
  source 1..75: mol_type = other DNA
ggaaggtgtcgctacagcgtctgaacaaggtgatgttcttcatcatcgcgctcggtgcgctgctgccgaccatgc

SEQ ID NO: 805129 - DNA, 75 bp, synthetic construct
  source 1..75: mol_type = other DNA
ctcaaagaattaaacttcgtaatgaattacgtgttcactcttgagacttggcattcatttttcgtcttgcgacgt

SEQ ID NO: 805130 - DNA, 75 bp, synthetic construct
  source 1..75: mol_type = other DNA
gtttgcaacgcatacatccgggtatcaaagcacgcgcaatttcctccagccaggaaaacgccagcaccgaatcga

SEQ ID NO: 805131 - DNA, 75 bp, synthetic construct
  source 1..75: mol_type = other DNA
attcgcaacgaattatattttgaaggatttcccgatagaaacaacccccggacaatgggatttccttctcaaaca

SEQ ID NO: 805132 - DNA, 75 bp, synthetic construct
  source 1..75: mol_type = other DNA
tccggaaggctggcgataaaggtgattgcagagccaccggataagcgccgccgtgacctggacaacattctgaaa

SEQ ID NO: 805133 - DNA, 75 bp, synthetic construct
  source 1..75: mol_type = other DNA
cgatgatccggattacagtttcgatattctggaagcccgctacgccattgaagccagcaccgcgtggcatgcagc

SEQ ID NO: 805134 - DNA, 75 bp, synthetic construct
  source 1..75: mol_type = other DNA
gtgaacacttactggcgacgtcgtggcagcacatattttgtctcggaggcgggtgagcgttatcgccgtgctgtg

SEQ ID NO: 805135 - DNA, 75 bp, synthetic construct
  source 1..75: mol_type = other DNA
tgaccacttacctctccccacgtgactaccaccgcgtacacatgccgtgcaacggtattctgcgtgagatgatct

SEQ ID NO: 805136 - DNA, 75 bp, synthetic construct
  source 1..75: mol_type = other DNA
aaactcggctctaccgttatcaacctgtttgcaccgggtaaagtgaatctggttgagcaactggaaagcctgtct

SEQ ID NO: 805137 - DNA, 75 bp, synthetic construct
  source 1..75: mol_type = other DNA
gtttgatgaaatcaatattgcgcgcggtcaggtcgttcccggtgggcggctgggcgtgaagatttacaaaattga

SEQ ID NO: 805138 - DNA, 75 bp, synthetic construct
  source 1..75: mol_type = other DNA
ccaatagtcatccaggattgtggaaagtcgggatgatggccggtgctcatgcggcaagctggtttatcaatggcg

SEQ ID NO: 805139 - DNA, 75 bp, synthetic construct
  source 1..75: mol_type = other DNA
tgaccttattcatccggcaaaaaatccgcgaagatttcctcagtgctgaaataggtattaccggctgtaatttcg

SEQ ID NO: 805140 - DNA, 75 bp, synthetic construct
  source 1..75: mol_type = other DNA
tggtgaagtcgaaatcaatggtgaccgaagagattggcgtcaaccatgtgttgcaggatgctggcattcaggtga

SEQ ID NO: 805141 - DNA, 75 bp, synthetic construct
  source 1..75: mol_type = other DNA
gcaccactggatgcactgacgcatgcggggcttctcatagacgacgagcagtttgatgaaattaatattgtgcgc

SEQ ID NO: 805142 - DNA, 75 bp, synthetic construct
  source 1..75: mol_type = other DNA
tgttcgccagcagcgactgaaattaaatctgtccggtagattggcaatcaggattattgcagagccaccggataa

SEQ ID NO: 805143 - DNA, 75 bp, synthetic construct
  source 1..75: mol_type = other DNA
gtttgatgaaatcaatattgtgcgcggtcagctcgttcctggtgggcgactgggcgtgaagatttatgaaatcac

SEQ ID NO: 805144 - DNA, 75 bp, synthetic construct
  source 1..75: mol_type = other DNA
gaccgaaagaacccaactggacagcatgtgaaccgccccggaaatcctggagactaaacttcctgagaaagaggt

SEQ ID NO: 805145 - DNA, 75 bp, synthetic construct
  source 1..75: mol_type = other DNA
gaccgaaagaacccaactggacagcatgggccaatgatgtgcgcacaatgcggatgctggatggcagaactcaca

SEQ ID NO: 805146 - DNA, 75 bp, synthetic construct
  source 1..75: mol_type = other DNA
aaaaacatcatgagcccgtcaaaacttcgcgataaatgggatgagctggttatccgtctggggcgttcgcctgta

SEQ ID NO: 805147 - DNA, 75 bp, synthetic construct
  source 1..75: mol_type = other DNA
gcgcgtgaggcatataaaccgaaaagaaaaattagcccggcaaaaaatgacccgttaacagttgacccgtcaaat

SEQ ID NO: 805148 - DNA, 75 bp, synthetic construct
  source 1..75: mol_type = other DNA
ttgagcgatttctggagaaacacccggatgcgcatacctggaatgtaccgaagcgacagtggggtacccgtgagg

SEQ ID NO: 805149 - DNA, 75 bp, synthetic construct
  source 1..75: mol_type = other DNA
ttatataaaagataatgagtttgatatggtgtcacaggaaattcttttaaatggttcttttgataagtggagtga

SEQ ID NO: 805150 - DNA, 75 bp, synthetic construct
  source 1..75: mol_type = other DNA
cccgtcaaatattggcccctcaacggttgacccgtcaaattttgatggatcaacagttgataaaaaacagccggt

SEQ ID NO: 805151 - DNA, 75 bp, synthetic construct
  source 1..75: mol_type = other DNA
atgattgaccccgatccgtcagtattaaaacctgatccgtcagataaaagatcttcttgtccggacgcttcgcaa

SEQ ID NO: 805152 - DNA, 75 bp, synthetic construct
  source 1..75: mol_type = other DNA
aatcaacgccaagaccgtaacctatgacttcgagcgtctgatggaaggcgctaatctgctgaaatgttcagagtt

SEQ ID NO: 805153 - DNA, 75 bp, synthetic construct
  source 1..75: mol_type = other DNA
gcgcacaatgcggatgctggatggcagaactcacagacaaatttgcgaaatgtttggtcgggcacagcgggatcc

SEQ ID NO: 805154 - DNA, 75 bp, synthetic construct
  source 1..75: mol_type = other DNA
gctgcgcgacggtaagcaggtcaacgtgaacctggaactgcagcagagcagccagaatcaggttgattccagctc

SEQ ID NO: 805155 - DNA, 75 bp, synthetic construct
  source 1..75: mol_type = other DNA
aattcatggcgctgggttccggcgtcatcattgatgccgataaaggctatgtcgtcaccaacaaccacgttgttg

SEQ ID NO: 805156 - DNA, 75 bp, synthetic construct
  source 1..75: mol_type = other DNA
cgcgtcagccgcgatccgttctggtgccgtaacgtgctcagcccgtcgaagttgcgggaaaaatgggatgagctt

SEQ ID NO: 805157 - DNA, 75 bp, synthetic construct
  source 1..75: mol_type = other DNA
atgagtgcagatatctacgaaaaaatcatgtccgatcttgaattcgaccgcgacaatctggaggaagtctggcgt

SEQ ID NO: 805158 - DNA, 75 bp, synthetic construct
  source 1..75: mol_type = other DNA
gccttctcccaccgccgcgatatgattgtccaggcgtcgaagatggctatcgtagagatagagcgtctgggggcc

SEQ ID NO: 805159 - DNA, 75 bp, synthetic construct
  source 1..75: mol_type = other DNA
cgcgatcgaggcaaaaatctatgacaacgagcgtaagagattgagtatgaatggaattaagtttaatgaatccgt

SEQ ID NO: 805160 - DNA, 75 bp, synthetic construct
  source 1..75: mol_type = other DNA
ggcgctcatggctgctctggcagcagacatgacgctcagttttcacagccagcttcagcgaacccgccaggtaaa

SEQ ID NO: 805161 - DNA, 75 bp, synthetic construct
  source 1..75: mol_type = other DNA
tgaccggcgaattgcgtcagataaaaggcataaccgaaaacatctatcagcggcttatcccgtatgtctgcgttc

SEQ ID NO: 805162 - DNA, 75 bp, synthetic construct
  source 1..75: mol_type = other DNA
atggcaaatcaattgtataaccagtgtcgggtttattgtgcaccctggcgattagatgctttgaatttaaatgat

SEQ ID NO: 805163 - DNA, 75 bp, synthetic construct
  source 1..75: mol_type = other DNA
gttttaacattaatagacggaatgatttcatcaccagaaaaaaataaaaataaacatatcttacgatactacaaa

SEQ ID NO: 805164 - DNA, 75 bp, synthetic construct
  source 1..75: mol_type = other DNA
tctataagtcacaagaatacctggctacgctgggcaccattgaataccgatcattgtttggtagttacagtctga

SEQ ID NO: 805165 - DNA, 75 bp, synthetic construct
  source 1..75: mol_type = other DNA
acagaaattagttcgcttgtcgaaatattccctggatgctgcgctgaaagagaaatgtacgcgcaacaatctcca

SEQ ID NO: 805166 - DNA, 75 bp, synthetic construct
  source 1..75: mol_type = other DNA
gcgattttgtatggtctggcgggttttggttatatcatcgtcgccacctacctgccgctcatggcgaaagacgcg

SEQ ID NO: 805167 - DNA, 75 bp, synthetic construct
  source 1..75: mol_type = other DNA
gtttagtgcgtgaaaaactacccacaagcggcgtcattatggttacacatcaacccggtgtctggaacctggctg

SEQ ID NO: 805168 - DNA, 75 bp, synthetic construct
  source 1..75: mol_type = other DNA
actggatgcttggtcatttagcgaatggcgatgaactggataatagcctaaccggaacgctggtgcgctataccg

SEQ ID NO: 805169 - DNA, 75 bp, synthetic construct
  source 1..75: mol_type = other DNA
gacttcgaacgtctgatggaaggcgctaaattgctgaaatgttcagagtttggtgacgcgatcatcaagaatatg

SEQ ID NO: 805170 - DNA, 75 bp, synthetic construct
  source 1..75: mol_type = other DNA
tattgaccagaaactggcagaaactattgcagcagaagcgaacagccgtcttgcccggcagcaaatggaacaaat

SEQ ID NO: 805171 - DNA, 75 bp, synthetic construct
  source 1..75: mol_type = other DNA
aaaaatttactctttacaaataaaaaaatgtaaagttaccactggcgataaaaatatatttatattatacaccgt

SEQ ID NO: 805172 - DNA, 75 bp, synthetic construct
  source 1..75: mol_type = other DNA
tatcaatattgctgtaaccaaccagttcgatttttctacaaaaaataatagcaatttaataaagcaggatatggt

SEQ ID NO: 805173 - DNA, 75 bp, synthetic construct
  source 1..75: mol_type = other DNA
tacgttgtaacaagttaaacatttctcttgaagatgtaatctctcaatgccgggacaggatacttagcccgtatt

SEQ ID NO: 805174 - DNA, 75 bp, synthetic construct
  source 1..75: mol_type = other DNA
tggtgaaaacagtcatgatatgtggaaagagttcgaatggggtgacttccttctgtccagagaagaaagcctttt

SEQ ID NO: 805175 - DNA, 75 bp, synthetic construct
  source 1..75: mol_type = other DNA
atgtacctacatattgtccctaaactttttcatcgcatggcgaacaaatgcactctaaaatccatctccatacct

SEQ ID NO: 805176 - DNA, 75 bp, synthetic construct
  source 1..75: mol_type = other DNA
atgctcatagatttggttttaccttacccgccaacggtgaacacctactggcgacgtcgtggcagcacatatttt

SEQ ID NO: 805177 - DNA, 75 bp, synthetic construct
  source 1..75: mol_type = other DNA
cgcctcgcaagcggacgttcgttttcacctggcaattgctgaagcctcacataacatcgtgctgctgcaaaccat

SEQ ID NO: 805178 - DNA, 75 bp, synthetic construct
  source 1..75: mol_type = other DNA
tccggaaggctggcgataaaggtgattgcagagccaccggataagcgtcgtcgcgacctggacaatattctgaaa

SEQ ID NO: 805179 - DNA, 75 bp, synthetic construct
  source 1..75: mol_type = other DNA
tcgggaaggctggcaataaaaattattgcagagccaccggataaacgccgtcgtgacctggacaatatcctgaag

SEQ ID NO: 805180 - DNA, 75 bp, synthetic construct
  source 1..75: mol_type = other DNA
gtgcgcggtcagctcgttcctggtgggcgactgggcgtgaagatttacgaaataatgcatgacgggcaggtcaaa

SEQ ID NO: 805181 - DNA, 75 bp, synthetic construct
  source 1..75: mol_type = other DNA
ccgccgacggtgaacacctactggcgacgtcgtggcagcacatattttgtatcaaaagccggtgagcgttatcgc

SEQ ID NO: 805182 - DNA, 75 bp, synthetic construct
  source 1..75: mol_type = other DNA
agtgataccggcggttcatcaaccgttaccatttttctgaataattacagaaaaattcaacaggaaagatatgaa

SEQ ID NO: 805183 - DNA, 75 bp, synthetic construct
  source 1..75: mol_type = other DNA
cattcaactgctcaacaaaggtcgtggcgcaaaaatgcgttgtgtgattgctactcagacctttgctgactttgc

SEQ ID NO: 805184 - DNA, 75 bp, synthetic construct
  source 1..75: mol_type = other DNA
aacgcgcttatgaaatcctaaagcgggataagcaaaccttgcttaaccaaggtcacggcaagcaaatgggttcga

SEQ ID NO: 805185 - DNA, 75 bp, synthetic construct
  source 1..75: mol_type = other DNA
ctatccaagaagtgatgcctatcattggttggaatgaacttgaaaaaattagccttgaatacattactggtaagg

SEQ ID NO: 805186 - DNA, 75 bp, synthetic construct
  source 1..75: mol_type = other DNA
ttatctgaacataaaacactatcagtaagttggagtcattacctgattgttaaaggtatggaaggcgcaatcaat

SEQ ID NO: 805187 - DNA, 75 bp, synthetic construct
  source 1..75: mol_type = other DNA
atgccagcaaaccggatggtacgccgcgcaaactgctggatgtgacgcgcctgcatcagcttggctggtatcacg

SEQ ID NO: 805188 - DNA, 75 bp, synthetic construct
  source 1..75: mol_type = other DNA
ccgaacctggaatacatagccaaaatttcaggcggaacaatcgtaaaaggccgtctgcccatattgacccagtaa

SEQ ID NO: 805189 - DNA, 75 bp, synthetic construct
  source 1..75: mol_type = other DNA
cggatccagtcgtaccgagtctttcacggtagtaacaccagatttatacttagccgtggtatcgatatccatgta

SEQ ID NO: 805190 - DNA, 75 bp, synthetic construct
  source 1..75: mol_type = other DNA
atgcagaaagacgcgctgaataacgtacatattaccgacgaacaggttttaatgactccggaacaactgaaggcc

SEQ ID NO: 805191 - DNA, 75 bp, synthetic construct
  source 1..75: mol_type = other DNA
tttccatttttctgaataattacagaaaaattcaacaggaaagatatgaaaacggagaaatcaaactcaacacgc

SEQ ID NO: 805192 - DNA, 75 bp, synthetic construct
  source 1..75: mol_type = other DNA
ttgctgggccattcgaatcaaaaaatgaccgatatttacaacgacgcacgcggtaaagagtggaaaaaactggtt

SEQ ID NO: 805193 - DNA, 75 bp, synthetic construct
  source 1..75: mol_type = other DNA
aggccgctagatgccataaccgtaaaagatgtggtatcggtgctggaagaatacaaggcaaagggacataacaga

SEQ ID NO: 805194 - DNA, 75 bp, synthetic construct
  source 1..75: mol_type = other DNA
ggtatttgatgaacgttttggcaccagaccgttagatgccataaccgtaaaagatgtggtatcagtactggaaga

SEQ ID NO: 805195 - DNA, 75 bp, synthetic construct
  source 1..75: mol_type = other DNA
tgatggtcagcctgtacgaagggcaggtgtacgtgcagcgcggtgtgcgcctgaaagcggatatgcctgaagaaa

SEQ ID NO: 805196 - DNA, 75 bp, synthetic construct
  source 1..75: mol_type = other DNA
agttgccgaacaatccagcggtgaacaagaggaaaagaatttaatccgcctggatacgcggcatcttttcgatgc

SEQ ID NO: 805197 - DNA, 75 bp, synthetic construct
  source 1..75: mol_type = other DNA
tatttgttcgacgaggtaagcgactgctgggcatgactgaaccgggcaaagcattactggtcattgcagaacgta

SEQ ID NO: 805198 - DNA, 75 bp, synthetic construct
  source 1..75: mol_type = other DNA
ctgagtctggagaacgatcccgtacgtcaggtagaaatttaccagcgtgtgaaggcgcagcacagctatgccccc

SEQ ID NO: 805199 - DNA, 75 bp, synthetic construct
  source 1..75: mol_type = other DNA
cgaacattatctgctgttaccagagccggaggcacagtacaccactgacgagcagcagcgtctcgatgaactgta

SEQ ID NO: 805200 - DNA, 75 bp, synthetic construct
  source 1..75: mol_type = other DNA
tcggtgacttgctgggttattcaccccgccatgtccagcgaatgctgaaactggctgaccttgcgcctgtcatcc

SEQ ID NO: 805201 - DNA, 75 bp, synthetic construct
  source 1..75: mol_type = other DNA
agccgtacaggcggtggtacaccataacgaaacggctgatcgggcatatgaactctatctgagtgaaaaacagta

SEQ ID NO: 805202 - DNA, 75 bp, synthetic construct
  source 1..75: mol_type = other DNA
gcgcagcgtagtccccccggcgaccaataagccggtagtactgcgggcgtctggtgcgaactctattctggcgga

SEQ ID NO: 805203 - DNA, 75 bp, synthetic construct
  source 1..75: mol_type = other DNA
atggaactagaatcgcaaaaaatgtcggcttatgccgccctaaaattcggtcgcggcgcggcgctcgccctggca

SEQ ID NO: 805204 - DNA, 75 bp, synthetic construct
  source 1..75: mol_type = other DNA
atgacggaaaatctgaactgcccggagtttaccgtgaatttccaacaactaaagataatccgcgaggctgcacgt

SEQ ID NO: 805205 - DNA, 75 bp, synthetic construct
  source 1..75: mol_type = other DNA
gaagccagtaatgttcgtcggcttgcagacctgtttaccaacgatacgtctggcgttctcactattgcaacgacg

SEQ ID NO: 805206 - DNA, 75 bp, synthetic construct
  source 1..75: mol_type = other DNA
tccgcgaagctgcccgtcaggattacaatctgacagaggtcgcgaatatgctctttacctcacagtcaggtgtca

SEQ ID NO: 805207 - DNA, 75 bp, synthetic construct
  source 1..75: mol_type = other DNA
ccggatgtgacggaggggatcagcgccccgttgctcaaaaagatgtcttcagaaaggacgctggcagtacaggca

SEQ ID NO: 805208 - DNA, 75 bp, synthetic construct
  source 1..75: mol_type = other DNA
acccggctctggatatggctggtgcattgaccacggtaaaacgccagcatcgccctgctctggatctttcacgct

SEQ ID NO: 805209 - DNA, 75 bp, synthetic construct
  source 1..75: mol_type = other DNA
gggcaagctcaggccatgccggaaacataacaacagtgcacgaaatgaatcctgtagatgctgtattaggtattg

SEQ ID NO: 805210 - DNA, 75 bp, synthetic construct
  source 1..75: mol_type = other DNA
cttggatgaagaagatgctcgttttgcctccggtatctactatcgttcggttgatttcgaaaagtattttaaaat

SEQ ID NO: 805211 - DNA, 75 bp, synthetic construct
  source 1..75: mol_type = other DNA
ctggcactagggaagtatcctgaagtttcgttagctgatgctcgatcgcggcgagacgaagcgcgtaagctctta

SEQ ID NO: 805212 - DNA, 75 bp, synthetic construct
  source 1..75: mol_type = other DNA
aattaaaggtgtgcgttattcgtaccgaggcatgaagatgaaagaggaacatatcgttccgcttagtcgacaggc

SEQ ID NO: 805213 - DNA, 75 bp, synthetic construct
  source 1..75: mol_type = other DNA
ataaaaacgcggtgctcgctgcatctccagagcgtgtagattctctggtggcggacgggaagactactgcaacac

SEQ ID NO: 805214 - DNA, 75 bp, synthetic construct
  source 1..75: mol_type = other DNA
atgccgggtatctcgttgtcgtcaagcgcgtcagcgacgacctggctgtggtcgcctcaatggtggagaacaacc

SEQ ID NO: 805215 - DNA, 75 bp, synthetic construct
  source 1..75: mol_type = other DNA
cgaacattatctgctgttaccagagccggaagcacagtacaccactgacgagcagcagcgtcttgatgaactgca

SEQ ID NO: 805216 - DNA, 75 bp, synthetic construct
  source 1..75: mol_type = other DNA
tggtcagtctgtatgacggtgagctttgcgtccagcgtggtgtgcagaagaagagccagacggcggcatctgacg

SEQ ID NO: 805217 - DNA, 75 bp, synthetic construct
  source 1..75: mol_type = other DNA
tcagaatttaccctacaacattatattgcggagggtgttaagcaacgtcgatgtgattatgagtattaagtacat

SEQ ID NO: 805218 - DNA, 75 bp, synthetic construct
  source 1..75: mol_type = other DNA
gactcacagagttccactgacttaaatagacttaaagaattgtttttacaaaatgatatattattaagttatcag

SEQ ID NO: 805219 - DNA, 75 bp, synthetic construct
  source 1..75: mol_type = other DNA
gctgctcaaccaactggagccagaggtgcgaaaagatttgctgcgaggcgctgaggaaaaacagcgaatgattga

SEQ ID NO: 805220 - DNA, 75 bp, synthetic construct
  source 1..75: mol_type = other DNA
actattatagaaaaaaggaaaggtcctcgtttaattattaaagttgatgcgcctgaaagattgattgtggaaaga

SEQ ID NO: 805221 - DNA, 75 bp, synthetic construct
  source 1..75: mol_type = other DNA
ttatttctggtgagtggaaaggctataccggcaaagcaatcactgacgtggtgaacatcggtatcggcggttctg

SEQ ID NO: 805222 - DNA, 75 bp, synthetic construct
  source 1..75: mol_type = other DNA
ggaatatcgcgatcagggtaaagatccggcaacgcttgactacgtggtaccgttcaaagtgttcgaaggtaaccg

SEQ ID NO: 805223 - DNA, 75 bp, synthetic construct
  source 1..75: mol_type = other DNA
tgcgatttcatcgccccggctatcacccataacccgctctctgatcatcaccagaaactgctgtctaacttcttt

SEQ ID NO: 805224 - DNA, 75 bp, synthetic construct
  source 1..75: mol_type = other DNA
gcgattaacggaattgcgtctgtacgtaacggtgataactggctgaccataccgggcgcaaaccgcgaaagtgac

SEQ ID NO: 805225 - DNA, 75 bp, synthetic construct
  source 1..75: mol_type = other DNA
cccgaccaactccattctgctgcgcgaaatcaccccgttcagtctgggtgccttgattgcgctgtatgagcacaa

SEQ ID NO: 805226 - DNA, 75 bp, synthetic construct
  source 1..75: mol_type = other DNA
gctgaaaaaagtgaaccctgaaaccacgctgttcctggtggcgtctaaaaccttcaccactcaggaaaccatgac

SEQ ID NO: 805227 - DNA, 75 bp, synthetic construct
  source 1..75: mol_type = other DNA
gtggatttttccaaaaaccgcatcacagaagagacattggccacgctgcaggatctggcgaaagagaccgatctg

SEQ ID NO: 805228 - DNA, 75 bp, synthetic construct
  source 1..75: mol_type = other DNA
ccaccagggaaccaaaatggtgccgtgcgatttcatcgcgccggctatcacccataacccgctctctgatcacca

SEQ ID NO: 805229 - DNA, 75 bp, synthetic construct
  source 1..75: mol_type = other DNA
ggaatatcgcgatcagggtaaagatccggcaacgcttgactacgtggtgccgttcaaagtattcgaaggtaaccg

SEQ ID NO: 805230 - DNA, 75 bp, synthetic construct
  source 1..75: mol_type = other DNA
aatacgttgaccgtaacggcaatgccgtggattaccagactggcccaattatttggggtgagccgggcactaacg

SEQ ID NO: 805231 - DNA, 75 bp, synthetic construct
  source 1..75: mol_type = other DNA
tgcgatttcatcgccccggctatcacccataacccgctctctgatcaccaccagaaactgctgtctaacttcttc

SEQ ID NO: 805232 - DNA, 75 bp, synthetic construct
  source 1..75: mol_type = other DNA
ctaaaaccttcaccactcaggaaaccatgaccaacgcccatagcgcgcgtgactggttcctgaaagcggcaggtg

SEQ ID NO: 805233 - DNA, 75 bp, synthetic construct
  source 1..75: mol_type = other DNA
tctactggaaatatgctccgccagcgaagccagagtttggtgatgttttatctctgagcagtaataattgggacg

SEQ ID NO: 805234 - DNA, 75 bp, synthetic construct
  source 1..75: mol_type = other DNA
aatacctgatccagcacagcgcaggttccggaaagtcgaactctattgcctggaccgcccaccagctttctcgtc

SEQ ID NO: 805235 - DNA, 75 bp, synthetic construct
  source 1..75: mol_type = other DNA
ggcagtgcgcgaacacaaaccgggcctctatgtcagtaaccgtatgcaaggaaactaacatgaatattgtagcaa

SEQ ID NO: 805236 - DNA, 75 bp, synthetic construct
  source 1..75: mol_type = other DNA
aaacacatctacccaggaatgaagcaaattggttctgagctttcaggaaggatttacgatattgcatatgagact

SEQ ID NO: 805237 - DNA, 75 bp, synthetic construct
  source 1..75: mol_type = other DNA
ccggatagaaggtaccgttaccaatgtgctgctggcgctgcggcgaccggatctctgcggtgtacaaatccgcct

SEQ ID NO: 805238 - DNA, 75 bp, synthetic construct
  source 1..75: mol_type = other DNA
atatccacccgtgcagaccgcaaccgcgggttgtttcgggagcactatgtcactttaccgaggcgttgcggtttt

SEQ ID NO: 805239 - DNA, 75 bp, synthetic construct
  source 1..75: mol_type = other DNA
tcaacttacaaaaagacatcatcgttcagatgttggaaaaaggctggattgtcggcaaaagtgacggctacgacc

SEQ ID NO: 805240 - DNA, 75 bp, synthetic construct
  source 1..75: mol_type = other DNA
acacttgaactgaaatcggcgtttaaacaatcgcttgatgcggcaaaactacagtatatcaatgaccgccagcca

SEQ ID NO: 805241 - DNA, 75 bp, synthetic construct
  source 1..75: mol_type = other DNA
taaaaaaaggttggagtaataaaatgttagctgcgcgttggggatgttcagaagtatgggtgagtaaaattatta

SEQ ID NO: 805242 - DNA, 75 bp, synthetic construct
  source 1..75: mol_type = other DNA
cgtttgaagattttaaccttgatatggaaaataataatcttcaagataaacaagcttatcaatattttggatttc

SEQ ID NO: 805243 - DNA, 75 bp, synthetic construct
  source 1..75: mol_type = other DNA
ggcttcatacttgatgtgctgaagaactacaccaactacaaggtggcgtacaagctgctgcaaaagctggacgat

SEQ ID NO: 805244 - DNA, 75 bp, synthetic construct
  source 1..75: mol_type = other DNA
atgcaaagaaaagcggcgatgaaacttggcgagtaaactgcgaacgtagtgttaagcaagctcgtgaagcgaagg

SEQ ID NO: 805245 - DNA, 75 bp, synthetic construct
  source 1..75: mol_type = other DNA
ctattttgaccccaaacgcggtcctgaagcgctaacggcgtattgtaaacctgcggtagatcgttttactcaacg

SEQ ID NO: 805246 - DNA, 75 bp, synthetic construct
  source 1..75: mol_type = other DNA
attcgccatcaccgaattgagttcatgatggctgggtttatgatttatttctgggcattctctcttattgccggt

SEQ ID NO: 805247 - DNA, 75 bp, synthetic construct
  source 1..75: mol_type = other DNA
tgtctggtattacgttcttgcacgctatgatgatcgtctggttttatctaaatcgtacaggcacggtagtacgaa

SEQ ID NO: 805248 - DNA, 75 bp, synthetic construct
  source 1..75: mol_type = other DNA
atggggtgttggtattgttttctttttaggcataaaacaaaaaaacaatatacagaatttgagttttatcagact

SEQ ID NO: 805249 - DNA, 75 bp, synthetic construct
  source 1..75: mol_type = other DNA
tggcgcgattctccacggcgagatccctctacgctggcggttactggcgatccttggaaatcccccggcgctgaa

SEQ ID NO: 805250 - DNA, 75 bp, synthetic construct
  source 1..75: mol_type = other DNA
tacggtgactcatgatgttgaatatgtgttattccctaatccattggtggcgctgggattgcgtgcagggttaat

SEQ ID NO: 805251 - DNA, 75 bp, synthetic construct
  source 1..75: mol_type = other DNA
ctatgagaatgtatggtattacattattgcgcgttatgatgatcgtctggtgttatcgaaatcatacaggagtgg

SEQ ID NO: 805252 - DNA, 75 bp, synthetic construct
  source 1..75: mol_type = other DNA
gaaggtggtttataacagtgccggggtcattaccggcatcagcagggtggcgtcagttctgtggcctgtgaacca

SEQ ID NO: 805253 - DNA, 75 bp, synthetic construct
  source 1..75: mol_type = other DNA
acacaccggaaaatccggatgtaccgggcgcaatgtacctgaaatcagaggatggtcaggactggtatgagtgtc

SEQ ID NO: 805254 - DNA, 75 bp, synthetic construct
  source 1..75: mol_type = other DNA
cagcttgcgaaaaaacttcatggtatggctcaaaaaggacaacgaatgccttcctgtatcaatataattggagga

SEQ ID NO: 805255 - DNA, 75 bp, synthetic construct
  source 1..75: mol_type = other DNA
ttttctggcaatattgctgctttttgttccgcctgttctggagttttcgttaattcatcagcacattgcgtcaga

SEQ ID NO: 805256 - DNA, 75 bp, synthetic construct
  source 1..75: mol_type = other DNA
aatcatacaggagtgagagtacaaagttcgttatacttaatagtgaacatattgatgactttaagattaatgtgg

SEQ ID NO: 805257 - DNA, 75 bp, synthetic construct
  source 1..75: mol_type = other DNA
atttccggcaggtatggagagattaagccgtatgaagaaccgccggaagctttaacacagtcacgtgaacggaaa

SEQ ID NO: 805258 - DNA, 75 bp, synthetic construct
  source 1..75: mol_type = other DNA
gatacacagtatcttgttaacaccaacacatggctgcaggagggatattatcggtacccgatttcaggatacagc

SEQ ID NO: 805259 - DNA, 75 bp, synthetic construct
  source 1..75: mol_type = other DNA
cgatggccgacctgtttcgggatgacccggaactcgcggctgccgtcctatccgcagtcgagtcggatggcgacc

SEQ ID NO: 805260 - DNA, 75 bp, synthetic construct
  source 1..75: mol_type = other DNA
aaaaggcgttacggggctcgttaaagtcaccatcaatcaaaatcagttcgatgcgctggttgattttgcctacaa

SEQ ID NO: 805261 - DNA, 75 bp, synthetic construct
  source 1..75: mol_type = other DNA
ttgatgcagccaaagctaccaccgatggcttcgagtttacggctcagctgaagggtggcgatactcctggtgact

SEQ ID NO: 805262 - DNA, 75 bp, synthetic construct
  source 1..75: mol_type = other DNA
gtacttctacattccgggtcacttcaacgtgaactcggtactgttcgagacggcggtctgtatgaccatctacat

SEQ ID NO: 805263 - DNA, 75 bp, synthetic construct
  source 1..75: mol_type = other DNA
caaggtgatgttcttcatcattgcacttggcgcgctgttgccgaccatgcaccagtcttcaatggggtcgctgat

SEQ ID NO: 805264 - DNA, 75 bp, synthetic construct
  source 1..75: mol_type = other DNA
aaagtgatacaggtcgaaaggttcgaaaaatatacactctggttaatgacgggaaaaacagcccctgcagcgggt

SEQ ID NO: 805265 - DNA, 75 bp, synthetic construct
  source 1..75: mol_type = other DNA
aactctctcggcgtcatttcaggccgtcgcgtcgattccaggccaggttgccgatcaggcccctctccccagtct

SEQ ID NO: 805266 - DNA, 75 bp, synthetic construct
  source 1..75: mol_type = other DNA
tggtgaaaacagtcatgatatgtgggaagagttcgaatggggagacttccttctatccagagaggaaagtctttt

SEQ ID NO: 805267 - DNA, 75 bp, synthetic construct
  source 1..75: mol_type = other DNA
ccagccagcacaatgatgcgccgaaaaccacaccttcaccgttcgatgaaaaccgcgacgggctggtgattggtg

SEQ ID NO: 805268 - DNA, 75 bp, synthetic construct
  source 1..75: mol_type = other DNA
gtgcaattaggtacagttgcaccaggtggtgaaggtgatgctaaagatattattttcaaagcgactaatgtctca

SEQ ID NO: 805269 - DNA, 75 bp, synthetic construct
  source 1..75: mol_type = other DNA
cctttgatgcagaaaaagccacttctaatggttttgaattcaaggcccagttgcagggtaaagataaagtcggtg

SEQ ID NO: 805270 - DNA, 75 bp, synthetic construct
  source 1..75: mol_type = other DNA
aaggaacggccagtcagggacagaaaatcccggaagaattcaaaaagttttttggtgatgatttaccggatcaac

SEQ ID NO: 805271 - DNA, 75 bp, synthetic construct
  source 1..75: mol_type = other DNA
tcgccagaaagcttggcagagcagtaaaacacactcccgaagcaatgccggaacctgtaaatacgctggcttcga

SEQ ID NO: 805272 - DNA, 75 bp, synthetic construct
  source 1..75: mol_type = other DNA
agggcaagaagcgataacgtttgaagtggtcgccagagactggcacgccagcaatcagaagtggtctgcatcaca

SEQ ID NO: 805273 - DNA, 75 bp, synthetic construct
  source 1..75: mol_type = other DNA
tggtttcagagctatggcatgtagttcattgatggagtcacgattgtggtcgaaggatgctgtagagaggcaaat

SEQ ID NO: 805274 - DNA, 75 bp, synthetic construct
  source 1..75: mol_type = other DNA
gtaagcggaacattgcggaactgaagactcgggatctgcttgtacccatcaaagcagtcgagtcatccggacgcc

SEQ ID NO: 805275 - DNA, 75 bp, synthetic construct
  source 1..75: mol_type = other DNA
tattagtcttcattcgttcgagtgaactgcgttttgccagatggaaagaaatcgattttaaaaatgcgctttgga

SEQ ID NO: 805276 - DNA, 75 bp, synthetic construct
  source 1..75: mol_type = other DNA
agctattgcggtagctaaaagagttcacaggccagctttgccattcgaacgattctcagaacttttagaacgaat

SEQ ID NO: 805277 - DNA, 75 bp, synthetic construct
  source 1..75: mol_type = other DNA
acaaaaaatggtcagcctcacatagtgagaagatactgaaaagcctcgaaactcatgtgtttccctttattggct

SEQ ID NO: 805278 - DNA, 75 bp, synthetic construct
  source 1..75: mol_type = other DNA
tcgaagtcgctgctcgtttgcagcagcgtactaccgcgattatgcgctttgctgtgcagagtgggttaatcgact

SEQ ID NO: 805279 - DNA, 75 bp, synthetic construct
  source 1..75: mol_type = other DNA
cgatcactattccggaagaccattaacccgacttgctgtcgaacttaccttgttagtttttatccgttcaagcga

SEQ ID NO: 805280 - DNA, 75 bp, synthetic construct
  source 1..75: mol_type = other DNA
ctggcgcttggtaaataccccgaaatatcgcttgcggatgctagggcgcgccgggatgaagccaggaggttgtta

SEQ ID NO: 805281 - DNA, 75 bp, synthetic construct
  source 1..75: mol_type = other DNA
actacaaccccgctcaagagattgctggtgcggttgctacggcgaaaagacagcatcgtgctgctctggaactta

SEQ ID NO: 805282 - DNA, 75 bp, synthetic construct
  source 1..75: mol_type = other DNA
atgaatgggaaccgtgacctgatcttcgtaggagatcacgatccccgtaaacccatgagtgagaacacggtgaac

SEQ ID NO: 805283 - DNA, 75 bp, synthetic construct
  source 1..75: mol_type = other DNA
tagtgctcgtgtattgaaaagcctggaagataatctattcgctgctatcggtaagcggaacattgctgagttgaa

SEQ ID NO: 805284 - DNA, 75 bp, synthetic construct
  source 1..75: mol_type = other DNA
gcgcaccacggccatcatgcgttatgcagtgcaaagcgggttaattgattacaatccggcgcaagagatggcggg

SEQ ID NO: 805285 - DNA, 75 bp, synthetic construct
  source 1..75: mol_type = other DNA
tgaccacttacctctccccgcgtgactaccaccgcgtacacatgccgtgcaacggtattctgcgtgaaatgatct

SEQ ID NO: 805286 - DNA, 75 bp, synthetic construct
  source 1..75: mol_type = other DNA
tatcagccagttgggtaaaatcgaagaagataaaatcctgcaagccaaaggccacaactacagcctcgaagccct

SEQ ID NO: 805287 - DNA, 75 bp, synthetic construct
  source 1..75: mol_type = other DNA
gccagacgctgaaccggccccgcttcctgctgaagagatcgaagcagaacacgacgccagcccattggttgacga

SEQ ID NO: 805288 - DNA, 75 bp, synthetic construct
  source 1..75: mol_type = other DNA
aaaaatcgttgatttactgacgccggaaaaggcaagggcgcataagcacgaggaaatcaacgcctggcgtaatgc

SEQ ID NO: 805289 - DNA, 75 bp, synthetic construct
  source 1..75: mol_type = other DNA
acagcgtgatagcgcaattactgaataataccccctggcgacgcacattacgccattgggatcgccatgcggggg

SEQ ID NO: 805290 - DNA, 75 bp, synthetic construct
  source 1..75: mol_type = other DNA
ggctcaggccatgaaccactgcatgcaggttttgtcggtatgggaatgttaaccggtgcatgtcctggtgaaatc

SEQ ID NO: 805291 - DNA, 75 bp, synthetic construct
  source 1..75: mol_type = other DNA
cttgagctttatatcttcccctatatcggttcgtccgacattcgtcagctcaaaaccagccacctattagccccg

SEQ ID NO: 805292 - DNA, 75 bp, synthetic construct
  source 1..75: mol_type = other DNA
cgtggcatgaaaatgaaagaggagcatattgttcctctcagtcggaaggctatggttttattagagcagctcaag

SEQ ID NO: 805293 - DNA, 75 bp, synthetic construct
  source 1..75: mol_type = other DNA
ttttctggatgcaaacagggaggagtgtatcagtccgtttgaatatgcaaaagttaacaatccactgaaaaggtg

SEQ ID NO: 805294 - DNA, 75 bp, synthetic construct
  source 1..75: mol_type = other DNA
gttcggctaagcctgaagcaaaagcctataagcttactgatggtgaaggcatggttttgctggttcaccctaacg

SEQ ID NO: 805295 - DNA, 75 bp, synthetic construct
  source 1..75: mol_type = other DNA
tggtttcaggacgatggcgtgtagttctttgattgaatcgggattgtggtcgagggatgcggtggagcgacagat

SEQ ID NO: 805296 - DNA, 75 bp, synthetic construct
  source 1..75: mol_type = other DNA
gttcggcaaagcctgaagcaaaagcctacaaactgactgacggtgatggcatggttttgctggttcaccccaacg

SEQ ID NO: 805297 - DNA, 75 bp, synthetic construct
  source 1..75: mol_type = other DNA
atccgtggatgaactaacaaaattaacgacagaaatcgccagctattgcgctgatgaatttaagaaactgaacga

SEQ ID NO: 805298 - DNA, 75 bp, synthetic construct
  source 1..75: mol_type = other DNA
acaaaattaacgacagaaatcgccagctattgcgctgatgaatttaagaaactgaacgacaaaaggagctggtaa

SEQ ID NO: 805299 - DNA, 75 bp, synthetic construct
  source 1..75: mol_type = other DNA
aaacgcgataaaaacactggggatatggtggaatcaactatagccatttatgcggataaattaaatctcctgtct

SEQ ID NO: 805300 - DNA, 75 bp, synthetic construct
  source 1..75: mol_type = other DNA
gccgactgagtaccattcttgaggacaatagtttgcctctttacctcagccagttattgctgaaattacaacagc

SEQ ID NO: 805301 - DNA, 75 bp, synthetic construct
  source 1..75: mol_type = other DNA
taaaaacaactaatcagatgcatgcttttttgctggaatttggtctcagcgttccacgaggttctgcagttatta

SEQ ID NO: 805302 - DNA, 75 bp, synthetic construct
  source 1..75: mol_type = other DNA
gaaacggaagcccgttaaaaccgcatgaaattgcaccatctgccagactgaccaggtctgaacgattgcaaatca

SEQ ID NO: 805303 - DNA, 75 bp, synthetic construct
  source 1..75: mol_type = other DNA
ctgacaaaattaacgacagaactcgccagttattgcgctgatgtatccaggaaacttaacgataaaaggagctga

SEQ ID NO: 805304 - DNA, 75 bp, synthetic construct
  source 1..75: mol_type = other DNA
ctgacgaaattaacgacagaaattgccagctattgcgctgatgtatccaggaaacttaacgataaaaggagctgg

SEQ ID NO: 805305 - DNA, 75 bp, synthetic construct
  source 1..75: mol_type = other DNA
atgtcctgttctcattcagttgtattactgaataacgccttaaaaatcgccgttatgggaaatggtgatttatct

SEQ ID NO: 805306 - DNA, 75 bp, synthetic construct
  source 1..75: mol_type = other DNA
tcgcagatcatctggaatgacgcccgctcattgccattaccagaatctgaactggtcaacaaagcgacggcattg

SEQ ID NO: 805307 - DNA, 75 bp, synthetic construct
  source 1..75: mol_type = other DNA
atcactttacgactacccgccgcaagaacagtggaacgctttccagaaactggcacaaatgctgatgcatacgcc

SEQ ID NO: 805308 - DNA, 75 bp, synthetic construct
  source 1..75: mol_type = other DNA
gcgtattagcggtacgggaatgtgtaatattcgcacttccggtacctggagcgcgaaaaccaattcacctttttt

SEQ ID NO: 805309 - DNA, 75 bp, synthetic construct
  source 1..75: mol_type = other DNA
acgctgctggcgaagctgcaagagggacaaaacattgcgctggtttctgatgccggaacgccgctgattaacgac

SEQ ID NO: 805310 - DNA, 75 bp, synthetic construct
  source 1..75: mol_type = other DNA
tcagcaagcgaggcaacaagaagatacgaaccttgctggttcagtgcgccagagtatttatacaaaaactggaac

SEQ ID NO: 805311 - DNA, 75 bp, synthetic construct
  source 1..75: mol_type = other DNA
gcatcgtgttcgagaatccttggttcaggataaggtaaaaacaactaatcagatgcatgcttttttgctggaatt

SEQ ID NO: 805312 - DNA, 75 bp, synthetic construct
  source 1..75: mol_type = other DNA
cgacattgctgggaattagtaagcgaggtaacaaaaagatccgaactttgttggttcaatgtgccagggtattca

SEQ ID NO: 805313 - DNA, 75 bp, synthetic construct
  source 1..75: mol_type = other DNA
cgctgcgggcgaaaaagaaagtcattatctcgaccggctcaaaagcgttgcaggatcagctctacagccgcgatt

SEQ ID NO: 805314 - DNA, 75 bp, synthetic construct
  source 1..75: mol_type = other DNA
cctgagtgtgagcgaggcgatgatgtggatggagttcgacagggtatccccgctgggtgatgagcgcggggatat

SEQ ID NO: 805315 - DNA, 75 bp, synthetic construct
  source 1..75: mol_type = other DNA
agtaactttgtcgtgacttgcgctctggcaaacaagctggccagaatagcctgggcactaacaacacggcagcaa

SEQ ID NO: 805316 - DNA, 75 bp, synthetic construct
  source 1..75: mol_type = other DNA
ggcgaaatggtgctgattgtcgaaggccataaagcgcaggaagatgacctgcctgctgatgccctgcgcacgctg

SEQ ID NO: 805317 - DNA, 75 bp, synthetic construct
  source 1..75: mol_type = other DNA
gccataaagcacaggaagaagacttacccgccgatgcactgcgcacactggcgctgttgcaggcagaactgccgc

SEQ ID NO: 805318 - DNA, 75 bp, synthetic construct
  source 1..75: mol_type = other DNA
gccgctacccgggccgtgtgctgctatcactgcgttaagcgccgcgggtttaccctctgaccgtttctgttacga

SEQ ID NO: 805319 - DNA, 75 bp, synthetic construct
  source 1..75: mol_type = other DNA
gagctcgaagtgttggcacgaggcgctactgttagttatgagggacaaaattttgcattcacggatagccatgac

SEQ ID NO: 805320 - DNA, 75 bp, synthetic construct
  source 1..75: mol_type = other DNA
gatggcgacgaaagaggagccgcgcgaaaccgttttcaggcaaaacaccttaaccggggcggtgctgcgggatat

SEQ ID NO: 805321 - DNA, 75 bp, synthetic construct
  source 1..75: mol_type = other DNA
acactgctggcgaaactgcaagaggggcaaaacattgcgctggtgtccgatgccggaacgccgctgattaacgac

SEQ ID NO: 805322 - DNA, 75 bp, synthetic construct
  source 1..75: mol_type = other DNA
aaggcgttgtggatctggagtcatgcggatatcaggtacgcaaaaatgaaaatcgcgccagtcgtgtggagtggg

SEQ ID NO: 805323 - DNA, 75 bp, synthetic construct
  source 1..75: mol_type = other DNA
acttatcacgggccggggcaacaggtgatgtatgtgttgcttaacctgaaacgccgtaaactcggtgtgcgtgaa

SEQ ID NO: 805324 - DNA, 75 bp, synthetic construct
  source 1..75: mol_type = other DNA
aaaaataaccactgcggatgaattaataaaattcatggctgaacaatctacatgttgcgcctgtgaactgaaaaa

SEQ ID NO: 805325 - DNA, 75 bp, synthetic construct
  source 1..75: mol_type = other DNA
cacgatgcgcgcagtaaaaatgtccattcggtgcgaatcgatcaaacttatcgcggcattgttctgaaacctgaa

SEQ ID NO: 805326 - DNA, 75 bp, synthetic construct
  source 1..75: mol_type = other DNA
aactcaccctttcgctgccgtggcagacgctggtctggctgtcgaatgaggatgccacggcgaccacggtgaatg

SEQ ID NO: 805327 - DNA, 75 bp, synthetic construct
  source 1..75: mol_type = other DNA
ccgaagcgacgactaataatattgctccacgtttactggaaaatattttagcgctactaaacaatccggacttcg

SEQ ID NO: 805328 - DNA, 75 bp, synthetic construct
  source 1..75: mol_type = other DNA
ggtctggcattaaacgtcaatatggatctttcaccatttttacgtattaatccttgtgggtatgccggaatggaa

SEQ ID NO: 805329 - DNA, 75 bp, synthetic construct
  source 1..75: mol_type = other DNA
ccggctgcggccattcagcagggcaaagtagaaagttcgaaagactttcttatcgcgaccctgaaaccacgctaa

SEQ ID NO: 805330 - DNA, 75 bp, synthetic construct
  source 1..75: mol_type = other DNA
atgaaggttgaagcgttagctaacttcccgattgaacgcgatctggtggtcgatatgacccacttcatcgaaagt

SEQ ID NO: 805331 - DNA, 75 bp, synthetic construct
  source 1..75: mol_type = other DNA
catgatggttaacaacgtgccgaaactggcatgtaaaaccttcttgcgtgactacaccgacggtatgaaggttga

SEQ ID NO: 805332 - DNA, 75 bp, synthetic construct
  source 1..75: mol_type = other DNA
atgtcctgttctcgttcagttgttttactgaacaatgccttaaaaatcgccgttatgaaaaatggcgatttgtct

SEQ ID NO: 805333 - DNA, 75 bp, synthetic construct
  source 1..75: mol_type = other DNA
agttgcatccgctacgccggtgaactgatagatgcccacctgcgtgggcgctataccctgccgctgacggaagta

SEQ ID NO: 805334 - DNA, 75 bp, synthetic construct
  source 1..75: mol_type = other DNA
ggtgaaggatgaccacaaagaagcgctgcggcaactcagggagttacgtgataacaggctcacgctggggctgcc

SEQ ID NO: 805335 - DNA, 75 bp, synthetic construct
  source 1..75: mol_type = other DNA
aaaaacgcgacatcactgaatctgttatcgcgatttatcagagcgaattaaacctcctgtctgatgtgatcaatt

SEQ ID NO: 805336 - DNA, 75 bp, synthetic construct
  source 1..75: mol_type = other DNA
cagtttggctgtagcgacgatgcgtttattcatcgtgccgacatgttcctcaaagagctgtggatgccagaaatt

SEQ ID NO: 805337 - DNA, 75 bp, synthetic construct
  source 1..75: mol_type = other DNA
atacggaagtgttcctgctgccgttccatctgtttagcgaaccgacgattgcccggagtttgctgcgctatcgct

SEQ ID NO: 805338 - DNA, 75 bp, synthetic construct
  source 1..75: mol_type = other DNA
gtacacaacagagttatgaccaacttcttgcagcatcgacagaaaactggcagcaatggtggcagaaacgtcgta

SEQ ID NO: 805339 - DNA, 75 bp, synthetic construct
  source 1..75: mol_type = other DNA
gcgagcgcgatgaacgcatcgcgaaggtgcaaggcaatcataacccgtatgtgcaacgcgcttgccaggcgcgaa

SEQ ID NO: 805340 - DNA, 75 bp, synthetic construct
  source 1..75: mol_type = other DNA
gtgagcgtgacgaacgcatcgcgaaggtgcaaggcaatcacaacccgtatgtgcaacgcgcttgccaggcgcgaa

SEQ ID NO: 805341 - DNA, 75 bp, synthetic construct
  source 1..75: mol_type = other DNA
acacaagtccccgaatccggggatttgttatttcagccaaactgctttcagttgttgcgtgtggctacgctttcc

SEQ ID NO: 805342 - DNA, 75 bp, synthetic construct
  source 1..75: mol_type = other DNA
ggccgatatcgcctgggcggttattcaatactggcagaccacgggggatgaaagtttcattgctcatgaaggcat

SEQ ID NO: 805343 - DNA, 75 bp, synthetic construct
  source 1..75: mol_type = other DNA
gaatctgttttctgtttgggtgattttattttgcccttcaatgggaccgctaccacacatcaggaggatgaatga

SEQ ID NO: 805344 - DNA, 75 bp, synthetic construct
  source 1..75: mol_type = other DNA
ctgacgaaattaacgacagaaattgccagctattgcgctgatgaatttaaaaaacttaacgacaaaaggaactgg

SEQ ID NO: 805345 - DNA, 75 bp, synthetic construct
  source 1..75: mol_type = other DNA
cgaagaagagacgccggaatttgccgccattaacattcgcaccgggctgcggcaaaaagtggcctcggcgcaggc

SEQ ID NO: 805346 - DNA, 75 bp, synthetic construct
  source 1..75: mol_type = other DNA
gtgtttggtcagcatctgatgcaggggatctacaccacccaggatggacgcagtgatgtggccatcagctgttgc

SEQ ID NO: 805347 - DNA, 75 bp, synthetic construct
  source 1..75: mol_type = other DNA
acgctgacgctgcaaaaacgggtgtggatcgactggcgggacgacagacacgtcgctttagacgagtggggcagt

SEQ ID NO: 805348 - DNA, 75 bp, synthetic construct
  source 1..75: mol_type = other DNA
acctatctggaacttgagcgattgataagcgatgccaaaccatgtagccgtcacatgatcggcatgtccatcaat

SEQ ID NO: 805349 - DNA, 75 bp, synthetic construct
  source 1..75: mol_type = other DNA
cggcttcctgatccgcatcattgagtggtggcagaccggtgaaacgccggggacgttccgtctggatattggcgt

SEQ ID NO: 805350 - DNA, 75 bp, synthetic construct
  source 1..75: mol_type = other DNA
cgtcgccgcttgagcgcagactggcgcagacctgcagcgggatttccgatctgcaggtatcgctgcgtgatttgt

SEQ ID NO: 805351 - DNA, 75 bp, synthetic construct
  source 1..75: mol_type = other DNA
gttgaccgcccacacttagtcaaactggtcgaaaacttgtttagccgcgaaagttttgcccgcaccgaaccacca

SEQ ID NO: 805352 - DNA, 75 bp, synthetic construct
  source 1..75: mol_type = other DNA
aattgaggcgctcgctgatggcattatggacgcggcgctggcgtcggtacgcgaacaggcgcgtccggcagcgca

SEQ ID NO: 805353 - DNA, 75 bp, synthetic construct
  source 1..75: mol_type = other DNA
gccgctcggctatcccatcaacgtgacggagtggtgggaaaacagtgacccgcccggcaccttccggcttgatat

SEQ ID NO: 805354 - DNA, 75 bp, synthetic construct
  source 1..75: mol_type = other DNA
gttcgcggcgttttacgattattgtattgaagttactcgcaggaattttgtgaagatttttgaggagagtaaatc

SEQ ID NO: 805355 - DNA, 75 bp, synthetic construct
  source 1..75: mol_type = other DNA
ttaaagggataaataattacggggataaggttactgttactgtgaagccggaaggtgacgggcaagcgtcgctgt

SEQ ID NO: 805356 - DNA, 75 bp, synthetic construct
  source 1..75: mol_type = other DNA
taatgaagaaaagtcggctcaggaaagaatgcccggggctgacagtccacaggaacttatgaaaagggcaaagga

SEQ ID NO: 805357 - DNA, 75 bp, synthetic construct
  source 1..75: mol_type = other DNA
ttattgcggatgcaaaaccagtaagtcgccatctgacagggctggcgatcagcctgagtgtgaacggaaatattt

SEQ ID NO: 805358 - DNA, 75 bp, synthetic construct
  source 1..75: mol_type = other DNA
atgacccaagactatgaactgattgtgaaagggatccgcaattttgagaataaagttgcggtaactgtagcatta

SEQ ID NO: 805359 - DNA, 75 bp, synthetic construct
  source 1..75: mol_type = other DNA
ccataattttagaggcgcagaatgtgtggataacttacaaagtaaagctaccgggaaaaattactggttctctga

SEQ ID NO: 805360 - DNA, 75 bp, synthetic construct
  source 1..75: mol_type = other DNA
atgagtgaccggctgttacccgttggctcgtcgctgctggaggtcgctgccgctgctgcgctctctgagattcag

SEQ ID NO: 805361 - DNA, 75 bp, synthetic construct
  source 1..75: mol_type = other DNA
atgcgaatatttgtctacggcagtttacgtcacaaacaaggcaacagccactggatgactaatgcccagttgctg

SEQ ID NO: 805362 - DNA, 75 bp, synthetic construct
  source 1..75: mol_type = other DNA
tggcgtgcttgagcagggtattaccgaggaaatgtatcaggagctggagcgtctcgttgctgatgcaaaacctgc

SEQ ID NO: 805363 - DNA, 75 bp, synthetic construct
  source 1..75: mol_type = other DNA
gtgcgggatgctatcacggtgacgccctgacggtttatccctacaccccggaggccattattgtcggaggggatt

SEQ ID NO: 805364 - DNA, 75 bp, synthetic construct
  source 1..75: mol_type = other DNA
ccactgcaagggcatgtgaggcacatccgctgctcctcacactggaagacaccaccaccattaacttcagccaca

SEQ ID NO: 805365 - DNA, 75 bp, synthetic construct
  source 1..75: mol_type = other DNA
tggcccacaaacaagtataattattctaattacacaggtagcatatttagcccacatcctgtgtgggcttctgtt

SEQ ID NO: 805366 - DNA, 75 bp, synthetic construct
  source 1..75: mol_type = other DNA
ccctctcccactctgtatggggatttttgtgcactggctcatatttttgttttgtcagtatgctctaaaatctta

SEQ ID NO: 805367 - DNA, 75 bp, synthetic construct
  source 1..75: mol_type = other DNA
cagccagcagtttcatgcgttgtgccgaagccgtcggaacacgcattacagacattccggtagacctcaacacgc

SEQ ID NO: 805368 - DNA, 75 bp, synthetic construct
  source 1..75: mol_type = other DNA
accccggaggcaattattgtcggaggggattatttcccggcctcggtcattcatttaattgataacctgagagta

SEQ ID NO: 805369 - DNA, 75 bp, synthetic construct
  source 1..75: mol_type = other DNA
cgcgtgccggtaccgctgcgcaccctgtggaactggcgcacctgcccggtaaacctgctgccgtatctggcgtgg

SEQ ID NO: 805370 - DNA, 75 bp, synthetic construct
  source 1..75: mol_type = other DNA
atgagtgattcgcgactgctgccgactggctcatcaccgcttgaagtcgccgccgcaaaagcctgtgcggaaatt

SEQ ID NO: 805371 - DNA, 75 bp, synthetic construct
  source 1..75: mol_type = other DNA
caacttcactggagcgccgactggcgcaaacgtgcagcgggatttctgatttgcaggtgccgctgcgtgacttgt

SEQ ID NO: 805372 - DNA, 75 bp, synthetic construct
  source 1..75: mol_type = other DNA
caacgccactggagcgccgactggcacaaacctgcagcgggatttctgatttgcaggtgccgctacgtgacttgt

SEQ ID NO: 805373 - DNA, 75 bp, synthetic construct
  source 1..75: mol_type = other DNA
ctggggaaaatgatcaaccactaccaggttaaccctaaacagatcgcgcttgaactcacagagcgcgagtttgcc

SEQ ID NO: 805374 - DNA, 75 bp, synthetic construct
  source 1..75: mol_type = other DNA
ataaagtttctgcaaaggaaatcagtgaaaactttataaaagcatatcctgacttgctggaaggtgctgttataa

SEQ ID NO: 805375 - DNA, 75 bp, synthetic construct
  source 1..75: mol_type = other DNA
gtgctggtgaccgaagagggcgaatgctggtttgattcgccgatcatcgctgaatatattgaattaatgaatgtc

SEQ ID NO: 805376 - DNA, 75 bp, synthetic construct
  source 1..75: mol_type = other DNA
cgctgggcgatgagcgcggggatatccgtaatgcgcagatcgtgaaagcggttttcggggcgcaggggatgaatg

SEQ ID NO: 805377 - DNA, 75 bp, synthetic construct
  source 1..75: mol_type = other DNA
tttatggaaagctttaatcagaaagttttcgaagaggctgtagggcggaaggttgaatttgttcaggataatcat

SEQ ID NO: 805378 - DNA, 75 bp, synthetic construct
  source 1..75: mol_type = other DNA
cagacgtattaattttcgaacctaaagtttttggtgacgagcgtggtttctttatggaaagctttaatcagaaag

SEQ ID NO: 805379 - DNA, 75 bp, synthetic construct
  source 1..75: mol_type = other DNA
actatgacactcatattcaggctgagaaagatcgcagtccgttgatgtcagatttaattgaccagttgaaattga

SEQ ID NO: 805380 - DNA, 75 bp, synthetic construct
  source 1..75: mol_type = other DNA
gtgatcctgctgcgctcctggtctaatcaaacagtcgatggtgatatcagcacctgcgtcagcgtggcggaagat

SEQ ID NO: 805381 - DNA, 75 bp, synthetic construct
  source 1..75: mol_type = other DNA
tggtgattatcgacaagttgccgtttacctcgccggatgatccactgttaaaagcgcgcatggaagattgtcgtt

SEQ ID NO: 805382 - DNA, 75 bp, synthetic construct
  source 1..75: mol_type = other DNA
actggtacgaatgcacttcgcgccattttactctggcgctcacgccgctcagcgtggcggataaattcaaagagt

SEQ ID NO: 805383 - DNA, 75 bp, synthetic construct
  source 1..75: mol_type = other DNA
ctgctggggcgaggatgaggataagccggagccagatcctttggccgctctggaggatgctctgttatttgcttc

SEQ ID NO: 805384 - DNA, 75 bp, synthetic construct
  source 1..75: mol_type = other DNA
gtgaacgacgatctgcatcatttcacctcgcggcttggcattgaacaggcagagtcgttgctgttacccagcccc

SEQ ID NO: 805385 - DNA, 75 bp, synthetic construct
  source 1..75: mol_type = other DNA
agtgcagctaccggatgcggtgattactcttaaacagggcgtagggcgactgattcgcgacgccgacgatcgcgg

SEQ ID NO: 805386 - DNA, 75 bp, synthetic construct
  source 1..75: mol_type = other DNA
tgcggatttccattacaaatgcacagacttctatgatcctaccgatgaaggggggataatctggaatgacaaaga

SEQ ID NO: 805387 - DNA, 75 bp, synthetic construct
  source 1..75: mol_type = other DNA
gtgatagtcttaataggtgagcatatcgaaaataatggaatcatttacgatatcctgcccttaccggagatgaat

SEQ ID NO: 805388 - DNA, 75 bp, synthetic construct
  source 1..75: mol_type = other DNA
cgggcctttctgagccattgacgctactgattataagaagcgtctttgaagatatgggcgactggctgcgtcagc

SEQ ID NO: 805389 - DNA, 75 bp, synthetic construct
  source 1..75: mol_type = other DNA
atttatcttgatgattttggtacggggtattcaagtttaagttatttacaggatctggatgtcgacattctgaag

SEQ ID NO: 805390 - DNA, 75 bp, synthetic construct
  source 1..75: mol_type = other DNA
aagcgtcatttattgaggagttgaatacctattcttcccgtgtcgctattcgggccaataaagtggcgatgcaag

SEQ ID NO: 805391 - DNA, 75 bp, synthetic construct
  source 1..75: mol_type = other DNA
gcccttcccggagatgaatatttcgatcattacctgggcctccacgcagctaatgcaaaaaggctggcatcgcca

SEQ ID NO: 805392 - DNA, 75 bp, synthetic construct
  source 1..75: mol_type = other DNA
ggcgcgctggccgcagacagacggtagttggttgtcaccagatagttttattccgctggcacagcaaacgggcct

SEQ ID NO: 805393 - DNA, 75 bp, synthetic construct
  source 1..75: mol_type = other DNA
gagcgtgagccggatacattcgaaagtccagatgattgtaaaaagtgtcgtagaaaattaaataaggggggtaaa

SEQ ID NO: 805394 - DNA, 75 bp, synthetic construct
  source 1..75: mol_type = other DNA
ctgatgtgctgatttttgaaccaaaagtttttggggatgaacgtggcttctttatggaaagctttaatcagaaag

SEQ ID NO: 805395 - DNA, 75 bp, synthetic construct
  source 1..75: mol_type = other DNA
agagaaagcgtccacgcctgcgcaacgtcagcaggcgtctctggaagagcaaaacaacgacgcgttaagcccggc

SEQ ID NO: 805396 - DNA, 75 bp, synthetic construct
  source 1..75: mol_type = other DNA
aaactgaaaatggtagcggagggaatcgaaaccagtaaacaagaagagtggctacgccagcatggcgtgcactac

SEQ ID NO: 805397 - DNA, 75 bp, synthetic construct
  source 1..75: mol_type = other DNA
atcatcacctgggcttcaacgaaaatgttgcagaaaggctggcatcggcaagtctttatttggttaccgctcggg

SEQ ID NO: 805398 - DNA, 75 bp, synthetic construct
  source 1..75: mol_type = other DNA
gcgaccgtaaattatgacgggaaaaaattcacgtatccggtcgctgatgagtggccgggattctcaacagtaatg

SEQ ID NO: 805399 - DNA, 75 bp, synthetic construct
  source 1..75: mol_type = other DNA
cggcaagggaggccggtcatgccgtccgtgagatggagcggtggatggtgccgaacaaactccgggaggcggcgt

SEQ ID NO: 805400 - DNA, 75 bp, synthetic construct
  source 1..75: mol_type = other DNA
gcatcaatgactgaaaacggtcatcgtcgggatatgcaccctgccgaacagattgccggatttcgtgcaatggcg

SEQ ID NO: 805401 - DNA, 75 bp, synthetic construct
  source 1..75: mol_type = other DNA
atcggcaaaagaacaggaaaacgccctgtctgccctgctggcgcagacggaggaagtgagcgtgccgctggcctc

SEQ ID NO: 805402 - DNA, 75 bp, synthetic construct
  source 1..75: mol_type = other DNA
tattccgcaggagctggcgaccgctgcatcaatgactgaaaacggtcatcgtcgggatatgcaccctgccgaaca

SEQ ID NO: 805403 - DNA, 75 bp, synthetic construct
  source 1..75: mol_type = other DNA
aattccgcaggagctggcgaccgcggcatcaatgactgaaaacggtcatcgtcgggatatgcaccctgccgaaca

SEQ ID NO: 805404 - DNA, 75 bp, synthetic construct
  source 1..75: mol_type = other DNA
ccgcgctggtcatgcagaagtacagccgccagcaggcacgggaggcagagcagaaagcccgtgcgtaccaggcgc

SEQ ID NO: 805405 - DNA, 75 bp, synthetic construct
  source 1..75: mol_type = other DNA
gcagcactcaacatgctggcagagcgtggcatcattccggcggactggtctgtccgcgtgaaaattattccgcag

SEQ ID NO: 805406 - DNA, 75 bp, synthetic construct
  source 1..75: mol_type = other DNA
ccaggctggatgtgtgcaccacatccacagacggataccactgaacgcaccgataacctggctgatgccgcctga

SEQ ID NO: 805407 - DNA, 75 bp, synthetic construct
  source 1..75: mol_type = other DNA
gctatgtggactgcgtggcgctcgatgccgccctgctggaaaaactccaggctgttgctgaacaccttcgggaag

SEQ ID NO: 805408 - DNA, 75 bp, synthetic construct
  source 1..75: mol_type = other DNA
tgctcagtttctgcaccgcatgcagcctttacggtgtccagacccgcaattgtggtcacacgtcacgcagtccgc

SEQ ID NO: 805409 - DNA, 75 bp, synthetic construct
  source 1..75: mol_type = other DNA
aaaaactccaggctgtcgctgaacaccttcgggaagctgaaggctgggaatggtgcgccggacgcatggagcctg

SEQ ID NO: 805410 - DNA, 75 bp, synthetic construct
  source 1..75: mol_type = other DNA
cacgctggcagtccaggcggcactcatgcagcaaccggacaaatccctggcactgctggcatggacgctctgcct

SEQ ID NO: 805411 - DNA, 75 bp, synthetic construct
  source 1..75: mol_type = other DNA
cattccgcaggagctggcgacagccgcatcaatgactgaaaacggtcatcgtcgggatatgcaccctgccgaaca

SEQ ID NO: 805412 - DNA, 75 bp, synthetic construct
  source 1..75: mol_type = other DNA
gtttcagaaatacgtttaacgccattaacaacggagaacagtatcctgtggatgagctgatcagcatagattctc

SEQ ID NO: 805413 - DNA, 75 bp, synthetic construct
  source 1..75: mol_type = other DNA
ctgtcatggattgaggcggccgttgatgcccacaaagtccttaatttcgagccgagcgggcgtaagcgtattggc

SEQ ID NO: 805414 - DNA, 75 bp, synthetic construct
  source 1..75: mol_type = other DNA
acatgtgtatgagggcgttccggagtctgatgatgatgcggcaatcatcaaactgtcctggatagaagccgcagt

SEQ ID NO: 805415 - DNA, 75 bp, synthetic construct
  source 1..75: mol_type = other DNA
atggcgctgagaaaaatcgcgggtctttatcgcattgagaagttcatccgtgaacgtcctgtggaaaaaatacgg

SEQ ID NO: 805416 - DNA, 75 bp, synthetic construct
  source 1..75: mol_type = other DNA
atctcccggaattaatttgaaggagccaagactgacgatgtcggcgatgattcagcctgatgtttaccacaaagg

SEQ ID NO: 805417 - DNA, 75 bp, synthetic construct
  source 1..75: mol_type = other DNA
accaagtttgcaatcggcatggtgatgtgttctggtgcgttcctgattctgccgctgggtgcgaaattcgcgtct

SEQ ID NO: 805418 - DNA, 75 bp, synthetic construct
  source 1..75: mol_type = other DNA
cggaaacagtcggaagctggcatgcacgctggagtgaccgggtggcagagcatgacctggaacccctgttctggc

SEQ ID NO: 805419 - DNA, 75 bp, synthetic construct
  source 1..75: mol_type = other DNA
cctgtcactcagccaggaggtgctgttatccctgctcagcttctgtaccgcgtgcagtcttaacggtgtccagac

SEQ ID NO: 805420 - DNA, 75 bp, synthetic construct
  source 1..75: mol_type = other DNA
gattccgcaggagctggcgaccgcagcatcaatgactgaaaacggtcatcgtcgggatatgcaccctgccgaaca

SEQ ID NO: 805421 - DNA, 75 bp, synthetic construct
  source 1..75: mol_type = other DNA
cacctggagaaactaaagcttgagctgacgaccccgcaccgagactttgatcgtaacggtagggttatggttgaa

SEQ ID NO: 805422 - DNA, 75 bp, synthetic construct
  source 1..75: mol_type = other DNA
atctgtaaaaacgcaggaaactgcactgtctgccctgctggcgcagacggaggaagtgagcgtgccgctggattc

SEQ ID NO: 805423 - DNA, 75 bp, synthetic construct
  source 1..75: mol_type = other DNA
tcggatacctgaaaaagccgcagattatcgatgccctgaatgatgccggactgtccggtgctgcgcgggacgcgg

SEQ ID NO: 805424 - DNA, 75 bp, synthetic construct
  source 1..75: mol_type = other DNA
ctgactggcctgtccgcgtgaaaattattccgcaggagctggcgactgccgcatcaatgactgaaaacggtcatc

SEQ ID NO: 805425 - DNA, 75 bp, synthetic construct
  source 1..75: mol_type = other DNA
tgtccctgctcagtttctgcaccgcgtgcagtattcacggtgttcagacccgcaattgtggtcacacgtcacgca

SEQ ID NO: 805426 - DNA, 75 bp, synthetic construct
  source 1..75: mol_type = other DNA
gcgtgccggaagcggtgtggtggtgtcctggcgttacggtaatgtgtgtgtccagcgtggtgtgcagttgcgcag

SEQ ID NO: 805427 - DNA, 75 bp, synthetic construct
  source 1..75: mol_type = other DNA
aactgcgcaccgatttgttcagcgacgacgagggtggctatgtggactgcgtggcgctcgatgccgccctgctgg

SEQ ID NO: 805428 - DNA, 75 bp, synthetic construct
  source 1..75: mol_type = other DNA
acgaaaggccgtggacgtaaggccgcgcagccagagcctcagccgcaaccgccggagggggaggattacgggttt

SEQ ID NO: 805429 - DNA, 75 bp, synthetic construct
  source 1..75: mol_type = other DNA
actggctgagtccattaagggcgttggcctgctgcagaatctggtcgtgcatgccctgccaggtgaccgttacgg

SEQ ID NO: 805430 - DNA, 75 bp, synthetic construct
  source 1..75: mol_type = other DNA
caaagcaagccgtaaatctgcaaaaacgcaggaaactgccctgtctgccctgctggcgcagacggaggaagtgag

SEQ ID NO: 805431 - DNA, 75 bp, synthetic construct
  source 1..75: mol_type = other DNA
aaatctctggcactgctggcatggacgctctgcctgaatgtgtttggcagcggggcgtacagtaaaccagcacaa

SEQ ID NO: 805432 - DNA, 75 bp, synthetic construct
  source 1..75: mol_type = other DNA
agtttctgcaccgcatgcagcctttacggtgtccagacccgcaattgtggtcacacgtcacgcagtccgctggat

SEQ ID NO: 805433 - DNA, 75 bp, synthetic construct
  source 1..75: mol_type = other DNA
caggcgctggcgctggagaacgacaccgcgcgtcaggtacaggtgtttgaagccgcctgtcagtcgggatggggc

SEQ ID NO: 805434 - DNA, 75 bp, synthetic construct
  source 1..75: mol_type = other DNA
tcgcaggctggctgcactcaacatgctggcagagcgtggcatcattccggctgactggcctgtccgcgtaaaaat

SEQ ID NO: 805435 - DNA, 75 bp, synthetic construct
  source 1..75: mol_type = other DNA
cacaccaatgcaatcccgaaagcggtggtgaaaaatgccgatggcagcctgacgctggagctggaagatggtcgc

SEQ ID NO: 805436 - DNA, 75 bp, synthetic construct
  source 1..75: mol_type = other DNA
aggaagtgagcgtgccgctggcctcgctgattaagtctccgctgaatgtgcgcacggtgccgtattctgcggagt

SEQ ID NO: 805437 - DNA, 75 bp, synthetic construct
  source 1..75: mol_type = other DNA
agtgatgcgtttttgccaggcgctgatgactgaactgtatcgccacctgggcgcggatactgacgttccggcagg

SEQ ID NO: 805438 - DNA, 75 bp, synthetic construct
  source 1..75: mol_type = other DNA
cgctctgcctgaatgtgtttggcagcggagcgtacagtagtcccgcagaattcgcctggcatgtgagcattattc

SEQ ID NO: 805439 - DNA, 75 bp, synthetic construct
  source 1..75: mol_type = other DNA
cacatgaaagacaaccgctgggtgcctggctggatgtgtgctccacgtccacagacggataccactgaacgcacc

SEQ ID NO: 805440 - DNA, 75 bp, synthetic construct
  source 1..75: mol_type = other DNA
tcattctcgtgggacgtctgggaaaagatccggaagtccgttacatccccaacgggggcgcagtggcaaacctgc

SEQ ID NO: 805441 - DNA, 75 bp, synthetic construct
  source 1..75: mol_type = other DNA
gatggtgcgccggacgcatggagcctgtcggtgagtgccgtgaggatgccggaacataccgcagtctgccggagc

SEQ ID NO: 805442 - DNA, 75 bp, synthetic construct
  source 1..75: mol_type = other DNA
ccagtcttgcagcaagagaggccggtcacgctgtccgtgagatggagcggtggatggtgccgaacaaactccggg

SEQ ID NO: 805443 - DNA, 75 bp, synthetic construct
  source 1..75: mol_type = other DNA
tgaataaaggggacgcggctgaacatgcagcgttccacatgaaagacaaccgctgggtgcctgactggatgtgtg

SEQ ID NO: 805444 - DNA, 75 bp, synthetic construct
  source 1..75: mol_type = other DNA
tgaaagcggattcacgaaagagaaactggcacgtcttatcgaaatcaaagccagccgcgatggtcgagtggcaga

SEQ ID NO: 805445 - DNA, 75 bp, synthetic construct
  source 1..75: mol_type = other DNA
tcggcttcgaacaaacctttaaaaatgccctgactaccctgccgatgggcggtggtaaaggcggcagtgattttg

SEQ ID NO: 805446 - DNA, 75 bp, synthetic construct
  source 1..75: mol_type = other DNA
ctggagcgtctggttgaaccggagcgcgtgatccagtttcgcgtggtatgggttgatgatcgcaaccaggtgcag

SEQ ID NO: 805447 - DNA, 75 bp, synthetic construct
  source 1..75: mol_type = other DNA
gtcggaagctggcatgcacgttggagtgaccgggtggcagagcatgacctggaaaccctgttctggcagtggggc

SEQ ID NO: 805448 - DNA, 75 bp, synthetic construct
  source 1..75: mol_type = other DNA
gcgcagataccgacgttccggcaggtgatatcggcgttggtggtcgtgaagtcggctttatggcggggatgatga

SEQ ID NO: 805449 - DNA, 75 bp, synthetic construct
  source 1..75: mol_type = other DNA
gtaaacctctccattcttaaattcctcggcttcgagcaaacctttaaaaatgccctgactaccctgccgatgggc

SEQ ID NO: 805450 - DNA, 75 bp, synthetic construct
  source 1..75: mol_type = other DNA
gcgtggtacatccggcgcagcgtatcttaattctcgtggaatattcagtcttcctgctgaggcgatccggttcaa

SEQ ID NO: 805451 - DNA, 75 bp, synthetic construct
  source 1..75: mol_type = other DNA
atgtgtggtcaacaatgaactccggttttatggagaagtttattgcgccaccaggcgttaatcacctgattatct

SEQ ID NO: 805452 - DNA, 75 bp, synthetic construct
  source 1..75: mol_type = other DNA
ttacggcatgcctcctgttactggtgtgaaacattacaacggaccctgcccgatatgtggtgccagaggtaaatt

SEQ ID NO: 805453 - DNA, 75 bp, synthetic construct
  source 1..75: mol_type = other DNA
ggcctacgatatttttctcgaactggctgccgacaatctcgatccagctgatgttctgctgttcaatcttcagtt

SEQ ID NO: 805454 - DNA, 75 bp, synthetic construct
  source 1..75: mol_type = other DNA
cacacctgggcaacgatgaacaccgctttcatgaagaagttccgtgttcctgccggggtaaagaacctgattatt

SEQ ID NO: 805455 - DNA, 75 bp, synthetic construct
  source 1..75: mol_type = other DNA
ctacggacgataaaggggagttgtgctatctgcaccagactctgcttgatggtgataaaaaagcagatatcggta

SEQ ID NO: 805456 - DNA, 75 bp, synthetic construct
  source 1..75: mol_type = other DNA
ttcattgtcggcgtgctgggagcgcgcgtgctgtcagcctggattgcagcaaaaacaggttatgacggtacatcg

SEQ ID NO: 805457 - DNA, 75 bp, synthetic construct
  source 1..75: mol_type = other DNA
tgtcctttattgttggtgtgcttggggcccgtggtgtggccggttacatggcggaacgtattgggtttaacagtg

SEQ ID NO: 805458 - DNA, 75 bp, synthetic construct
  source 1..75: mol_type = other DNA
aagatactgacctttctttatcaacaggaaatttcatcgctgttcggcctgttttccagactgcgcggcggaggg

SEQ ID NO: 805459 - DNA, 75 bp, synthetic construct
  source 1..75: mol_type = other DNA
aacgacatgctcattcaggggggtgaagcccgtgaacatgtgttgacgcgcaaattcaaagcggaggctgcctga

SEQ ID NO: 805460 - DNA, 75 bp, synthetic construct
  source 1..75: mol_type = other DNA
atgcagactaagaaggcagcggccgggcattgggggcgaatttttgaatattacggcatgcctcctgttactggc

SEQ ID NO: 805461 - DNA, 75 bp, synthetic construct
  source 1..75: mol_type = other DNA
attctctcgttcatccaccagcaggatattgcatcactggtgtccggtgtgttctcccgcctgcggggcggagga

SEQ ID NO: 805462 - DNA, 75 bp, synthetic construct
  source 1..75: mol_type = other DNA
gccggagcgccaccgtaccgcgtggcttcattattaagccacaaacactcccgttgcgaagtgatttctggtgtc

SEQ ID NO: 805463 - DNA, 75 bp, synthetic construct
  source 1..75: mol_type = other DNA
gcggggtataaccagctttgtgatgaaaatattgataattttgattttctgaatacgcctgaaaagacgctaata

SEQ ID NO: 805464 - DNA, 75 bp, synthetic construct
  source 1..75: mol_type = other DNA
ggtggtttgtgaaccgctgggccgtaattaccgcgtcagtatgccgcttatagcctttcgctccagaaaaaacat

SEQ ID NO: 805465 - DNA, 75 bp, synthetic construct
  source 1..75: mol_type = other DNA
ctgactcgatgacctcgcagggtaaaggtctgtcgcagggttctggcgtcgcgtttgataacgaaaaatttgcct

SEQ ID NO: 805466 - DNA, 75 bp, synthetic construct
  source 1..75: mol_type = other DNA
cgttgctggataacgagcgctatctcacatggagccaggttggactgacccagcaagacgatggtctggtaagta

SEQ ID NO: 805467 - DNA, 75 bp, synthetic construct
  source 1..75: mol_type = other DNA
gggttatcacaatcccgtcgcgttgagtctgggattaaattataccccagtgccattagtcactgtgacggccca

SEQ ID NO: 805468 - DNA, 75 bp, synthetic construct
  source 1..75: mol_type = other DNA
ttgtccttcaattctgacagagaaaggagctgcaatgtttatacgccatcaaggtgtcgtaatacagataatatc

SEQ ID NO: 805469 - DNA, 75 bp, synthetic construct
  source 1..75: mol_type = other DNA
gccattgggccatgatttttgagcattacggactgccgccgatcaccggtaaaaatcactttaaggggaagtgcc

SEQ ID NO: 805470 - DNA, 75 bp, synthetic construct
  source 1..75: mol_type = other DNA
gccttgcatgaaacggactctggtgagggcgttatctttttaaccgatatagccggagcgccaccgtaccgcgtg

SEQ ID NO: 805471 - DNA, 75 bp, synthetic construct
  source 1..75: mol_type = other DNA
ggcatcaggagcacctgaagtcagtagcctctggcatcagcaacaaaagaatcccccttttgtcctcaagcacaa

SEQ ID NO: 805472 - DNA, 75 bp, synthetic construct
  source 1..75: mol_type = other DNA
cctggtaattgattccaccgggctgaaggtcttcggtgaaggcgagtggaaagtcaagattactctgcgcaaact

SEQ ID NO: 805473 - DNA, 75 bp, synthetic construct
  source 1..75: mol_type = other DNA
atgtactgcacccaggaggatttgcttgcgcaggtgccggagcggacgcttatcgaactcaccagtgaagagatg

SEQ ID NO: 805474 - DNA, 75 bp, synthetic construct
  source 1..75: mol_type = other DNA
gtactggccggatcacgatgatttcaacaatatgctcatgaacggcgatcaggttcgtgagctggttttctataa

SEQ ID NO: 805475 - DNA, 75 bp, synthetic construct
  source 1..75: mol_type = other DNA
aacaatgccgcagacactttcagcctggcgtgtggctgcacattttctggtgtcctttattgttggtgtgcttgg

SEQ ID NO: 805476 - DNA, 75 bp, synthetic construct
  source 1..75: mol_type = other DNA
agactggcaggacttcttcaccatttgagcagtgaggaggggggacatttccccttacactgcagaaatggggag

SEQ ID NO: 805477 - DNA, 75 bp, synthetic construct
  source 1..75: mol_type = other DNA
ctctgtatgaaaaaaaatgatattttacagcgtggtccgaaccgtttccggaaaaaggataaaatcaactggtta

SEQ ID NO: 805478 - DNA, 75 bp, synthetic construct
  source 1..75: mol_type = other DNA
acgttaattcaattactgttgataaatggatatacaccggaaaatcattatattccgcctacaatacaaaacagg

SEQ ID NO: 805479 - DNA, 75 bp, synthetic construct
  source 1..75: mol_type = other DNA
aaaaacggcaggcttaaaaaaaccagccatcgcgtcactaccgtggagggtatccgccttgagcgtaccattctg

SEQ ID NO: 805480 - DNA, 75 bp, synthetic construct
  source 1..75: mol_type = other DNA
cactgaatatcgggaaaacagagtagcgctggataccaataccctggctgataacgtcgatttagataacgcggt

SEQ ID NO: 805481 - DNA, 75 bp, synthetic construct
  source 1..75: mol_type = other DNA
gagaattagcaatatggtacggtaatgagtatgtgcggttgtctaatccgttaacttttgacaactctgccctga

SEQ ID NO: 805482 - DNA, 75 bp, synthetic construct
  source 1..75: mol_type = other DNA
agactggcagggcttattcaccattttagcggtgaggaaggtgacatttccccctacactgctgaaatggcgaga

SEQ ID NO: 805483 - DNA, 75 bp, synthetic construct
  source 1..75: mol_type = other DNA
ctgtaacatcaaggaaatcaatatccggtcactccatgggggggctgggagcgctggttctgtcgctgcgaaatc

SEQ ID NO: 805484 - DNA, 75 bp, synthetic construct
  source 1..75: mol_type = other DNA
ccaacgccctacttcattaccgtaacaaatatgaaagcaggaaatagcaatctcccaaacaccatggtgccgcca

SEQ ID NO: 805485 - DNA, 75 bp, synthetic construct
  source 1..75: mol_type = other DNA
ctttttcacaacttggctttgacgtttccgttacgtttgttgatgcaaaaggtacgaaatatcagtattttgatt

SEQ ID NO: 805486 - DNA, 75 bp, synthetic construct
  source 1..75: mol_type = other DNA
aggagcttgaacttttcaactggataaaaagctgttgcattgagaaggggatacgctgtatgagaaaaaatgaca

SEQ ID NO: 805487 - DNA, 75 bp, synthetic construct
  source 1..75: mol_type = other DNA
aacgtttgaaaactctgcactgaccgtacctatgcgactcattccagaggagcttgaacttttcaactggataaa

SEQ ID NO: 805488 - DNA, 75 bp, synthetic construct
  source 1..75: mol_type = other DNA
attaccggcccgcaccgttgccgcgttcctgaaagcaaaggataaaaatctggatgaaaaatcagttgtgttcat

SEQ ID NO: 805489 - DNA, 75 bp, synthetic construct
  source 1..75: mol_type = other DNA
gctggtgtcggtgttgtcagtgaagattctctcgtttatccatcagcaggatatcggttcgttgatatcgggcct

SEQ ID NO: 805490 - DNA, 75 bp, synthetic construct
  source 1..75: mol_type = other DNA
attctgtcgttcatccaccagcaggatatcggttcactggtatccgggctgttctcccgcctgcggggtggaggc

SEQ ID NO: 805491 - DNA, 75 bp, synthetic construct
  source 1..75: mol_type = other DNA
gtacggctgcggcgctcggtggggcgacggtatttggactgtttaccggaacggatttcgggattgtgtttggtg

SEQ ID NO: 805492 - DNA, 75 bp, synthetic construct
  source 1..75: mol_type = other DNA
tggcgtgtggcagcgcattttctggtgtcgtttatcgttggcgtgctgggtgcgcatgtgctgtcagcctggatt

SEQ ID NO: 805493 - DNA, 75 bp, synthetic construct
  source 1..75: mol_type = other DNA
attctgtcgttcatccaccagcaggatattgcatcactggtatccggcctgttctcccgcctgcgggatggagga

SEQ ID NO: 805494 - DNA, 75 bp, synthetic construct
  source 1..75: mol_type = other DNA
gacggtattcgggctgttcaccggaacggatttcgggattgtgtttggtgcgttcgcgggggcgttgtttgtggc

SEQ ID NO: 805495 - DNA, 75 bp, synthetic construct
  source 1..75: mol_type = other DNA
tgatgaagccggggttatacccgcccgacagatgaaacagctgatggaggtgatcgagaagcataacgctcgcgc

SEQ ID NO: 805496 - DNA, 75 bp, synthetic construct
  source 1..75: mol_type = other DNA
tgagccgcgacagccccaaaacaacggccgcagaaattgaccgcttcttcgggcttgaggcgagattcaaggata

SEQ ID NO: 805497 - DNA, 75 bp, synthetic construct
  source 1..75: mol_type = other DNA
ccgcagacgtctcaggcggaacagagccataccggaaaagaacacacccatgagcatgagcatgaagaagggggc

SEQ ID NO: 805498 - DNA, 75 bp, synthetic construct
  source 1..75: mol_type = other DNA
aaaggcaaggacggcccgcaaacgtcaatgaataccgtccctaacttcaccagcccggaggtaaaagccgaccgg

SEQ ID NO: 805499 - DNA, 75 bp, synthetic construct
  source 1..75: mol_type = other DNA
tggagggcgcttaaaaacgatgaactgatgcgggccaagatgcacctgggggatgtctacaagcaagagctggcg

SEQ ID NO: 805500 - DNA, 75 bp, synthetic construct
  source 1..75: mol_type = other DNA
gccgacgcaggataaaggtaatgcccggcctaaagataaaggccatgaaaaaaataacgatgacagagccttgag

SEQ ID NO: 805501 - DNA, 75 bp, synthetic construct
  source 1..75: mol_type = other DNA
accggtgcttatgcatggaacgcgccacgcgaggccgtcgggcgcgaaagaccccttacacgtgacgagatgcgt

SEQ ID NO: 805502 - DNA, 75 bp, synthetic construct
  source 1..75: mol_type = other DNA
tccctcgtatgtctattaaagacgcgcgcgagtgtgctcgtgaactctataacagatatgatgataaccgggtgc

SEQ ID NO: 805503 - DNA, 75 bp, synthetic construct
  source 1..75: mol_type = other DNA
ttccacgtatgcccgttaacgtcgcgcgtgaacgagcacgtgaactctataacagatttgatgatcaccgggtgc

SEQ ID NO: 805504 - DNA, 75 bp, synthetic construct
  source 1..75: mol_type = other DNA
ctcctggctgccgccgtcccgctgggataacggtattccggggctgttgtttgactacaacatcaacgggacggt

SEQ ID NO: 805505 - DNA, 75 bp, synthetic construct
  source 1..75: mol_type = other DNA
tcttgttgaaagcgggtgcgactgacgtccgtctggcacaggacgaagcagagcgcgtacgtttctgggccggtc

SEQ ID NO: 805506 - DNA, 75 bp, synthetic construct
  source 1..75: mol_type = other DNA
cgaaagaggccagcaatgtacagcagaccgttaaccatatgcctggcgatgatgttgatcgtgagctgcgcacaa

SEQ ID NO: 805507 - DNA, 75 bp, synthetic construct
  source 1..75: mol_type = other DNA
tgacaaaagaggtgggcaatgtacagcagagtgttaaccatatggctgatgacgatgttgatcgcgagctgcggg

SEQ ID NO: 805508 - DNA, 75 bp, synthetic construct
  source 1..75: mol_type = other DNA
tatccgcatcccgctcgaaataccagcaccaggataacgattcggcatttatacggctgtcagtgccgtggggaa

SEQ ID NO: 805509 - DNA, 75 bp, synthetic construct
  source 1..75: mol_type = other DNA
tctttatgactcaaccgtaccggcaggtccattcaccattcaggatctggacagttccgtgcgtggtcgtttgga

SEQ ID NO: 805510 - DNA, 75 bp, synthetic construct
  source 1..75: mol_type = other DNA
caaaggggacggacagccagttcacctggagtcgtttctacatgtaccgcgctataccgcgctggcgtgcaaacc

SEQ ID NO: 805511 - DNA, 75 bp, synthetic construct
  source 1..75: mol_type = other DNA
aggcctggctggagtattccgacgcctcctggctgccgccgtcccgctgggataacggtattccggggctgttgt

SEQ ID NO: 805512 - DNA, 75 bp, synthetic construct
  source 1..75: mol_type = other DNA
atgtcggcgtgaacagtggtggtggtcaaccgtcacaacggcagatgagtgcctattacaaccataacggttccc

SEQ ID NO: 805513 - DNA, 75 bp, synthetic construct
  source 1..75: mol_type = other DNA
acgtctgtcagtgccgtggggaaccggcacggccaactacagcggcagcatgagcaatgaccgttacaccaacac

SEQ ID NO: 805514 - DNA, 75 bp, synthetic construct
  source 1..75: mol_type = other DNA
ggcgcgaaaaaatcaatcagatgtgcgcccagttcaacagtgatgaaattactacctttcatgcagtcaaggcgg

SEQ ID NO: 805515 - DNA, 75 bp, synthetic construct
  source 1..75: mol_type = other DNA
agatcatcaacggcgggcagaatggcatcgacgatcgccgtgtgcgttacctgtcggccaagaaggtgctggcat

SEQ ID NO: 805516 - DNA, 75 bp, synthetic construct
  source 1..75: mol_type = other DNA
atgtggtccgtcacaacctcatcatgccggataactttggccgtactgctgccacagtgctgaccgaagaaatct

SEQ ID NO: 805517 - DNA, 75 bp, synthetic construct
  source 1..75: mol_type = other DNA
cccggttccggcgcgtaagggcgataccttccacgtcgattacggcaacatgggctccattagctgtaatgccga

SEQ ID NO: 805518 - DNA, 75 bp, synthetic construct
  source 1..75: mol_type = other DNA
accggcgatattgcacgtgtaactctgattatcaatggtggcagaaacggtatcgacgaccggcgtgcgcggtac

SEQ ID NO: 805519 - DNA, 75 bp, synthetic construct
  source 1..75: mol_type = other DNA
tattgctcaagtcgggcatgagtctggtggcttcaccaggttgcaggagaatttcaactacagtgtcacaggact

SEQ ID NO: 805520 - DNA, 75 bp, synthetic construct
  source 1..75: mol_type = other DNA
gcagccatgaatgagtttggcattattaaacctgatgaccaggcgatgtttattgcgcaggtcgggcatgagtcc

SEQ ID NO: 805521 - DNA, 75 bp, synthetic construct
  source 1..75: mol_type = other DNA
cggtgctgacgctggcaggcactgaccaggacgcggatttgtccgggtacatcgccccgctggataccctctgga

SEQ ID NO: 805522 - DNA, 75 bp, synthetic construct
  source 1..75: mol_type = other DNA
aaattgtcgccaaccaggatatgccggacgaagtgcgcgccaaattatgcaaggcgtgtgcctttgcccgtcgtg

SEQ ID NO: 805523 - DNA, 75 bp, synthetic construct
  source 1..75: mol_type = other DNA
ccactgcctgaaatatggtctgaccgtacataacctgctgaaaattgaagtgcaaacgctggatggcgaggcgct

SEQ ID NO: 805524 - DNA, 75 bp, synthetic construct
  source 1..75: mol_type = other DNA
tatgctgggcaaaaacgtcctacagccgatcggctgggacgcctttggtctgcctgcggaaggcgcggcggtgaa

SEQ ID NO: 805525 - DNA, 75 bp, synthetic construct
  source 1..75: mol_type = other DNA
gcgagcgtaaagtaaactatcgcctgcgcgactggggtgtttcccgtcagcgttactggggcgcaccgattccga

SEQ ID NO: 805526 - DNA, 75 bp, synthetic construct
  source 1..75: mol_type = other DNA
cagcgaaacagttgctgtgtcagggtatggtgctggcagatgccttctactatgttggcgaaaacggcgaacgta

SEQ ID NO: 805527 - DNA, 75 bp, synthetic construct
  source 1..75: mol_type = other DNA
atgaaaaataatacctcttttgctgttaacggcattacatatgcgctgctgctttccctggcaggcgcaccggct

SEQ ID NO: 805528 - DNA, 75 bp, synthetic construct
  source 1..75: mol_type = other DNA
acctcttctatcgtgagtcgcgatcctgagttttcagctatctaccttgcagagaaagagctgatgctggacgta

SEQ ID NO: 805529 - DNA, 75 bp, synthetic construct
  source 1..75: mol_type = other DNA
tgatattgtttatttcggaaagcaggacataggtggtttttccttcctgcacgacagagagcctgagttgagatg

SEQ ID NO: 805530 - DNA, 75 bp, synthetic construct
  source 1..75: mol_type = other DNA
ttttaaagatattattttttcaaagaggaagggcatactgtgtgaattatcgagatatgaccattggaataacat

SEQ ID NO: 805531 - DNA, 75 bp, synthetic construct
  source 1..75: mol_type = other DNA
aaatatatttaggtactttaaagagggcgaccaggaatttaaggagcgagttgagcgtgcttatcgattcaacca

SEQ ID NO: 805532 - DNA, 75 bp, synthetic construct
  source 1..75: mol_type = other DNA
ttcaccgcaacactgatgaagcaccggagcagatccgcaatttctggaagcgagccacgcgccagaacgcctcca

SEQ ID NO: 805533 - DNA, 75 bp, synthetic construct
  source 1..75: mol_type = other DNA
agcataatctcggcgtagttcctgtgtttcctgttgattgtattggagaaagtgaatcaccgtatttcagcccat

SEQ ID NO: 805534 - DNA, 75 bp, synthetic construct
  source 1..75: mol_type = other DNA
tccttaaaatacttttttaccagcgagggagggtatactgcgtaaattacagagatatgacaattggcattactt

SEQ ID NO: 805535 - DNA, 75 bp, synthetic construct
  source 1..75: mol_type = other DNA
ggtacagactgtgctcggctggccgatgcagggcgattattactggtcatcgctggcggggcttaccgggcagca

SEQ ID NO: 805536 - DNA, 75 bp, synthetic construct
  source 1..75: mol_type = other DNA
cactggcgacggtgattccctccacggtacagactgtgctcggctggccgatgcagggcgattattactggtcat

SEQ ID NO: 805537 - DNA, 75 bp, synthetic construct
  source 1..75: mol_type = other DNA
gtgatgcccgtcccgagtggtgttctggtaaatatacgtaaaatcatttccccttattttggtttttcatctgat

SEQ ID NO: 805538 - DNA, 75 bp, synthetic construct
  source 1..75: mol_type = other DNA
acctttttttggtggtgtacaggagacaacgaatgtcaggttgagtgatgatgcttacagaactctcatattttg

SEQ ID NO: 805539 - DNA, 75 bp, synthetic construct
  source 1..75: mol_type = other DNA
gtcacccctgtaccaagtggcgttcagttgaatatcaggcaaattgtaagcccatactttggtttttctacggat

SEQ ID NO: 805540 - DNA, 75 bp, synthetic construct
  source 1..75: mol_type = other DNA
cataccgatggcgtctcaacttcaccgctggcggatgtttccatcactaaagcactgccgccggaagcgcagcag

SEQ ID NO: 805541 - DNA, 75 bp, synthetic construct
  source 1..75: mol_type = other DNA
gagatggtcagccggatggggctgaccgaggcttctcaggagaaggtcacatactggaataacgggcagtgtgct

SEQ ID NO: 805542 - DNA, 75 bp, synthetic construct
  source 1..75: mol_type = other DNA
gaaatcagcacagtgttacaagacggggatatttaatatcgccgccgtaaactggcctgagagcgccgacactga

SEQ ID NO: 805543 - DNA, 75 bp, synthetic construct
  source 1..75: mol_type = other DNA
tgtgtccacaggtacgggtcgcggatatcgtccagctgaacgggaatatccggccacgatcacgccagtggtggc

SEQ ID NO: 805544 - DNA, 75 bp, synthetic construct
  source 1..75: mol_type = other DNA
ctgcaggtgccaactttggtgcctggcgcttgcgtgcggactatcaaggcaacctgaatcgtagctccggcattg

SEQ ID NO: 805545 - DNA, 75 bp, synthetic construct
  source 1..75: mol_type = other DNA
tatgccgtcgattttaatacagatgttctggatgcagcagacagacagaatattgatttttcccggttctcccag

SEQ ID NO: 805546 - DNA, 75 bp, synthetic construct
  source 1..75: mol_type = other DNA
tggagatacgcccgaatccggcagaagggatgctgtacatcaatatgccgcaggcctggctggaatattccgacg

SEQ ID NO: 805547 - DNA, 75 bp, synthetic construct
  source 1..75: mol_type = other DNA
ttacgttcgcgggctatcgtttttccgagcgtaattatttgactatgcaaagatatctcgatgagagatatcgta

SEQ ID NO: 805548 - DNA, 75 bp, synthetic construct
  source 1..75: mol_type = other DNA
ccatacttgacgagaccaggtcaagttcggtttaagattgcagcagggcgctccagatattacggacataacctt

SEQ ID NO: 805549 - DNA, 75 bp, synthetic construct
  source 1..75: mol_type = other DNA
ctctggcggatgtttccattactaaagcactgccgccggaagcgcagcagatgatgcagttaagcattgagaacg

SEQ ID NO: 805550 - DNA, 75 bp, synthetic construct
  source 1..75: mol_type = other DNA
taactggcctgagagcgtcgacaccgatgcgaaaaaatgcgccgcctttgcgggttctggcgtatccgttcagcc

SEQ ID NO: 805551 - DNA, 75 bp, synthetic construct
  source 1..75: mol_type = other DNA
ctgagaagaccaaaccgtcagcaaagaaacggaagcccgttaaaaccacatgaaattgcaccatcggccagactg

SEQ ID NO: 805552 - DNA, 75 bp, synthetic construct
  source 1..75: mol_type = other DNA
ggttcacggttatttgctttcttaagactcgctgatagtagtgttccgccatttggcgcaagtgtaataaatgag

SEQ ID NO: 805553 - DNA, 75 bp, synthetic construct
  source 1..75: mol_type = other DNA
caaagccggctcatcatacctggcgcagttacgcgatgttcctgctggatgtgatgccggaaagaacagcagaac

SEQ ID NO: 805554 - DNA, 75 bp, synthetic construct
  source 1..75: mol_type = other DNA
aagcatttaaggggcgagacggtattaccccccaaattgattaccatggtgccattaatataagtgctttttcag

SEQ ID NO: 805555 - DNA, 75 bp, synthetic construct
  source 1..75: mol_type = other DNA
cgaagcagacttcatttctattttttactcgcggtggcgaatgccgtcgtgttaattatctgggcgctgtacaat

SEQ ID NO: 805556 - DNA, 75 bp, synthetic construct
  source 1..75: mol_type = other DNA
gactctgagccagcacaaacagacatttacttttgaaattgataacaacctcaaagtgtctggcaatgaagatca

SEQ ID NO: 805557 - DNA, 75 bp, synthetic construct
  source 1..75: mol_type = other DNA
cacgaaagtcgcctgaatattgagagtacagtaggaaaaggaacacgtttcagttttgttatcccggaacgttta

SEQ ID NO: 805558 - DNA, 75 bp, synthetic construct
  source 1..75: mol_type = other DNA
ggtgctcaacaccgggcggcatctggaaattcgcgtcatgccttatacccacaaacagttgctgatggtggcgcg

SEQ ID NO: 805559 - DNA, 75 bp, synthetic construct
  source 1..75: mol_type = other DNA
gccattctatctgctggactgctcccgcgcagtcaaaccgctgattttccaggagcgccgcaaaccggaactggt

SEQ ID NO: 805560 - DNA, 75 bp, synthetic construct
  source 1..75: mol_type = other DNA
ggattttcagggcggtcttgaagacgccccgtcgcagtacagcaaaattgcaatggtggtgaactcctccacccg

SEQ ID NO: 805561 - DNA, 75 bp, synthetic construct
  source 1..75: mol_type = other DNA
gatcgccacgttggttgatatggcggagcaggcgacagggcagcgcggaacggtaggtatgggcattccaggttc

SEQ ID NO: 805562 - DNA, 75 bp, synthetic construct
  source 1..75: mol_type = other DNA
tgaatgatattgtcgatgacggcaatcaagatgttaaatttgctgacaagaagggcagttgttattatttcgggc

SEQ ID NO: 805563 - DNA, 75 bp, synthetic construct
  source 1..75: mol_type = other DNA
ccgtccctgttaatcgtgatgattttgaggacgataatctcggtatttactcgcctttatttcaggagcttggtc

SEQ ID NO: 805564 - DNA, 75 bp, synthetic construct
  source 1..75: mol_type = other DNA
tggcagcctgagttcacagataaaacactctccaggaaacccggggcggttcaaaccctgtcagggagtaatcat

SEQ ID NO: 805565 - DNA, 75 bp, synthetic construct
  source 1..75: mol_type = other DNA
actgggcaatctgattaaacgctttcgtagcggcgcggagtcgctgcccgacgcggtggtgctgaccacggaaga

SEQ ID NO: 805566 - DNA, 75 bp, synthetic construct
  source 1..75: mol_type = other DNA
acaatgatccgaaattcagtaccaccattaataatgcgctggcactgaaagcgccgctgttgagtccggaactca

SEQ ID NO: 805567 - DNA, 75 bp, synthetic construct
  source 1..75: mol_type = other DNA
ggtgcacgaagatatgactggtgggcttatgtatcagctcgcccccgcaatatcgcatttaactatatcgtgagg

SEQ ID NO: 805568 - DNA, 75 bp, synthetic construct
  source 1..75: mol_type = other DNA
atgataccggagatatcagttcgctcggctctatacaatacggatttggtgacgctttaacctctaatcaactgg

SEQ ID NO: 805569 - DNA, 75 bp, synthetic construct
  source 1..75: mol_type = other DNA
ctgaacatgaaatactacgtgcattcaggacattactggattcagaaagtgatcgttttcagccctccgcctggc

SEQ ID NO: 805570 - DNA, 75 bp, synthetic construct
  source 1..75: mol_type = other DNA
ccagcattatcaaaatcagcttaacggtgctggtgataggttacgcgatcggtaaaatcgcgatgttgttcagtt

SEQ ID NO: 805571 - DNA, 75 bp, synthetic construct
  source 1..75: mol_type = other DNA
accacattgccgcacaggatcctcatacccagtatgcgcagaaacataatccgacatttaccggagaaccaaaag

SEQ ID NO: 805572 - DNA, 75 bp, synthetic construct
  source 1..75: mol_type = other DNA
ttcgcgaggcgatggggttaattatgtgaccattcgtccccgtaacattgcgtttaattacatcgtaagggcggc

SEQ ID NO: 805573 - DNA, 75 bp, synthetic construct
  source 1..75: mol_type = other DNA
aagtgcgacgggcgcgcctttacaaaagaacaatatcctgttctggccagagtctacccgaccctccgtcttccc

SEQ ID NO: 805574 - DNA, 75 bp, synthetic construct
  source 1..75: mol_type = other DNA
cacgaaagtcgcctgaatattgagagtacattgggtaaaggcacgcgtttcagctttgttttgccggaacgttta

SEQ ID NO: 805575 - DNA, 75 bp, synthetic construct
  source 1..75: mol_type = other DNA
atttaggcctgaagggcaggaacgaaacgggaataaatatgctgagactgattattcagtagtaaaagcatcctt

SEQ ID NO: 805576 - DNA, 75 bp, synthetic construct
  source 1..75: mol_type = other DNA
gtccaaccaacggaagctgagcctgaaatatacagaactcgtgccgggggctgagctgggcattttcattgtcag

SEQ ID NO: 805577 - DNA, 75 bp, synthetic construct
  source 1..75: mol_type = other DNA
tcctgcctctgaacttgctgcagccataaggcagattaaagaacgccagcgcctgcccggaacaaaacgatggaa

SEQ ID NO: 805578 - DNA, 75 bp, synthetic construct
  source 1..75: mol_type = other DNA
attcgcgacggattatcatcgtttgagcggacatgcgctgaaaggcagtgaaattatccgcctggttgaagaaag

SEQ ID NO: 805579 - DNA, 75 bp, synthetic construct
  source 1..75: mol_type = other DNA
cgattgcgacctctgcagccttactgacaggatgtcagaatacgcacggtattaataccgatttggctatcagct

SEQ ID NO: 805580 - DNA, 75 bp, synthetic construct
  source 1..75: mol_type = other DNA
atgaattggggcacgttgcattgggtcactcgctggctgaaatgaaagcctcttatgcgatcgttgccgcacgtg

SEQ ID NO: 805581 - DNA, 75 bp, synthetic construct
  source 1..75: mol_type = other DNA
aacgaaattgaaggcgttctgggccatgaactgggccacgtcgcgttgggtcactcgctggctgaaatgaaagct

SEQ ID NO: 805582 - DNA, 75 bp, synthetic construct
  source 1..75: mol_type = other DNA
atggagattaaacaattccagcgagctgctggtattagcgaggcgctgtccgcgcgctggttctcgtatataact

SEQ ID NO: 805583 - DNA, 75 bp, synthetic construct
  source 1..75: mol_type = other DNA
atggagattaaacaattccagcgagctgctggtatcagcgaggcgctggctgcacgctggttctcgcatataact

SEQ ID NO: 805584 - DNA, 75 bp, synthetic construct
  source 1..75: mol_type = other DNA
tggggcgacgtgcaggcgaaccaccattgccacttgagcgccagagagcgattgccaatctggtgtacagcaaac

SEQ ID NO: 805585 - DNA, 75 bp, synthetic construct
  source 1..75: mol_type = other DNA
ggagggtttactcggttacaggagaacttcaactacaacgtaaacgggctgtccgggtttatccgcgccggacgc

SEQ ID NO: 805586 - DNA, 75 bp, synthetic construct
  source 1..75: mol_type = other DNA
tggctggaactaccgtgggcgcggacttatccagattaccggtttgaataactatcgtgactgtggaaacggtct

SEQ ID NO: 805587 - DNA, 75 bp, synthetic construct
  source 1..75: mol_type = other DNA
atggagattaaacaattccagcgagctgctggtatcagcgagtcactgtccgcacgctggttctcgcatataacg

SEQ ID NO: 805588 - DNA, 75 bp, synthetic construct
  source 1..75: mol_type = other DNA
cgaacggctgtgttcgtgtctacagtggcctgatggacatgatgaacgacaacgaaattgaaggcgttctgggtc

SEQ ID NO: 805589 - DNA, 75 bp, synthetic construct
  source 1..75: mol_type = other DNA
tttgatctgttgaagaaacgtggcatcagcacccaggggctggttggcagctttgaaaaactggctagtctggat

SEQ ID NO: 805590 - DNA, 75 bp, synthetic construct
  source 1..75: mol_type = other DNA
actaccgggattgcggtaacggtctgaaggttgatctggtagcgcagcctgagctgctggcacaggatgaatacg

SEQ ID NO: 805591 - DNA, 75 bp, synthetic construct
  source 1..75: mol_type = other DNA
gcatggggaacaatgcccccggcgatggctggaattaccggggtcgcggacttatccagattaccggtttgaata

SEQ ID NO: 805592 - DNA, 75 bp, synthetic construct
  source 1..75: mol_type = other DNA
accggagcaactcatgcccgttgtattttcggtggcgcgaaacaaccatatgctgcatctgttgttgtgcaaagg

SEQ ID NO: 805593 - DNA, 75 bp, synthetic construct
  source 1..75: mol_type = other DNA
atgtattccggtgcgacggtccggcatgtactggaacagatgcgccaggggtggccctcttacggttttccggcg

SEQ ID NO: 805594 - DNA, 75 bp, synthetic construct
  source 1..75: mol_type = other DNA
actcagcgatgctgcacgtcgtgcagcggaagcccttaacctgaccattcccgctgcgaatgcctcagcggatac

SEQ ID NO: 805595 - DNA, 75 bp, synthetic construct
  source 1..75: mol_type = other DNA
gtgcgtataggtatcgatttaggcggcaccaaaactgaagtgattgcactgggcgatgcaggggagcagttgtat

SEQ ID NO: 805596 - DNA, 75 bp, synthetic construct
  source 1..75: mol_type = other DNA
cgtcgctacgagctgcggctggcaaaatcgctggcacacgtagtgaatattctcgatccggatgtgattgtgttg

SEQ ID NO: 805597 - DNA, 75 bp, synthetic construct
  source 1..75: mol_type = other DNA
gatcgccacgttggttgatatggcggagcaggcgacagggcagcgcggaacggtaggcatgggcattccaggctc

SEQ ID NO: 805598 - DNA, 75 bp, synthetic construct
  source 1..75: mol_type = other DNA
tgccagcctgaaaaaatcatcgccgttttcgtccggtttttcccgtattcccctgatgcaatgggcggcaccgga

SEQ ID NO: 805599 - DNA, 75 bp, synthetic construct
  source 1..75: mol_type = other DNA
gtttgacaattgcatttgtcgccggttttgctgttgccagaaaattgacactccgaaaagttgcctcatcggtaa

SEQ ID NO: 805600 - DNA, 75 bp, synthetic construct
  source 1..75: mol_type = other DNA
agaagccgacttcagttctattttttgctggcagtggtgaatgccgtcgtgttaatcgtctgggcgttgtacaat

SEQ ID NO: 805601 - DNA, 75 bp, synthetic construct
  source 1..75: mol_type = other DNA
tcagcgcaccgggtggatatcaccgctgatgctgtaccggaacaactcatgcctgttgtattttcgagagaggga

SEQ ID NO: 805602 - DNA, 75 bp, synthetic construct
  source 1..75: mol_type = other DNA
aatgcaattactgaagaatatctgcgccaggagggcggcgaattgcccctggtaccaggcaaggactggaataat

SEQ ID NO: 805603 - DNA, 75 bp, synthetic construct
  source 1..75: mol_type = other DNA
aatgcaattactgaagaatatctgcaccaggggggcggcgaattgcccctggttccaggcaaggactggaacaat

SEQ ID NO: 805604 - DNA, 75 bp, synthetic construct
  source 1..75: mol_type = other DNA
gcgttgttgccttcggtatcgtggttatcttcggtaaagaagccttcgcgatgaaaggtgctgcgcgtcgtaaaa

SEQ ID NO: 805605 - DNA, 75 bp, synthetic construct
  source 1..75: mol_type = other DNA
taacttcgccttctgccaacgctgggttaaacagtacggttcaaaaccagacttcgagcctatcaactaccgtaa

SEQ ID NO: 805606 - DNA, 75 bp, synthetic construct
  source 1..75: mol_type = other DNA
gttttggttattacggcctacaaggaattatggctgtttacctggttaaacaactgggtatgtctgaagcggatt

SEQ ID NO: 805607 - DNA, 75 bp, synthetic construct
  source 1..75: mol_type = other DNA
ctacggtcgtgccaacctgcgtgataactatcgtctggttgatggcgcatcgaaagacggctggttattcactgc

SEQ ID NO: 805608 - DNA, 75 bp, synthetic construct
  source 1..75: mol_type = other DNA
tcaggcggcggacgtactggccgggatggggctgaccatctctgacctggttcgcataaccctcacaaaagtcgc

SEQ ID NO: 805609 - DNA, 75 bp, synthetic construct
  source 1..75: mol_type = other DNA
aatgttcaatgggagaacggacgattcgcttttctgttcgcaaatttagcgacaatatactggaaacggtgagca

SEQ ID NO: 805610 - DNA, 75 bp, synthetic construct
  source 1..75: mol_type = other DNA
atccttttgacgtaaccagtaatgaatcaggtaagacttatcaactgacgcctaactcgtccaagtcggttcagc

SEQ ID NO: 805611 - DNA, 75 bp, synthetic construct
  source 1..75: mol_type = other DNA
tctgatgtgccttacggtgtgctgctttctggtggtctggattcctcaattatttccgctatcaccaagaaatac

SEQ ID NO: 805612 - DNA, 75 bp, synthetic construct
  source 1..75: mol_type = other DNA
gtacctcaatgcccagttcggtgcagtgcgctttgcgtacaacaaagttcttcatatcaaaaaacatgcttacca

SEQ ID NO: 805613 - DNA, 75 bp, synthetic construct
  source 1..75: mol_type = other DNA
tgcggacaagttttaccagaaacatatcgattcggatattgatattgtaaaactacgaaatgatatcccagatta

SEQ ID NO: 805614 - DNA, 75 bp, synthetic construct
  source 1..75: mol_type = other DNA
gatagatgacgtgaagcggcaaatcaacgattcaatgccctacaccgacattcctatcgacctggtggaagaggc

SEQ ID NO: 805615 - DNA, 75 bp, synthetic construct
  source 1..75: mol_type = other DNA
gacggtggcgtttaagactcccgtgcaggtggagattatcgctggggcacagcttgcaggctgggtcgcggaata

SEQ ID NO: 805616 - DNA, 75 bp, synthetic construct
  source 1..75: mol_type = other DNA
atgatgattactctgcgcaaacttcctatggcggttgccgtcgcagcgggcgtaatgtctgctcaggcaatggct

SEQ ID NO: 805617 - DNA, 75 bp, synthetic construct
  source 1..75: mol_type = other DNA
caaagtgccggagatcacgctggccggatgctgggcccatgcccgcaggggcttcgccgacctgtataaaatcag

SEQ ID NO: 805618 - DNA, 75 bp, synthetic construct
  source 1..75: mol_type = other DNA
ctttgtggtgaaccgttatgtccgtccacaatacagttgtccctgttgccagaaggtgttcagcggtgaaatgcc

SEQ ID NO: 805619 - DNA, 72 bp, synthetic construct
  source 1..72: mol_type = other DNA
atgagtcggaaatacctcattcgtatcactgagctggaaaggctgctctctgagcaggctgaagccctccgt

SEQ ID NO: 805620 - DNA, 75 bp, synthetic construct
  source 1..75: mol_type = other DNA
cgggtcctcagatatcccgaggcctggctgaaggactggcatggcggtacgctggtgagtgacggatacagcgtg

SEQ ID NO: 805621 - DNA, 75 bp, synthetic construct
  source 1..75: mol_type = other DNA
tccctgatacccggaaaggcggtaaatcctgctccggctggctgtgggcttacgtcagcggagaaagaagcagtc

SEQ ID NO: 805622 - DNA, 75 bp, synthetic construct
  source 1..75: mol_type = other DNA
gcagatggcgggagaacgcgccgcgcaaataatgagcttgctggaaaccgcgaaacgcaacggtctggagccgca

SEQ ID NO: 805623 - DNA, 75 bp, synthetic construct
  source 1..75: mol_type = other DNA
ctcgcatcgatgaagcactgaaaaacgaagccgctgatgtgctggcgggtatggggttaaccgtgtcagaccttg

SEQ ID NO: 805624 - DNA, 75 bp, synthetic construct
  source 1..75: mol_type = other DNA
tcctgctgatttcaacggcggcagcttcggtcgtggcgacagcgacgagtggaccttcggtgcccagatggaaat

SEQ ID NO: 805625 - DNA, 75 bp, synthetic construct
  source 1..75: mol_type = other DNA
gtacaaaattaccctcgcacaacaatggcaggctggcgacagcatctggtcacgcccggctattcgtgtcttcgc

SEQ ID NO: 805626 - DNA, 75 bp, synthetic construct
  source 1..75: mol_type = other DNA
ctgaaaggcgaaggcgatatcgacaacgcgccgtggccggttgcagacgagaaagcgatggtggaagattccacg

SEQ ID NO: 805627 - DNA, 75 bp, synthetic construct
  source 1..75: mol_type = other DNA
gtgacgtgatcgcccgttaccagcgcatgctgggcaaaaacgttctgcagccaatcggctgggacgcgtttggtc

SEQ ID NO: 805628 - DNA, 75 bp, synthetic construct
  source 1..75: mol_type = other DNA
acgtaaagagctggatgttgacgtcattgaagctgaactggcaaagcttgctgaacaaccgattgaaaaagactg

SEQ ID NO: 805629 - DNA, 75 bp, synthetic construct
  source 1..75: mol_type = other DNA
taaaaaactcagccgggcgctgaaagccatcacccgttcggaaagttatctgtgtgcaatgaaagccggcgcctg

SEQ ID NO: 805630 - DNA, 75 bp, synthetic construct
  source 1..75: mol_type = other DNA
acatattagtagtaatattaacataaaaaaattacagaatgatgtaggaagatatatttcccaggcaaattccat

SEQ ID NO: 805631 - DNA, 75 bp, synthetic construct
  source 1..75: mol_type = other DNA
tcacgattagtcaatataggaattgataagttttgcgctgaaaataacacgaagataacgggccctgtgcgacaa

SEQ ID NO: 805632 - DNA, 75 bp, synthetic construct
  source 1..75: mol_type = other DNA
tcttggcactcgtgtttatcgaagtgggcgtcgcagcgatttatctgtttcgcaaactaaccggacatgatgagc

SEQ ID NO: 805633 - DNA, 75 bp, synthetic construct
  source 1..75: mol_type = other DNA
cgaattggttgataattttagccagtatctttatccatactttactccttcgagtcttttggagagtctgcatga

SEQ ID NO: 805634 - DNA, 75 bp, synthetic construct
  source 1..75: mol_type = other DNA
ttatcacgcaaatagagcaggattttaatgatcctgttcgcagtgtgtgtcgtgatctttttctttttctggtta

SEQ ID NO: 805635 - DNA, 75 bp, synthetic construct
  source 1..75: mol_type = other DNA
gtgataaaataaatatgctttgcaagggagtgagtagagaagtaaagaaccagacaatggatgtaatagccaatc

SEQ ID NO: 805636 - DNA, 75 bp, synthetic construct
  source 1..75: mol_type = other DNA
agattccgttaaaagccatctgatgtctgatgtgccttacggtgtgctgctatctggtggcctggattcctcaat

SEQ ID NO: 805637 - DNA, 75 bp, synthetic construct
  source 1..75: mol_type = other DNA
atataagtatgtggcaagtaatgtcgatgagtggcagggttttagtaatgagtacttcagcaaagagctcaagta

SEQ ID NO: 805638 - DNA, 75 bp, synthetic construct
  source 1..75: mol_type = other DNA
tgctggaaaacatcgttcgcaccggtacggtgacggagattgacgaggaaaagtggcgggtaagggtaaaaagcg

SEQ ID NO: 805639 - DNA, 75 bp, synthetic construct
  source 1..75: mol_type = other DNA
tgcttgagcgtcatggttatgccttcaatgagttggatcttggcaaacgcgagccggttaccgaggaagagaaac

SEQ ID NO: 805640 - DNA, 75 bp, synthetic construct
  source 1..75: mol_type = other DNA
gaaagaaatcgtggtcagcgcgccggatggcgcggtgttccgctacgacgcagacgctggcgcactgagcgccag

SEQ ID NO: 805641 - DNA, 75 bp, synthetic construct
  source 1..75: mol_type = other DNA
tgagcaacatcatccgcaccgggatcatctctgaagttgatgaggaatcctggtgcgtgcgcgttcgcagcggcg

SEQ ID NO: 805642 - DNA, 75 bp, synthetic construct
  source 1..75: mol_type = other DNA
ggtgaaatctacaaccaccaggcattgcgcgctgaatatggcgatcgttaccagttccagaccgggtctgactgt

SEQ ID NO: 805643 - DNA, 75 bp, synthetic construct
  source 1..75: mol_type = other DNA
atcttgatgtggcattttccaacttttttaatccgaagcggaaagcgcggttcccgacgtttaaacgtaaacacg

SEQ ID NO: 805644 - DNA, 75 bp, synthetic construct
  source 1..75: mol_type = other DNA
aagcgtacgcggcagcgcgtctggcaaaaattcgtcgccagaaccggagaaaagccgaacttcaggccgtgctgg

SEQ ID NO: 805645 - DNA, 75 bp, synthetic construct
  source 1..75: mol_type = other DNA
gcagagctggcggcaaaaaaagcgcaggccagacaggcactgtccatttatctgaatctgcccacgctggatgag

SEQ ID NO: 805646 - DNA, 75 bp, synthetic construct
  source 1..75: mol_type = other DNA
ggagttctgtcaataactgtacgcgggatcccgcgacaggtgctgacggtcttgaacatgccgatcacgaagtgg

SEQ ID NO: 805647 - DNA, 75 bp, synthetic construct
  source 1..75: mol_type = other DNA
atgaccgccgtaacccgtggccgtcgcgcgccctctccacctccaccgtatccgggtaacgctgacaatgctctc

SEQ ID NO: 805648 - DNA, 75 bp, synthetic construct
  source 1..75: mol_type = other DNA
cgctatcacgctatgcagcataacgggcgccgtaataacaaatactgtggcgcgtcgccgcgtgagacacagcaa

SEQ ID NO: 805649 - DNA, 75 bp, synthetic construct
  source 1..75: mol_type = other DNA
atgacagagcagaaacggtcagtactgacactgaaacgaagaaccgacgtggaaacaccgacccggagccggaaa

SEQ ID NO: 805650 - DNA, 75 bp, synthetic construct
  source 1..75: mol_type = other DNA
aaaaacccacgtactggcggtaaacggtgaaatctacaaccaccaggcattgcgcgccgaatatggcgatcgtta

SEQ ID NO: 805651 - DNA, 75 bp, synthetic construct
  source 1..75: mol_type = other DNA
ttcctcaattatttccgctatcaccaagaaatacgccgcccgtcgcgtggaagatcaggaacgctctgaagcctg

SEQ ID NO: 805652 - DNA, 75 bp, synthetic construct
  source 1..75: mol_type = other DNA
aggccagacaggcgctgtccatttatctgaacctgcccacactggatgaggccgtgaacaccctgaagccctggt

SEQ ID NO: 805653 - DNA, 75 bp, synthetic construct
  source 1..75: mol_type = other DNA
gccgtgaacaccctgaaaccctggtggccgggattatttgacggtgacacaccccggcttctggcctgcggtatc

SEQ ID NO: 805654 - DNA, 75 bp, synthetic construct
  source 1..75: mol_type = other DNA
tatttctcaggaggaggaagcgtatgcggcagagcgtctggataaaatccgccgccagaaccggataaaggcaga

SEQ ID NO: 805655 - DNA, 75 bp, synthetic construct
  source 1..75: mol_type = other DNA
aaacgatacgcccacgttgcgtattccctactatcgcccgctcgaaccgctacaaccgggctttttgcccggccg

SEQ ID NO: 805656 - DNA, 75 bp, synthetic construct
  source 1..75: mol_type = other DNA
ctacgcaatgcgatgatggaacaggcgctggaaaccggaaagcagcaagatgtgctggagctggcgcaactggcc

SEQ ID NO: 805657 - DNA, 75 bp, synthetic construct
  source 1..75: mol_type = other DNA
tatttatggtcaaaatttaagactctgtacagaagccagatatgtttgtcctgtgcaacaaattatagatacccc

SEQ ID NO: 805658 - DNA, 75 bp, synthetic construct
  source 1..75: mol_type = other DNA
gctatttagggatttagcatctgcaacatgtcgtcctaatagcaccttggtaacatatggttatagttttggaga

SEQ ID NO: 805659 - DNA, 75 bp, synthetic construct
  source 1..75: mol_type = other DNA
gttataggggtccaggatattggtcataattggtcgtccttgactaaggatgcggtttcaattcttggtggtaaa

SEQ ID NO: 805660 - DNA, 75 bp, synthetic construct
  source 1..75: mol_type = other DNA
ataataatacccagcgcccgattggcgatttagcgcatcactgggaaacctctactgacgggttacgctgggatt

SEQ ID NO: 805661 - DNA, 75 bp, synthetic construct
  source 1..75: mol_type = other DNA
atgcgtaatattgaaaccctcacgactaaaaccggaccggatgatgcaggtcttaatcttttactgacagaggcc

SEQ ID NO: 805662 - DNA, 75 bp, synthetic construct
  source 1..75: mol_type = other DNA
atgcgtaatattgaaaccctcacgactaaaaccggaccggatgacgcagggctaaatattttactgacagaggct

SEQ ID NO: 805663 - DNA, 75 bp, synthetic construct
  source 1..75: mol_type = other DNA
cgtctggaagaacgccgagcaagggctgaagcaatggcagctcgccttgatagtctggcgtgtcatattacatcc

SEQ ID NO: 805664 - DNA, 75 bp, synthetic construct
  source 1..75: mol_type = other DNA
tgaacaccgacgcgtcgttgctgtttctggcagagcgtgaccactatgcgcgcctgccgggaatgaatgacaagg

SEQ ID NO: 805665 - DNA, 75 bp, synthetic construct
  source 1..75: mol_type = other DNA
cccaggccgttgcgccgcataatctctattacgcgccggatccttcctcacaaatcgcctgttcgattggcggca

SEQ ID NO: 805666 - DNA, 75 bp, synthetic construct
  source 1..75: mol_type = other DNA
tttccactgcgtgctggtatatctgcgtcacgcggaagatcccactccgctggtgtgccacggtagctggccggg

SEQ ID NO: 805667 - DNA, 75 bp, synthetic construct
  source 1..75: mol_type = other DNA
atatagtcataattgcttacggtgatccgcttggaagaattatgcgttttataaatgatagtggaagaaaagctc

SEQ ID NO: 805668 - DNA, 75 bp, synthetic construct
  source 1..75: mol_type = other DNA
aaggtctcgaaattttaacggtgttaaatactcctcaaccagaaaatccgccacctccttattctgcttatagaa

SEQ ID NO: 805669 - DNA, 75 bp, synthetic construct
  source 1..75: mol_type = other DNA
ttacggtaccttccactcatatagtaataatagcctttggcgatccacttggcagaattatgcgtttcattagta

SEQ ID NO: 805670 - DNA, 75 bp, synthetic construct
  source 1..75: mol_type = other DNA
ctgaattactgaccgaaatcgcaggtgaacgtagcgcccgctttgataacaaaggcgatcgcttttacgatctga

SEQ ID NO: 805671 - DNA, 75 bp, synthetic construct
  source 1..75: mol_type = other DNA
gtgcagacagtccttggctggccgatgcagggggattattactggtcatcgctggcgggcaccaccgggcaccac

SEQ ID NO: 805672 - DNA, 75 bp, synthetic construct
  source 1..75: mol_type = other DNA
cagttttccacaccacctgcgctgcgctgggaaaatcaaacaccccctaccgtcagcctgatgtgggccgatgcc

SEQ ID NO: 805673 - DNA, 75 bp, synthetic construct
  source 1..75: mol_type = other DNA
ggggagttttctaaatctataattaaaggagaatatttaatcaaaactgctgaaccagcccggaaagaggaaact

SEQ ID NO: 805674 - DNA, 75 bp, synthetic construct
  source 1..75: mol_type = other DNA
tcggcactgctttcccgtgcccgtgtctatctgttgaaatccctgagtacagaggatattgagcaagtactaact

SEQ ID NO: 805675 - DNA, 75 bp, synthetic construct
  source 1..75: mol_type = other DNA
aaccgcaatgcaggtcgccgcactattctttttgttgacgaagttcaccgtttcaacaaaagccagcaggatgca

SEQ ID NO: 805676 - DNA, 75 bp, synthetic construct
  source 1..75: mol_type = other DNA
atatagtaataattgcatacggtgatccacttggtagaatcatgcgttttataaacgatagtggaagaaaagctc

SEQ ID NO: 805677 - DNA, 75 bp, synthetic construct
  source 1..75: mol_type = other DNA
gctgatgtggaacgtatttctgccgtcacctctggcgtgaaagagattcgcgaggcgatcgagcgcgctcggcaa

SEQ ID NO: 805678 - DNA, 75 bp, synthetic construct
  source 1..75: mol_type = other DNA
gtgaggtttatttcccgccggaaatagcacaaacacgctattatttcccgacaaacaggggccttgaaggcaaga

SEQ ID NO: 805679 - DNA, 75 bp, synthetic construct
  source 1..75: mol_type = other DNA
gccggtgaggtttacttcccaccggaaatagcacaaacacgctattatttcccgacaaacagggggctggaaggc

SEQ ID NO: 805680 - DNA, 75 bp, synthetic construct
  source 1..75: mol_type = other DNA
atgcgaaatattgaaacccgaatcaccaaaacaggaccagatgatgctggccttaaccagatgctgactgatgcg

SEQ ID NO: 805681 - DNA, 75 bp, synthetic construct
  source 1..75: mol_type = other DNA
acaaagcaggcgaacaaatcactgttacctgctctttgaattacaacattggtcagattgtcctgtcgttctcca

SEQ ID NO: 805682 - DNA, 75 bp, synthetic construct
  source 1..75: mol_type = other DNA
ggttcggctatcaacgatatgcatccacgcaacggtgctgactacttcacccgtgtaactctgactatggcaaaa

SEQ ID NO: 805683 - DNA, 75 bp, synthetic construct
  source 1..75: mol_type = other DNA
cccatgagcaagatatgcttcgtcttcgtatcatgatttggcgaactcttgcgaccgactcctttgatattgcac

SEQ ID NO: 805684 - DNA, 75 bp, synthetic construct
  source 1..75: mol_type = other DNA
gttatatttacgggggggaatcagtttaagataagaaacaagaaagaattcaccgaatacacaatagaatccaac

SEQ ID NO: 805685 - DNA, 75 bp, synthetic construct
  source 1..75: mol_type = other DNA
actgcacagaaatttactccgctggtatagcgcaggtcgcctggatatccccgaacttctggattacgcccggtc

SEQ ID NO: 805686 - DNA, 75 bp, synthetic construct
  source 1..75: mol_type = other DNA
tcgtgtaacgctgacaatggccaaaaaaggcgggcttaactttataagcggcgacacgattgatgccggtgactc

SEQ ID NO: 805687 - DNA, 75 bp, synthetic construct
  source 1..75: mol_type = other DNA
gccacatgcctggctgacagacgtcctgacacgtctgccggagtggccggaggagcaactggcagagttgctgcc

SEQ ID NO: 805688 - DNA, 75 bp, synthetic construct
  source 1..75: mol_type = other DNA
tcctggcgcgtctgccggaatggccagaggagcgactggcagagttgctgcctcttgagggatttaccttctccg

SEQ ID NO: 805689 - DNA, 75 bp, synthetic construct
  source 1..75: mol_type = other DNA
gcgacaacggtattcccggccgatagtgaatgacctgtttgcctggcttgaagagcaggagccgtgctgtccgcc

SEQ ID NO: 805690 - DNA, 75 bp, synthetic construct
  source 1..75: mol_type = other DNA
gaagcagctcctgagctgatcccacttatcaaccacgaaatgaagagttacaccctgttcccaaaccagttcgtc

SEQ ID NO: 805691 - DNA, 75 bp, synthetic construct
  source 1..75: mol_type = other DNA
aagcgccggataaaggcactgagatcgccattgaggcggagatcaatatagaagcagctcctgagctgatcccac

SEQ ID NO: 805692 - DNA, 75 bp, synthetic construct
  source 1..75: mol_type = other DNA
gcacaggtgatcatcaataaatacggtgaccacctgcctctgtatcgccagcaacaggtctttgcccgttcagat

SEQ ID NO: 805693 - DNA, 75 bp, synthetic construct
  source 1..75: mol_type = other DNA
gtgccgtagttggcggatggatcagcacgctgtttggctttggtaaagtcgatggcttcaattttggcagcttcg

SEQ ID NO: 805694 - DNA, 75 bp, synthetic construct
  source 1..75: mol_type = other DNA
ccaggaaatctgccttccgtcactggcgcaagccaggagacggtactgggggctattttccccgctaacccgtga

SEQ ID NO: 805695 - DNA, 75 bp, synthetic construct
  source 1..75: mol_type = other DNA
gagcttgaggcgctggcgcgtggcgcgaccgtaaattatgacgggaaaaaattcacgtatccggtcgctgatgag

SEQ ID NO: 805696 - DNA, 75 bp, synthetic construct
  source 1..75: mol_type = other DNA
ctaaaaccggaccggatgatgcaggtcttaatcttttactgacagaggcccgtcttgaagaacgtcgggcaaggg

SEQ ID NO: 805697 - DNA, 75 bp, synthetic construct
  source 1..75: mol_type = other DNA
cgccagctaaaccacgtggaagcggcagaactgctgcgcgtgactgctgaagcaatccagaacgaagcgcaggag

SEQ ID NO: 805698 - DNA, 75 bp, synthetic construct
  source 1..75: mol_type = other DNA
gtggcgatccagttatgacacctacaccgtctgagcaagccgcagcggtgttaaatctgattgaggccggggtta

SEQ ID NO: 805699 - DNA, 75 bp, synthetic construct
  source 1..75: mol_type = other DNA
ctgaagcaatggcagctcgccttgatagcctggcgtttcatatctcatcccgccagctaaaccacgtggaagcgg

SEQ ID NO: 805700 - DNA, 75 bp, synthetic construct
  source 1..75: mol_type = other DNA
gaatgattttgggtttaacgacattttctcccgttacgttgaagcagtaggtcgcgaaggtgatgtgctgctggg

SEQ ID NO: 805701 - DNA, 75 bp, synthetic construct
  source 1..75: mol_type = other DNA
gtcgcgaaggcgatgtactgctggggatctccacctcaggtaactctgcaaacgtgatcaaagcgatcgcggcgg

SEQ ID NO: 805702 - DNA, 75 bp, synthetic construct
  source 1..75: mol_type = other DNA
tacagctcggtgaaaacaggtatggaggaactcattccagttgcccaacagtggcaagcagaagaaccagaaagt

SEQ ID NO: 805703 - DNA, 75 bp, synthetic construct
  source 1..75: mol_type = other DNA
atgttcttcgtcatttttgctggtgacttttttcggtcaaacatcctgctgattttcgtggcgataggcatggtt

SEQ ID NO: 805704 - DNA, 75 bp, synthetic construct
  source 1..75: mol_type = other DNA
gcttgtgcgcgttgcgattggcgggcgtatctcactcatggtcggtgttgctgcggcactggtggcagtggtcgt

SEQ ID NO: 805705 - DNA, 75 bp, synthetic construct
  source 1..75: mol_type = other DNA
ttgtcgtttctgtgttggcgatgtcgtctgctgcggtaagtgcagccgagggtgatgaatcagtaacgaccactg

SEQ ID NO: 805706 - DNA, 75 bp, synthetic construct
  source 1..75: mol_type = other DNA
cagacctggtcattgatcactcatttaatcgcggcaaacagcatgcttactttatccaccaattacggtcacgca

SEQ ID NO: 805707 - DNA, 75 bp, synthetic construct
  source 1..75: mol_type = other DNA
gctcacgtctaagaagctcacagcgttctttgagtggcttctatatagtgatctatacctacactacttccatct

SEQ ID NO: 805708 - DNA, 75 bp, synthetic construct
  source 1..75: mol_type = other DNA
tcctgataaacaaatctcatgataataacccaacattattacattgtgttatgtcagctttagagcatgaaaaac

SEQ ID NO: 805709 - DNA, 75 bp, synthetic construct
  source 1..75: mol_type = other DNA
acgctctctgatatgcagaagcgtcaacgtgacgtagcagaacttgacgccagatatacaaaggagcttgctgat

SEQ ID NO: 805710 - DNA, 75 bp, synthetic construct
  source 1..75: mol_type = other DNA
gcctccggcgtggatgatgcttccagccccagacttactgacaccgctcaacgggattatttcgttctcagagag

SEQ ID NO: 805711 - DNA, 75 bp, synthetic construct
  source 1..75: mol_type = other DNA
cgctgaacgggattatttcatcctcagagaacggttgatgacaatgcagaagcagctggaaggggcacaggacta

SEQ ID NO: 805712 - DNA, 75 bp, synthetic construct
  source 1..75: mol_type = other DNA
ttattaccgtctccgatgtggaatcgacaagataaccgcgcaggttaactacctgcaggaatacatcaggacgca

SEQ ID NO: 805713 - DNA, 75 bp, synthetic construct
  source 1..75: mol_type = other DNA
ttattaccgtctccgatgtggaatcgacaagataaccgcgcaggttaactacatgcaggactacatcaggacgca

SEQ ID NO: 805714 - DNA, 75 bp, synthetic construct
  source 1..75: mol_type = other DNA
ttattaccgtctccgaagtggaatcgacaagataaccgcgcaggttaactacctgcaggattacatcaggacgca

SEQ ID NO: 805715 - DNA, 75 bp, synthetic construct
  source 1..75: mol_type = other DNA
gaacaggcgggagatgcttatgcactgatggcaagcggcaaatgtgggaaagttgtgattaatttcccggattaa

SEQ ID NO: 805716 - DNA, 75 bp, synthetic construct
  source 1..75: mol_type = other DNA
ttattaccgtctccgacgtggaatcgacaagataaccgcgcaggttaactacttgcaggaatacatcaggacgca

SEQ ID NO: 805717 - DNA, 75 bp, synthetic construct
  source 1..75: mol_type = other DNA
ttattaccgtctccgacgtggaatcgacaagataaccgcgcaggttaactacatgcaggattacatcaggacgca

SEQ ID NO: 805718 - DNA, 75 bp, synthetic construct
  source 1..75: mol_type = other DNA
gttggcaaacgcaaccattactgatatgcaggtgcgccagcgcgatgttgctgcgctcgatgcaaaatactcgag

SEQ ID NO: 805719 - DNA, 75 bp, synthetic construct
  source 1..75: mol_type = other DNA
ttgctatgctgctggtggcctgtgttgtgcttagtctggggctgaatcattaccgtgataacgccatcgcctaca

SEQ ID NO: 805720 - DNA, 75 bp, synthetic construct
  source 1..75: mol_type = other DNA
ggctgatggcaatgcagaagcaactggaaggagcacaggaatatatccgtaccagtgtataccgtgatgttttgt

SEQ ID NO: 805721 - DNA, 75 bp, synthetic construct
  source 1..75: mol_type = other DNA
atgcagcagcgtcagcgtgatgttgcagcacttgatgccggatactcaagggagttagctgatgcgaaagctgaa

SEQ ID NO: 805722 - DNA, 75 bp, synthetic construct
  source 1..75: mol_type = other DNA
gttgcgcatcaaggcagtctgttcgtccgtgcgtgaaggcaccgccgcctccggcgtggataatgcagccgcccc

SEQ ID NO: 805723 - DNA, 75 bp, synthetic construct
  source 1..75: mol_type = other DNA
tcattgccctcctggtggcctgtggtgcgcttagtctggggctgaatcattaccgtgataacgccattacctaca

SEQ ID NO: 805724 - DNA, 75 bp, synthetic construct
  source 1..75: mol_type = other DNA
tgggattatttcatcctcagagaacggttgatgacaatgcagaagcagctggaaggggcgcaggaatatatccgc

SEQ ID NO: 805725 - DNA, 75 bp, synthetic construct
  source 1..75: mol_type = other DNA
aacgccataacctacaaagcgcagcgcgataaaaaagtcagtgagctggagctggcaaatgcaaccattactgat

SEQ ID NO: 805726 - DNA, 75 bp, synthetic construct
  source 1..75: mol_type = other DNA
tgctggtggtctgtggtgcgcttagtctggggctgaatcattaccgcgataacgccataacctacaaagcgcagc

SEQ ID NO: 805727 - DNA, 75 bp, synthetic construct
  source 1..75: mol_type = other DNA
ttattaccgtctccgaagcggaatcgacaggataaccgcgcaggttaactacctgcaggaatacatcaggacgca

SEQ ID NO: 805728 - DNA, 75 bp, synthetic construct
  source 1..75: mol_type = other DNA
cgggattatttcactctcagagagcggttgatgctgatgcagaagcagctggaaggggcacaggactatatccgc

SEQ ID NO: 805729 - DNA, 75 bp, synthetic construct
  source 1..75: mol_type = other DNA
cccccgactggcagacacagttgaacgggattatttcactctcagagagcggttgatgctgatgcagaagcagct

SEQ ID NO: 805730 - DNA, 75 bp, synthetic construct
  source 1..75: mol_type = other DNA
ttattgtcatgctggtggcctgtggtgcgcttagtctggggctgaatcattaccgtgataacgccattacctaca

SEQ ID NO: 805731 - DNA, 75 bp, synthetic construct
  source 1..75: mol_type = other DNA
ttattaccgtctccgaagtggaatcgacaagataaccgcgcaggttaactacttgcaggactacatcaggacgca

SEQ ID NO: 805732 - DNA, 75 bp, synthetic construct
  source 1..75: mol_type = other DNA
agagctgaaaatgaaactctgcgtgctgatgttgccgctggtcgtaagcgcctgcggatcaacgccacctgtcca

SEQ ID NO: 805733 - DNA, 75 bp, synthetic construct
  source 1..75: mol_type = other DNA
agcgtgctggttgccaccgcctacatggaagaggccgaacgcttcgactggctggtagcgatgaatgccggagaa

SEQ ID NO: 805734 - DNA, 75 bp, synthetic construct
  source 1..75: mol_type = other DNA
tgcgcttagtctggggctgaatcattaccgcgataacgccataacctacaaagagcagcgcgataaaaaagtcag

SEQ ID NO: 805735 - DNA, 75 bp, synthetic construct
  source 1..75: mol_type = other DNA
gagctggaacaggcgaatgccaccattactgacatgcaggtgcgccagcgtgatgttgctgcgctcgatgcaaaa

SEQ ID NO: 805736 - DNA, 75 bp, synthetic construct
  source 1..75: mol_type = other DNA
cgggattatttcaccctcagagaacggttgatgacaatgcagaagcagctggaaggggcgcaggaatatatccgc

SEQ ID NO: 805737 - DNA, 75 bp, synthetic construct
  source 1..75: mol_type = other DNA
cctgcgcgtcaacgccacctgtgtgtccaccacagataaaaccaccggcaccgccagcgtggataatgcagcccg

SEQ ID NO: 805738 - DNA, 75 bp, synthetic construct
  source 1..75: mol_type = other DNA
tcgacggagcgatgcccagtcgtgccgaaacggtaaaaggttacgtgcaggcaatgcaccagagttggcttcagg

SEQ ID NO: 805739 - DNA, 75 bp, synthetic construct
  source 1..75: mol_type = other DNA
cttctggcgtcgatccggtggcgagggatatgttctggcagttgatggtggatctctcgcgccaggacaaagtga

SEQ ID NO: 805740 - DNA, 75 bp, synthetic construct
  source 1..75: mol_type = other DNA
atcaaagacatgcagacccggcagcgagatgtcgctgcgctggatgccaaatacattaaggaattagctgatgcg

SEQ ID NO: 805741 - DNA, 75 bp, synthetic construct
  source 1..75: mol_type = other DNA
tatgaacgaagcggaacgttgtgaccgtatctcactgatgcacgccggaaaagtgctcgccagcggtacaccgca

SEQ ID NO: 805742 - DNA, 75 bp, synthetic construct
  source 1..75: mol_type = other DNA
aacggttgatgacaatgcagaagcagctggaaggggcgcaggaatatatccgcactcagtgtactaagcaggctt

SEQ ID NO: 805743 - DNA, 75 bp, synthetic construct
  source 1..75: mol_type = other DNA
tccggacatgcataaaaccaccgccgcctccggcgtggatgatggtgccagccccagacttactgacaccgctca

SEQ ID NO: 805744 - DNA, 75 bp, synthetic construct
  source 1..75: mol_type = other DNA
gttaggcgaattactgagtgaagatgaaatactcgaacaattattaacagcaacatcagaaagacaattagcgga

SEQ ID NO: 805745 - DNA, 75 bp, synthetic construct
  source 1..75: mol_type = other DNA
aagtaatgaaccgattaaattacttatcgggctttctgctgccgatgccgattcgcacattggcgctattcaggc

SEQ ID NO: 805746 - DNA, 75 bp, synthetic construct
  source 1..75: mol_type = other DNA
tcattgccctgctggtggcctgtggtgcgcttactctggggctgaatcattaccgtgataacgccattacctaca

SEQ ID NO: 805747 - DNA, 75 bp, synthetic construct
  source 1..75: mol_type = other DNA
tattaccgtctccgaagtggaatcgacaggataaccgcacaggttaattacctacaggaatacatcagaactcaa

SEQ ID NO: 805748 - DNA, 75 bp, synthetic construct
  source 1..75: mol_type = other DNA
taccgtgataacgccatcgcctacaaagaacagcgtgataaagccacatccatcatcgctgatatgcagaagcgt

SEQ ID NO: 805749 - DNA, 75 bp, synthetic construct
  source 1..75: mol_type = other DNA
gaatgacgaaccgattaaattactcatcggactttctgctgccgatgccgattcgcacattggcgctattcaggc

SEQ ID NO: 805750 - DNA, 75 bp, synthetic construct
  source 1..75: mol_type = other DNA
ctgcctgtcattggctgttaatcattaccgtgataacgcaatcgcctacaaagagcagcgcgataacaaggccag

SEQ ID NO: 805751 - DNA, 75 bp, synthetic construct
  source 1..75: mol_type = other DNA
ctgcctgtcatgggcggttaatcattaccgtgataacgccatcgcctacaaagaacagcgtgataaaaaagtcag

SEQ ID NO: 805752 - DNA, 75 bp, synthetic construct
  source 1..75: mol_type = other DNA
caacgtgatgtagcagaactcgacgccagatacacaaaggagcttgctgatgctaacgcgactatcgaaagtcta

SEQ ID NO: 805753 - DNA, 75 bp, synthetic construct
  source 1..75: mol_type = other DNA
tccagacatgcataaaatcaccgccgcctccggcgtggatgatggcaccagccccagacttactgacaccgctca

SEQ ID NO: 805754 - DNA, 75 bp, synthetic construct
  source 1..75: mol_type = other DNA
tgctaatgcgactatcgaaagtcttcgtgctgatgtttctgctgggcataagcgcctgcaagtcgccgccacctg

SEQ ID NO: 805755 - DNA, 75 bp, synthetic construct
  source 1..75: mol_type = other DNA
acgcgattacctacaaagcgcagcgcgataaaaaagccagagagctggagctggcaaacgccaccattactgata

SEQ ID NO: 805756 - DNA, 75 bp, synthetic construct
  source 1..75: mol_type = other DNA
gagctggaacaggcgaatgccaccataactgacatgcaggtgcgccagcgcgatgttgctgcgctcgatgccaga

SEQ ID NO: 805757 - DNA, 75 bp, synthetic construct
  source 1..75: mol_type = other DNA
aagagcagagagatgatgcgaagacaaaactcagccaggcgaatgcagccattactgacatgcagcagcgccagc

SEQ ID NO: 805758 - DNA, 75 bp, synthetic construct
  source 1..75: mol_type = other DNA
ctgtctgtcgtgggcagtcaatcattaccgtgataacgccattacctacaaagagcagcgcgataaaaaagtcag

SEQ ID NO: 805759 - DNA, 75 bp, synthetic construct
  source 1..75: mol_type = other DNA
attactgacatgcagcagcgtcagcgtgatgttgctgcactcgatgcaaaatacacaaaggagttaaccgatgcg

SEQ ID NO: 805760 - DNA, 75 bp, synthetic construct
  source 1..75: mol_type = other DNA
cctgcgggtcaacgccacctgccccggtaccgtgcgtgaagccaccggcacctccagcgtggataatgcaaccgg

SEQ ID NO: 805761 - DNA, 75 bp, synthetic construct
  source 1..75: mol_type = other DNA
atgaaccgtgttctgtgtgtggtgattattgtcatgctggtagcctgtggtgtgcttagtctggggctgaatcat

SEQ ID NO: 805762 - DNA, 75 bp, synthetic construct
  source 1..75: mol_type = other DNA
atgaaccgtgttctgtgtgtggtgattattgtcatgccggtagcctgtggtgcactgaggctggcaacaaaccat

SEQ ID NO: 805763 - DNA, 75 bp, synthetic construct
  source 1..75: mol_type = other DNA
ctgcctgtcgtgggcggtcaatcattaccgtgataacgccatcacctataaggtacaacgcgatgatacgaagac

SEQ ID NO: 805764 - DNA, 75 bp, synthetic construct
  source 1..75: mol_type = other DNA
aacgccatcacttacaaagcgcagcgcgataaaaaagtcagtgagctgaagctggcgaacgccaccattactgat

SEQ ID NO: 805765 - DNA, 75 bp, synthetic construct
  source 1..75: mol_type = other DNA
tgcgctgtgtctggcaacaaaccattaccgcgataacgccatcacctacaaagcgcagcgcgataaaaaagtcag

SEQ ID NO: 805766 - DNA, 75 bp, synthetic construct
  source 1..75: mol_type = other DNA
cggctacacactggcaaaacagcttgctgatagcaattatgagctacccgcgattatcagctttcaggagttacc

SEQ ID NO: 805767 - DNA, 75 bp, synthetic construct
  source 1..75: mol_type = other DNA
agtaaagattccgcggcaaaaattgcagaagctacaaacgtatccctttcctggttgctgacaggaaaagaagat

SEQ ID NO: 805768 - DNA, 75 bp, synthetic construct
  source 1..75: mol_type = other DNA
tgtttttacttgaactccttgcgttggctcccagttcatttggcagggataatgttgtactttattccgctagtt

SEQ ID NO: 805769 - DNA, 75 bp, synthetic construct
  source 1..75: mol_type = other DNA
ggaacttccaggcatcttacgttaagcaggcagcgtcgattcctgtcgttgccgggtttgtgaaaaccaacgcgg

SEQ ID NO: 805770 - DNA, 75 bp, synthetic construct
  source 1..75: mol_type = other DNA
gatggtgtgaatattgccctgcataatattgaaggttccactattaagcaggttcaggttaataatccgggtgat

SEQ ID NO: 805771 - DNA, 75 bp, synthetic construct
  source 1..75: mol_type = other DNA
aaggttctactattaagcaggttaaaatcaacaatcctggcgatatctattccaaagcactggatgcaacttcca

SEQ ID NO: 805772 - DNA, 75 bp, synthetic construct
  source 1..75: mol_type = other DNA
acaacgaatacaccggtaacggcgttacgacatcgtttccgtatacttttcgaattttcagaaaatcagacctgg

SEQ ID NO: 805773 - DNA, 75 bp, synthetic construct
  source 1..75: mol_type = other DNA
tttattttagttacaaacacagaacaattaaaagcatcgataaatcatatttatggttatagtattaactcacaa

SEQ ID NO: 805774 - DNA, 75 bp, synthetic construct
  source 1..75: mol_type = other DNA
gggtaattaagtatgaggctgtgaatagtcaggcgttccgtttgcttgagataagccctttcgaattgtgggtgg

SEQ ID NO: 805775 - DNA, 75 bp, synthetic construct
  source 1..75: mol_type = other DNA
taaggtttcttttttcggccccttctatggcgggtataacgtaattgcactcgaccgggaatatcgtcacgcgct

SEQ ID NO: 805776 - DNA, 75 bp, synthetic construct
  source 1..75: mol_type = other DNA
ggtgttgctcatactggttcctcatcgagtgccgactttgacgatttacgccagcgcatacagcttcaggcgaat

SEQ ID NO: 805777 - DNA, 75 bp, synthetic construct
  source 1..75: mol_type = other DNA
tgtctgacaatccggataatcgagttgtcagtgataccctgatacttggttgtacgtcagtagcccctgagggtg

SEQ ID NO: 805778 - DNA, 75 bp, synthetic construct
  source 1..75: mol_type = other DNA
gaactcaattattaccgtctccgaagtggaatcgacaagataaccgcgcaggttaactacctgcaggaatacatc

SEQ ID NO: 805779 - DNA, 75 bp, synthetic construct
  source 1..75: mol_type = other DNA
tgctgtttattgatgagatccatcgtctctcgccagtcgtggaagaggtgctgtatccggcgatggaagattacc

SEQ ID NO: 805780 - DNA, 75 bp, synthetic construct
  source 1..75: mol_type = other DNA
ctggaaccttatttgattcagcagggctttttgcagcggacgccgcgcgggcgtatggcgacagtgcgtgcgtgg

SEQ ID NO: 805781 - DNA, 75 bp, synthetic construct
  source 1..75: mol_type = other DNA
aaaaaccacgttagccaacatcgttgccaatgaaatgggcgtcaatttacgcacaacgtctggtccggtactgga

SEQ ID NO: 805782 - DNA, 75 bp, synthetic construct
  source 1..75: mol_type = other DNA
taacactctcgctaaacgcgccccctatttttccagtctgttgattggcttagttggtgtgtatatgggcgtaca

SEQ ID NO: 805783 - DNA, 75 bp, synthetic construct
  source 1..75: mol_type = other DNA
tgagaatatgcacgagcatcaccatcatgaccatgaacatcatcacgaccatgatcacgaacatcatcaccatca

SEQ ID NO: 805784 - DNA, 75 bp, synthetic construct
  source 1..75: mol_type = other DNA
atggtgaaagttggaacctcttacgtgccgatcaacgtctcattttcgccaaaagttggcccagggcttcccggt

SEQ ID NO: 805785 - DNA, 75 bp, synthetic construct
  source 1..75: mol_type = other DNA
gtactgtgcgtggtcatcattgccctgctggtggcctgtggtgcgcttagtctggggctgaatcattaccgtgat

SEQ ID NO: 805786 - DNA, 75 bp, synthetic construct
  source 1..75: mol_type = other DNA
ggtgcgctgtggctggcaacaaaccattaccgtgacaacgcgctcacctacaaagcgcagcgcgataaaaaagcc

SEQ ID NO: 805787 - DNA, 75 bp, synthetic construct
  source 1..75: mol_type = other DNA
ttcatcctcagagaacggctgatggcaatgcagaagcaactggaaggagcacaggaatatatccgtacccagtgt

SEQ ID NO: 805788 - DNA, 75 bp, synthetic construct
  source 1..75: mol_type = other DNA
gattatttcaccctcagagagagaattgaaatcagttataaacagataagagcattgcaggactatatctcaagt

SEQ ID NO: 805789 - DNA, 75 bp, synthetic construct
  source 1..75: mol_type = other DNA
cctccggcgtgggtaatacaaccggtccccgactggcagaagccgctgaacgggattatttcatcctcagagaac

SEQ ID NO: 805790 - DNA, 75 bp, synthetic construct
  source 1..75: mol_type = other DNA
cagtgatcattattagcaccgcgttctggatgttctggcgtacctggcgcggcgaacgcaactggctggagaata

SEQ ID NO: 805791 - DNA, 75 bp, synthetic construct
  source 1..75: mol_type = other DNA
ggacgagctgaaagagagcaaactggacctggtggttgcgggtactgaagccgctgtactgatggttgaatctga

SEQ ID NO: 805792 - DNA, 75 bp, synthetic construct
  source 1..75: mol_type = other DNA
gcggcgtgctggcagtaatgccggatatggacaaattcccgtacaccgtacgtgttgtgtctgaaatcaccgaat

SEQ ID NO: 805793 - DNA, 75 bp, synthetic construct
  source 1..75: mol_type = other DNA
gacggcgagaaagcgaaacacgctattcgtcgtatcgaagaaatcaccgcagaaatcgaagtgggtcgcgtctac

SEQ ID NO: 805794 - DNA, 75 bp, synthetic construct
  source 1..75: mol_type = other DNA
cttgctgatgctaacgcgactatcgaaagtctccgtgctgatgtttctgctgggcgtaagcgcctgcaagtcgcc

SEQ ID NO: 805795 - DNA, 75 bp, synthetic construct
  source 1..75: mol_type = other DNA
gttgtactgtctgacattttgggcgacgaagatcacctgggcgatatggacttcaaagttgcgggttcccgcgag

SEQ ID NO: 805796 - DNA, 75 bp, synthetic construct
  source 1..75: mol_type = other DNA
ttaacccggatatcgtcgcgatgattggtgcttccgcagcactgtctctgtctggtattccgttcaatggtccga

SEQ ID NO: 805797 - DNA, 75 bp, synthetic construct
  source 1..75: mol_type = other DNA
ctgccgttgcgggtatcgcaatgggtctggtgaaagaaggcaacaactacgttgtactgtctgacattttgggcg

SEQ ID NO: 805798 - DNA, 75 bp, synthetic construct
  source 1..75: mol_type = other DNA
actgatgggcgaacgtactgacaccttcctgttccactacaactttcctccgtactccgtaggcgaaaccggcat

SEQ ID NO: 805799 - DNA, 75 bp, synthetic construct
  source 1..75: mol_type = other DNA
caagcgaaggcgaaacgctgatcgcgcgtctgattgaccgcccgattcgcccgctgttcccggaaggcttcgtca

SEQ ID NO: 805800 - DNA, 75 bp, synthetic construct
  source 1..75: mol_type = other DNA
cgtgtgcggcgcgtctctggcgctgatggacgcaggtgtgccgatcaaagctgccgttgcgggtatcgcaatggg

SEQ ID NO: 805801 - DNA, 75 bp, synthetic construct
  source 1..75: mol_type = other DNA
tgatgtgaatattcttaacagtttttctaaagatgattacgtaaactggatattatcctgtgatcaggatgcttt

SEQ ID NO: 805802 - DNA, 75 bp, synthetic construct
  source 1..75: mol_type = other DNA
aaaattttctagtttcagatcatcgggttgccgtcataaaaggagattggggcgttggtaaaactcattattgga

SEQ ID NO: 805803 - DNA, 75 bp, synthetic construct
  source 1..75: mol_type = other DNA
atttaagaccccttcctcgggaggggctttcccgtttcagcgtcccgctgaaatcgtcggcttacctcctttcgc

SEQ ID NO: 805804 - DNA, 75 bp, synthetic construct
  source 1..75: mol_type = other DNA
caaaaccgagcagttctgtccgaatgccaaaatcattcatgtcgatatcgaccgtgcagagctgggtaaaatcaa

SEQ ID NO: 805805 - DNA, 75 bp, synthetic construct
  source 1..75: mol_type = other DNA
tatgctggcgcagaacattgcagaagcggcgagcggcattgataagctggtttcccgcgtgctggttctggctga

SEQ ID NO: 805806 - DNA, 75 bp, synthetic construct
  source 1..75: mol_type = other DNA
gtcgaaataaaatacgatcctacgcctgagaagaacttacgtaaagttttttatgaaactgattctgattttctt

SEQ ID NO: 805807 - DNA, 75 bp, synthetic construct
  source 1..75: mol_type = other DNA
tcctgaaacctcgacgctagtccgccgctttaatcacggcgcacaaccgcctgtgcagtcggcccttgatggtaa

SEQ ID NO: 805808 - DNA, 75 bp, synthetic construct
  source 1..75: mol_type = other DNA
atttaaggccccttcctcgggaggggctttcccgtttcagcgtcccgctgaaatcatcggcttacctcctttcgc

SEQ ID NO: 805809 - DNA, 75 bp, synthetic construct
  source 1..75: mol_type = other DNA
ttgatgcgctggttgccgcaggcgttgacgttctgctgattgactcctctcacggtcactctgaaggtgttctgc

SEQ ID NO: 805810 - DNA, 75 bp, synthetic construct
  source 1..75: mol_type = other DNA
atgactaagagcaccacgatgatgatccacttcatcatgaccctttccttatttaagaccccttcctcgggaggg

SEQ ID NO: 805811 - DNA, 75 bp, synthetic construct
  source 1..75: mol_type = other DNA
gacgcacatcctgagctgggtaataacgcacagctggcggcgttactggggatcacggtcatgggcgaaattgag

SEQ ID NO: 805812 - DNA, 75 bp, synthetic construct
  source 1..75: mol_type = other DNA
ataactacagcctgtatgagcgatattttgcgccacgtggcattgcaatgttgaccattgatatgccctcggtgg

SEQ ID NO: 805813 - DNA, 75 bp, synthetic construct
  source 1..75: mol_type = other DNA
gtccaatcccgaaagcgtgcgatccattaagccattacggcctgatcaacgccgttgccgcctgtgtcgatgaca

SEQ ID NO: 805814 - DNA, 75 bp, synthetic construct
  source 1..75: mol_type = other DNA
gtggatatgagtacaaggaacgtttcccgcagatgattcggtatcgggttaaagagtgggaaaaagttgccggtg

SEQ ID NO: 805815 - DNA, 75 bp, synthetic construct
  source 1..75: mol_type = other DNA
ccgcacggttgctgaagacggcaagctggaaatccacactacatatgtgagtctgtcgatgatcccactggaaat

SEQ ID NO: 805816 - DNA, 75 bp, synthetic construct
  source 1..75: mol_type = other DNA
acttcttggttagaagtagtttttacatgataaggttaaattatattcctttagggcacaagactagagagtgta

SEQ ID NO: 805817 - DNA, 75 bp, synthetic construct
  source 1..75: mol_type = other DNA
agatatctattcaactaaatatgattatatatatgcatatggaagttggacgttactcatcatcccatcactctg

SEQ ID NO: 805818 - DNA, 75 bp, synthetic construct
  source 1..75: mol_type = other DNA
gcaaaatgtaccaatgccgtttttgcgattgtatggttatctcgacggtctggtgccgcgcaaagtagtgccgat

SEQ ID NO: 805819 - DNA, 75 bp, synthetic construct
  source 1..75: mol_type = other DNA
actctggctatatctgagaactaaggcaaagaaaaagaaaatcctacaggttgttaagaagataaaagaaagcag

SEQ ID NO: 805820 - DNA, 75 bp, synthetic construct
  source 1..75: mol_type = other DNA
gcgctggggctggtgcatcagcaacagagtctgttctacgagcaaggcgtttttgccgccacctatccgggcaaa

SEQ ID NO: 805821 - DNA, 75 bp, synthetic construct
  source 1..75: mol_type = other DNA
gctgttgccgcctgtgtcgatgacaatgcgattatcaccaccgatgttggtcagcatcaaatgtggacggcgcag

SEQ ID NO: 805822 - DNA, 75 bp, synthetic construct
  source 1..75: mol_type = other DNA
atcaatgcgcctgcgcgggtgcgtgaactggcggagaaagcgcaactgcctaccaccatgactttaatggcgctg

SEQ ID NO: 805823 - DNA, 75 bp, synthetic construct
  source 1..75: mol_type = other DNA
ggtaaagacattcctgcagaccgactcgcctatatggaagctatcattgaagaggtggaaaacggtatctgtgat

SEQ ID NO: 805824 - DNA, 75 bp, synthetic construct
  source 1..75: mol_type = other DNA
gttatgaaattcatgcacagccagagttgtttggtatgtcttctcgaccaccgctgaaagaaggtcgttttacgt

SEQ ID NO: 805825 - DNA, 75 bp, synthetic construct
  source 1..75: mol_type = other DNA
cgtgatgaagacctgttccagcagttacttcatacggagcgcgcgatcccactgattggccgctcggggatgggg

SEQ ID NO: 805826 - DNA, 75 bp, synthetic construct
  source 1..75: mol_type = other DNA
ttccagaaagcggaacgtaaaccgaacgcctgtaaagacgagcaaggccgtctgcgtgtaggtgcagcggttggc

SEQ ID NO: 805827 - DNA, 75 bp, synthetic construct
  source 1..75: mol_type = other DNA
ttgtacgtatcagcggtgcgggcattcaggaaagccacgttcacgacgtgaccatcaccaaagagtccccgaact

SEQ ID NO: 805828 - DNA, 75 bp, synthetic construct
  source 1..75: mol_type = other DNA
cgcctgaaagagatcatccaccagcagatgggcggtctgcgctcctgtatggggctgaccggctgtggtactatc

SEQ ID NO: 805829 - DNA, 75 bp, synthetic construct
  source 1..75: mol_type = other DNA
attgaacgccaggctgaagaagttcgccgtgtgaaaaaacacgaatctggcgtggtgactgacccacagacggtt

SEQ ID NO: 805830 - DNA, 75 bp, synthetic construct
  source 1..75: mol_type = other DNA
tccggatgcaatgcgcgttgttggccaactgggccaggttctggggccgcgcggcctgatgccaaacccgaaggt

SEQ ID NO: 805831 - DNA, 75 bp, synthetic construct
  source 1..75: mol_type = other DNA
ccagctgggccaggttctgggtccgcgtggcctgatgccaaacccgaaagtgggtactgtaacaccgaacgttgc

SEQ ID NO: 805832 - DNA, 75 bp, synthetic construct
  source 1..75: mol_type = other DNA
cgtggcctgatgccaaacccgaaagtgggtactgtaacaccgaacgttgctgaagcggttaaaaacgctaaagct

SEQ ID NO: 805833 - DNA, 75 bp, synthetic construct
  source 1..75: mol_type = other DNA
tgctttagatagttatacaggaagccgacttgttcagattgctacaaaattattaatggttacgggggttagaac

SEQ ID NO: 805834 - DNA, 75 bp, synthetic construct
  source 1..75: mol_type = other DNA
taacgctagccgacgctcgtgaaaaacgcaacgaagccaggaaaatcctcactgctggaggcgatccaggggtgg

SEQ ID NO: 805835 - DNA, 75 bp, synthetic construct
  source 1..75: mol_type = other DNA
acaccatgagtaccattctgcacgaacagggctttaattccgcctggattgaaatgcaattagctcatgtggata

SEQ ID NO: 805836 - DNA, 75 bp, synthetic construct
  source 1..75: mol_type = other DNA
tcaaggttttgatagtgcctggattgaactccagttggctcatgtagataaaaataacattcgaggtacttataa

SEQ ID NO: 805837 - DNA, 75 bp, synthetic construct
  source 1..75: mol_type = other DNA
ttagtaaggaaagcattaaccaagtaattgaattacttggatataagggaagactcacagggcacggtttcagac

SEQ ID NO: 805838 - DNA, 75 bp, synthetic construct
  source 1..75: mol_type = other DNA
cgctacgcgatcatcactggccgtgctgaatacaatccagcacctgatttagctatcgcattagctgtaccgaag

SEQ ID NO: 805839 - DNA, 75 bp, synthetic construct
  source 1..75: mol_type = other DNA
agattattgctgaactcacccacggcggcgcagatgttgcgctcgattgttccggtaatgccgcaggtcgtttgc

SEQ ID NO: 805840 - DNA, 75 bp, synthetic construct
  source 1..75: mol_type = other DNA
tcgtatttcgctggaacaaggtacgccgggctttgagccaccgctggaaggtgaaacacgtgcggcgattatcaa

SEQ ID NO: 805841 - DNA, 75 bp, synthetic construct
  source 1..75: mol_type = other DNA
ccgcggcggcaactggatttatgagtgggctacccaggcgatggaatggcagcagaaagcttgtgcggaagaaga

SEQ ID NO: 805842 - DNA, 75 bp, synthetic construct
  source 1..75: mol_type = other DNA
attaaccgtttgatgtggatctggcgcggcgttgacccgcgtgaaatcctcgacgtccaggcgcgtattgtgatg

SEQ ID NO: 805843 - DNA, 75 bp, synthetic construct
  source 1..75: mol_type = other DNA
gatcaccgccgttgctgatgcagtagaagccctggaaggtaccggcattccggttatcgctgacggcggtatccg

SEQ ID NO: 805844 - DNA, 75 bp, synthetic construct
  source 1..75: mol_type = other DNA
cagcgcggttaaagtcggtatcggccctggttctatctgtacgactcgtatcgttactggcgtaggtgttccgca

SEQ ID NO: 805845 - DNA, 75 bp, synthetic construct
  source 1..75: mol_type = other DNA
gccctttcaccagacctcgctgcgctgactgccatcagtaaacagattggctgtaatggttttttccccttccag

SEQ ID NO: 805846 - DNA, 75 bp, synthetic construct
  source 1..75: mol_type = other DNA
gtaaattgttagagatcccatttaacccggtgtatcggaattttgacaaaggccttcaggaaatcacagactgga

SEQ ID NO: 805847 - DNA, 75 bp, synthetic construct
  source 1..75: mol_type = other DNA
cgcttctcactggaacaggccggtgatgcttatgagctgatggcaagcggcaaatgcggcaaagtcgtgattaac

SEQ ID NO: 805848 - DNA, 75 bp, synthetic construct
  source 1..75: mol_type = other DNA
gaacaggcgggagatgcttacgcgctaatggcgagcggcaaatgcgggaaagccgtgatcaacttcccggattaa

SEQ ID NO: 805849 - DNA, 75 bp, synthetic construct
  source 1..75: mol_type = other DNA
aaccatccctcactggtatcgcatgattaaccgtctgatgtggatctggcgcggtattgacccacgtgaaatcct

SEQ ID NO: 805850 - DNA, 75 bp, synthetic construct
  source 1..75: mol_type = other DNA
ttaatcacctcatcatctgctgacggtaaattattagagatcccatttaacccggtgtatcggaattttgacaaa

SEQ ID NO: 805851 - DNA, 75 bp, synthetic construct
  source 1..75: mol_type = other DNA
ggtggcttgccttggtccggtagttcataccttgttaagtgactttcagtgccagcaacaggtgccggaaatgta

SEQ ID NO: 805852 - DNA, 75 bp, synthetic construct
  source 1..75: mol_type = other DNA
atcaatgtaatggatgctcgcgggcgcattatcggcagcggcgatcgtgaacgtattggtgaattgcacgaaggt

SEQ ID NO: 805853 - DNA, 75 bp, synthetic construct
  source 1..75: mol_type = other DNA
tcattactcgtatgaaagagtacgggcagctgcgatttcgcgtttcgttgggtaattattttaccggacctggca

SEQ ID NO: 805854 - DNA, 75 bp, synthetic construct
  source 1..75: mol_type = other DNA
gagcatcgtaagcgagtagaacaacttatcatccgcatgaaagagtatggcccgctgcgttttcgcgtgtcactg

SEQ ID NO: 805855 - DNA, 75 bp, synthetic construct
  source 1..75: mol_type = other DNA
atctcaatcaaccgcgagtggtggctattgttgaggtcgacagcggtcagcttggcgtggacagcgcaatggcgg

SEQ ID NO: 805856 - DNA, 75 bp, synthetic construct
  source 1..75: mol_type = other DNA
ggacactaacggcttgctgcggcgaacgctggcagcgtggtttcgccataatgtgcaaccgctggcaacgtcaaa

SEQ ID NO: 805857 - DNA, 75 bp, synthetic construct
  source 1..75: mol_type = other DNA
ggcacgtcatctgcacggtgtgcggcaggggattaatctaccgttacggctggaaggtgaaattgtcggcgtaat

SEQ ID NO: 805858 - DNA, 75 bp, synthetic construct
  source 1..75: mol_type = other DNA
ctggaaaggcgaatcgccggtaattcgcggcatgaagcgtaaccgtttaaaaaccttgctggcgaatgatatcaa

SEQ ID NO: 805859 - DNA, 75 bp, synthetic construct
  source 1..75: mol_type = other DNA
ctgcactcctgctgtttctggtggtgatggtggatttcaccagcagaatcatgtcggtgctggcggatggggtgc

SEQ ID NO: 805860 - DNA, 75 bp, synthetic construct
  source 1..75: mol_type = other DNA
gttttctcggcagcgggaaaacgacgtcaattcttcatctattagcccacaaagatccgcaagaaaaatgggcgg

SEQ ID NO: 805861 - DNA, 75 bp, synthetic construct
  source 1..75: mol_type = other DNA
aaatggcgcaggatatcgtggcgcgcactatgcgcattatcgataccaatattaacgtgatggacgcacgtgggc

SEQ ID NO: 805862 - DNA, 75 bp, synthetic construct
  source 1..75: mol_type = other DNA
cctacaggttcagtggtttcctgccgactatggaaaagtgtttatgtcactctggaaaaactatcaaaagtatcg

SEQ ID NO: 805863 - DNA, 75 bp, synthetic construct
  source 1..75: mol_type = other DNA
aaaacatcgcccggacggattactgacgctgcctgacggtaacgttattgccattgaaaccgagcgccgcctgaa

SEQ ID NO: 805864 - DNA, 75 bp, synthetic construct
  source 1..75: mol_type = other DNA
cagcgaatgcccgaaaatcgctgctatttttatcaggatctgatgttaccagttttactggatagtttgcgcggc

SEQ ID NO: 805865 - DNA, 75 bp, synthetic construct
  source 1..75: mol_type = other DNA
caaaggttaagcccgcacctttgctggaaaaagatgcaatcgctaggcttatgagaggagatgtcaaaatgaaaa

SEQ ID NO: 805866 - DNA, 75 bp, synthetic construct
  source 1..75: mol_type = other DNA
tacaaagtcaacgaccggagccagcggcatgggcgatggagaaagccctagacttacagcagatgctgaactcca

SEQ ID NO: 805867 - DNA, 75 bp, synthetic construct
  source 1..75: mol_type = other DNA
attcagagcgaaggcagcaaaagccatgatgaacacgttgttcctatcgcctcccggttacggccctatctggag

SEQ ID NO: 805868 - DNA, 75 bp, synthetic construct
  source 1..75: mol_type = other DNA
gtgcggtaatcatcgtgacaatcagcgcaatgggttgggcgattaaccactatcgcgacaacgccatcacctata

SEQ ID NO: 805869 - DNA, 75 bp, synthetic construct
  source 1..75: mol_type = other DNA
atacacgaaggacttagctgatgctaaaaagcagcttgatgatttgcagcgttgtgttcgcactggcaagtgtgg

SEQ ID NO: 805870 - DNA, 75 bp, synthetic construct
  source 1..75: mol_type = other DNA
tatttccccctcagagagcgaatcgtcacagtgacgaagcaggtcggctacttgcaggactacatcaaagagcag

SEQ ID NO: 805871 - DNA, 75 bp, synthetic construct
  source 1..75: mol_type = other DNA
ttcgcacagaaaacattataaaaatcgtttctgatcctgacttttatgatgaaaaaacaataacggacaatttaa

SEQ ID NO: 805872 - DNA, 75 bp, synthetic construct
  source 1..75: mol_type = other DNA
agttacaacaactgcaaaacgcgctgactacgcccgagcgtaataatctggtggcgattgtttcgctgaccgaaa

SEQ ID NO: 805873 - DNA, 75 bp, synthetic construct
  source 1..75: mol_type = other DNA
ctggagtatcggcttaatcgtatatcggaactgaccgggcttgatttgggcaattttgatgacaggttgctgctg

SEQ ID NO: 805874 - DNA, 75 bp, synthetic construct
  source 1..75: mol_type = other DNA
tgtcagcattgatgagcagcattatccagcatgaaaatggaagaaatatctattctcgagagctgattaataagg

SEQ ID NO: 805875 - DNA, 75 bp, synthetic construct
  source 1..75: mol_type = other DNA
actgggagtggatccccgggctgccctgaatatgagcgatccgcaaaccatgtcagcattgatgagcagcattat

SEQ ID NO: 805876 - DNA, 75 bp, synthetic construct
  source 1..75: mol_type = other DNA
actggtgaaagcgctggcgaaactgctcaatattgaccccaaatcatggtccctgaagtgggatttcagcaactt

SEQ ID NO: 805877 - DNA, 75 bp, synthetic construct
  source 1..75: mol_type = other DNA
cgaattgaactgatttccagcaatgaggctgactggaatgccttgcagagcgcactgttgaagcttcgtttagcg

SEQ ID NO: 805878 - DNA, 75 bp, synthetic construct
  source 1..75: mol_type = other DNA
gctgatgttctccggtcgtcagcaacacaaactgatgcagtggaaacagaagtatctggcacccaaaaaaatgaa

SEQ ID NO: 805879 - DNA, 75 bp, synthetic construct
  source 1..75: mol_type = other DNA
gaaaactctgcaggaaaaactgactccgtaactgctgtcattcatcgcgaatacaagcagacatggaaaacactg

SEQ ID NO: 805880 - DNA, 75 bp, synthetic construct
  source 1..75: mol_type = other DNA
agtattttatatcgttatcagtctgactgacgcaatgaatacaggggctgttcctgacggtggaaccatcgaatg

SEQ ID NO: 805881 - DNA, 75 bp, synthetic construct
  source 1..75: mol_type = other DNA
aatgtccggactgcgggcctgttatgggtaacacaacatatcaggaaacattcgatgaagaaaatctggctgaaa

SEQ ID NO: 805882 - DNA, 75 bp, synthetic construct
  source 1..75: mol_type = other DNA
gtgcttgctgcatcacgtggtgaatttgttgaaggaattagcgacccgaatgatccgaagtgggttgaggggatc

SEQ ID NO: 805883 - DNA, 75 bp, synthetic construct
  source 1..75: mol_type = other DNA
agaagtgcaacaagaaccggaaaaagtctgcaccgcctgcggtcagaccggcgacggcaactgtcctgactgtgg

SEQ ID NO: 805884 - DNA, 75 bp, synthetic construct
  source 1..75: mol_type = other DNA
cttaccgtgggatggggtccctgggcgcgatgtctaaaggctcttctgaccgttacttccagagcgacaacgctg

SEQ ID NO: 805885 - DNA, 75 bp, synthetic construct
  source 1..75: mol_type = other DNA
gtaggcttaagcagaatataaaatttgctatgcaagagttagtcgagtttggggcgaaaaaggctgtaattgatg

SEQ ID NO: 805886 - DNA, 75 bp, synthetic construct
  source 1..75: mol_type = other DNA
ttttataaaaaaaatatctataaaggatgagccacaattcgcaacgtatttaattgcctctggctgtttaataaa

SEQ ID NO: 805887 - DNA, 75 bp, synthetic construct
  source 1..75: mol_type = other DNA
ttgtacgtatcagcggtgcgggcattcaggaaagccacgttcacgacgtgaccattactaaagagtccccgaact

SEQ ID NO: 805888 - DNA, 75 bp, synthetic construct
  source 1..75: mol_type = other DNA
cctggttctatctgtacgactcgtatcgttactggcgtaggtgttccgcagatcactgccgttgctgacgcagtt

SEQ ID NO: 805889 - DNA, 75 bp, synthetic construct
  source 1..75: mol_type = other DNA
acgcctgtaaagacgagcaaggccgtctgcgtgttggtgctgcagttggcgcaggtgcgggtaacgaagagcgtg

SEQ ID NO: 805890 - DNA, 75 bp, synthetic construct
  source 1..75: mol_type = other DNA
ggaaatggaaggcgctgaacatccacacaaggagaacactggcggcaatcagcatcacgccagcgataatgaaac

SEQ ID NO: 805891 - DNA, 75 bp, synthetic construct
  source 1..75: mol_type = other DNA
gtggatttcaccagcagaatcatgtcggtgctggcggatggggtgctggtctgcggcattgtggtattgctgtag

SEQ ID NO: 805892 - DNA, 75 bp, synthetic construct
  source 1..75: mol_type = other DNA
cggagatatgggaccggaatttagtaagactatcgatctggaaactgctggcggagtcattgatcgtgacaccat

SEQ ID NO: 805893 - DNA, 75 bp, synthetic construct
  source 1..75: mol_type = other DNA
atcccgttagatgatgcactgctgcaattacgggaatttatcgacgaaaactccggtgaattttttgttcaggtc

SEQ ID NO: 805894 - DNA, 75 bp, synthetic construct
  source 1..75: mol_type = other DNA
caggcctgcggctggatattcgacgctgatacggtattcgacaccattggcattctggaatgggcgcgacttgca

SEQ ID NO: 805895 - DNA, 75 bp, synthetic construct
  source 1..75: mol_type = other DNA
cgccacgttatgtattctcgatcctcgcctgctgctggatgaaaaaagcgtcaataatgaaaatttccgtgacca

SEQ ID NO: 805896 - DNA, 75 bp, synthetic construct
  source 1..75: mol_type = other DNA
cggaattgatggtgctttgctcgccgatagcggcgcattgctgaaagagatccccggcggctgcatgtgctgcgt

SEQ ID NO: 805897 - DNA, 75 bp, synthetic construct
  source 1..75: mol_type = other DNA
gctcaggactgcgcttataaatttattgtctgcgaggataaacccggtataccccgccctgccctcgattcctgg

SEQ ID NO: 805898 - DNA, 75 bp, synthetic construct
  source 1..75: mol_type = other DNA
gcaaaagaagtagtcctgaacaaagaaagtccgttcaaagaatggtccgcagcacttcgtgcaaccccgggtatt

SEQ ID NO: 805899 - DNA, 75 bp, synthetic construct
  source 1..75: mol_type = other DNA
gccagacgtgatttaaaaccaaccgccaaatggcccgacgttcaggcatattttctcgaccgtaaaaaacgccag

SEQ ID NO: 805900 - DNA, 75 bp, synthetic construct
  source 1..75: mol_type = other DNA
ctattccggatgaacaggcaataaaagaagaatgtgcagttgctgtagccactgccattgaagccggggacgagc

SEQ ID NO: 805901 - DNA, 75 bp, synthetic construct
  source 1..75: mol_type = other DNA
atgcgcatctggaaaaaacgtcgcgaaggtgaacgcaaggaaaccggaaaatacacgtctgttgttgatctcgcc

SEQ ID NO: 805902 - DNA, 75 bp, synthetic construct
  source 1..75: mol_type = other DNA
tgccccgattatctcaataggtgcaatatttttcgatccgcaaaccggagatatgggaccggaatttagtaagac

SEQ ID NO: 805903 - DNA, 75 bp, synthetic construct
  source 1..75: mol_type = other DNA
tggtgtggaagccaacaacgacgccgaacgccagcgcttcgccgagctgctggcccgtaaagagcatcagcgggt

SEQ ID NO: 805904 - DNA, 75 bp, synthetic construct
  source 1..75: mol_type = other DNA
gtttctggccgggcgaggagcctttccgctgtttgccctggtgtgggggctgaatctgtcccgtcatgcgcatat

SEQ ID NO: 805905 - DNA, 75 bp, synthetic construct
  source 1..75: mol_type = other DNA
ctacaggctgtaccgggcggaagacagaacggaacgcttggcgctggtcgcctgcctgctggctgttattcctgc

SEQ ID NO: 805906 - DNA, 75 bp, synthetic construct
  source 1..75: mol_type = other DNA
ttccgtggtatgaggggaatatcctgtttgcctttgcagtggcggcacaggtgctgacgtggtgtgagacgcgca

SEQ ID NO: 805907 - DNA, 75 bp, synthetic construct
  source 1..75: mol_type = other DNA
cactggctgcccggaccgatacctggttgcagtcgttgctggtctggtcacccggacagcgggatatcatcaaaa

SEQ ID NO: 805908 - DNA, 75 bp, synthetic construct
  source 1..75: mol_type = other DNA
ttccgctttttgccctggtatgggggctgaatctgtcccgtcatgcgcatatccggcaaccggccattaaccggc

SEQ ID NO: 805909 - DNA, 75 bp, synthetic construct
  source 1..75: mol_type = other DNA
ggatgtttctggccgggcgtggagcctttccgttgtttgctctggtgtgggggctgaatctgtcccgtcatgcgc

SEQ ID NO: 805910 - DNA, 75 bp, synthetic construct
  source 1..75: mol_type = other DNA
acagagcggaacgtctggcgctggtcgcctgcctgctggctgttattccggcgcttaaccttgccaccagtgatg

SEQ ID NO: 805911 - DNA, 75 bp, synthetic construct
  source 1..75: mol_type = other DNA
caccagtgatgcagcggcggtggccggtcttgtgatgacggtgctgaccgttggtctggtgtcgtgtgcaggaaa

SEQ ID NO: 805912 - DNA, 75 bp, synthetic construct
  source 1..75: mol_type = other DNA
aagtggccttgtgataaccgggaagaacaacaccccatgaatgccccattctctggagaatggatacacctctga

SEQ ID NO: 805913 - DNA, 75 bp, synthetic construct
  source 1..75: mol_type = other DNA
tgtcagattcagtctggctactggttgtgttattcatcctgcttaacggtttcttctttttcgatgtctacccac

SEQ ID NO: 805914 - DNA, 75 bp, synthetic construct
  source 1..75: mol_type = other DNA
ttctgggggcagtgatattgattgtggcatggcagcccctgtctcagaccagttatggcattccggggctgctgt

SEQ ID NO: 805915 - DNA, 75 bp, synthetic construct
  source 1..75: mol_type = other DNA
acgtctggcgctggttgcatgcctgctggccgtgattccggcgcttaaccttgctaccagtgatgcggcggctgt

SEQ ID NO: 805916 - DNA, 75 bp, synthetic construct
  source 1..75: mol_type = other DNA
atatcaggcagtcggccattaaccggctgtggggatggggaattattgcccagttcgcgtattatctggcaggct

SEQ ID NO: 805917 - DNA, 75 bp, synthetic construct
  source 1..75: mol_type = other DNA
aatattcaaccaagcctttggccttatttttaggcgttccgaagatcatcttcatcttattccgactaatgaagg

SEQ ID NO: 805918 - DNA, 75 bp, synthetic construct
  source 1..75: mol_type = other DNA
ttcagcagacaatgctgcttcctctaaggcggcagccgcatcgtcagccagttcagcggcgtcatcggcatcatc

SEQ ID NO: 805919 - DNA, 75 bp, synthetic construct
  source 1..75: mol_type = other DNA
cacgatcgtggggaatggaacagtgccttcttctggtgcacacacccactcagtatcaggcactgctgcaagtgc

SEQ ID NO: 805920 - DNA, 75 bp, synthetic construct
  source 1..75: mol_type = other DNA
tacagacatggaatacttacctcttacaaggattattcataacaacaatacattgtgtattgataatgaatgctc

SEQ ID NO: 805921 - DNA, 75 bp, synthetic construct
  source 1..75: mol_type = other DNA
aagatgccattcacccatggttgtattatatggcattatgtcagtttgcaggggaaatatctacatttcataact

SEQ ID NO: 805922 - DNA, 75 bp, synthetic construct
  source 1..75: mol_type = other DNA
atgactcgtttatcattatttatatcattgcttcttacatcggtcgctgtactggctgatgtgcagattagcatc

SEQ ID NO: 805923 - DNA, 75 bp, synthetic construct
  source 1..75: mol_type = other DNA
taattttattgctgaacaacgagctgacggtaatgactccaacttattgatagtgttttatgttcagataatgcc

SEQ ID NO: 805924 - DNA, 75 bp, synthetic construct
  source 1..75: mol_type = other DNA
gtgaggtaacaaaaaccataagcatatcctgtacgtataagagtggctcaccctggataaaggtcacaggtaatg

SEQ ID NO: 805925 - DNA, 75 bp, synthetic construct
  source 1..75: mol_type = other DNA
ggccatcagataccgttccgtctggttatgccctgatgcaggggcagacttttgacaaatctgcatacccgaaac

SEQ ID NO: 805926 - DNA, 75 bp, synthetic construct
  source 1..75: mol_type = other DNA
tgcttagcagcgggaaccaggccttaagcgcagataacatgaacaatgccgcaggcatactgcaatactgcgcca

SEQ ID NO: 805927 - DNA, 75 bp, synthetic construct
  source 1..75: mol_type = other DNA
atgatgaaaactattaaacatcttctgtgctgtgccattgccgccagcgcattaatttccaccggggtgcatgct

SEQ ID NO: 805928 - DNA, 75 bp, synthetic construct
  source 1..75: mol_type = other DNA
ggtcacaaaatgcagcagttagacagtattatctccgcgaaaggccagacggcgtactcttccgttattctgggt

SEQ ID NO: 805929 - DNA, 75 bp, synthetic construct
  source 1..75: mol_type = other DNA
ggtatgaagggaatatcctgtttgcctttgcggttgcggcacaggtgctgacgtggtgtgaaacgcgcagcctgt

SEQ ID NO: 805930 - DNA, 75 bp, synthetic construct
  source 1..75: mol_type = other DNA
cggtgctgactgttggtctggtgtcctgtacagggaaatcactaccccgtttctggtacggggattttttcccga

SEQ ID NO: 805931 - DNA, 75 bp, synthetic construct
  source 1..75: mol_type = other DNA
tgccgttgttccgtgtcagtggtggcgcattatagggagttattccggcctgacaagaggaaatttaaaataatt

SEQ ID NO: 805932 - DNA, 75 bp, synthetic construct
  source 1..75: mol_type = other DNA
aaactctggcactatagccacagtaccgatctcctcggtgattgtgatggcctgatggaggcgattcggggaaaa

SEQ ID NO: 805933 - DNA, 75 bp, synthetic construct
  source 1..75: mol_type = other DNA
agagcggaacgtctggcgctgttggcctgcctgctggcggttattccggcgcttaaccttgccaccagtgatgca

SEQ ID NO: 805934 - DNA, 75 bp, synthetic construct
  source 1..75: mol_type = other DNA
agagcggaacgtctggcgctgttggcctgcctgctggccgttattccggcacttaaccttgccgccagtgatgca

SEQ ID NO: 805935 - DNA, 75 bp, synthetic construct
  source 1..75: mol_type = other DNA
agagcggaacgtctggcgctgttggcctgcctgctggcagttattccggcccttaaccttgccgccagtgatgca

SEQ ID NO: 805936 - DNA, 75 bp, synthetic construct
  source 1..75: mol_type = other DNA
ggatgatggcactgaatatccggatccgcactcagttacgcactggcgtgaaatgccagcagcaccgcagcagga

SEQ ID NO: 805937 - DNA, 75 bp, synthetic construct
  source 1..75: mol_type = other DNA
ggataagctgtagtgagcgaatgccggataagttaattccggtaatggtcatgtatgaagacggtgagatgtggt

SEQ ID NO: 805938 - DNA, 75 bp, synthetic construct
  source 1..75: mol_type = other DNA
caccgacgggaaaagcatgggatgcactgaaagagcttggcgtgaaaacctcagacagtaaagggaatactcgac

SEQ ID NO: 805939 - DNA, 75 bp, synthetic construct
  source 1..75: mol_type = other DNA
ctgcatcttcaaaggctgctggtgcggcttctgaggttgcaaataaagctctggtcaaggctacggaaagtgttg

SEQ ID NO: 805940 - DNA, 75 bp, synthetic construct
  source 1..75: mol_type = other DNA
atgcctggattagtatcatatatatcatcgacctcattcgcgaatgagatggcggagatgcgtcagcaggtaatg

SEQ ID NO: 805941 - DNA, 75 bp, synthetic construct
  source 1..75: mol_type = other DNA
aattccgaacaaatcgaacccgtaagtaatcgtgatgagttgccgctggactatctgcaaggacacaaagacggc

SEQ ID NO: 805942 - DNA, 75 bp, synthetic construct
  source 1..75: mol_type = other DNA
cgcattctgcatctggaccagacgtggatgtttctggccgggcgtggagcctttccgctgtttgccctggtgtgg

SEQ ID NO: 805943 - DNA, 75 bp, synthetic construct
  source 1..75: mol_type = other DNA
atggcaaaagtaccacgtaaaaccgctgaatttgtagatacggctggcaatgaaatagacaccgtaaacccgaac

SEQ ID NO: 805944 - DNA, 75 bp, synthetic construct
  source 1..75: mol_type = other DNA
cagcaacaacaaaataatgatacctcgcttggtacgaatttaagctggagaactcccatcgccacaatagatggc

SEQ ID NO: 805945 - DNA, 75 bp, synthetic construct
  source 1..75: mol_type = other DNA
tggtattacgttgccggctttccctggtatgaggggaatatcctgtttgcctttgcggttgcggcacaggtgcag

SEQ ID NO: 805946 - DNA, 75 bp, synthetic construct
  source 1..75: mol_type = other DNA
ctgaagcaggaatggatgtttctggccgggcgaggagcctttccgctgtttgccctggtgtgggggctgaatctg

SEQ ID NO: 805947 - DNA, 75 bp, synthetic construct
  source 1..75: mol_type = other DNA
gctgtggggatgggcggtgattgcccagttcgcatattatctggccggctttccctggtatgaggggaatatcct

SEQ ID NO: 805948 - DNA, 75 bp, synthetic construct
  source 1..75: mol_type = other DNA
cgcattctgcatctggaccagacgtggatgttcctggccgggcgcggggcatttccactgtttgccctggtgtgg

SEQ ID NO: 805949 - DNA, 75 bp, synthetic construct
  source 1..75: mol_type = other DNA
atgacaacggataacacgaacacgatacgtaacgattcactggctgcacggaccgatacctggttgcagtcattt

SEQ ID NO: 805950 - DNA, 75 bp, synthetic construct
  source 1..75: mol_type = other DNA
tgccgttacgaagaagatatcgcgcaactgcgccagttactgaaacacctgaagcgttatttgcaggataatcgc

SEQ ID NO: 805951 - DNA, 75 bp, synthetic construct
  source 1..75: mol_type = other DNA
tgtttctggccgggcgaggagcctttccgctgtttgccctggtgtgggggctgaatctgtcccgtcatgcgcata

SEQ ID NO: 805952 - DNA, 75 bp, synthetic construct
  source 1..75: mol_type = other DNA
aaccggcattagctattgctctacaaaaagaggcgctgcctcgcgagagcaaaaggctcaccctctcctcacgcg

SEQ ID NO: 805953 - DNA, 75 bp, synthetic construct
  source 1..75: mol_type = other DNA
atgacaacagagaacacgacacgtaacgattcactggctgcccggaccgatacctggctgcagtcgttgctggtc

SEQ ID NO: 805954 - DNA, 75 bp, synthetic construct
  source 1..75: mol_type = other DNA
cggtgctgaccgttggtctggtgtcgcgtgcaggaaaatcattaccccgtttctggcccggagattttttcccga

SEQ ID NO: 805955 - DNA, 75 bp, synthetic construct
  source 1..75: mol_type = other DNA
caatcctcgcgtgggtgctgtaaccggtaatcctcgcatacgtacacgttcaactctgataggtaaaattcaggt

SEQ ID NO: 805956 - DNA, 75 bp, synthetic construct
  source 1..75: mol_type = other DNA
aacgtatttaccgtttccggtgttattgccgcatttcgtcgcagcgccctggcagaagtgggttactggagtgac

SEQ ID NO: 805957 - DNA, 75 bp, synthetic construct
  source 1..75: mol_type = other DNA
cggcgcgcagtgggctcagcgttgaggttcttcaactgcgcaatcgcggggctgactatcccgctatacggctgg

SEQ ID NO: 805958 - DNA, 75 bp, synthetic construct
  source 1..75: mol_type = other DNA
tagactgggttgatacagaatggtgttggcgtgcattagctaatagtatgattattgttcagacaccatcagtca

SEQ ID NO: 805959 - DNA, 75 bp, synthetic construct
  source 1..75: mol_type = other DNA
tgctttcggaaaacaaaggcattgcatttgctcagaaccatggtgttaagaagggcctggaagcaaaagagtttg

SEQ ID NO: 805960 - DNA, 75 bp, synthetic construct
  source 1..75: mol_type = other DNA
atttgaaattttatattcgaaagaaaaattaaattcactgaaggtttgttttaaagctgtacgtgatggtatgtt

SEQ ID NO: 805961 - DNA, 75 bp, synthetic construct
  source 1..75: mol_type = other DNA
tcggtcaggtggtatttgaaaccagactgaagcccacggtcgtcatcgggacgcaggccgccgccgtgcatggta

SEQ ID NO: 805962 - DNA, 75 bp, synthetic construct
  source 1..75: mol_type = other DNA
cggctggagaaatcgtaaacttattgatttttttatccgttttgcaacgaccgttttcattcgttataaagaaaa

SEQ ID NO: 805963 - DNA, 75 bp, synthetic construct
  source 1..75: mol_type = other DNA
cttatcatctggtgacaaaatatggtggctggcgaaaccgtaaactgatcgacttttttatccgctccgcatcaa

SEQ ID NO: 805964 - DNA, 75 bp, synthetic construct
  source 1..75: mol_type = other DNA
ctgggatgacactgagaaatgggatggttcaacagcatatctatttcttaacgacacagaaaatacatggtattg

SEQ ID NO: 805965 - DNA, 75 bp, synthetic construct
  source 1..75: mol_type = other DNA
gtccgcacgctgcgccagtggggacacaagcgttaccggaaaggccgcgccattatcgggcgcgaccctgaccgt

SEQ ID NO: 805966 - DNA, 75 bp, synthetic construct
  source 1..75: mol_type = other DNA
gaccagtaattatctttaatgcccggttcgacatccgcattctgaaaaagactgctgccgcacatagcgatccgg

SEQ ID NO: 805967 - DNA, 75 bp, synthetic construct
  source 1..75: mol_type = other DNA
cggtttattcctctcgcagaagagattggtgaaatcgaaaatattgggcgctgggtcatcgcggaagcttgccgt

SEQ ID NO: 805968 - DNA, 75 bp, synthetic construct
  source 1..75: mol_type = other DNA
atgagtgacgttgaaagtaaattcccttttgaatctcttgttgcatatcaatcagttgacctcattgcatcaggg

SEQ ID NO: 805969 - DNA, 75 bp, synthetic construct
  source 1..75: mol_type = other DNA
gagttaggtagagcaagtaagtttacagtaaggctaatatgggatgacgactttcaagatgggaatgaaagcgtc

SEQ ID NO: 805970 - DNA, 75 bp, synthetic construct
  source 1..75: mol_type = other DNA
cattcttgggccgcgacgtggctgtattctttgctatcgcttgccctaatgcgaaacctaatgacgaagcatata

SEQ ID NO: 805971 - DNA, 75 bp, synthetic construct
  source 1..75: mol_type = other DNA
gtgtatgtgccagagatctggccgacagaagccaaattgcgcggctccggtctggcgaatgcggtaggacgaatc

SEQ ID NO: 805972 - DNA, 75 bp, synthetic construct
  source 1..75: mol_type = other DNA
gcggtaccttattctgctttactgacgggagtattactgaaacgcgttattttaggctcctgtgtgcttattgcc

SEQ ID NO: 805973 - DNA, 75 bp, synthetic construct
  source 1..75: mol_type = other DNA
gcagatgccaccgctgacaaatccgctgattacactaaggaatcattggtaacttacaaatctgtttctttctcc

SEQ ID NO: 805974 - DNA, 75 bp, synthetic construct
  source 1..75: mol_type = other DNA
atctcgaaccgccacaagccgttcagccgccaccggagccggtggtagagccagaaccggaacctgagccgatcc

SEQ ID NO: 805975 - DNA, 75 bp, synthetic construct
  source 1..75: mol_type = other DNA
atggtcgcgtggataacgtacaaatcctctcagccaagcctgcaaacatgtttgagcgtgaggtgaaaaatgcga

SEQ ID NO: 805976 - DNA, 75 bp, synthetic construct
  source 1..75: mol_type = other DNA
caagccggttaccagtgtggcttcaggaccacgcgcattaagccgtaatcagccgcagtatccggcacgagcaca

SEQ ID NO: 805977 - DNA, 75 bp, synthetic construct
  source 1..75: mol_type = other DNA
acgatgatgtctcaacctggtctattgagtgttcaagcgctggccaggtaacggtagatgacatcccggcagcat

SEQ ID NO: 805978 - DNA, 75 bp, synthetic construct
  source 1..75: mol_type = other DNA
agagttagcaatcgccgtgtggtgttgttctcattttctggaattgccagagagggagtcaaagataagcgcagc

SEQ ID NO: 805979 - DNA, 75 bp, synthetic construct
  source 1..75: mol_type = other DNA
attaaaaacaaaagacaaattggattcatttaaagtagttagagatgagttacatttttttctgtcacaacaggg

SEQ ID NO: 805980 - DNA, 75 bp, synthetic construct
  source 1..75: mol_type = other DNA
gtgattatacccaccggcgccctgctgaccccgctggttcttgtctggaccgggggggtatggatcagccgtctg

SEQ ID NO: 805981 - DNA, 75 bp, synthetic construct
  source 1..75: mol_type = other DNA
cgtctggaagcgggtatgaatctttatggtcaggagatggacgaaaccatttctccgttagccgccaacatgggc

SEQ ID NO: 805982 - DNA, 75 bp, synthetic construct
  source 1..75: mol_type = other DNA
caaattcgcaaccgtgaaatgccggttaaagtgacgaaacctgtttttgtgcgtaacggtaaagccgtcgcgtga

SEQ ID NO: 805983 - DNA, 75 bp, synthetic construct
  source 1..75: mol_type = other DNA
tgaagccctggaagtgcagcgtgagcatggcacagaaaaactggttggtctggtgatgaccgaaaaaggcgtgct

SEQ ID NO: 805984 - DNA, 72 bp, synthetic construct
  source 1..72: mol_type = other DNA
atgaaccgcgtactgtgcgtggtcatcattgccctgctggtggcctgtggtgcgcttagtctggggctgaat

SEQ ID NO: 805985 - DNA, 75 bp, synthetic construct
  source 1..75: mol_type = other DNA
ttctaaagcactggacgtagcaggttacaaagattctgatcgtctgaactacattgaaatcggtacctggtatta

SEQ ID NO: 805986 - DNA, 75 bp, synthetic construct
  source 1..75: mol_type = other DNA
atgggtcgttggtgatattcatggtgaatatcagttattacaatcccgcttacatcaactctcttttttccccga

SEQ ID NO: 805987 - DNA, 75 bp, synthetic construct
  source 1..75: mol_type = other DNA
cattgattattgatgatgaatattcatttcctgcaatgaggttatcagcgaataacaaacttagagataagatcg

SEQ ID NO: 805988 - DNA, 75 bp, synthetic construct
  source 1..75: mol_type = other DNA
actttgtggcttgctcttaagcgatttaattccggccataaaaatgtatctggagtcaatgataaacgaggctct

SEQ ID NO: 805989 - DNA, 75 bp, synthetic construct
  source 1..75: mol_type = other DNA
tgcaggataagtgcctgacacatctccggggtacagatcccggcactgtaaatttgtggcttgctcttaagcgat

SEQ ID NO: 805990 - DNA, 75 bp, synthetic construct
  source 1..75: mol_type = other DNA
tggttttcattcctgagttcaatcgcggtgtgcgtgaggcgttttataaccgaccggttgaacagcgtgatgcat

SEQ ID NO: 805991 - DNA, 75 bp, synthetic construct
  source 1..75: mol_type = other DNA
agtatccgattgacgcggtacaccctgataagttcgcagaattgctcggaaaaccgcgtactgcggttgttgaaa

SEQ ID NO: 805992 - DNA, 75 bp, synthetic construct
  source 1..75: mol_type = other DNA
gcagcatgacgaacaggccgcgcagccggacaccgccagcagaaggtattatgattttcgtaatacctttagcaa

SEQ ID NO: 805993 - DNA, 75 bp, synthetic construct
  source 1..75: mol_type = other DNA
tgcgcttagtctggggctgaatcattaccgcgataacgccatcacttacaaagcgcagcgcgataaaaaaagcca

SEQ ID NO: 805994 - DNA, 75 bp, synthetic construct
  source 1..75: mol_type = other DNA
attgaggaaattatcgctgaaaataaaccgccattttctgttttccgcgacaaattcatcgccatgcctggtggg

SEQ ID NO: 805995 - DNA, 75 bp, synthetic construct
  source 1..75: mol_type = other DNA
ctgtccgcacaaggggcaacgctgttaagaacagcaatgctggattattataaccaggacactacgggaacctcg

SEQ ID NO: 805996 - DNA, 75 bp, synthetic construct
  source 1..75: mol_type = other DNA
acattcgcactatcagaaaagaagcccatgagatgggtcatgaaagcttccttgagttcgctgagaaggttctca

SEQ ID NO: 805997 - DNA, 75 bp, synthetic construct
  source 1..75: mol_type = other DNA
aactcagaataatgctttccggaccggcagcaatatatatggttcattcgccggccataaaaagggttcttgatg

SEQ ID NO: 805998 - DNA, 75 bp, synthetic construct
  source 1..75: mol_type = other DNA
tcaaaaactgcgtgcagaactctatgaagccaggaaaaacattccacccaaaaatcctgtcgatacagacaaatt

SEQ ID NO: 805999 - DNA, 75 bp, synthetic construct
  source 1..75: mol_type = other DNA
accccgcatgtatagccacagcgccagcaatccctgatatcgccatcatgattgccaacaggcttgaaaatttcg

SEQ ID NO: 806000 - DNA, 75 bp, synthetic construct
  source 1..75: mol_type = other DNA
ctatggtggtcgcccggtactgtcgtttatctgtaatggcagccgttgctctgtgaaaaaaagagaaataatgta

SEQ ID NO: 806001 - DNA, 75 bp, synthetic construct
  source 1..75: mol_type = other DNA
gagttacatcaatgactacggtgggcgtccggtactgcaattctcctgtgccggaagccgctgtactgcagtaaa

SEQ ID NO: 806002 - DNA, 75 bp, synthetic construct
  source 1..75: mol_type = other DNA
tcagattgaaaatccgacaccgtattacgtgacagtgattggcattggtggtaatgaaaaacaggccagagaggg

SEQ ID NO: 806003 - DNA, 75 bp, synthetic construct
  source 1..75: mol_type = other DNA
gatatttgtgcgcaacggcgatgaacacacctgcgatgaagcggtttcccacctgcgtctgaagctgggcaatac

SEQ ID NO: 806004 - DNA, 75 bp, synthetic construct
  source 1..75: mol_type = other DNA
tattgtgaagatccccggtaagagcgatgagaacgcacagccttttttacatgcgctaattgcgcagacggataa

SEQ ID NO: 806005 - DNA, 75 bp, synthetic construct
  source 1..75: mol_type = other DNA
gttatttattccggtacggtagccgccgcgatggaaggccgtcatttaggttttccggcgcttgccgtctcgctt

SEQ ID NO: 806006 - DNA, 75 bp, synthetic construct
  source 1..75: mol_type = other DNA
agggctgaaacatgcagaaattttgccagttatggacagttactctgtctttatgaaagaggtgaataaccgcac

SEQ ID NO: 806007 - DNA, 75 bp, synthetic construct
  source 1..75: mol_type = other DNA
gatcgttttgccgagaagcacggcgtgaagctgggctttatgtccttctttgttaaggccgttacccgggcgctg

SEQ ID NO: 806008 - DNA, 75 bp, synthetic construct
  source 1..75: mol_type = other DNA
gtggttatattccggcgaccagctcttatgcaggctatcaggcttatcagccggtcacggcaccggctggccgct

SEQ ID NO: 806009 - DNA, 75 bp, synthetic construct
  source 1..75: mol_type = other DNA
caggcttatcagccggtcacggcaccggctggccgctcttatgtggaccagagtaaaaacgaatatcacatcagc

SEQ ID NO: 806010 - DNA, 75 bp, synthetic construct
  source 1..75: mol_type = other DNA
ttttccggcgcttgccgtctcgcttgacgggcataaacattacgacactgccgcggcggtaacctgttcaatttt

SEQ ID NO: 806011 - DNA, 75 bp, synthetic construct
  source 1..75: mol_type = other DNA
atcttatgttcgtgcagatgcgagccaaccaggcactgctggttatgtgaaaactaacactgcatataccgttac

SEQ ID NO: 806012 - DNA, 75 bp, synthetic construct
  source 1..75: mol_type = other DNA
ttagcggcctggtcgttgataacacctgtgaagctcgtgttgatggcggtaacaaagatggtttgatcctgctgc

SEQ ID NO: 806013 - DNA, 75 bp, synthetic construct
  source 1..75: mol_type = other DNA
gtctattaacaacccatctgacggcgttaatatcgctctgcacaatattgatggttccactatcaaacaggttca

SEQ ID NO: 806014 - DNA, 75 bp, synthetic construct
  source 1..75: mol_type = other DNA
gaaattcgccgtttacgtctcaaggagtggtttaaagataaaactctgccacccaaagagaagagctacctatct

SEQ ID NO: 806015 - DNA, 75 bp, synthetic construct
  source 1..75: mol_type = other DNA
attgtgtgtgtcccgtgggcgcgtcgctttaatgatgcagcagggcgtagacaattcgctatagacatgctgtta

SEQ ID NO: 806016 - DNA, 75 bp, synthetic construct
  source 1..75: mol_type = other DNA
aacgggagcgtgatttattcctttcaagcgaaggtatcccgtttaattcagaaactgaaatgcgatggcatcacc

SEQ ID NO: 806017 - DNA, 75 bp, synthetic construct
  source 1..75: mol_type = other DNA
atcatcggtgccattggtcttgtagcctggccggttatcaccggcatcaatgccattatcgcggcagcaggcgca

SEQ ID NO: 806018 - DNA, 75 bp, synthetic construct
  source 1..75: mol_type = other DNA
cgttggtgtgcgtcatgctgagttaggtcaagatgccgtgttgcatcaccaatatctaatcaaggatgaattcca

SEQ ID NO: 806019 - DNA, 75 bp, synthetic construct
  source 1..75: mol_type = other DNA
atgaatattcaagaattatttggacgtcaggcaagcgtagtaagcccattcgaatatgagcaaggcttaaaccaa

SEQ ID NO: 806020 - DNA, 75 bp, synthetic construct
  source 1..75: mol_type = other DNA
catgcagaatctcagtctgcaaaagacattgccacaacaattttctgagcagatgttttttgcctgcctttccat

SEQ ID NO: 806021 - DNA, 75 bp, synthetic construct
  source 1..75: mol_type = other DNA
atcggattcgataaagagacggacagagaaacattaggcagcatattacaagagatttgggaagacgatagctgg

SEQ ID NO: 806022 - DNA, 75 bp, synthetic construct
  source 1..75: mol_type = other DNA
tagccacagcggcatttctggtcgttgcctgtagttctcccaaaccaccacgtggcgtgaccgtagtaaataatt

SEQ ID NO: 806023 - DNA, 75 bp, synthetic construct
  source 1..75: mol_type = other DNA
attggtgggatcactgttattgatgtgtcaatgtttcctgagattgttgctcacatcggagagaacggtttcgca

SEQ ID NO: 806024 - DNA, 75 bp, synthetic construct
  source 1..75: mol_type = other DNA
tggggatgttgatgccattcaggcggcaacgccggtcacgctgaacatggcgctggcgaaccgccgcacgatgga

SEQ ID NO: 806025 - DNA, 75 bp, synthetic construct
  source 1..75: mol_type = other DNA
cttgtcgcctggccggttatcaccggcatcaatgccattatcgcggcagcaggcgcaatgggggcaatcttcacg

SEQ ID NO: 806026 - DNA, 75 bp, synthetic construct
  source 1..75: mol_type = other DNA
aagcgggtggagatgctgcggctattcaggcagcaacgccggtcacactgaatatggcactggcaaaccagcggt

SEQ ID NO: 806027 - DNA, 75 bp, synthetic construct
  source 1..75: mol_type = other DNA
cagtggatggtgactccacacgagattgactgtcgtacttaccctaacccaaccgacggcctgccttgtggatgt

SEQ ID NO: 806028 - DNA, 75 bp, synthetic construct
  source 1..75: mol_type = other DNA
cgctggcgcgtgtcagtgcgcaacaggcaaaacttaacgcagtaaaacagcgctatcaggcaggaaaggagctgg

SEQ ID NO: 806029 - DNA, 75 bp, synthetic construct
  source 1..75: mol_type = other DNA
tgatgcccggttatgagtttgcgcagaaaaactcagaattacaggccgtgctcggtgtggcaaaagattctgccg

SEQ ID NO: 806030 - DNA, 75 bp, synthetic construct
  source 1..75: mol_type = other DNA
cgtactggaaacaaccgttggtgccaaagctaaaccttttagcatcactgttgactgcagcaaagctaacccagc

SEQ ID NO: 806031 - DNA, 75 bp, synthetic construct
  source 1..75: mol_type = other DNA
cacacaatatgtgttaaagctcgacggctggatccagaaaaacaaaggtctggcgacaactatcggcattattgc

SEQ ID NO: 806032 - DNA, 75 bp, synthetic construct
  source 1..75: mol_type = other DNA
ggcctcaacttgaccgacagctacgcgacacactcgaacaaattgagcgcgaaaagcgtgcgcgtcagcgtgcca

SEQ ID NO: 806033 - DNA, 75 bp, synthetic construct
  source 1..75: mol_type = other DNA
gcgcagcttaaccgccagcgcgaggcactggcacgcgtcagtgcgcagcaggcgaaattaagccgggtgaaagag

SEQ ID NO: 806034 - DNA, 75 bp, synthetic construct
  source 1..75: mol_type = other DNA
atgacacctgtgactctcaacctgtcgcttgcaaacaaaaaaacaatggaggaaaacgcgcaactgttgatgggg

SEQ ID NO: 806035 - DNA, 75 bp, synthetic construct
  source 1..75: mol_type = other DNA
gcttctgctgatgatgcagccagtgcgcagattatcattgcaaaaggtggtggtgatgcggcggctatagcggcc

SEQ ID NO: 806036 - DNA, 75 bp, synthetic construct
  source 1..75: mol_type = other DNA
cggtggtgcgctggcgctgattggtatcatcggcggcattggtctcgttgcgtggccggttgtcatgggaattaa

SEQ ID NO: 806037 - DNA, 75 bp, synthetic construct
  source 1..75: mol_type = other DNA
ctcagattattattgcaaaggctggcggcgatgctgcggctattcaggccgctacccccgtaacactcgatatgg

SEQ ID NO: 806038 - DNA, 75 bp, synthetic construct
  source 1..75: mol_type = other DNA
gcctacgaccaggcatggaagcggctttacccgacgctgacacccatccgcagtgtcgtccagccacgtctggcg

SEQ ID NO: 806039 - DNA, 75 bp, synthetic construct
  source 1..75: mol_type = other DNA
ttctgctactaccgctgtttgccagcccgcagcaaacccgcattgaagagcaagccatcacccacacgcaggcgc

SEQ ID NO: 806040 - DNA, 75 bp, synthetic construct
  source 1..75: mol_type = other DNA
tggacaaactgaccgctgcgtttaaagcctcagacgggaaaactgcagagctggtaaatatcatgcaggacaatc

SEQ ID NO: 806041 - DNA, 75 bp, synthetic construct
  source 1..75: mol_type = other DNA
ctcggtgtcggtaaagactcagctgatatggtggcgctccgcaaacaggcgcgccagctcggtgacaacaccgcc

SEQ ID NO: 806042 - DNA, 75 bp, synthetic construct
  source 1..75: mol_type = other DNA
ttgccccagtcggggaaatgttagctccactgactcccatttttgatggtctcggcgagaaactgcgcggcgtct

SEQ ID NO: 806043 - DNA, 75 bp, synthetic construct
  source 1..75: mol_type = other DNA
ccctgtcagccgacgagcgtcggctcaaaacctctatcagcgaaacgacggcgcagcttaaccgccagcgtgaag

SEQ ID NO: 806044 - DNA, 75 bp, synthetic construct
  source 1..75: mol_type = other DNA
ccgccacgtatggcagcggtggttatattccggcgaccagctcttatgcaggctatcaggcttatcagccggtca

SEQ ID NO: 806045 - DNA, 75 bp, synthetic construct
  source 1..75: mol_type = other DNA
tcggcggtgactttaaggagtttcagtccgcttatgaggcggtggggactgacctgtttgaccagcaggaaggcg

SEQ ID NO: 806046 - DNA, 75 bp, synthetic construct
  source 1..75: mol_type = other DNA
ggtaaagcggggattaatacccgcaacctgacgaatgatgaaaatcgcctgaaaaataatatcagcgaaacgacc

SEQ ID NO: 806047 - DNA, 75 bp, synthetic construct
  source 1..75: mol_type = other DNA
cgtgctgaatgacaccgttggcgctaaagccaaacctttcagcatcaccgttgactgcagcaaagcaaatccgaa

SEQ ID NO: 806048 - DNA, 75 bp, synthetic construct
  source 1..75: mol_type = other DNA
tgtggcaaaaaatgccggtgtcagcattgaagaaaccgccgcaatggtcggggcgctgcatgatgcaaaaattac

SEQ ID NO: 806049 - DNA, 75 bp, synthetic construct
  source 1..75: mol_type = other DNA
gcgccagctcggcgacaacaccgccgcctcggcggatgatgcagccggtgcgcagattatcattgcaaaagccgg

SEQ ID NO: 806050 - DNA, 75 bp, synthetic construct
  source 1..75: mol_type = other DNA
gcaggcgcaggtgcttgaatcggcaaagcgtgccgccgacgggctgcagacgaaatacaacagcctcactgagtc

SEQ ID NO: 806051 - DNA, 75 bp, synthetic construct
  source 1..75: mol_type = other DNA
tgttctctcgatgacgatgaacaaaaccgccgccgattttgacgggatgagcgatgcgctgacctatgccgcgcc

SEQ ID NO: 806052 - DNA, 75 bp, synthetic construct
  source 1..75: mol_type = other DNA
tgccggtgtcggtattgcgacggcgggaacgatggccggggttaagctgctgacgccgggctatgcgtttgcgca

SEQ ID NO: 806053 - DNA, 75 bp, synthetic construct
  source 1..75: mol_type = other DNA
gcgtgatttgaatggtcaggcatcgaaaatcgacggttttcgcaaaaccagcgcacaactggcggtaaccggaca

SEQ ID NO: 806054 - DNA, 75 bp, synthetic construct
  source 1..75: mol_type = other DNA
cgcttgcaaacaaaaaaacaatggaggaaaacgcgcaactgttgatggggacaaaagccgcctttcaactttcta

SEQ ID NO: 806055 - DNA, 75 bp, synthetic construct
  source 1..75: mol_type = other DNA
gtagtgccattgcaaccgcgatcggtgcgatcacatggccgattgtggccgtcggtgcggcgattgtggccgggg

SEQ ID NO: 806056 - DNA, 75 bp, synthetic construct
  source 1..75: mol_type = other DNA
gccagtacaaaatgaacaatcaagacctctgcctgatgtggctcagcgtctgatgcagcatcttgcagagcatgg

SEQ ID NO: 806057 - DNA, 75 bp, synthetic construct
  source 1..75: mol_type = other DNA
cacgccatctgcctgggaaaatatggccgaaattattgccccacaaggccgtatcggactcatcgacgaccctga

SEQ ID NO: 806058 - DNA, 75 bp, synthetic construct
  source 1..75: mol_type = other DNA
gcatgctggattccggtaagctcaaacctccgttgctggcagagtatggcaggctgaatgctaaggaaggtgcga

SEQ ID NO: 806059 - DNA, 75 bp, synthetic construct
  source 1..75: mol_type = other DNA
tgcggctgtgtgagcactgaaacgcttatgcactggatgcgtgtggcgtatgaggctggcaactctccggtaatt

SEQ ID NO: 806060 - DNA, 75 bp, synthetic construct
  source 1..75: mol_type = other DNA
ttgaggctgttaaggctgttttgcgtagactggctggcaactatccggtaattccggatggttggataagctgta

SEQ ID NO: 806061 - DNA, 75 bp, synthetic construct
  source 1..75: mol_type = other DNA
ggactggcaatcctgatattgataacgccatcatcatgctcgaccgcatagatacgctggaaaattgcgatgatg

SEQ ID NO: 806062 - DNA, 75 bp, synthetic construct
  source 1..75: mol_type = other DNA
tcgaagtcttgtaaaggtgtcttacgcggattgcattatcagttagaaccttatgcacaagggaaattggtgcgc

SEQ ID NO: 806063 - DNA, 75 bp, synthetic construct
  source 1..75: mol_type = other DNA
gcgcgcactgtgcaaagagccgctgcgcaccgggcgtattctcaatattaacgtcccggatttaccgctggatca

SEQ ID NO: 806064 - DNA, 75 bp, synthetic construct
  source 1..75: mol_type = other DNA
tttgctgatgttcaggtggttgcccccgatcgtaaccgcagcggcgcttcaaattccctgacgctggaatcctcc

SEQ ID NO: 806065 - DNA, 75 bp, synthetic construct
  source 1..75: mol_type = other DNA
gggggatgtcagcctggatacccgccatttgtgggagtggctgaccgagccactctggagcctgaaaggaaaact

SEQ ID NO: 806066 - DNA, 75 bp, synthetic construct
  source 1..75: mol_type = other DNA
tgagcctgtttaccatatcagcggcgagcattacaacgggcagggcacaggtacactggcagccatgagcatgtc

SEQ ID NO: 806067 - DNA, 75 bp, synthetic construct
  source 1..75: mol_type = other DNA
tggctggattatctggatgcactggagctggttgatacctccagtgcaccagatattgaatggcctacgcctccg

SEQ ID NO: 806068 - DNA, 75 bp, synthetic construct
  source 1..75: mol_type = other DNA
gctggaagcagaaccagttgcttatattttcaaacatccggccgggaaattattctgggctttaacggatgaaag

SEQ ID NO: 806069 - DNA, 75 bp, synthetic construct
  source 1..75: mol_type = other DNA
gaaaaaccgtatcagtgaaaccaccgcacagcttaaccgtcagcgtgatgcgctggcgcgtgtcagtgcgcaaca

SEQ ID NO: 806070 - DNA, 75 bp, synthetic construct
  source 1..75: mol_type = other DNA
atcatcggtgccattggcctcgtagcctggccggttatcaccggcatcaatgccattatcgcggcagcaggcgca

SEQ ID NO: 806071 - DNA, 75 bp, synthetic construct
  source 1..75: mol_type = other DNA
gtgggtaatacctggtgcgtcgtggattccatcacactggatgccgctaccagaaccgccgcaggaggcgaaatg

SEQ ID NO: 806072 - DNA, 75 bp, synthetic construct
  source 1..75: mol_type = other DNA
tgccggtgtggggattgcggcggcgggaacgatggccggtgttaagctgctgatgcccggttatgagtttgcgca

SEQ ID NO: 806073 - DNA, 75 bp, synthetic construct
  source 1..75: mol_type = other DNA
gaaaaaccgtatcagtgaaaccaccgcacagcttaaccgtcagcgcgacgcactggcgcgtgtcagtgcacaaca

SEQ ID NO: 806074 - DNA, 75 bp, synthetic construct
  source 1..75: mol_type = other DNA
ggaactgttcacgccacttaagccggtgtttgactggctgggcgaaaagttacaggccgcgtggcagtggtttaa

SEQ ID NO: 806075 - DNA, 75 bp, synthetic construct
  source 1..75: mol_type = other DNA
atcctgacgctaatgatgggtggataattcctggtgcgtcgtggaaaccgtcacactggatgcctctaccagaac

SEQ ID NO: 806076 - DNA, 75 bp, synthetic construct
  source 1..75: mol_type = other DNA
gccagttgcgtcgttctggaatcattacggggcacatgtaactcactggatgcctctaccagaaccgccgcagga

SEQ ID NO: 806077 - DNA, 75 bp, synthetic construct
  source 1..75: mol_type = other DNA
caggcaattgaaaaactcaaacggaaattagtggaatgcaatcgctataactactgtgcagatgcagttaaaggc

SEQ ID NO: 806078 - DNA, 75 bp, synthetic construct
  source 1..75: mol_type = other DNA
caaagcacggcgagtatatggcaggacaggtacaaggggaatacgtggagttgagcgacggcactttatcgtggt

SEQ ID NO: 806079 - DNA, 75 bp, synthetic construct
  source 1..75: mol_type = other DNA
tatcgttaccattaacaaatatgccagtcagttggcagcagaaccgatagcgactaataacgttcgagagcagca

SEQ ID NO: 806080 - DNA, 75 bp, synthetic construct
  source 1..75: mol_type = other DNA
tgatggcgaagacctgcatctcaaagaagtaacccactggatgccgctaccagaaccgccgaaggaggtacgcca

SEQ ID NO: 806081 - DNA, 75 bp, synthetic construct
  source 1..75: mol_type = other DNA
acggggtacatgcacccggtatacaaacgctggcaaaagccttgcgtgagtttgctgacgttcaggtggtcgccc

SEQ ID NO: 806082 - DNA, 75 bp, synthetic construct
  source 1..75: mol_type = other DNA
caaagatgaattgagaaaaacagccatctttgatggcgatattttaataactcgaactggaactgttggtaaaag

SEQ ID NO: 806083 - DNA, 75 bp, synthetic construct
  source 1..75: mol_type = other DNA
cgacaacagctttgatcaagcgattttaagtaaactgagcgctgagggttatgccatagaaggcgccacaccgct

SEQ ID NO: 806084 - DNA, 75 bp, synthetic construct
  source 1..75: mol_type = other DNA
aaactaagtgctgagggttatgccatagaaggcgccacaccgctatttagcgatgtggatgagttatacagtttg

SEQ ID NO: 806085 - DNA, 75 bp, synthetic construct
  source 1..75: mol_type = other DNA
aagtgtctgagtttgttcaaaaatacatcggggataaagttcgccaagccgagcagctgcgcgcttgggcgaagc

SEQ ID NO: 806086 - DNA, 75 bp, synthetic construct
  source 1..75: mol_type = other DNA
tatacctgaaaatgaaggcctctagcgatccttactatctcgttagctacctgaactgtgaccaaggacaaaagg

SEQ ID NO: 806087 - DNA, 75 bp, synthetic construct
  source 1..75: mol_type = other DNA
aatttgcctgttatctcagcagaatcattgtctcaaaaatacatcggggataaagttcgccaagccgagcagttg

SEQ ID NO: 806088 - DNA, 75 bp, synthetic construct
  source 1..75: mol_type = other DNA
atgacgccaggtgaagtacggcgcctgtatttcatcattcgcacttttttaagttacggacttgatgaactgatc

SEQ ID NO: 806089 - DNA, 75 bp, synthetic construct
  source 1..75: mol_type = other DNA
attgcaggacaaagttgctccgtttgatggcaagctggcgaagcagcagattgaagctgcaatgggcggcttgcc

SEQ ID NO: 806090 - DNA, 75 bp, synthetic construct
  source 1..75: mol_type = other DNA
atcggattcgataaagaggcagacaaagaaacattaggcggcatattacaagagatttgggaagacgatagctgg

SEQ ID NO: 806091 - DNA, 75 bp, synthetic construct
  source 1..75: mol_type = other DNA
taaaacttgacggaaccacccctggccagctgtcaatggctaagttggtcaagtatatgtctgctctcgtagatc

SEQ ID NO: 806092 - DNA, 75 bp, synthetic construct
  source 1..75: mol_type = other DNA
gtgattaaagtcattcgcccggatattttgccggtcataaaagcggatctgaaactcatctatcgtctggcgcgt

SEQ ID NO: 806093 - DNA, 75 bp, synthetic construct
  source 1..75: mol_type = other DNA
gacggcgaactggcgaaagcacaaattgaagcggcgatgggcggtctgccggtggaagcgtggtttgatgatttt

SEQ ID NO: 806094 - DNA, 75 bp, synthetic construct
  source 1..75: mol_type = other DNA
ggttgaatttgttcaggataaccattcgaagtctagtaaaggtgttttacgcgggctgcattatcagttagaacc

SEQ ID NO: 806095 - DNA, 75 bp, synthetic construct
  source 1..75: mol_type = other DNA
gaaatgagcccaggtacggtgcgtgaatatgtcgttcgtctgcgccgtttggggaatcatctacacgagcaaaat

SEQ ID NO: 806096 - DNA, 75 bp, synthetic construct
  source 1..75: mol_type = other DNA
gtgggctgcactatcagttagaaccttatgcgcaaggaaaactggtacgctgcgttgttggtgaagtttttgacg

SEQ ID NO: 806097 - DNA, 75 bp, synthetic construct
  source 1..75: mol_type = other DNA
acctacctttggcaaatgggttggggtgaatttatctgctgagaataagcgccagttgtggatacctgaaggatt

SEQ ID NO: 806098 - DNA, 75 bp, synthetic construct
  source 1..75: mol_type = other DNA
tgcggtcgccgtcacccggcagatcaagtgatcccacagcaggatccgcgcggcaatacgttgtactggatcggt

SEQ ID NO: 806099 - DNA, 75 bp, synthetic construct
  source 1..75: mol_type = other DNA
tgtgggagccgtcatccggcagatcaggtgatcccgcagcaagatcctcgtggtaatacactgtactggattggt

SEQ ID NO: 806100 - DNA, 75 bp, synthetic construct
  source 1..75: mol_type = other DNA
ttcttgatgaaacctttgccccgtggctgcctgccaccagcaccaacaattaccgcattgcgttacgtaagtatc

SEQ ID NO: 806101 - DNA, 75 bp, synthetic construct
  source 1..75: mol_type = other DNA
gtttaacctgacagtgcgaaatcgctataaccataacaactacagttccactgatttaaatggtgagctggataa

SEQ ID NO: 806102 - DNA, 75 bp, synthetic construct
  source 1..75: mol_type = other DNA
tgcgtaatcgctataaccataataattacagctctacagatttgaacggcgaattggataataacgacacctatg

SEQ ID NO: 806103 - DNA, 75 bp, synthetic construct
  source 1..75: mol_type = other DNA
caacaaactactatcatccgcaaagcgacaggggtttgatgtggaatgactcggacataggtatccaatggggtg

SEQ ID NO: 806104 - DNA, 75 bp, synthetic construct
  source 1..75: mol_type = other DNA
gaattatctgggaataataaaagacaattgtggatccccgaaggttttgcccatggtttttatgtgttggaggag

SEQ ID NO: 806105 - DNA, 75 bp, synthetic construct
  source 1..75: mol_type = other DNA
taataaagtatattgactctagttctgttttagcgaaggatgagttggtacaatatcgtgcatattttcaattgt

SEQ ID NO: 806106 - DNA, 75 bp, synthetic construct
  source 1..75: mol_type = other DNA
ctatggcgcttatagtatcggaacagctttagccgaaattaatgcaaaagaaggggattatgttcacatagctca

SEQ ID NO: 806107 - DNA, 75 bp, synthetic construct
  source 1..75: mol_type = other DNA
gctcaggactgcgcttataaatttcttgtctgtgaggataaacccggcatgccccgccctgccattgactcctgg

SEQ ID NO: 806108 - DNA, 75 bp, synthetic construct
  source 1..75: mol_type = other DNA
atactctctcgtcgccagtaccagaaactgatgcagtggaaacggcaattccggacaacgaaaaaaccgaatgca

SEQ ID NO: 806109 - DNA, 75 bp, synthetic construct
  source 1..75: mol_type = other DNA
gttatgaaacgtcgcgccaaaattgtatatcgcaacctggaactgtgcttcccggagatgagcgaacaagaacgc

SEQ ID NO: 806110 - DNA, 75 bp, synthetic construct
  source 1..75: mol_type = other DNA
gctgggatgaggagtcagcttcctttgtaccggtcgaaccagaatccgatccgatgaacgtcacttttgacaagc

SEQ ID NO: 806111 - DNA, 75 bp, synthetic construct
  source 1..75: mol_type = other DNA
accccgccctgccctcgattcctgggatgccgaatatatgcaggaaaaccgctgggatgaggagtcagcttcctt

SEQ ID NO: 806112 - DNA, 75 bp, synthetic construct
  source 1..75: mol_type = other DNA
aattccggacaacgaaaaaaccgaatgcaaagtggaagtcgaaccatctgtagagcgtgaggggccgttctactt

SEQ ID NO: 806113 - DNA, 75 bp, synthetic construct
  source 1..75: mol_type = other DNA
tcaataggtgcaatatttttcgatccgcaaaccggagatatgggaccggaatttagtaagactatcgatctggaa

SEQ ID NO: 806114 - DNA, 75 bp, synthetic construct
  source 1..75: mol_type = other DNA
gtgatcgaaaaatgcatcatgatggcgccagaacaatatatgtggctgcatcgccgctttaaaacacgcccggaa

SEQ ID NO: 806115 - DNA, 75 bp, synthetic construct
  source 1..75: mol_type = other DNA
aaatggaaggcactgcgcatcagcacaaggagaacactggcggcaatcagcatcacaatagcgataatgaaactg

SEQ ID NO: 806116 - DNA, 75 bp, synthetic construct
  source 1..75: mol_type = other DNA
ttagcaagaccatcgatctggatactgctggcggagtcattgatcgtgacgtcattaaatggtggctgaagcaat

SEQ ID NO: 806117 - DNA, 75 bp, synthetic construct
  source 1..75: mol_type = other DNA
gcaattcctggagcaacatccggctgctcaggactgcgcttataaatttcttgtctgtgaggataaacccggcat

SEQ ID NO: 806118 - DNA, 75 bp, synthetic construct
  source 1..75: mol_type = other DNA
cataacgccctgcacgatgcgcgttaccaggcaaaatacgtttcagccatctggcaaaaactgctcccgagtcag

SEQ ID NO: 806119 - DNA, 75 bp, synthetic construct
  source 1..75: mol_type = other DNA
atatggatagggcccgtaccatggcgaacgcactgctaccgtctgctttaaatcaggcgatagcagaagccatca

SEQ ID NO: 806120 - DNA, 75 bp, synthetic construct
  source 1..75: mol_type = other DNA
gaattcagcaaaactatcgatctggaaaccgcaggcggggtcatcgatcgggacaccattaagtggtggctgaaa

SEQ ID NO: 806121 - DNA, 75 bp, synthetic construct
  source 1..75: mol_type = other DNA
gtgaaacataatgttaacttctccatactttggataaggaaatacagacatgaaaaactcattgctgagttgtta

SEQ ID NO: 806122 - DNA, 75 bp, synthetic construct
  source 1..75: mol_type = other DNA
tgcaccgcctgcggtcagagcggtggcggcaactgccccgattgtggcgctgtcatgggcaacgcaacataccag

SEQ ID NO: 806123 - DNA, 75 bp, synthetic construct
  source 1..75: mol_type = other DNA
ggcggggtcattgatcgggacaccattaaatggtggcttaagcaatcacgcgaagcgcaatctgccattatgacc

SEQ ID NO: 806124 - DNA, 75 bp, synthetic construct
  source 1..75: mol_type = other DNA
gtgatgatggcgatgaatttctctttcgacaccctgtttttcattatcgctgtgcccgcggcgatcagtgcggtg

SEQ ID NO: 806125 - DNA, 75 bp, synthetic construct
  source 1..75: mol_type = other DNA
agacataagcaccatcgaatggtggcttcaacgctctggcgaagcccgtgccgccattttagctgatcgaatacc

SEQ ID NO: 806126 - DNA, 75 bp, synthetic construct
  source 1..75: mol_type = other DNA
cgcaaaatgaccaacagcggttgattgatcaggtagagggggcgctgtacgaggtaaagcccgatgccagcattc

SEQ ID NO: 806127 - DNA, 75 bp, synthetic construct
  source 1..75: mol_type = other DNA
atcgacgaaaactctggtgagttttttgttcaggtctggggcaacggaaccagtttcgacaacgtaattttacgc

SEQ ID NO: 806128 - DNA, 75 bp, synthetic construct
  source 1..75: mol_type = other DNA
gagagcgctggtgacgctcagcatggcaatagcagtgatgaaactggcgagatggcaaatcccctaattgcggtg

SEQ ID NO: 806129 - DNA, 75 bp, synthetic construct
  source 1..75: mol_type = other DNA
gaattttttgttcaggtctggggtaacggtgcaactttcgacaacgtgattttacgccgttcatatgaacggcag

SEQ ID NO: 806130 - DNA, 75 bp, synthetic construct
  source 1..75: mol_type = other DNA
ttatcgacgaaaactccggtgaattttttgttcaggtctggggaaatggagccaacttcgacaacacgattttgc

SEQ ID NO: 806131 - DNA, 75 bp, synthetic construct
  source 1..75: mol_type = other DNA
ctcaataggtgcaatatttttcgatccgcaaaccggagatatgggaccggaatttagtaagactatcgatctgga

SEQ ID NO: 806132 - DNA, 75 bp, synthetic construct
  source 1..75: mol_type = other DNA
gatgaagagtatcaggttgaagttcaggaagatgatccggaggaaatggaaggcgctgaacatccacacaaggag

SEQ ID NO: 806133 - DNA, 75 bp, synthetic construct
  source 1..75: mol_type = other DNA
tagcagtagcagtagcaggaacaacaacatcatcagtaacaggcaaatgacaggtctgaagcccacagcagaacg

SEQ ID NO: 806134 - DNA, 75 bp, synthetic construct
  source 1..75: mol_type = other DNA
tatgcgaaatctgatcgtaccgacactcaagttaatgcagggaaagttcttcctgaagtatttgcttccggtaaa

SEQ ID NO: 806135 - DNA, 75 bp, synthetic construct
  source 1..75: mol_type = other DNA
aggattcccggggcggttcagactgacgtcctgccagaattcggtggtgacacttggactcaaacagatgtgttc

SEQ ID NO: 806136 - DNA, 75 bp, synthetic construct
  source 1..75: mol_type = other DNA
ctggactggcggagacggttgtggctgtctttgcccccggcgacaggggcttaaacaggtgtatggcaccggaca

SEQ ID NO: 806137 - DNA, 75 bp, synthetic construct
  source 1..75: mol_type = other DNA
acagaacggccagaaagcggaacaaaacagcccaaatgcgttacaaaacgagccagaaacgaaacaacctgaacc

SEQ ID NO: 806138 - DNA, 75 bp, synthetic construct
  source 1..75: mol_type = other DNA
aagcataaatgtaagcctggtgctaaatggcctgaaattcaggcagagatgcgcatctggaaaaaacgtcgcgaa

SEQ ID NO: 806139 - DNA, 75 bp, synthetic construct
  source 1..75: mol_type = other DNA
ccatctgatgatcgaccttgaaacgatgggaacaaatcctgatgcgccaatcaactctattggcggtaaattctt

SEQ ID NO: 806140 - DNA, 75 bp, synthetic construct
  source 1..75: mol_type = other DNA
cgggaatttatcgacgaaaactccggtgaattttttgttcatgtctggggaaatggagccaacttcgacaacacg

SEQ ID NO: 806141 - DNA, 75 bp, synthetic construct
  source 1..75: mol_type = other DNA
cagatgaaaaattcgttcaggtatggggtaatggtgcaactttcgataacgcaattttgcgcacctcatacgaac

SEQ ID NO: 806142 - DNA, 75 bp, synthetic construct
  source 1..75: mol_type = other DNA
tgatgtaggtgcaacctattacttcaacaaaaatatgtctactttcgttgattacaaaatcaacctgcttgacaa

SEQ ID NO: 806143 - DNA, 75 bp, synthetic construct
  source 1..75: mol_type = other DNA
tctggcctggtgatgtggatgccggaagcattgacggcagcatccatcgctgggcaaaaaatgaagttatcgcca

SEQ ID NO: 806144 - DNA, 75 bp, synthetic construct
  source 1..75: mol_type = other DNA
acgacgaagagcgcgtgcgcgaaacggcgttgccccttacatcccggcgtctttttgccgggatgccgggagcgc

SEQ ID NO: 806145 - DNA, 75 bp, synthetic construct
  source 1..75: mol_type = other DNA
cgacgctttttcgccatatatcgacaatcaacgggttcgaaaatccgatggctcagccgttgttgtcagatggac

SEQ ID NO: 806146 - DNA, 75 bp, synthetic construct
  source 1..75: mol_type = other DNA
tagagcgtgaaggaccattttatttcgtctttaccgataagggcggggaaaatacggcagggcaaacaaactttc

SEQ ID NO: 806147 - DNA, 75 bp, synthetic construct
  source 1..75: mol_type = other DNA
gaatatttcgccgcaaaaacggtacatactcaggttcacaacaaaatactggtgcatctgacacgaccgcacaac

SEQ ID NO: 806148 - DNA, 75 bp, synthetic construct
  source 1..75: mol_type = other DNA
gtaattcagacctgggactgataactgcttttttcgaggcatacctggacgctgattacactgatcggggtctgc

SEQ ID NO: 806149 - DNA, 75 bp, synthetic construct
  source 1..75: mol_type = other DNA
ttctggtctggacaaggcgctggctgccggcgctaccgaaatctcaaaagaggaatattttgcccgaaaaaatgg

SEQ ID NO: 806150 - DNA, 75 bp, synthetic construct
  source 1..75: mol_type = other DNA
ttgcactgaacaaatatatcagcgaatacctgacaacaaagggcgtgtttgagcatgaagaaacagaccagagct

SEQ ID NO: 806151 - DNA, 75 bp, synthetic construct
  source 1..75: mol_type = other DNA
atgtacgcacaatcgttgagctggggaaagccatagacttcgatgccagaacggctattccattcgaaggtgagc

SEQ ID NO: 806152 - DNA, 75 bp, synthetic construct
  source 1..75: mol_type = other DNA
aaacgtatcgaggaaattatcgctgaaaataaatcgcccttttctgttttccgcgacaaattcatcaccatgcct

SEQ ID NO: 806153 - DNA, 75 bp, synthetic construct
  source 1..75: mol_type = other DNA
gctgactacaccgatcgcggtctgctgacaaaagagtggatgaaaggaaatcgtatttcacgcatcacgcgcacg

SEQ ID NO: 806154 - DNA, 75 bp, synthetic construct
  source 1..75: mol_type = other DNA
aaaaacccgtccgtgtccatttacccgttgtgaatgacctgccccctgaaggcgtatttgatacggaattctgca

SEQ ID NO: 806155 - DNA, 75 bp, synthetic construct
  source 1..75: mol_type = other DNA
ccagtaacgcacgtttcacgcgacgaactccaggcattacacattgcatgggctgaagaactaccggctgttact

SEQ ID NO: 806156 - DNA, 75 bp, synthetic construct
  source 1..75: mol_type = other DNA
acatgaaccgctcacgatcaatggcagccggcttaatgcccggcgcgctgagtagggcgattgaggaagcgattc

SEQ ID NO: 806157 - DNA, 75 bp, synthetic construct
  source 1..75: mol_type = other DNA
tcataaatatttgtcgatgatgcgcaatggtgctctgatcatcaatgccgcaaggggaaagttgctggatgaggg

SEQ ID NO: 806158 - DNA, 75 bp, synthetic construct
  source 1..75: mol_type = other DNA
catggcaacattcgacggacatatcgttgaagcgttgatgaaaatgccagaagttaacgccatgtatccgaagag

SEQ ID NO: 806159 - DNA, 75 bp, synthetic construct
  source 1..75: mol_type = other DNA
tggaaaaaacgtcgcgaaggtgaacgcaaagaaaccggaaaatacacgtctgttgttgatctcgcccgcgccaga

SEQ ID NO: 806160 - DNA, 75 bp, synthetic construct
  source 1..75: mol_type = other DNA
aatggcccgaaattcaggcagagatgcgcatctggaaaaaacgtcgtgaaggtgaacgcaaggaaaccggaaaat

SEQ ID NO: 806161 - DNA, 75 bp, synthetic construct
  source 1..75: mol_type = other DNA
atgagtacagaaatgaaaacggggctggtgctgtccggtggcggggcggtgggcgcttatcaggcaggtgtggtt

SEQ ID NO: 806162 - DNA, 75 bp, synthetic construct
  source 1..75: mol_type = other DNA
cgacgcttcttcaccatatatcgacaatcaacgggttcgaaaacccgatggctcagccgttgttgtcagatggac

SEQ ID NO: 806163 - DNA, 75 bp, synthetic construct
  source 1..75: mol_type = other DNA
atttcgacgcaagaacgactattccattcgaaggtgaacgccataacgccctgcacgatgcacgttaccaggcga

SEQ ID NO: 806164 - DNA, 75 bp, synthetic construct
  source 1..75: mol_type = other DNA
aacactggcggcaatcagcatcacgatagcgataatgaaactggcgagacggcagatcactcaattaaggtgaac

SEQ ID NO: 806165 - DNA, 75 bp, synthetic construct
  source 1..75: mol_type = other DNA
ggaagtggaaaaagtctgcaccgcctgcggtcagaccggcggcggcaactgccctgattgtggcgcagtgatggg

SEQ ID NO: 806166 - DNA, 75 bp, synthetic construct
  source 1..75: mol_type = other DNA
atgactcaacgacgtgatttacaagcacttatcgatgcagctccgatcggcaagatgcagtggtgcgttatcatc

SEQ ID NO: 806167 - DNA, 75 bp, synthetic construct
  source 1..75: mol_type = other DNA
ggcggcaatcagcatcatgccagcgatagtgaaactggcgaggcgtcagatcccttaattaaggcgaacggtcat

SEQ ID NO: 806168 - DNA, 75 bp, synthetic construct
  source 1..75: mol_type = other DNA
aaaagatctgcaccgcctgcggtcagagcggtggcggcaactgccctgattgtggtgcggtgatgggtgacgcaa

SEQ ID NO: 806169 - DNA, 75 bp, synthetic construct
  source 1..75: mol_type = other DNA
ccataatgcacttgatgacgcccgttaccaggcaaaatacgtttcagttatctggcaaaaactgatcccgaatca

SEQ ID NO: 806170 - DNA, 75 bp, synthetic construct
  source 1..75: mol_type = other DNA
tgacggaaactgatcacgagaaccccagcaaggaaactctcacagttgcccggcatacgccggaaaaagatatcc

SEQ ID NO: 806171 - DNA, 75 bp, synthetic construct
  source 1..75: mol_type = other DNA
gccttgtccgtgagcgtccgatcgacattcacaaagatcccgtagcactgaacaaatacatcactgaatacctgg

SEQ ID NO: 806172 - DNA, 75 bp, synthetic construct
  source 1..75: mol_type = other DNA
accctggcgcccaatacgcaaaccacctctccccgcacgttggccgattccttaatgcagctggcacgacaagtt

SEQ ID NO: 806173 - DNA, 75 bp, synthetic construct
  source 1..75: mol_type = other DNA
tttcaacaaaccatgcagatgctgaatgagggcatcattcccactgcgatgctggtcgccaacgatcagatggcg

SEQ ID NO: 806174 - DNA, 75 bp, synthetic construct
  source 1..75: mol_type = other DNA
atgcaggcagccaatatcagccagcctgacgccgataagttgcttgctgcatcacgtggtgaatttgttgaaggg

SEQ ID NO: 806175 - DNA, 75 bp, synthetic construct
  source 1..75: mol_type = other DNA
ttgcacttatccgaagcgcacaccctgaattttatcactacccgggacgccttcaggggtatatcaacgcctatt

SEQ ID NO: 806176 - DNA, 75 bp, synthetic construct
  source 1..75: mol_type = other DNA
cttcgacaacacgattttgcgccgttcatacgaacggcaggggatcccctgcccgtggcgttactacaacgatcg

SEQ ID NO: 806177 - DNA, 75 bp, synthetic construct
  source 1..75: mol_type = other DNA
gaaaaatacggtcgcgcaaacaaactttctggtctggataaggcgctggctgccggggctactgaaatcacgaaa

SEQ ID NO: 806178 - DNA, 75 bp, synthetic construct
  source 1..75: mol_type = other DNA
aaatcccgttagatgatgcactgttacaattgcgggaatttatcgacgaaaactccggtgaattttttgttcagg

SEQ ID NO: 806179 - DNA, 75 bp, synthetic construct
  source 1..75: mol_type = other DNA
cgccagagccaatcaacagtacactgaaaattcaacaggaaaaatcagcccgttcattgctgccattcatcgcga

SEQ ID NO: 806180 - DNA, 75 bp, synthetic construct
  source 1..75: mol_type = other DNA
atggcgcaaaacatttcgtggtatggcatgatagcacccgaagagagtcaattcagggtggtaaatgtgaaacca

SEQ ID NO: 806181 - DNA, 75 bp, synthetic construct
  source 1..75: mol_type = other DNA
atcgcgaagactggaagcgcatctccgcatcaatgcgcaaacaacctgatgcgcttcgctacagccgccagacta

SEQ ID NO: 806182 - DNA, 75 bp, synthetic construct
  source 1..75: mol_type = other DNA
gcgcgcaggaactgttgcaggaagacatggcaacattcgacggacatatcgttgaagcgttgatgaaaatgccag

SEQ ID NO: 806183 - DNA, 75 bp, synthetic construct
  source 1..75: mol_type = other DNA
tgtaagcctggtgccaaatggcccgaaattcaggcagagatgcgcatctggaaaaaacgtcgcgaaggtgaacgc

SEQ ID NO: 806184 - DNA, 75 bp, synthetic construct
  source 1..75: mol_type = other DNA
tacaagcagacctggaaaacactggataaagaactggcctatgctctctggcctggtgacattgatgtccggaac

SEQ ID NO: 806185 - DNA, 75 bp, synthetic construct
  source 1..75: mol_type = other DNA
tgaataaagtctttatttgcgcagctattccggacgaacaggcaataaaggaagaaggtgcagtcgctgtggcct

SEQ ID NO: 806186 - DNA, 75 bp, synthetic construct
  source 1..75: mol_type = other DNA
cagatgagaaattcgtgcaggtatggggcaatggcgcaactttcgacaacacaattttacgccgttcatatgaac

SEQ ID NO: 806187 - DNA, 75 bp, synthetic construct
  source 1..75: mol_type = other DNA
aaacgaccagaaagcggaacaaaacagtccaaatgcgttacaaaacgagccagaaacgaaactgcctgaaccaga

SEQ ID NO: 806188 - DNA, 75 bp, synthetic construct
  source 1..75: mol_type = other DNA
ggtgagcgccataatgcacttgatgacgctcgttaccaggcaaaatacgtttcagctatctggcaaaaactgatc

SEQ ID NO: 806189 - DNA, 75 bp, synthetic construct
  source 1..75: mol_type = other DNA
ggggctactgaaatcacgaaagaagaatattttgctcgaaaaaacggtacatactcaggttcacaacaaaatact

SEQ ID NO: 806190 - DNA, 75 bp, synthetic construct
  source 1..75: mol_type = other DNA
gcgctggatgatgcccgtcaccaggcaaaatacgtttcagcaatctggcaaaaactgatcccgaatccggttgat

SEQ ID NO: 806191 - DNA, 75 bp, synthetic construct
  source 1..75: mol_type = other DNA
tcatcataatctcacatccaccagcagagcggggattcatctgatgatcgaccttgaaaccatgggaaaaaatcc

SEQ ID NO: 806192 - DNA, 75 bp, synthetic construct
  source 1..75: mol_type = other DNA
cgattctgtaaaccagaaccagcaagaatcggaacagaacgaccagaaagcggaacaaaacagcccaaatacgca

SEQ ID NO: 806193 - DNA, 75 bp, synthetic construct
  source 1..75: mol_type = other DNA
tccggatggttccaccattgaatggtggctggcgcagtccagtgaggcgagatctgcaatcttggtagaccaggt

SEQ ID NO: 806194 - DNA, 75 bp, synthetic construct
  source 1..75: mol_type = other DNA
atcagaaccagcaagaaacggaacagaacgaccagaaagcggaacaaaacagcccaaatgcgcaacaggagccgg

SEQ ID NO: 806195 - DNA, 75 bp, synthetic construct
  source 1..75: mol_type = other DNA
tcgccccgctttttggtgcgggtctgctgggtttaacggcaggcgcactgctttgtggcccgttgtctgaccgct

SEQ ID NO: 806196 - DNA, 75 bp, synthetic construct
  source 1..75: mol_type = other DNA
ggcgcaacaggaagtggaaaaagtctgcaccgcctgcggtcagaccggcggcggcaactgccctgattgtggcgc

SEQ ID NO: 806197 - DNA, 75 bp, synthetic construct
  source 1..75: mol_type = other DNA
aaactgctccagtggagacggcagaatccgatactcaaaaaaatgaaatcctggtggaagctgaaccatctgtag

SEQ ID NO: 806198 - DNA, 75 bp, synthetic construct
  source 1..75: mol_type = other DNA
acatacacaggcttaccgcaaaatgcaaataccgcacaaaattctgaacaaccagaaccggtaaaagttaccgct

SEQ ID NO: 806199 - DNA, 75 bp, synthetic construct
  source 1..75: mol_type = other DNA
atgggaaaaaatcctgatgccccgattatctcaataggtgcaatatttttcgatccgcaaaccggagagatgggg

SEQ ID NO: 806200 - DNA, 75 bp, synthetic construct
  source 1..75: mol_type = other DNA
aatgcacttgatgacgctcgttaccaggcaaaatacgtttcagctatctggcaaaaactgatcccgagtcaggct

SEQ ID NO: 806201 - DNA, 75 bp, synthetic construct
  source 1..75: mol_type = other DNA
ctgctgattaccgtggttcgccagtcgacctctgtccctgactcactgcctcgcgcaggcgttgtgaacgaataa

SEQ ID NO: 806202 - DNA, 75 bp, synthetic construct
  source 1..75: mol_type = other DNA
gctgatgctctccagccgtcagcagcacaaactgctccagtggagacggcagaatccgatactcaaaaaaatgaa

SEQ ID NO: 806203 - DNA, 75 bp, synthetic construct
  source 1..75: mol_type = other DNA
taccgcaggcggtaattgcaaaaaccgtgagtgccatgactcgcgagcgttatgtcgatacccacttttatctca

SEQ ID NO: 806204 - DNA, 75 bp, synthetic construct
  source 1..75: mol_type = other DNA
tttatcgacgaaaactccggtgaattttttgttcaggtttggggaaatggagccaacttcgacaacacgattttg

SEQ ID NO: 806205 - DNA, 75 bp, synthetic construct
  source 1..75: mol_type = other DNA
caatatttttcgatccacaaaccggagatatgggaccggaatttagcaagaccatagatctgaatactgctggcg

SEQ ID NO: 806206 - DNA, 75 bp, synthetic construct
  source 1..75: mol_type = other DNA
tgcagctgctaaatgctatttttattggcattctgggcggcatcgggatgctctattttcaggatctgatgcccg

SEQ ID NO: 806207 - DNA, 75 bp, synthetic construct
  source 1..75: mol_type = other DNA
tcgcgcgtgggctggatcatcgcaggatcagtggcgggcatcgtcgccgagatctggaattatcacgctgtgttc

SEQ ID NO: 806208 - DNA, 75 bp, synthetic construct
  source 1..75: mol_type = other DNA
ccagtcactgccgccatttgtcgcgaatacaagcagacatggaaaacgctggatgaagaactggcctacgctctc

SEQ ID NO: 806209 - DNA, 75 bp, synthetic construct
  source 1..75: mol_type = other DNA
agcggtggatcagccgtggactaactggcaggaagcactgaataacgtgcaaaaagtgccaggtattgccgccgc

SEQ ID NO: 806210 - DNA, 75 bp, synthetic construct
  source 1..75: mol_type = other DNA
cgctgggtagagaaagacacccctgatgcagttgaaaaaattcaggcgttgttaccagcgatcgaaaaggcaatg

SEQ ID NO: 806211 - DNA, 75 bp, synthetic construct
  source 1..75: mol_type = other DNA
gcatggcgatgaatgcctgggcgcgtccggacggtgaaaaagttccggcagccgagataaccagggtttattttg

SEQ ID NO: 806212 - DNA, 75 bp, synthetic construct
  source 1..75: mol_type = other DNA
tggaggcggcagttaaagagcttaataagggggtggctatgggtaaacctggactcaggtatccaccgaaggaaa

SEQ ID NO: 806213 - DNA, 75 bp, synthetic construct
  source 1..75: mol_type = other DNA
ctgatgcagccaaaacgtgtgcgtttgcacgttgccggtattttgcagttgagtggtcaactcgatcacagtttt

SEQ ID NO: 806214 - DNA, 75 bp, synthetic construct
  source 1..75: mol_type = other DNA
cgtgaactgaacaaccgcattctggcagtggtgccgcatggtgaaattgaagcggtgaatcagccgtggacgaac

SEQ ID NO: 806215 - DNA, 75 bp, synthetic construct
  source 1..75: mol_type = other DNA
aactggggatgacgttcccggaactgtacgacgacagccatccggaagccctggctcgtaatacccagaaaattt

SEQ ID NO: 806216 - DNA, 75 bp, synthetic construct
  source 1..75: mol_type = other DNA
gcgcagccacagttcagcttattttcgggagttggtggagacgcgggagcgactggtgagagacgctgatgattt

SEQ ID NO: 806217 - DNA, 75 bp, synthetic construct
  source 1..75: mol_type = other DNA
gctggaataacccaggcttattttgagttgggtatgacgttcccagaactgtatgacgacagccatccggaagcc

SEQ ID NO: 806218 - DNA, 75 bp, synthetic construct
  source 1..75: mol_type = other DNA
cgcaatacccagaaaattttccgctgggtggagaaagacactcctgatgcggttaaaaaaattcaggcgttgtta

SEQ ID NO: 806219 - DNA, 75 bp, synthetic construct
  source 1..75: mol_type = other DNA
ggctggtgaaggatgtcgacgattttgttgcgtcagcggtcgttttgtatgaccagatgaatcgcggcggcccgg

SEQ ID NO: 806220 - DNA, 75 bp, synthetic construct
  source 1..75: mol_type = other DNA
tgccgccaccgctggtggcccgaatgcgtagtcacagttcggagtatcaccgggagattgtcgagcgacgggatc

SEQ ID NO: 806221 - DNA, 75 bp, synthetic construct
  source 1..75: mol_type = other DNA
ggtaaaggtgccgccattggtatccctaatcttctggtcagaaaacactctctgattgcgttagatccaaaacag

SEQ ID NO: 806222 - DNA, 75 bp, synthetic construct
  source 1..75: mol_type = other DNA
cctgttttctcaattggttctgtcgttgacttgtacagtaatattgaccgggaacttatactcagtaagcgggaa

SEQ ID NO: 806223 - DNA, 75 bp, synthetic construct
  source 1..75: mol_type = other DNA
aaagcattatgattgggccggacggtgagctgtacggtgcatccgacccgcgctcggtggatgatttaacggcgg

SEQ ID NO: 806224 - DNA, 75 bp, synthetic construct
  source 1..75: mol_type = other DNA
tcgggccgaataaacgcccgctgtcgtcgatgtcaccaaccattgtggtcaaggatggtaaaacctggctggtca

SEQ ID NO: 806225 - DNA, 75 bp, synthetic construct
  source 1..75: mol_type = other DNA
taaacttaaactgctgacaatttatcagaatatcagtcagctaaatgaaatctatggtattgagggagccaaaac

SEQ ID NO: 806226 - DNA, 75 bp, synthetic construct
  source 1..75: mol_type = other DNA
cccccttttctatattgatttaaaagcggagagtggggctaaggatctgcttaaactgattgaaattctgtttcc

SEQ ID NO: 806227 - DNA, 75 bp, synthetic construct
  source 1..75: mol_type = other DNA
cccgttttctcaatcggttctgtcgtcgacctgtacagcaatattgaccgggaactgatactcagtaagcgggaa

SEQ ID NO: 806228 - DNA, 75 bp, synthetic construct
  source 1..75: mol_type = other DNA
gctcgacgtcgaaaagtagttcagaaagtgaggcgcagcgcgcccttgtgctcccgcaggagctgggaacgctgg

SEQ ID NO: 806229 - DNA, 75 bp, synthetic construct
  source 1..75: mol_type = other DNA
cctgattgcattagatccaaaacaggaactgtggaaaatcaccagtaaggtacgtgaaaaactgctgggtaataa

SEQ ID NO: 806230 - DNA, 75 bp, synthetic construct
  source 1..75: mol_type = other DNA
gacctggagggaacaaaaggacttgatgaaaacgcgctgtatcatctgcgcgatgccctgaccaaaatcagggag

SEQ ID NO: 806231 - DNA, 75 bp, synthetic construct
  source 1..75: mol_type = other DNA
taactcctgatggcaccgcatctaacacccctgagttgaccattgcgaaagtgatgggccccggcgatgcagcag

SEQ ID NO: 806232 - DNA, 75 bp, synthetic construct
  source 1..75: mol_type = other DNA
gctctgcagataacgatagtacaaccttgctaaaacttagaatgatgctgtatcggtatcatcagcaaaaacttg

SEQ ID NO: 806233 - DNA, 75 bp, synthetic construct
  source 1..75: mol_type = other DNA
tggttgtgttaaagagaagcatcttcaagatgaagtaaatgagtttttgagtaaactctatccgatcgttttaga

SEQ ID NO: 806234 - DNA, 75 bp, synthetic construct
  source 1..75: mol_type = other DNA
agcacgatgcgcagtgtccgctctgtcacggcgagcggttgcgtgtcgataccggcgattcgctgatcgtcaaaa

SEQ ID NO: 806235 - DNA, 75 bp, synthetic construct
  source 1..75: mol_type = other DNA
tatggggcggcgcgcttgccgccaaccagtctgaaggtgcgttccgtgaaggcggcaaagggctgaccacggtcg

SEQ ID NO: 806236 - DNA, 75 bp, synthetic construct
  source 1..75: mol_type = other DNA
atgaagatgaagcccgtttaaaccgccggatgtgcgaagttgcggaacggatcatcgtggtcaccgattccagta

SEQ ID NO: 806237 - DNA, 75 bp, synthetic construct
  source 1..75: mol_type = other DNA
tgttgcgtcagcggttgttttgtatgaccagataaatcgcggcggcccggcagggaatgctgtggtgatgcacta

SEQ ID NO: 806238 - DNA, 75 bp, synthetic construct
  source 1..75: mol_type = other DNA
ctcaccttcaatgaaatcaacattatgctgcacagtcccttctccggtgccgggctggtatttgaagacggtgag

SEQ ID NO: 806239 - DNA, 75 bp, synthetic construct
  source 1..75: mol_type = other DNA
atgtcagtatttccagaaggttttttatggggcggcgcgcttgccgccaaccagtctgaaggtgcgtaccgtgaa

SEQ ID NO: 806240 - DNA, 75 bp, synthetic construct
  source 1..75: mol_type = other DNA
atttgatgggctggtgaaatactggctcacctttaatgaaatcaacatcatgttgcatagcccgttctccggcgc

SEQ ID NO: 806241 - DNA, 75 bp, synthetic construct
  source 1..75: mol_type = other DNA
tgatgcggttgaaaaaattcaggcgctgttaccggcgatcgaaaaggcgatgccgcctttgctggtggcccgtat

SEQ ID NO: 806242 - DNA, 75 bp, synthetic construct
  source 1..75: mol_type = other DNA
cgccgcaacgacgtgaagcgcggtttgcgaaacggcgttgccccttacatcccggcggctttttgccgggatgca

SEQ ID NO: 806243 - DNA, 75 bp, synthetic construct
  source 1..75: mol_type = other DNA
cactgcgatgctggttgccaacgatcagatggcgctgggcgcaatgcgcgccattaccgagtccgggctgcgcgt

SEQ ID NO: 806244 - DNA, 75 bp, synthetic construct
  source 1..75: mol_type = other DNA
agctgcctgtcggagtcgggcctgacgaccggatgccgtcaggcagccgggagccgaaggtgcgcgtgcgacagg

SEQ ID NO: 806245 - DNA, 75 bp, synthetic construct
  source 1..75: mol_type = other DNA
ggcggatacccttcagccccgaccgtgactcagcctgtgaaagcagagaaaccccgccggaaccgattttcaccg

SEQ ID NO: 806246 - DNA, 75 bp, synthetic construct
  source 1..75: mol_type = other DNA
acagtaacaggcacggtaaccacagaaaaataacatcagaaaaaaacattccggacacatcacaaacgggaaggg

SEQ ID NO: 806247 - DNA, 75 bp, synthetic construct
  source 1..75: mol_type = other DNA
ctggggtctggtggatactttccgccatgcgaacccggaaacggcagatcgcttctcgtggtttgattaccgctc

SEQ ID NO: 806248 - DNA, 75 bp, synthetic construct
  source 1..75: mol_type = other DNA
gcgcagccacagttccgcttattttcgggagttggtagagacgaaggaacggctggtgaaagatattgatgattt

SEQ ID NO: 806249 - DNA, 75 bp, synthetic construct
  source 1..75: mol_type = other DNA
gcatggcgatcaatgcttgggcctatccggacggtgagaaagttcctgcagctgaaatagcccggacttatttcg

SEQ ID NO: 806250 - DNA, 75 bp, synthetic construct
  source 1..75: mol_type = other DNA
aggcaatgccgcctctgctggtggcccgtatgcgcagtcacagctctgaatattaccgtgagatcgtcgaacgga

SEQ ID NO: 806251 - DNA, 75 bp, synthetic construct
  source 1..75: mol_type = other DNA
gcgcagccacagttctgaatattaccgtgagatcgtcgaacggagggatcggctggtgaaggatgtcgatgattt

SEQ ID NO: 806252 - DNA, 75 bp, synthetic construct
  source 1..75: mol_type = other DNA
gcatggcgatgaatgcctgggcgtatccggacggtgaaaaagttccagcagctggaataacccaggcttatttcg

SEQ ID NO: 806253 - DNA, 75 bp, synthetic construct
  source 1..75: mol_type = other DNA
tgtcgcagtggcgatcgctggtttcaatcagatgaatcgtggtggtccggcgggaaatgccgtggtggtgcattg

SEQ ID NO: 806254 - DNA, 75 bp, synthetic construct
  source 1..75: mol_type = other DNA
ggcaatgtcaccgtgatcaacggctacttcccacagggcgaaagccgcgaccatccaattaaattcccggcaaaa

SEQ ID NO: 806255 - DNA, 75 bp, synthetic construct
  source 1..75: mol_type = other DNA
gccagccgttggcggaatgttgcgtagaaaccggcattgactatgaaatccgcagcatggaaaaaccgtcagatc

SEQ ID NO: 806256 - DNA, 75 bp, synthetic construct
  source 1..75: mol_type = other DNA
gtggcaaagctcggttacaacgtgttttatcacgggcagaaaggccattacggcgtggcgctgttgaccaaagag

SEQ ID NO: 806257 - DNA, 75 bp, synthetic construct
  source 1..75: mol_type = other DNA
gctgaaataacccgggcttattttgagcttggtatgacgttcccggagctatatgacgacagccatccggaagcc

SEQ ID NO: 806258 - DNA, 75 bp, synthetic construct
  source 1..75: mol_type = other DNA
cttggtgtagatgcgatcgatctggagcgcggcgtcagcacgcataatgaagatgaagcccgtttaaaccgtcgg

SEQ ID NO: 806259 - DNA, 75 bp, synthetic construct
  source 1..75: mol_type = other DNA
gtcaaccgctggcggaatactgtgttgaaaccggcatcgactatgaaattcgcagtatggaaaaaccgtccgatc

SEQ ID NO: 806260 - DNA, 75 bp, synthetic construct
  source 1..75: mol_type = other DNA
gtgctgtcggtaaacagattggtttacttttcattgctgaaaaaactgctcccggccatgaacctctgccagctc

SEQ ID NO: 806261 - DNA, 75 bp, synthetic construct
  source 1..75: mol_type = other DNA
tgactgaaaacgagaggggagaggtgatcccccgccactcggcttacggactggtatcagtaagccgcacgtcca

SEQ ID NO: 806262 - DNA, 75 bp, synthetic construct
  source 1..75: mol_type = other DNA
atgaaaaacacagtaatcccgacggtgactgaaaacgagaggggagaggtgatcccccgccactcggcttacgga

SEQ ID NO: 806263 - DNA, 75 bp, synthetic construct
  source 1..75: mol_type = other DNA
gccctgctgactcccggcaagctgaagaatttcctcgttgagaaaatgcggactctcggcaccgcagcctgcccg

SEQ ID NO: 806264 - DNA, 75 bp, synthetic construct
  source 1..75: mol_type = other DNA
ccgctggacatgtacaaagaggtcaacaccggcactaacctgcctgcgcaaatcgacctgtacgcggtagatggc

SEQ ID NO: 806265 - DNA, 75 bp, synthetic construct
  source 1..75: mol_type = other DNA
cggggttttgcgtcagggatggaagcccgccagggggacgcccgggaaaggcacaggctgaagaagaacaagaca

SEQ ID NO: 806266 - DNA, 75 bp, synthetic construct
  source 1..75: mol_type = other DNA
tcggccacggcgaaatcgaccttccgcaaaccgtttatgccgctgctgccagggttccgtcatgtaccgtttggc

SEQ ID NO: 806267 - DNA, 75 bp, synthetic construct
  source 1..75: mol_type = other DNA
aaaaacacttgctgcactgacgcccggtaaactgaaatacagcttcttttgtaatagcggcaccgagtccgttga

SEQ ID NO: 806268 - DNA, 75 bp, synthetic construct
  source 1..75: mol_type = other DNA
ccggctcaggctgaacaaaaaggcgatatgttgctggacggtttccgtcaactggcgcgggaatatcccgatctg

SEQ ID NO: 806269 - DNA, 75 bp, synthetic construct
  source 1..75: mol_type = other DNA
ccggaaaaataagactggcatttcctcatgcgagaagacacaaacgacagggatatatttcttgtgaacaagtac

SEQ ID NO: 806270 - DNA, 75 bp, synthetic construct
  source 1..75: mol_type = other DNA
cagggtaagaataatcatgatcgtagtagcttagataactacaccaaaggcaatggcgatggttttggtttctct

SEQ ID NO: 806271 - DNA, 75 bp, synthetic construct
  source 1..75: mol_type = other DNA
gtaatagcggcaccgagtccgttgaagcggcgctgaagctggcgaaggcttatcagtcaccgcgcggcaaattta

SEQ ID NO: 806272 - DNA, 75 bp, synthetic construct
  source 1..75: mol_type = other DNA
tcgacggtgaaaccatcctgaaagtggaaccagaagccctgactctgctggcgcagcaagcctttcacgacgctt

SEQ ID NO: 806273 - DNA, 75 bp, synthetic construct
  source 1..75: mol_type = other DNA
aggtattgtggtcaataatgctgttgggattaattcaaatgcagtcgcggaatttatcattggtcttatttttgc

SEQ ID NO: 806274 - DNA, 75 bp, synthetic construct
  source 1..75: mol_type = other DNA
tatgtctacctcagctggaatgccggcgcagccaggctgcttgtcccggatgcggcaaaacagttcccgtttttt

SEQ ID NO: 806275 - DNA, 75 bp, synthetic construct
  source 1..75: mol_type = other DNA
gggcgcttatcaggcgggagtggttaaggcactggcagagtgtggtgtacagatcagcatggtttcaggggccag

SEQ ID NO: 806276 - DNA, 75 bp, synthetic construct
  source 1..75: mol_type = other DNA
aatttatcattggacttatcttcgcgagcatgagaaatatccctggcagctatcatgcgatgcaaaatggctact

SEQ ID NO: 806277 - DNA, 75 bp, synthetic construct
  source 1..75: mol_type = other DNA
ttgatcttcgtgcggcacagcaatccggtattgttgtcaataatgcggttgggattaattcaaatgcggttgcgg

SEQ ID NO: 806278 - DNA, 75 bp, synthetic construct
  source 1..75: mol_type = other DNA
ggggtgagtcgcatggctgtgaattacaagggaaacggattggcctggttggctacggtaatataggtaaaactc

SEQ ID NO: 806279 - DNA, 75 bp, synthetic construct
  source 1..75: mol_type = other DNA
gttcacttggcccaactaccgcaggtcgtatggactcctacgtggatctgctgcaatcccacggcggcagcatga

SEQ ID NO: 806280 - DNA, 75 bp, synthetic construct
  source 1..75: mol_type = other DNA
atccgtctgccacgtcacggcgcatcctgcccggtaggcatgggcgtctcctgctccgctgaccgtaacattaaa

SEQ ID NO: 806281 - DNA, 75 bp, synthetic construct
  source 1..75: mol_type = other DNA
ggatagaaaaactggagcacaacccaggccagtacattccggaagagctacgtcaggcaggtgaaggcgaagcgg

SEQ ID NO: 806282 - DNA, 75 bp, synthetic construct
  source 1..75: mol_type = other DNA
gaaatacccctgtgacgcctctggtcgatgccggatgcaatatggtgattgtgtcgcatctgagtgacggttctt

SEQ ID NO: 806283 - DNA, 75 bp, synthetic construct
  source 1..75: mol_type = other DNA
gggctaccgttgtatgtgtcgctgtaccccacggaagggggcatgcaggatattattgactgcattcgtgctgaa

SEQ ID NO: 806284 - DNA, 75 bp, synthetic construct
  source 1..75: mol_type = other DNA
aacgtatctctaccaggaaaccaaagccctgctgactccgggtaaactgaaaaacttcctcgtcgagaaaatgcg

SEQ ID NO: 806285 - DNA, 75 bp, synthetic construct
  source 1..75: mol_type = other DNA
agaacgttcagccggatatcctgtgcctggcgaaagcgctcggcggcggcgtgatgccgattggtgcgaccatcg

SEQ ID NO: 806286 - DNA, 75 bp, synthetic construct
  source 1..75: mol_type = other DNA
ttaccctctccggctcgcaatcaatccatgagcatattactcatgtgggaagtcctcaatttaatactggcaatg

SEQ ID NO: 806287 - DNA, 75 bp, synthetic construct
  source 1..75: mol_type = other DNA
gtgattaatctggtgacagcgaaaaatattacggctgatttgcaagggcgttatccgtggactgaagaagaaccc

SEQ ID NO: 806288 - DNA, 75 bp, synthetic construct
  source 1..75: mol_type = other DNA
aaatggaagatgtcgttgaagggctggtgtatggcaatgagccgcttgattatcgagttcggtgaccgcctggat

SEQ ID NO: 806289 - DNA, 75 bp, synthetic construct
  source 1..75: mol_type = other DNA
agtgatgatggagataaaacttatgctcgtttaggcttcaaaggcgaaactcagataaatgatcagttaactggc

SEQ ID NO: 806290 - DNA, 75 bp, synthetic construct
  source 1..75: mol_type = other DNA
tctggtcactgggtggtctgggattagccacctggaataatttgcctttcgcagtgttcagcctggtgttgctgt

SEQ ID NO: 806291 - DNA, 75 bp, synthetic construct
  source 1..75: mol_type = other DNA
tcctttccggtgatccgacaggttacggggcggcgacctcgcggtttttcactatttatgaaaatttttcaggga

SEQ ID NO: 806292 - DNA, 75 bp, synthetic construct
  source 1..75: mol_type = other DNA
ggtcagtcctaaactggcatcattgacgatggaactaaataagacgaaaaaaaatatttggtgtgaaagggctta

SEQ ID NO: 806293 - DNA, 75 bp, synthetic construct
  source 1..75: mol_type = other DNA
ttattatctggcaactgaataaaacggatgttgctctttatggtgacgcgaagtttgccagtgataatgatttaa

SEQ ID NO: 806294 - DNA, 75 bp, synthetic construct
  source 1..75: mol_type = other DNA
atgtctttaaaacttcccgataaaggccagtggttttttatcggtctggttatgtgtctcgtgacctattatgct

SEQ ID NO: 806295 - DNA, 75 bp, synthetic construct
  source 1..75: mol_type = other DNA
gatactaaaaccagtattagctggtatgtgcagctatccacacaagccatagatttccttaagatgctgcaacta

SEQ ID NO: 806296 - DNA, 75 bp, synthetic construct
  source 1..75: mol_type = other DNA
caaaacaggaattgtggaaaatcaccagtaaggtgcgtgaaatactgctgggtaataaagtttatctgctcgacc

SEQ ID NO: 806297 - DNA, 75 bp, synthetic construct
  source 1..75: mol_type = other DNA
tcgatttgtacagcaacattgaccgggaactgatactcagtaagcgagaagacctggagggaacgaaaggacttg

SEQ ID NO: 806298 - DNA, 75 bp, synthetic construct
  source 1..75: mol_type = other DNA
ctacggttgcagcatctgttctgatggcaatgtctgcacaagcggcagaaatctataacaaagacggtaacaaac

SEQ ID NO: 806299 - DNA, 75 bp, synthetic construct
  source 1..75: mol_type = other DNA
ggcaggcgagcggggtattgcctgtattccagggcgtgaagaagagtttcgtgatggcgtagcagcagcgattcg

SEQ ID NO: 806300 - DNA, 75 bp, synthetic construct
  source 1..75: mol_type = other DNA
atgttacgtttctctgctaatttatcgatgttatttggtgaatatgattttctcgcccgttttgagaaagctgcg

SEQ ID NO: 806301 - DNA, 75 bp, synthetic construct
  source 1..75: mol_type = other DNA
acggttgggttggctgtgaatataaacccagaaccaccacggaagccggtttaggctggatgaaaccgtaccgtt

SEQ ID NO: 806302 - DNA, 75 bp, synthetic construct
  source 1..75: mol_type = other DNA
ttttattgccaccagcggcgcattccacggcaaatcgcttggcgcactgtcagccacggcgaaattgactttccg

SEQ ID NO: 806303 - DNA, 75 bp, synthetic construct
  source 1..75: mol_type = other DNA
agcgagatgttccgccagcgcgtactggtggccggaacgctcaacaacgccaaaacgatccgcattgaaccgcca

SEQ ID NO: 806304 - DNA, 75 bp, synthetic construct
  source 1..75: mol_type = other DNA
ctgggctgggtaaaagcgacacaggcactgatgcaggctcaggggctgctggcgaggtggttccggtttcagccg

SEQ ID NO: 806305 - DNA, 75 bp, synthetic construct
  source 1..75: mol_type = other DNA
taattgacgatagtaagtttaccaaaacagctggtattgataccgacgacatcgccgctgtaggtctggtttatc

SEQ ID NO: 806306 - DNA, 75 bp, synthetic construct
  source 1..75: mol_type = other DNA
cgctaataaagctcagaacgttgaggctgttgcacaatatcagttcgattttgggctgcgtccgtccgtggctta

SEQ ID NO: 806307 - DNA, 75 bp, synthetic construct
  source 1..75: mol_type = other DNA
ctatgcaaaatctgaccgtactgatggacaggtatcctatgctaaagccagccctctgaatgcctctggtaaaac

SEQ ID NO: 806308 - DNA, 75 bp, synthetic construct
  source 1..75: mol_type = other DNA
tatggatttagctgattacctgcagttgcagaaacgatttcagctcgtcactgggatgggcgagagcggcgaagg

SEQ ID NO: 806309 - DNA, 75 bp, synthetic construct
  source 1..75: mol_type = other DNA
ccaaatcaacgatcaactgactggtttcggtcagtgggaatatgaattcaaaggcaaccgcactgaatctcaagg

SEQ ID NO: 806310 - DNA, 75 bp, synthetic construct
  source 1..75: mol_type = other DNA
aagtatgggctactggtctgaaatatgacgcaaacaacatttacctggctgcaacttattctgaaactcagaata

SEQ ID NO: 806311 - DNA, 75 bp, synthetic construct
  source 1..75: mol_type = other DNA
tcggctggggtggctggtggttctgggatccggtagaaaacgcctcgtttatgccgtggctggtgggactgcgct

SEQ ID NO: 806312 - DNA, 75 bp, synthetic construct
  source 1..75: mol_type = other DNA
atgcacgggcatgattatgagcatcatcatcacgatcacgaacatcaccacgaccatggacatcatcaccatcac

SEQ ID NO: 806313 - DNA, 75 bp, synthetic construct
  source 1..75: mol_type = other DNA
acgttcgcccggtcgcgctcacgcagggaacgcccggagaagatggcaacacaacgcaggtcgtgatccccccga

SEQ ID NO: 806314 - DNA, 75 bp, synthetic construct
  source 1..75: mol_type = other DNA
tgccgttgtaggtctggaaaatagcggatttggtaaggtacacgccgccgatggttccaccgtatcccggcaggt

SEQ ID NO: 806315 - DNA, 75 bp, synthetic construct
  source 1..75: mol_type = other DNA
tggagcaactacatccggaactgcaccaagtgcaggtaagtatcaaggcgtcgtttccattgtaatgactcaatc

SEQ ID NO: 806316 - DNA, 75 bp, synthetic construct
  source 1..75: mol_type = other DNA
aaatattctgcaaccaaacacccagatcccaatgagtgtaacattgggaggtaaaacactaacgactgctgccca

SEQ ID NO: 806317 - DNA, 75 bp, synthetic construct
  source 1..75: mol_type = other DNA
ccatagctttcactgctttttttgcaagtatgggggcgtctgccgtcgaaaaaaatattacggtaactgctagtg

SEQ ID NO: 806318 - DNA, 75 bp, synthetic construct
  source 1..75: mol_type = other DNA
actcacgcgatgctctaaaagctctggatgtggatgagaagaataccgtcgctttaagctacggtattcgcggaa

SEQ ID NO: 806319 - DNA, 75 bp, synthetic construct
  source 1..75: mol_type = other DNA
tgacggaaatggcaatctggcgatcgcagaagaatcatattctgttgctcaggatgtcgccagtgcatgcctggt

SEQ ID NO: 806320 - DNA, 75 bp, synthetic construct
  source 1..75: mol_type = other DNA
actgggtattccgcgaggtgattccttcaatccgcaaaacggggggttatggtgttccgtttgccatgctgaatg

SEQ ID NO: 806321 - DNA, 75 bp, synthetic construct
  source 1..75: mol_type = other DNA
tggatggccgtccggcggtgaaaaacctgctggaaatcctctccgaatggctggtgttccgccgcgataccgtgc

SEQ ID NO: 806322 - DNA, 75 bp, synthetic construct
  source 1..75: mol_type = other DNA
atcacaaggttgcgttacgccgtctcgatgatgatgaaaagggggagtgtttaatacccacccttggcggaaatc

SEQ ID NO: 806323 - DNA, 75 bp, synthetic construct
  source 1..75: mol_type = other DNA
aaagcgtgagctggaggaagaagaaaaaaggctgatacgtgaatatcagcctgagttttactttggcaaccgcat

SEQ ID NO: 806324 - DNA, 75 bp, synthetic construct
  source 1..75: mol_type = other DNA
ccatgcagatgctactcgggtaactggcggcgcactaacagctggtcaatatcagggactcgtatcaattatcct

SEQ ID NO: 806325 - DNA, 75 bp, synthetic construct
  source 1..75: mol_type = other DNA
tgacttaagggccgccatatatctgtcccgagaaactatgccaataggtgcatatgtggttggtttatcgccatc

SEQ ID NO: 806326 - DNA, 75 bp, synthetic construct
  source 1..75: mol_type = other DNA
gctggcgtttgcgcgtgctgaccgtattgctcccattttagccaactctccaattattcatggtaatcccaggat

SEQ ID NO: 806327 - DNA, 75 bp, synthetic construct
  source 1..75: mol_type = other DNA
tagataacctagaccgctgtctccctgccaatgctatccatacacttgaagctatcaggctattccttttcttga

SEQ ID NO: 806328 - DNA, 75 bp, synthetic construct
  source 1..75: mol_type = other DNA
gcgactgattcagcgcaagttggaacagcatggctgaccggaatgttcaatgcacatgcggttatccttcctgaa

SEQ ID NO: 806329 - DNA, 75 bp, synthetic construct
  source 1..75: mol_type = other DNA
ttgtattgctcaacacagtattgatgcgactgattcagcgcaagtaggaacagcatggttgaccggaatgttcaa

SEQ ID NO: 806330 - DNA, 75 bp, synthetic construct
  source 1..75: mol_type = other DNA
ctactggaatgtgcaggctatgcagatgattacgcggcatgcatagttattaacgatacaattgagcgcattgaa

SEQ ID NO: 806331 - DNA, 75 bp, synthetic construct
  source 1..75: mol_type = other DNA
atcctactttcgttattctggctgaagatgggattgaatttaacagcatggtgatcttacccagcaatagtggac

SEQ ID NO: 806332 - DNA, 75 bp, synthetic construct
  source 1..75: mol_type = other DNA
cacaggcatcggcagcagaggtcaaggcagagagtatgcgttggcctctggagcaggctgaagggggcaaatccg

SEQ ID NO: 806333 - DNA, 75 bp, synthetic construct
  source 1..75: mol_type = other DNA
cggaagtcaggtaaccgactgttccgttgttttgtgaacgccactaaagagaatcctgcgagtttatcttgttct

SEQ ID NO: 806334 - DNA, 75 bp, synthetic construct
  source 1..75: mol_type = other DNA
taacgaagcagcccaaggaaatccaaaccttgtagagaagacattcagtttatttaaccgagtagataaagtgag

SEQ ID NO: 806335 - DNA, 75 bp, synthetic construct
  source 1..75: mol_type = other DNA
agatgggattgaatttaacagcatggaaaaggcaagtgttattgcaaaactgcaatctctcggctttgtaattgc

SEQ ID NO: 806336 - DNA, 75 bp, synthetic construct
  source 1..75: mol_type = other DNA
tcgcccctgtcaacgcgagcaatgaccttgttcgttgcaaagtagtagcttattctggcgatccgctgctgcaag

SEQ ID NO: 806337 - DNA, 75 bp, synthetic construct
  source 1..75: mol_type = other DNA
gtcgcactgaaatctctgtcattaaattcgatgacattcaggtgcgcatagtgagtatcaacggcgagccgtggt

SEQ ID NO: 806338 - DNA, 75 bp, synthetic construct
  source 1..75: mol_type = other DNA
tgaagcggaaattatcacttcgcgcgccgagatccgtaaaatctacgagaacggacgtggttcagtgcgtatgcg

SEQ ID NO: 806339 - DNA, 75 bp, synthetic construct
  source 1..75: mol_type = other DNA
gccgccgcaaagtaccctgaccattcatgtcgggaaacgcaaaatcaaactgcgcccggaagaattgctgaaagt

SEQ ID NO: 806340 - DNA, 75 bp, synthetic construct
  source 1..75: mol_type = other DNA
aaagataacgtcatttctgaacatagagatatgaaggttgaatccattatcactggtgatggtttggtaatctca

SEQ ID NO: 806341 - DNA, 75 bp, synthetic construct
  source 1..75: mol_type = other DNA
atcaggtttctggtgcgcgcgtactggagcaaattgctgcgcaaatgcgcaacaaaaagctgccgatggttgacg

SEQ ID NO: 806342 - DNA, 75 bp, synthetic construct
  source 1..75: mol_type = other DNA
cgccgttcaccgttgcaggaacgcgaagaagcgaaagcaatgagtgagcacgacatgctgccgtctgaacccgtt

SEQ ID NO: 806343 - DNA, 75 bp, synthetic construct
  source 1..75: mol_type = other DNA
accttgatgcgcggtttacagcgtatcgaccgtgtcgagattgactcacctcaccgcgccagcagtagcgatagc

SEQ ID NO: 806344 - DNA, 75 bp, synthetic construct
  source 1..75: mol_type = other DNA
tcgtgcagttgctttcattgaaagtgaagtagacgaatggattcaattaactatcgaaaattcaagaaagcatgt

SEQ ID NO: 806345 - DNA, 75 bp, synthetic construct
  source 1..75: mol_type = other DNA
accagcacattgattctgccattccgggacgttacactgttcaggcaccttataaagcgggtgccgggattggcg

SEQ ID NO: 806346 - DNA, 75 bp, synthetic construct
  source 1..75: mol_type = other DNA
ctttcacagaagtggtagacttcgttccttatgaagattctctgaaacaactggcgcgcgaacgctataaagcct

SEQ ID NO: 806347 - DNA, 75 bp, synthetic construct
  source 1..75: mol_type = other DNA
tgcagacaggtaaaaactcatggctgtcgctttcattagggaaaactaaagattgggaaattaccgataaaggta

SEQ ID NO: 806348 - DNA, 75 bp, synthetic construct
  source 1..75: mol_type = other DNA
taatgctctgcgtttggggatttttgatcctcaatctttttcaaccattcccacgcccgctgaatattttcgtta

SEQ ID NO: 806349 - DNA, 75 bp, synthetic construct
  source 1..75: mol_type = other DNA
atgctgattaatattggacgcttgttaatgctctgcgtatggggatttttaatccttaatatttttcagcccttc

SEQ ID NO: 806350 - DNA, 75 bp, synthetic construct
  source 1..75: mol_type = other DNA
aacatcgccgtgacgttattagatctgccacaacaaatcgtactagcgaaagaaaatatcgcgaatgcaggtttt

SEQ ID NO: 806351 - DNA, 75 bp, synthetic construct
  source 1..75: mol_type = other DNA
aggcacgcgcccgttaccgccgctacggatgccctttcgcgatgtgattgaccgtgttgagcaagcattacttaa

SEQ ID NO: 806352 - DNA, 75 bp, synthetic construct
  source 1..75: mol_type = other DNA
tcgatagcttcggcgtaggcgcaatgaaagatgtcacgctggtgcgcccgcaagatgccggggccaatacttgcg

SEQ ID NO: 806353 - DNA, 75 bp, synthetic construct
  source 1..75: mol_type = other DNA
tccaggaaaccgacctcgctggtcatgcagaagacgtcgcacgttatgccgaacgtttgcaggtcgttgaccgta

SEQ ID NO: 806354 - DNA, 75 bp, synthetic construct
  source 1..75: mol_type = other DNA
acttggaaggtgcgaactacacctctgcaggtaccgatatttgcgctgcgggcttcggttctccgcacatcaggc

SEQ ID NO: 806355 - DNA, 75 bp, synthetic construct
  source 1..75: mol_type = other DNA
tgatgacgagcggcacttatggccggcattcttctggcttattgaaaaatgcaatcctggcatcgttattggcga

SEQ ID NO: 806356 - DNA, 75 bp, synthetic construct
  source 1..75: mol_type = other DNA
atcaagatcagcgaattattggatatggaaacgcaatcaatgcagaagtagcaacggcattcgtgaaagtttgta

SEQ ID NO: 806357 - DNA, 75 bp, synthetic construct
  source 1..75: mol_type = other DNA
gagatggcgcaggatgaactgcgcgaagctaaagaaaaagcgagcaactggaacagcaattacaggttctgttac

SEQ ID NO: 806358 - DNA, 75 bp, synthetic construct
  source 1..75: mol_type = other DNA
tggcaacgatcgttcccggtaaaataggtaactgcaaagaaacttctttcacaaaatattgttccaggactatac

SEQ ID NO: 806359 - DNA, 75 bp, synthetic construct
  source 1..75: mol_type = other DNA
atgagcgaaatccgatttgtaactctggcatccgacattaacaatattaaagaaatttattctgatgatgagtta

SEQ ID NO: 806360 - DNA, 75 bp, synthetic construct
  source 1..75: mol_type = other DNA
ggtcacgcggaagacgtcgcacgttatgccgaacgtttgcagatcgttgaccgtaaccttgcccggcttattgag

SEQ ID NO: 806361 - DNA, 75 bp, synthetic construct
  source 1..75: mol_type = other DNA
atcctcatggaatgagctggcaaaatttggtggatagccaacggattatggatatcactctcgacgaatttaacg

SEQ ID NO: 806362 - DNA, 75 bp, synthetic construct
  source 1..75: mol_type = other DNA
ttacacctcaagaattaggcacaatttatactggtgggcgaaaccctgcagatggagtcgctgattatctttctc

SEQ ID NO: 806363 - DNA, 75 bp, synthetic construct
  source 1..75: mol_type = other DNA
agaacgttttggcatcgagtctggcacagaacgcgccattattttctacagagccatgatggatgtggaacaagg

SEQ ID NO: 806364 - DNA, 75 bp, synthetic construct
  source 1..75: mol_type = other DNA
cacgttacgctgggttatatcggaacaaacggaatcacaatgttgccacaaaacgcaaagtttaatggtaacccc

SEQ ID NO: 806365 - DNA, 75 bp, synthetic construct
  source 1..75: mol_type = other DNA
aatggtcctcccttttagccatgcagatacgcagtttaaaaatgttccatcaaattttcaggttggttatatcaa

SEQ ID NO: 806366 - DNA, 75 bp, synthetic construct
  source 1..75: mol_type = other DNA
cgccagattggtatccttttccaggatgcgctgctatttgaccagttcagcgtcgggcaaaatttgctgctggcg

SEQ ID NO: 806367 - DNA, 75 bp, synthetic construct
  source 1..75: mol_type = other DNA
tgtctggcggtcagcgagcgcgcgttgctctgctacgcgcccttctcgctcagccaaaagcgttgctactggatg

SEQ ID NO: 806368 - DNA, 75 bp, synthetic construct
  source 1..75: mol_type = other DNA
cccgacgtaatgccgtgaatgatgcacttgagcgttcaggccttgacggagctttccatcaggatcctgctactt

SEQ ID NO: 806369 - DNA, 75 bp, synthetic construct
  source 1..75: mol_type = other DNA
ttctctcaattgcatgactctggttcgtcttaaacgccacgggcaaatcctgatggagatgatgaaggagtcagg

SEQ ID NO: 806370 - DNA, 75 bp, synthetic construct
  source 1..75: mol_type = other DNA
cgtcttaaacgccacgggcaaatcctgatggagatgatgaaagagtccggccttagagttgacttcatctatggg

SEQ ID NO: 806371 - DNA, 75 bp, synthetic construct
  source 1..75: mol_type = other DNA
catcatcgacaccacacctggctttgcagaaggtgtattgccaattgatggcacattcgattttggagttctgaa

SEQ ID NO: 806372 - DNA, 75 bp, synthetic construct
  source 1..75: mol_type = other DNA
ttgcctggggtgccaggcatcccggatcgtacccgtatcataatgaatgagtcagataaaggcgaagcattaaaa

SEQ ID NO: 806373 - DNA, 75 bp, synthetic construct
  source 1..75: mol_type = other DNA
caaagtttggttcgctatctacagatgagttatttcagcaggtaaaacttatctatcctgcgttgcaggattatg

SEQ ID NO: 806374 - DNA, 75 bp, synthetic construct
  source 1..75: mol_type = other DNA
ggtagcgacatcaatggatttaataatgcattaacggatctaaccgaaaatagaaccaaactgaccattactgta

SEQ ID NO: 806375 - DNA, 75 bp, synthetic construct
  source 1..75: mol_type = other DNA
gtattcaatgaagtccgcgaactggcgatccccgtcgttcaagtcacccacgattttcaggatgttcctgccgat

SEQ ID NO: 806376 - DNA, 75 bp, synthetic construct
  source 1..75: mol_type = other DNA
atgtatctactgattaacactaatggttctaaatactggcgcatgaagtaccgctttgctggtaaagaaaagatg

SEQ ID NO: 806377 - DNA, 75 bp, synthetic construct
  source 1..75: mol_type = other DNA
aattgagctgcttggttataaaggacgggctactggtcatggatttcggcattctatgtcgaccatacttcatga

SEQ ID NO: 806378 - DNA, 75 bp, synthetic construct
  source 1..75: mol_type = other DNA
ccattatcaacgcaggtaacagaattattcaagcaactgaaacctatcacgggacattacccttacatttttatt

SEQ ID NO: 806379 - DNA, 75 bp, synthetic construct
  source 1..75: mol_type = other DNA
ggtaggaacgatcctcgcaagccgattagtaaggagagcattaaccaagtcattgaattactggggtataaggga

SEQ ID NO: 806380 - DNA, 75 bp, synthetic construct
  source 1..75: mol_type = other DNA
tgtttaaacagcttgaaccgatatcaaaacatcatccgctggtctttatcggcagaaacgatccccgcaagccta

SEQ ID NO: 806381 - DNA, 75 bp, synthetic construct
  source 1..75: mol_type = other DNA
taatcatgcccagtatctggatggtcgccgtgaaatgatgcagtggtatgctgactacattgattcactttctga

SEQ ID NO: 806382 - DNA, 75 bp, synthetic construct
  source 1..75: mol_type = other DNA
aatgccgacgaaacttctgtgaaagccattaccgattttgccgccgacgagctgcacgttagcgaaattcatttt

SEQ ID NO: 806383 - DNA, 75 bp, synthetic construct
  source 1..75: mol_type = other DNA
atggcagagcatggtgcactggcaaccctgaaagatctggcagaaaaagaggtggatgatgccgcccgcctgctg

SEQ ID NO: 806384 - DNA, 75 bp, synthetic construct
  source 1..75: mol_type = other DNA
ggtggataacgccgcacgtctgttgggtgaaatgcgtcgcggatgtcagcaggcagaagaacaactcaaaatgct

SEQ ID NO: 806385 - DNA, 75 bp, synthetic construct
  source 1..75: mol_type = other DNA
tcgcgcaaaacgaaaagatcgatctgaccatcgtcggcccggaagcgccgctggtgaaaggcgtggtggatacct

SEQ ID NO: 806386 - DNA, 75 bp, synthetic construct
  source 1..75: mol_type = other DNA
gcgcgcgttgaatggtttgcttattcatcgggaaaagttaaccccggagcattttacggcgctaaccgactgctg

SEQ ID NO: 806387 - DNA, 75 bp, synthetic construct
  source 1..75: mol_type = other DNA
ggcgctactgcaagccagccacgaggcaggcattcatactgcggtagaaacctgtctgcatgtgccgtggaaata

SEQ ID NO: 806388 - DNA, 75 bp, synthetic construct
  source 1..75: mol_type = other DNA
atgactgttcggattgtatctaacgcagttaatgcgcttatttctggcgcagatgacaaggtaaagcaactggtg

SEQ ID NO: 806389 - DNA, 75 bp, synthetic construct
  source 1..75: mol_type = other DNA
tggtcttgcgcattacgcgtatcgaatgggcgtcgccgcaatcccgctgattaaagcgaacactaaaaaagtggg

SEQ ID NO: 806390 - DNA, 75 bp, synthetic construct
  source 1..75: mol_type = other DNA
atgctgccaaacgcccggtgctttatctgggcggcggtgtgatcaatgcgcctgcgagagtgcgtgaactggcgg

SEQ ID NO: 806391 - DNA, 75 bp, synthetic construct
  source 1..75: mol_type = other DNA
tctacaagcagggcgtttttgccgctacctatccgggcaaaatcaactttatgcagattgccgccggatttggcc

SEQ ID NO: 806392 - DNA, 75 bp, synthetic construct
  source 1..75: mol_type = other DNA
aacgctactgccgatttgtggcgggataggcgcaagccttgcgctacaaggctctattcttggcgcagtcgtatt

SEQ ID NO: 806393 - DNA, 75 bp, synthetic construct
  source 1..75: mol_type = other DNA
attgccgtcggcgcaccgctgggggggattggcgatgccatgttctggcttacgctgttacccatttgtggcggg

SEQ ID NO: 806394 - DNA, 75 bp, synthetic construct
  source 1..75: mol_type = other DNA
cgggcgacgcagtggttaagttacaggctgatgttatcgacaaactgatgcctgccttcttaccgctggtctaca

SEQ ID NO: 806395 - DNA, 75 bp, synthetic construct
  source 1..75: mol_type = other DNA
cattaatgcccggaacagacagcattatggttaccccttttgggactgcaactcagcaaattaaaaaccttccga

SEQ ID NO: 806396 - DNA, 75 bp, synthetic construct
  source 1..75: mol_type = other DNA
gcgtgattacatttcaacactgccgccgatggaacgtattgagcctgatgaacaggtacaaattcgcctgatggc

SEQ ID NO: 806397 - DNA, 75 bp, synthetic construct
  source 1..75: mol_type = other DNA
gcgcgattacatatcaacgctccccccaatggaacgtatcgaggccaatgagcaagtgcaaattcgcctgatggc

SEQ ID NO: 806398 - DNA, 75 bp, synthetic construct
  source 1..75: mol_type = other DNA
gccattggcgcggcactggcgaatccggatcgcaaagtattgtgtttctctggcgacggcagcctgatgatgaat

SEQ ID NO: 806399 - DNA, 75 bp, synthetic construct
  source 1..75: mol_type = other DNA
gcggatctgctgattgttctcggtgcgcgttttgatgaccgggcgattggcaaaaccgagcagttctgcccgaat

SEQ ID NO: 806400 - DNA, 75 bp, synthetic construct
  source 1..75: mol_type = other DNA
caggacagagaaacgctgttctactataacgtgcgggaaattccgccgcgcgccaaagaacagaatgtcatgcaa

SEQ ID NO: 806401 - DNA, 75 bp, synthetic construct
  source 1..75: mol_type = other DNA
ccgcggctggagtccgctgcgcctgattgcggttaccgtggttctcggcatcgtcggtaaattctgccatttcct

SEQ ID NO: 806402 - DNA, 75 bp, synthetic construct
  source 1..75: mol_type = other DNA
tgtcgcattcatatgagcggaaacacattatcgacacgacgcctgggtttgccgagggggtcttgccggttggca

SEQ ID NO: 806403 - DNA, 75 bp, synthetic construct
  source 1..75: mol_type = other DNA
gcattggtcgtatgacgctgtttttaaccacgcgatcggttctgatgttccagatggcagagaacttccagaaat

SEQ ID NO: 806404 - DNA, 75 bp, synthetic construct
  source 1..75: mol_type = other DNA
gtgctcagcacggcaacccgttttaatgatgagcagcaaaccctagtatttcctggcggggaatttctgcacaaa

SEQ ID NO: 806405 - DNA, 75 bp, synthetic construct
  source 1..75: mol_type = other DNA
gccagattatgtgtgaacgcagactatcgtctggcgcttacggccacgccgttcatgaaggattcgacggaagcc

SEQ ID NO: 806406 - DNA, 75 bp, synthetic construct
  source 1..75: mol_type = other DNA
attgcaaacggtcagactattgaggcaacttttgatcaggctgtaactaccagcactcagtggagcgctccgctg

SEQ ID NO: 806407 - DNA, 75 bp, synthetic construct
  source 1..75: mol_type = other DNA
cattatcgacacgacgcctgggtttgccgagggggtcttgccggttggcagcacattcgatttcactgttttgga

SEQ ID NO: 806408 - DNA, 75 bp, synthetic construct
  source 1..75: mol_type = other DNA
ccgcggctggagtccgctgcgcctgattgcggttaccgtgattctagggatcgtcggtaaattctgccatttcct

SEQ ID NO: 806409 - DNA, 75 bp, synthetic construct
  source 1..75: mol_type = other DNA
tcgcggctggagtccgttgcgcctgattgcaatcacggtggttctcggcatcgtcggtaaattttgccatttcct

SEQ ID NO: 806410 - DNA, 75 bp, synthetic construct
  source 1..75: mol_type = other DNA
ggctgacgttatcgacaaactgatgcctgccttcttaccgctggtctataccctgaccatgttctggctggtacg

SEQ ID NO: 806411 - DNA, 75 bp, synthetic construct
  source 1..75: mol_type = other DNA
gcccggcgcatgggagagtttcggccctgataagcacatcagcccatccgaaacctggtcagaagagttgcagca

SEQ ID NO: 806412 - DNA, 75 bp, synthetic construct
  source 1..75: mol_type = other DNA
acagagctactgtgccacgttcccaaactcactgagtggaaaacattaccgcccggcgcatgggagagtttcggc

SEQ ID NO: 806413 - DNA, 75 bp, synthetic construct
  source 1..75: mol_type = other DNA
attgccgtcggtgcgccgcttggcgggattggcgatgcgatgttctggctaacgctactgccgatttgtggcggg

SEQ ID NO: 806414 - DNA, 75 bp, synthetic construct
  source 1..75: mol_type = other DNA
tgaggtacgtagagcctacaaccgtagcacataccttgaacaacgtgctgtagttatgaaatggtggggaagcaa

SEQ ID NO: 806415 - DNA, 75 bp, synthetic construct
  source 1..75: mol_type = other DNA
tggaaaaagacgtattccccaccatcggggagatccctgtccagcaaatcaaagcccgaacactggttgaagccc

SEQ ID NO: 806416 - DNA, 75 bp, synthetic construct
  source 1..75: mol_type = other DNA
gcttgctgatgcacgaaggttaagagcggattaccttgccctattagccaacggaatcgacccacagattcaagc

SEQ ID NO: 806417 - DNA, 75 bp, synthetic construct
  source 1..75: mol_type = other DNA
actgctgatattctccagccgtcagcagcacaaactgatgcagtggaaactgaagtatctgatacccaaaaaaat

SEQ ID NO: 806418 - DNA, 75 bp, synthetic construct
  source 1..75: mol_type = other DNA
aaggtgaacggtcatcataatctcacatccaccagcagagcggggattcatctgatgatcgaccttgaaaccatg

SEQ ID NO: 806419 - DNA, 75 bp, synthetic construct
  source 1..75: mol_type = other DNA
ggttttaattccgatattatagaatcagctttagtgcatatagataaaaatgaagtacggcgggcgtataatcgt

SEQ ID NO: 806420 - DNA, 75 bp, synthetic construct
  source 1..75: mol_type = other DNA
gaaatgatccaaagcaaccgatgaatagtcaaacagctaatgccgcgttgaagagaattggttacggtgggaagc

SEQ ID NO: 806421 - DNA, 75 bp, synthetic construct
  source 1..75: mol_type = other DNA
ttggttatgtctaatctgtctgttccgacgcgttgtcttattgagtggcaacttctgacccttgtgcgcccttct

SEQ ID NO: 806422 - DNA, 75 bp, synthetic construct
  source 1..75: mol_type = other DNA
aaacgtattggatatggtggaaaacttgtcgcacatggtatgcgttcaattgccagtacagcgatgaacgaggca

SEQ ID NO: 806423 - DNA, 75 bp, synthetic construct
  source 1..75: mol_type = other DNA
actcctgacacttgtgcgtccttctgaagcctctggtgctcgttgggcagagctcgatcttgatacaaagctctg

SEQ ID NO: 806424 - DNA, 75 bp, synthetic construct
  source 1..75: mol_type = other DNA
acggaattgacccacaaattcaggccgaagttgcaaaggaacagcagcaaatcgctctggacagtattttttcaa

SEQ ID NO: 806425 - DNA, 75 bp, synthetic construct
  source 1..75: mol_type = other DNA
gcttgcagatgccaggagattaaaagctgattatctttcattattagccaatggaattgatccgcaaattcaagc

SEQ ID NO: 806426 - DNA, 75 bp, synthetic construct
  source 1..75: mol_type = other DNA
gccgaacgcaaagaaaccgggaaatacacgtctgttgttgatcttgcccgcgccagagtcaaccggcagaacact

SEQ ID NO: 806427 - DNA, 75 bp, synthetic construct
  source 1..75: mol_type = other DNA
aagaaatcaatcttgaggcggcaacatggacgataccagccggacgcatgaagatgcgccgtgaccatgtgatcc

SEQ ID NO: 806428 - DNA, 75 bp, synthetic construct
  source 1..75: mol_type = other DNA
agccagtacagctctcaacgaatctaattttaattctgatgtgattgagtctgcgctggcacacacagataagaa

SEQ ID NO: 806429 - DNA, 75 bp, synthetic construct
  source 1..75: mol_type = other DNA
catagggagtatgttttcccaagcagaaatgatcctaaaaaaaatatgaatagtcagacggctaatgcggcactt

SEQ ID NO: 806430 - DNA, 75 bp, synthetic construct
  source 1..75: mol_type = other DNA
tagagaaggacattattccagctatcggtgagattcctgttcaggaaataaaagctcgtacattaattgaagccc

SEQ ID NO: 806431 - DNA, 75 bp, synthetic construct
  source 1..75: mol_type = other DNA
acctaaagatgccgattaccagctgtatgatggtgatgggcttactctgctaatcaagtccagcggtagtaagct

SEQ ID NO: 806432 - DNA, 75 bp, synthetic construct
  source 1..75: mol_type = other DNA
gaagctgctgaggctcgatgggatgagatcgattttgatactagcgaatggaaaattccagcagcccgaatgaag

SEQ ID NO: 806433 - DNA, 75 bp, synthetic construct
  source 1..75: mol_type = other DNA
aattcgactgcgcgaaccaccatcactctcgggcattatcctgccatgtcgcttgccagcgcacgcgcattacac

SEQ ID NO: 806434 - DNA, 75 bp, synthetic construct
  source 1..75: mol_type = other DNA
taagaacgatggttgctctgggactggtgatggatttcgacgcaagaacgactattccattcgaaggtgaacgcc

SEQ ID NO: 806435 - DNA, 75 bp, synthetic construct
  source 1..75: mol_type = other DNA
aatggcctgagatccagacagaattacgcacatggaaaaaacgtcgcgaaggcgaacgcaaagaaaccgggaaat

SEQ ID NO: 806436 - DNA, 75 bp, synthetic construct
  source 1..75: mol_type = other DNA
agatcgatctcgatgccaaactctggatgattcccgccgaacgaatgaaggctaagcgagaacatattgtcccat

SEQ ID NO: 806437 - DNA, 75 bp, synthetic construct
  source 1..75: mol_type = other DNA
aaaagaattggatttggtggtaaattagtggcacacgggctgcgatctattgcaagtacagcaatgaatgaagcc

SEQ ID NO: 806438 - DNA, 75 bp, synthetic construct
  source 1..75: mol_type = other DNA
tcgtcaaaacctccggtaaaaaactctggcgcttccgttatcaacgaccgggaagcagcagccgcacaaatttga

SEQ ID NO: 806439 - DNA, 75 bp, synthetic construct
  source 1..75: mol_type = other DNA
tatcgtctcaggcgttagatattttagaagtaatgaaacctattagtgcacatcgtgaacatatatttcctagta

SEQ ID NO: 806440 - DNA, 75 bp, synthetic construct
  source 1..75: mol_type = other DNA
agcatcacaccagcgataatgaagctggcgggacggcaaatcccttaattaccatgaacggtcatcataaaatca

SEQ ID NO: 806441 - DNA, 75 bp, synthetic construct
  source 1..75: mol_type = other DNA
cattgacggtaccatccatcgctgggctaaaaatgaggttatcgacaaggatcgcgaagactggaagcgtatctc

SEQ ID NO: 806442 - DNA, 75 bp, synthetic construct
  source 1..75: mol_type = other DNA
acaggaagaggaaaaagtctgtaccgcctgcggtcagagtggtggcggcaactgccctgattgtggcgcggtgat

SEQ ID NO: 806443 - DNA, 75 bp, synthetic construct
  source 1..75: mol_type = other DNA
catccaccagcaggttttggcaccatctgatgattgaccttgaaacaatgggcaaaaatcctgatgccccgatta

SEQ ID NO: 806444 - DNA, 75 bp, synthetic construct
  source 1..75: mol_type = other DNA
aaaccgcaggcggagtcatcgatcgggacaccattaagtggtggctgaaacagtcacgggaagcacaatcagcca

SEQ ID NO: 806445 - DNA, 75 bp, synthetic construct
  source 1..75: mol_type = other DNA
gcggcaactgtcctgactgtggcgcggtgatgggcgacgcaacataccaggaaacattcgatgaaaaaaatcggg

SEQ ID NO: 806446 - DNA, 75 bp, synthetic construct
  source 1..75: mol_type = other DNA
gcaccgcgattattgttggtaaaaaagggcagcgtgtatggaccggtggcggtgatgaagcggcgctggcgcgcg

SEQ ID NO: 806447 - DNA, 75 bp, synthetic construct
  source 1..75: mol_type = other DNA
gcgcgtcaggcgtttcatgatgcgtcattcatgctgcgtccggcacatcaacagcaggtagccgatattttgcgt

SEQ ID NO: 806448 - DNA, 75 bp, synthetic construct
  source 1..75: mol_type = other DNA
tccgatttactatgcgggtccggccaaaacgccggaaggttatgcctccggttctcttggcccaacgaccgccgg

SEQ ID NO: 806449 - DNA, 75 bp, synthetic construct
  source 1..75: mol_type = other DNA
aatggctggcagttcgcaacgtacattaccgacagtttctgaaggagcattagggaaggtgcgaataagcaggtc

SEQ ID NO: 806450 - DNA, 75 bp, synthetic construct
  source 1..75: mol_type = other DNA
gtctgggggcgcagtttggtggtaaatacttcgctcacgatatccgcgtgattcgcctgccgcgtcatggcgcat

SEQ ID NO: 806451 - DNA, 75 bp, synthetic construct
  source 1..75: mol_type = other DNA
agggcagcgtgtatggaccggtggtggtgatgaagcggcgctggcacgcggtgtctataacacttatatcgaaga

SEQ ID NO: 806452 - DNA, 75 bp, synthetic construct
  source 1..75: mol_type = other DNA
agacatggcaacattcgacggacatatcgttgaagcgttgatgaaaatgccagaagttaacgccatgtatccgga

SEQ ID NO: 806453 - DNA, 75 bp, synthetic construct
  source 1..75: mol_type = other DNA
gctgacttcgttatggctgctgatcacggaaatatgattggagatggcattcgaggtataaggcttgtcggctaa

SEQ ID NO: 806454 - DNA, 75 bp, synthetic construct
  source 1..75: mol_type = other DNA
atgaaccgcgaccatactgttccattgtcagatgaagcaattgcgatactggagatgatgaagccgttaagtgga

SEQ ID NO: 806455 - DNA, 75 bp, synthetic construct
  source 1..75: mol_type = other DNA
agaagcgcgagagtggaagattcctgcagcacgcatgaaaatgaaccgcgaccatactgttccattgtcagatga

SEQ ID NO: 806456 - DNA, 75 bp, synthetic construct
  source 1..75: mol_type = other DNA
acggaattgacccgcaaattcaagctgaaattgcagaggaacagcagcaaatcgcactggacagtattttttcaa

SEQ ID NO: 806457 - DNA, 75 bp, synthetic construct
  source 1..75: mol_type = other DNA
aagacattgatcctcaggatcatcagaaagaacaggtaagaaattctcaagaggctaaaaccaacactttcctgt

SEQ ID NO: 806458 - DNA, 75 bp, synthetic construct
  source 1..75: mol_type = other DNA
attagagactgttcgccgcctttgtcagcgtattaatgaaatcatgatttatgcgcagaacacaggcctgattga

SEQ ID NO: 806459 - DNA, 75 bp, synthetic construct
  source 1..75: mol_type = other DNA
gcaatatccggctgctcaggactgtgcttataaatttcttgtctgcgaggataaacccggcatggcccgccccgc

SEQ ID NO: 806460 - DNA, 75 bp, synthetic construct
  source 1..75: mol_type = other DNA
ggaaatggaaggcgctgaacatccacacaaggagaatgctggcagcgctcaggaccacgccagcgataatgcaac

SEQ ID NO: 806461 - DNA, 75 bp, synthetic construct
  source 1..75: mol_type = other DNA
ccaaatggcccgaaattcaggcagagatgcgcatctggaaaaaacgtcgcgaaggtgaacgcaaggaaaccggaa

SEQ ID NO: 806462 - DNA, 75 bp, synthetic construct
  source 1..75: mol_type = other DNA
atgcgaacagccagcattagtctttccacacgctgcctgttcatgtggcaactccttactattagccgccctgcc

SEQ ID NO: 806463 - DNA, 75 bp, synthetic construct
  source 1..75: mol_type = other DNA
ggatttccacctgatgttattgaggctgcacttgctcatgtggataagaatgaggttcgtcgtgcgtataaccgt

SEQ ID NO: 806464 - DNA, 75 bp, synthetic construct
  source 1..75: mol_type = other DNA
atacatcaacgatgccagacgtgatttaaaaccaaccgccaaatggcccgacgttcaggcatattttctcgaccg

SEQ ID NO: 806465 - DNA, 75 bp, synthetic construct
  source 1..75: mol_type = other DNA
ggagtctttggttgctgaacaccttcctggttttaagccttctgaagtactcaggaaaaccatcattgaccgtat

SEQ ID NO: 806466 - DNA, 75 bp, synthetic construct
  source 1..75: mol_type = other DNA
gtttcggcaaactatccgggtgctgatgcgcagaccgtgcaggatacagtgacgcaggttatcgaacagaatatg

SEQ ID NO: 806467 - DNA, 75 bp, synthetic construct
  source 1..75: mol_type = other DNA
tgttgagcctgttgtatctaatcaacatagtgtgctgattatacctggaggtggatacaggaggattgtttatga

SEQ ID NO: 806468 - DNA, 75 bp, synthetic construct
  source 1..75: mol_type = other DNA
ctaaggccgcgccggaagtgattgagcgcgcgctgaatggtttgcttattcatcgggaaaagttaaccccggagc

SEQ ID NO: 806469 - DNA, 75 bp, synthetic construct
  source 1..75: mol_type = other DNA
cgacccatgacggccccggtatccgcacggtcgtatttcttaaaggctgttcgctgggctgccgctggtgtcaga

SEQ ID NO: 806470 - DNA, 75 bp, synthetic construct
  source 1..75: mol_type = other DNA
gaagaaggcgttgagccccgcctgagcgcgagcatagggtttatgtccaaaatgaccagtaagcgcgatcacgaa

SEQ ID NO: 806471 - DNA, 75 bp, synthetic construct
  source 1..75: mol_type = other DNA
ttgcaacagaaaaccggtagccctgtgcaatttgagataaccaaagggacaagagaagctgttgctgcattgata

SEQ ID NO: 806472 - DNA, 75 bp, synthetic construct
  source 1..75: mol_type = other DNA
gtaaaacgcgcgatttagctctgttcaatatggcactggacagtaagcttcgaggctgtgatctggtcaaactca

SEQ ID NO: 806473 - DNA, 75 bp, synthetic construct
  source 1..75: mol_type = other DNA
taattatgctgatatttcttgtcatgtctctcatgttactggtttttgccattatggatattcagtctattagtg

SEQ ID NO: 806474 - DNA, 75 bp, synthetic construct
  source 1..75: mol_type = other DNA
acaagaaaaccaagaatcttcgggtgatccaacttctgttgggccataagaaactggaaagcacagtccgttatc

SEQ ID NO: 806475 - DNA, 75 bp, synthetic construct
  source 1..75: mol_type = other DNA
cacggcattctggtgttggggggcgtgttaccgctgatgctgtttgtcgcactgctggtagttctgccggaatcg

SEQ ID NO: 806476 - DNA, 75 bp, synthetic construct
  source 1..75: mol_type = other DNA
gatccaacttctgttaggccataagaaactggaaagcacagtccgttatctgggcattgaagtcgatgatgcgtt

SEQ ID NO: 806477 - DNA, 75 bp, synthetic construct
  source 1..75: mol_type = other DNA
tcgctgggctgccgctggtgtcagaacccggaaagccgcgcccgcacgcaggatctgctgtatgacccacgactg

SEQ ID NO: 806478 - DNA, 75 bp, synthetic construct
  source 1..75: mol_type = other DNA
tttgctggaaaatatgcgcagtttctttctgacagttgtctggctcccactgaatttttcgccattttggtctca

SEQ ID NO: 806479 - DNA, 75 bp, synthetic construct
  source 1..75: mol_type = other DNA
cagatacggaagtggagtgagtggggaacgtgcttaagttttgttacgttgggtatgatggcgtgggctttgcgg

SEQ ID NO: 806480 - DNA, 75 bp, synthetic construct
  source 1..75: mol_type = other DNA
ttggttttgcgttgggatattattgccagtggcgcagcaaaaatagatgccagatacggaagtggagtgagtggg

SEQ ID NO: 806481 - DNA, 75 bp, synthetic construct
  source 1..75: mol_type = other DNA
ggtggagatcgcctggccgcaaaaacgcagcagcagcccgcgcgatatattgattagtctgcgaacaagctttgc

SEQ ID NO: 806482 - DNA, 75 bp, synthetic construct
  source 1..75: mol_type = other DNA
tcgtgccgttgcttttgtcgagagtgaagttgacgagtggattcaatcagttatcgaatcaagcagaattaatgt

SEQ ID NO: 806483 - DNA, 75 bp, synthetic construct
  source 1..75: mol_type = other DNA
gtggcgtagcaaaaatagaagccataggaagaagtggggcgattgggtaacgtgcttaagtttggcgattttagc

SEQ ID NO: 806484 - DNA, 75 bp, synthetic construct
  source 1..75: mol_type = other DNA
ggtaatcgactgtggcggcacattacgctgcggcatctatccgaaacggcgtattcccaccattaatatccactc

SEQ ID NO: 806485 - DNA, 75 bp, synthetic construct
  source 1..75: mol_type = other DNA
gtcaggacacggttcgcgtcggggttccttctgtactggtgagccgctttttgaccggcgcaccgactgtactga

SEQ ID NO: 806486 - DNA, 75 bp, synthetic construct
  source 1..75: mol_type = other DNA
acctgctgaagaaagaactgcaggcagacgcgcaagcctacggtgacgaacgtcgttcgccgttgcaggaacgcg

SEQ ID NO: 806487 - DNA, 75 bp, synthetic construct
  source 1..75: mol_type = other DNA
tacaactatggttatcggctgaatatgcgcttttcttctgtgcaatggtgggcgttggttggcaatttgcgcgca

SEQ ID NO: 806488 - DNA, 75 bp, synthetic construct
  source 1..75: mol_type = other DNA
gttttgcgttgggatattactgccagtggcgcagcaaaaatagaagccagaggcagaaatggggcgagtggggaa

SEQ ID NO: 806489 - DNA, 75 bp, synthetic construct
  source 1..75: mol_type = other DNA
accattctgccgtttatggcgttcgtctcggcgcttatcggcatcattatggcttccggtcttggcgactggatt

SEQ ID NO: 806490 - DNA, 75 bp, synthetic construct
  source 1..75: mol_type = other DNA
agactgtattgagtctcttcgtgaaaacagtggcgaaaactctctggaatatactcttggtttatgggttcccca

SEQ ID NO: 806491 - DNA, 75 bp, synthetic construct
  source 1..75: mol_type = other DNA
tgagccaggtgcactattaatgatggttgggccattttctgaacagcggtttagtcttcctgctggagcgggaaa

SEQ ID NO: 806492 - DNA, 75 bp, synthetic construct
  source 1..75: mol_type = other DNA
tcgtggcaccattaaatggtggcttaagcaatcacgggaggcgcaatctgccattctgaccgatgaaatcccgtt

SEQ ID NO: 806493 - DNA, 75 bp, synthetic construct
  source 1..75: mol_type = other DNA
tgaaactggcgaggcgtcagatcccttaattaaggcgaacggtcatcataatctcacatccaccagcagagcggg

SEQ ID NO: 806494 - DNA, 75 bp, synthetic construct
  source 1..75: mol_type = other DNA
ttgttaacttcatcaccaaaaagggaggtgacaaacttgtggatttgcccctatatttccagacatctgttatca

SEQ ID NO: 806495 - DNA, 75 bp, synthetic construct
  source 1..75: mol_type = other DNA
tgattatgtgcctgatggcgctggcattcttcggcaacggttttgcttcgattacctggtcgctggtctcttctc

SEQ ID NO: 806496 - DNA, 75 bp, synthetic construct
  source 1..75: mol_type = other DNA
gctcgttatctcgtgcaaagttgggtgagtaatattgatggttctaaagccccttttctcatcacgcctcccgtt

SEQ ID NO: 806497 - DNA, 75 bp, synthetic construct
  source 1..75: mol_type = other DNA
tggagccaacttcgacaacacgattttgcgccgttcatacgaacggcaggggatcccctgcccgtggcgttacta

SEQ ID NO: 806498 - DNA, 75 bp, synthetic construct
  source 1..75: mol_type = other DNA
ttctgaccgatgaaatcccgttagatgatgcactactgcaattacggaaatttatcaacgaaaactccggcgaaa

SEQ ID NO: 806499 - DNA, 75 bp, synthetic construct
  source 1..75: mol_type = other DNA
tatcactggatgggaacaacaatcatcaacttctcgtcgataatatttgaaatgattccgaaggtgaacggctaa

SEQ ID NO: 806500 - DNA, 75 bp, synthetic construct
  source 1..75: mol_type = other DNA
gcactgaacaaatacatcagcgaatacctgacgacaaagggcgtgtttgaacatgaagaaacagaccagagctct

SEQ ID NO: 806501 - DNA, 75 bp, synthetic construct
  source 1..75: mol_type = other DNA
caactgatactctctcgtcgccagtaccagaaactgatgcagtggaaacggcaattccggacaacgaaaaaaccg

SEQ ID NO: 806502 - DNA, 75 bp, synthetic construct
  source 1..75: mol_type = other DNA
tgttgctctccggctattcatagaatttatcgaaaaaaactccggcgggcgttttgtccaggtatggggaaatgg

SEQ ID NO: 806503 - DNA, 75 bp, synthetic construct
  source 1..75: mol_type = other DNA
acgcctggccattagtacgcggtcatgaactgatgagtgccttgcaggatgtcatggggttcaccccactgctga

SEQ ID NO: 806504 - DNA, 75 bp, synthetic construct
  source 1..75: mol_type = other DNA
cgctggagtgaccgggtggcagagcatgacctggaaaccctgttctggcagtggggcgagcgttttccgtcactg

SEQ ID NO: 806505 - DNA, 75 bp, synthetic construct
  source 1..75: mol_type = other DNA
cctgctggaaatcctttccgaatggctggtgttccgccgtgataccgtgcgccgccgtctgaactatcgtctgga

SEQ ID NO: 806506 - DNA, 75 bp, synthetic construct
  source 1..75: mol_type = other DNA
aatcgcattaatcgaccagccgaaaaccacgctcgatcagctgctggatatcgtgcaggggccggattatccgac

SEQ ID NO: 806507 - DNA, 75 bp, synthetic construct
  source 1..75: mol_type = other DNA
gcctggacagactttggacgaaaatggcatccctttgctgaactggccacagactgtattgagtctcttcgtgaa

SEQ ID NO: 806508 - DNA, 75 bp, synthetic construct
  source 1..75: mol_type = other DNA
acagaaagcgaggcacgggtagaagcaatgaataacggtgttttactttgcgaacaattattccccatgcttcag

SEQ ID NO: 806509 - DNA, 75 bp, synthetic construct
  source 1..75: mol_type = other DNA
atgcgctgccaggcgttacttattcaactgctccataacggctggcgctatcaggaacagagcgctattagtcag

SEQ ID NO: 806510 - DNA, 75 bp, synthetic construct
  source 1..75: mol_type = other DNA
tcctgaggcaaaacgcgaatacgaaaaagcggcgaaagacttctgcattgataacctgggcgcgttcgataaata

SEQ ID NO: 806511 - DNA, 75 bp, synthetic construct
  source 1..75: mol_type = other DNA
atgcaaaaatatagtcttgatgtgtggttaagtggttgcaaggagtgtttcggattatttgatagcgaagaggca

SEQ ID NO: 806512 - DNA, 75 bp, synthetic construct
  source 1..75: mol_type = other DNA
atggctaaaaatattttcactgaatttcctacttatccggtcgatcagctttccggtatttttatcaatggcatt

SEQ ID NO: 806513 - DNA, 75 bp, synthetic construct
  source 1..75: mol_type = other DNA
atggctactgtcccaacttccccattcctcaaaatcgaagtcgtcaacggcaaggccgttattttctctctgcat

SEQ ID NO: 806514 - DNA, 75 bp, synthetic construct
  source 1..75: mol_type = other DNA
gaaatttactacggtactaacccactggcctttgccgcgccgggagaaggcgacgagatccttacctttgatatg

SEQ ID NO: 806515 - DNA, 75 bp, synthetic construct
  source 1..75: mol_type = other DNA
agatccttgaactggatgggcgacaccccgccgatgaaattctgcaagcgtcacaacgcgcaattcacgccgcgc

SEQ ID NO: 806516 - DNA, 75 bp, synthetic construct
  source 1..75: mol_type = other DNA
tctggcgaatgcggtagggcgaatcagtggtattgccgcaccttatgccgttgcagtggctttgttgaataaatc

SEQ ID NO: 806517 - DNA, 75 bp, synthetic construct
  source 1..75: mol_type = other DNA
cgaagaattgaatgaagatatcgcctggcgtattgggcgcgcctatggcgaatttctcaaaccgaaaaccattgt

SEQ ID NO: 806518 - DNA, 75 bp, synthetic construct
  source 1..75: mol_type = other DNA
tgcctttgatggcgattttgaccgctgtttcctgtttgacgaaaaagggcagtttatcgagggctactacattgt

SEQ ID NO: 806519 - DNA, 75 bp, synthetic construct
  source 1..75: mol_type = other DNA
gaagtcaccgataagcaggtgaatgcctcttttttcgctgagaatacggttcaatcattacttacctggggagat

SEQ ID NO: 806520 - DNA, 75 bp, synthetic construct
  source 1..75: mol_type = other DNA
ggcaccgaagagatttatttcgccacgttccatctcggcgtggatggcggcatcgaagttacggccagccataac

SEQ ID NO: 806521 - DNA, 75 bp, synthetic construct
  source 1..75: mol_type = other DNA
ggcaccgaagagatttatttcgccacgttccatctcggcgtggatggcggcatcgaagttaccgccagccataag

SEQ ID NO: 806522 - DNA, 75 bp, synthetic construct
  source 1..75: mol_type = other DNA
ctggcagaagcgttcctcgaaaaaaatcccggcgcgaagatcatccacgatccacgtctctcctggaacaccatt

SEQ ID NO: 806523 - DNA, 75 bp, synthetic construct
  source 1..75: mol_type = other DNA
accgagccggtggtacgtttgaacgtcgaatcccggtctaatatcgagctaatggaaataaaaactaaagagata

SEQ ID NO: 806524 - DNA, 75 bp, synthetic construct
  source 1..75: mol_type = other DNA
tattgaagtgacagctagccataacccggtggactataacggtatgaagattgtgcgcgaaggtgcacgtcctat

SEQ ID NO: 806525 - DNA, 75 bp, synthetic construct
  source 1..75: mol_type = other DNA
ccgccaggataccgccgacgcggtgcgcgagcatcaggccgacatggggattgcctttgacggcgacttcgatcg

SEQ ID NO: 806526 - DNA, 75 bp, synthetic construct
  source 1..75: mol_type = other DNA
atctggcggtacacgtagccactaagcttaaccgctctcatctgctgaccgcacggcatagctatattctgccgg

SEQ ID NO: 806527 - DNA, 75 bp, synthetic construct
  source 1..75: mol_type = other DNA
gcatcagcatgacctttgccgactggcgctttaatctgcgcacctccaataccgaaccggtggtgcgcgtgcgac

SEQ ID NO: 806528 - DNA, 75 bp, synthetic construct
  source 1..75: mol_type = other DNA
ggcgaaatgagcgcccaccattacttccgtgatttcgcttactgcgacagcggcatgatcccgtggctgctggta

SEQ ID NO: 806529 - DNA, 75 bp, synthetic construct
  source 1..75: mol_type = other DNA
ggcaccgaagagatttatttcgccacgttccatctcggcgtggatggcggcatggaagttaccgccagccataac

SEQ ID NO: 806530 - DNA, 75 bp, synthetic construct
  source 1..75: mol_type = other DNA
cggcctgctggcagaagcgttcctcgaaaaaaatccaggaacgcagatcctccacgatccacgtccctcctggaa

SEQ ID NO: 806531 - DNA, 75 bp, synthetic construct
  source 1..75: mol_type = other DNA
acaactggcggcaacgctggcggcgatgccggagatgacggtggaaaaagcccgcccgatcctggctgcttcacc

SEQ ID NO: 806532 - DNA, 75 bp, synthetic construct
  source 1..75: mol_type = other DNA
ggacagaggctgccgtttttgaaggtcagtccggtattaaggccggactggcggatgaattaatcaatgcgtcgg

SEQ ID NO: 806533 - DNA, 75 bp, synthetic construct
  source 1..75: mol_type = other DNA
gcgctggcggtggatcgcaccgatggcatcagcatgacctttgccaactggcgctttaacctgcgctcctccaac

SEQ ID NO: 806534 - DNA, 75 bp, synthetic construct
  source 1..75: mol_type = other DNA
cagcggggataccggactgcgcgatgtccagcgcctggcagaagccaacgacttccctcccgttgacgaaaccaa

SEQ ID NO: 806535 - DNA, 75 bp, synthetic construct
  source 1..75: mol_type = other DNA
ctacggcggggagatgagtgcgcaccattacttccgcgatttcgcctactgcgacagcgggatgatcccgtggct

SEQ ID NO: 806536 - DNA, 75 bp, synthetic construct
  source 1..75: mol_type = other DNA
cagcggggataccggactgcgcgacgtccagcgtctggcagaagcgaacgactttccccccgtcgatgaaaccaa

SEQ ID NO: 806537 - DNA, 75 bp, synthetic construct
  source 1..75: mol_type = other DNA
cagcggtgataccggactgcgcgatgtccagcgtctggcagaagccaacgactttccccccgtcgatgaaaccaa

SEQ ID NO: 806538 - DNA, 75 bp, synthetic construct
  source 1..75: mol_type = other DNA
cagcggagataccggactgcgcgaggtccagcgtctggcagaagcaaacgactttccccccgtcgatgaaaccaa

SEQ ID NO: 806539 - DNA, 75 bp, synthetic construct
  source 1..75: mol_type = other DNA
accgaaccggtggtgcgcttaaacgtggagtctcgcggaaatacgccgctgatgcaggcgcgaacgcaggacatt

SEQ ID NO: 806540 - DNA, 75 bp, synthetic construct
  source 1..75: mol_type = other DNA
gcgctggagatcgaccgtactgacggcatcagcctggcgtttgccgactggcgcttcaacctgcgttcttccaat

SEQ ID NO: 806541 - DNA, 75 bp, synthetic construct
  source 1..75: mol_type = other DNA
tttaggcggtgatgtccgcctcaccagcgaagcgttaaaactggcgctggcaaaaggtttacaggatgcgggcgt

SEQ ID NO: 806542 - DNA, 75 bp, synthetic construct
  source 1..75: mol_type = other DNA
gcgcatccgggcgcagtatgagccggcggctgcacacatcgacacaacggacggtatcagtattgaataccctga

SEQ ID NO: 806543 - DNA, 75 bp, synthetic construct
  source 1..75: mol_type = other DNA
tccattggcgtgatgatgagccatgtcagctatgccggtcatctggcgcaggccggtgtggatatcacgctgatt

SEQ ID NO: 806544 - DNA, 75 bp, synthetic construct
  source 1..75: mol_type = other DNA
ttgcagcagcattcaatgaaccgctgcttctggagcccgcctatgcgcgggttttcttttgcgcgctggggcgcg

SEQ ID NO: 806545 - DNA, 75 bp, synthetic construct
  source 1..75: mol_type = other DNA
cgcaggctgaaaaactggcggcgtttcccggaatgacggtggaggctgcccgcgacattctgtcctcatcgccgg

SEQ ID NO: 806546 - DNA, 75 bp, synthetic construct
  source 1..75: mol_type = other DNA
gatggcagcgctggtgattattcagaagacggctaatgttgagtcatcaaaagcaaaagcagctaacgttgttgc

SEQ ID NO: 806547 - DNA, 75 bp, synthetic construct
  source 1..75: mol_type = other DNA
tatctcctggctggtgacagccgtaggctcaatggcactggcatgggcattcgcaaaatgcggtatgttcagccg

SEQ ID NO: 806548 - DNA, 75 bp, synthetic construct
  source 1..75: mol_type = other DNA
gtctctgcatccacaaccgccctgtttgaacatttcatggcgaatcattcaccggcagcggtgcggggtggcgtg

SEQ ID NO: 806549 - DNA, 75 bp, synthetic construct
  source 1..75: mol_type = other DNA
cccgggctgtgctggctgcgggatcaggtaaggcagaaccggtctctgcatccacaaccgccatgtttgaacatt

SEQ ID NO: 806550 - DNA, 75 bp, synthetic construct
  source 1..75: mol_type = other DNA
caatcagtttgaatccctgccgtcagaggttcgccaggacatgcagcagcgcattgatgcggcgcgccggatgtt

SEQ ID NO: 806551 - DNA, 75 bp, synthetic construct
  source 1..75: mol_type = other DNA
gcattgatgcggcgcgccggatgtttgccgaaaaagtggccatgtttaccggtctgtctgttgatgccgtcacgg

SEQ ID NO: 806552 - DNA, 75 bp, synthetic construct
  source 1..75: mol_type = other DNA
atgacggtggaaaaagcccgcccgatcctggctgcttcaccgcaggcggatgccggaccatcactccgtgatcag

SEQ ID NO: 806553 - DNA, 75 bp, synthetic construct
  source 1..75: mol_type = other DNA
taacagcattcaggcattgccggcaggtgtgcgggcggattttcagcaacgtattgatgaagcccgccggatgtt

SEQ ID NO: 806554 - DNA, 75 bp, synthetic construct
  source 1..75: mol_type = other DNA
gatgacggtggaaaaagcccgcccgatcctggcggctgcaccactggcggatgccgggccctcacttcgtgatca

SEQ ID NO: 806555 - DNA, 75 bp, synthetic construct
  source 1..75: mol_type = other DNA
ggctcaatggcgctggcatgggcattcgcaaaatgcggtatgttcagccgtaaatcaggcggtatgggcggttat

SEQ ID NO: 806556 - DNA, 75 bp, synthetic construct
  source 1..75: mol_type = other DNA
atttaaagccctcggcgcaccggtggaattaatcaaagtacacaacacgccggacggcaatttccccaacggtat

SEQ ID NO: 806557 - DNA, 75 bp, synthetic construct
  source 1..75: mol_type = other DNA
agcgaagcgttaaaactggcgcttgcgaaaggtttacaggatgcgggcgtcgatgtgctggatatcggtatgtcc

SEQ ID NO: 806558 - DNA, 75 bp, synthetic construct
  source 1..75: mol_type = other DNA
agggaaaaatagagcgcctgagcctggctgaagaggagcgttccaccgttgccgtgaccaacaaaaaagctgtca

SEQ ID NO: 806559 - DNA, 75 bp, synthetic construct
  source 1..75: mol_type = other DNA
ggcacggaagagatttacttcgccaccttccacctcggggtggacggcggcatcgaggtgacggcgagtcacaac

SEQ ID NO: 806560 - DNA, 75 bp, synthetic construct
  source 1..75: mol_type = other DNA
gttgaatgtggaatcacgcggtgatgtaaagctaatggaaaagaaaactaaagctcttcttaaattgctaagtga

SEQ ID NO: 806561 - DNA, 75 bp, synthetic construct
  source 1..75: mol_type = other DNA
tgatcacctgttcggttatatcaacgtcaaaaacctcacgccgctcaagctggtgatcaactccgggaacggcgc

SEQ ID NO: 806562 - DNA, 75 bp, synthetic construct
  source 1..75: mol_type = other DNA
cagctggtactcgcggcagcaccgcaaacagcgcaggcgcggacagaaacggcgctcgatacactaatgagcact

SEQ ID NO: 806563 - DNA, 75 bp, synthetic construct
  source 1..75: mol_type = other DNA
aagctgccgcgcaggagaaccagcgagtgatggggatcctgacgtgtcaggaagcgaaaggacgtgaacaccttg

SEQ ID NO: 806564 - DNA, 75 bp, synthetic construct
  source 1..75: mol_type = other DNA
tgcgcgcattaccgggcaaatcagtagcattactgtgtggggggtaatcattccggtcgtcggtctgtgcattat

SEQ ID NO: 806565 - DNA, 75 bp, synthetic construct
  source 1..75: mol_type = other DNA
gctgcggtccaggggggcgtgtcacaggcgtcagaagacggtgatgcggacgtgaaaatgctcatggccatgcca

SEQ ID NO: 806566 - DNA, 75 bp, synthetic construct
  source 1..75: mol_type = other DNA
atgccgcaattaactgcaacggaagccgccgtgcaggagaaccagcgagtgatggggatcctgacatgccaggaa

SEQ ID NO: 806567 - DNA, 75 bp, synthetic construct
  source 1..75: mol_type = other DNA
caacagtattcaggcgttgccgacaggtgtgcgtgcggattttcagcgccgtattgatgatgcccgccggatgtt

SEQ ID NO: 806568 - DNA, 75 bp, synthetic construct
  source 1..75: mol_type = other DNA
gcgccctgcgaaatataaatacactgatgttaatggtgaaacgaaaacctggactggccaggggcgtacccctaa

SEQ ID NO: 806569 - DNA, 75 bp, synthetic construct
  source 1..75: mol_type = other DNA
acacttgccagcgccgccgacatcgctgtggcgttactgaatgctcagccacttccggctgtcgaaaccgatgta

SEQ ID NO: 806570 - DNA, 75 bp, synthetic construct
  source 1..75: mol_type = other DNA
catgatctcagtgaagagattggtggaatatcgatgctcttcgctttagatgcgctggcgcaagacgatgaaact

SEQ ID NO: 806571 - DNA, 75 bp, synthetic construct
  source 1..75: mol_type = other DNA
atgctcggagatattgcagcagaagctcagctttatgctgaaattgctgacaaacgctacatcgcaggagtgact

SEQ ID NO: 806572 - DNA, 75 bp, synthetic construct
  source 1..75: mol_type = other DNA
tgctggtggtgccagcggtgtgctgtgtctgattggcggcgtgctgttgctgaagcgtcgtctgttcagcccacg

SEQ ID NO: 806573 - DNA, 75 bp, synthetic construct
  source 1..75: mol_type = other DNA
atggtgtggcgtttatcttccgtctgcacctggtgttggggatgacgttattcctgctgttcccgttctcgcgtc

SEQ ID NO: 806574 - DNA, 75 bp, synthetic construct
  source 1..75: mol_type = other DNA
caaccgatggtgaaatagtttttgatggcgagattttaaaatccgcttgtgaaatcaatgactctgataagaaaa

SEQ ID NO: 806575 - DNA, 75 bp, synthetic construct
  source 1..75: mol_type = other DNA
aatacgataatagtaacttctattattgctgtggtatttttagggggtatcggaggcgggggagtgtttctgctt

SEQ ID NO: 806576 - DNA, 75 bp, synthetic construct
  source 1..75: mol_type = other DNA
aattgctggcatcgcgtcggcaaatcaaccaactgctgaactggcactggaaactgaaaccgcagaacaatttgc

SEQ ID NO: 806577 - DNA, 75 bp, synthetic construct
  source 1..75: mol_type = other DNA
aattggtgttattggcgcgtcaggcaccgggctacaggaagtgacttgccgaatcgaccagctcggagcgggtat

SEQ ID NO: 806578 - DNA, 75 bp, synthetic construct
  source 1..75: mol_type = other DNA
gtcgtcagactgaagagcagcttaaaaaattgaaaggatatacagggattacgcccaatgtcgctgctcgactgg

SEQ ID NO: 806579 - DNA, 75 bp, synthetic construct
  source 1..75: mol_type = other DNA
cccgaaaatcttgcttacggcactacaattaaattatttgaactaaaaaagccattgataggactcaaacttacc

SEQ ID NO: 806580 - DNA, 75 bp, synthetic construct
  source 1..75: mol_type = other DNA
taggtgatggtgaactttttagatattgtaaggataaatattctaaagatttacggtatatatttatggggaaag

SEQ ID NO: 806581 - DNA, 75 bp, synthetic construct
  source 1..75: mol_type = other DNA
gtgcaggcctttctggtgaactgtccggcaatgcggcgacagcaacaaagctgaaaacagcccgtaaaattaata

SEQ ID NO: 806582 - DNA, 75 bp, synthetic construct
  source 1..75: mol_type = other DNA
ttcggattacggtaactttgattcccgctatgtgagagatgtcagacttggcactcgtgttgttcagaccatgca

SEQ ID NO: 806583 - DNA, 75 bp, synthetic construct
  source 1..75: mol_type = other DNA
atctgacttcgccaggcatttacagcgttacagggaaggcgtcaaacggtccaatgcaggataccgctggagcga

SEQ ID NO: 806584 - DNA, 75 bp, synthetic construct
  source 1..75: mol_type = other DNA
ctcagctttatgctgaaattgctgacaaacgctacatcgcaggagtgacttgtcaacagatctatgaatctttaa

SEQ ID NO: 806585 - DNA, 75 bp, synthetic construct
  source 1..75: mol_type = other DNA
gtgaatcagatattcacggtgattttgctcgtgttggtaggatttgtcgtaggtaatgtctggagcgacagagga

SEQ ID NO: 806586 - DNA, 75 bp, synthetic construct
  source 1..75: mol_type = other DNA
ttctcgtgttgtcaggatttatcgtcggaaatgtctggagcgaccgaggatggcaaaaaaaatgggcggaacgtg

SEQ ID NO: 806587 - DNA, 75 bp, synthetic construct
  source 1..75: mol_type = other DNA
cagcggatggtcggtaacagtaaagccgatgcggctctgctggatgaaatgatcaacaacatccagtttattccc

SEQ ID NO: 806588 - DNA, 75 bp, synthetic construct
  source 1..75: mol_type = other DNA
cgcaacactggagaaaaatttcccggaagataatgctgtcggtgtgcttgaggtttttgcagctggcaattttgc

SEQ ID NO: 806589 - DNA, 75 bp, synthetic construct
  source 1..75: mol_type = other DNA
tggctgcgctacgactacgggcagtacacctggcgcgccgcctccagccagatgctggataaacgcgggatggtg

SEQ ID NO: 806590 - DNA, 75 bp, synthetic construct
  source 1..75: mol_type = other DNA
aatgacaacgcaaattcacgtctggcgaaaaatcagaacggtgcagatatccaggataaatcagcttttctggac

SEQ ID NO: 806591 - DNA, 75 bp, synthetic construct
  source 1..75: mol_type = other DNA
tttctggcacctggaatggctcagacggtccgtggatctactggcgtcagattcagtctgcaacacgccccctga

SEQ ID NO: 806592 - DNA, 75 bp, synthetic construct
  source 1..75: mol_type = other DNA
gttatctggtggtcaattgaatggtgctctgggtataggaacatccagtgctcttggcggtaattcgattgtttt

SEQ ID NO: 806593 - DNA, 75 bp, synthetic construct
  source 1..75: mol_type = other DNA
ctggatgaatgccgcctgatgcaaacgcgtcgtcaggagatcgttgcgccagaagacgcatggcgtgatatcacc

SEQ ID NO: 806594 - DNA, 75 bp, synthetic construct
  source 1..75: mol_type = other DNA
gcctgaatgtggaatcgcgcggtgatgtgccgctgatgaaagaaaagacaaaacttatccttgagttactgaata

SEQ ID NO: 806595 - DNA, 75 bp, synthetic construct
  source 1..75: mol_type = other DNA
tgttgtccgtgccagttgataataaaattgaaagctatcgtacagaattagaactgtgtaaggcagaagaagtgg

SEQ ID NO: 806596 - DNA, 75 bp, synthetic construct
  source 1..75: mol_type = other DNA
atctacgcgtctcaagtctggagcaggtacgtacaggcggtggtcttgatacgcaagatgaagaagtcagacgct

SEQ ID NO: 806597 - DNA, 75 bp, synthetic construct
  source 1..75: mol_type = other DNA
ctggaacgtgcggcgaagcgtgccggattcaaggatgtggtattccagtacgagccggtggcggcagggctggat

SEQ ID NO: 806598 - DNA, 75 bp, synthetic construct
  source 1..75: mol_type = other DNA
tgttgcacattcgccagcaggcgcaggcgcagctgccagaagcgattactcaggcggtgatcggtcgccctatca

SEQ ID NO: 806599 - DNA, 75 bp, synthetic construct
  source 1..75: mol_type = other DNA
gcgtgacggtaaaccgcacttgctaaaaatggaaaacgacagcacgctgctgccttcaatgctttgcgcgccaac

SEQ ID NO: 806600 - DNA, 75 bp, synthetic construct
  source 1..75: mol_type = other DNA
gtgaagaccctaacgatatttatcatgatcttgggggtgaagatgattgaatgcattattgttgcggtagttata

SEQ ID NO: 806601 - DNA, 75 bp, synthetic construct
  source 1..75: mol_type = other DNA
tgtgttctcttatgggagttccgaattttcatatattatccatcatagcaccgaactgcacacactcattcctga

SEQ ID NO: 806602 - DNA, 75 bp, synthetic construct
  source 1..75: mol_type = other DNA
atggtttctgcgagtatgagatacaggggttaagcgcactgctgaaagcagagaattatgatgtcagactcagga

SEQ ID NO: 806603 - DNA, 75 bp, synthetic construct
  source 1..75: mol_type = other DNA
aaagaaaccggatgataatagagaaatattctctagagaatatgacggaaaattatcttcaaatctatgaatgtc

SEQ ID NO: 806604 - DNA, 75 bp, synthetic construct
  source 1..75: mol_type = other DNA
gatgattcttcattattgtgcaatcctaatgatcctcatgatttggcttgtaaaatattaaatttaagcatggat

SEQ ID NO: 806605 - DNA, 75 bp, synthetic construct
  source 1..75: mol_type = other DNA
ctagtcttctggcctttcattacgatatacgcattcagtgacgctatgcgtattaacatcatgcgagccattaag

SEQ ID NO: 806606 - DNA, 75 bp, synthetic construct
  source 1..75: mol_type = other DNA
gggcattccgattgcaggcggcgatgactttggctccgtcaccgccgggctggcacgctgggcggaagtggtgtt

SEQ ID NO: 806607 - DNA, 75 bp, synthetic construct
  source 1..75: mol_type = other DNA
cgaacattgtggtttgaactcgtcacaaaaatagatatagatatacataaaaagaacaggtatgcgagttatgat

SEQ ID NO: 806608 - DNA, 75 bp, synthetic construct
  source 1..75: mol_type = other DNA
cagaagcatggcatatcctaacaaccatctatacgtatcagcggttgatggaaggccttactaatagcagtacaa

SEQ ID NO: 806609 - DNA, 75 bp, synthetic construct
  source 1..75: mol_type = other DNA
gcagaaacgcgtcttaatgtggtgctgcgcgggatcgcctttggtgccagacccggcgcggttattgaagaaggt

SEQ ID NO: 806610 - DNA, 75 bp, synthetic construct
  source 1..75: mol_type = other DNA
ggaagatgcctggcgtgatatcaccaatgcctggcaattacgcacacgccaactggcctgtctgcaactgttagc

SEQ ID NO: 806611 - DNA, 75 bp, synthetic construct
  source 1..75: mol_type = other DNA
gtatcatgccgggccgctgttcagtcgcatcagtcgtgcggggcagccaggacaacaacggcttaccaccacggg

SEQ ID NO: 806612 - DNA, 75 bp, synthetic construct
  source 1..75: mol_type = other DNA
ctgcttgatgcgggctatgctgttgccacggtgaacatggcgctgtcggcgctgaaatcggttgccggagcggct

SEQ ID NO: 806613 - DNA, 75 bp, synthetic construct
  source 1..75: mol_type = other DNA
tgaggactttatcgtgtcagacaaactccatgagacaaattatcccgacgaccataacgaccgcctctggtgggg

SEQ ID NO: 806614 - DNA, 75 bp, synthetic construct
  source 1..75: mol_type = other DNA
atccggaagtatgccccacaggagcatgaactccatcgtatcgcggatgccctgcaggcggtgcagaaacgtaac

SEQ ID NO: 806615 - DNA, 75 bp, synthetic construct
  source 1..75: mol_type = other DNA
tagcgtttaaaaacctgatgccactgctgggtatgggtggcgaaaccgaaaaaggcatcgccctgccgattctgc

SEQ ID NO: 806616 - DNA, 75 bp, synthetic construct
  source 1..75: mol_type = other DNA
ggcaatgttgagcatagcggcggcagctttacatcaaatggcgttgtggtgcatacccacaaacatggcggcgta

SEQ ID NO: 806617 - DNA, 75 bp, synthetic construct
  source 1..75: mol_type = other DNA
caccacggcaacagaagcgaaaatctcagagtgcgatttaaccgcgacgattgaacaacgcggaccacaaacggc

SEQ ID NO: 806618 - DNA, 75 bp, synthetic construct
  source 1..75: mol_type = other DNA
ttctggcaactgcaggctgaaatcagtcaccggggacgttactgccatccgtacagcatggatatcactgttacc

SEQ ID NO: 806619 - DNA, 75 bp, synthetic construct
  source 1..75: mol_type = other DNA
gaactggaaaagtcccattaccaactggtcagcacatacagtgagctgaaccggcagtatacggaactgctgagt

SEQ ID NO: 806620 - DNA, 75 bp, synthetic construct
  source 1..75: mol_type = other DNA
ccaactggtcagcacatacagtgagctgaaccggcagtatgccagcctgctggaagagtacaaatcactgcggcg

SEQ ID NO: 806621 - DNA, 75 bp, synthetic construct
  source 1..75: mol_type = other DNA
tgccacaggaaagaaaaacatggtgtcgcactggttcagtgccagccagtggcagttaccgaacgaggatgatta

SEQ ID NO: 806622 - DNA, 75 bp, synthetic construct
  source 1..75: mol_type = other DNA
tacggatgtctggacgcacaagcctgtgccgtattaccccggcaaacatccctgtgagaaaccggcggatatgtt

SEQ ID NO: 806623 - DNA, 75 bp, synthetic construct
  source 1..75: mol_type = other DNA
gtgcagtactatccagggaaacatccgtgcgaaaaaccggcagaaatgctgcggcagataatctgcgcgagcagt

SEQ ID NO: 806624 - DNA, 75 bp, synthetic construct
  source 1..75: mol_type = other DNA
ctggtttggtacctgtcagtggcagttaccgaacgaagctgattacagaaaactgcaggcgctgttcgcgtgtgt

SEQ ID NO: 806625 - DNA, 75 bp, synthetic construct
  source 1..75: mol_type = other DNA
gcgggtgatgaagattacctgaagtggctggaccagtgtcttgcgcagttctggcgggtgctgaagccagccgga

SEQ ID NO: 806626 - DNA, 75 bp, synthetic construct
  source 1..75: mol_type = other DNA
tgccgttcgctgccaggatatgtggctgagctgggaagaggtgcagttttacgccgctctgtttgatttcccctg

SEQ ID NO: 806627 - DNA, 75 bp, synthetic construct
  source 1..75: mol_type = other DNA
cgtgcaattggcgttgagctggagaccggacgttttgagcagaccgcaagggatgtacagaatttaatcagaaag

SEQ ID NO: 806628 - DNA, 75 bp, synthetic construct
  source 1..75: mol_type = other DNA
gaaatcatgatgcgtgaacgcttcagtgtgctgaaccatattatctgggcgaagccgtccggacgctggaacgga

SEQ ID NO: 806629 - DNA, 75 bp, synthetic construct
  source 1..75: mol_type = other DNA
aaaagcagcactggcgctcgggcgtcgtgcgattggcgttgaactggagaccggacgttttgagcagacagtcag

SEQ ID NO: 806630 - DNA, 75 bp, synthetic construct
  source 1..75: mol_type = other DNA
cgggaaacatccgtgcgaaaaaccggcagaaatgctgcagcagataatcagcgcaagtagccgtcctggtgatct

SEQ ID NO: 806631 - DNA, 75 bp, synthetic construct
  source 1..75: mol_type = other DNA
aaaagcggcactttcactgggacgctgtgcgattggcgtggagctggaagaagagagatttaatcagactgtgaa

SEQ ID NO: 806632 - DNA, 75 bp, synthetic construct
  source 1..75: mol_type = other DNA
ggtaatgcccgcacatggtggcgaccatcggaaggtgagcaggtggtgctgctgagtctgggcggcaatctggaa

SEQ ID NO: 806633 - DNA, 75 bp, synthetic construct
  source 1..75: mol_type = other DNA
ttctaacggaattgtggttgatgcacatcagcatactggcgtcctgaaaggcggtgacacaaccggaggcccggt

SEQ ID NO: 806634 - DNA, 75 bp, synthetic construct
  source 1..75: mol_type = other DNA
aagaacttgattcctgtgccctttcaccaactataaacgaccactttgcctttcatcctattgtcgatcggcttt

SEQ ID NO: 806635 - DNA, 75 bp, synthetic construct
  source 1..75: mol_type = other DNA
gagtacccggacggcggcaggtttgagtacgaacccgccaccgggcgatggtacgtccggggtatcaaatccatg

SEQ ID NO: 806636 - DNA, 75 bp, synthetic construct
  source 1..75: mol_type = other DNA
tgcgccttatcaccaatctgatccgcactggtgtagtcaccgaagtggaccgggaacactggctttgtcgggtga

SEQ ID NO: 806637 - DNA, 75 bp, synthetic construct
  source 1..75: mol_type = other DNA
tgcgccttatcaccaacctgatccgcactggtgtagttaccgaagtggataggaagaactggctttgccgggtga

SEQ ID NO: 806638 - DNA, 75 bp, synthetic construct
  source 1..75: mol_type = other DNA
cgctcgggcgtcgtgcaattggcgttgagctggagactgaacgttttgagcagacagtcagggaagttcaggatt

SEQ ID NO: 806639 - DNA, 75 bp, synthetic construct
  source 1..75: mol_type = other DNA
acgggtgatgaggattacctgaaatggctggaccagtgtctggcgcagttctggcgggtgctgaaacctgccgga

SEQ ID NO: 806640 - DNA, 75 bp, synthetic construct
  source 1..75: mol_type = other DNA
gatgattccattgacctgattgttacagatccgccgtacttcaaggtgaaacccaacgactgggacaatcagtgg

SEQ ID NO: 806641 - DNA, 75 bp, synthetic construct
  source 1..75: mol_type = other DNA
aactcgcgcgcgcactgcgcaatatgatccgcaccggtcttgtcgtcgaaaccgaccttaacgccggtcgctgcc

SEQ ID NO: 806642 - DNA, 75 bp, synthetic construct
  source 1..75: mol_type = other DNA
cgtgcgaaaaaccggcagaaatgctgcagcagataatcagtgcgagcagtcgtccgggtgacctggttgcagatt

SEQ ID NO: 806643 - DNA, 75 bp, synthetic construct
  source 1..75: mol_type = other DNA
gcctggcatctgacaccgaaatcatgatgcgtcagcgctttaatgtgctgaaccacattatctgggcgaagccgt

SEQ ID NO: 806644 - DNA, 75 bp, synthetic construct
  source 1..75: mol_type = other DNA
acggcaaaacagattgtggatgccacaggaaagaaaaacatggtgtcgcactggttcagtgccagccagtggcag

SEQ ID NO: 806645 - DNA, 75 bp, synthetic construct
  source 1..75: mol_type = other DNA
gcgtcagataattaccgccagcagccatccgggagatttggttgctgatttttttatggggtcgggatcaacaat

SEQ ID NO: 806646 - DNA, 75 bp, synthetic construct
  source 1..75: mol_type = other DNA
tggccccgctgatttcttactttcgtgatgcgcgtgaatcactggggataacgtcaaaacagatagcggaagcca

SEQ ID NO: 806647 - DNA, 75 bp, synthetic construct
  source 1..75: mol_type = other DNA
ccggcaatatgccagcctgctggcagagtacaaatctttacggcgttatttttccgtatcggctgctgttcctta

SEQ ID NO: 806648 - DNA, 75 bp, synthetic construct
  source 1..75: mol_type = other DNA
ttgcgcgtgttgcggcagaaaaacatcagcgcggggaactggaaaagccacaccgccaactggtaagcacataca

SEQ ID NO: 806649 - DNA, 75 bp, synthetic construct
  source 1..75: mol_type = other DNA
aaaggctgcgctctctctggaacgtagagctattggtgtagagctggaaacggacaggtttaatcaaacggttga

SEQ ID NO: 806650 - DNA, 75 bp, synthetic construct
  source 1..75: mol_type = other DNA
aaaagcggcgatggcgctggggcgtcgggtaatcggcgttgagcttgaaactgaacggtttgagcagacagtcgg

SEQ ID NO: 806651 - DNA, 75 bp, synthetic construct
  source 1..75: mol_type = other DNA
ctggcgggtactgaagcctgccggaagtctttacctgttctgtggtcatcgcctggcatctgatatcgaaatcat

SEQ ID NO: 806652 - DNA, 75 bp, synthetic construct
  source 1..75: mol_type = other DNA
gaactggagaagccccaccaccagctgctggagacgtatacttcactgaaccggcagtatgcggaactacagagt

SEQ ID NO: 806653 - DNA, 75 bp, synthetic construct
  source 1..75: mol_type = other DNA
gatgcgtgaacgcttcaatgtgctgaaccatattatctgggcgaagccgtccggacgctggaacgggtgcaataa

SEQ ID NO: 806654 - DNA, 75 bp, synthetic construct
  source 1..75: mol_type = other DNA
ccggcaatatgccagtctgctggaggagtataaatttctgcggcgttatttttctgtatcggctgcggttcctta

SEQ ID NO: 806655 - DNA, 75 bp, synthetic construct
  source 1..75: mol_type = other DNA
gcctcgcatctgatatcgagatcatgatgcgtgaacgtttcaacgttcttaaccatattatctgggcgaagccgt

SEQ ID NO: 806656 - DNA, 75 bp, synthetic construct
  source 1..75: mol_type = other DNA
ggcagggcactgaaacagcatgtgatggcaccgctgattgcttactttcgtgatgcgcgtgctgccctggggata

SEQ ID NO: 806657 - DNA, 75 bp, synthetic construct
  source 1..75: mol_type = other DNA
cctgtgaaaaaccggcggatatgttgcgtcagataattactgccagcagccgtccgggcgatttggtcgcagatt

SEQ ID NO: 806658 - DNA, 75 bp, synthetic construct
  source 1..75: mol_type = other DNA
ctgagtgaatataaaaatttgcggcggtatttcggtgtgacggtgcaggtgccgtacaccgatgtgtggacgtac

SEQ ID NO: 806659 - DNA, 75 bp, synthetic construct
  source 1..75: mol_type = other DNA
gtgcagtactatcccgggaaacatccgtgcgaaaaaccggcagaaatgctgcagcagataatcagcgcaagtagt

SEQ ID NO: 806660 - DNA, 75 bp, synthetic construct
  source 1..75: mol_type = other DNA
ggaaagcctgcgggcgtatttccccgccacagaacgcattctgttcgcggaacattatcaggggccgtatcgtcc

SEQ ID NO: 806661 - DNA, 75 bp, synthetic construct
  source 1..75: mol_type = other DNA
tcggtgtgacggtgcaggtgccgtacacggatgtgtggacacataaaccggtgcagttctatcccgggaaacatc

SEQ ID NO: 806662 - DNA, 75 bp, synthetic construct
  source 1..75: mol_type = other DNA
gtattgatttaatcaacgctgattgcctgcattttattcagtccctgcctgatgattccattgacctgattgtta

SEQ ID NO: 806663 - DNA, 75 bp, synthetic construct
  source 1..75: mol_type = other DNA
cgtgctacaggcgttgagctggagactgaacgttttgagcagacggtcagggaagttcaggatttagccagccag

SEQ ID NO: 806664 - DNA, 75 bp, synthetic construct
  source 1..75: mol_type = other DNA
caaagcagcgatggcgcagggacgtcgtgtgattggtgttgagctggagactgagcgttttgagcagacggtcag

SEQ ID NO: 806665 - DNA, 75 bp, synthetic construct
  source 1..75: mol_type = other DNA
cctgtgaaaaaccggcagatatgttgcgtcagataattactgccagcagtcgccccggtgatttggtcgctgatt

SEQ ID NO: 806666 - DNA, 75 bp, synthetic construct
  source 1..75: mol_type = other DNA
cgtccgggggacctggttgcagattttttcatggggtcgggttcgacagtcaaagccgcgatggcgctggggcgt

SEQ ID NO: 806667 - DNA, 75 bp, synthetic construct
  source 1..75: mol_type = other DNA
gttttgagttaatcaacgccgactgcctggaatttatccggtcgttacccgaaaattctgttgacctgatagtca

SEQ ID NO: 806668 - DNA, 75 bp, synthetic construct
  source 1..75: mol_type = other DNA
tgctgaaccatattatctgggcgaagccgtccggacgctggaacggatgcaacaaggaaagcctgcgggcgtatt

SEQ ID NO: 806669 - DNA, 75 bp, synthetic construct
  source 1..75: mol_type = other DNA
ctgaaacctgccggaagtctttacctgttctgtggtcatcgcctggcatctgatatcgaaatcatgatgcgtgaa

SEQ ID NO: 806670 - DNA, 75 bp, synthetic construct
  source 1..75: mol_type = other DNA
ccatgaaccgcgtgcggtgcaggctattgaagagtgttggtgccttgcgctccctatgaaacattaccgcccgct

SEQ ID NO: 806671 - DNA, 75 bp, synthetic construct
  source 1..75: mol_type = other DNA
aggaaaggtgagcacgaatctgattttcaaggagtgtcgccagagtgccgcgatgaagcgggtgttggctttata

SEQ ID NO: 806672 - DNA, 75 bp, synthetic construct
  source 1..75: mol_type = other DNA
ctgtgcgcaggacgttgctgcggtaacaggcgcaacagtaaccagtataaatcaggctgcggttaaaatggcacg

SEQ ID NO: 806673 - DNA, 75 bp, synthetic construct
  source 1..75: mol_type = other DNA
gtgttggtgccttgcgctccctatgaaacttaccgtccgctgttattaaacgacacgctatttttacgaaaactc

SEQ ID NO: 806674 - DNA, 75 bp, synthetic construct
  source 1..75: mol_type = other DNA
ttatcacgaaaagcatacgcaagcggcagagtatttgggcgtttcttatcggcacctgttatatgttctcgcaca

SEQ ID NO: 806675 - DNA, 75 bp, synthetic construct
  source 1..75: mol_type = other DNA
gcctattaagtcattaccgttgtcattgccatccagaagagcggatgatcctctcaattcatacggcgacaatgg

SEQ ID NO: 806676 - DNA, 75 bp, synthetic construct
  source 1..75: mol_type = other DNA
tcgcgtcggcaaatcaaccaactgctgaactggcactggaaactgaaaccgcagaacaatttgccggagctgatt

SEQ ID NO: 806677 - DNA, 75 bp, synthetic construct
  source 1..75: mol_type = other DNA
tggaacagcggcatgttcctgttccgcgccggacgctatctcgaagaactgaaaaaatatcgtccggatattctc

SEQ ID NO: 806678 - DNA, 75 bp, synthetic construct
  source 1..75: mol_type = other DNA
tgaagacagtaaaaagcctctgtttcctatgcatttgatgctggctggtggcacggtgctttatatctctgtttg

SEQ ID NO: 806679 - DNA, 75 bp, synthetic construct
  source 1..75: mol_type = other DNA
cagcttgatgctcccggaatgctggctgaaacggacgagtacatggccggaggtaaacgaccggcccgtgtttac

SEQ ID NO: 806680 - DNA, 75 bp, synthetic construct
  source 1..75: mol_type = other DNA
tgaaaccggtaaagtgatgcctgttccggcagcagcgttgagctataaaaaacaaaaagccgcccagatggcggc

SEQ ID NO: 806681 - DNA, 75 bp, synthetic construct
  source 1..75: mol_type = other DNA
gtcggtgcataacgtttcaaccgcccgtgacttaaccaaactgctcattgccagcaaacaatatccgttgatcgg

SEQ ID NO: 806682 - DNA, 75 bp, synthetic construct
  source 1..75: mol_type = other DNA
cattttgccgatgccagccgcctgcgtacctggattgagaccggtaaagtgatgcctgttccggcagcagcgttg

SEQ ID NO: 806683 - DNA, 75 bp, synthetic construct
  source 1..75: mol_type = other DNA
gatcatggcactggatgaggcaaaaggggctgaggcgcaggctgaacagctggctgcctgcccgggaatgactgt

SEQ ID NO: 806684 - DNA, 75 bp, synthetic construct
  source 1..75: mol_type = other DNA
agggaaggcgatatcgccattgcgctaaatcagcaggatttcactgatccacgagcaatgattgctctgatgcgg

SEQ ID NO: 806685 - DNA, 75 bp, synthetic construct
  source 1..75: mol_type = other DNA
gcggatgaattagtcaatgcgtcggatgccatcagcgtgatggccacggcgctgaacagtaatgtcagaggaggc

SEQ ID NO: 806686 - DNA, 75 bp, synthetic construct
  source 1..75: mol_type = other DNA
gagaggctcgtctggctattcgtgccatattcgaaactgcgcaggggcttgttggcgcacaagtaggtgaagcca

SEQ ID NO: 806687 - DNA, 75 bp, synthetic construct
  source 1..75: mol_type = other DNA
ggctgcggtccaggggggcgtgtcacaggcgtcagaagacggtgatgcggacgtgaaaatgctcatggccatgcc

SEQ ID NO: 806688 - DNA, 75 bp, synthetic construct
  source 1..75: mol_type = other DNA
tgcagcagcgggttgatgcggcgcaccggatgtttgccgaaaaagtggcgatgtatacggggctgtctgtggaag

SEQ ID NO: 806689 - DNA, 75 bp, synthetic construct
  source 1..75: mol_type = other DNA
aataaggtgatctattcaaaccacccggacctggtgcgtccgattgcctctatcagcaagttaatgaccgcgatg

SEQ ID NO: 806690 - DNA, 75 bp, synthetic construct
  source 1..75: mol_type = other DNA
ctgtgccggcagcagcgttgagaaaaaaaaaaaaaaaaaccgcccaaaggggggcggcggggcagacggcacaga

SEQ ID NO: 806691 - DNA, 75 bp, synthetic construct
  source 1..75: mol_type = other DNA
ggattgatgcggcgcgccggatgtttgccgaaaaagtggcgatgtttaccggtctgtctgttgatgccgtcacgg

SEQ ID NO: 806692 - DNA, 75 bp, synthetic construct
  source 1..75: mol_type = other DNA
caccgccgagggcaacgtttgccacggcgatgtgattaatcacaaaaccgaaaacagctatgtgtatgccgaatc

SEQ ID NO: 806693 - DNA, 75 bp, synthetic construct
  source 1..75: mol_type = other DNA
gcccgctgacaatatcaccttgaaaaccagtgagtttgtactggaggctgaccgcacgcgtattaacagcgaagt

SEQ ID NO: 806694 - DNA, 75 bp, synthetic construct
  source 1..75: mol_type = other DNA
gaccgctgacaatatcaccgtgaaaaccagtgagtttgtactggaggctgaccgcacgcggattaacagcgaagt

SEQ ID NO: 806695 - DNA, 75 bp, synthetic construct
  source 1..75: mol_type = other DNA
ggggcatcaaatcaatggtcattgagaccgctgacaagatcaccgtgaaaaccagtgagtttgtcctggaggctg

SEQ ID NO: 806696 - DNA, 75 bp, synthetic construct
  source 1..75: mol_type = other DNA
gctgagtctgggcggcaatctggaaaccgcgtttgccctgcctgcggtctactcaaaccagtttccgccaccttc

SEQ ID NO: 806697 - DNA, 75 bp, synthetic construct
  source 1..75: mol_type = other DNA
ggccgctgacaatatcaccctgaaaaccagtgagtttgtactggaggctgaccgcacgcgaattaacagcgaagt

SEQ ID NO: 806698 - DNA, 75 bp, synthetic construct
  source 1..75: mol_type = other DNA
ggccgctgacaatatcaccatgaaaaccagtgagtttgtactggaggctgaccgcacgcgcattaacagcgaagt

SEQ ID NO: 806699 - DNA, 75 bp, synthetic construct
  source 1..75: mol_type = other DNA
ggggcatcaaatcaatggtcattgagaccgctgacaatatcaccttgaaaaccagtgagtttgtcctggaggctg

SEQ ID NO: 806700 - DNA, 75 bp, synthetic construct
  source 1..75: mol_type = other DNA
ggggcatcaaatcaatggtcattgagaccgctgacaaaatcaccctgaaaaccagtgagtttgtactggaggctg

SEQ ID NO: 806701 - DNA, 75 bp, synthetic construct
  source 1..75: mol_type = other DNA
ggggcatcaaatcaatggtcattgagaccgctgacaaaatcaccatgaaaaccagtgagtttgtcctggaggctg

SEQ ID NO: 806702 - DNA, 75 bp, synthetic construct
  source 1..75: mol_type = other DNA
ggggcatcaaatcaatggtcattgagaccgctgacaagatcaccctgaaaaccagtgagtttgtgctggaggctg

SEQ ID NO: 806703 - DNA, 75 bp, synthetic construct
  source 1..75: mol_type = other DNA
ggggcatcaaatcaatggtcattgagaccgctgacaacatcaccctgaaaaccagtgagtttgtcctggaggctg

SEQ ID NO: 806704 - DNA, 75 bp, synthetic construct
  source 1..75: mol_type = other DNA
ggggcatcaaatcaatggtcattgagaccgctgacaatatcaccctgaaaaccagtgagtttgttctggaggctg

SEQ ID NO: 806705 - DNA, 75 bp, synthetic construct
  source 1..75: mol_type = other DNA
cagtcgcatggttttttctttcttgccgtgagcgaaagcattgattgtggtcggtatccggtacgcgtgttcgag

SEQ ID NO: 806706 - DNA, 75 bp, synthetic construct
  source 1..75: mol_type = other DNA
atgaccgcattaacaccgattactggcaggatttacagaccatcacgcaattggtgcacacagaaaaaactcgat

SEQ ID NO: 806707 - DNA, 75 bp, synthetic construct
  source 1..75: mol_type = other DNA
aggggcatcaaatccatggtgatcgaggcatcagacagtgtcacctacaaaaccggtgagtttgtggtggaggct

SEQ ID NO: 806708 - DNA, 75 bp, synthetic construct
  source 1..75: mol_type = other DNA
gctgagtctgggcggaaatctggaaacagcctttgcgctgcccgccatctattcgaatcagtttgcaccgccgtc

SEQ ID NO: 806709 - DNA, 75 bp, synthetic construct
  source 1..75: mol_type = other DNA
ctatgtgtatgccgaatctggcctggtcaccaccgtcggggtgaaagatttggtggtagtgcagaccaaagatgc

SEQ ID NO: 806710 - DNA, 75 bp, synthetic construct
  source 1..75: mol_type = other DNA
tggttgagcagctcaaagccgacggtcgacacgagtatcggatgcatcgcgaagtataccgtccgtgggggcaat

SEQ ID NO: 806711 - DNA, 75 bp, synthetic construct
  source 1..75: mol_type = other DNA
tatgactctatcgacgcgggcgaccgctaccaggtgaaacgcatcaccgtgaaaccgggcgagggtttgtcggta

SEQ ID NO: 806712 - DNA, 75 bp, synthetic construct
  source 1..75: mol_type = other DNA
tgctttgcccgccatctattctaatcagtttgcaccgccgtcgcagtcggtggacgcctgtgtgacagaacatcc

SEQ ID NO: 806713 - DNA, 75 bp, synthetic construct
  source 1..75: mol_type = other DNA
accgcctttgcgttgcccgccatctattcgaatcagttcgcaccgccgtcaacgtcggcggaagcctgcgtgaca

SEQ ID NO: 806714 - DNA, 75 bp, synthetic construct
  source 1..75: mol_type = other DNA
ccggatctacggggcgaatttattcgaggttgggatgatggacgaggtgtggacaatgggcgagcattattaagc

SEQ ID NO: 806715 - DNA, 75 bp, synthetic construct
  source 1..75: mol_type = other DNA
ttctaacgggatcgtggttgatgcgcatcagcatactggcgtccagaaaggtggcgacaccaccggaggcccggt

SEQ ID NO: 806716 - DNA, 75 bp, synthetic construct
  source 1..75: mol_type = other DNA
ggtgcgatgagttctaacgggattgtggttgatgcgcatcagcatactggtgtcctgaaaggcggcgatacaacc

SEQ ID NO: 806717 - DNA, 75 bp, synthetic construct
  source 1..75: mol_type = other DNA
gggcgctggtatgtcaggggcatcaaatccatggtcattgaggctgccgacaacatcaccctgaaaaccagtgag

SEQ ID NO: 806718 - DNA, 75 bp, synthetic construct
  source 1..75: mol_type = other DNA
tagtttcgaatgtttctgttaagggtgaccctctattattgttatctaagcgcagccaagaacgttcagagtcta

SEQ ID NO: 806719 - DNA, 75 bp, synthetic construct
  source 1..75: mol_type = other DNA
acagagatatctctggagttgacaaaatctaatccggttcaggtcaaaacacgcgatcatcaaggtaatttgtct

SEQ ID NO: 806720 - DNA, 75 bp, synthetic construct
  source 1..75: mol_type = other DNA
attcatttttctgacaaagtgatgaatcggcaacttgaagaacgacgggcagaaattgccgctgaacgtgatggg

SEQ ID NO: 806721 - DNA, 75 bp, synthetic construct
  source 1..75: mol_type = other DNA
tgcagcggatttatatacaagaaaatcgaaactcagtaagaatgtgcattatcttgataaaaacagtaacaggac

SEQ ID NO: 806722 - DNA, 75 bp, synthetic construct
  source 1..75: mol_type = other DNA
atgcgtgatatccaacaggttctgtcccgatggggtgcatgggtggtaaataatcatgagagtgtggcatggtcc

SEQ ID NO: 806723 - DNA, 75 bp, synthetic construct
  source 1..75: mol_type = other DNA
gtattaaattccctgttttcacagaagtttataaaagcgtgttaattaggcatgacttagttcatcgagcaggta

SEQ ID NO: 806724 - DNA, 75 bp, synthetic construct
  source 1..75: mol_type = other DNA
atgatcgacaggaaacctcatgtacatatagtaataccaaaaaaaaatttactttcaggtaatgtatttaatctt

SEQ ID NO: 806725 - DNA, 75 bp, synthetic construct
  source 1..75: mol_type = other DNA
tgatatcaccggcgacagcgcaacggtggacaacaaaggcggcatgaccgtcaccgatcctgactccatcggtat

SEQ ID NO: 806726 - DNA, 75 bp, synthetic construct
  source 1..75: mol_type = other DNA
tcgtcgacggcaaaggcgccaccggaactgaaatcgcgggtaataacgcggtggtgaatcaggacggcgagctgg

SEQ ID NO: 806727 - DNA, 75 bp, synthetic construct
  source 1..75: mol_type = other DNA
accggcgacagcgcaacggtggacaacaaaggcggcatgactgtcaccgatccggattccatcggtattcagatc

SEQ ID NO: 806728 - DNA, 75 bp, synthetic construct
  source 1..75: mol_type = other DNA
atgaaaaaggtttccgcgccgatgacattcagattcgtgatgctgacacgttgctggaagtcactgaaaacagta

SEQ ID NO: 806729 - DNA, 75 bp, synthetic construct
  source 1..75: mol_type = other DNA
caggaagactgcgagaagctaaacaaacgtaaagtagatctggttttcgctccctcggtaaaagagatctatccg

SEQ ID NO: 806730 - DNA, 75 bp, synthetic construct
  source 1..75: mol_type = other DNA
gccggacatcgcctgcttcggtgaaaaggactttcagcaactggcgctgatccgcaaaatggttgccgatatggg

SEQ ID NO: 806731 - DNA, 75 bp, synthetic construct
  source 1..75: mol_type = other DNA
gcggatgcagcgagtgcctgtctggctgagtggcggaatagccctgctggtgatgttgaccttatttggttttta

SEQ ID NO: 806732 - DNA, 75 bp, synthetic construct
  source 1..75: mol_type = other DNA
ctcggtattgaaccgcaggacgcttacgactacgcagcgattggttgtatcgaaaccgccgtcggtggcaaatgg

SEQ ID NO: 806733 - DNA, 75 bp, synthetic construct
  source 1..75: mol_type = other DNA
ggaaattcaaattcatctggttctacatcaactgtgatgaaaaccggtgagtcatatctgactccgtggggtgat

SEQ ID NO: 806734 - DNA, 75 bp, synthetic construct
  source 1..75: mol_type = other DNA
ctcttggcttctggggaattgcaattatcacaggtattgtttcttcttacataggggatgatgagttgaacaagc

SEQ ID NO: 806735 - DNA, 75 bp, synthetic construct
  source 1..75: mol_type = other DNA
acctatttcatggaacgtctacggcactaccggcagttaagcctccagttgccaaaagggaacgatccggcatat

SEQ ID NO: 806736 - DNA, 75 bp, synthetic construct
  source 1..75: mol_type = other DNA
attttaccggaaacggagcaaaaaaccgccattcataccctgtatcaatcagtgtcatcctgtttaatagtcgtt

SEQ ID NO: 806737 - DNA, 75 bp, synthetic construct
  source 1..75: mol_type = other DNA
tctcggcggcgtgctgctcaaccagaaactgaatccagcaacgctggagaacgaatctgacaagcagaaactgat

SEQ ID NO: 806738 - DNA, 75 bp, synthetic construct
  source 1..75: mol_type = other DNA
gcgcgggctgctggctcactctgttctgatgtacgcccccgacagcgccctgccagtcggtcttatcgaacagca

SEQ ID NO: 806739 - DNA, 75 bp, synthetic construct
  source 1..75: mol_type = other DNA
tcggatgcgtcgggtaccggtctggctgagcgccgggattgccctgctggtgatgctgacgctgtttgcctttta

SEQ ID NO: 806740 - DNA, 75 bp, synthetic construct
  source 1..75: mol_type = other DNA
tatcggaaaaaagggcgacggaagtggctacgctgttgaagtccggtggtgtttctaccagtcgaatccgggttg

SEQ ID NO: 806741 - DNA, 75 bp, synthetic construct
  source 1..75: mol_type = other DNA
tacgggtgctgggcctgcggcagggaggtatcagtgaagaaacacaaaatgacagctgtaagaaaatactgacgc

SEQ ID NO: 806742 - DNA, 75 bp, synthetic construct
  source 1..75: mol_type = other DNA
ggcgtgatgatcgtcaataccagtcgcggtgcattgattgattctcaggcggcaattgaagcgctgaaaaatcag

SEQ ID NO: 806743 - DNA, 75 bp, synthetic construct
  source 1..75: mol_type = other DNA
caatggctgcgaagcggtatgtattttcgtaaacgatgacggcagccgcccggtgctggaagagctgaaaaagca

SEQ ID NO: 806744 - DNA, 75 bp, synthetic construct
  source 1..75: mol_type = other DNA
gacggcgagctggatgtgagcggcggcggtcacggtattgatatcaccggcgacagcgcgacggtggacaacaaa

SEQ ID NO: 806745 - DNA, 75 bp, synthetic construct
  source 1..75: mol_type = other DNA
gccgtcgttcaggtgcaacatatcttcacgcctgccgcgatcagtcacacgctggcgcttgccgcgacactggat

SEQ ID NO: 806746 - DNA, 75 bp, synthetic construct
  source 1..75: mol_type = other DNA
aattgaaaaaattgaagattatcagccgcaggcgttggcgattctgggcaaacaagcatatgaacagggattcag

SEQ ID NO: 806747 - DNA, 75 bp, synthetic construct
  source 1..75: mol_type = other DNA
agctacacgcaggtgggcgtaagctgattgaaaaaattgaagattatcagccgcaagcgttggcgattctgggca

SEQ ID NO: 806748 - DNA, 75 bp, synthetic construct
  source 1..75: mol_type = other DNA
ggaaccaaagccggggctctgcgggagcgcgcacgctggctgacatgctgacccaaaacggcgtcccgatgagcc

SEQ ID NO: 806749 - DNA, 75 bp, synthetic construct
  source 1..75: mol_type = other DNA
ctgtaccggagccagacagggtatggtgcggagatattacgtatatctgggcaggaaatcgctggtgctatctgg

SEQ ID NO: 806750 - DNA, 75 bp, synthetic construct
  source 1..75: mol_type = other DNA
ggtgaatggtggtggacagcctttcgccgtcgttcaggtgcaacatatcttcacgcctgccgcgatcagtcacac

SEQ ID NO: 806751 - DNA, 75 bp, synthetic construct
  source 1..75: mol_type = other DNA
tacagcccatgaacgcacaggaatatgaagatatccgggctgccggaagtgatgaacgccgtgagctgactcacg

SEQ ID NO: 806752 - DNA, 75 bp, synthetic construct
  source 1..75: mol_type = other DNA
gaatgccggtggacagccgttcgccgtcgttcaggtgcagcggcggtttgcaccggaagctgtcagccattcact

SEQ ID NO: 806753 - DNA, 75 bp, synthetic construct
  source 1..75: mol_type = other DNA
gcgtcactggatgaacagggatacagcgtcagtgacatcatccatatcctgatggcggaaggaggtcaggcatga

SEQ ID NO: 806754 - DNA, 75 bp, synthetic construct
  source 1..75: mol_type = other DNA
ctgaagccgcaggaggcgcagcatctgctggattatcgctgtggcgctaccagactggttgacagaccaacggtg

SEQ ID NO: 806755 - DNA, 75 bp, synthetic construct
  source 1..75: mol_type = other DNA
ttgaagccgcaggaggcacagcatctgctggattatcgttgtggcgtcaccaaactggttgacaggccaacggtg

SEQ ID NO: 806756 - DNA, 75 bp, synthetic construct
  source 1..75: mol_type = other DNA
tccagaccatgaacgcacaggaatatgaagatatccgggctgccggaagtgatgaacgccgtgagctgactcacg

SEQ ID NO: 806757 - DNA, 75 bp, synthetic construct
  source 1..75: mol_type = other DNA
atgacccttggcgaaacgctcttccttaatgccaaactgccaaccggtaaagaatttatgccgcgtgaaatcagt

SEQ ID NO: 806758 - DNA, 75 bp, synthetic construct
  source 1..75: mol_type = other DNA
atgtgagcggcggtggtcacggtattgatatcaccggcgacagcgcaacggtggataacaaaggcggcatgaccg

SEQ ID NO: 806759 - DNA, 75 bp, synthetic construct
  source 1..75: mol_type = other DNA
accatgaccgtcaccgatccggagtccatgggtatccagatcgacggtgacaaggccatcgtcaataacgaaggc

SEQ ID NO: 806760 - DNA, 75 bp, synthetic construct
  source 1..75: mol_type = other DNA
ggcgatctggatgtcagcggcggcggtcacggtattgatatcaccggcgaaagcgcaacagaggctaccacgtgc

SEQ ID NO: 806761 - DNA, 75 bp, synthetic construct
  source 1..75: mol_type = other DNA
aaaacagaaaaaacgttaactattcgcgattcagttttcagttataccgagaatgctgacgggactatttctctg

SEQ ID NO: 806762 - DNA, 75 bp, synthetic construct
  source 1..75: mol_type = other DNA
gatcgacggtgacaaggccatcgtcaataacgaaggcgagagcaccatcaccaacggtggcaccggcacccagat

SEQ ID NO: 806763 - DNA, 75 bp, synthetic construct
  source 1..75: mol_type = other DNA
tcgtcgacggcaaaggcgccaccggaactgaaatcgcgggtaacaacgcggtggtgaaccaggacggcgagctgg

SEQ ID NO: 806764 - DNA, 75 bp, synthetic construct
  source 1..75: mol_type = other DNA
gattacactgacgcggtgatggcaacagataccagcaccgcgccggatgtcatctggcctgaactgccggaggcg

SEQ ID NO: 806765 - DNA, 75 bp, synthetic construct
  source 1..75: mol_type = other DNA
atgcgccgggcagagatatcggccccggcgatgtttggcaggctgccggaccagcgggactatgtgcgctggcgg

SEQ ID NO: 806766 - DNA, 75 bp, synthetic construct
  source 1..75: mol_type = other DNA
gcgcagcaggagcagggctggttctggcagcagaacagcgaggggcggtatgtggatgcgctacggctggcgggg

SEQ ID NO: 806767 - DNA, 75 bp, synthetic construct
  source 1..75: mol_type = other DNA
cccggattctggatgtttttctggattcaaatgatgcttttatcacccttagtgatattggcatcaatacatcac

SEQ ID NO: 806768 - DNA, 75 bp, synthetic construct
  source 1..75: mol_type = other DNA
ctggattacattgacgcggtgactgcaacagatatcagcaccgcgccggatgtcatctggcctgaactactggag

SEQ ID NO: 806769 - DNA, 75 bp, synthetic construct
  source 1..75: mol_type = other DNA
gaggcacagcatagcgccgcagtagacgcggcagaagcacaacgtcagtcactgattgatactgcaatggcttcc

SEQ ID NO: 806770 - DNA, 75 bp, synthetic construct
  source 1..75: mol_type = other DNA
acgccatcgcagtacagcagtggtgggaaatcaaagcttggcaggataacgaaagctggcgattcgtatctgcga

SEQ ID NO: 806771 - DNA, 75 bp, synthetic construct
  source 1..75: mol_type = other DNA
tcgccgcgttaatggataaaggatttgtttgtcgtcttgatgcattcagtgatgtctatgtagtgatgttgccgg

SEQ ID NO: 806772 - DNA, 75 bp, synthetic construct
  source 1..75: mol_type = other DNA
tggttgtcgaattgggtttagaggaaactgcggcaagaagacttctcgatgtttgctatgcacgtagcgatgcat

SEQ ID NO: 806773 - DNA, 75 bp, synthetic construct
  source 1..75: mol_type = other DNA
agaatcgatcaataaagatatcgaggagtgcaatgccatcattgagcagtttatcgactacctgcgcaccggaca

SEQ ID NO: 806774 - DNA, 75 bp, synthetic construct
  source 1..75: mol_type = other DNA
cggcccgacggaagtacgcgttgaggtcaacaaaagttcgcctgtcgtctggctgaaaacctggctgtcgcccaa

SEQ ID NO: 806775 - DNA, 75 bp, synthetic construct
  source 1..75: mol_type = other DNA
aagagaaaacagcaacatataatcgtcttcgagggttgatatcagaattcggcgtcattgccccacaaagtacag

SEQ ID NO: 806776 - DNA, 75 bp, synthetic construct
  source 1..75: mol_type = other DNA
cgggtacataatgaagttgagttgttgtacaagggggatgcttctggtcagaaaagggaggttgtgaagcaggac

SEQ ID NO: 806777 - DNA, 75 bp, synthetic construct
  source 1..75: mol_type = other DNA
taaaggccacagagccttagattatctttcttatatcgctaagatctttgctttaattaaacttcttagcggtga

SEQ ID NO: 806778 - DNA, 75 bp, synthetic construct
  source 1..75: mol_type = other DNA
acagggagtatgcggaggtgctgatcgctattacggagtatcaccgtgccctgttatccaggcttatggcagatt

SEQ ID NO: 806779 - DNA, 75 bp, synthetic construct
  source 1..75: mol_type = other DNA
cgagtgggcgcaagaggttatgttggcagatgcagagctaccgttcgaaccggaattcattgatgaactggccaa

SEQ ID NO: 806780 - DNA, 75 bp, synthetic construct
  source 1..75: mol_type = other DNA
gttcaataacgagcgtccttatatcgtttctaagctggactttgcttatcagttctgctgcgacatgggctatgc

SEQ ID NO: 806781 - DNA, 75 bp, synthetic construct
  source 1..75: mol_type = other DNA
ttgatgaatgcgaaggaagaaatcctcattaggcattataagcatatgttgggattgcatctttcactattaatt

SEQ ID NO: 806782 - DNA, 75 bp, synthetic construct
  source 1..75: mol_type = other DNA
gaccgttggtcgatctcgaacatgctgctttgcaggtcggtaaagggattattccgccgccgctgcgtgagtatg

SEQ ID NO: 806783 - DNA, 75 bp, synthetic construct
  source 1..75: mol_type = other DNA
catcgtccccgacagggttttatcgaagagaaaatagcaacatataatcgtcttcgagggttgatatcagagttc

SEQ ID NO: 806784 - DNA, 75 bp, synthetic construct
  source 1..75: mol_type = other DNA
gttgattcgtcttggcattgatgaacaaaccgcgtttgcgcgtaaacctgaccaccaactggcggcgttacagga

SEQ ID NO: 806785 - DNA, 75 bp, synthetic construct
  source 1..75: mol_type = other DNA
cacggcaagcctggtaaatgaactggcagcaagaatgccaacagaacacatttatctcgggcaatcgtccgggcg

SEQ ID NO: 806786 - DNA, 75 bp, synthetic construct
  source 1..75: mol_type = other DNA
tcacttttaatgctggtggagtgcgcccaccagcatttttttcgtccaatgaggagggcatttgagtattttcaa

SEQ ID NO: 806787 - DNA, 75 bp, synthetic construct
  source 1..75: mol_type = other DNA
gaaaatcgccgaatatgacagggtattatctcgtgtggccaaaacagatcatcgcagccagcagttaatggaact

SEQ ID NO: 806788 - DNA, 75 bp, synthetic construct
  source 1..75: mol_type = other DNA
acaccatcacagtacagcagtggcggaaaatcaaagcttggcagaataacgaaagcgggcgattcatatctgcga

SEQ ID NO: 806789 - DNA, 75 bp, synthetic construct
  source 1..75: mol_type = other DNA
gaaattcatcagggagatttctccccgctatttcgctatacattggcgattatgttgatggcgataggcggagcg

SEQ ID NO: 806790 - DNA, 75 bp, synthetic construct
  source 1..75: mol_type = other DNA
ggagatgccgatggaaatggcggatctcaacgcagtgctcggtgaggtgattgccgccgaaagtggctatgagcg

SEQ ID NO: 806791 - DNA, 75 bp, synthetic construct
  source 1..75: mol_type = other DNA
tggagcttggcaccagcgagcggggcgggctttccattcgcgcctggctgccagtgccggtaacgcgggcgcagg

SEQ ID NO: 806792 - DNA, 75 bp, synthetic construct
  source 1..75: mol_type = other DNA
tgatggttcaggtaaatcgactctcacagcaagcctggtaaatgaactggcaacaaaaatgccaacagaacacat

SEQ ID NO: 806793 - DNA, 75 bp, synthetic construct
  source 1..75: mol_type = other DNA
gagcggggcgggctttccattcgcgcctggctgcctgtgccggtaacgcgggcgcagggcacgacaaaagaaggg

SEQ ID NO: 806794 - DNA, 75 bp, synthetic construct
  source 1..75: mol_type = other DNA
tgcagcgtatcgtggataaccataacggcatgctggagcttggcaccagcgaacggggtgggctttccattcgcg

SEQ ID NO: 806795 - DNA, 75 bp, synthetic construct
  source 1..75: mol_type = other DNA
ctgatatagcggaattcaacattcctgacgggctggatgctgtcagagatgcgttgcgaagaaagcgtggcaaac

SEQ ID NO: 806796 - DNA, 75 bp, synthetic construct
  source 1..75: mol_type = other DNA
aagaatggaaaatcgtggcttagtcagacgtgaacatgacaccgctgataagcggcgacgctttgtctggctgac

SEQ ID NO: 806797 - DNA, 75 bp, synthetic construct
  source 1..75: mol_type = other DNA
atggcgttacgaaataaagcgttccatcagttacgacagctttttcagcagcacacggctcgctggcagcacgag

SEQ ID NO: 806798 - DNA, 75 bp, synthetic construct
  source 1..75: mol_type = other DNA
tttaaaccaccagtttcatgttatggatttagtaagaagcgagacacgaagtcgtaatatagtcacagtcatggt

SEQ ID NO: 806799 - DNA, 75 bp, synthetic construct
  source 1..75: mol_type = other DNA
ccattgtctatcgggctactttgcccagtattgaagcagttgaagggcacctgcaggaattgccctactctgaac

SEQ ID NO: 806800 - DNA, 75 bp, synthetic construct
  source 1..75: mol_type = other DNA
catctgcaggagccgcggccccgcatcccctcagcacggggagcgtggagcaatgtatacgaagacgtaacatgg

SEQ ID NO: 806801 - DNA, 75 bp, synthetic construct
  source 1..75: mol_type = other DNA
ccgctgctattcgtaacgcggtgaagatggctaccggtgttgcaatcaatacactgccgctaacgccaaaacgat

SEQ ID NO: 806802 - DNA, 75 bp, synthetic construct
  source 1..75: mol_type = other DNA
atgttgttcttaaatgataaagagcaaatcatcaagtataaagatgaaatgctaaagatcaatccacaaattacc

SEQ ID NO: 806803 - DNA, 75 bp, synthetic construct
  source 1..75: mol_type = other DNA
aaatcatcaagtataaagatgaaatgctgaaaattaatccacaaattaccgaaatggtagctaaatacgctgggt

SEQ ID NO: 806804 - DNA, 75 bp, synthetic construct
  source 1..75: mol_type = other DNA
atgccacttctcaatgaccagctcgatttcagtgaccatccgcttatgccaccgccctctgcgcaactgtttgca

SEQ ID NO: 806805 - DNA, 75 bp, synthetic construct
  source 1..75: mol_type = other DNA
gcatagatgaaaaaacacaatcaatagctattctcagacaactaggaatagaacatctggccttttgttatctgg

SEQ ID NO: 806806 - DNA, 75 bp, synthetic construct
  source 1..75: mol_type = other DNA
taaacgcgggttatcagaaaaaaaacgtaatatgtgatcttagtttatctgaacttcctcgcggaaaaataacca

SEQ ID NO: 806807 - DNA, 75 bp, synthetic construct
  source 1..75: mol_type = other DNA
gaatctattctggtttccctacgcgcgtcaaagatgggcgggaaacatgaaaaaacacaatcaatagctattctc

SEQ ID NO: 806808 - DNA, 75 bp, synthetic construct
  source 1..75: mol_type = other DNA
ggcgctgaccttttccaattcagcaaggtagttaatttgatgtgtgaccttctttcttacaaagaagataaaagc

SEQ ID NO: 806809 - DNA, 75 bp, synthetic construct
  source 1..75: mol_type = other DNA
gtcgaaccagcggcatttatgttgtccgcattagcgttccccaacgttttcgtcgatacgcaggacagtgtgaga

SEQ ID NO: 806810 - DNA, 75 bp, synthetic construct
  source 1..75: mol_type = other DNA
gcgagcgcgtaaccgccgtgttgaaatcagtctggtaccgcaggccgatgcctgtcgtctgccggacatcacccg

SEQ ID NO: 806811 - DNA, 75 bp, synthetic construct
  source 1..75: mol_type = other DNA
atggctggtgaatgccctggtggatattaaggcaaaagcaggctggctgattgtggtcagtggccacacggacaa

SEQ ID NO: 806812 - DNA, 75 bp, synthetic construct
  source 1..75: mol_type = other DNA
atggttcaatgaatcgctgcttgcagggcgattgaaattagagagaaacagaagcaaatccttccattctttccg

SEQ ID NO: 806813 - DNA, 75 bp, synthetic construct
  source 1..75: mol_type = other DNA
cgggtgcaaaacgagaaaaacagtctgatgatgaaaaggatcaacctaaagaagtcatcattctcaatagcgcgt

SEQ ID NO: 806814 - DNA, 75 bp, synthetic construct
  source 1..75: mol_type = other DNA
agattcaacattcctgatgggctggatgctgtaagtgaaccgccccggaaatcctggagactaaactccctgaga

SEQ ID NO: 806815 - DNA, 75 bp, synthetic construct
  source 1..75: mol_type = other DNA
tcaatatcgacatcgagacctgcagcggctgcggcggcgccatgaaagtcatcgcctgcattgaagaccctatag

SEQ ID NO: 806816 - DNA, 75 bp, synthetic construct
  source 1..75: mol_type = other DNA
gctgtcggttcacaggcggggcgaaaggtgttcactttgcaaactctgccgaccagtggtgatccgttcggtgac

SEQ ID NO: 806817 - DNA, 75 bp, synthetic construct
  source 1..75: mol_type = other DNA
tacggcgttgcatggcaaacatttgctgtgggcggtgacgactggcggtggggaaagtcattttgagattggtac

SEQ ID NO: 806818 - DNA, 75 bp, synthetic construct
  source 1..75: mol_type = other DNA
ccgaagatccggtacaacaaaacctgatggaaatggtactggcagaagggatcgccgtacgtttctggacgctgc

SEQ ID NO: 806819 - DNA, 75 bp, synthetic construct
  source 1..75: mol_type = other DNA
gaagcacaaagccgaaaccagcgggaccagggcgttacccgaaagccgggcgccaccggctgagctgctcctggg

SEQ ID NO: 806820 - DNA, 75 bp, synthetic construct
  source 1..75: mol_type = other DNA
atgttcacttccacatgctgtttctcgacggtgtgtatgtcgagcaatcccacggctcagcgcgtttccgctggg

SEQ ID NO: 806821 - DNA, 75 bp, synthetic construct
  source 1..75: mol_type = other DNA
aatcgcttccgtttccgtggtgcactttcgactgccagcatcgatgattttacccgttattctaaagatcttgca

SEQ ID NO: 806822 - DNA, 75 bp, synthetic construct
  source 1..75: mol_type = other DNA
tggcattgcctgagaatttccgcattcatgatctggaaaaatttaatttaaatcgcttccgtttccgtggtgcac

SEQ ID NO: 806823 - DNA, 75 bp, synthetic construct
  source 1..75: mol_type = other DNA
tgacgggattgccggggcgtcgggttcttgatgaatcctttgatcatcagttacgcaactgtagattcaatctgt

SEQ ID NO: 806824 - DNA, 75 bp, synthetic construct
  source 1..75: mol_type = other DNA
tatgacgcactctcgacggattcggcacggaatgcttggacccaatcaattaatgcgataaaggagaatttggag

SEQ ID NO: 806825 - DNA, 75 bp, synthetic construct
  source 1..75: mol_type = other DNA
tattaaccaccccggtaaggggagatgtgtttgactgtttactgctgcagtttctgtccggtcaggggcgacagt

SEQ ID NO: 806826 - DNA, 75 bp, synthetic construct
  source 1..75: mol_type = other DNA
ggaagaaatggctaacgaatttcgtgatctgcttgttgagaaattcaaagacagcaaagtagaaacctttattgg

SEQ ID NO: 806827 - DNA, 75 bp, synthetic construct
  source 1..75: mol_type = other DNA
ccattcaggcaacaaaagcggctgcggcggtccgtaaaatcacgattgaagcaaaccagacctctgattttgaag

SEQ ID NO: 806828 - DNA, 75 bp, synthetic construct
  source 1..75: mol_type = other DNA
agactggtgcatgtgtggagcgcgccgtttgagtactttactcgtcggtatcagattgtgcgttcgcggcgataa

SEQ ID NO: 806829 - DNA, 75 bp, synthetic construct
  source 1..75: mol_type = other DNA
tacccgttattctaaagatcttgcagatgaaggcacccgctgctttatcgatgctgataatatgcgtgccgtcag

SEQ ID NO: 806830 - DNA, 75 bp, synthetic construct
  source 1..75: mol_type = other DNA
aagagcggaccgggcaatgtatgagggtaagcaaaccggaagaaatcgctgcatgtttattgacgaacaaaatgt

SEQ ID NO: 806831 - DNA, 75 bp, synthetic construct
  source 1..75: mol_type = other DNA
aaatgatgatgaagcgtgtcgcgccggggttcgtatttgtcagttagtcgataaccatgcgatagcgcatcctgg

SEQ ID NO: 806832 - DNA, 75 bp, synthetic construct
  source 1..75: mol_type = other DNA
tgtgcttaatctgggtactattgatgaaccaggtcacgcagataacaccgccactctcaaactgaaaaagacagc

SEQ ID NO: 806833 - DNA, 75 bp, synthetic construct
  source 1..75: mol_type = other DNA
ccgggaaaacaaaactgatgtttgactcaaaggagcaggcactggaagttaaagaagggtacaaatttttaacgt

SEQ ID NO: 806834 - DNA, 75 bp, synthetic construct
  source 1..75: mol_type = other DNA
gggagacagagctgcattatcacagttacgtggctgggattatcgtgatcgtcgcaaagacaagcgacgaacaac

SEQ ID NO: 806835 - DNA, 75 bp, synthetic construct
  source 1..75: mol_type = other DNA
aacccgacttacgttacggagaacggttacgggaaattcatgctgcctgccgtcggcgcaaggcgtatatccgtg

SEQ ID NO: 806836 - DNA, 75 bp, synthetic construct
  source 1..75: mol_type = other DNA
cctgtattgtttgatcgtgagccaggaatgggttttgaaccggaaggctcatatcaacagtttaatgatgtattt

SEQ ID NO: 806837 - DNA, 75 bp, synthetic construct
  source 1..75: mol_type = other DNA
atgtcagaaataccaattactatgaccagtgcgggtgcgcagcctacgccacccaatgatttgctcgcgaatctt

SEQ ID NO: 806838 - DNA, 75 bp, synthetic construct
  source 1..75: mol_type = other DNA
tagttattatatcttatatagctggacattttatttctatcacgtcagcattttttatcgaaaaatacatgaata

SEQ ID NO: 806839 - DNA, 75 bp, synthetic construct
  source 1..75: mol_type = other DNA
catttgcattacctgtgcgtgttaaagcagttaaattgtcatcaaatactgcaactgatataggtcaaggcaatt

SEQ ID NO: 806840 - DNA, 75 bp, synthetic construct
  source 1..75: mol_type = other DNA
caggtgcaggatacccttaattactacaagaatcaggccgggagtctcgatgcgtacctgaaacgatatcaggat

SEQ ID NO: 806841 - DNA, 75 bp, synthetic construct
  source 1..75: mol_type = other DNA
cacgtaaaaaggcgaacgacgccgtgtttaaggctctcgatcaacagcaggaaacactgcaaagcgatgctgata

SEQ ID NO: 806842 - DNA, 75 bp, synthetic construct
  source 1..75: mol_type = other DNA
gctgtggctaaacagatccagcagtaccagacgcagctgcagcagtatgaaaacatgctgaaaaatacagtcgca

SEQ ID NO: 806843 - DNA, 75 bp, synthetic construct
  source 1..75: mol_type = other DNA
taattcaacaattaataagcttctgcaggctcaggacacattgaattactacaagaaccaggcgggaagcctgga

SEQ ID NO: 806844 - DNA, 75 bp, synthetic construct
  source 1..75: mol_type = other DNA
gcacaggcccaagccgataaagaggcccagcaagcggctgcatcagaaactttcagggctgggacttataccaaa

SEQ ID NO: 806845 - DNA, 75 bp, synthetic construct
  source 1..75: mol_type = other DNA
cacaggctgaggctgataaagaagcccaacaaatagtcgctgatgaaaaagcgttagctggcgagaacacaccaa

SEQ ID NO: 806846 - DNA, 75 bp, synthetic construct
  source 1..75: mol_type = other DNA
caaaagcggctgcggtagtccgtaaaatcacgattgaagcaaaccagaccgctgattttgaagataatgacttca

SEQ ID NO: 806847 - DNA, 75 bp, synthetic construct
  source 1..75: mol_type = other DNA
atctgcacgctgatatttaatctgcaaacctccggtattgcgctgaaattaaaactggacagcagcacggtaatt

SEQ ID NO: 806848 - DNA, 75 bp, synthetic construct
  source 1..75: mol_type = other DNA
atgaatgctattttgagtgttcagggtgcttctgcgcccgtcaaaaagaagtcgtttttttctaaattcactcgt

SEQ ID NO: 806849 - DNA, 75 bp, synthetic construct
  source 1..75: mol_type = other DNA
acagcgtgaagctgattgccgaaaccgcgcctgacgctaataacctgttacgtcagtatgttgcttttgccagcc

SEQ ID NO: 806850 - DNA, 75 bp, synthetic construct
  source 1..75: mol_type = other DNA
aaattatcctgatgcgcgttttaccctgataactccggcataccaaagcccgctcggtgtggcgctctctctggc

SEQ ID NO: 806851 - DNA, 75 bp, synthetic construct
  source 1..75: mol_type = other DNA
cgctgtgcgtggctggtggtgccggtggagcagattgcgcaattccgccaacaggcatcgctggagccatgtgct

SEQ ID NO: 806852 - DNA, 75 bp, synthetic construct
  source 1..75: mol_type = other DNA
aacaattgaagatttaaagaaacgacaccctgatattattctcattacagaatctgaagcattagcattgctatc

SEQ ID NO: 806853 - DNA, 75 bp, synthetic construct
  source 1..75: mol_type = other DNA
cagtaggtatgtctgttggtaagcgtaaagccaatgccgtctgtaacacctgctccttgcagactaaattagagc

SEQ ID NO: 806854 - DNA, 75 bp, synthetic construct
  source 1..75: mol_type = other DNA
gttaaatgggtcgttctggctgaagttctggtcggtgcggtcatgtacatgatgaccaaaaacgtcaagttcctg

SEQ ID NO: 806855 - DNA, 75 bp, synthetic construct
  source 1..75: mol_type = other DNA
gaacagggcattgatcgtgacctggtgctcgctgccacccagctaagcgaagccgatctggcagcgaataaccac

SEQ ID NO: 806856 - DNA, 75 bp, synthetic construct
  source 1..75: mol_type = other DNA
agtgcggtgaaatgggttattctggctgaggttctggtcggtgcagtcatgtatatgatgactaaaaacgtcaag

SEQ ID NO: 806857 - DNA, 75 bp, synthetic construct
  source 1..75: mol_type = other DNA
atgcttcgcctggctcgcgctgtgatcccggctgctgttctgatgatgctcttcccgcaactggcgatggtcgct

SEQ ID NO: 806858 - DNA, 75 bp, synthetic construct
  source 1..75: mol_type = other DNA
gaacctcaagttcctggcgggctttgcgatcctgtccgtattcgtcacggtaggtatgtctgtcgcaggatactg

SEQ ID NO: 806859 - DNA, 75 bp, synthetic construct
  source 1..75: mol_type = other DNA
attatcactggtgatcgccctgtactggttctgcgcattattcagctggaagcagtgcaggaagaaatggctaac

SEQ ID NO: 806860 - DNA, 75 bp, synthetic construct
  source 1..75: mol_type = other DNA
atgaataatgatgtgtttcagatcagccccgacgaagtaacgtcggagctgatttctgcaaaggaaagattttta

SEQ ID NO: 806861 - DNA, 75 bp, synthetic construct
  source 1..75: mol_type = other DNA
cctacatgaagttcagcagcatgcttcaaaatattttaataccgctgttaagttagttcaaaaagtagatttatg

SEQ ID NO: 806862 - DNA, 75 bp, synthetic construct
  source 1..75: mol_type = other DNA
atgctgataatatgcgtgccgtcagtgtacttaacctgggtactattgatgaaccaggtcacgcagataacactg

SEQ ID NO: 806863 - DNA, 75 bp, synthetic construct
  source 1..75: mol_type = other DNA
gcgttccgtttgaaggtctgaaagaacgtccatttaaattacgcctcagcattatcactggcgatcgtcctgtac

SEQ ID NO: 806864 - DNA, 75 bp, synthetic construct
  source 1..75: mol_type = other DNA
acctgggtactattgatgaaccaggtcacgcagataacaccgccactctcaaactgaaaaagacagcaccgttct

SEQ ID NO: 806865 - DNA, 75 bp, synthetic construct
  source 1..75: mol_type = other DNA
ttgtgggctttgatgctaatggtgacgccattcaggcaacaaaagcggctgcggcagtccgtaaaatcacgattg

SEQ ID NO: 806866 - DNA, 75 bp, synthetic construct
  source 1..75: mol_type = other DNA
ggatgttaaccagctgcatgctcgtatcactcccggcaatgattaacgccggaggcgtacaaatgggattcaggg

SEQ ID NO: 806867 - DNA, 75 bp, synthetic construct
  source 1..75: mol_type = other DNA
gaagatggcatttcgtggttcggaattcaaagtatctgccgttggtggtttagcagcattgattgtttctttcat

SEQ ID NO: 806868 - DNA, 75 bp, synthetic construct
  source 1..75: mol_type = other DNA
cgcgcctgacgctaataacctgttacgtcagtatgttgcttttgccagccaacgtgcagccagccatctgaatga

SEQ ID NO: 806869 - DNA, 75 bp, synthetic construct
  source 1..75: mol_type = other DNA
gcatttgaatttaaatgcgttccgtttgaaggcctgaaagaacgtccgtttaaattacgcctcagcattatcact

SEQ ID NO: 806870 - DNA, 75 bp, synthetic construct
  source 1..75: mol_type = other DNA
gattttctctttatatttcatgagtgcggccgttggaatctcgccattcattgcaaataatataaaggtcaatgg

SEQ ID NO: 806871 - DNA, 75 bp, synthetic construct
  source 1..75: mol_type = other DNA
gccagtctggtcatgatgctttctggcgtattaatggtactggtttcgccgctggtggcctggatgatgttctga

SEQ ID NO: 806872 - DNA, 75 bp, synthetic construct
  source 1..75: mol_type = other DNA
tgggcggcggcatacttggcaccgtagagatgtagaggcatggttagataaacaacgagaacaggccaatcccca

SEQ ID NO: 806873 - DNA, 75 bp, synthetic construct
  source 1..75: mol_type = other DNA
gcaatgtttttatccagattgtttcttttaatatttccaaattaaagtatgtattctcacccacaatggaagatc

SEQ ID NO: 806874 - DNA, 75 bp, synthetic construct
  source 1..75: mol_type = other DNA
atgaaagtacttctgactggctcaactggcatggttggtaagaatatattagagcatgatagtgcaagtaaatat

SEQ ID NO: 806875 - DNA, 75 bp, synthetic construct
  source 1..75: mol_type = other DNA
atcatagtcactcgtgattcaacctccagcattgatcggttgctcggtgaacatcctcacgtgatcgctttgttt

SEQ ID NO: 806876 - DNA, 75 bp, synthetic construct
  source 1..75: mol_type = other DNA
gtctcttgccgcaacgctggatgcggaaggctatcgtgtcggggacatcatccacatcctgatggcagaagtagg

SEQ ID NO: 806877 - DNA, 75 bp, synthetic construct
  source 1..75: mol_type = other DNA
gccagcccacgaacgtttccacctggcattatgttcgccgggagacgtctctcagctctggatgctggttctggt

SEQ ID NO: 806878 - DNA, 75 bp, synthetic construct
  source 1..75: mol_type = other DNA
tactttgcattcaggtgaaagaatttacgttgggagctgtgctggttctttgctttagtatcggattggcaatca

SEQ ID NO: 806879 - DNA, 75 bp, synthetic construct
  source 1..75: mol_type = other DNA
tcaggggaacggtcacacaagcagtattgttaggtcttgcggcgacaatttctcatacctctattgtctggctca

SEQ ID NO: 806880 - DNA, 75 bp, synthetic construct
  source 1..75: mol_type = other DNA
ctcgcccggcgtgcgccgtatttctccagcgccctgattgccattgttggtctgtatatgggctatcacggctgg

SEQ ID NO: 806881 - DNA, 75 bp, synthetic construct
  source 1..75: mol_type = other DNA
atggacagattcccacgttctgattcaatcgtacaaccccgggctggcttgcaaacttatatggcgcaagtctat

SEQ ID NO: 806882 - DNA, 75 bp, synthetic construct
  source 1..75: mol_type = other DNA
gggtggctgttttttttgatcgttttcacaaaaatgaaaatccacagggttgacagggaaaacgcagcggcgtaa

SEQ ID NO: 806883 - DNA, 75 bp, synthetic construct
  source 1..75: mol_type = other DNA
atgtttgtgctggtttttgtggcatcgggcgggaatagcacgtggtgtgggtggctgttttttttgatcgttttc

SEQ ID NO: 806884 - DNA, 75 bp, synthetic construct
  source 1..75: mol_type = other DNA
cagacagctccttcctggtattgctgggaattttcattgccatgctgtacccggcaggcgttgttcgccttttca

SEQ ID NO: 806885 - DNA, 75 bp, synthetic construct
  source 1..75: mol_type = other DNA
atgaaaactgaactgaccctgaatgtattacagaccatgaacacacaggaatatgaagatatccgggctgccgga

SEQ ID NO: 806886 - DNA, 75 bp, synthetic construct
  source 1..75: mol_type = other DNA
actgaactgaccctgaatgccctgcagtccatgaacgcacaggaatatgaagatatccgtgctgcgggaagcgat

SEQ ID NO: 806887 - DNA, 75 bp, synthetic construct
  source 1..75: mol_type = other DNA
aggtcgatcttgaccattttaaagcgattaatgaccgctttggtcatcaggcggcgaccgtgttctttctcatgc

SEQ ID NO: 806888 - DNA, 75 bp, synthetic construct
  source 1..75: mol_type = other DNA
aaactgaactgaccctgaatgtattacagaccatgaacgcacaggaatatgaagatatccgggctgccggaagtg

SEQ ID NO: 806889 - DNA, 75 bp, synthetic construct
  source 1..75: mol_type = other DNA
tattacagaccatgaacgcacaggaatatgaagatatccgggctgccggaagtgatgaacgccgtgagctgactc

SEQ ID NO: 806890 - DNA, 75 bp, synthetic construct
  source 1..75: mol_type = other DNA
gaatggtggtggacagcctttcgccgtcgttcaggtgcaacatatcttcacgcctgccgcgatcagtcacacgct

SEQ ID NO: 806891 - DNA, 75 bp, synthetic construct
  source 1..75: mol_type = other DNA
cgataagcatttgcagtataacgtcgacaaactgatctttttgcgtaatggcatgcgcgaagctctcgtggcgcc

SEQ ID NO: 806892 - DNA, 75 bp, synthetic construct
  source 1..75: mol_type = other DNA
ttctttgatgtattcgccatgcctgcggatgccaaaaataaagacgaagcctatcagttcctgaattacctgctg

SEQ ID NO: 806893 - DNA, 75 bp, synthetic construct
  source 1..75: mol_type = other DNA
aaatctggaaaaactgaaaagctgcggtgtctctttcctcgatgcgccagaagaagtttttgctaccgtgctgaa

SEQ ID NO: 806894 - DNA, 75 bp, synthetic construct
  source 1..75: mol_type = other DNA
tcagcaacatgtatgttctgcaaagttcgttgcagtggcaggcgtggcacgacaccttaacccgcttatataatc

SEQ ID NO: 806895 - DNA, 75 bp, synthetic construct
  source 1..75: mol_type = other DNA
cgcctgaagttaaatgaaaaagagatgctgatcgccaagagtacgacgatacgcatcagtgcctcgctgggggta

SEQ ID NO: 806896 - DNA, 75 bp, synthetic construct
  source 1..75: mol_type = other DNA
tcagcgaggggaatctcctgtctcgcgaaaatgaaatcctcgacaatgaaattaccgctgcactggaagttggtt

SEQ ID NO: 806897 - DNA, 75 bp, synthetic construct
  source 1..75: mol_type = other DNA
ccatcgcggccatgtgcatgattatgatgtggaattccgtgaacatgaacacgaccacgatcattcctcgctgga

SEQ ID NO: 806898 - DNA, 75 bp, synthetic construct
  source 1..75: mol_type = other DNA
gttcgattgccgacaaattgcaggctggcgaacgggatctcgatgaaattattgctattgccgggcaagaactga

SEQ ID NO: 806899 - DNA, 75 bp, synthetic construct
  source 1..75: mol_type = other DNA
ctttgatattgagattgtcggagtgccgattatgcgcgcgaaagacggtctggcgctcagttcccgtaacggcta

SEQ ID NO: 806900 - DNA, 75 bp, synthetic construct
  source 1..75: mol_type = other DNA
ttgctggaaatctctgaaaacagcaaacgagcggtgattctggtagccgcctggcttggcgatgctcgcctgatc

SEQ ID NO: 806901 - DNA, 75 bp, synthetic construct
  source 1..75: mol_type = other DNA
gtttaattatctgctgcaatgcggcgatacctcccgtttcacccgttttattgaggagattgccgaacgttcacc

SEQ ID NO: 806902 - DNA, 75 bp, synthetic construct
  source 1..75: mol_type = other DNA
tattcgaagatgtgtatcgctttttgttgaatggttccgggcggctggagctgcgccgcgctgacgtggctgccg

SEQ ID NO: 806903 - DNA, 75 bp, synthetic construct
  source 1..75: mol_type = other DNA
atctgccagcatgggggcgatgctgagttgttatcggcaacaatataaaggaatcggcattatttatccgaaata

SEQ ID NO: 806904 - DNA, 75 bp, synthetic construct
  source 1..75: mol_type = other DNA
attaagtacaaatacggcggtatacgtggtgtttgaggcgttgccggggtttggtatccctaaaggatttgtggt

SEQ ID NO: 806905 - DNA, 75 bp, synthetic construct
  source 1..75: mol_type = other DNA
gttgctgattacatcaattctattgaagtcggtcacccgataaatctgctgcgaatccaggatatttttaccagc

SEQ ID NO: 806906 - DNA, 75 bp, synthetic construct
  source 1..75: mol_type = other DNA
tatcccgtcatcacaaaacgtcatggtgctaatcacctggaacacggtgtctgatgattatgttgatccggcggg

SEQ ID NO: 806907 - DNA, 75 bp, synthetic construct
  source 1..75: mol_type = other DNA
aacgtaaagtggatttagtttttgcgccttcggtaaaagagatctacccgaacggtacagaaacccacacctatg

SEQ ID NO: 806908 - DNA, 75 bp, synthetic construct
  source 1..75: mol_type = other DNA
ttgctggaaatcgctgaaaacagcaaacgagctgtgattctggtagccgcctggcttggcgatgctcgcctgatc

SEQ ID NO: 806909 - DNA, 75 bp, synthetic construct
  source 1..75: mol_type = other DNA
tgacggtattgaacgcgggatgaacactgaaggcgtgctgcctggtccgctcaatgtgccgcgtcgtgccgtagc

SEQ ID NO: 806910 - DNA, 75 bp, synthetic construct
  source 1..75: mol_type = other DNA
gcagcaaggtaaattggagggtctgcagaaaggtaaattagaaggtttgcaggaaggcatgcatgagcaagccat

SEQ ID NO: 806911 - DNA, 75 bp, synthetic construct
  source 1..75: mol_type = other DNA
cggacagatgggatacctactgcttcactatgctggtggattacgtgcctgctaatgaagacattggcgcagaac

SEQ ID NO: 806912 - DNA, 75 bp, synthetic construct
  source 1..75: mol_type = other DNA
gcgtatcgatagtgaccccaaaactgccgatcaggcatcaaaaatcccgtatatgcttaacgaagaagggaaggt

SEQ ID NO: 806913 - DNA, 75 bp, synthetic construct
  source 1..75: mol_type = other DNA
tttgaggtgactggcaagggtgtttggacaatattgataaagtcctgtcgccccgggaatgaggaggcgttggct

SEQ ID NO: 806914 - DNA, 75 bp, synthetic construct
  source 1..75: mol_type = other DNA
cattaccgttttgctgctctgcatccaggtgaaggaatttacgctcggtgccgcgctggtactgtgtttcagcat

SEQ ID NO: 806915 - DNA, 75 bp, synthetic construct
  source 1..75: mol_type = other DNA
tttatcaaaatgaagctggcggagtacggcgggcgcgataaccctatgtacatgattaaggtacgcggcctattc

SEQ ID NO: 806916 - DNA, 75 bp, synthetic construct
  source 1..75: mol_type = other DNA
atgatctggcagcctgagttcacagataaaacactctccaggaaacccggggcggttcatactggtaaaggtgta

SEQ ID NO: 806917 - DNA, 75 bp, synthetic construct
  source 1..75: mol_type = other DNA
tcaccactacaaaaggagagattaatgactattgctgaacggctacggcaggaaggacatcaaattggctggcag

SEQ ID NO: 806918 - DNA, 75 bp, synthetic construct
  source 1..75: mol_type = other DNA
tgcgcatgctggaacagggctttgatcgtgacctggtgctcgcggccacccagctaagcgaagccgatctggcag

SEQ ID NO: 806919 - DNA, 75 bp, synthetic construct
  source 1..75: mol_type = other DNA
tgcgaatgctggaacagggcatcgatcgtgacctggtgctcgcaacgacccaactcagcgaagccgatctggcag

SEQ ID NO: 806920 - DNA, 75 bp, synthetic construct
  source 1..75: mol_type = other DNA
atgaattgtggttcttatgtccgaaacaaaaacgaacttgaagacctgctggaaaaagcagcaaccgaaccggcg

SEQ ID NO: 806921 - DNA, 75 bp, synthetic construct
  source 1..75: mol_type = other DNA
atgtccgaaacaaaaaatgaacttgaagacctgctggaaaaagcagcaaccgaaccggcgcaccgcccggccttt

SEQ ID NO: 806922 - DNA, 75 bp, synthetic construct
  source 1..75: mol_type = other DNA
cgtgcgtgctgtggtacatcgctccgcgaatgctgctgagggcggctatcacgcagggcgtttatgtgggctgac

SEQ ID NO: 806923 - DNA, 75 bp, synthetic construct
  source 1..75: mol_type = other DNA
ctgcgcaacaagctgttccagattgattacctcaccacgctaagtaaccaggcagtggtttccctgctgtatcat

SEQ ID NO: 806924 - DNA, 75 bp, synthetic construct
  source 1..75: mol_type = other DNA
atactgcggcaacggtaatttttcattagctctggcgcgcaattttgatcgagtattagccaccgaaatcgctaa

SEQ ID NO: 806925 - DNA, 75 bp, synthetic construct
  source 1..75: mol_type = other DNA
gggaaagagatgatctaccgtcaggtggagaacagcttcactcagccgaacgcggcgatgaatattcagatgctg

SEQ ID NO: 806926 - DNA, 75 bp, synthetic construct
  source 1..75: mol_type = other DNA
gggcgtcagttctgacgcagggttgttggaggccgcagatattctgttatgtatgcggcattgcgaaacaagtaa

SEQ ID NO: 806927 - DNA, 75 bp, synthetic construct
  source 1..75: mol_type = other DNA
atggttgatttccacgagcgcaaacgcctcattcaagaagaaattgatcgctgtctcgctgaatctaaaattaga

SEQ ID NO: 806928 - DNA, 75 bp, synthetic construct
  source 1..75: mol_type = other DNA
agggaatcgacttaaagagttatcagtgcgaaaccatttttgtcgacccgccgcgcagcggtctggacagtgaaa

SEQ ID NO: 806929 - DNA, 75 bp, synthetic construct
  source 1..75: mol_type = other DNA
aatgacctgccttcatcaggtgatccggaagcagaacaaaaatttactgctctggaaaatacgctgaatgctgct

SEQ ID NO: 806930 - DNA, 75 bp, synthetic construct
  source 1..75: mol_type = other DNA
gaagcgtggattgatgaattccggcagcgtgtcgaaagcgcggccacgactgaggaaaccactgcattacgccaa

SEQ ID NO: 806931 - DNA, 75 bp, synthetic construct
  source 1..75: mol_type = other DNA
gggagaaccggtgtttctttccagcgtgattacgcgtaattctcctttatggacctcaaacccgaaacaacagct

SEQ ID NO: 806932 - DNA, 75 bp, synthetic construct
  source 1..75: mol_type = other DNA
aaaaagctggatgacgagtggcgccagcaggcagaagccctgcgcgatgcactgcgagcgcagaatctgaatgtg

SEQ ID NO: 806933 - DNA, 75 bp, synthetic construct
  source 1..75: mol_type = other DNA
aaacattaagccagacgcacaaagttgaacgtctggctctgtttgatcagttcccttatacacaccatatggagt

SEQ ID NO: 806934 - DNA, 75 bp, synthetic construct
  source 1..75: mol_type = other DNA
cagacattttctcaggtaatggcttccggcatggctacagtaccggaacacctccggggaaacccatcagactgt

SEQ ID NO: 806935 - DNA, 75 bp, synthetic construct
  source 1..75: mol_type = other DNA
cagcgtcgggcatttgttgatggatatcgcgatgtgctgcctgagccttatacgctgtctgatgttgttcgcgag

SEQ ID NO: 806936 - DNA, 75 bp, synthetic construct
  source 1..75: mol_type = other DNA
gtatctgtatgcggtcgatcgtaataacccgcgcgtatcgccgctgtataacccgattacgccatcgttcctgcg

SEQ ID NO: 806937 - DNA, 75 bp, synthetic construct
  source 1..75: mol_type = other DNA
atggttcacagcctcgatcagatcttatgggtgaagagtgagatccagaaagcaatcgttgagcttaagcgcgat

SEQ ID NO: 806938 - DNA, 75 bp, synthetic construct
  source 1..75: mol_type = other DNA
cgtaaactggtgaataaaaacttccgccagtcgttgtttgccgcgcaagatgcacaaagtatcctgcgctgctgg

SEQ ID NO: 806939 - DNA, 75 bp, synthetic construct
  source 1..75: mol_type = other DNA
aggaaattgaagcgttactcaccgcctttacgccggaagaagacgttcgcccactgctggcgctggagaatatct

SEQ ID NO: 806940 - DNA, 75 bp, synthetic construct
  source 1..75: mol_type = other DNA
cgcacctcgcataccctgattctggcccgcgcttcggcgatcccggtactgagcggcctgccgctggatgcgatt

SEQ ID NO: 806941 - DNA, 75 bp, synthetic construct
  source 1..75: mol_type = other DNA
ctttgttgatcagtcctttagtaataaagagcaggcgatccagttcctgtgcggtaacctcggtgttaacgggcg

SEQ ID NO: 806942 - DNA, 75 bp, synthetic construct
  source 1..75: mol_type = other DNA
gtttccagttgtttgagtatgacaccgataacattgaaaaaaataatttgatatcggcaccgggagggcatgttc

SEQ ID NO: 806943 - DNA, 75 bp, synthetic construct
  source 1..75: mol_type = other DNA
gaaactatttctggacaaggatggcttcagttactgctttgaaaatgaacagacactatcgctcgagcagcttca

SEQ ID NO: 806944 - DNA, 75 bp, synthetic construct
  source 1..75: mol_type = other DNA
ggcagcgcaattacgctgaatctgatatctggtctcgaccgctacgagcgcgttaccgtgacacgttcatccgat

SEQ ID NO: 806945 - DNA, 75 bp, synthetic construct
  source 1..75: mol_type = other DNA
ctctatacctcggtacatcaggttattgaactacctgcgcctgcgcagccgatttctgtcacgatggttgcgcct

SEQ ID NO: 806946 - DNA, 75 bp, synthetic construct
  source 1..75: mol_type = other DNA
aatattcaatatcaaaagcatgacaattttagtttccagttgtttgagtatgacaccgataatattgaaaaaaaa

SEQ ID NO: 806947 - DNA, 75 bp, synthetic construct
  source 1..75: mol_type = other DNA
agagggcgtcaccagaaagttaagatttgaggactggatgacgcataaagcattgactccgattttgctggatga

SEQ ID NO: 806948 - DNA, 75 bp, synthetic construct
  source 1..75: mol_type = other DNA
tgaatgctgcacgaccacatctgggtgaattatatgaggcgtataaaacgacactgacagatatgaaaccagaat

SEQ ID NO: 806949 - DNA, 75 bp, synthetic construct
  source 1..75: mol_type = other DNA
catgctgaagcgatatacacatctgcgggcgtatcagctggtcagcaagctcgatgcaaagcgtaaacagacctg

SEQ ID NO: 806950 - DNA, 75 bp, synthetic construct
  source 1..75: mol_type = other DNA
ttgagcagttgaaagttatccgcgagcgtctgaaaaatgcccgtctggatgacacttccagcgagttcaacaccc

SEQ ID NO: 806951 - DNA, 75 bp, synthetic construct
  source 1..75: mol_type = other DNA
ttttttcttatacctcttcgggattcaaaagtgcctggcgaacagcacttcaggaactgaagatagaaaacttgc

SEQ ID NO: 806952 - DNA, 75 bp, synthetic construct
  source 1..75: mol_type = other DNA
atcctgacgtcatcatgatcggagagatccgcgatggcgaaacggcagaaattgccattaaagccgcgcaaaccg

SEQ ID NO: 806953 - DNA, 75 bp, synthetic construct
  source 1..75: mol_type = other DNA
gccggaaatcgcccagcttggtttacgggcgctggcagcagcaacgctttccaacctgatgagtgcgactattgc

SEQ ID NO: 806954 - DNA, 75 bp, synthetic construct
  source 1..75: mol_type = other DNA
tgcgggttattgttggcgctgatgctttttctgttgccggaatatcaccgaaatattcatcaaccgctggttgaa

SEQ ID NO: 806955 - DNA, 75 bp, synthetic construct
  source 1..75: mol_type = other DNA
tgcaaaatattcgtggacgttaccatcaatggatgaacgagctgcctgagcgcgttagccataaaacacagcatc

SEQ ID NO: 806956 - DNA, 75 bp, synthetic construct
  source 1..75: mol_type = other DNA
accgtttcttgccgttatatctggtggcgttacacctctacgctgaactgggacgatccggtcagcctggtgtgc

SEQ ID NO: 806957 - DNA, 75 bp, synthetic construct
  source 1..75: mol_type = other DNA
taccgcccggctaaattagcgttaccccccgatcaggccgcagaaaaattaagattccgtcgtggcgccaattct

SEQ ID NO: 806958 - DNA, 75 bp, synthetic construct
  source 1..75: mol_type = other DNA
gtataccgaccaaagtgaccggtcaggcgctgacggtgaacgagaagggcgaagatgtggtgatccctggcctgt

SEQ ID NO: 806959 - DNA, 75 bp, synthetic construct
  source 1..75: mol_type = other DNA
atctgccagagtcggaatccatgacgcgacgtagcgtcaacatggaaccgaaactgcgcccggcattcccgccga

SEQ ID NO: 806960 - DNA, 75 bp, synthetic construct
  source 1..75: mol_type = other DNA
cgggcgtatcagctggtcagcaagctcgatgcaaagcgtaaacagacctgcaaaatcgccccctattttgttccc

SEQ ID NO: 806961 - DNA, 75 bp, synthetic construct
  source 1..75: mol_type = other DNA
gatccgcgatggcgaaacagcagagatcgctattaaagcggcgcaaaccggtcacctggtgttgtctaccctaca

SEQ ID NO: 806962 - DNA, 75 bp, synthetic construct
  source 1..75: mol_type = other DNA
tatctatctttggtggagtgcattcgtttctgaatggggttcgtgaaaaacgttacgaagcgtcatgcagacaat

SEQ ID NO: 806963 - DNA, 75 bp, synthetic construct
  source 1..75: mol_type = other DNA
aatatccagctcttatatatcactttttcattcccggtttggaggtaccctaccttgctacgaatatgataatct

SEQ ID NO: 806964 - DNA, 75 bp, synthetic construct
  source 1..75: mol_type = other DNA
ctttttcacctaaatttgaaaaaactcgccgaaatgaaatccagcgatttatcaggaatggcggagagattaagt

SEQ ID NO: 806965 - DNA, 75 bp, synthetic construct
  source 1..75: mol_type = other DNA
acataaaaacacttccgcttgccgcgtggaacgtgaaacaacaattattgagcaggatgccggggaaaactggat

SEQ ID NO: 806966 - DNA, 75 bp, synthetic construct
  source 1..75: mol_type = other DNA
accgctgaactggcaacggtcaaactgctgctgacaggggttgatgattctgcggtcgttgcagtgagtggcgat

SEQ ID NO: 806967 - DNA, 75 bp, synthetic construct
  source 1..75: mol_type = other DNA
atgtttgatctaaaaatcattttcatatccatctttggcggaatgcattcgtttctgaatggggttcgtgaaaaa

SEQ ID NO: 806968 - DNA, 75 bp, synthetic construct
  source 1..75: mol_type = other DNA
ttgaaaacggctgcctggcggtggagcaaggcttaaccacctttgaagagttaatccgcgtattgggaatgccgt

SEQ ID NO: 806969 - DNA, 75 bp, synthetic construct
  source 1..75: mol_type = other DNA
gtacgcaaactttgcccacattgtcgcctgcagcaaggggagtccatccatattccagacaatgtatggtcgtcg

SEQ ID NO: 806970 - DNA, 75 bp, synthetic construct
  source 1..75: mol_type = other DNA
gtgcgtttacagcaaatgggcgttgctcgctggatgctctcatcagcgcttacgctggtaatagcccagcgtctg

SEQ ID NO: 806971 - DNA, 75 bp, synthetic construct
  source 1..75: mol_type = other DNA
attaacacaagaaaataaaatagagcgagttttcaatccgggtaatgactccaacttattgatagtgttttatgt

SEQ ID NO: 806972 - DNA, 75 bp, synthetic construct
  source 1..75: mol_type = other DNA
agataacaaaataataaaagaatttcaaacatcattcaactcaacattttgggaagtctatctttatgcagtgtt

SEQ ID NO: 806973 - DNA, 75 bp, synthetic construct
  source 1..75: mol_type = other DNA
atcgagcgtaagaaagaagaagatcgcaaagctgcaatgttgagcatgtttgatccggcgttagtcaataagtta

SEQ ID NO: 806974 - DNA, 75 bp, synthetic construct
  source 1..75: mol_type = other DNA
gccgtgcgggtgaccttaagcggcactcagggggctctggattctctgcgcgtgcgggaagtcacccggcgtcgc

SEQ ID NO: 806975 - DNA, 75 bp, synthetic construct
  source 1..75: mol_type = other DNA
caccagaatattgccaccggcgggatctccgtttccggtctggatgcggcacggcagatgatgcgcctgcagaaa

SEQ ID NO: 806976 - DNA, 75 bp, synthetic construct
  source 1..75: mol_type = other DNA
cgtgtatgtggatggcgttgccgcatcgatggcatccgtgattgcgatggccggtgatacggtcattatgccgga

SEQ ID NO: 806977 - DNA, 75 bp, synthetic construct
  source 1..75: mol_type = other DNA
agctggggcgcgagtccacgccatccaataaaaatactccgcctcatatctatgccggaaacggaaacataacag

SEQ ID NO: 806978 - DNA, 75 bp, synthetic construct
  source 1..75: mol_type = other DNA
gccgtacgggtaaccttaagcggcaccgagggagcactggattccctgcgtgtgagggaagtcacccgccgtcgc

SEQ ID NO: 806979 - DNA, 75 bp, synthetic construct
  source 1..75: mol_type = other DNA
ccgagggagcgatggattccctgcgtgtacgggaagtcccccgccgacgcggcgtagggcaatatctgctggaag

SEQ ID NO: 806980 - DNA, 75 bp, synthetic construct
  source 1..75: mol_type = other DNA
gtgtttagcttgttcggcagtcgttacgacgggatcaaaatggcgtgtctggaagatgcatcatgtacaccggaa

SEQ ID NO: 806981 - DNA, 75 bp, synthetic construct
  source 1..75: mol_type = other DNA
aagggtattataatagatatacagaattgctagttactttacaatcaggtatgtgtatacctaaaaatgtttgga

SEQ ID NO: 806982 - DNA, 75 bp, synthetic construct
  source 1..75: mol_type = other DNA
ttgccaccctgcgggtaaaagagcttaacgcaaataacgccacattcctgatgcataccaacaacagtcaggctg

SEQ ID NO: 806983 - DNA, 75 bp, synthetic construct
  source 1..75: mol_type = other DNA
gtgtggatggcgtgacaacgaaagtgcgtattgacgctggtgttgcgccagttgatcaccgcggcctggtgaaat

SEQ ID NO: 806984 - DNA, 75 bp, synthetic construct
  source 1..75: mol_type = other DNA
ttaccgggcatgcgctgatgtttgaacaagaccgcctgcaagggcgcatcaaccaactgttcgagcgtattgaag

SEQ ID NO: 806985 - DNA, 75 bp, synthetic construct
  source 1..75: mol_type = other DNA
cgcagcgagtttaaataccgcccgacggatgattttgacgcccgctggccgctaattgccgcgcagttgcagtaa

SEQ ID NO: 806986 - DNA, 75 bp, synthetic construct
  source 1..75: mol_type = other DNA
tgaaaacacatggtgcgtccattaccgtttatgtcgacggtgtggcggcgtcaatggcgtcggtcattgcgatgg

SEQ ID NO: 806987 - DNA, 75 bp, synthetic construct
  source 1..75: mol_type = other DNA
caggcgctgaccgaaggcgaaagccgggcgcagcttgcctcgctgaaactgttacaggtcggcggcgcacgtctt

SEQ ID NO: 806988 - DNA, 75 bp, synthetic construct
  source 1..75: mol_type = other DNA
ccagattgaacccgcattgctgattgccgatcgccaacatgcgctgtttagcggggatgatttcctcaatacttt

SEQ ID NO: 806989 - DNA, 75 bp, synthetic construct
  source 1..75: mol_type = other DNA
cagctatccgaaattgccttgactgccttggagggaacaaactggcatcatcaattacacaggaagatgttctca

SEQ ID NO: 806990 - DNA, 75 bp, synthetic construct
  source 1..75: mol_type = other DNA
gccacaccgtcacctgccgatgaagtggcctattttcagctctccggcggtaccaccggcacaccgaaactgatc

SEQ ID NO: 806991 - DNA, 75 bp, synthetic construct
  source 1..75: mol_type = other DNA
catcgacggcgagcggcagttgagttaccgggagctgaatcaggcggcggataacctcgcctgtagtttgcgccg

SEQ ID NO: 806992 - DNA, 75 bp, synthetic construct
  source 1..75: mol_type = other DNA
gtggtgcaactgctcaacgacagcggtgagcataacttgcaggatgcgattaaccatccggctgaggattttact

SEQ ID NO: 806993 - DNA, 75 bp, synthetic construct
  source 1..75: mol_type = other DNA
tttccgtttccggactggatgcggcccgtcagatgatgcgcctgcagaaagaaggcgatcgcgccctgaatatcc

SEQ ID NO: 806994 - DNA, 75 bp, synthetic construct
  source 1..75: mol_type = other DNA
caaaaagcgcgtgtaaacggtattaatgatctgtttgccatgtttggcgggcgttatcagacgctgcaggctcag

SEQ ID NO: 806995 - DNA, 75 bp, synthetic construct
  source 1..75: mol_type = other DNA
cctgctcgataaggttgaggcggttctgttacccgcttatgcacagaaaaccgggaaaaccaccgatgaaattgc

SEQ ID NO: 806996 - DNA, 75 bp, synthetic construct
  source 1..75: mol_type = other DNA
ccaggctaaagaagatgaccttatttataatccggagccttatgtcgaagccacccctgatgctctgcaccttct

SEQ ID NO: 806997 - DNA, 75 bp, synthetic construct
  source 1..75: mol_type = other DNA
gggtaaacgagatgtgtctgtttctcgtgatggcaggtttttaagcagccgcacggtgaaaagcaccaggaatga

SEQ ID NO: 806998 - DNA, 75 bp, synthetic construct
  source 1..75: mol_type = other DNA
tttgctggataaagtcgaatcggtactgttgccagcctatgcgcagaaaaccggaaaaaccaccgatgaaattgc

SEQ ID NO: 806999 - DNA, 75 bp, synthetic construct
  source 1..75: mol_type = other DNA
gccggtgaccagagtgattaccgcggaaatgtgacgctggaaaacaaatcatccctgaaaatcatggagaaattc

SEQ ID NO: 807000 - DNA, 75 bp, synthetic construct
  source 1..75: mol_type = other DNA
aaaaagcgatcgttgagcttaagcgcgatggcctgcgtcatgcagagacgattacgctgggtatcatggtggaag

SEQ ID NO: 807001 - DNA, 75 bp, synthetic construct
  source 1..75: mol_type = other DNA
gtcgaactggtgatcatgttgacgctgggcgctagcgaaggaatgaaccatgtgaaagtcttttcgcaactggcg

SEQ ID NO: 807002 - DNA, 75 bp, synthetic construct
  source 1..75: mol_type = other DNA
ggcctggatgagctgagtatgagtagcccgcgcattccggcggtgaaaagccagcttcgtcaactggatagcgag

SEQ ID NO: 807003 - DNA, 75 bp, synthetic construct
  source 1..75: mol_type = other DNA
atgaactatcgtattattccggtcaccgcattctcccagaactgttcattgatctggtgtgaacaaacccgcctg

SEQ ID NO: 807004 - DNA, 75 bp, synthetic construct
  source 1..75: mol_type = other DNA
aaaactttagcgaccaggaccgaattgacctgcaaaagatctggccggagtattccccttcctctttgctggttg

SEQ ID NO: 807005 - DNA, 75 bp, synthetic construct
  source 1..75: mol_type = other DNA
ggcgtggaagatcgcggcgtgatgacggcgtttatgcaggcgctggggtttactgcacaacagggcggctgggag

SEQ ID NO: 807006 - DNA, 75 bp, synthetic construct
  source 1..75: mol_type = other DNA
aacccgcgcgtatcgccgctgtataacccgattacgccatcgttcctgcgcatgttgcagcagatagttaccact

SEQ ID NO: 807007 - DNA, 75 bp, synthetic construct
  source 1..75: mol_type = other DNA
cgtggcgatcccgcataccaaatcccagtggatccgccattccagtatcagtattgcccggctggtaaaaccaat

SEQ ID NO: 807008 - DNA, 75 bp, synthetic construct
  source 1..75: mol_type = other DNA
gggtcagcgacattcgcgatatcagcgaacagttactgcatatcacctggccggaactaaaaccgcgcaataatc

SEQ ID NO: 807009 - DNA, 75 bp, synthetic construct
  source 1..75: mol_type = other DNA
gtcaggcatgtgaatgccgcagcgcgcaggaaattgaagcgttactcaccgcctttacgccggaagaagacgttc

SEQ ID NO: 807010 - DNA, 75 bp, synthetic construct
  source 1..75: mol_type = other DNA
gcgcagacgctggcggataaacgccaaaaacaacaggcgcaggccgccgcgcagctggcctattcccgtgataac

SEQ ID NO: 807011 - DNA, 75 bp, synthetic construct
  source 1..75: mol_type = other DNA
gaacagcatcaggggctgggggcggcgatcatcagcaatatggagcaggtttgcgccaaactttctgcttctgcc

SEQ ID NO: 807012 - DNA, 75 bp, synthetic construct
  source 1..75: mol_type = other DNA
ctgcattctcccagaactgctcattgatctggtgtgaacaaactcgcctggctgcactggttgatcctggcggcg

SEQ ID NO: 807013 - DNA, 75 bp, synthetic construct
  source 1..75: mol_type = other DNA
attcaggctgagtggtggaaatgcaaatttcattgccagaaatatggcatctgtcaccggaaatatttatgctga

SEQ ID NO: 807014 - DNA, 75 bp, synthetic construct
  source 1..75: mol_type = other DNA
tatgaagtttttggggggcatggtagtcccggtgacttatattatgtttctgcatcaaatacttactttatcctg

SEQ ID NO: 807015 - DNA, 75 bp, synthetic construct
  source 1..75: mol_type = other DNA
ccgggctgggttaccagttcgacctgctggcgaacggagaaacggttctgcgggatgcatccggagagaaacgtt

SEQ ID NO: 807016 - DNA, 75 bp, synthetic construct
  source 1..75: mol_type = other DNA
aatcagtacggaaaaaacggatgataccataaaatgggtgctgacagggtaccagaccaccgctaatgctggagc

SEQ ID NO: 807017 - DNA, 75 bp, synthetic construct
  source 1..75: mol_type = other DNA
actgaaactcgatgcggcaacattccatctgtccagaaacggcaagatgcagggagatattaacgccaccaacgg

SEQ ID NO: 807018 - DNA, 75 bp, synthetic construct
  source 1..75: mol_type = other DNA
tgctgtctccgaactggcccgcagggttacctgcaaaagccatcgcagactttcacgtcgggttattcttacgtc

SEQ ID NO: 807019 - DNA, 75 bp, synthetic construct
  source 1..75: mol_type = other DNA
cacacattccgacatcgccatgagtgatattgatgaaaccatcagtcactactggccgacaggcagcctccgtcc

SEQ ID NO: 807020 - DNA, 75 bp, synthetic construct
  source 1..75: mol_type = other DNA
tgataaccatgccatcagcctgttcagcgcatatgcttctctggtttacgttacccctattctcggcggctggct

SEQ ID NO: 807021 - DNA, 75 bp, synthetic construct
  source 1..75: mol_type = other DNA
tctcgtggcactgagccatccttaagtgtcgcccttcagattgcgtctatcgaaggagtaagtgttgagtggcta

SEQ ID NO: 807022 - DNA, 75 bp, synthetic construct
  source 1..75: mol_type = other DNA
ttcacagccggaacgcagcagattggtttcagtaatgtcacgccggtaatcagcacagaaaaaacggatgatgcc

SEQ ID NO: 807023 - DNA, 75 bp, synthetic construct
  source 1..75: mol_type = other DNA
tcaaggataaaaacggtaacctcacacaaatttatacaagtggcggttttttggtcggaggtacagttggtgcac

SEQ ID NO: 807024 - DNA, 75 bp, synthetic construct
  source 1..75: mol_type = other DNA
atatttccatttacgacaagcagggcaatctggtcggtaaacttgataaagccccgatggctgatttcagcagtg

SEQ ID NO: 807025 - DNA, 75 bp, synthetic construct
  source 1..75: mol_type = other DNA
caggttgtgttcaccctgaaacgtcctgacggcagtattctgccgtttggcacagttgtttctctggacggtatg

SEQ ID NO: 807026 - DNA, 75 bp, synthetic construct
  source 1..75: mol_type = other DNA
aaatagcttttacaatacttacgcagagagggatattagctcgttacgtgcaatattacgacttggtgaagtttc

SEQ ID NO: 807027 - DNA, 75 bp, synthetic construct
  source 1..75: mol_type = other DNA
ttcttttttttgtgaggagcacaaaggtttttgccgaagattattttgacccatctcttctggcaaccgatatta

SEQ ID NO: 807028 - DNA, 75 bp, synthetic construct
  source 1..75: mol_type = other DNA
ctctctgatcaggagcagggtcacatccttgaagaccttggaaatgatttacaatatttccgtggtgctttcagt

SEQ ID NO: 807029 - DNA, 75 bp, synthetic construct
  source 1..75: mol_type = other DNA
aacagtgtcatgtcgattttagcctgccactggataaaaagcagtccggtcccgtcacggaggctatggcggtat

SEQ ID NO: 807030 - DNA, 75 bp, synthetic construct
  source 1..75: mol_type = other DNA
aacagtgccatgtcgattttagcctgctgctgaataaaaagcagtccggtcccgtgacggaggtgatggcggtat

SEQ ID NO: 807031 - DNA, 75 bp, synthetic construct
  source 1..75: mol_type = other DNA
agactcgttttccgttgatgataatggatcaggtaatatttttgtatgtggagatcttgtaaatagcaaagagaa

SEQ ID NO: 807032 - DNA, 75 bp, synthetic construct
  source 1..75: mol_type = other DNA
gtatgccttcctcggatacgaatatattatgacgccggttgccaccaccattatcagtatggtgctgttcgcctt

SEQ ID NO: 807033 - DNA, 75 bp, synthetic construct
  source 1..75: mol_type = other DNA
actgtactccgtctcctcggtactgattaacgtcttcgtcagcagcaaagagttgaaatttactggcggatcggt

SEQ ID NO: 807034 - DNA, 75 bp, synthetic construct
  source 1..75: mol_type = other DNA
actaaaatcagctatggctggatacgcaaaggccagaaaaaagcagtaaaaacaacaggcagccgcacacgcctg

SEQ ID NO: 807035 - DNA, 75 bp, synthetic construct
  source 1..75: mol_type = other DNA
caggcgtcccccataaattcagtgaagagaaacaaaggcaattcattgaatactataaggaactgaaaacaactg

SEQ ID NO: 807036 - DNA, 75 bp, synthetic construct
  source 1..75: mol_type = other DNA
gtgtgcagcagccggtaatccagcaaaaataataaaaagaaatataatatgggcaagaacggataaagcggagct

SEQ ID NO: 807037 - DNA, 75 bp, synthetic construct
  source 1..75: mol_type = other DNA
ctgctgtaaaagctcgccaggtggcggctgatggcggtaaatacccacatatggctaaacagcttaaaggtggtc

SEQ ID NO: 807038 - DNA, 75 bp, synthetic construct
  source 1..75: mol_type = other DNA
atttcccagagcggtcagacctgtgcgctgctctctaaagtcttcccgacccgttcccataccgtgtctgcgcaa

SEQ ID NO: 807039 - DNA, 75 bp, synthetic construct
  source 1..75: mol_type = other DNA
ggtttctcaagatttaaaatcaacccattagaaacgaatcaagcgtatgatctattacgtcgatatgatggacgt

SEQ ID NO: 807040 - DNA, 75 bp, synthetic construct
  source 1..75: mol_type = other DNA
agtccaagctgattgagttcgctacgcagatttctgtctggattaaaactcaatcgtcgttcaaattttccgacg

SEQ ID NO: 807041 - DNA, 75 bp, synthetic construct
  source 1..75: mol_type = other DNA
tcatttgtacattaatcatactcccgatagggttacaggcagagaccagtcattcttctatggctaaagatacaa

SEQ ID NO: 807042 - DNA, 75 bp, synthetic construct
  source 1..75: mol_type = other DNA
atgtatatgaacgtaatcagaactgtcatttgtacattaatcatactcccgatagggttacaggcagcgaccaac

SEQ ID NO: 807043 - DNA, 75 bp, synthetic construct
  source 1..75: mol_type = other DNA
cagtggcgggctgggaggtgtagtggacttcagaactgccgatgcagcagatttccttccccccggagagacaaa

SEQ ID NO: 807044 - DNA, 75 bp, synthetic construct
  source 1..75: mol_type = other DNA
tgccacctatacacaagcggatctggacgctgccgaacgtctgcaagcggtacaggcaaatatgaatatggcatg

SEQ ID NO: 807045 - DNA, 75 bp, synthetic construct
  source 1..75: mol_type = other DNA
atggagttgaacatctcaaccttaacaaacaaggttgtatttaaagttgattttgcatcattacagaaagcacgc

SEQ ID NO: 807046 - DNA, 75 bp, synthetic construct
  source 1..75: mol_type = other DNA
ctcaagctggtgaagagtgggcgcaaatgttgaaagatctcaatcctctgtttaaagaacttggaagctcaacgg

SEQ ID NO: 807047 - DNA, 75 bp, synthetic construct
  source 1..75: mol_type = other DNA
gaacaggttaaaggtttccagactgatccattaggtttcctgggcgctgtagtgaaagaaggtgaacgccgtgga

SEQ ID NO: 807048 - DNA, 75 bp, synthetic construct
  source 1..75: mol_type = other DNA
atgcaccgaacatcgtcgtaaacgtgccggaaagcaaggtggatgtgaatatcgcccctgatggtagtcagcttg

SEQ ID NO: 807049 - DNA, 75 bp, synthetic construct
  source 1..75: mol_type = other DNA
cggcttagaacacggtgttgatagttccatagaccaacgccaggataaccttaaagatgtacaggaacgtctcgg

SEQ ID NO: 807050 - DNA, 75 bp, synthetic construct
  source 1..75: mol_type = other DNA
atacgaatatattatgacgccggttgccaccaccattatcagtatggtgctgttcgccttctccacctgggtttc

SEQ ID NO: 807051 - DNA, 75 bp, synthetic construct
  source 1..75: mol_type = other DNA
gcgcgaatttgccgaaacgggcgtggactttatctccgtcggtgcgctaactaaacacgtacaggcactagacct

SEQ ID NO: 807052 - DNA, 75 bp, synthetic construct
  source 1..75: mol_type = other DNA
cagtgatcacccgcgagaatggcgtattttgcggcaaacgctgggttgaagaggtgtttattcaactggcaggcg

SEQ ID NO: 807053 - DNA, 75 bp, synthetic construct
  source 1..75: mol_type = other DNA
tcagaccagatggaaaaacggggatcggtagtggaacctcggaagcaacagctatagtttccggcgttctggcag

SEQ ID NO: 807054 - DNA, 75 bp, synthetic construct
  source 1..75: mol_type = other DNA
gttgtctggcggcaattttgctgatggatcctgttgccattctctcgcaaagtttatggctctctgccgctgcgg

SEQ ID NO: 807055 - DNA, 75 bp, synthetic construct
  source 1..75: mol_type = other DNA
atatcttccgcaagcggtttgtgctggacaacaatggtcaatgaaactcaaagttcgtgcggttcatggccaact

SEQ ID NO: 807056 - DNA, 75 bp, synthetic construct
  source 1..75: mol_type = other DNA
gtagcgttgccaatgatgttacagatgagatggtcagactaaactggctgacggcatttatgcctcttccgacca

SEQ ID NO: 807057 - DNA, 75 bp, synthetic construct
  source 1..75: mol_type = other DNA
gtgctgaaaaatttacggctgcatattctgttcctgctttttatctcagtgtcagtcagggcggaaaaaccatgg

SEQ ID NO: 807058 - DNA, 75 bp, synthetic construct
  source 1..75: mol_type = other DNA
ggggcgttactggttactctgtttgccggtttcactgaatatatgccgggcagaaatcggggaacatggtctagt

SEQ ID NO: 807059 - DNA, 75 bp, synthetic construct
  source 1..75: mol_type = other DNA
ccgttttgtgatgggcgttgggctgggagctttactggttacgctgtttgctggtttcaccgaatatatgcccgg

SEQ ID NO: 807060 - DNA, 75 bp, synthetic construct
  source 1..75: mol_type = other DNA
caaattcagttttactcaggatggttcgccattcccggtaaaagagcctgaagctttatatattcatggtactgc

SEQ ID NO: 807061 - DNA, 75 bp, synthetic construct
  source 1..75: mol_type = other DNA
tcgccattcccggtaaaagagtctgaagctttatatattcatggtactgccatggcttcactcattgcctcacgt

SEQ ID NO: 807062 - DNA, 75 bp, synthetic construct
  source 1..75: mol_type = other DNA
cctcacttgcagataaggtgacggaagggagggttcttaatgcagaaaaagcaattagcatgttctgcaagaaaa

SEQ ID NO: 807063 - DNA, 75 bp, synthetic construct
  source 1..75: mol_type = other DNA
tgccattaattggtggaatctgctgtgctgctttttatgcctggcttacgggaatgcaacctcctgcattgcgta

SEQ ID NO: 807064 - DNA, 75 bp, synthetic construct
  source 1..75: mol_type = other DNA
tctccgcagttcgttcgcccttttgttaagagcaacaagaacgattttgtcgatgcagaagccatatgcgaagcg

SEQ ID NO: 807065 - DNA, 75 bp, synthetic construct
  source 1..75: mol_type = other DNA
atgaacattgatttcttaggaaaaaaagggaatgttgtttttaatgacttttccctgaagcaaagcatccctctt

SEQ ID NO: 807066 - DNA, 75 bp, synthetic construct
  source 1..75: mol_type = other DNA
tatcctgcgaatagtggatgtaaccaacggcagtctgcctaaagacagagagtcactgttctgggttagcgtgaa

SEQ ID NO: 807067 - DNA, 75 bp, synthetic construct
  source 1..75: mol_type = other DNA
gcaggatctgatgaatactattattaatatgaccgccgcagcgtccatgcttccgccgttattcatcatgctggc

SEQ ID NO: 807068 - DNA, 75 bp, synthetic construct
  source 1..75: mol_type = other DNA
gcacggttaaattgccttctgatgcgggaagcaatattacttaccgaacaataaatgattatggcgcacttaccc

SEQ ID NO: 807069 - DNA, 75 bp, synthetic construct
  source 1..75: mol_type = other DNA
ggccatgcgggcgcttcaccgggtcagggaatcattggtcagtgataaagtcaaaacgaccaatcagatgcatgc

SEQ ID NO: 807070 - DNA, 75 bp, synthetic construct
  source 1..75: mol_type = other DNA
gggacgaatagcattcttctaaccggtgatattgaagcccccgctgaacaaaagatgctaagccgttactggcag

SEQ ID NO: 807071 - DNA, 75 bp, synthetic construct
  source 1..75: mol_type = other DNA
ggaacaaaaaatgctgagtcgttactggcaacaggtgcaggcaaccttgcttcaggtaccccatcacggcagtaa

SEQ ID NO: 807072 - DNA, 75 bp, synthetic construct
  source 1..75: mol_type = other DNA
gctggttttgccccaattgcctgggacattaacccttgcgtttctgactgtcttcgcctgcgtactggtatttat

SEQ ID NO: 807073 - DNA, 75 bp, synthetic construct
  source 1..75: mol_type = other DNA
atggcgactaccctccagtaaagttaaaagacgctatcaacttcagggatatcaatgggttgacaccccgcatca

SEQ ID NO: 807074 - DNA, 75 bp, synthetic construct
  source 1..75: mol_type = other DNA
cgccaggcatcgtgctgtatggcgagtatctgccacaagcggtttgtgccggacaacaatggtcaatgaaactca

SEQ ID NO: 807075 - DNA, 75 bp, synthetic construct
  source 1..75: mol_type = other DNA
ttgctgattttgccccaattgcctgggacattaacccttgcgtttctgactctcttcgcctgcgtactggcattt

SEQ ID NO: 807076 - DNA, 75 bp, synthetic construct
  source 1..75: mol_type = other DNA
aatcgttgctggcgaaaacgcttgataagctttttcctgcaagcgatgaaattaactggcaaaaagtggcggcag

SEQ ID NO: 807077 - DNA, 75 bp, synthetic construct
  source 1..75: mol_type = other DNA
tggcgaacagattcaacgtttcgccagtaaagaggtcgcacgccggattggtctgctggcgcaaaacgctaccac

SEQ ID NO: 807078 - DNA, 75 bp, synthetic construct
  source 1..75: mol_type = other DNA
ctgaactgattgagcgtatttatggtttgcgttgcatgatcattgacgatccggtagccggaactccgcttgtgg

SEQ ID NO: 807079 - DNA, 75 bp, synthetic construct
  source 1..75: mol_type = other DNA
ttaccgctctgattaacggtgcgccagccacgctggacacactgaaagaaattgccgcagccattaacaatgacc

SEQ ID NO: 807080 - DNA, 75 bp, synthetic construct
  source 1..75: mol_type = other DNA
accactgcgtttgttcaggccgctattaccgctctgattaacggtgcgccagccacgctggacacactgaaagaa

SEQ ID NO: 807081 - DNA, 75 bp, synthetic construct
  source 1..75: mol_type = other DNA
acgacattctgccagcatcaagaggaggcactggagcgtcaactatagccggagcattgataaactttggtctga

SEQ ID NO: 807082 - DNA, 75 bp, synthetic construct
  source 1..75: mol_type = other DNA
gctttacgatgatgaaggcgtactcattgcggtggcgaactgcccggaaacgtacaaaccgcagttgcaggaagg

SEQ ID NO: 807083 - DNA, 75 bp, synthetic construct
  source 1..75: mol_type = other DNA
caaaggatgaatgggagttggccacaattttcaaaaaaacatattcacaaggccggggacttgatgctgcaaata

SEQ ID NO: 807084 - DNA, 75 bp, synthetic construct
  source 1..75: mol_type = other DNA
ggttagttattatcaggcaaaaaactttctcgcaattgatcctgtgctgaaccctgaaaactttagtcagggcca

SEQ ID NO: 807085 - DNA, 75 bp, synthetic construct
  source 1..75: mol_type = other DNA
gaaaggctatacgctggcggcggtgctgcacgatcttaatcaggcctgtcgctacgccagccatttgattgcgct

SEQ ID NO: 807086 - DNA, 75 bp, synthetic construct
  source 1..75: mol_type = other DNA
cgcggctgtgatggtccgtgggggccacacgcgaaactgaaactcgaccacctgggtaaagaagttctcgaatcc

SEQ ID NO: 807087 - DNA, 75 bp, synthetic construct
  source 1..75: mol_type = other DNA
atacgctgactcatttgagtggaaaggatgttgccggtcttctcgcataccttggtttgggagaagcggcgaaaa

SEQ ID NO: 807088 - DNA, 75 bp, synthetic construct
  source 1..75: mol_type = other DNA
ggcgaattacgcagggttgtcaatgctgtactgcaaatgatggatgcttatcagggcaaaagtctaattctggcg

SEQ ID NO: 807089 - DNA, 75 bp, synthetic construct
  source 1..75: mol_type = other DNA
tttgtgccgtagcacttactacaccgcgccgacactggcggaacgcaaactggcgattgatgataaccgccgggc

SEQ ID NO: 807090 - DNA, 75 bp, synthetic construct
  source 1..75: mol_type = other DNA
tgtgcacgttacgtcaggcgctggactggtgtgatgaactcgatcccgatggcgaatttggcctcggcgtggcgg

SEQ ID NO: 807091 - DNA, 75 bp, synthetic construct
  source 1..75: mol_type = other DNA
ttgcccgtaatgacagcgcgcttgggttgtttaatggcgatatcggtattgctctggatcgcgggcaggggacgc

SEQ ID NO: 807092 - DNA, 75 bp, synthetic construct
  source 1..75: mol_type = other DNA
aagcaggtccaactggctgttacaaataatgatgagaatagtacttacttaattcaatcctgggtagaaaatgcc

SEQ ID NO: 807093 - DNA, 75 bp, synthetic construct
  source 1..75: mol_type = other DNA
aatgtccgccactcaggattgccagcaggcgacgcgcgcctttgccgaaaaaagtagcgtaagcttccataatca

SEQ ID NO: 807094 - DNA, 75 bp, synthetic construct
  source 1..75: mol_type = other DNA
gccattattgatgcctgcgccgcacgcggtattggtgcgatcgccccctggcgcagagagttgcagggcgaagag

SEQ ID NO: 807095 - DNA, 75 bp, synthetic construct
  source 1..75: mol_type = other DNA
aaaataacgaggcgtcgcatccgctgttggcgacctgtgtcagtgaaatcggtgagctacaaaattgggaagaat

SEQ ID NO: 807096 - DNA, 75 bp, synthetic construct
  source 1..75: mol_type = other DNA
tgaatcaagttcagatgctgtcgaagagatacttgaagaaaatcgtagggctgatgtgttacgcacttacggaat

SEQ ID NO: 807097 - DNA, 75 bp, synthetic construct
  source 1..75: mol_type = other DNA
caatgaccttgaacatattctttatggtgatcatgcgatacaaacctctcgagtgcccgctgcacctccagtgcc

SEQ ID NO: 807098 - DNA, 75 bp, synthetic construct
  source 1..75: mol_type = other DNA
ttgattttaccgagccagcgtacaccggtggtaacacgagagctggtttacactgcggtaacccgcgcgcgtcgc

SEQ ID NO: 807099 - DNA, 75 bp, synthetic construct
  source 1..75: mol_type = other DNA
cgtttaccggaacacgaaaccacgtgggcgatgacggtacataaatcgcagggttctgagttcgaccatgcggcg

SEQ ID NO: 807100 - DNA, 75 bp, synthetic construct
  source 1..75: mol_type = other DNA
gtctgctggcttcacatgcggtcagccggggagatgaacctacaccaatgatcctttgtggcgatcgtctctatc

SEQ ID NO: 807101 - DNA, 75 bp, synthetic construct
  source 1..75: mol_type = other DNA
cttattcagcgaagcacagccgttatgggaagccgcgcgcgcacatggtttacgccgcggtgtcactcagtattt

SEQ ID NO: 807102 - DNA, 75 bp, synthetic construct
  source 1..75: mol_type = other DNA
caatttcctgctctcacccgatgcacaactgcgtaaagcagaccctgctgtctggggcgatccttctgttctcga

SEQ ID NO: 807103 - DNA, 75 bp, synthetic construct
  source 1..75: mol_type = other DNA
tccgcaaaaactgcctgatgggcagcgcgaaacattgcaatcaagaatgccgcaagatctgccgccgatactggc

SEQ ID NO: 807104 - DNA, 75 bp, synthetic construct
  source 1..75: mol_type = other DNA
cggatggatgctctgctgaaagccggcacattgcgcctgtcgctgacctttaaccctgctcatgcccagcaaaaa

SEQ ID NO: 807105 - DNA, 75 bp, synthetic construct
  source 1..75: mol_type = other DNA
caactgcgtaaggcagactcggctgtctggggtgatccatccgttctcgatccgcagaaactgcctgatggacaa

SEQ ID NO: 807106 - DNA, 75 bp, synthetic construct
  source 1..75: mol_type = other DNA
ggggatgattggcaacgtgcatttcgtcaccattcctgctaacgcgaatgccagtgctgcggcgaaggttgtcgc

SEQ ID NO: 807107 - DNA, 75 bp, synthetic construct
  source 1..75: mol_type = other DNA
gactgggttagcggcgagatgaaaacccattacgatataaacctgaagattgtccgcctggcggatgccgcagac

SEQ ID NO: 807108 - DNA, 75 bp, synthetic construct
  source 1..75: mol_type = other DNA
cgtttatgccggatggcgtgctgaactttcagcatcagccacgcatgtgaaaaaaggcgatccccatcaggctgg

SEQ ID NO: 807109 - DNA, 75 bp, synthetic construct
  source 1..75: mol_type = other DNA
gcatgtgaaaaaaggcgatccccatcaggctggttatgccgtacattccttttcactgtcttataagcctgtaag

SEQ ID NO: 807110 - DNA, 75 bp, synthetic construct
  source 1..75: mol_type = other DNA
atgtatatgaacataatcagaaacgttatttgtacattaatcatactcccgatcgggttacaggcagcgatcagt

SEQ ID NO: 807111 - DNA, 75 bp, synthetic construct
  source 1..75: mol_type = other DNA
attgggtagtttttactgatgacagaaattcaaaatatctcaatatattaaatgatttcttgtcttataacataa

SEQ ID NO: 807112 - DNA, 75 bp, synthetic construct
  source 1..75: mol_type = other DNA
acgcaacgagcgtttttttaaatctctattaaaaggagattattacgaacgcctttttgaacaaacccaaaaagt

SEQ ID NO: 807113 - DNA, 75 bp, synthetic construct
  source 1..75: mol_type = other DNA
ataacagcctcatcaatgtaaagtcaactttatatctcagtgatatcactatcaagacaaacggtcacaacaaaa

SEQ ID NO: 807114 - DNA, 75 bp, synthetic construct
  source 1..75: mol_type = other DNA
agaatgccgcaagatctgccgccggtactggctgaaccgcacgcaggttgggtaaatgcgctggaacaagaatgg

SEQ ID NO: 807115 - DNA, 75 bp, synthetic construct
  source 1..75: mol_type = other DNA
tttaatggtggggttccaagagtttcaggggaaactcgacctcggaacattgcgtttaactacattgtgagggct

SEQ ID NO: 807116 - DNA, 75 bp, synthetic construct
  source 1..75: mol_type = other DNA
aaacaccgaaaattattcaatatgggaatcagcaggctcttttaagggggcagtggtgcctttgaacccctcaac

SEQ ID NO: 807117 - DNA, 75 bp, synthetic construct
  source 1..75: mol_type = other DNA
gcgaaagtgtttccttcgctggtattacctgaagcccgcggtgatttcattcgtatctgggatgacgggcgaggt

SEQ ID NO: 807118 - DNA, 75 bp, synthetic construct
  source 1..75: mol_type = other DNA
agatgaatttcagcaagcgcgaaaaagaaattctgaaatggacggcggaagggaagacatcagcagagatagcga

SEQ ID NO: 807119 - DNA, 75 bp, synthetic construct
  source 1..75: mol_type = other DNA
tggtgtcactcagtatttaatgctgccaaaccgggcgctgggttttttgtccttttcccgtagtagtacgcgtga

SEQ ID NO: 807120 - DNA, 75 bp, synthetic construct
  source 1..75: mol_type = other DNA
gcgatgattttgtcaatctctgagaatacggtcaatttccatcagaaaaacatgcagaaaaaaatcaatgcacca

SEQ ID NO: 807121 - DNA, 75 bp, synthetic construct
  source 1..75: mol_type = other DNA
tgctatggatgtcgcgtatgaaagctccggatccggtgactggcgcacgagtggggttattgtaggcattggcct

SEQ ID NO: 807122 - DNA, 75 bp, synthetic construct
  source 1..75: mol_type = other DNA
gagattggtgttataacatcttttacatgggcgcgttctatgactaatgcgcaggcatttattgatattaaccca

SEQ ID NO: 807123 - DNA, 75 bp, synthetic construct
  source 1..75: mol_type = other DNA
cggatggatgctctgctgaaagccggcacattgcgcctgtcgctcacttttaaccccgctcatgcgcagcaaaaa

SEQ ID NO: 807124 - DNA, 75 bp, synthetic construct
  source 1..75: mol_type = other DNA
aataccacgcagcttgcgaccaccgcatttgttcaggcggcactgacggctcttattaatggtgcgccagccacg

SEQ ID NO: 807125 - DNA, 75 bp, synthetic construct
  source 1..75: mol_type = other DNA
gcgatcctcataaaggaaattttatagtatccgaaaaaggtttaagactaattgacctttcaggtaaaaaacaac

SEQ ID NO: 807126 - DNA, 75 bp, synthetic construct
  source 1..75: mol_type = other DNA
caactcatttggtgaatatgcagatgcttctgtcagagggcatgacggcaaagccaaaagccttcaggggatgag

SEQ ID NO: 807127 - DNA, 75 bp, synthetic construct
  source 1..75: mol_type = other DNA
accgcaaccgacgcatttatgcgcgatattaaaccgtttatggtggcagatgcgctggccgatttcagccgtgac

SEQ ID NO: 807128 - DNA, 75 bp, synthetic construct
  source 1..75: mol_type = other DNA
gcgaacgccaccattactgacatgcagcagcgccagcgtgatgctgatgcactcgatgataaatacacgaaggag

SEQ ID NO: 807129 - DNA, 75 bp, synthetic construct
  source 1..75: mol_type = other DNA
ctctccggttgctggacgaaacgttctcggtatcagagacggaatcatcagcgaccaggcagcattgagaatgct

SEQ ID NO: 807130 - DNA, 75 bp, synthetic construct
  source 1..75: mol_type = other DNA
atacacgaaggagttagctgatgcgaaagctaaaaatgatgctcttcggcgcaagcttgataatggtggtcgggt

SEQ ID NO: 807131 - DNA, 75 bp, synthetic construct
  source 1..75: mol_type = other DNA
atgagcagggtaaccgcgattatctccgctctggttatcggcatcatcgtctgcttgtcgtgggctgttaatcat

SEQ ID NO: 807132 - DNA, 75 bp, synthetic construct
  source 1..75: mol_type = other DNA
ttattaccgtctccgaagtggaatcgacaagataaccgcgcaggttaactacctgcaggagtacatcaggactca

SEQ ID NO: 807133 - DNA, 75 bp, synthetic construct
  source 1..75: mol_type = other DNA
aagagatggccagtcgggtgccgcctgggtcgtggggcgtaatgccgatattctccgacagaatgcggtttaaaa

SEQ ID NO: 807134 - DNA, 75 bp, synthetic construct
  source 1..75: mol_type = other DNA
tcaacaaaaactggcaactggcgtgtgagtgtatgcgccaggcgctgcacaacgccggcatagacccggagtata

SEQ ID NO: 807135 - DNA, 75 bp, synthetic construct
  source 1..75: mol_type = other DNA
ctgcctgtcgtgggcggtcaatcattaccgtgataacgccatcgcctacaaagaacagcgagataaaaaagtcag

SEQ ID NO: 807136 - DNA, 75 bp, synthetic construct
  source 1..75: mol_type = other DNA
tcgctgccgtttcggcatgttcgatgcgtgaaggcattgttttatataacaatgaaggaacaccgatctgggcct

SEQ ID NO: 807137 - DNA, 75 bp, synthetic construct
  source 1..75: mol_type = other DNA
atgatctggcagcctgagttcacagataaaacactctccaggaaacccggggcggttcactgcggtctgaaggcg

SEQ ID NO: 807138 - DNA, 75 bp, synthetic construct
  source 1..75: mol_type = other DNA
tggggcgtaatgccgatcttctccgacagaatgcgctttaaaacctggtatcacgctgcgccttcctttattaac

SEQ ID NO: 807139 - DNA, 75 bp, synthetic construct
  source 1..75: mol_type = other DNA
aggaagtgatcaccagaacggtgaaagttaccaatgtgggacgcccgtcgatggcggaaaatctcactaaaatta

SEQ ID NO: 807140 - DNA, 75 bp, synthetic construct
  source 1..75: mol_type = other DNA
aaccgtatgccctgtggcagatgggggacaatatcagcaacgtcacggacccgctgtgcaccatttcctgcccgt

SEQ ID NO: 807141 - DNA, 75 bp, synthetic construct
  source 1..75: mol_type = other DNA
atgccaacaccaaatcccctggagccggtaaaaggtgccggtaccaccctgtgggtttacaacggcaagggtgac

SEQ ID NO: 807142 - DNA, 75 bp, synthetic construct
  source 1..75: mol_type = other DNA
tggtgtgctggctgcggttaaacgcggttccattttcgatcacacagcggttggcctggcgctgaccggctactc

SEQ ID NO: 807143 - DNA, 75 bp, synthetic construct
  source 1..75: mol_type = other DNA
ctggttgattgacgcgctgcaacgccgcgattatccggtggtgcagggcggcgtattgctggtggcgacgatgat

SEQ ID NO: 807144 - DNA, 75 bp, synthetic construct
  source 1..75: mol_type = other DNA
cggtgaaaggtgccggaaccaccctgtgggtttataacggaaacggcgacccttatgcgaacccgctttcagacg

SEQ ID NO: 807145 - DNA, 75 bp, synthetic construct
  source 1..75: mol_type = other DNA
tgcagggctggtttctgccggtctctggtccaggcgtgtgaataaacacggtctggtttctctggtccgtgaact

SEQ ID NO: 807146 - DNA, 75 bp, synthetic construct
  source 1..75: mol_type = other DNA
gtcataccgcaatcagctctctttcctgaacctgttcgaccgcaatgcggggctggatacggataacaacaacct

SEQ ID NO: 807147 - DNA, 75 bp, synthetic construct
  source 1..75: mol_type = other DNA
cgttttccgaatggcacggtggatgtgtttcgtggctgggtcagcagtatcggtaaggccgtgacggcgaaagaa

SEQ ID NO: 807148 - DNA, 75 bp, synthetic construct
  source 1..75: mol_type = other DNA
tgaaccaggtggccaaccgtgttgtggctggtctggcttctgccggcctgtggtcgacgcgggtggataaacacg

SEQ ID NO: 807149 - DNA, 75 bp, synthetic construct
  source 1..75: mol_type = other DNA
acgaagtgattacccgtagtgcacaaattaccaataaaggcaaaccgtcgctggctgaagataacgcctccacta

SEQ ID NO: 807150 - DNA, 75 bp, synthetic construct
  source 1..75: mol_type = other DNA
acggcagaaccctacgatgataactacctggatgatgaagacgcggactggagcgcgaccgggcaggggcagaag

SEQ ID NO: 807151 - DNA, 75 bp, synthetic construct
  source 1..75: mol_type = other DNA
tggtttttgcaatttcaggatgcgtcaacccttataactacagagaagaacaaaatgttattatctcgttcaaaa

SEQ ID NO: 807152 - DNA, 75 bp, synthetic construct
  source 1..75: mol_type = other DNA
acacaacagaagtagctgacaactttttgatgacatctgaggagtacgctacgcgagttgtattttttaatagaa

SEQ ID NO: 807153 - DNA, 75 bp, synthetic construct
  source 1..75: mol_type = other DNA
gaagtggttattcttgctacaatcggcatcaaatataatactctctgggagaaattgtttaagctctgttttatc

SEQ ID NO: 807154 - DNA, 75 bp, synthetic construct
  source 1..75: mol_type = other DNA
ttcccttgctgcatttattctggtgagtgaacttttgtctgcccggggggataaataccttgatatttgccttgt

SEQ ID NO: 807155 - DNA, 75 bp, synthetic construct
  source 1..75: mol_type = other DNA
taatcgcggtcagttgagtgaggatataggcaatctggatgaactttttcataaagtaaaaatttttatgaaaaa

SEQ ID NO: 807156 - DNA, 75 bp, synthetic construct
  source 1..75: mol_type = other DNA
acaacaatttccgactgcatacttaatgaaatccaccgaaaactctatattaaccgtggtcagttgagtgaggat

SEQ ID NO: 807157 - DNA, 75 bp, synthetic construct
  source 1..75: mol_type = other DNA
tgaagaaagtattaagtcagatatcataaaggcagaagaagatatcgatcttttcagaaggattgatatgaacat

SEQ ID NO: 807158 - DNA, 75 bp, synthetic construct
  source 1..75: mol_type = other DNA
aaattgccgatccttcgttgctgacatggaatccgacactgattgtagtggatgaagctcatcaactcgcacgta

SEQ ID NO: 807159 - DNA, 75 bp, synthetic construct
  source 1..75: mol_type = other DNA
tacaaccgtggtcagtgtgactacagatggttttctgacggatgcctctaccgagaatatcgatatgtctggtcc

SEQ ID NO: 807160 - DNA, 75 bp, synthetic construct
  source 1..75: mol_type = other DNA
ttgcagcaatgtgacgttcaccgatacgttgttgatcactccgggtgggatggggctggcggaatgtggccaatt

SEQ ID NO: 807161 - DNA, 75 bp, synthetic construct
  source 1..75: mol_type = other DNA
cagagtatgcagagagtatactttctggtaaaaaaaaatatgagtttcggaaaaatatttttagaaataaaaatg

SEQ ID NO: 807162 - DNA, 75 bp, synthetic construct
  source 1..75: mol_type = other DNA
tcttgaccatcaattttattctgacaaaaactacacgattccttttctcgtttcagcctggatactgagttttgt

SEQ ID NO: 807163 - DNA, 75 bp, synthetic construct
  source 1..75: mol_type = other DNA
aagatgatgctgaacagcgtgcgctggacatgttgcaatggatcactaaagcgctccattttaatcagcaaatgg

SEQ ID NO: 807164 - DNA, 75 bp, synthetic construct
  source 1..75: mol_type = other DNA
acccggatgggggatacataatggcgaagtggttattctggctacaattggtatcagatataattctctctgggc

SEQ ID NO: 807165 - DNA, 75 bp, synthetic construct
  source 1..75: mol_type = other DNA
ggtccgctgaaaactgaggctgtggaatatgaacattatcaacatctttttgagaaagaagatgaagagcatgag

SEQ ID NO: 807166 - DNA, 75 bp, synthetic construct
  source 1..75: mol_type = other DNA
aatgttttacgtgaccctatcatgggtctgcgttctaatgatgcagcagcaagggccattagtaccatcaagcac

SEQ ID NO: 807167 - DNA, 75 bp, synthetic construct
  source 1..75: mol_type = other DNA
ctctatgctgcgtttatctgtggtttagtccatgatgccggaaaggtttacgatctcgacattgtaagcctgaat

SEQ ID NO: 807168 - DNA, 75 bp, synthetic construct
  source 1..75: mol_type = other DNA
tgggcaggttaaacctgaacgtcgcaaggcagaacgaatcgactacgaatccttcctgaacgcctacaacaccga

SEQ ID NO: 807169 - DNA, 75 bp, synthetic construct
  source 1..75: mol_type = other DNA
cccgtcgctaaacagtcagttcaacgtgctggttaacctggccgtggtgaccaatatcattccgtatattctgtc

SEQ ID NO: 807170 - DNA, 75 bp, synthetic construct
  source 1..75: mol_type = other DNA
ccgggcggaatccccagactggagagaacatccagatcgccgctgctaacatccctgggttcaaagctggtaagg

SEQ ID NO: 807171 - DNA, 75 bp, synthetic construct
  source 1..75: mol_type = other DNA
gcaacctttgcccgtatttgtcgggatgccgagattgcggttcgttatgctttacaggttcgcaatttttgcgcc

SEQ ID NO: 807172 - DNA, 75 bp, synthetic construct
  source 1..75: mol_type = other DNA
gacctgacactccatatcggttttgataccgaatatgttttcaaccctgaaacacgacagaatgatattctgtca

SEQ ID NO: 807173 - DNA, 75 bp, synthetic construct
  source 1..75: mol_type = other DNA
gtgattacaaaatggcccggtattattaatatatatgcgcatttcattcgtgcggatatcacctcctttgccaat

SEQ ID NO: 807174 - DNA, 75 bp, synthetic construct
  source 1..75: mol_type = other DNA
aactgtaacggaatacagaaggccggtcccgggtcgtgagtctgttaccagagtaacggacactgtcaatgacgc

SEQ ID NO: 807175 - DNA, 75 bp, synthetic construct
  source 1..75: mol_type = other DNA
ttctctatggcaatttcgctggcgggctggagttaaaccaggtcagtgaggaagagcaggttattctttcggtgc

SEQ ID NO: 807176 - DNA, 75 bp, synthetic construct
  source 1..75: mol_type = other DNA
atgcgcgtgctttcagatgttctgctgaagtatgagccacgtattaagcacgtcgacgtgacaatgcaggaacag

SEQ ID NO: 807177 - DNA, 75 bp, synthetic construct
  source 1..75: mol_type = other DNA
gctgcatggaagcctggtcggagcatgtcaatgaatgggatgctcgttttcagcggctgcgctggcataaactgg

SEQ ID NO: 807178 - DNA, 75 bp, synthetic construct
  source 1..75: mol_type = other DNA
acctggatgatgaagacgcggactggaccgcgaccgggcagggacagaaatctgcgggtgataccagttttacgc

SEQ ID NO: 807179 - DNA, 75 bp, synthetic construct
  source 1..75: mol_type = other DNA
gccagggcgcagatgattttctcggtactcaaggcgacccgtgggatacgcaatccgatatgttctgcgcactac

SEQ ID NO: 807180 - DNA, 75 bp, synthetic construct
  source 1..75: mol_type = other DNA
ttcaaatctttgcgacgttatttttccgtatcagctgccgttccgtatacggatgtctggacgcacaggcccgtg

SEQ ID NO: 807181 - DNA, 75 bp, synthetic construct
  source 1..75: mol_type = other DNA
attaaccgcggacggcgaactgcagcgcctcacctgggaagtgtctcgtcgtgaaacccgaacctatgaccgtac

SEQ ID NO: 807182 - DNA, 75 bp, synthetic construct
  source 1..75: mol_type = other DNA
caaggtcaacattccggtcgtatccggtaatggtgaacttgctgcggttgcagaaatcaacgtcaccgccagtta

SEQ ID NO: 807183 - DNA, 75 bp, synthetic construct
  source 1..75: mol_type = other DNA
cggtgaaaggttccggcaccacactatgggtgtacaccggcaaggatgatgcttatgccaacccgttgtcagatg

SEQ ID NO: 807184 - DNA, 75 bp, synthetic construct
  source 1..75: mol_type = other DNA
accaacgtgggcaaaccttctgtggcggaagaacgcagcgaaattacgccggtcactgcgattaaggtgacgccg

SEQ ID NO: 807185 - DNA, 75 bp, synthetic construct
  source 1..75: mol_type = other DNA
gtctgcaggagataccagttttacgctggcctggaaaccgggagaagaaggtcagaaagggcttataggctggtt

SEQ ID NO: 807186 - DNA, 75 bp, synthetic construct
  source 1..75: mol_type = other DNA
cgtccgggagacctggttgcagatttttttatgggttcaggttcaacggtaaaagcggcgatggcactggggcgt

SEQ ID NO: 807187 - DNA, 75 bp, synthetic construct
  source 1..75: mol_type = other DNA
aaaggcagcattgtcactggagcgtcgggctattggtgtggaactggatgaagggcgatttaatcagactgtaac

SEQ ID NO: 807188 - DNA, 75 bp, synthetic construct
  source 1..75: mol_type = other DNA
ccggcagtatgcggagttgctgagtgaatacaaaaatctgcgccggtattttggcgtgacggcgcaggttccgta

SEQ ID NO: 807189 - DNA, 75 bp, synthetic construct
  source 1..75: mol_type = other DNA
gtctggcatctgatatcgagatcatgttgcgtgaacatttcaacgtgcttaaccatatcatctgggcgaagccgt

SEQ ID NO: 807190 - DNA, 75 bp, synthetic construct
  source 1..75: mol_type = other DNA
gataatcagcgcaagtagtcgtcctggtgatctggttgcggattttttcatggggtcgggttcaacggtaaaagc

SEQ ID NO: 807191 - DNA, 75 bp, synthetic construct
  source 1..75: mol_type = other DNA
cgaagggcagggcactgaaacagcatgtgatggccccgctgattgcttactttcgtgatgcgcgcgctgccctgg

SEQ ID NO: 807192 - DNA, 75 bp, synthetic construct
  source 1..75: mol_type = other DNA
tggccccgctgatttcttactttcgtgatgcgcgtaaatcactgggaataacgtcaaaacagatagcggaagcca

SEQ ID NO: 807193 - DNA, 75 bp, synthetic construct
  source 1..75: mol_type = other DNA
gtatcgagttaatcaacgctgatagcctgcattacgtcgccaccctcccggataactctattgatctgatagtta

SEQ ID NO: 807194 - DNA, 75 bp, synthetic construct
  source 1..75: mol_type = other DNA
gataagcgcgatgtatgagttaatcgagtggtgggcagcgctggcaatgggccagggcgcagatgattttctcgg

SEQ ID NO: 807195 - DNA, 75 bp, synthetic construct
  source 1..75: mol_type = other DNA
aaccatattatctgggcgaagccgtccggacgctggaacgggtgcaacaaggaaagcctgcgggcgtattttccg

SEQ ID NO: 807196 - DNA, 75 bp, synthetic construct
  source 1..75: mol_type = other DNA
caggctacggatgattacagccagttttctggtgaaagatttgttgatcgactggcgcgaaggcgagcgatattt

SEQ ID NO: 807197 - DNA, 75 bp, synthetic construct
  source 1..75: mol_type = other DNA
gaactggaaaagctccaccaccagctggtggatacgtatacctcactgaaccggcagtatgcggagctgctgagt

SEQ ID NO: 807198 - DNA, 75 bp, synthetic construct
  source 1..75: mol_type = other DNA
cgggcgatcggcgtagaactggaggcagacaggtttatacagaccaccgaagaggtggaaaaactgaaaaaatca

SEQ ID NO: 807199 - DNA, 75 bp, synthetic construct
  source 1..75: mol_type = other DNA
gtggcggaagaacgcagcgaaattacgccggccactgcaattaaggtgacaccgacatccggtaccgtggaaaaa

SEQ ID NO: 807200 - DNA, 75 bp, synthetic construct
  source 1..75: mol_type = other DNA
gcggataaagatctgcgtaacctgaaaattggtcaacaactcacctggacattaaccgcagagggcgatttacaa

SEQ ID NO: 807201 - DNA, 75 bp, synthetic construct
  source 1..75: mol_type = other DNA
gagatgacggcagaatcctacgatgataactacctggatgatgaagacgcggactggaccgcgaccgggcagggg

SEQ ID NO: 807202 - DNA, 75 bp, synthetic construct
  source 1..75: mol_type = other DNA
caccggtcaccggtattaccgtgacgccaccaacgggcaatgtggcaaagggtcagaatatcaccctgaccgtgg

SEQ ID NO: 807203 - DNA, 75 bp, synthetic construct
  source 1..75: mol_type = other DNA
gataaaacaaaagccaccgtgtcggtcagtggtatgaccatcaccgtgaaaggtgttgctgcggttgcagaaatc

SEQ ID NO: 807204 - DNA, 75 bp, synthetic construct
  source 1..75: mol_type = other DNA
gatgcttatgcaaacccgttgtcagacgatgactggcagcgactggctaaggtgaaggatctgacgccgggcgag

SEQ ID NO: 807205 - DNA, 75 bp, synthetic construct
  source 1..75: mol_type = other DNA
ctttgtcacagttaatgcaggtaaagaaacgattgctggatcttgcgattgatgcagattttattgctcatgaag

SEQ ID NO: 807206 - DNA, 75 bp, synthetic construct
  source 1..75: mol_type = other DNA
gttaaaaaaggcgatgaatttgcggtattaatgtcacgtgaaatgcttgatggcaaacgtgagcaaagccagtta

SEQ ID NO: 807207 - DNA, 75 bp, synthetic construct
  source 1..75: mol_type = other DNA
gtgaccatgactgacaataacgtagaaattcactgtctgatccgttcactgatcgacagcggtaaagactacgtg

SEQ ID NO: 807208 - DNA, 75 bp, synthetic construct
  source 1..75: mol_type = other DNA
cggatgagcaggttcatatcgaaagcgttggtcattactggacactactgactgaactgctgaaagaaattccgg

SEQ ID NO: 807209 - DNA, 75 bp, synthetic construct
  source 1..75: mol_type = other DNA
tcctggcgggtcatgcagaagaactggatctgcgccttatcgatttcaacggcggcacactgcgtaacgccatcc

SEQ ID NO: 807210 - DNA, 75 bp, synthetic construct
  source 1..75: mol_type = other DNA
agtatcggtaaggccgtgacggcgaaagaagtgatcacccgcacggtgaaagtcaccaacgtgggcaaaccttct

SEQ ID NO: 807211 - DNA, 75 bp, synthetic construct
  source 1..75: mol_type = other DNA
cggtaaaaggtgccggtaccacactgtgggtttacaccggcacgggtgatgcttatgcaaacccgttgtcagacg

SEQ ID NO: 807212 - DNA, 75 bp, synthetic construct
  source 1..75: mol_type = other DNA
agcaactggttgcaggctgatattctgattaacaccgactccgaagaagaaggtgaaatctacatgggttgtgcg

SEQ ID NO: 807213 - DNA, 75 bp, synthetic construct
  source 1..75: mol_type = other DNA
aatcaccaacatcggtcgtccgtcgctggcggaagatcggggtgaaatcacgccggtcaccggtattaccgtgac

SEQ ID NO: 807214 - DNA, 75 bp, synthetic construct
  source 1..75: mol_type = other DNA
tccgcgggtgacaccagttttacgctggcctggaaaccgggtgagcaaggacagcgtgatttgatagcctggttt

SEQ ID NO: 807215 - DNA, 75 bp, synthetic construct
  source 1..75: mol_type = other DNA
cattggtatggcctctgcgctggcggttctggctgacgaaaacgtggttcacggcccgctggaagtgctgctgac

SEQ ID NO: 807216 - DNA, 75 bp, synthetic construct
  source 1..75: mol_type = other DNA
gtggtctgttcaaaaaaccgtatccggaaatggacatggtttctatcgggccaaccatcaccggtccacactctc

SEQ ID NO: 807217 - DNA, 75 bp, synthetic construct
  source 1..75: mol_type = other DNA
cggtgaaaggttccggcaccacactatgggtgtacaccggcactggtgatgcttatgcaaacccgttgtcagacg

SEQ ID NO: 807218 - DNA, 75 bp, synthetic construct
  source 1..75: mol_type = other DNA
cggaccggacgtagccatgagtatcctgaaaactggcttcagggctggggcgggacgctggttgtcgacggacat

SEQ ID NO: 807219 - DNA, 75 bp, synthetic construct
  source 1..75: mol_type = other DNA
atgagcaagttttttaccctcaaggccggtgacgttgtgctgacagtcactttcgatgggcattctttggcaact

SEQ ID NO: 807220 - DNA, 75 bp, synthetic construct
  source 1..75: mol_type = other DNA
gtgggaaaaggccaaagcgtttgataactcttgtccactttccgggtttattcccgccgcagagttcactggcga

SEQ ID NO: 807221 - DNA, 75 bp, synthetic construct
  source 1..75: mol_type = other DNA
tttccagcgcgatttctgccgataacccggaaattgtcgcagctcatgaagcgcgtattccggtgatccgtcgtg

SEQ ID NO: 807222 - DNA, 75 bp, synthetic construct
  source 1..75: mol_type = other DNA
atgtctaatcaatttggtgatacacatatcgatgacgacctgacgttgttgagtgaaacactggaagaggtgctt

SEQ ID NO: 807223 - DNA, 75 bp, synthetic construct
  source 1..75: mol_type = other DNA
gtgaagtgatctcgtcagccattgcgaaaagcctctacccggacgtagatccgtcgaaactgacagaagatcaga

SEQ ID NO: 807224 - DNA, 75 bp, synthetic construct
  source 1..75: mol_type = other DNA
ctgatcaagacgtgctattgttagttctcccggcagaccatataataaaagatctagacacctttcatcaggccg

SEQ ID NO: 807225 - DNA, 75 bp, synthetic construct
  source 1..75: mol_type = other DNA
ggatgtgaaaaaagtggtggagcagattaaagcagatgggcgtcatgaacaccatattcaccgtgaagtttaccg

SEQ ID NO: 807226 - DNA, 75 bp, synthetic construct
  source 1..75: mol_type = other DNA
tatttatactgcttgtggtaaagcaataggggctattgacccagatcatgactttgttcgtattgataaagatgc

SEQ ID NO: 807227 - DNA, 75 bp, synthetic construct
  source 1..75: mol_type = other DNA
ctgtgcgatctgcggcagccattggcgatcccatccgatttcggttcagttcatcatgaagtcgaactggcggtg

SEQ ID NO: 807228 - DNA, 75 bp, synthetic construct
  source 1..75: mol_type = other DNA
tgggggcgacgcactgcctggaaaatccggggaaaattccgctcgatttaattgaagtgcgctccggctcttatc

SEQ ID NO: 807229 - DNA, 75 bp, synthetic construct
  source 1..75: mol_type = other DNA
aggcttgtcggtacagatgcatcatcaccgcgcggaacactgggtagtggttgcgggaacggcaaaagtcaccat

SEQ ID NO: 807230 - DNA, 75 bp, synthetic construct
  source 1..75: mol_type = other DNA
cgccgttttgatttcctcggtgaattcccgctggagccagtgaatggtaaaagcggtacggcaatgctggtcgat

SEQ ID NO: 807231 - DNA, 75 bp, synthetic construct
  source 1..75: mol_type = other DNA
gttccgctgacattcatgctggttggttctccctgtgtgcgtccgatgctggagcgtgggctggctgattttcgc

SEQ ID NO: 807232 - DNA, 75 bp, synthetic construct
  source 1..75: mol_type = other DNA
ttgcgattaccagaatatcgccactctgggcagggctgattggtgtctgtacgtttattgccgcgttactatgga

SEQ ID NO: 807233 - DNA, 75 bp, synthetic construct
  source 1..75: mol_type = other DNA
taggcctttttgcctgggcagttgcattcatcgtctttgctgcattttttaactacacaacgcgcctttattatg

SEQ ID NO: 807234 - DNA, 75 bp, synthetic construct
  source 1..75: mol_type = other DNA
cgtcgaaaaaacgggcaggacttcaaaccactgtatgacacgcacagtctgatggactcaatcacctacgtagtg

SEQ ID NO: 807235 - DNA, 75 bp, synthetic construct
  source 1..75: mol_type = other DNA
ctgcagtctacaggggcaacagtcaggcttggcggccgcgaggtgacattacctccgcgtccttttctggatatc

SEQ ID NO: 807236 - DNA, 75 bp, synthetic construct
  source 1..75: mol_type = other DNA
aagctataccaacagaaagagaactggctgaacattatttgagcagcagaacaacaattcggaaaacaatagaaa

SEQ ID NO: 807237 - DNA, 75 bp, synthetic construct
  source 1..75: mol_type = other DNA
atgaacaagaatatggcaggaattctgggtgcagcggcggtattaaccatgctggcaggttgtacggcgtatgat

SEQ ID NO: 807238 - DNA, 75 bp, synthetic construct
  source 1..75: mol_type = other DNA
atgaacaagaatatggcaggaattctgagtgcagcggcgggattaaccatgctggcgggttgtacggcttatgat

SEQ ID NO: 807239 - DNA, 75 bp, synthetic construct
  source 1..75: mol_type = other DNA
gaatgctgatataccagcgccgccgtctccggaagtatataaagtatttcacaatggagtgctggattttaaacc

SEQ ID NO: 807240 - DNA, 75 bp, synthetic construct
  source 1..75: mol_type = other DNA
gatcgtcaactcgttgaagagggaatgtcttgtgaagttcgtatcggagatgatctgacactgacgggatatgtt

SEQ ID NO: 807241 - DNA, 75 bp, synthetic construct
  source 1..75: mol_type = other DNA
ggaacgcagcaagcaggatgtttcgctgttaccggaaaatcaacaggcgctgaaatttatcccttgtacggggca

SEQ ID NO: 807242 - DNA, 75 bp, synthetic construct
  source 1..75: mol_type = other DNA
gtgacgcggggtattgagcgcctgccgtcggattttgagctttcgctgacggactggtatccgcaggagggcttt

SEQ ID NO: 807243 - DNA, 75 bp, synthetic construct
  source 1..75: mol_type = other DNA
atgcgaacgctttttgaaaacggctgcctggccgtggagcaaggcttaaccacctttgaagagttaatccgcgta

SEQ ID NO: 807244 - DNA, 75 bp, synthetic construct
  source 1..75: mol_type = other DNA
ctgttacccgcttatgcacagaaaaccgggaaaaccaccgatgaaattgctgccatgctggcggatgagacctgg

SEQ ID NO: 807245 - DNA, 75 bp, synthetic construct
  source 1..75: mol_type = other DNA
tccgacagtagtgtatgaagtagaaactacggcgaaagaagttatctacgtcgacagcccatccaagctgccagc

SEQ ID NO: 807246 - DNA, 75 bp, synthetic construct
  source 1..75: mol_type = other DNA
ccttccgcgatgcgctgggcaaacttagcctgaacgatgcctcattgttctatgagccagaaagctccacggcgc

SEQ ID NO: 807247 - DNA, 75 bp, synthetic construct
  source 1..75: mol_type = other DNA
atatttatgccggcaacggtaattttgtgggggacgggatccgacaggcgctgatggcacgcgccggatttgctg

SEQ ID NO: 807248 - DNA, 75 bp, synthetic construct
  source 1..75: mol_type = other DNA
tggacgtggcatcgctggataaagcccgccagttgatgcgcgttcagaaagagggggagcgtcatctgaatattc

SEQ ID NO: 807249 - DNA, 75 bp, synthetic construct
  source 1..75: mol_type = other DNA
tgccggaatccattcgaaacatgattactccgccacgcaacagtgctccacgcgtacaggatgatgaacctgcag

SEQ ID NO: 807250 - DNA, 75 bp, synthetic construct
  source 1..75: mol_type = other DNA
tggtgtgcaggacgttctcgaacgtctggtgcgcgacattccgccgccggaaggcgatccggaaggcccgttgca

SEQ ID NO: 807251 - DNA, 75 bp, synthetic construct
  source 1..75: mol_type = other DNA
gtggtcgacgccgggcagggcgtagaagcgcaaaccctggcaaactgctacaccgcgatggaaatggatctcgaa

SEQ ID NO: 807252 - DNA, 75 bp, synthetic construct
  source 1..75: mol_type = other DNA
atgctgcttgatatcgactatttcaaaagcattaacgataactatggacatgaatgtggcgataaagtgttaagc

SEQ ID NO: 807253 - DNA, 75 bp, synthetic construct
  source 1..75: mol_type = other DNA
ctggcgcgtaatccggcagaaaaagcgctgccaggctttaagaaagttaaacctcaggtttatgccggtctgttc

SEQ ID NO: 807254 - DNA, 75 bp, synthetic construct
  source 1..75: mol_type = other DNA
cgcacattattgcgcgttctaccgttaaacagttgcgtaaaaacgtactggctaaatgttatggcggtgatatca

SEQ ID NO: 807255 - DNA, 75 bp, synthetic construct
  source 1..75: mol_type = other DNA
ttatccgtattaaaaacggcaccctgcgtaagggcgacaaagtgaaagtcatgagtaccgggcagacctataacg

SEQ ID NO: 807256 - DNA, 75 bp, synthetic construct
  source 1..75: mol_type = other DNA
cgcgtgaatgatgtccttctgcctggacgccttctggatgccgctcatgaagccctgttcagggcgctggattca

SEQ ID NO: 807257 - DNA, 75 bp, synthetic construct
  source 1..75: mol_type = other DNA
actggaacaacgcgcttctgatattcatatcgaaccagcagataatgcctatcgcatccgcttgcgtatcgacgg

SEQ ID NO: 807258 - DNA, 75 bp, synthetic construct
  source 1..75: mol_type = other DNA
gttacggcgtttccgctgagcgtgtgcgccagctggaaaagaacgcgatgaaaaaattgcgtgctgccattgaag

SEQ ID NO: 807259 - DNA, 75 bp, synthetic construct
  source 1..75: mol_type = other DNA
gttacggcgtttccgctgagcgtgtgcgtcagcttgaaaagaacgcgatgaaaaaacttcgcgctgctattgaag

SEQ ID NO: 807260 - DNA, 75 bp, synthetic construct
  source 1..75: mol_type = other DNA
cacctttcagggcgttttgcgtgcgttattgcgccaggatcctgacgtcatcatgatcggagagatccgcgatgg

SEQ ID NO: 807261 - DNA, 75 bp, synthetic construct
  source 1..75: mol_type = other DNA
ttgaaaacggctgcctggccgtggaacaaggtttaaccacctttgaagagttaatccgcgtattggggatgccac

SEQ ID NO: 807262 - DNA, 75 bp, synthetic construct
  source 1..75: mol_type = other DNA
ggatgtcaacacgctgggaatgcagccgttacaactggcggactttgctcatgccctacagcaaccacagggact

SEQ ID NO: 807263 - DNA, 75 bp, synthetic construct
  source 1..75: mol_type = other DNA
aattcatgccctgtcggcctatctgacgccgtcgtgtcgtgaactgatggagggagatgcccgccgccgtaagga

SEQ ID NO: 807264 - DNA, 75 bp, synthetic construct
  source 1..75: mol_type = other DNA
ctggcccgcgcccagttctgggagttgatcgaacgcattcgcggtgatcgcgcagagatgagcgtggtcgtcgcc

SEQ ID NO: 807265 - DNA, 75 bp, synthetic construct
  source 1..75: mol_type = other DNA
acgttgcgatcgcatgtcgatgatgcacgccggcaaggtgctcgatagcgatgcaccggcgaaactggtggaaaa

SEQ ID NO: 807266 - DNA, 75 bp, synthetic construct
  source 1..75: mol_type = other DNA
gttacggtgtttccgctgaacgtgtgcgccaactggaaaagaacgcgatgaaaaaacttcgcgccgctattgaag

SEQ ID NO: 807267 - DNA, 75 bp, synthetic construct
  source 1..75: mol_type = other DNA
ccgaattagcgaagaaatataatctgacgctgcaatggatttataagatagtgaaacgcgtacatgcggaaaagc

SEQ ID NO: 807268 - DNA, 75 bp, synthetic construct
  source 1..75: mol_type = other DNA
gggagggggacccggagcataaccccttcgggctggcgcttgactgctacagcagtacaccacaacggctggaag

SEQ ID NO: 807269 - DNA, 75 bp, synthetic construct
  source 1..75: mol_type = other DNA
ggctttatgtttgtatatcgataatagctttgcgattaccagaatatcgccactctgggcagggctaattggtgt

SEQ ID NO: 807270 - DNA, 75 bp, synthetic construct
  source 1..75: mol_type = other DNA
cgtttatcgtggttgtacctggcgttaatgaagcaagcttcaggcaaaatggcaaagcgatgctggcgcatgcgg

SEQ ID NO: 807271 - DNA, 75 bp, synthetic construct
  source 1..75: mol_type = other DNA
aaatttataccttcggcccgactttccgtgctgaaaactccaacaccagccgtcacctggcggaattctggatgc

SEQ ID NO: 807272 - DNA, 75 bp, synthetic construct
  source 1..75: mol_type = other DNA
cagatccgcgcccagcaattccccatgatgaagtcgaacgcagaatggcagaacgctttgctaaaatgcgcaagg

SEQ ID NO: 807273 - DNA, 75 bp, synthetic construct
  source 1..75: mol_type = other DNA
atcgataatagctttgcgattaccagaatatcgccactctgggcagggctaattggtgtctgtacgtttattgcc

SEQ ID NO: 807274 - DNA, 75 bp, synthetic construct
  source 1..75: mol_type = other DNA
cctcccggcagtaccacgatattaggtcttttttgcctgggcagttgcattcatcgtctttactgcattttttta

SEQ ID NO: 807275 - DNA, 75 bp, synthetic construct
  source 1..75: mol_type = other DNA
tgccgccagacggcacctggccgatgggcaccacgcgctgggaaaaacgcaatattgccgaagagatccccatct

SEQ ID NO: 807276 - DNA, 75 bp, synthetic construct
  source 1..75: mol_type = other DNA
catcaatatgatgtcgcgtctggagcatgtggaagaagagaaaatcaattatgacttcttcctcaacttaccaga

SEQ ID NO: 807277 - DNA, 75 bp, synthetic construct
  source 1..75: mol_type = other DNA
gcagtttatcgacaaatatcagatggcagaacgcctgaaacctggcggtattttcctgcttaatactccgtacag

SEQ ID NO: 807278 - DNA, 75 bp, synthetic construct
  source 1..75: mol_type = other DNA
cacgctggcacaagcgcttcatcgcttctttaacgaacagggttttttctgggtttcgactccgctgattactgc

SEQ ID NO: 807279 - DNA, 75 bp, synthetic construct
  source 1..75: mol_type = other DNA
ctggtggtatcgcgatctgcgtcgctacggtactgttccgcattcaggtttcggtcttggttttgaacgcctgat

SEQ ID NO: 807280 - DNA, 75 bp, synthetic construct
  source 1..75: mol_type = other DNA
tcggtcttggttttgaacgcctgattgcttacgtaactggcgtgcaaaacgtacgtgatgtgattccgttcccac

SEQ ID NO: 807281 - DNA, 75 bp, synthetic construct
  source 1..75: mol_type = other DNA
cgtttatgccgacctacgaactctctgaagcccttgccgaagcgattgttggcgtggctaacggcgctggcgtgc

SEQ ID NO: 807282 - DNA, 75 bp, synthetic construct
  source 1..75: mol_type = other DNA
aaaaagccaaagagccggtgctggagattattcaggcgcggcgctggattgaagcgcgtatgcaggaggccgggt

SEQ ID NO: 807283 - DNA, 75 bp, synthetic construct
  source 1..75: mol_type = other DNA
ggcggcggcatcacaagtaatgctggcggtggagattatggatacagcgtttatgaactccatcagcaaatggaa

SEQ ID NO: 807284 - DNA, 75 bp, synthetic construct
  source 1..75: mol_type = other DNA
ttgccgcgatgatcgaaacgggcgttgggatcccgtcgatgtgcctgtccgcacatcgtcgttttccctttggta

SEQ ID NO: 807285 - DNA, 75 bp, synthetic construct
  source 1..75: mol_type = other DNA
gcaaaaagctgtggttttgattttgtcgaaatgtcagtggatgaaaccgatgaacgtctgtcacgccttgactgg

SEQ ID NO: 807286 - DNA, 75 bp, synthetic construct
  source 1..75: mol_type = other DNA
cgcgacggtggaaaaaggccacgcgatggcgcaacgctgcggtggtgaaattcagatcgagttgttcggtaactg

SEQ ID NO: 807287 - DNA, 75 bp, synthetic construct
  source 1..75: mol_type = other DNA
gaaggcacccaacaacgttttgctgaagggctggcgtgggcagtcgaacaggcggcggcatcacaagtaatgctg

SEQ ID NO: 807288 - DNA, 75 bp, synthetic construct
  source 1..75: mol_type = other DNA
ggcagcagctatcggccgaccctttggttgggtaaatccaactttgttgccgttgagttacctaacgcgcagggt

SEQ ID NO: 807289 - DNA, 75 bp, synthetic construct
  source 1..75: mol_type = other DNA
gagcgatgaagaaattcgtttctttatcaacggaattcgcgacaacactatctccgaagggcagattgccgccct

SEQ ID NO: 807290 - DNA, 75 bp, synthetic construct
  source 1..75: mol_type = other DNA
gtaaaaaacgtgatggtcatgcgctaagcgatgaagaaattcgtttctttatcaacggtattcgcgacaacacta

SEQ ID NO: 807291 - DNA, 75 bp, synthetic construct
  source 1..75: mol_type = other DNA
atggacggattcagaagccattcacgggacgctcaggtctggcgttacctgcgtgccggaagccgtgccgtcagc

SEQ ID NO: 807292 - DNA, 75 bp, synthetic construct
  source 1..75: mol_type = other DNA
ggctggaggctggggccaaattaatcggtggatgctgtcgcaccacgccgaaagatattgctgagctgaacgcgc

SEQ ID NO: 807293 - DNA, 75 bp, synthetic construct
  source 1..75: mol_type = other DNA
gccgatggtccgaaagaggtgcttgggcgactgctgcaaaacagcaaaacgctttcttcacagttccgcaccggg

SEQ ID NO: 807294 - DNA, 75 bp, synthetic construct
  source 1..75: mol_type = other DNA
agccactgtatctggacgtaatgaccgcgctggcggaagcctttaataatggcgagcgtgaaacactgccacgcg

SEQ ID NO: 807295 - DNA, 75 bp, synthetic construct
  source 1..75: mol_type = other DNA
ggcagcggcatcacaagtcatgctggcggtggagattatggacaccgcgtttatgaactctatcagcaaatggaa

SEQ ID NO: 807296 - DNA, 75 bp, synthetic construct
  source 1..75: mol_type = other DNA
cctgcagcaattcgaactgcaatcaggctttcgtgaagctcagctcatggcatggcagcagtttttcctgcatca

SEQ ID NO: 807297 - DNA, 75 bp, synthetic construct
  source 1..75: mol_type = other DNA
ctgcaacgcgcggcgcagcgtgccggcttccgcgacgtggttttccagtacgaaccggtcgccgccggtctggat

SEQ ID NO: 807298 - DNA, 75 bp, synthetic construct
  source 1..75: mol_type = other DNA
tacagcggtacctttggttcgcttggcctgcgggccggtattcagcgctataacaacggcgacagcaacgccaat

SEQ ID NO: 807299 - DNA, 75 bp, synthetic construct
  source 1..75: mol_type = other DNA
gttccgaaaggtttaacattaggttttcatatcagggatcgtttaggtaatattgtatttggaacgaatacctta

SEQ ID NO: 807300 - DNA, 75 bp, synthetic construct
  source 1..75: mol_type = other DNA
cgacgtctattacgaagaccacgacgaaggcacccagcaacgttttgctgaagggctggcgtgggcggtcgaaca

SEQ ID NO: 807301 - DNA, 75 bp, synthetic construct
  source 1..75: mol_type = other DNA
ctgtgaaagattttttcaaaaataatgatatgttccaaatttactcgggtaagcaaatatcttccttacttgagt

SEQ ID NO: 807302 - DNA, 75 bp, synthetic construct
  source 1..75: mol_type = other DNA
cttcaggaatattgttagtaccgacgccaatcaatatttgtcaatgggaaaacgttttttaataatgaatcaaaa

SEQ ID NO: 807303 - DNA, 75 bp, synthetic construct
  source 1..75: mol_type = other DNA
tgccccagaaatgtctcctgcatattatgccaagcaatgttataatttatggtttgaattatttgatataaatca

SEQ ID NO: 807304 - DNA, 75 bp, synthetic construct
  source 1..75: mol_type = other DNA
agagagcaaaatcgccttgtccgaaagcgcacaaatcgatacccacctgccgtttatcagcgacacgctggccac

SEQ ID NO: 807305 - DNA, 75 bp, synthetic construct
  source 1..75: mol_type = other DNA
tacagctcagccaatggccgcctgctgcgtgatctggcgcgcgatgcccgcgatgcggaaaaggtctccctgctc

SEQ ID NO: 807306 - DNA, 75 bp, synthetic construct
  source 1..75: mol_type = other DNA
aagtccgaaaggacagcgtattctggccgatgccaatacaggaaaatatccggtgacaccacttgccgcagacaa

SEQ ID NO: 807307 - DNA, 75 bp, synthetic construct
  source 1..75: mol_type = other DNA
cgtctgggtcggtgatgtggtctgcagcggcctctcatcgtgggcggcggtgacgcagacaggagaagagaatga

SEQ ID NO: 807308 - DNA, 75 bp, synthetic construct
  source 1..75: mol_type = other DNA
atgagttacttacccgtggcgaaaaagtcggggtgctgaaagttcgactataccgcccgttctccgccaaacatt

SEQ ID NO: 807309 - DNA, 75 bp, synthetic construct
  source 1..75: mol_type = other DNA
gccgtgtgccgtttattcatttttttgatggtttccgcacgtcccacgagatcaacaaaattgttccactggctg

SEQ ID NO: 807310 - DNA, 75 bp, synthetic construct
  source 1..75: mol_type = other DNA
catttgatgaatgcaatattatgccaggatttagccagggaaattatttcattaagaaaagagctccatgcctga

SEQ ID NO: 807311 - DNA, 75 bp, synthetic construct
  source 1..75: mol_type = other DNA
tacgggcatccgcaagcggaacgggtgattatcctgatgggctctgccattggcacctgtgaagaagtggttgat

SEQ ID NO: 807312 - DNA, 75 bp, synthetic construct
  source 1..75: mol_type = other DNA
ttgctccatgagcaacgtttccgccgtctgaattcgcaacagccagaagtggcggaacagttatggaaagatgcc

SEQ ID NO: 807313 - DNA, 75 bp, synthetic construct
  source 1..75: mol_type = other DNA
atcagaaaaaagcacgcttttatgtcattaacgcagcgaaaatcgcgcgtgaatgtggactggcggctcgtatta

SEQ ID NO: 807314 - DNA, 75 bp, synthetic construct
  source 1..75: mol_type = other DNA
gcaaaagtacctgggaaccgttctatttcgccatcgtctgtggcgtgatttacctggttttcaccaccgtttcca

SEQ ID NO: 807315 - DNA, 75 bp, synthetic construct
  source 1..75: mol_type = other DNA
tgaatctaatcttgctggtgcgtttatttcattactcgatacggtaatcgtcgaattaaataaagcgatcgaaat

SEQ ID NO: 807316 - DNA, 75 bp, synthetic construct
  source 1..75: mol_type = other DNA
tctctgaattcctgaaaactgtagaagcgcttcaaaatgagtatggcgaagtgcgtatggtgtttgggtttgata

SEQ ID NO: 807317 - DNA, 75 bp, synthetic construct
  source 1..75: mol_type = other DNA
agctcagaaaggcaagcttgatgctcagaaaggcgagcttgaagcgcagaagcaaaatcttggtgaactgaccac

SEQ ID NO: 807318 - DNA, 75 bp, synthetic construct
  source 1..75: mol_type = other DNA
tcaatgccactgcggctgttggtggttacagtgaccagcaggcaatggcagtgggtgttggttatcgtttcaatg

SEQ ID NO: 807319 - DNA, 75 bp, synthetic construct
  source 1..75: mol_type = other DNA
aggaggtccgccggatcttcaataaagttaataatctatctaatactgttgtaaatcctgcattgaaaaatcaag

SEQ ID NO: 807320 - DNA, 75 bp, synthetic construct
  source 1..75: mol_type = other DNA
ggatttgctcgtgagcgtattattctcggtggcgaccatctgggaccaaactgctggcagcaagaaaatgcggat

SEQ ID NO: 807321 - DNA, 75 bp, synthetic construct
  source 1..75: mol_type = other DNA
ggtaattgaagaagtgatgctcgacgaaccgcaatactggaaaaaatattatcgcacgggttttaacgattcatt

SEQ ID NO: 807322 - DNA, 75 bp, synthetic construct
  source 1..75: mol_type = other DNA
gactccccggtaacgttccataaactgacaaccagtaacctcaccggtcagggtggcaccatcaatatgcgtgtt

SEQ ID NO: 807323 - DNA, 75 bp, synthetic construct
  source 1..75: mol_type = other DNA
aaccgtgacagcgatgaagactggtacctgcgcagtgaaaatgcctatcgttctgaagtccccccgtatgcctcc

SEQ ID NO: 807324 - DNA, 75 bp, synthetic construct
  source 1..75: mol_type = other DNA
ctcagcgcggcacggccctgaagctgaccggcagcacagtgctgaacggtgccattgaccccacgaatgtcaccc

SEQ ID NO: 807325 - DNA, 75 bp, synthetic construct
  source 1..75: mol_type = other DNA
aaatattatcgcacgggttttaacgattcattactggatattcgttacagcctgtcggatcgtattcgttattac

SEQ ID NO: 807326 - DNA, 75 bp, synthetic construct
  source 1..75: mol_type = other DNA
aggcaccctggtggtggcttccgaactggcacgctcacggggaaaaggcgccggtgtggcggttgctctgtctct

SEQ ID NO: 807327 - DNA, 75 bp, synthetic construct
  source 1..75: mol_type = other DNA
ccaacaagagctggtgtgggtaggccgtgcgatggtgctggtggtagcgttggtggctatcgctctggcggcgaa

SEQ ID NO: 807328 - DNA, 75 bp, synthetic construct
  source 1..75: mol_type = other DNA
gaacaacgataccctgaccatccgtgaaggcgatgcactcctgcagggaggctctctcaccggtaacggcagcgt

SEQ ID NO: 807329 - DNA, 75 bp, synthetic construct
  source 1..75: mol_type = other DNA
acactgaacggcggtaaccagtatgtgcacaacggcggtacagcgtctggcactgttgtgaacagtgacggctgg

SEQ ID NO: 807330 - DNA, 75 bp, synthetic construct
  source 1..75: mol_type = other DNA
ggtgccaccacagaagaaggtgcgtttgccctgagtcgcccgcttcaggccggagcctttaactacaccctgaac

SEQ ID NO: 807331 - DNA, 75 bp, synthetic construct
  source 1..75: mol_type = other DNA
tgccactgttgaggggaacaatgccagcggtaagttcagtattgatggcacatccggtcaggccagcggactgct

SEQ ID NO: 807332 - DNA, 75 bp, synthetic construct
  source 1..75: mol_type = other DNA
aaccgtgacagcgatgaagactggtacctgcgcagtgaatatgcttatcgttctgaagtcccccggtatgcctcc

SEQ ID NO: 807333 - DNA, 75 bp, synthetic construct
  source 1..75: mol_type = other DNA
cgtgcggtgacgtaccagaaatcatggtgattggcggtgggcgcgtatacgagcagttcctgccgaaagcgcaaa

SEQ ID NO: 807334 - DNA, 75 bp, synthetic construct
  source 1..75: mol_type = other DNA
tgagcagtgggtacatgaaggcgggattgcaacgggtaccgtcattaatgagaagggctggcaggccatcaaatc

SEQ ID NO: 807335 - DNA, 75 bp, synthetic construct
  source 1..75: mol_type = other DNA
accgtcaccacggatgtcattgctcagcgcggcacggccctgaagctgaccggcagcactgtgctgaacggtgcc

SEQ ID NO: 807336 - DNA, 75 bp, synthetic construct
  source 1..75: mol_type = other DNA
ctgacgacaggggtatatggtgctgctggccattcttccgttgatgttaaggatgatgacggttcccgcgccggc

SEQ ID NO: 807337 - DNA, 75 bp, synthetic construct
  source 1..75: mol_type = other DNA
aaccgtgacagcgatgaagactggtacctgcgcagtgaacatgcctatcgttctgaagtcccccagtatgcctcc

SEQ ID NO: 807338 - DNA, 75 bp, synthetic construct
  source 1..75: mol_type = other DNA
aaccgtgacagcgatgaagactggtacctgcgcagtgaacatgcatatcgttctgaagtccccccgtatgcctcc

SEQ ID NO: 807339 - DNA, 75 bp, synthetic construct
  source 1..75: mol_type = other DNA
aaccgtgacagcgatgaagactggtacctgcgcagtgaatatgcgtatcgttctgaagtccccctgtatgcctcc

SEQ ID NO: 807340 - DNA, 75 bp, synthetic construct
  source 1..75: mol_type = other DNA
cagcactgctgcaaccgtcaccggcacaaaccgcctgggagcattctctgttgtggagggtaaagctgataatgt

SEQ ID NO: 807341 - DNA, 75 bp, synthetic construct
  source 1..75: mol_type = other DNA
ggttatgcccacagcgtcagcggcagcagcgctgaaggttataacggtcaggccacgctgaatgtgactttctga

SEQ ID NO: 807342 - DNA, 75 bp, synthetic construct
  source 1..75: mol_type = other DNA
tgctgctgtcacgtcactcccggcactggctgctgacacggttgtccaggcgggagaaaccgtgaacggtggaac

SEQ ID NO: 807343 - DNA, 75 bp, synthetic construct
  source 1..75: mol_type = other DNA
ccgtcagcggcgatgcaaaaacgttttgccgaagctgacgcgcactatcattcggtgccgccgtcacggttgcag

SEQ ID NO: 807344 - DNA, 75 bp, synthetic construct
  source 1..75: mol_type = other DNA
ggtacacggagaggcacataacacccgactggaggggggtaaccagtatgtacacaacggtggcacggcaacaga

SEQ ID NO: 807345 - DNA, 75 bp, synthetic construct
  source 1..75: mol_type = other DNA
ggaaagcagcggcagctatggcttcgtccgtctggagggggacctgctcagaacagaggttgccggtatgtctgt

SEQ ID NO: 807346 - DNA, 75 bp, synthetic construct
  source 1..75: mol_type = other DNA
gaataacgataccctgaccatccgtgaaggcgatgcactcctgcagggaggcgctctcaccggtaacggcagggt

SEQ ID NO: 807347 - DNA, 75 bp, synthetic construct
  source 1..75: mol_type = other DNA
gccaacagaatcgacccgcaaattcaagctaaagccgtagacgaagagcaatatttgaaaaggtgggcacctacg

SEQ ID NO: 807348 - DNA, 75 bp, synthetic construct
  source 1..75: mol_type = other DNA
gagtgaattaccggtgaactggtgggtacagccttctgttatccgcaccttcagctcccggggagatatgcgtgt

SEQ ID NO: 807349 - DNA, 75 bp, synthetic construct
  source 1..75: mol_type = other DNA
tggaaaaatcaggaagtggcacactcactgtcagcaacaccacactcacccagaaagccgtcaacctgaatgaag

SEQ ID NO: 807350 - DNA, 75 bp, synthetic construct
  source 1..75: mol_type = other DNA
ccggtgtggcgattgcgctgtctcttgctgctgtcacatcagtcccggcgctggctgctgacacggttgtacagg

SEQ ID NO: 807351 - DNA, 75 bp, synthetic construct
  source 1..75: mol_type = other DNA
cgtagatattcccgtggcgagcgataacccagtgcactatgcggatgccattcgttataatgctcgaatgcctct

SEQ ID NO: 807352 - DNA, 75 bp, synthetic construct
  source 1..75: mol_type = other DNA
tgcgcagtgaaaatgcttatcgtgctgaggtccccctgtatgcctccatgctgacacaggcaatggactatgacc

SEQ ID NO: 807353 - DNA, 75 bp, synthetic construct
  source 1..75: mol_type = other DNA
gacaacgccggttatgtgaagttcgggcatggcagtgcacaacatgtgcgtgccggtttccgtctgggcagccac

SEQ ID NO: 807354 - DNA, 75 bp, synthetic construct
  source 1..75: mol_type = other DNA
cgtgaactgccggtgaactggtgggtacagccttctgttatccgcaccttcagctcacggggtgacatgagcatg

SEQ ID NO: 807355 - DNA, 75 bp, synthetic construct
  source 1..75: mol_type = other DNA
actgacaaatcatgacaaccagattgttctcggtacggccaacggaatgaccatcagtaccggtctggagtatgg

SEQ ID NO: 807356 - DNA, 75 bp, synthetic construct
  source 1..75: mol_type = other DNA
gctgaaggaacagcaaataccactgtggtttatgccggcggcgaccagactgtacatggtcacgcactggatacc

SEQ ID NO: 807357 - DNA, 75 bp, synthetic construct
  source 1..75: mol_type = other DNA
tggcgatcaaccaaaaactttgacgattatattttgggtggccgcagtcttggcccatttgtaacggcattatcg

SEQ ID NO: 807358 - DNA, 75 bp, synthetic construct
  source 1..75: mol_type = other DNA
aaatatcaccctgggcgttcaggccggttatgctcacagcgtcagcggcagcagcgctgaaggctataacggtca

SEQ ID NO: 807359 - DNA, 75 bp, synthetic construct
  source 1..75: mol_type = other DNA
gcatgggtacagccgcagccggcagtaacatgacgttctcaccgtcccagaatggcacgtcactggacctgcagg

SEQ ID NO: 807360 - DNA, 75 bp, synthetic construct
  source 1..75: mol_type = other DNA
tgatgtggtcagtaccggcgatattgttaacgccggagagattcgctttgataatcagacgacaccggatgccgc

SEQ ID NO: 807361 - DNA, 75 bp, synthetic construct
  source 1..75: mol_type = other DNA
tggcggcagattctcaccacagcattgtccatgcgcgtcgtatcagtatgacctggatgatcctctgcctggcag

SEQ ID NO: 807362 - DNA, 75 bp, synthetic construct
  source 1..75: mol_type = other DNA
tctggagtccggtggtcgcctggatgtactggagggccattcagcccggaaaacactggtggatgacggcggaac

SEQ ID NO: 807363 - DNA, 75 bp, synthetic construct
  source 1..75: mol_type = other DNA
gctcagtaaaggcgccagcatggtactgaatggcgatgtggtcagtaccggcgatattgttaacgcaggggagat

SEQ ID NO: 807364 - DNA, 75 bp, synthetic construct
  source 1..75: mol_type = other DNA
tgagaatggtcgtcagattgtggctgctgaaggaacggcaaataccactgtggtttatgccggcggcgaccagac

SEQ ID NO: 807365 - DNA, 75 bp, synthetic construct
  source 1..75: mol_type = other DNA
ataatcagacaacaccggacgccgtactgagccgtgctgttgcaaaaggcaacgccccggtaacgttccataaac

SEQ ID NO: 807366 - DNA, 75 bp, synthetic construct
  source 1..75: mol_type = other DNA
tggtaaaggcacctcatcccgtgacaccctgcgcgacagtgcaaaacacagtgtgagtgaattgccggtgaactg

SEQ ID NO: 807367 - DNA, 75 bp, synthetic construct
  source 1..75: mol_type = other DNA
gaaatggcatggcagataacgtcgttctggaaaatggcggtcgtctggatgtactggagagccattcagcacaga

SEQ ID NO: 807368 - DNA, 75 bp, synthetic construct
  source 1..75: mol_type = other DNA
ggaaaaggcgatgcatatctcgctggtgctgtacgccgaacacgagtttaacgcttccacctttaccagccgggt

SEQ ID NO: 807369 - DNA, 75 bp, synthetic construct
  source 1..75: mol_type = other DNA
tggcgatcgactaaaaactttgacgactatattctgggcggtcgcagccttgggccgtttgtaacggcgttatcg

SEQ ID NO: 807370 - DNA, 75 bp, synthetic construct
  source 1..75: mol_type = other DNA
gaataacgataccctgaccatccatgaaggtgatgcactcctgcagggaggcgctcttaccggtaacggcagggt

SEQ ID NO: 807371 - DNA, 75 bp, synthetic construct
  source 1..75: mol_type = other DNA
gggcggcaccatcaatatgcgtgtcagccttgatggcagtaatgcctcagaccagctggtaattaatggtggtca

SEQ ID NO: 807372 - DNA, 75 bp, synthetic construct
  source 1..75: mol_type = other DNA
atgaagacgggattgcaacgggtaccgtcattaatgagaagggctggcaggccatcaaatccggcgcagtggcaa

SEQ ID NO: 807373 - DNA, 75 bp, synthetic construct
  source 1..75: mol_type = other DNA
gcggtgtggcggttgcactgtctcttgccgcagtcacgtcactcccggtgctggctgctgacatcgttgtgcccc

SEQ ID NO: 807374 - DNA, 75 bp, synthetic construct
  source 1..75: mol_type = other DNA
gttcgggcatggcagtgcacaacatgtgcgtgccggtttccgtctgggcagccacaacgatatgacctttggtga

SEQ ID NO: 807375 - DNA, 75 bp, synthetic construct
  source 1..75: mol_type = other DNA
ggcggcactgacttaccgttatggtgacgaacatcggcccgtcaccaccgccgacattctgacgccacgacgccg

SEQ ID NO: 807376 - DNA, 75 bp, synthetic construct
  source 1..75: mol_type = other DNA
agccacaacgatatgacctttggtgaaggcacctcatcccgtgcccccctgcgtgacagtgcaaaacacagtgtg

SEQ ID NO: 807377 - DNA, 75 bp, synthetic construct
  source 1..75: mol_type = other DNA
gcacaacatgtgcgtgccggcttccgtctgggcagccacaacgatatgaactttggtaaaggcacctcatcccgt

SEQ ID NO: 807378 - DNA, 75 bp, synthetic construct
  source 1..75: mol_type = other DNA
atgtgcacaaggacggactggcgctgaacacggtaattaacgaggggggctggcaggttgttaaggccggtggta

SEQ ID NO: 807379 - DNA, 75 bp, synthetic construct
  source 1..75: mol_type = other DNA
ggtctgcccttcagtatcactgacaacctgatgctggagccacaactgcagtatacctggcagggactttccctg

SEQ ID NO: 807380 - DNA, 75 bp, synthetic construct
  source 1..75: mol_type = other DNA
acacagtgtgagtgaattaccggtgaactggtgggtacagccttctgttatccgcaccttcagctcccggggaga

SEQ ID NO: 807381 - DNA, 75 bp, synthetic construct
  source 1..75: mol_type = other DNA
cgacggtacttttacctttgatgaaaaaaatccagctgccgataaagtgaatgtgacaattaacaccaccagcgt

SEQ ID NO: 807382 - DNA, 75 bp, synthetic construct
  source 1..75: mol_type = other DNA
ctgcgcagtgaaaatgcttatcgtgctgaagtccccctgtatgcctccatgctgacacaggcaatggactatgac

SEQ ID NO: 807383 - DNA, 75 bp, synthetic construct
  source 1..75: mol_type = other DNA
ctgccggtgaactggtgggtacagccttccgttatccgcaccttcagctcccggggtgatatgcgtgtggggacc

SEQ ID NO: 807384 - DNA, 75 bp, synthetic construct
  source 1..75: mol_type = other DNA
ccgacacggttgtgaataccggcgcggaagggggaccggatgcagaaaacggtgataccgggcagtttgttcgcg

SEQ ID NO: 807385 - DNA, 75 bp, synthetic construct
  source 1..75: mol_type = other DNA
gccggacagtgacgaaaacaccggcgggcaatggataaacgcgggtggcacaggcagaaacaccactgtcaccgc

SEQ ID NO: 807386 - DNA, 75 bp, synthetic construct
  source 1..75: mol_type = other DNA
cagtgcagatttcctcaataccgcaaaatatccacaggcaacattcacctccactagcgtaaagaaagacggtga

SEQ ID NO: 807387 - DNA, 75 bp, synthetic construct
  source 1..75: mol_type = other DNA
gttagccttgatggcagtaatgcctcagaccagctggtgattaatggtggtcaggcaaccggcaaaacctggctt

SEQ ID NO: 807388 - DNA, 75 bp, synthetic construct
  source 1..75: mol_type = other DNA
acgcgcaacggtgcgctggcggggatgatcatcggtgcgctgacggtgatcgtctggaaacagttcggctggctg

SEQ ID NO: 807389 - DNA, 75 bp, synthetic construct
  source 1..75: mol_type = other DNA
acaggctggtatggaatcacattacgggcgctttcgtggttgcctccgaactggcccgcgcacagggtaaacgtg

SEQ ID NO: 807390 - DNA, 75 bp, synthetic construct
  source 1..75: mol_type = other DNA
actggaaaccggtctgcccttcagtatcactgacaacctgatgctggagccacaactgcagtacacctggcaggg

SEQ ID NO: 807391 - DNA, 75 bp, synthetic construct
  source 1..75: mol_type = other DNA
acaggctggtatggaatcacattacgggcaccctggtggtggcttccgaactggcccgctcacgggggaaacgta

SEQ ID NO: 807392 - DNA, 75 bp, synthetic construct
  source 1..75: mol_type = other DNA
taccacactgaatggcggttaccagtatgtgcacagggacggacttgcgctgaacacggtaattaacgagggggg

SEQ ID NO: 807393 - DNA, 75 bp, synthetic construct
  source 1..75: mol_type = other DNA
gtgacctgatgagaacagaggttgccggtatgtctgtgaccgcgggggtatatggtgctgctggccattcttccg

SEQ ID NO: 807394 - DNA, 75 bp, synthetic construct
  source 1..75: mol_type = other DNA
caggggcggcacactggcgggcaccaccacgctgaataacggcgccatacttaccctttccgggaagacggtgaa

SEQ ID NO: 807395 - DNA, 75 bp, synthetic construct
  source 1..75: mol_type = other DNA
ccaacaacactactgtcaccggtggtggtcttcagagagtgaatgccggaggaagcgtttcagacacggttatca

SEQ ID NO: 807396 - DNA, 75 bp, synthetic construct
  source 1..75: mol_type = other DNA
aggtgtcggaacgtctggtggattatgcggcattccagtggcagcgggcttcagttcagcgttttattgcacttt

SEQ ID NO: 807397 - DNA, 75 bp, synthetic construct
  source 1..75: mol_type = other DNA
tatcgcaaaaatctgctttacgtccactcactgcgcgaactgacggttaatgctgtgctgcccggcattcgcaat

SEQ ID NO: 807398 - DNA, 75 bp, synthetic construct
  source 1..75: mol_type = other DNA
aaaaacctgaacggacagaatggcaccatcagcctgcgtgtacgcccggatatggcacagaacaatgctgacaga

SEQ ID NO: 807399 - DNA, 75 bp, synthetic construct
  source 1..75: mol_type = other DNA
tgtgcgtgccggtttccgtctgggcagccacaacgatatgacctttggtgaaggcacctcatcccgtgcccccct

SEQ ID NO: 807400 - DNA, 75 bp, synthetic construct
  source 1..75: mol_type = other DNA
caggcgctggcacaggcggcactgacttaccgttatggtgacgaacatcagccagtcaccaccgctgacattctg

SEQ ID NO: 807401 - DNA, 75 bp, synthetic construct
  source 1..75: mol_type = other DNA
tggcggcggattctcactatagcattgtccatgcgcgtcgtatcagcatgacctggatgatcctctgtctggcag

SEQ ID NO: 807402 - DNA, 75 bp, synthetic construct
  source 1..75: mol_type = other DNA
ctgcgcgacagtgccaaacacagtgtgcgtgaactgcccgtgagctggtgggtacagccttctgttatccgcacc

SEQ ID NO: 807403 - DNA, 75 bp, synthetic construct
  source 1..75: mol_type = other DNA
cgctgccagattatttcaccggacgttttgaagataaaagccgtattttgcgtattatttctgcgctggttattt

SEQ ID NO: 807404 - DNA, 75 bp, synthetic construct
  source 1..75: mol_type = other DNA
tgcgcagtgaaaatgcttatcgtgctgaagtccccctgtatacctccatgctgacacaggcaatggactatgacc

SEQ ID NO: 807405 - DNA, 75 bp, synthetic construct
  source 1..75: mol_type = other DNA
gaaatgccgtacgtaccactatcaatgaaaatggtcgtcagattgtggctgctgaaggaacagcaaataccactg

SEQ ID NO: 807406 - DNA, 75 bp, synthetic construct
  source 1..75: mol_type = other DNA
cgctgttctgccgggaattcggcctttgctggcagatcttcgggcgcaaggcatcccggtagggctggcctccgt

SEQ ID NO: 807407 - DNA, 75 bp, synthetic construct
  source 1..75: mol_type = other DNA
ggcggggaagccactgcagtcacccagaacacgggcggtgcactggttaccagtacggctgcaaccgttaccggc

SEQ ID NO: 807408 - DNA, 75 bp, synthetic construct
  source 1..75: mol_type = other DNA
cgacaggggtgcatggtgccgcaggccattcttccgttgatgttaaggatgatgacggttcccgcgccggcacgg

SEQ ID NO: 807409 - DNA, 75 bp, synthetic construct
  source 1..75: mol_type = other DNA
accctgggcgttcaggccggttatgcccacagcgtcagcggcagcagcgctgaaggttataacggtcaggccacg

SEQ ID NO: 807410 - DNA, 75 bp, synthetic construct
  source 1..75: mol_type = other DNA
gacggtacacgggcatgcgctggataccacactgaatggcggttaccagtatgtgcacaaggacggacttgcgct

SEQ ID NO: 807411 - DNA, 75 bp, synthetic construct
  source 1..75: mol_type = other DNA
tcatcccgtgacaccctgcgcgacagtgcaaaacaccgtgtgcgtgaactgccggtgaactggtgggtacagcct

SEQ ID NO: 807412 - DNA, 75 bp, synthetic construct
  source 1..75: mol_type = other DNA
gtgaaaatgcttatcgtgcagaagtccccctgtatgcctccatgctgacacaggcaatggactatgaccggattc

SEQ ID NO: 807413 - DNA, 75 bp, synthetic construct
  source 1..75: mol_type = other DNA
tgcagcggcgaccatcctttatacctttattggtgggttcctcgcggtgagctggaccgataccgtacaggccag

SEQ ID NO: 807414 - DNA, 75 bp, synthetic construct
  source 1..75: mol_type = other DNA
tacggagatgccgtacgcaccaccatcaataaaaatggtcgtcagattgtggctgctgaaggaacggcaaatacc

SEQ ID NO: 807415 - DNA, 75 bp, synthetic construct
  source 1..75: mol_type = other DNA
gccggttatgtgaagttcgggcatggcagtgcacaacatgtgcgtgccggcttccgtctgggcagccacaacgat

SEQ ID NO: 807416 - DNA, 75 bp, synthetic construct
  source 1..75: mol_type = other DNA
ctgaatggcggcgaacagtggatgcatgagggggcgatagccacaggaaccgtcattaatgataagggctggcag

SEQ ID NO: 807417 - DNA, 75 bp, synthetic construct
  source 1..75: mol_type = other DNA
ggaaaatatcaccctgggcgttcaggccggttatgcccacagtgtcagcggcagcagcgctgaaggttataacgg

SEQ ID NO: 807418 - DNA, 75 bp, synthetic construct
  source 1..75: mol_type = other DNA
aatggcgggatagccggaaacaccactgtcaccacaaatggtcgtcaggtcgtgctggaggggggtgcccctatt

SEQ ID NO: 807419 - DNA, 75 bp, synthetic construct
  source 1..75: mol_type = other DNA
ataagagcagggcattgcaggcggatatcgtcgccgtgcagtcgcaggtagtgtacggcagcgtaggcaacagca

SEQ ID NO: 807420 - DNA, 75 bp, synthetic construct
  source 1..75: mol_type = other DNA
tgtcatttcccactctcgggtaaaaacggatcttaaaggtactggcgatctgttttgcgctcaacttatcagtgg

SEQ ID NO: 807421 - DNA, 75 bp, synthetic construct
  source 1..75: mol_type = other DNA
gaagaaaatcaggagatgcaggtggtggtggtcagtgccgacagcgtgaatgtcatttcccattcacgggtaaaa

SEQ ID NO: 807422 - DNA, 75 bp, synthetic construct
  source 1..75: mol_type = other DNA
gcggttttttatcccgcttcctcttttcaaatatcaccccgaacaccatgctgagttcctgtgtgatgagccacc

SEQ ID NO: 807423 - DNA, 75 bp, synthetic construct
  source 1..75: mol_type = other DNA
tgcgcgatgcagttaaaaaagaccagtgtacagacgaggcccaggcagccctgaaatctcacgcatcggttgaac

SEQ ID NO: 807424 - DNA, 75 bp, synthetic construct
  source 1..75: mol_type = other DNA
tcgcaaatcaaaatccttgccgaatggctgacagccttacgcgaagagcatcctgacttgctgattatggttgat

SEQ ID NO: 807425 - DNA, 75 bp, synthetic construct
  source 1..75: mol_type = other DNA
ggtggcacgctctccaaaagtgaaatgcggaagatggcacaggtcggcatcaatgaagatgttctgcgccgaatc

SEQ ID NO: 807426 - DNA, 75 bp, synthetic construct
  source 1..75: mol_type = other DNA
gctggcagtgttgcttcagaggccgcattgcaggccactcaggaagctcgctcaccgatggagagcgtatcgaac

SEQ ID NO: 807427 - DNA, 75 bp, synthetic construct
  source 1..75: mol_type = other DNA
tttcgcgcacgctgcgtttaatggtactggatgaaacactttgcatagataccaataaacacggccttaattttt

SEQ ID NO: 807428 - DNA, 75 bp, synthetic construct
  source 1..75: mol_type = other DNA
tatcgtcgccgtgcagtcgcaggtagtttacggcagcgtgggcaacagcattgccgtgcctgctatcaaacagaa

SEQ ID NO: 807429 - DNA, 75 bp, synthetic construct
  source 1..75: mol_type = other DNA
caaacccacgcggtccgtaaaatgctaccttttcagaacctgtgggcgatatcaccattactaaataaagttgaa

SEQ ID NO: 807430 - DNA, 75 bp, synthetic construct
  source 1..75: mol_type = other DNA
gcatagtcatctgtgggatgaccgtttcgctagagagattttccagtctgcagtgctgaaagatgtagactcagt

SEQ ID NO: 807431 - DNA, 75 bp, synthetic construct
  source 1..75: mol_type = other DNA
aaccctcagcaaactggtgatgaaaccgtatgatgcattgaaggctgaactggcgcaggaatacctggagagact

SEQ ID NO: 807432 - DNA, 75 bp, synthetic construct
  source 1..75: mol_type = other DNA
ttaccgggcaacttattcacccgatgataataaattgcgactttacgcatcattacggctcgatgaagaaacgta

SEQ ID NO: 807433 - DNA, 75 bp, synthetic construct
  source 1..75: mol_type = other DNA
aactgctttttggccttgccgcacacagcggtatctatgtaggtaacggcgatattgttcatcttgatggcgatg

SEQ ID NO: 807434 - DNA, 75 bp, synthetic construct
  source 1..75: mol_type = other DNA
ctcgataaacgattacctgcacttgtatctatgttactacagcaagatagtaatatagatactcttgtacgtatt

SEQ ID NO: 807435 - DNA, 75 bp, synthetic construct
  source 1..75: mol_type = other DNA
gcgcagtacatcgccaatattctcgaccatgacattaccttcggcgttggcccggcgggtacgggtaaaacctac

SEQ ID NO: 807436 - DNA, 75 bp, synthetic construct
  source 1..75: mol_type = other DNA
agcgtgccggagtacggcaaagcggtcaatatcaaaaccaaacgcggcgtaattaagccgcgcacgccaaaccag

SEQ ID NO: 807437 - DNA, 75 bp, synthetic construct
  source 1..75: mol_type = other DNA
actttaaactgaccggccgtccgatttgcgtcaccgctgcggcagacattctgcgtagcctgtatgtcgatactg

SEQ ID NO: 807438 - DNA, 75 bp, synthetic construct
  source 1..75: mol_type = other DNA
tggcgctgatgaccatcacataaatccggcgtggtcgtatacattcagcctggcagagttcgtaggcgacaaggg

SEQ ID NO: 807439 - DNA, 75 bp, synthetic construct
  source 1..75: mol_type = other DNA
agtgaatgcagcaaagggacaacggaagttcgggttgcatttaacggtattgaggatgcagaaatgaagtggttt

SEQ ID NO: 807440 - DNA, 75 bp, synthetic construct
  source 1..75: mol_type = other DNA
ttgaagtcaactcagaagtccgtcaatccaggactggtgagcgcttcggcaacctttacccttgaatttcaataa

SEQ ID NO: 807441 - DNA, 75 bp, synthetic construct
  source 1..75: mol_type = other DNA
ggctatacttatatcctgatgagccacagcaaaaatccgcaatagaaaccattgaagaaatacctcaaagacaac

SEQ ID NO: 807442 - DNA, 75 bp, synthetic construct
  source 1..75: mol_type = other DNA
tatcagtgaatacggcagttgagcgattgctgaagtgggaaacaccgcaggaacggttggtgaaaagttatgctt

SEQ ID NO: 807443 - DNA, 75 bp, synthetic construct
  source 1..75: mol_type = other DNA
ctgcgatgcgtgatgctgttccgttgattaagaagcagcaggaggaggcgagagccaaagctgaagaacggcgga

SEQ ID NO: 807444 - DNA, 75 bp, synthetic construct
  source 1..75: mol_type = other DNA
ggcattgtcgagcgtgtatatacatatttcggacctcgccgcaggttgcttggctatcgaattaaatatttgtat

SEQ ID NO: 807445 - DNA, 75 bp, synthetic construct
  source 1..75: mol_type = other DNA
tggctgaaagaggccaccccggggcgttatgcggtcagtattgcggactcttccacactactggcgggcaccacg

SEQ ID NO: 807446 - DNA, 75 bp, synthetic construct
  source 1..75: mol_type = other DNA
gaaaatgcagcaaatgctgcactcgggcatgaaaacagcgccgctgaatacgcccgacaggctaaagccagccag

SEQ ID NO: 807447 - DNA, 75 bp, synthetic construct
  source 1..75: mol_type = other DNA
acatacgcatcctcaccgcaggttgtgattggcggtgccggtgaatacaacttccccggtcgttacaaggcgctt

SEQ ID NO: 807448 - DNA, 75 bp, synthetic construct
  source 1..75: mol_type = other DNA
gtctggaaacagcgaatgcggcatttgttcgcaaactgctcgccgcgctggttgactcatcaccggaagccctgg

SEQ ID NO: 807449 - DNA, 75 bp, synthetic construct
  source 1..75: mol_type = other DNA
accaaaggatggtgatttacgtccggaggtgatgaagcgttttgaggaaatggtggatgcagttacccggcagtc

SEQ ID NO: 807450 - DNA, 75 bp, synthetic construct
  source 1..75: mol_type = other DNA
cttccccggtcgttacacggcgctttctggcctgggtaacaattatggtactcagcgtggctttatcggtctttt

SEQ ID NO: 807451 - DNA, 75 bp, synthetic construct
  source 1..75: mol_type = other DNA
aatttttacctggcacataccgtgggctggttaactatccggaactacagacggaagactatatgcttggtctgt

SEQ ID NO: 807452 - DNA, 75 bp, synthetic construct
  source 1..75: mol_type = other DNA
gtccgcaaactgcttgctgcgctggttgactcatcacctgaagccctggacacgctgaacgagctggcagcggcg

SEQ ID NO: 807453 - DNA, 75 bp, synthetic construct
  source 1..75: mol_type = other DNA
gacagcaacaaagctggttctgttttttggaaaagacggacggattcttatgaccgttcgtggcgataatatctc

SEQ ID NO: 807454 - DNA, 75 bp, synthetic construct
  source 1..75: mol_type = other DNA
tatatcccggaaaaggttcaaatgtaataaccattcctaataagattaatgattttttcattgctaaaattattt

SEQ ID NO: 807455 - DNA, 75 bp, synthetic construct
  source 1..75: mol_type = other DNA
ggacgaatctgacgccacaacttggcaatgcagcacagaaggatgcgcaggagaatatttacgaccgcaccgaag

SEQ ID NO: 807456 - DNA, 75 bp, synthetic construct
  source 1..75: mol_type = other DNA
ctgaccggaacaccgtccacgccaacaccgccggatgatgcagcaggtaatgaaatagccaatgcggcgtttgtc

SEQ ID NO: 807457 - DNA, 75 bp, synthetic construct
  source 1..75: mol_type = other DNA
cgcccgacaggctaaagccagccaggatgcaggtgcagacaatgcgcaggaagcgaaacagtacagggatgaggc

SEQ ID NO: 807458 - DNA, 75 bp, synthetic construct
  source 1..75: mol_type = other DNA
atgtatatcgagacaaaagatgcgcaaataagcggggcggtaggccgttattcaaagaaattcgcgccaggtaag

SEQ ID NO: 807459 - DNA, 75 bp, synthetic construct
  source 1..75: mol_type = other DNA
tacaaataattttaaaaaacaacttcgacataatccaattggctttgcagtatattataaagatcagttccatag

SEQ ID NO: 807460 - DNA, 75 bp, synthetic construct
  source 1..75: mol_type = other DNA
catcgtcctgcaaatggacaaggatgacttattaagctggggatggcgtattccttttctttgcagcattcttat

SEQ ID NO: 807461 - DNA, 75 bp, synthetic construct
  source 1..75: mol_type = other DNA
atcaatgacagtcgctggagcattatctggtcggtactatttggcatgctggtcggactgatcggcacctgcatt

SEQ ID NO: 807462 - DNA, 75 bp, synthetic construct
  source 1..75: mol_type = other DNA
attaaagaatcaatacatgattgcttatctgagaggaaaagtttcagcggagtcggttttagaagagcatatata

SEQ ID NO: 807463 - DNA, 75 bp, synthetic construct
  source 1..75: mol_type = other DNA
tcggtaggccgttattcaaagaaattcgcgccaggtaaggtgtttactgtatatcaggtgataagggtattttag

SEQ ID NO: 807464 - DNA, 75 bp, synthetic construct
  source 1..75: mol_type = other DNA
gtcgtaccggtcgtgcaggtcgtgctggtcgtgcgctgctgttcgttgagaaccgtgagcgtcgtctgctgcgca

SEQ ID NO: 807465 - DNA, 75 bp, synthetic construct
  source 1..75: mol_type = other DNA
gtcgtaccggtcgtgcgggtcgtgcgggtcgtgcgctgctgttcgttgaaaaccgcgagcgtcgtctgctgcgca

SEQ ID NO: 807466 - DNA, 75 bp, synthetic construct
  source 1..75: mol_type = other DNA
cgggacgaatcagtcgatgccgccgaacgtgcccgcctttatcataataccgcatcatcagcagcgaccagttca

SEQ ID NO: 807467 - DNA, 75 bp, synthetic construct
  source 1..75: mol_type = other DNA
aaggcggtcgtaacttcagcggtgaacgccgtgaaggccgtgctccgcgtcgtgatgactctaccggtcgtcgtc

SEQ ID NO: 807468 - DNA, 75 bp, synthetic construct
  source 1..75: mol_type = other DNA
gatcaataccgtgcactgctgagcaaaattcagccgactgccgaaggtgaagagctggatctcgaaactctggca

SEQ ID NO: 807469 - DNA, 75 bp, synthetic construct
  source 1..75: mol_type = other DNA
tggcggagagcgtcgtggcggtggtcgtggtttcagtggcgagcgtcgtgaaggtggtcgtaacttcagcggtga

SEQ ID NO: 807470 - DNA, 75 bp, synthetic construct
  source 1..75: mol_type = other DNA
attggacgcaaatatgcgtctgaaccgccccgggtttcctggagagtgttttatctgtgaactcaggctgccaga

SEQ ID NO: 807471 - DNA, 75 bp, synthetic construct
  source 1..75: mol_type = other DNA
acagaacaatattttgccttactccgctcgtttgaagtcaactcagaagtccgtcaatcctggactggtgagcgc

SEQ ID NO: 807472 - DNA, 75 bp, synthetic construct
  source 1..75: mol_type = other DNA
gctcgtttgaagtcaacgcagaattccgtcaatccgggactggtgagtgcttcggcaacctttacccttgaattt

SEQ ID NO: 807473 - DNA, 75 bp, synthetic construct
  source 1..75: mol_type = other DNA
tgcaggacggcgcattcagcctgacggcaccgcccgtgcagggaatgccggtgcagactgccctgcgcaccctgc

SEQ ID NO: 807474 - DNA, 75 bp, synthetic construct
  source 1..75: mol_type = other DNA
gagccggagtcggtactgatgcaggacggcgcattcagcctgagcgccccgccggtacaggggatgccggtgcag

SEQ ID NO: 807475 - DNA, 75 bp, synthetic construct
  source 1..75: mol_type = other DNA
gcccgtttgaagtcaacacaaaagtccgtcaatccaggactggttagcgcttcggcaacatttacccttgaattt

SEQ ID NO: 807476 - DNA, 75 bp, synthetic construct
  source 1..75: mol_type = other DNA
atgaagacattattatttgtaattctatttttttctgcatctgtatatgcagatacggcatcaaaaatgaatttt

SEQ ID NO: 807477 - DNA, 75 bp, synthetic construct
  source 1..75: mol_type = other DNA
gatgaaatacttacacgctctgctcagggagatgctgaagcgcaagccagattgggggaagcatacctgaatgga

SEQ ID NO: 807478 - DNA, 75 bp, synthetic construct
  source 1..75: mol_type = other DNA
ccgtaccattcacaatatttcgctgaaccctaactttggcggcgaagtaatggtgattggtctgggttgtgaaaa

SEQ ID NO: 807479 - DNA, 75 bp, synthetic construct
  source 1..75: mol_type = other DNA
tttatgaagtattcagtaataaaaaggaaattttttctgaagtaattaaagagtataaaaccctgttcctcgatc

SEQ ID NO: 807480 - DNA, 75 bp, synthetic construct
  source 1..75: mol_type = other DNA
aaaaacgaatacccggcccgcgaacaggtgatgcagtaccgtcaggacgacctcacgttcgtctcccgcctgctc

SEQ ID NO: 807481 - DNA, 75 bp, synthetic construct
  source 1..75: mol_type = other DNA
atatcagtaaacttcctcaggacagggaatcactgttttattttaatctccgggaaataccgccgaggagtgaaa

SEQ ID NO: 807482 - DNA, 75 bp, synthetic construct
  source 1..75: mol_type = other DNA
cgagatggcgaggcaaacgccctctgctcgcgctcttgcagggactgtttaccgtctctctgacgttgctcggcc

SEQ ID NO: 807483 - DNA, 75 bp, synthetic construct
  source 1..75: mol_type = other DNA
tcagaatcgagattagttcgagggtttgcaaacagggtatggccttcacatgtaccgacgataaaaaaggggaat

SEQ ID NO: 807484 - DNA, 75 bp, synthetic construct
  source 1..75: mol_type = other DNA
tattggataatgatattttttctcctaagaatagtgatgatttatataagttaagcactcattggttcactgtca

SEQ ID NO: 807485 - DNA, 75 bp, synthetic construct
  source 1..75: mol_type = other DNA
cgttacgaagtgcggcttgaaccccgtatggcgctgctgacccgcagccgccagaatgccatctaccagaatctg

SEQ ID NO: 807486 - DNA, 75 bp, synthetic construct
  source 1..75: mol_type = other DNA
cagattgtcttcggtacgaccaacggaatgaccatcagtaccgggctggagtatgggccggataacgaggccaat

SEQ ID NO: 807487 - DNA, 75 bp, synthetic construct
  source 1..75: mol_type = other DNA
agaagtccctgcgtattttcatgaaaggagatcactcaataacttccatcgagatcgggtaataacatttgaaca

SEQ ID NO: 807488 - DNA, 75 bp, synthetic construct
  source 1..75: mol_type = other DNA
agctgagtgatatggaagttagaaaaagaagtaaatatgctgttgcttgtgttaatgatgatgacctgtatgttc

SEQ ID NO: 807489 - DNA, 75 bp, synthetic construct
  source 1..75: mol_type = other DNA
tatcgaattttacgacgaccagagcggctatgagcgaggactgacgctgccacttcgccatccttcagggctaca

SEQ ID NO: 807490 - DNA, 75 bp, synthetic construct
  source 1..75: mol_type = other DNA
acggtaccgcaaatcgtcgaaaaaatcctgcgcgagcggcaccagatgcgcggtcaggacttcgtgtttaacctc

SEQ ID NO: 807491 - DNA, 75 bp, synthetic construct
  source 1..75: mol_type = other DNA
gcgggactacaactaccgtgaagccacggcggaaatgaccacaggccagcatgacgccaccgggggcgataaaac

SEQ ID NO: 807492 - DNA, 75 bp, synthetic construct
  source 1..75: mol_type = other DNA
gcgggactacaactaccgcaccgccacagcagagatgatgacagagcagcatgacgccaccgggggcgataacac

SEQ ID NO: 807493 - DNA, 75 bp, synthetic construct
  source 1..75: mol_type = other DNA
gtgctgaccttcgaaggccgcgaacaactgagtaccccgttccgctacgacattgaatttaccagtaccgataaa

SEQ ID NO: 807494 - DNA, 75 bp, synthetic construct
  source 1..75: mol_type = other DNA
acgccggagtcggtactgatgcaggatggcgcattcagccagacggcaccgccggtacagggaatgccggtgcag

SEQ ID NO: 807495 - DNA, 75 bp, synthetic construct
  source 1..75: mol_type = other DNA
ctgcctcgggcgaccaaagtgccggagccgcagcagccgcagcagccgcaggaagattacacctttgaaggttac

SEQ ID NO: 807496 - DNA, 75 bp, synthetic construct
  source 1..75: mol_type = other DNA
tgacgtgacacgaaccgccttaaccagtaccggtcagggatacagcgatggcggcgcagttgattcaagtaattt

SEQ ID NO: 807497 - DNA, 75 bp, synthetic construct
  source 1..75: mol_type = other DNA
gttcgtatgacgccaccctgaacctgttcattatgaatgagctcagaaatggcgcaagcaaatataagaccccac

SEQ ID NO: 807498 - DNA, 75 bp, synthetic construct
  source 1..75: mol_type = other DNA
tgtctgatggcgtcgcagctgtaagtgaccggtatcagagtattagcagcgacggcgtttcgacttatgcgaatg

SEQ ID NO: 807499 - DNA, 75 bp, synthetic construct
  source 1..75: mol_type = other DNA
gagagacggccgaaagtaataaacaggatctccgtgaaacctccagcctgcttaaaagtctggtttccgacttcg

SEQ ID NO: 807500 - DNA, 75 bp, synthetic construct
  source 1..75: mol_type = other DNA
caactcctataacgataccttcaaggccagtaatcagcttggatcgcagcttcaacgtactgacgcgcttgtggc

SEQ ID NO: 807501 - DNA, 75 bp, synthetic construct
  source 1..75: mol_type = other DNA
gttaactgaccagttcagtaaagcggcgtctcaggtaagcagcgatcagatatccaatactaatgcgtttaaaga

SEQ ID NO: 807502 - DNA, 75 bp, synthetic construct
  source 1..75: mol_type = other DNA
ggatgactgggaatcggtattcagcgaattccacgacgctgatgcgctaaactctcacagctattgctttgagat

SEQ ID NO: 807503 - DNA, 75 bp, synthetic construct
  source 1..75: mol_type = other DNA
catatcgacgcggaagtggaaggcgacacccatttcccggattacgagccggatgactgggaatcggtattcagc

SEQ ID NO: 807504 - DNA, 75 bp, synthetic construct
  source 1..75: mol_type = other DNA
ttaagccagaaagtagacccgtatctgcgcccgctatacgacgcgctgttcgaaatgcttggctttgaaaaagtc

SEQ ID NO: 807505 - DNA, 75 bp, synthetic construct
  source 1..75: mol_type = other DNA
cagaccgtcacagatcgcttggttggggaaaagatagaggccaacactgagcggggcgcgatttctggtgcgcta

SEQ ID NO: 807506 - DNA, 75 bp, synthetic construct
  source 1..75: mol_type = other DNA
ggttgtgagcgtcgggtcgtttacgatttcgtcaacgtcatccagggcgatgcaacgctaaatcaggcgctaatt

SEQ ID NO: 807507 - DNA, 75 bp, synthetic construct
  source 1..75: mol_type = other DNA
atgcgggtaaagcctacgcagataccgtagaacgtctgttgggagaagaacgccctttccgcttcattgaagaag

SEQ ID NO: 807508 - DNA, 75 bp, synthetic construct
  source 1..75: mol_type = other DNA
ggctaaactcggtctttcctccaacgctcaggacgcgacacagcatgtccctggaaaaagtgaagctggctttac

SEQ ID NO: 807509 - DNA, 75 bp, synthetic construct
  source 1..75: mol_type = other DNA
cagttgtacatgggcggtactttgacagaggtattcggcctcgtgctggtcgtgacaaaatacctttttaaacgc

SEQ ID NO: 807510 - DNA, 75 bp, synthetic construct
  source 1..75: mol_type = other DNA
accctctcaacaagtcacccgtactgagagtaaaatcttgaccgagttcacatctgtgaaacaggtgaattcact

SEQ ID NO: 807511 - DNA, 75 bp, synthetic construct
  source 1..75: mol_type = other DNA
agtgatcacatgtattgtttgtttgatgcttttagtcaggggttgcataatgttgctcgtgatggcagtccacgg

SEQ ID NO: 807512 - DNA, 75 bp, synthetic construct
  source 1..75: mol_type = other DNA
gacctgctggtgcgctgcggcgcaacggtgatgttctccgaagtcactgaagtacgcgacgccattcatctgtta

SEQ ID NO: 807513 - DNA, 75 bp, synthetic construct
  source 1..75: mol_type = other DNA
gcaccatccataatattgcgctgaacccaaacttcggtggcgaagtgatggtggtgggcatgcagtgcggtggca

SEQ ID NO: 807514 - DNA, 75 bp, synthetic construct
  source 1..75: mol_type = other DNA
ggtacgcgatgtcgccaaaggcagctggatcgacgaatccacggtcacgctaccgaaagcgccgccgcttaacac

SEQ ID NO: 807515 - DNA, 75 bp, synthetic construct
  source 1..75: mol_type = other DNA
acgttttcaggaggagtcttccatcgacgtatctctgtgaacagcgagccagaaaagacagatgtatggcgattc

SEQ ID NO: 807516 - DNA, 75 bp, synthetic construct
  source 1..75: mol_type = other DNA
ggttgaatgtcctcgttgccagacttgctccttattatactgatagtgtatcagctatagctgaaactgcttccc

SEQ ID NO: 807517 - DNA, 75 bp, synthetic construct
  source 1..75: mol_type = other DNA
actgctttgaacagtatgtatcagagcgggcaagttcgtggcttatctaataacactgataactactttagtcgt

SEQ ID NO: 807518 - DNA, 75 bp, synthetic construct
  source 1..75: mol_type = other DNA
gttgccaccttttaaagaggatgtcttttctaaaacagaagaacaatttaaaaaaagcccccatggcaaattgct

SEQ ID NO: 807519 - DNA, 75 bp, synthetic construct
  source 1..75: mol_type = other DNA
ttaaagatatcgccaatcattccagcgaatgtttttcttacagttgttatgccgccccgctggatgcgaatgcta

SEQ ID NO: 807520 - DNA, 75 bp, synthetic construct
  source 1..75: mol_type = other DNA
atatagatttatgcagtagtaccgcaaccaaacttcagggattacaagatattgaacaacaattgttctggcgca

SEQ ID NO: 807521 - DNA, 75 bp, synthetic construct
  source 1..75: mol_type = other DNA
ttatcgtgcagaagtccccctgtatgcctccatgctgacacaggcaatggactatgaccggattctggcaggctc

SEQ ID NO: 807522 - DNA, 75 bp, synthetic construct
  source 1..75: mol_type = other DNA
cgtcaccattatgtcagcatagtgataatgaaccagaaacgaaacgggaatgttccgtcgttattccagacgact

SEQ ID NO: 807523 - DNA, 75 bp, synthetic construct
  source 1..75: mol_type = other DNA
atggtcggtcaggagcaactggagtcgtcaccattatgccagcatagtgacaatgaaacagaaacgaaacgggaa

SEQ ID NO: 807524 - DNA, 75 bp, synthetic construct
  source 1..75: mol_type = other DNA
cgctttggcattcgcagtattccgacgattatgattttcaagaatggtcagattgtcgacatgcttaatggcgca

SEQ ID NO: 807525 - DNA, 75 bp, synthetic construct
  source 1..75: mol_type = other DNA
aaaagtgtacgtatcactgtttgtgtgaacaacgaactgaactggcagactatcccgccgggatccatcgcagcg

SEQ ID NO: 807526 - DNA, 75 bp, synthetic construct
  source 1..75: mol_type = other DNA
gtgcatttccccacggtcagccgtagagatctgatggtgaccgggcaatctgcgcgcgtaccggtggtgtttcag

SEQ ID NO: 807527 - DNA, 75 bp, synthetic construct
  source 1..75: mol_type = other DNA
ccgagtatcaggtccgggtgacgctgaccggtacggaagacagcgagcagcccggttttctggcgctggatgcct

SEQ ID NO: 807528 - DNA, 75 bp, synthetic construct
  source 1..75: mol_type = other DNA
ttcagagcctggctacaggcgaaaagtggtcgtgatgtaacaatcggcgattttactgccagcctgacggcaacg

SEQ ID NO: 807529 - DNA, 75 bp, synthetic construct
  source 1..75: mol_type = other DNA
tggataccacttcaaccgctcagggcgtcggaattgggatggaaacgatcgatggtgtgcgggtggcaattaaca

SEQ ID NO: 807530 - DNA, 75 bp, synthetic construct
  source 1..75: mol_type = other DNA
cagcggaaccacgttggcggcggacaacctgcatttttacggcaacttgttaagtaaatcctgcacgctggtggt

SEQ ID NO: 807531 - DNA, 75 bp, synthetic construct
  source 1..75: mol_type = other DNA
acaacctgcatttttacggcaacctgctgagtaaatcctgcacgctggtggtggatggtgccaatctggcggaaa

SEQ ID NO: 807532 - DNA, 75 bp, synthetic construct
  source 1..75: mol_type = other DNA
ttcaatgcctggttacaggcgaaaagcggtcgtgaagttactctcggcgagttcacagccactctgaccgcaacg

SEQ ID NO: 807533 - DNA, 75 bp, synthetic construct
  source 1..75: mol_type = other DNA
gtggtttttcaactcaaagattgtaaagggccatcgaattacgaggtgaaagtcactttgaccggaacggaagac

SEQ ID NO: 807534 - DNA, 75 bp, synthetic construct
  source 1..75: mol_type = other DNA
cccgtgaaatcaaaaaactcgacggcctgtgggcattcagtctggatcgcgaaaactgtggaattgagcagcgtt

SEQ ID NO: 807535 - DNA, 75 bp, synthetic construct
  source 1..75: mol_type = other DNA
tatgcgttagcgcctaatacgttgtcgcggttgctggaaaaaattgccaatgaagcgcagatcaagcaggcgaaa

SEQ ID NO: 807536 - DNA, 75 bp, synthetic construct
  source 1..75: mol_type = other DNA
atcggacgtacgctcaactcgttttatcttatccgtgcccagacttgagaaaatgcttccggaaacccaatacta

SEQ ID NO: 807537 - DNA, 75 bp, synthetic construct
  source 1..75: mol_type = other DNA
tttctctggacggtggaggatcctgcgggaccgatggataccgggtccgaaatgaagatggaaacatacaggatt

SEQ ID NO: 807538 - DNA, 75 bp, synthetic construct
  source 1..75: mol_type = other DNA
gatctttaccgtacccagttatcagagactgaacagcagttagagcaggctgctgcaaatattgcccgcgccccg

SEQ ID NO: 807539 - DNA, 75 bp, synthetic construct
  source 1..75: mol_type = other DNA
tttcttttcttcgtgctgatgtgactctcgcggatatcgggttttcgtcggcggcctcacatactgtcaacgcag

SEQ ID NO: 807540 - DNA, 75 bp, synthetic construct
  source 1..75: mol_type = other DNA
aagccggtatgctccagcagtccattgagcaagacagcaaaaaagcatggcagcgttttgatatgtaccgccaac

SEQ ID NO: 807541 - DNA, 75 bp, synthetic construct
  source 1..75: mol_type = other DNA
atggtgatgtcagcgttgaactgcgtgatgcggatcaacaggtggttgcaactggacaaggggcaccagcgggac

SEQ ID NO: 807542 - DNA, 75 bp, synthetic construct
  source 1..75: mol_type = other DNA
tgaacaacgaactgaactggcagactatcccgccgggaatggtgattaccgacgaaaacggcaagaaaaagcagt

SEQ ID NO: 807543 - DNA, 75 bp, synthetic construct
  source 1..75: mol_type = other DNA
gaactgtgcgtcacagccaaaagccagacagagtgtgatatctacccgcttcgcgtcggcatccggtcagtggca

SEQ ID NO: 807544 - DNA, 75 bp, synthetic construct
  source 1..75: mol_type = other DNA
cccagagggacaggcaatcaccgtctcaataagagagcaggagagcttttttgaccttgtgattgaaaatccggg

SEQ ID NO: 807545 - DNA, 75 bp, synthetic construct
  source 1..75: mol_type = other DNA
tgttatccaacgccctgcgttataccccagagggacaggcaatcaccgtctcaataagagagcaggagagctttt

SEQ ID NO: 807546 - DNA, 75 bp, synthetic construct
  source 1..75: mol_type = other DNA
tcccaggggggaggtgctctttagttcagcgcagggggcagcactacgcccggccgtgaattcagcagattttag

SEQ ID NO: 807547 - DNA, 75 bp, synthetic construct
  source 1..75: mol_type = other DNA
gtaccggtggtttttcgcctgaaagattgccgtgggccagcgcagtacagcgtaaaagttaccctgaccggaaca

SEQ ID NO: 807548 - DNA, 75 bp, synthetic construct
  source 1..75: mol_type = other DNA
acagctttctgaccagcaaggcgcggcgctggcagcggcgttttctgcactctcctgcgatcatctggaatacct

SEQ ID NO: 807549 - DNA, 75 bp, synthetic construct
  source 1..75: mol_type = other DNA
gaatatgggctgtacactgtttggtctgacgccggaggaagcgctggccgggattacgtgccacggcgcgcgcgc

SEQ ID NO: 807550 - DNA, 75 bp, synthetic construct
  source 1..75: mol_type = other DNA
tagcactcatgctaagcggctgttccatgttaagcagatcccctgtcgaacccgttcaaagcactgccccccagc

SEQ ID NO: 807551 - DNA, 75 bp, synthetic construct
  source 1..75: mol_type = other DNA
cacgcagttatcaggccaacgttgaagtcctcaacacggtgaaaagcatgatgctgaagaccctcacgctcggtc

SEQ ID NO: 807552 - DNA, 75 bp, synthetic construct
  source 1..75: mol_type = other DNA
atgtccgatcctatttctggctccgggttggctggaggtgtcctgacgggagctagtatctatgggttgttaacc

SEQ ID NO: 807553 - DNA, 75 bp, synthetic construct
  source 1..75: mol_type = other DNA
ggcgagcgataacccagtgcactatgcggatgccattcgttataatgctcgaacgcctctgcaaggttctttgct

SEQ ID NO: 807554 - DNA, 75 bp, synthetic construct
  source 1..75: mol_type = other DNA
gcgcgggtggtcgccgatagtctgggaaattttttgaaagaactccccgccagcgggacgcctacccagccatag

SEQ ID NO: 807555 - DNA, 75 bp, synthetic construct
  source 1..75: mol_type = other DNA
aactgatgtttgatgatattgacttgctggtcatgctgcagctggtggcgcgggtggtcgccaattcgctgggaa

SEQ ID NO: 807556 - DNA, 75 bp, synthetic construct
  source 1..75: mol_type = other DNA
atcgacaccgtgaaattcgatcagctgaaaccggtgtttgaaaccctgctcccgcgtatcgctgaggaactgtct

SEQ ID NO: 807557 - DNA, 75 bp, synthetic construct
  source 1..75: mol_type = other DNA
ggtgccggtgtgccagcagggcaccatggcctttgacgatatcgacctgttcgtgatgctgcagcttgtggcgcg

SEQ ID NO: 807558 - DNA, 75 bp, synthetic construct
  source 1..75: mol_type = other DNA
ggcaaactggttttcggtgagaaaagggcgttcgacgctctggatatcgttttgccgaagattgccgatacgctg

SEQ ID NO: 807559 - DNA, 75 bp, synthetic construct
  source 1..75: mol_type = other DNA
aataccgcaccgccaagctcgatgttttccagcagttgaaggtaagccgcaagctgctgccggtgctggccgggc

SEQ ID NO: 807560 - DNA, 75 bp, synthetic construct
  source 1..75: mol_type = other DNA
ccatgtcggcgtcacgcagctatcaggccaatgttgaagtgctcaacacggtgaaaagcatgatgctgaaaaccc

SEQ ID NO: 807561 - DNA, 75 bp, synthetic construct
  source 1..75: mol_type = other DNA
ccggaagatttacggatgctggtcgaagataaattcgtcgatgctctgcgtgccaccgcagcacaaatgaccatg

SEQ ID NO: 807562 - DNA, 75 bp, synthetic construct
  source 1..75: mol_type = other DNA
gctaaccttgcactcgcagaagcagtaagcgcccaacaaaacgtagaaaccactcgccagacagccgaagccgat

SEQ ID NO: 807563 - DNA, 75 bp, synthetic construct
  source 1..75: mol_type = other DNA
tcgtgatgccaatcttccatgaaattatccctatcaatatgaataccctgaaactggaagtcagtcgctcgacga

SEQ ID NO: 807564 - DNA, 75 bp, synthetic construct
  source 1..75: mol_type = other DNA
tgccgtatgcgttctatttattatcggtattattttcgcgcggctttatcgtcgggcatctgccgagcaggcatt

SEQ ID NO: 807565 - DNA, 75 bp, synthetic construct
  source 1..75: mol_type = other DNA
aaagctgaaaaagaagccgcagagatgcaggcggcagcaatcgtagagttagctgaggcaacacgtaaaaaaggc

SEQ ID NO: 807566 - DNA, 75 bp, synthetic construct
  source 1..75: mol_type = other DNA
atcaagattattcaggtcgatggtctgaatcgtggtggtactgcgggggatgcaaacacgggtaatgtggggggc

SEQ ID NO: 807567 - DNA, 75 bp, synthetic construct
  source 1..75: mol_type = other DNA
agcagtcgaactgaccgtgcgggcgaaagctgaaaaagaagccgcagagatgcaggcgcggcaatcgttgagtta

SEQ ID NO: 807568 - DNA, 75 bp, synthetic construct
  source 1..75: mol_type = other DNA
agaacatttcaatccgaacaatgcctttgacgccgaaggtttaaccaaactgactcaggagacggagcgccgtcg

SEQ ID NO: 807569 - DNA, 75 bp, synthetic construct
  source 1..75: mol_type = other DNA
ggaaccaatgaagtccattgacggtatcaagattattcaggtcgatggtctgaatcgtggtggtattgcggggga

SEQ ID NO: 807570 - DNA, 75 bp, synthetic construct
  source 1..75: mol_type = other DNA
aagttaaaacccgtaccgccgagcagaatgcgaaaattgccgcttttgaagctgaacgtcgtcgtgaagcggagc

SEQ ID NO: 807571 - DNA, 75 bp, synthetic construct
  source 1..75: mol_type = other DNA
cactcgccagaccgcagaagccgatcgtgctaaacaagttgccctaatcgctgccgcgcaggatgcagaaaccaa

SEQ ID NO: 807572 - DNA, 75 bp, synthetic construct
  source 1..75: mol_type = other DNA
tagaaggcatcgccactgcggcccagacgctggggcaacgcactctatcaccagaagatttacgtatgctggtcg

SEQ ID NO: 807573 - DNA, 75 bp, synthetic construct
  source 1..75: mol_type = other DNA
ataatgagacacttctgatactaacaggaagggctcgttatagctataattctaatgacagtagtcctcgatgtg

SEQ ID NO: 807574 - DNA, 75 bp, synthetic construct
  source 1..75: mol_type = other DNA
acagcgattagtgaagctttgctcaatgtttctcatcatgcgtatgaagatgaggggtttgaaccgccccgggtt

SEQ ID NO: 807575 - DNA, 75 bp, synthetic construct
  source 1..75: mol_type = other DNA
aactgttctgcagggaatatttaaaagatttaaacgccactcaggcagctatcagggcgggttacagcgagaaaa

SEQ ID NO: 807576 - DNA, 75 bp, synthetic construct
  source 1..75: mol_type = other DNA
attcagaatcacttttggtgttcacagggaatgttaagtacagctataattcaagaaatgaggttcccaaatgcg

SEQ ID NO: 807577 - DNA, 75 bp, synthetic construct
  source 1..75: mol_type = other DNA
atgagtttgtttcccgttatcgtggtgtttgggctgtccttcccaccgatattttttgaattgcttttatcactg

SEQ ID NO: 807578 - DNA, 75 bp, synthetic construct
  source 1..75: mol_type = other DNA
gcgattttctggctggtgcgccgggtacttgtgccaacaggtatctacgactttgtctggcatccggcgttgttc

SEQ ID NO: 807579 - DNA, 75 bp, synthetic construct
  source 1..75: mol_type = other DNA
ggcgtgaaaaaatgattgccgcgctgcagcgcctgaaaaccagctatgagccacaagaagcaaccagcatgatgg

SEQ ID NO: 807580 - DNA, 75 bp, synthetic construct
  source 1..75: mol_type = other DNA
atcgctgagcgagctgttcatgacccacccgccgctggataaacgtattgaggctctgcgcacgggtgaatacct

SEQ ID NO: 807581 - DNA, 75 bp, synthetic construct
  source 1..75: mol_type = other DNA
cgcattgctgagcttaaggccgagcgcaatgagcaagtaggtgtagacgctgcttacgtattgcgacgtctcact

SEQ ID NO: 807582 - DNA, 75 bp, synthetic construct
  source 1..75: mol_type = other DNA
ccaaccgtactgcgtccgaaaacatgtcaaaacctgacatacaactcagaatctccgaattgaaagcacaacgca

SEQ ID NO: 807583 - DNA, 75 bp, synthetic construct
  source 1..75: mol_type = other DNA
cggtgcgcgccgtgatgcctctctggttgctgtcagcaccggtttgctgcagaacatgagcccggatgaagccga

SEQ ID NO: 807584 - DNA, 75 bp, synthetic construct
  source 1..75: mol_type = other DNA
atcgctcagtgagttgttcatgacccacccgccgctggataaacgaattgaagctctgcgtacgggtgaatacct

SEQ ID NO: 807585 - DNA, 75 bp, synthetic construct
  source 1..75: mol_type = other DNA
acttacctggttgacagtcagggcagtgacaatctgctgcggcagtgggcactggagcacgatatccctgtggac

SEQ ID NO: 807586 - DNA, 75 bp, synthetic construct
  source 1..75: mol_type = other DNA
atggttgaactggcatcacaacccggtgcttgtgtggcccagattgcacgagaaaatggtctcaatgataatgtt

SEQ ID NO: 807587 - DNA, 75 bp, synthetic construct
  source 1..75: mol_type = other DNA
atgaatattgaacttcgtcatctgcgctactttgttgcggttgcggaagaactgcatttcgggcgcgccgctgcc

SEQ ID NO: 807588 - DNA, 75 bp, synthetic construct
  source 1..75: mol_type = other DNA
gggtatctattgcggaagaggatgcggtttctgagatgtggctggtttggccaaaacatcatgaacaaagcccgg

SEQ ID NO: 807589 - DNA, 75 bp, synthetic construct
  source 1..75: mol_type = other DNA
acactctccaggaaaaccggggcggttcaaacctcttctgacactggcgttgaattattacctgtagaaataacg

SEQ ID NO: 807590 - DNA, 75 bp, synthetic construct
  source 1..75: mol_type = other DNA
taatgataatgttattttcaaatggctcagactctggcaaaacgaagggcgtgtttcgcggcgtcttccggtaac

SEQ ID NO: 807591 - DNA, 75 bp, synthetic construct
  source 1..75: mol_type = other DNA
ggcgtaatatacgaaaatggtgaaggggttgggcaggactttcatcaggcgagggcttggtatgaaaaggctgct

SEQ ID NO: 807592 - DNA, 75 bp, synthetic construct
  source 1..75: mol_type = other DNA
ggtacagggaacggcacaacgccggcaggcgttgtttgtgcaggcggaaaactgtaccgcgtgtgatgcccgtct

SEQ ID NO: 807593 - DNA, 75 bp, synthetic construct
  source 1..75: mol_type = other DNA
cgcgaacttctccagcgtcagcggatctgcatgattcgccgcgccagcgaagagttgctggcggtaaacgatgag

SEQ ID NO: 807594 - DNA, 75 bp, synthetic construct
  source 1..75: mol_type = other DNA
ggagctgctggcggtaaacgatgagataacccatcactatgagcagttgcatggacatagccatcagcggcatag

SEQ ID NO: 807595 - DNA, 75 bp, synthetic construct
  source 1..75: mol_type = other DNA
gttacttcattgctgttgcggaagagctgcattttggtcgcgctgctgcccgactgaatatttcacaaccgccgc

SEQ ID NO: 807596 - DNA, 75 bp, synthetic construct
  source 1..75: mol_type = other DNA
gcttatggcgatgatcccgcacgatcatcccctggcaaataacccgaatgtaacgctggctgaactggcgaaaga

SEQ ID NO: 807597 - DNA, 75 bp, synthetic construct
  source 1..75: mol_type = other DNA
tgtcgggagtgttgacagtgtcaacagtcgcactcgctgcaccttcagtgaatcaggaaaacagcctgacggtga

SEQ ID NO: 807598 - DNA, 75 bp, synthetic construct
  source 1..75: mol_type = other DNA
cgttcaggcatttaaagaacaagcttctcatgagctaaccggcaaagacggcggcgcaatccagattgaaacatc

SEQ ID NO: 807599 - DNA, 75 bp, synthetic construct
  source 1..75: mol_type = other DNA
gttcttgatccgtttgcgattcgccagatcgacgcggtactggcgactcacgatcacaacgatcatatcgacgtt

SEQ ID NO: 807600 - DNA, 75 bp, synthetic construct
  source 1..75: mol_type = other DNA
agcggttgaactgaccgtgcgggcgaaagcagagaaagaagcggcagagatgcaggcggcggcgatcgttgagtt

SEQ ID NO: 807601 - DNA, 75 bp, synthetic construct
  source 1..75: mol_type = other DNA
atgccgatctttcatgaaataatccccatcaatatgaatactctgaagctggaagtcagccgctcaaccattgat

SEQ ID NO: 807602 - DNA, 75 bp, synthetic construct
  source 1..75: mol_type = other DNA
tgccgatcaaaaagcggctggcgtactgccggacggcatggacgatcgcgcggtgaactacctgttcaaaacgcc

SEQ ID NO: 807603 - DNA, 75 bp, synthetic construct
  source 1..75: mol_type = other DNA
gataaagacaatttcgagtaccattatccgcgcggttttgacgattgcttcaccattgaaccggatctgccgttc

SEQ ID NO: 807604 - DNA, 75 bp, synthetic construct
  source 1..75: mol_type = other DNA
atgaaaaaagatcgtctgaagtatggcttcaagccgtttatctggcaggttggcggcaaatttacctggccgctg

SEQ ID NO: 807605 - DNA, 75 bp, synthetic construct
  source 1..75: mol_type = other DNA
taaatgctcaggggggggcttttgcccagacaaaagcgcaggaaaagcagaaagttgatgctttattgaaagata

SEQ ID NO: 807606 - DNA, 75 bp, synthetic construct
  source 1..75: mol_type = other DNA
acataccattgatctggcacccagaaagcgtccgcacgatttgaatccacgacctattgtgctgtttggtggttt

SEQ ID NO: 807607 - DNA, 75 bp, synthetic construct
  source 1..75: mol_type = other DNA
aaattgaacagcaactagagcaagccgctgccaatattgcccgcgctccggaagatgagcagttaatggatcttt

SEQ ID NO: 807608 - DNA, 75 bp, synthetic construct
  source 1..75: mol_type = other DNA
cgatgaagtcaatcgacggtatcaagattattcaggtcgatggtctgaatcgtggcggcgctgcgggtgatgcaa

SEQ ID NO: 807609 - DNA, 75 bp, synthetic construct
  source 1..75: mol_type = other DNA
ttaccaactttaaccagacctcgaaagaacatttcaatcctaacaatgcctttgacgccgaaggtttaaccaaac

SEQ ID NO: 807610 - DNA, 75 bp, synthetic construct
  source 1..75: mol_type = other DNA
ccgagttgctggaaaaaattactgatgaaacgcagatcaaacaagctcaaagctttgaaaaagagttaaggctat

SEQ ID NO: 807611 - DNA, 75 bp, synthetic construct
  source 1..75: mol_type = other DNA
tggattggctggggtgtgccgaaagaacgttgcatcgtggtcaaaccgggcgatgtcgttaaagtgaaagacatt

SEQ ID NO: 807612 - DNA, 75 bp, synthetic construct
  source 1..75: mol_type = other DNA
cgtcaggcatggcggaaacctccgggagaaactcgtccccggcagacgctcacactgacatacagcagcagtcat

SEQ ID NO: 807613 - DNA, 75 bp, synthetic construct
  source 1..75: mol_type = other DNA
agcggaatgggtgcagcgtgagattggccagcggcgggataaggttttcagtgagcagtacagctacggtgcgga

SEQ ID NO: 807614 - DNA, 75 bp, synthetic construct
  source 1..75: mol_type = other DNA
ccgcctgtctatgacattccctggaacgggcaggtgttgcacgcaacgtcggagcagatcctgaaagacgattat

SEQ ID NO: 807615 - DNA, 75 bp, synthetic construct
  source 1..75: mol_type = other DNA
atggaggaccagtcagaacagaaattaccaaattaacgcctgagcaggccgcagaggtgtatagaaaaatgatgg

SEQ ID NO: 807616 - DNA, 75 bp, synthetic construct
  source 1..75: mol_type = other DNA
gaggaccagtcagaacagaaattaccaacttaacgccggagcaggttgcagaagcgtatagaaaaatgatgggct

SEQ ID NO: 807617 - DNA, 75 bp, synthetic construct
  source 1..75: mol_type = other DNA
tggatgtcgtcgagatggcatcagcagatagtgctgctctcctgaagaaaatcaaatggcctgataaggttaaaa

SEQ ID NO: 807618 - DNA, 75 bp, synthetic construct
  source 1..75: mol_type = other DNA
tgactacctggccggaacggaggccagtaacctggtggaagagaaggtggaaaagaccgccatctccatccgcag

SEQ ID NO: 807619 - DNA, 75 bp, synthetic construct
  source 1..75: mol_type = other DNA
gactcccactactctaactattatgcgaagcacggtaacgaacatcagatcgacgtggctttaggttcatacggc

SEQ ID NO: 807620 - DNA, 75 bp, synthetic construct
  source 1..75: mol_type = other DNA
gattcccactactccaactattatgcaaaacatggtaacgagcatcagatcgacgtggctttaggatcgtacggc

SEQ ID NO: 807621 - DNA, 75 bp, synthetic construct
  source 1..75: mol_type = other DNA
acgggtgagagcaaccctgtggaagaaaaggcgcctgtggcggagctggctgaaattgtggacaaagaaaccggg

SEQ ID NO: 807622 - DNA, 75 bp, synthetic construct
  source 1..75: mol_type = other DNA
agagctgactgaaattgtggacaaagaaaccggggaaatcctgtatccggacgatgagcggtatgacgaactctg

SEQ ID NO: 807623 - DNA, 75 bp, synthetic construct
  source 1..75: mol_type = other DNA
tcgtgaatggatgagcacggtcaacgatccgcagatcacccgacacggctggttatgggtcaccagtaatgcccg

SEQ ID NO: 807624 - DNA, 75 bp, synthetic construct
  source 1..75: mol_type = other DNA
cactgttgtgaacagtgacggctggcagattgtcaaaaacgggggcgtggccgggaataccattatcaaccagaa

SEQ ID NO: 807625 - DNA, 75 bp, synthetic construct
  source 1..75: mol_type = other DNA
tgtgaataccggcgcggaagggggaccggatgcagaaaatggtgataccgggcagtttgttcgcggaaatgccgt

SEQ ID NO: 807626 - DNA, 75 bp, synthetic construct
  source 1..75: mol_type = other DNA
ggaacactgacaaatcatgacaaccagattgtcttcggtacggccaacggaatgaccatcagtaccggtctggag

SEQ ID NO: 807627 - DNA, 75 bp, synthetic construct
  source 1..75: mol_type = other DNA
tcaccctgggcgttcaggccggttatggccacagcgtcagcggcagcagcgctgaaggatataacggtcaggcca

SEQ ID NO: 807628 - DNA, 75 bp, synthetic construct
  source 1..75: mol_type = other DNA
taataaaaccataaatattacagggcgtgttaacccctcggattacggtaactttgattcccgttatgtgaaaga

SEQ ID NO: 807629 - DNA, 75 bp, synthetic construct
  source 1..75: mol_type = other DNA
gactccccggtaacgttccataaactgaccaccagtaacctcaccggccaggacggcaccatcaatatgcgtgtt

SEQ ID NO: 807630 - DNA, 75 bp, synthetic construct
  source 1..75: mol_type = other DNA
acggccaggataacgccggttatgtgaagttcgggcatggcagtacacaacatgtgcgtgccggcttccgtctgg

SEQ ID NO: 807631 - DNA, 75 bp, synthetic construct
  source 1..75: mol_type = other DNA
tgctggagccgcaactgcagtacacctggcagggactctccctggatgacggccaggataacgccggttatgtga

SEQ ID NO: 807632 - DNA, 75 bp, synthetic construct
  source 1..75: mol_type = other DNA
agaccggtgtaagcggtgaaaataacagcgtccgtctcagcattcagggcggtcatctcggtcacgataacaacg

SEQ ID NO: 807633 - DNA, 75 bp, synthetic construct
  source 1..75: mol_type = other DNA
aggcaaactgcaggtgaacgccggtggtaccgccacacatgtcaccctgaaacagggtggagcactggtcaccag

SEQ ID NO: 807634 - DNA, 75 bp, synthetic construct
  source 1..75: mol_type = other DNA
gttacgttctaaagataaaaaattattttctatcagagttcttgctaatttgtacaaacttacatcaagagtaat

SEQ ID NO: 807635 - DNA, 75 bp, synthetic construct
  source 1..75: mol_type = other DNA
ccggcgcctttaactacaccctgaaccgtgacagcgatgaagactggtacctgcgcagtgaaaatgcttatcgtg

SEQ ID NO: 807636 - DNA, 75 bp, synthetic construct
  source 1..75: mol_type = other DNA
tcaccctgggcgttcaggcgggttatgcccacagcgtcagcggcagcagcgctgaaggatataacggtcaggcca

SEQ ID NO: 807637 - DNA, 75 bp, synthetic construct
  source 1..75: mol_type = other DNA
ctcggcattatctcacgacggataagttacataccggcttctgcaatagataaagaggtaataaataaactgcaa

SEQ ID NO: 807638 - DNA, 75 bp, synthetic construct
  source 1..75: mol_type = other DNA
gtccaggggaataagctgcaggccggtgcctttaactactccctcaaccgggacagtgatgagagctggtatctg

SEQ ID NO: 807639 - DNA, 75 bp, synthetic construct
  source 1..75: mol_type = other DNA
gaagggacagaggcagaaaacgacgagcagattgagttggttcctgattggctaaaatcaaaagcggttccggtc

SEQ ID NO: 807640 - DNA, 75 bp, synthetic construct
  source 1..75: mol_type = other DNA
ctgcctggaatgtatccgctatatttcttcccgctctctggatgaggctaaaaatattcttattgctgattgtga

SEQ ID NO: 807641 - DNA, 75 bp, synthetic construct
  source 1..75: mol_type = other DNA
ctgacgaggtatggactcatgataagggagtgtttgagcgttgcaaaagtctcaatattcctgtgttcacattgt

SEQ ID NO: 807642 - DNA, 75 bp, synthetic construct
  source 1..75: mol_type = other DNA
tacgtcactggacctgcaggccggactggaagcccgtgtccgggaaaatatcaccctgggcgttcaggcaggtta

SEQ ID NO: 807643 - DNA, 75 bp, synthetic construct
  source 1..75: mol_type = other DNA
gttctctccctcacagaatggcacttcactggatctgcaggccggactggaagcccgtgtccgggaaaatatcac

SEQ ID NO: 807644 - DNA, 75 bp, synthetic construct
  source 1..75: mol_type = other DNA
aggacaacgccggttatgtgaagttcgggcatggcagtgcacaacatgtgcgtgccggtttccgtctgggcagcc

SEQ ID NO: 807645 - DNA, 75 bp, synthetic construct
  source 1..75: mol_type = other DNA
ggcagccacaacgatatgacctttggtgaaggcacctcatcccgtgacaccctgcgcgacagtgcaaaacacagt

SEQ ID NO: 807646 - DNA, 75 bp, synthetic construct
  source 1..75: mol_type = other DNA
tctctggcactggtagctgtcacaaccggccctgacatgatcaaaatgttgcggggacggatctccggtgcgcag

SEQ ID NO: 807647 - DNA, 75 bp, synthetic construct
  source 1..75: mol_type = other DNA
agggtatgctgaagcatattgatttttcgacggccagcccgactgtccggcaggcgcttcagaaggggaccggtg

SEQ ID NO: 807648 - DNA, 75 bp, synthetic construct
  source 1..75: mol_type = other DNA
gccaccctgacggtgaaaaatctccggggacagaacggcagcatcaccctgcgtgtccgccctgacctggcacag

SEQ ID NO: 807649 - DNA, 75 bp, synthetic construct
  source 1..75: mol_type = other DNA
actgccggtgaactggtgggtacagccttctgttatccgcaccttcagctcccggggtgacatgagcatgggtac

SEQ ID NO: 807650 - DNA, 75 bp, synthetic construct
  source 1..75: mol_type = other DNA
gggcatggcagtgcacaacatgtgcgtgccggtttccgtctgggcagccacaacgatatgagctttggtgaaggc

SEQ ID NO: 807651 - DNA, 75 bp, synthetic construct
  source 1..75: mol_type = other DNA
tatcaccctgggcgttcaggcaggttatgtccacagcgtcagcggcagcagcgctgaaggctataacggtcaggc

SEQ ID NO: 807652 - DNA, 75 bp, synthetic construct
  source 1..75: mol_type = other DNA
accaatatgcaaagtcttcgctactcgcaccctgaaacccaacgcattggtcagctctttaaaggggacgacatc

SEQ ID NO: 807653 - DNA, 75 bp, synthetic construct
  source 1..75: mol_type = other DNA
gtggtagatgtctcggaagtgttacgcgacggtacgccgcgccgcgacgaagagattacgattaaagaccggcta

SEQ ID NO: 807654 - DNA, 75 bp, synthetic construct
  source 1..75: mol_type = other DNA
ggcaggctcccgcagccatcagaccggtgtaaacggtgaaaataacagcgtccgtctcagcattcagggcggtca

SEQ ID NO: 807655 - DNA, 75 bp, synthetic construct
  source 1..75: mol_type = other DNA
ggggccggggctggctgggctcactggaaaccggtctgcccttcagtatcactgacaacctgatgctggagccac

SEQ ID NO: 807656 - DNA, 75 bp, synthetic construct
  source 1..75: mol_type = other DNA
acgcaccaccatcaataaaaatggtcgtcagattgtggctgctgaaggaacggcaaataccactggggtttatgc

SEQ ID NO: 807657 - DNA, 75 bp, synthetic construct
  source 1..75: mol_type = other DNA
agttcgggcatggcagtgcacaacatgtgcgtgccggtttccgtctgggcagccacaacgatatgacctttggtg

SEQ ID NO: 807658 - DNA, 75 bp, synthetic construct
  source 1..75: mol_type = other DNA
aatatcaccctgggcgttcaggccggttatgcccacagcgtcagcggcagcagcgctgaaggttataacggtcag

SEQ ID NO: 807659 - DNA, 75 bp, synthetic construct
  source 1..75: mol_type = other DNA
gtatacctggcagggactttccctggatgacggccaggataacgccggttatgtgaagtttgggcatggcagtgc

SEQ ID NO: 807660 - DNA, 75 bp, synthetic construct
  source 1..75: mol_type = other DNA
agcatgggtacagccgccgccggcagtaacatgacgttctcaccgtcccggaatggcacgtcactggacctgcag

SEQ ID NO: 807661 - DNA, 75 bp, synthetic construct
  source 1..75: mol_type = other DNA
cctatctacgacgaaaatcataagcagatcggcgtggtggcgattggtctggagctaagccgcgtaacgcagcag

SEQ ID NO: 807662 - DNA, 75 bp, synthetic construct
  source 1..75: mol_type = other DNA
cggctggagggaggaaaccagtatgtgcacaaatacggacttgcgctgaacacggtaattaacgaggggggctgg

SEQ ID NO: 807663 - DNA, 75 bp, synthetic construct
  source 1..75: mol_type = other DNA
tgtgcgtgaactgccggtgaactggtgggtacagccttctgttatccgcaccttcagttcccggggtgacatgag

SEQ ID NO: 807664 - DNA, 75 bp, synthetic construct
  source 1..75: mol_type = other DNA
ctggctgctgacacggttgtacaggcgggagaaaccgtgaacggcggaacactggcaaatcatgacaaccagatt

SEQ ID NO: 807665 - DNA, 75 bp, synthetic construct
  source 1..75: mol_type = other DNA
ccttaacgaaggcgcactgacgctggccgacagtaccgtcaccacggatatcattgcccggcgcggtaccaccct

SEQ ID NO: 807666 - DNA, 75 bp, synthetic construct
  source 1..75: mol_type = other DNA
ggtcgtcttgatgtactgaacggtcacacggccactgacacccgggtggatgacgggggcacgctggcagtcctg

SEQ ID NO: 807667 - DNA, 75 bp, synthetic construct
  source 1..75: mol_type = other DNA
gggggactgctgaatccaccaccatcaacaacaatggccgacaggttatctggtcttcgggggtatcccgggaca

SEQ ID NO: 807668 - DNA, 75 bp, synthetic construct
  source 1..75: mol_type = other DNA
agggcggtcatctcggtcacgataacaatggcggtattgcccgtggggccacgccggaaagcagcggcagctatg

SEQ ID NO: 807669 - DNA, 75 bp, synthetic construct
  source 1..75: mol_type = other DNA
gggcaagaacccggtggtgaaatcagcgttacgttgcactaccgtcacggctggctgcactgtgaaattaacgat

SEQ ID NO: 807670 - DNA, 75 bp, synthetic construct
  source 1..75: mol_type = other DNA
gacactaagccaggcatggtcgcaggtagtggatgtctccgaagtattacgagacggcacgccgcgccgtgacga

SEQ ID NO: 807671 - DNA, 75 bp, synthetic construct
  source 1..75: mol_type = other DNA
gaacggactggcggtgaacaccacgctgaataacagaggcgagcagtgggttcatgagggcggggttgccaccgg

SEQ ID NO: 807672 - DNA, 75 bp, synthetic construct
  source 1..75: mol_type = other DNA
ggtgaactggtgggtacagccttctgttatccgcactttcagctcccggggtgacatgagcatgggtacagccgc

SEQ ID NO: 807673 - DNA, 75 bp, synthetic construct
  source 1..75: mol_type = other DNA
cgctcgcgctcgctattcgaaacgcttaaacgcgatatcgccagcgtttcgccagaaacagaagtggtgggcgtt

SEQ ID NO: 807674 - DNA, 75 bp, synthetic construct
  source 1..75: mol_type = other DNA
ggagcttaaccgtcgcctgtttacccgtacagaacgggctgccgggtattacgttcgtttcaacctcacagggtt

SEQ ID NO: 807675 - DNA, 75 bp, synthetic construct
  source 1..75: mol_type = other DNA
atgctgcttgatgctctttttcgcagtgaaccactggaaaacccggctactccgatcacgagtgaatcggcagaa

SEQ ID NO: 807676 - DNA, 75 bp, synthetic construct
  source 1..75: mol_type = other DNA
agtctacctgatgcagaaatatgcccgtctggggccgagcgcgatgcagagtgaacaaccgacgcagcaacaggg

SEQ ID NO: 807677 - DNA, 75 bp, synthetic construct
  source 1..75: mol_type = other DNA
tggatgctcagatcattgatatgaccaagctgaaccggtcgatgattgccggaatttttaatgtcccggcgcaca

SEQ ID NO: 807678 - DNA, 75 bp, synthetic construct
  source 1..75: mol_type = other DNA
tcgatttaagccgttataacgccatcgccagccgctttgccgaggaacgccagcaaacgcttgattttcttaagt

SEQ ID NO: 807679 - DNA, 75 bp, synthetic construct
  source 1..75: mol_type = other DNA
acgtgggtgattagtttctggctggcggggttgattattcgtcgtcgcgatgaagaaactgaaaacgcccaataa

SEQ ID NO: 807680 - DNA, 75 bp, synthetic construct
  source 1..75: mol_type = other DNA
atcacggaaaccccgaccggggaggcgtttgcgtccgtcgttctggaacagggtgaaacgggttttgaactgctc

SEQ ID NO: 807681 - DNA, 75 bp, synthetic construct
  source 1..75: mol_type = other DNA
ctttttattgattatgtcgatacagaatggtgtcttagatgcttaaactatggcatattagttcatatcattcct

SEQ ID NO: 807682 - DNA, 75 bp, synthetic construct
  source 1..75: mol_type = other DNA
tgccgtgggtaacgaactgggaacaggaactcaatcgccgcctgttcacccgtgctgaactggctgccggatatt

SEQ ID NO: 807683 - DNA, 75 bp, synthetic construct
  source 1..75: mol_type = other DNA
aagcgttatgcgacgcggaggacgtgctggtgtggtccgtggcggtcacgcccacgattgaaaagctcagtgtct

SEQ ID NO: 807684 - DNA, 75 bp, synthetic construct
  source 1..75: mol_type = other DNA
aatcggtctggtgacgtgggtgacaggcttctggctggcagggatgattattcgtcgtcgcgatgatgaagctga

SEQ ID NO: 807685 - DNA, 75 bp, synthetic construct
  source 1..75: mol_type = other DNA
gcgggctttggctatgtactcgacagtgttagcgagccggacaaagacgatctgctgtttgaacacgacggcgcg

SEQ ID NO: 807686 - DNA, 75 bp, synthetic construct
  source 1..75: mol_type = other DNA
ctcaggctctggctgatcaaagggcgtatatcacggcgtcttccggtaaggaactcttctggcattggcgttgaa

SEQ ID NO: 807687 - DNA, 75 bp, synthetic construct
  source 1..75: mol_type = other DNA
atgcccaatataatttaggtcagatttattactacggtcagggtgtgactcagagctatcgacaggcgaaatact

SEQ ID NO: 807688 - DNA, 75 bp, synthetic construct
  source 1..75: mol_type = other DNA
tgatcatcggtgcgctgacggttatcgtctggaaacagttcggctggctgggactgtacgaaattattccgggct

SEQ ID NO: 807689 - DNA, 75 bp, synthetic construct
  source 1..75: mol_type = other DNA
cgggtggtcgccgattcgctgggaaattttttgcaaggactccctaccaaagagacgcccatcccgccagcggaa

SEQ ID NO: 807690 - DNA, 75 bp, synthetic construct
  source 1..75: mol_type = other DNA
ctcagactctggcaaaacgaagggcgtgtttcgcggcgtcttccggtaacggcctcttctgacactggcgttgaa

SEQ ID NO: 807691 - DNA, 75 bp, synthetic construct
  source 1..75: mol_type = other DNA
acccgcgagtgccgctgatattacggcgcgagctgaccaggaaggctggaaccctgggttcacggaaaaaatggt

SEQ ID NO: 807692 - DNA, 75 bp, synthetic construct
  source 1..75: mol_type = other DNA
atgaagtcggattaatactggatctgaatagtgaggtgtatgagcgtgaaaagactcaccatcagcaatatgcac

SEQ ID NO: 807693 - DNA, 75 bp, synthetic construct
  source 1..75: mol_type = other DNA
atccagaggatttcgcctggcagggcttaacgctgacacccgctgccgcggttcacatctgtgagctggtggcaa

SEQ ID NO: 807694 - DNA, 75 bp, synthetic construct
  source 1..75: mol_type = other DNA
atccacaggatttcgcctggcaaggcttaacgctgacacccgcagcggcgatacacatccgcgaactggtggcaa

SEQ ID NO: 807695 - DNA, 75 bp, synthetic construct
  source 1..75: mol_type = other DNA
ggtgtttagtttgctgggtaaagcgccgtcagcggcgatgcaaaaacgctttgccgaggccgatgcgcactatca

SEQ ID NO: 807696 - DNA, 75 bp, synthetic construct
  source 1..75: mol_type = other DNA
gaaaaaaggcgctaaagattttgcgttggtggaacggttatatcagtccattgaaatctgcgcttgagtcattgc

SEQ ID NO: 807697 - DNA, 75 bp, synthetic construct
  source 1..75: mol_type = other DNA
gcagccttaaccatctctacaatggcaggattgagggacaatatgtcacttacgaccatcattatcgtctgacgt

SEQ ID NO: 807698 - DNA, 75 bp, synthetic construct
  source 1..75: mol_type = other DNA
aaaaaataaaattgaatatatgaaaaaacatattttggctacgctggatggaataagaggaattactgggggcgg

SEQ ID NO: 807699 - DNA, 75 bp, synthetic construct
  source 1..75: mol_type = other DNA
ggaagcgtttcgctttgatatctgcggcagcgttagcgaaccgatccccgataatcgttatggcgtgagtaatgg

SEQ ID NO: 807700 - DNA, 75 bp, synthetic construct
  source 1..75: mol_type = other DNA
atgaaatggttatatttctctgtcctgattttattcagtcatacatcaatcgcatctgtgatgaataataatcat

SEQ ID NO: 807701 - DNA, 75 bp, synthetic construct
  source 1..75: mol_type = other DNA
agcgttctttcagaggtaaacaaacgccatattgaagcacaaacagggctaacactatcactaaacataagcaaa

SEQ ID NO: 807702 - DNA, 75 bp, synthetic construct
  source 1..75: mol_type = other DNA
tacaatggcaggatgacagtgttgagtttatacacaagcagatgtctatatttaaaaatgttgctattgttgtca

SEQ ID NO: 807703 - DNA, 75 bp, synthetic construct
  source 1..75: mol_type = other DNA
cgatattaatctgggtgaggctctttattcaacacaatatatgtttccttcaaagcaaatgattatggacttgcg

SEQ ID NO: 807704 - DNA, 75 bp, synthetic construct
  source 1..75: mol_type = other DNA
agcggcgaaaaaatgcgcaaagccccgatcctgtttcactacatcaatcttgccgaagggatgacagagcggcga

SEQ ID NO: 807705 - DNA, 75 bp, synthetic construct
  source 1..75: mol_type = other DNA
gtaaccgccgttttggcatgatgctcggtcagggcatggatgtacaaagcgcgcaggagaagattggtcaggtgg

SEQ ID NO: 807706 - DNA, 75 bp, synthetic construct
  source 1..75: mol_type = other DNA
ggggccatgaccctgaacatatcgcaacgcttgaacgcgaccgctgtaacgccgcgtttctccccgatgtgcctt

SEQ ID NO: 807707 - DNA, 75 bp, synthetic construct
  source 1..75: mol_type = other DNA
aagccggaaatcacgaacgtagtcgcgttttaacgctgttacgcaacgattggggaattcctgttgagcagttta

SEQ ID NO: 807708 - DNA, 75 bp, synthetic construct
  source 1..75: mol_type = other DNA
agatcgaggtactggatgtggatggtgagccgggctggtaccaggtcgcgatttctgtcagaccgcattttaaat

SEQ ID NO: 807709 - DNA, 75 bp, synthetic construct
  source 1..75: mol_type = other DNA
caccgctcttgccatcaccttggcaagaaatggccacgaggttgtcctctggggccatgaccctgaacatatcgc

SEQ ID NO: 807710 - DNA, 75 bp, synthetic construct
  source 1..75: mol_type = other DNA
tgcgaaagaactggcggcaggtttaccgacggctatttcgttggcctctaccgaccaaacctttgctgatgatct

SEQ ID NO: 807711 - DNA, 75 bp, synthetic construct
  source 1..75: mol_type = other DNA
cctgccatactggacaggtaaaatacgcagaaagttcgacctaataccaccatggtcaatataccgctctgttat

SEQ ID NO: 807712 - DNA, 75 bp, synthetic construct
  source 1..75: mol_type = other DNA
gaacgtcaggctaacaccagtctgtcggaaataccgtattacgagtgctacacagatattccggcgatggtgaaa

SEQ ID NO: 807713 - DNA, 75 bp, synthetic construct
  source 1..75: mol_type = other DNA
ctggcgaaacccgtgagctacgtctggataaaattaccagctttagccacccggaaatcggtacggtggtggtga

SEQ ID NO: 807714 - DNA, 75 bp, synthetic construct
  source 1..75: mol_type = other DNA
gtacttgtttttttctttttatttttggtgttaaggttgtccctgcttttgctcaggttttacctgtttctcagt

SEQ ID NO: 807715 - DNA, 75 bp, synthetic construct
  source 1..75: mol_type = other DNA
tattcgcaatgagtttatcaaaaaactttcctgctatatggataatgaaaatgcaaaaatagctggcccagtttt

SEQ ID NO: 807716 - DNA, 75 bp, synthetic construct
  source 1..75: mol_type = other DNA
tcattgagccaggatcaggcatcgagatcaacacgctgggacggctggttttcgacattaaaacagcacaggccg

SEQ ID NO: 807717 - DNA, 75 bp, synthetic construct
  source 1..75: mol_type = other DNA
caccgtgctttgttccttatgtgtctgtgccatcaggaaagggaaaacagcctgtttcctggaaacagactcgca

SEQ ID NO: 807718 - DNA, 75 bp, synthetic construct
  source 1..75: mol_type = other DNA
tcttcattaattgaggcagggattcctgctcctgaagcactcaggattatttcaagaacagctaccccatggtat

SEQ ID NO: 807719 - DNA, 75 bp, synthetic construct
  source 1..75: mol_type = other DNA
ttccgttatcttatgcattgaatgaactttatcagtttactaccgattcaggaaagaaagaaacaacatcttcaa

SEQ ID NO: 807720 - DNA, 75 bp, synthetic construct
  source 1..75: mol_type = other DNA
ctacgccggaagcgatacgaataataagcagaaatgcttctccatggtatagagagagattgacggttattagat

SEQ ID NO: 807721 - DNA, 75 bp, synthetic construct
  source 1..75: mol_type = other DNA
ctgctgtcttttatgatggtgatattattaatactggcaactttgtcaagatggaccggaaggttgcgtctcttc

SEQ ID NO: 807722 - DNA, 75 bp, synthetic construct
  source 1..75: mol_type = other DNA
aattattatttacgactaagttgagactgcgtttttatgaaaaaatgtcgaggtacctctcgaatggtatccctg

SEQ ID NO: 807723 - DNA, 75 bp, synthetic construct
  source 1..75: mol_type = other DNA
ggatatgtttttccgtctaaggcgttagttatggatattagatcttatgctgcactggatggttttgaaatgatg

SEQ ID NO: 807724 - DNA, 75 bp, synthetic construct
  source 1..75: mol_type = other DNA
ggactctctgtttcctgacaaccatcggtgtgtcgctgggactggagctctccaaccagttgttacttatcgttc

SEQ ID NO: 807725 - DNA, 75 bp, synthetic construct
  source 1..75: mol_type = other DNA
tatgcccgcgactctgctgaaattcttgaactccattttcccaccttttgtcatggcacctacgcgcaggatcaa

SEQ ID NO: 807726 - DNA, 75 bp, synthetic construct
  source 1..75: mol_type = other DNA
atttatggcgactgcgatggtcttttagttattccaaaagaagttgaaaaggaggtaatagctgaagcactgaat

SEQ ID NO: 807727 - DNA, 75 bp, synthetic construct
  source 1..75: mol_type = other DNA
tggaaggcgctctggccgttattgttgttgtgggtgtttactgcctggtcgtgcttttgatggatcgtctgggga

SEQ ID NO: 807728 - DNA, 75 bp, synthetic construct
  source 1..75: mol_type = other DNA
ggtcgcgtaagcctgcgttacctgatgtacaaaaccgaccaggttcgcgaatccctcggtcattccaacttccgc

SEQ ID NO: 807729 - DNA, 75 bp, synthetic construct
  source 1..75: mol_type = other DNA
ttgacatacccgataacgctggacacacctgcgaatggagtgttcatgagaaactcacaaggtgctgagatatgc

SEQ ID NO: 807730 - DNA, 75 bp, synthetic construct
  source 1..75: mol_type = other DNA
gcagacgtgaatgacgctgatatatttttaatgttaaaagcgtttgtagaaatgggatttgaaatcagtttacat

SEQ ID NO: 807731 - DNA, 75 bp, synthetic construct
  source 1..75: mol_type = other DNA
aaactacgccaaacggcatcaagatcggaactcgcgttattggctggtctggcgcggttaaacaattcgatggtt

SEQ ID NO: 807732 - DNA, 75 bp, synthetic construct
  source 1..75: mol_type = other DNA
aacctacattaacaggcatccgttttggtaatcgaattattggttattcaactgcggttcgccagatcgacaacg

SEQ ID NO: 807733 - DNA, 75 bp, synthetic construct
  source 1..75: mol_type = other DNA
ttgccgaacgtctaccccgcgcagcaaaagagccaccagcgacacacagacgcgctacagacgacgtaaaagcac

SEQ ID NO: 807734 - DNA, 75 bp, synthetic construct
  source 1..75: mol_type = other DNA
ctggtacagaagcatatccgtcaacaggatatgacaacgctgttagataagttatcccgcttaatgattctgggg

SEQ ID NO: 807735 - DNA, 75 bp, synthetic construct
  source 1..75: mol_type = other DNA
atgtttattcttatcgctggcgttaacgtgcgcaatgaatattttgttaatcgcatcgctgggatcgctggttac

SEQ ID NO: 807736 - DNA, 75 bp, synthetic construct
  source 1..75: mol_type = other DNA
ttgatgtatcacctgttggtattgttgcaggatcaggatctggatttaacgacggtgattgagaacctgcgtaaa

SEQ ID NO: 807737 - DNA, 75 bp, synthetic construct
  source 1..75: mol_type = other DNA
ggtaaagtgatgatcgccgggatgggcggtgtacttggttccgtcactattattattggtctgggcgctatgctg

SEQ ID NO: 807738 - DNA, 75 bp, synthetic construct
  source 1..75: mol_type = other DNA
acaaaattaagcgataaaataaatccaccgggcgtcgcgctggtcacctcgctaattgttattcctatcgcgcgg

SEQ ID NO: 807739 - DNA, 75 bp, synthetic construct
  source 1..75: mol_type = other DNA
gttgcgttggttaagcgctccacaacgcttatccatgcttgaggaactgatgcagtgggaggggagtgattctga

SEQ ID NO: 807740 - DNA, 75 bp, synthetic construct
  source 1..75: mol_type = other DNA
acgcctgcagttttattatcaatgagccgcaatgtgttttccggcaaatatttgagagcacgctgcgccaacggc

SEQ ID NO: 807741 - DNA, 75 bp, synthetic construct
  source 1..75: mol_type = other DNA
ggcttcaccgcaaattgcagatgtcgattttactgagccgggaagacataacgcctgtagctttattatcaacga

SEQ ID NO: 807742 - DNA, 75 bp, synthetic construct
  source 1..75: mol_type = other DNA
ctttttgcgagcttcgcaaaaattgtgctgcacacaatcgacggtgacttttcatattcagcagcttgagcagga

SEQ ID NO: 807743 - DNA, 75 bp, synthetic construct
  source 1..75: mol_type = other DNA
gttatcgaaaccgaagaggccagtcaatttgcggcaattgccagtgccttgctgattaacgttggcacactgacg

SEQ ID NO: 807744 - DNA, 75 bp, synthetic construct
  source 1..75: mol_type = other DNA
acacgctactggtactggcgaatcctatcggaccaacctgccataaaggcaccagcagctgcttcggcgacaccg

SEQ ID NO: 807745 - DNA, 75 bp, synthetic construct
  source 1..75: mol_type = other DNA
agacaaaaccatcgaaagcggcaaagtcaccttcttctcgcgcactaaacagcgactgtggaccaaaggcgaaac

SEQ ID NO: 807746 - DNA, 75 bp, synthetic construct
  source 1..75: mol_type = other DNA
tataacatctgacttagggaagactctagaaaattttcactccgcctatgaagagataaaggagttgagtgctaa

SEQ ID NO: 807747 - DNA, 75 bp, synthetic construct
  source 1..75: mol_type = other DNA
aaaattatgtattaaaaattttatgtggtaaagttgatgaaataatcacaattaacaagattcaatcatatttgt

SEQ ID NO: 807748 - DNA, 75 bp, synthetic construct
  source 1..75: mol_type = other DNA
ggcgctcggtgcatcgccagcgatggttatcgaaaccgaagaggccagtcagtttgcggctatcgccagtgcgtt

SEQ ID NO: 807749 - DNA, 75 bp, synthetic construct
  source 1..75: mol_type = other DNA
ggaattgtcgctgatagccaggaagaagcggaatatcaggaaacttttgataaagttaatcgtatcctgaagcaa

SEQ ID NO: 807750 - DNA, 75 bp, synthetic construct
  source 1..75: mol_type = other DNA
actgctacaagaagccggaacgcagctggaaagtgaacatgcgctggtacgctggttatcgcaacatatcctcga

SEQ ID NO: 807751 - DNA, 75 bp, synthetic construct
  source 1..75: mol_type = other DNA
agcgcaggagatgctttggctgttgcaggcggtgatgacgcctgaacgagagaacactctgcgcagtgcgctggc

SEQ ID NO: 807752 - DNA, 75 bp, synthetic construct
  source 1..75: mol_type = other DNA
agatccgcgaaacagtagcgcgtgaaaaacgccgccgtggcgaattgggttttgatgacatgttaagtcggctcg

SEQ ID NO: 807753 - DNA, 75 bp, synthetic construct
  source 1..75: mol_type = other DNA
gcggtgatgacgcccgaacgtgagaacaccctgcgtagtgcgctggcaacgtcaatgatggggctgaacgcgctg

SEQ ID NO: 807754 - DNA, 75 bp, synthetic construct
  source 1..75: mol_type = other DNA
agttgagccgaattgggtgcgggaaaaactggaactcggcggctttgaaccgcagtgggaaccggtgttgaccga

SEQ ID NO: 807755 - DNA, 75 bp, synthetic construct
  source 1..75: mol_type = other DNA
ttggtctggctgccgtttatcaccaatttccgcgtccaggatcaggcgttttatcacgatcgccactcgtttgag

SEQ ID NO: 807756 - DNA, 75 bp, synthetic construct
  source 1..75: mol_type = other DNA
ggaatagtcattctttaattacgatggttaattctcaagcacaaacactactgaatattgataaagaaagtttaa

SEQ ID NO: 807757 - DNA, 75 bp, synthetic construct
  source 1..75: mol_type = other DNA
aacaaaagttaataaacaaagtactttgccagcataatgctgtgattgaatgtatggatgacggttttatttgtt

SEQ ID NO: 807758 - DNA, 75 bp, synthetic construct
  source 1..75: mol_type = other DNA
acccaccacctgcgatggtgacgacctccatcctgaagcgccgtggcgatacagcagcccttaccctgctacagg

SEQ ID NO: 807759 - DNA, 75 bp, synthetic construct
  source 1..75: mol_type = other DNA
gcggtgttggcgattatcaaagcaccatggcgcaggtatgtgccgcgcaaatccgcgactggttacaggccgggc

SEQ ID NO: 807760 - DNA, 75 bp, synthetic construct
  source 1..75: mol_type = other DNA
aaagcgtcggcgtggtgaagtgggttttgacgacatgttaagtcggctggattccgcgttgcgtagcgaaagcgg

SEQ ID NO: 807761 - DNA, 75 bp, synthetic construct
  source 1..75: mol_type = other DNA
ctggaagagatcgacgataaagcgcaagccgcgcagtggttgttgttagccgaacggcagatggatgaagcggca

SEQ ID NO: 807762 - DNA, 75 bp, synthetic construct
  source 1..75: mol_type = other DNA
gatatcttcacttatatgaaggcgcgtagcgaagttcacgcccactacactttagataccaactggcgctccgca

SEQ ID NO: 807763 - DNA, 75 bp, synthetic construct
  source 1..75: mol_type = other DNA
ttgcagtggaagccgatccgagaagtgttgaaacagaagagattgaatcacgctattacacgctatcgtaacgag

SEQ ID NO: 807764 - DNA, 75 bp, synthetic construct
  source 1..75: mol_type = other DNA
tgctgcgcaaggttgatattagtcggggtacatattattcacggttgaagaagtacgggattaaggcagagttct

SEQ ID NO: 807765 - DNA, 75 bp, synthetic construct
  source 1..75: mol_type = other DNA
atctggtgcagatcgtcacgatccataaatcgaaaggactggaatatccgctggtctggttgccgtttatcacca

SEQ ID NO: 807766 - DNA, 75 bp, synthetic construct
  source 1..75: mol_type = other DNA
gttaccaggtgaatctcgcccagcgttttcaggctacctattgcggtgatgaatggcaggcattcgttcagctta

SEQ ID NO: 807767 - DNA, 75 bp, synthetic construct
  source 1..75: mol_type = other DNA
gcgcgcagcttttcctggtggctcaataaccggggctccgaaagtacgggctatggaaattatcgacgaactgga

SEQ ID NO: 807768 - DNA, 75 bp, synthetic construct
  source 1..75: mol_type = other DNA
gcgattttaagtctttcgccagaacggtttattctttgtgatggtggcgagatccagacccgcccgattaaaggc

SEQ ID NO: 807769 - DNA, 75 bp, synthetic construct
  source 1..75: mol_type = other DNA
gatatcttcacctacatgaaggcgcgtagcgaagttcacgctcattacacgttggataccaactggcgttccgca

SEQ ID NO: 807770 - DNA, 75 bp, synthetic construct
  source 1..75: mol_type = other DNA
taaatcaaaagggctggaatatccgctggtctggttgccatttattaccaatttccgcgtccaggatcaggcgtt

SEQ ID NO: 807771 - DNA, 75 bp, synthetic construct
  source 1..75: mol_type = other DNA
gatatcttcacttatatgaaggcgcgtagcgaagttcatgctcactacaccttagataccaactggcgttccgca

SEQ ID NO: 807772 - DNA, 75 bp, synthetic construct
  source 1..75: mol_type = other DNA
attgctgattacgactatgagcgccactttggcggcgttatctatctgttcctgcgtggcgttgataaagaacat

SEQ ID NO: 807773 - DNA, 75 bp, synthetic construct
  source 1..75: mol_type = other DNA
atccgcgactggttacaagccgggcagcgcggggaagcgttgctgatgaacggcgatgatgcgcgaccggtacgt

SEQ ID NO: 807774 - DNA, 75 bp, synthetic construct
  source 1..75: mol_type = other DNA
gctcatcgccagccagcttgatgcactaattcgccagtttgacccgctatccgctggctgcccgccgctggagtt

SEQ ID NO: 807775 - DNA, 75 bp, synthetic construct
  source 1..75: mol_type = other DNA
cgtccggcattgaatctgaagtgaaatacaccctgcagttctggctgctgagtaacggaaaggtcatgacggaaa

SEQ ID NO: 807776 - DNA, 75 bp, synthetic construct
  source 1..75: mol_type = other DNA
ccggatatctacaaagcgatgattgatggtgaagcgaatgccagtgttgaactgacgccaaacatggcaggccca

SEQ ID NO: 807777 - DNA, 75 bp, synthetic construct
  source 1..75: mol_type = other DNA
ccgatggtcagcaaaagcaggaaaaccagattaaagcggtacgttcctttgttgcacaaggggtagatgcaatct

SEQ ID NO: 807778 - DNA, 75 bp, synthetic construct
  source 1..75: mol_type = other DNA
tgtatctcctttcgggtgggtacagggcagtgcgcgattgctggcgcaggcagattgacaaaagggccgctgaga

SEQ ID NO: 807779 - DNA, 75 bp, synthetic construct
  source 1..75: mol_type = other DNA
gcgctctgaagaagtcctgagcgcactgaaacaaaaacttcgccataacctggaagcgcgtcttgatgcagaggt

SEQ ID NO: 807780 - DNA, 75 bp, synthetic construct
  source 1..75: mol_type = other DNA
atggcttacaaggaagccaaccgtgcgcataatcgcgctgccaacggcgcgtgtgatgaatacaaacaactcaag

SEQ ID NO: 807781 - DNA, 75 bp, synthetic construct
  source 1..75: mol_type = other DNA
atggcacatccaccacggctgaatgacgacaaaccggttatctggacggtatctgtaacgcggctgttcgagcta

SEQ ID NO: 807782 - DNA, 75 bp, synthetic construct
  source 1..75: mol_type = other DNA
acgcttactgacaccacaacaggcactggagaaatttaaaggcgataaaacagcagcggcgaattatttaggcat

SEQ ID NO: 807783 - DNA, 75 bp, synthetic construct
  source 1..75: mol_type = other DNA
aatggcgataaaacagcagcggcgaattatttaggtatcagccgaacgacgttctggcggcggctgaaaaactga

SEQ ID NO: 807784 - DNA, 75 bp, synthetic construct
  source 1..75: mol_type = other DNA
ccgatggtcagcaaaagcaggaaaaccagattaaagcggtacgttccttcgtcgcacaaggggtggatgcgatct

SEQ ID NO: 807785 - DNA, 75 bp, synthetic construct
  source 1..75: mol_type = other DNA
caggcaaagatattctgacaggttctatcgacggcgtaccggatatctacaaagcgatgattgatgcgaagcgaa

SEQ ID NO: 807786 - DNA, 75 bp, synthetic construct
  source 1..75: mol_type = other DNA
aaaagaggtcaatggcaaaccgtgtaacgtggttgagttgcagggcaccgttggggccagcgtcgccattgaccg

SEQ ID NO: 807787 - DNA, 75 bp, synthetic construct
  source 1..75: mol_type = other DNA
ctgaaacagcaactccgccagaatcttgaggcgcgtcttgatgctgaagtggatgccattctggatgaactgctg

SEQ ID NO: 807788 - DNA, 75 bp, synthetic construct
  source 1..75: mol_type = other DNA
tcgtcgcatttgtggttggcgttctgggggctggcgtggctgcgtcactgatgcagtggctgacccactacaacg

SEQ ID NO: 807789 - DNA, 75 bp, synthetic construct
  source 1..75: mol_type = other DNA
ccggaaggcatcgcgggtgaggggagtgcttcagatagcggtgaccccacacctgacagcgacatgatgatgtaa

SEQ ID NO: 807790 - DNA, 75 bp, synthetic construct
  source 1..75: mol_type = other DNA
actgctgggcgcaccggcagctccggagccggaaggcatcgcgggtgaggggagtgcttcagatagcggtgaccc

SEQ ID NO: 807791 - DNA, 75 bp, synthetic construct
  source 1..75: mol_type = other DNA
tgctgaacaacgctcagaacgccagcgttccgatcatcgctgggcacaacgttttcgcacagaatcgttagccgt

SEQ ID NO: 807792 - DNA, 75 bp, synthetic construct
  source 1..75: mol_type = other DNA
aatatccttaattactggctggtgggatattcgcttggcggacgtgtggcgatgatggcggcttgtcaggggatg

SEQ ID NO: 807793 - DNA, 75 bp, synthetic construct
  source 1..75: mol_type = other DNA
gtctggcgcatgattatccacctgattatcgcgtttgtggtcggcgttctgggggccggtgtggcggcgtcactg

SEQ ID NO: 807794 - DNA, 75 bp, synthetic construct
  source 1..75: mol_type = other DNA
atcttaagagcgtggtgcgcttttgcgaaaaagtgaaaaaccataaaccggatgtcactctggtctggacgctgc

SEQ ID NO: 807795 - DNA, 75 bp, synthetic construct
  source 1..75: mol_type = other DNA
gaacataaggtcgaggtgaaagacggctgtattgccatcgcttgcccgattaccggagactgggtggcaatgacc

SEQ ID NO: 807796 - DNA, 75 bp, synthetic construct
  source 1..75: mol_type = other DNA
ccgaagagcctctcatttcgtagcaactttcttaacaacacctttcaacgagaaaatcccatgtcagaaataaaa

SEQ ID NO: 807797 - DNA, 75 bp, synthetic construct
  source 1..75: mol_type = other DNA
ccattctggatgagctgcttggtgtacaggcagagccaccgactgaagcgggagataccaccgcagagagcggtg

SEQ ID NO: 807798 - DNA, 75 bp, synthetic construct
  source 1..75: mol_type = other DNA
ggggtaacggctgctcacgggcctgaagacggtgcgggtgacagtgctgtttcagatggtgtcgtgtctcagcct

SEQ ID NO: 807799 - DNA, 75 bp, synthetic construct
  source 1..75: mol_type = other DNA
agcaaaggcaactaccactcggtatctatcactatcaacgccactcatatcgagcaggttgaaacactgtatgaa

SEQ ID NO: 807800 - DNA, 75 bp, synthetic construct
  source 1..75: mol_type = other DNA
tatgctcggtcaatcaccacagatggaacaggtacggcagactattttgctgtatgcccgctccagtgcggcggt

SEQ ID NO: 807801 - DNA, 75 bp, synthetic construct
  source 1..75: mol_type = other DNA
gatgaactttaaatacaccatcaccttcagtcgtgacgaagacaaacttcacgcgcctgataacgcctgggtgca

SEQ ID NO: 807802 - DNA, 75 bp, synthetic construct
  source 1..75: mol_type = other DNA
gaaaaagctgccagaggatactccagtcacggcacagaccagcattggtgataatggtgagattgtagaaagtac

SEQ ID NO: 807803 - DNA, 75 bp, synthetic construct
  source 1..75: mol_type = other DNA
taaatgaagtgactgccaccgcagtcaaacgaatcaaatacagcccggattatttcactttcggcgatgttcagc

SEQ ID NO: 807804 - DNA, 75 bp, synthetic construct
  source 1..75: mol_type = other DNA
gacgaccgttccggcgcgcaaattctttgatatctgccgtggtctgcctgaaggcgcggaaattgccgtgcagct

SEQ ID NO: 807805 - DNA, 75 bp, synthetic construct
  source 1..75: mol_type = other DNA
tgatattccggtgtatctcatcgtccatgacaatccgggccttctcggttccggtgcacatttacgccagacctt

SEQ ID NO: 807806 - DNA, 75 bp, synthetic construct
  source 1..75: mol_type = other DNA
ggccgcgtaagcctgcgttatttaatgtacaaaacagatcaggtccgtgaatccctcggtcattccaacttccgc

SEQ ID NO: 807807 - DNA, 75 bp, synthetic construct
  source 1..75: mol_type = other DNA
caccccatgatggacgcggtagccaccttgagtcattagccgcccgctggcgtgaattgccagtgccggtgattg

SEQ ID NO: 807808 - DNA, 75 bp, synthetic construct
  source 1..75: mol_type = other DNA
ttgccacccatagcgacgcggcgcgggaagtgttgcaaaaatccggcggtaaaaccgtcagcgaagaagaggtgc

SEQ ID NO: 807809 - DNA, 75 bp, synthetic construct
  source 1..75: mol_type = other DNA
gcgaaggcaaaaagttgctgccgcacatctatgaactcaccagagtgatggatacgcttcgtgaggctgccaaaa

SEQ ID NO: 807810 - DNA, 75 bp, synthetic construct
  source 1..75: mol_type = other DNA
ggccgcgtaagtctgcgttatctgatgtacaaaactgatcaggtccgtgaatccctcggacattccaacttccgc

SEQ ID NO: 807811 - DNA, 75 bp, synthetic construct
  source 1..75: mol_type = other DNA
tcgacgttattatggggaaattccagccgtcctgttgtttatgaagtcggtgttgatggtggcgcttatatgttc

SEQ ID NO: 807812 - DNA, 75 bp, synthetic construct
  source 1..75: mol_type = other DNA
tagacaataaaacaacatggaatagttattgcaatgtaatctatgatcaaaagacattgccgaccactggaacta

SEQ ID NO: 807813 - DNA, 75 bp, synthetic construct
  source 1..75: mol_type = other DNA
ccaaactggtggatggtcgcttcccggattaccgccgtgttctgccgaagaacccggacaaacatctggaagcag

SEQ ID NO: 807814 - DNA, 75 bp, synthetic construct
  source 1..75: mol_type = other DNA
cctgtcacttgggcgtgttgaccagtactgctacccgatgtttgaagcagatatccgtgaaggtcgcctgactca

SEQ ID NO: 807815 - DNA, 75 bp, synthetic construct
  source 1..75: mol_type = other DNA
gtagccggttacagcgcctacttcgtggaattgtgcaaggaagttcaggacgaaatcatcagccgtacggtgatt

SEQ ID NO: 807816 - DNA, 75 bp, synthetic construct
  source 1..75: mol_type = other DNA
cattattaaatttgattacacagacacattacaaatcaaatacgctaatcatgggtcaaccatgacattaaacac

SEQ ID NO: 807817 - DNA, 75 bp, synthetic construct
  source 1..75: mol_type = other DNA
cgctatttttaagtgtggaaccgacgccggatttaacgccgcaatttttgcagctgctactgccggaactggcgc

SEQ ID NO: 807818 - DNA, 75 bp, synthetic construct
  source 1..75: mol_type = other DNA
tttaatttgcgcctcgaccaacgtagctacattaccgaagaagacgcgcgcgggcagattaacgagctgaaagcc

SEQ ID NO: 807819 - DNA, 75 bp, synthetic construct
  source 1..75: mol_type = other DNA
atcacctggcgaacattacccctattcagcttggctttgaaaaagcagtgacctacatccgcaagaaactggcaa

SEQ ID NO: 807820 - DNA, 75 bp, synthetic construct
  source 1..75: mol_type = other DNA
gatttttcccggtggcagcggatacctcaaaatgggtaactgccttatgtcatacagcaagcgtggaagtaacgc

SEQ ID NO: 807821 - DNA, 75 bp, synthetic construct
  source 1..75: mol_type = other DNA
tagacagcaaagatgaaaccgttggtgactggtctgcttcatggtatcagcaggtattgccaactagcggagcta

SEQ ID NO: 807822 - DNA, 75 bp, synthetic construct
  source 1..75: mol_type = other DNA
ggaaggtgagcggatgctggtgcgctccgggcgtagccgtttttcgctgtctaccctgccagcggcggatttccc

SEQ ID NO: 807823 - DNA, 75 bp, synthetic construct
  source 1..75: mol_type = other DNA
aaagattatctgcaattgagggtaagcgtaaactgaccgccgtatgtagccatcagacgagaattggtaacttag

SEQ ID NO: 807824 - DNA, 75 bp, synthetic construct
  source 1..75: mol_type = other DNA
gaagccgtaggaactatgatgaagtatcaggacggtggtagcggatctgaaggcgaagaaggtgaacggtattac

SEQ ID NO: 807825 - DNA, 75 bp, synthetic construct
  source 1..75: mol_type = other DNA
tgtagatggtgctctgtatatgttttatgcacagaaaactaccagcaatacctacgaattgacggttaacggtgc

SEQ ID NO: 807826 - DNA, 75 bp, synthetic construct
  source 1..75: mol_type = other DNA
aaagatatcgacaaagccaaactgcgcgaaaactttgccgtcttcctgaaagcgattattccggttgccgaagaa

SEQ ID NO: 807827 - DNA, 75 bp, synthetic construct
  source 1..75: mol_type = other DNA
cggaagaagggtacaccctcgaccagttccgtaagcacctggagctatataaagatatcgacaaagccaaactgc

SEQ ID NO: 807828 - DNA, 75 bp, synthetic construct
  source 1..75: mol_type = other DNA
ttttaccatgtgcaccggttcctacggcgtgcgtgctgacaacgatctggttgatatgatcaagcagttcggtcc

SEQ ID NO: 807829 - DNA, 75 bp, synthetic construct
  source 1..75: mol_type = other DNA
accgaagaagaaattgctcaggcagcagttcgcttcgctaccatgagcgacgaagacaaagcgcgtctgacccgt

SEQ ID NO: 807830 - DNA, 75 bp, synthetic construct
  source 1..75: mol_type = other DNA
aatataatttaacagacaatcctatcccacattatttccctcatgatagtagattcctgtctctacttgggaaat

SEQ ID NO: 807831 - DNA, 75 bp, synthetic construct
  source 1..75: mol_type = other DNA
gtatatcggcagcatggtttgttcctgcaaacgcgtttatatttgctcttctgtcatcgttattacttgatagca

SEQ ID NO: 807832 - DNA, 75 bp, synthetic construct
  source 1..75: mol_type = other DNA
ttgatgaaggcacgatggttgatacctgggccaccgtcggttcctgtgcgcagattggtaaaaacgtccaccttt

SEQ ID NO: 807833 - DNA, 75 bp, synthetic construct
  source 1..75: mol_type = other DNA
aggggtgattgtcgaagaaggttccgtcatctctatgggcgtatacattggtcagagcacccgtatttacgaccg

SEQ ID NO: 807834 - DNA, 75 bp, synthetic construct
  source 1..75: mol_type = other DNA
ggtcagtgggtgacgcatcagtggttgaaaaaagcggtgctgctctctttccgtattaatgataatcaggtgatc

SEQ ID NO: 807835 - DNA, 75 bp, synthetic construct
  source 1..75: mol_type = other DNA
tatggcgggcggaacgcctgaaagatggaaaaattgtcgcagtaaaaatccctaaggatattactcgggaagacc

SEQ ID NO: 807836 - DNA, 75 bp, synthetic construct
  source 1..75: mol_type = other DNA
cagattggtaaaaacgtccacctttccggtggcgtgggcatcggcggcgtgctggagccgctgcaggctaaccca

SEQ ID NO: 807837 - DNA, 75 bp, synthetic construct
  source 1..75: mol_type = other DNA
ctgggccacagtcggttcctgtgcgcagattggtaaaaacgtgcacctgtctggcggtgtaggtatcggtggtgt

SEQ ID NO: 807838 - DNA, 75 bp, synthetic construct
  source 1..75: mol_type = other DNA
ttcatcgtcaatgtaagcactgcaatcaggtattagacgggaatatcaaactatacagaattaatttgattaagc

SEQ ID NO: 807839 - DNA, 75 bp, synthetic construct
  source 1..75: mol_type = other DNA
tgcgagcgcattaaagccaccaacggtaaagatcgggtgatcatgcactgccatgccaccaacctgatcgccctt

SEQ ID NO: 807840 - DNA, 75 bp, synthetic construct
  source 1..75: mol_type = other DNA
ttgatcctgcagctaacttaggcgtcgtaaaagtcgacagcgacggcgcgggctaccatattctctgggggttaa

SEQ ID NO: 807841 - DNA, 75 bp, synthetic construct
  source 1..75: mol_type = other DNA
tatacctgaggaaagcgtgccgttatatctccaacgcctggaatattatcgtcggctttatcgaccgaagcaggt

SEQ ID NO: 807842 - DNA, 75 bp, synthetic construct
  source 1..75: mol_type = other DNA
ttcaaaacagagacattattattccggtgacggatgaatcatgccgtaacacagcagcagacgggcaaactttga

SEQ ID NO: 807843 - DNA, 75 bp, synthetic construct
  source 1..75: mol_type = other DNA
aggtatatcttgcggtatatcttatggcactttcaacaaaaagaaaatattctcaggaaatattgatagagagga

SEQ ID NO: 807844 - DNA, 75 bp, synthetic construct
  source 1..75: mol_type = other DNA
atgcaaaaacattcgctggtgttgtggcccttccacggtgtgttcggttccggaccgacgctggatgaaaccttc

SEQ ID NO: 807845 - DNA, 75 bp, synthetic construct
  source 1..75: mol_type = other DNA
agcgaagcattatcacagacagaacgtgatcatattcactattatcttgctgttcgttcaattgttttcaaactg

SEQ ID NO: 807846 - DNA, 75 bp, synthetic construct
  source 1..75: mol_type = other DNA
gcaccgatctggacgatcagctttctgcgcaaatgtgcaacgccaaaaattacattggcgacgacaccatcgttc

SEQ ID NO: 807847 - DNA, 75 bp, synthetic construct
  source 1..75: mol_type = other DNA
gagaattttaaagaacatcatatgagtgctttaaattactatgaacgccggatacactttgttatccggccattg

SEQ ID NO: 807848 - DNA, 75 bp, synthetic construct
  source 1..75: mol_type = other DNA
taccaaaagagatggctacgcccgcagagttcgcggagtgggaaggtatttcccgtggttctgtttaccaaaaga

SEQ ID NO: 807849 - DNA, 75 bp, synthetic construct
  source 1..75: mol_type = other DNA
actggataccatctatattgataaacccttacaaaaacataaccttatccagactatttctcgcgttaaccgtaa

SEQ ID NO: 807850 - DNA, 75 bp, synthetic construct
  source 1..75: mol_type = other DNA
aaggccgtgcggctaaagtgatcctggactccagcaaactggaagaagtcgaaaagtattacgaagagtgcgcaa

SEQ ID NO: 807851 - DNA, 75 bp, synthetic construct
  source 1..75: mol_type = other DNA
cacaaattttatcagcaccctgcgccagcactgcattgaagaattgcagcgcccttctattccagcttcccatta

SEQ ID NO: 807852 - DNA, 75 bp, synthetic construct
  source 1..75: mol_type = other DNA
aaagttgtggacggtattaatcattcaggactcggaaaagtgtggtttgcgggccgggggattgcatctgaatgg

SEQ ID NO: 807853 - DNA, 75 bp, synthetic construct
  source 1..75: mol_type = other DNA
acgcaagctcaatgttctgggcatcaaaaccgcgctcgatctggccctgacgaacccggcctttatccgcaaaaa

SEQ ID NO: 807854 - DNA, 75 bp, synthetic construct
  source 1..75: mol_type = other DNA
gcgcgaaccctgtatttatcaggaagaatttcagcgttgtgctggagagaaccgtccgtgaactcaacggagaaa

SEQ ID NO: 807855 - DNA, 75 bp, synthetic construct
  source 1..75: mol_type = other DNA
tgcgttttcaagtaactatgaactttatgcctcgatgttggcgcgcgtgatgaacagcctggaggaactggcccc

SEQ ID NO: 807856 - DNA, 75 bp, synthetic construct
  source 1..75: mol_type = other DNA
gaaaaactgcgtaaagagcaccagtattgccggcatatttccgttttcatcaaaacgtctccgttcgccattaaa

SEQ ID NO: 807857 - DNA, 75 bp, synthetic construct
  source 1..75: mol_type = other DNA
tgtgaaaacatcgccgttcgccgtaaatgagccctactacggtaatctggccagtgaaaaactgctcatccccac

SEQ ID NO: 807858 - DNA, 75 bp, synthetic construct
  source 1..75: mol_type = other DNA
gcaacacagaatgaactgggagtatataaatcccgactttcgaccttacaaaaaagcatcacggaaaacaaatat

SEQ ID NO: 807859 - DNA, 75 bp, synthetic construct
  source 1..75: mol_type = other DNA
ccgggtgtgcagctttgcattacctgtcaggaaatcgcagaactgaaaggcaaacattacaacggaggtgctgta

SEQ ID NO: 807860 - DNA, 75 bp, synthetic construct
  source 1..75: mol_type = other DNA
aacctgaacaatttcatctgattactggcaatattgcgcaatataaagatcggctgtatgtaacaaaattatcga

SEQ ID NO: 807861 - DNA, 75 bp, synthetic construct
  source 1..75: mol_type = other DNA
aacgagccctattacggcaatctggcaacagagaaactgatgacacccacgcgggacacccgggacattattact

SEQ ID NO: 807862 - DNA, 75 bp, synthetic construct
  source 1..75: mol_type = other DNA
aatgagatgagcggttggtttgacctgaccttaaatcagcgtgtttataatcaggacaaatgcggtcgttaccta

SEQ ID NO: 807863 - DNA, 75 bp, synthetic construct
  source 1..75: mol_type = other DNA
aatcagcgtgtttataatcaggacggtaaaacggcaaatgcggtcgttacctatgatggcaacgtgggtgagtag

SEQ ID NO: 807864 - DNA, 75 bp, synthetic construct
  source 1..75: mol_type = other DNA
gggacgaggcattgctcctgagtggcaaatgaaacgagaaatgctttcccctgcgtacacaacacgctggaatga

SEQ ID NO: 807865 - DNA, 75 bp, synthetic construct
  source 1..75: mol_type = other DNA
ttacacgttctaaaacgcatggcacctgatgaaaatgttcaactatgcgagtggtttcctggtttgaatgaaaga

SEQ ID NO: 807866 - DNA, 75 bp, synthetic construct
  source 1..75: mol_type = other DNA
tgatcaataaacatctggaaggagagtttgaacggcaattgtttgactctgcgatctacaatcttttagatgtaa

SEQ ID NO: 807867 - DNA, 75 bp, synthetic construct
  source 1..75: mol_type = other DNA
aaaaacgagctgattgtcgcgcagaaaaaggtcgatgccgccagcgtacagctggatgacaaacagcgcaccatc

SEQ ID NO: 807868 - DNA, 75 bp, synthetic construct
  source 1..75: mol_type = other DNA
caacatgctcgtccccgctcttttgttctacgtgatgatgacggccatgtttctgggacttgacgcattcatgga

SEQ ID NO: 807869 - DNA, 75 bp, synthetic construct
  source 1..75: mol_type = other DNA
agtaccaatgcagagctgagcggcagctattatggcgatactaaaagctatggtctgggtgggtatacgtccatc

SEQ ID NO: 807870 - DNA, 75 bp, synthetic construct
  source 1..75: mol_type = other DNA
gtgagaagtccagtgtatgcccctgaacgtttagagtgtgatgaaggggcattccatgcagatacttcaagttgg

SEQ ID NO: 807871 - DNA, 75 bp, synthetic construct
  source 1..75: mol_type = other DNA
agtgccttatccggcctacagatcgtacatccggcaacaggcacggacgtccaattaacaggaacacagaacatg

SEQ ID NO: 807872 - DNA, 75 bp, synthetic construct
  source 1..75: mol_type = other DNA
aattcccgatatttggccagcgctggccggcgtcgctcagtgcggcgaaaaccgggcttcagatctggaagcaga

SEQ ID NO: 807873 - DNA, 75 bp, synthetic construct
  source 1..75: mol_type = other DNA
aaaggcaggctgcatgctgaacgatttcacgccaaccggggtatcacagctgaatttgtttgatgaagttcagcc

SEQ ID NO: 807874 - DNA, 75 bp, synthetic construct
  source 1..75: mol_type = other DNA
cgtaccgcctggatcccgttgaaacaacttagcacagagccaagcctgcgctcccgtgtgccagatctggaaaat

SEQ ID NO: 807875 - DNA, 75 bp, synthetic construct
  source 1..75: mol_type = other DNA
aagttaagttttgaagtgataccagagagcaatcccccaacaaatattcatgtgctaattggtcggaatggtgtt

SEQ ID NO: 807876 - DNA, 75 bp, synthetic construct
  source 1..75: mol_type = other DNA
agtgttgaatgaactaggagaagatatccgaaatgaaatattatcatcgcttaatgatattgctctgagtgaaga

SEQ ID NO: 807877 - DNA, 75 bp, synthetic construct
  source 1..75: mol_type = other DNA
atgcactatcgcaatgtggtttgtttgttggcttgttcattgtttttatcgtcggcatggggatgtcggctttcc

SEQ ID NO: 807878 - DNA, 75 bp, synthetic construct
  source 1..75: mol_type = other DNA
gtggaattccggcctccctggaaacctgacttactggggctgatattacgtgacgctaatttcttgtatatcaat

SEQ ID NO: 807879 - DNA, 75 bp, synthetic construct
  source 1..75: mol_type = other DNA
gctggatgcccggctcactcttgacctggcgtgataaaaacgggctgcagcgtaaagtcctcgacaaggaaaatc

SEQ ID NO: 807880 - DNA, 75 bp, synthetic construct
  source 1..75: mol_type = other DNA
cctggcacgacgcgccgggctgacgattaatcgcggcgtttgcgtcgatagttatctgcaaaccagtaatgccga

SEQ ID NO: 807881 - DNA, 75 bp, synthetic construct
  source 1..75: mol_type = other DNA
gggtagcgaaagtgattaccgatattgccggtagttccgcctggtttgaacgcggatttgtcacctacagtaacg

SEQ ID NO: 807882 - DNA, 75 bp, synthetic construct
  source 1..75: mol_type = other DNA
cgtgatgcggtgcgtcgtcaggctactgcgtatgcattgcagaccttgtggcaacaatttctacaaaacacttga

SEQ ID NO: 807883 - DNA, 75 bp, synthetic construct
  source 1..75: mol_type = other DNA
gtggatcttaccgaactggctaacgctcaatccggtgttgcgaaggtcgttcttgaatctgttcaggatatgtta

SEQ ID NO: 807884 - DNA, 75 bp, synthetic construct
  source 1..75: mol_type = other DNA
tgtttttggcaccattatatgggcatatggcggatacataaaaattattccatccctcgtaatgtggataagaca

SEQ ID NO: 807885 - DNA, 75 bp, synthetic construct
  source 1..75: mol_type = other DNA
agaagaaaacttagctaaagctcgagttgaggtcagagaggaaataaaagctgaagtactcggggttggactaac

SEQ ID NO: 807886 - DNA, 75 bp, synthetic construct
  source 1..75: mol_type = other DNA
cgggatatggctatggcgtaaattacaaaacgggatatctggacggaaaaattaccgatgacggcgaatttattc

SEQ ID NO: 807887 - DNA, 75 bp, synthetic construct
  source 1..75: mol_type = other DNA
ggtcattcattaggccaatacatccgcagccgtaagatgacggaaatcgcgaaaaagctgaagaaaagtaacgag

SEQ ID NO: 807888 - DNA, 75 bp, synthetic construct
  source 1..75: mol_type = other DNA
tgactattcatagtattttggactggatcgaagataacctggaatcgccactgtcactggaaaaagtgtcagaac

SEQ ID NO: 807889 - DNA, 75 bp, synthetic construct
  source 1..75: mol_type = other DNA
attctggcatcgttaatgccaccggaagtaagcagtcgcttacaacatcgcttgacggagatgggcgtccatctg

SEQ ID NO: 807890 - DNA, 75 bp, synthetic construct
  source 1..75: mol_type = other DNA
agaagagatcctcaaacgcaaggcgatcgttgaagacgcaggcctggtgtggtctgtcgtagaaagcgtaccaat

SEQ ID NO: 807891 - DNA, 75 bp, synthetic construct
  source 1..75: mol_type = other DNA
ggaaaaaaagaatgcagtagttacttgggaacaccaaataacacctatctaaaatataatcccaaagctaaaggg

SEQ ID NO: 807892 - DNA, 75 bp, synthetic construct
  source 1..75: mol_type = other DNA
aagcaaggtgaatatttccccatgaatccgataagttcaaatgataatgatagtgtagacttgcgaaatataaaa

SEQ ID NO: 807893 - DNA, 75 bp, synthetic construct
  source 1..75: mol_type = other DNA
ttatgagtattgatgtgattaaacaaattcagagcattcaggacaaaggcattattatttattcaaaatacagag

SEQ ID NO: 807894 - DNA, 75 bp, synthetic construct
  source 1..75: mol_type = other DNA
cctattacctctaccacgttcattctgatccacaaagatcagaagaaaccagaacaaggcacagaagtgctgaag

SEQ ID NO: 807895 - DNA, 75 bp, synthetic construct
  source 1..75: mol_type = other DNA
cgaagacaaagcgcgtctgacccgtaacatcattgctggtcttccgggcgcggaagaagggtacaccctcgacca

SEQ ID NO: 807896 - DNA, 75 bp, synthetic construct
  source 1..75: mol_type = other DNA
ccttagccatccgtgaactgcgcctttctgacggggcgttacgcgaaggcgtgctgtatgaaatggaaggacgtt

SEQ ID NO: 807897 - DNA, 75 bp, synthetic construct
  source 1..75: mol_type = other DNA
gatgctggtgaaaatcaaaacgccggaattaccgctgcatctggcaggcgaaacccagcgtcaggatttacgctg

SEQ ID NO: 807898 - DNA, 75 bp, synthetic construct
  source 1..75: mol_type = other DNA
ttaacggtcaggtattgccgttcctccagccgattcaacttagcgcgatggtgctggcaaaaaatcttctcggca

SEQ ID NO: 807899 - DNA, 75 bp, synthetic construct
  source 1..75: mol_type = other DNA
tcgtgcggcctgacggtggagcagatgcaaaaccagatggacccggtgtacacgccggcgcgaaaaatccacctg

SEQ ID NO: 807900 - DNA, 75 bp, synthetic construct
  source 1..75: mol_type = other DNA
ggcgggtgctggaaaccaccatgcagatgtacgaacagtggcgggaacaacaaccgaagctggcgcatccgcaac

SEQ ID NO: 807901 - DNA, 75 bp, synthetic construct
  source 1..75: mol_type = other DNA
ttctgacggtgcgctacgcgaaggcgtactttatgaaatggaaggccgttttcgccatcaggatgtacgtagtcg

SEQ ID NO: 807902 - DNA, 75 bp, synthetic construct
  source 1..75: mol_type = other DNA
tgagcctgtgtacgacttctggagctatttcaaaacctcggtacgctatcagtcttctcaggaagcaacaactgg

SEQ ID NO: 807903 - DNA, 75 bp, synthetic construct
  source 1..75: mol_type = other DNA
gtcgatatctcgtcatttcaggcatggggtgattttgccgcagataagtacagcctctattacgaaggcaaacgc

SEQ ID NO: 807904 - DNA, 75 bp, synthetic construct
  source 1..75: mol_type = other DNA
agttaattgacggctttgaatcgccgtttggtctggagttgctggcaaccgtagactggttgctgagccgtggcg

SEQ ID NO: 807905 - DNA, 75 bp, synthetic construct
  source 1..75: mol_type = other DNA
gacgccaggttgagagccgtggagttcagtcagcaggcttgcagacgttttctcagccaggtattggtgatgctt

SEQ ID NO: 807906 - DNA, 75 bp, synthetic construct
  source 1..75: mol_type = other DNA
caaaaacgtctgcttccgccaccggtgacccgcccggtgacaccgccccacccgacaatggcgacgtccacagcc

SEQ ID NO: 807907 - DNA, 75 bp, synthetic construct
  source 1..75: mol_type = other DNA
gcttagcacgattctgaaaactggtaaattaccgtctccccaggtggtcggtagtcgctctgatgtggcagatga

SEQ ID NO: 807908 - DNA, 75 bp, synthetic construct
  source 1..75: mol_type = other DNA
tcattcgtgagggcgaagagaaaatgtcgtttaccagcaaaaaggaagccgatgcttatgataaaatgcttgata

SEQ ID NO: 807909 - DNA, 75 bp, synthetic construct
  source 1..75: mol_type = other DNA
atggctcacagctttggcgctacccaacacccaataccagggccgtgcgggtgaactggaaaaccggacattcag

SEQ ID NO: 807910 - DNA, 75 bp, synthetic construct
  source 1..75: mol_type = other DNA
atggcctccaggtattcgagtcttccgggccgcttatcctgatggattatcgtgttcctgacgagcatgaggctc

SEQ ID NO: 807911 - DNA, 75 bp, synthetic construct
  source 1..75: mol_type = other DNA
agcgtcattactttctgcaaagtacccgacaaaaacaggatgtgcaggtattcaccagcagcggtgcgctgatag

SEQ ID NO: 807912 - DNA, 75 bp, synthetic construct
  source 1..75: mol_type = other DNA
tgcctatgaagatgagcaatatcaggcaacgagaaaattatggatacaaaatgaagcggatgcctggaatgaccc

SEQ ID NO: 807913 - DNA, 75 bp, synthetic construct
  source 1..75: mol_type = other DNA
gtgaatacaataaaacagtcaggattaattgaaatattaggcattaaccatattgaattagaaagcattttgtat

SEQ ID NO: 807914 - DNA, 75 bp, synthetic construct
  source 1..75: mol_type = other DNA
cgcctggcacgccgcgtattaagcgataacgaatgggaaatctggaaaacgcaccaccagccggtgcgttttctg

SEQ ID NO: 807915 - DNA, 75 bp, synthetic construct
  source 1..75: mol_type = other DNA
gagcagaacgaccacgccagctccggtggccacgaaaccgccagcaccatcacaacagaaggtcacaccgccacg

SEQ ID NO: 807916 - DNA, 75 bp, synthetic construct
  source 1..75: mol_type = other DNA
tggatggtgccgcaacggatcgtattcctcgacgccttaccgctgatggctaacgggaaaattgactaccaggcg

SEQ ID NO: 807917 - DNA, 75 bp, synthetic construct
  source 1..75: mol_type = other DNA
gcggacattatctggcttaataacgccctacatcgtctgctgccggaagatcccgggctccttgcgacattacaa

SEQ ID NO: 807918 - DNA, 75 bp, synthetic construct
  source 1..75: mol_type = other DNA
gaagagcacggcgacagcattgaactggtgactgacgatcatcagcgggaaaatccgctacaacagttactggac

SEQ ID NO: 807919 - DNA, 75 bp, synthetic construct
  source 1..75: mol_type = other DNA
taaaagagagcaataccggaggcgtgcagatagacccaaccacctttcgtaagtacaacattaccgccgtaccgg

SEQ ID NO: 807920 - DNA, 75 bp, synthetic construct
  source 1..75: mol_type = other DNA
atggcacatccaccacggctgaatgacgacaaaccggttatctggacggtatcggtgacgcgcttattcgagctg

SEQ ID NO: 807921 - DNA, 75 bp, synthetic construct
  source 1..75: mol_type = other DNA
agaagccggaatgaccggaatttttatttattccgccgccaccgtacgccaggcgttcagcgatgcgctggatat

SEQ ID NO: 807922 - DNA, 75 bp, synthetic construct
  source 1..75: mol_type = other DNA
atttccgccgcaacggaatcacctttacccagtgggcaaaacagaacaactacacccgagcagaggtttaccgcg

SEQ ID NO: 807923 - DNA, 75 bp, synthetic construct
  source 1..75: mol_type = other DNA
tgcttaatggtcagtcaaaagccaactacggaaaggcgcatgagattgccgtcaaacttggccttaagtccggca

SEQ ID NO: 807924 - DNA, 75 bp, synthetic construct
  source 1..75: mol_type = other DNA
gccacggcagtggaaaatggaaaaagggaccacgctgaaggacggactggcccgctggacgtcgtccgaaaaatg

SEQ ID NO: 807925 - DNA, 75 bp, synthetic construct
  source 1..75: mol_type = other DNA
agtaatctgcgccagcgggtgatggaagctatcgaaacgttgccggagcgcgaaaaactggtattaaccctctat

SEQ ID NO: 807926 - DNA, 75 bp, synthetic construct
  source 1..75: mol_type = other DNA
acctgatcccaggtaaaaccgcgccacacattatggtcgtagagcgcgattatccggcgacttacgaacgcttta

SEQ ID NO: 807927 - DNA, 75 bp, synthetic construct
  source 1..75: mol_type = other DNA
ttctaaccgcgatgagtttgttgtagtgcgtaagatgaagaacattgactggttagatggcgaaggcaatgacca

SEQ ID NO: 807928 - DNA, 75 bp, synthetic construct
  source 1..75: mol_type = other DNA
ggcggttcaatggctatcagcgttgatggttttgctgatgtcaccgatgtgctgcataacactcttgttagttac

SEQ ID NO: 807929 - DNA, 75 bp, synthetic construct
  source 1..75: mol_type = other DNA
atgccgccacgaatcccaaaagcctgccgtgctcgaggttgccgtaataccacgacagacccgtcaggctactgc

SEQ ID NO: 807930 - DNA, 75 bp, synthetic construct
  source 1..75: mol_type = other DNA
aacgcggtcgtatggaaattcgcattgatgttcagggcgttagctgccacggctctgcgccagaacgcggtgata

SEQ ID NO: 807931 - DNA, 75 bp, synthetic construct
  source 1..75: mol_type = other DNA
atgtctaacactagttctaattttgagatgactggaattttgctggggcaggagcttcgtaaacgtaaaactcct

SEQ ID NO: 807932 - DNA, 75 bp, synthetic construct
  source 1..75: mol_type = other DNA
tgaagcgtgacaaaggactgtgccagttgtgcctgcgtgccggtgtggtgcgtgaagcgaaaaccgttgatcaca

SEQ ID NO: 807933 - DNA, 75 bp, synthetic construct
  source 1..75: mol_type = other DNA
gatgccgacaataatctgcagagtctgtgctggccgtgtcataaggcgaagacggcccgtgaacggctgaagtaa

SEQ ID NO: 807934 - DNA, 75 bp, synthetic construct
  source 1..75: mol_type = other DNA
tgatgccgactgtaatctgcagagtctgtgttggccgtgtcataaggcgaagacggcccgtgaacggttaaagtg

SEQ ID NO: 807935 - DNA, 75 bp, synthetic construct
  source 1..75: mol_type = other DNA
ggcagaagtgattcgcttcattaacgacattctgctctccgcgccgtcgattgtggttggtctgtttgtttacac

SEQ ID NO: 807936 - DNA, 75 bp, synthetic construct
  source 1..75: mol_type = other DNA
gcccgtttgcggaatggcagcaactggcctgggccggggtattgatcattaccctgtgcgtactgctgctgaaca

SEQ ID NO: 807937 - DNA, 75 bp, synthetic construct
  source 1..75: mol_type = other DNA
ctgaatatggtcgtaaatcctggctggcagaagtgattcgcttcattaacgacattctgctctctgcgccgtcga

SEQ ID NO: 807938 - DNA, 75 bp, synthetic construct
  source 1..75: mol_type = other DNA
gaaattttatgcccgaatgcaaaaaatcgatcccgcactagatatcctatctggtcaggtaatgagtcatatatt

SEQ ID NO: 807939 - DNA, 75 bp, synthetic construct
  source 1..75: mol_type = other DNA
gcatcgccgaaccccagctcagcctgatggcctggcgatctgcacgtattcttaatcgcgtactggggcgtgatt

SEQ ID NO: 807940 - DNA, 75 bp, synthetic construct
  source 1..75: mol_type = other DNA
gtcaacgccagcatgcaaactcatggcatcgccgaaccccagctcagcctgatggcatggagatctgcacgtatt

SEQ ID NO: 807941 - DNA, 75 bp, synthetic construct
  source 1..75: mol_type = other DNA
tgatgcagacagtaatctgcagagtctgtgctggccgtgtcataaggcgaagacggcccgtgaacggttgaagtg

SEQ ID NO: 807942 - DNA, 75 bp, synthetic construct
  source 1..75: mol_type = other DNA
ccaccagcgtggctatggctcaaaatggacggtgattcgtgcccgtattctgaagcgcgataaaggtctgtgtca

SEQ ID NO: 807943 - DNA, 75 bp, synthetic construct
  source 1..75: mol_type = other DNA
gcgaaaaccgtcgaccacatcatcccgaaagcgcatggcggaacagacgcagacagcaacctgcagagtctgtgc

SEQ ID NO: 807944 - DNA, 75 bp, synthetic construct
  source 1..75: mol_type = other DNA
accattcaaatctctgaccaaatgaatatcaaagccaagaccgtttcatcgcataaaggtaatattaaacgtaag

SEQ ID NO: 807945 - DNA, 75 bp, synthetic construct
  source 1..75: mol_type = other DNA
aaggacaggtgtatggcaatgagccgctttattatcgagttcggtgaccgcctgtcacttctgaaaaaaggcatt

SEQ ID NO: 807946 - DNA, 75 bp, synthetic construct
  source 1..75: mol_type = other DNA
gataagcatcgcggtgaaggctgggtgcagcaccagcgcggactgagccgccaccagcgtggctatggctcaaaa

SEQ ID NO: 807947 - DNA, 75 bp, synthetic construct
  source 1..75: mol_type = other DNA
tgatgcagactgcaatctgcagagcctgtgctggccgtgtcataaggcgaagacggcccgtgaacggctaaagtg

SEQ ID NO: 807948 - DNA, 75 bp, synthetic construct
  source 1..75: mol_type = other DNA
tgggacagtatccgcgcgcgtgtcctgaagcgtgacaaaggcctgtgtcagttatgtctgcgtgctggtgtggtg

SEQ ID NO: 807949 - DNA, 75 bp, synthetic construct
  source 1..75: mol_type = other DNA
tcatccctaaagcgcatggcggcaccgatgcagacagtaacctacagagtctgtgctggccgtgtcataaggcga

SEQ ID NO: 807950 - DNA, 75 bp, synthetic construct
  source 1..75: mol_type = other DNA
tgaggccgacaataatctgcagagtctgtgctggccgtgtcataaggcgaagacggcccgtgaacggctaaagtg

SEQ ID NO: 807951 - DNA, 75 bp, synthetic construct
  source 1..75: mol_type = other DNA
tatccttggcgatattctgaaaaaagagacaacgataacctcgtttttaaatatgccgacgttatcattgagccg

SEQ ID NO: 807952 - DNA, 75 bp, synthetic construct
  source 1..75: mol_type = other DNA
gtgtttattaatgaggactgtttcatccatgatgcttctaacagtcagcacatcaagcacatcattaatcaacat

SEQ ID NO: 807953 - DNA, 75 bp, synthetic construct
  source 1..75: mol_type = other DNA
cacgactgacccgtcaggctactgcgaaagccacaaaagcgaaggctggaagcaatacaaacctggacaatcccg

SEQ ID NO: 807954 - DNA, 75 bp, synthetic construct
  source 1..75: mol_type = other DNA
cgttgcgctgtagcagacagctgcgcagtttcaattgaccgtcgtctgacctggggcgaaacctgggaaggcgcg

SEQ ID NO: 807955 - DNA, 75 bp, synthetic construct
  source 1..75: mol_type = other DNA
caatgcctgtatgcagaccagtatccctgacatctacgccgtgggggatgccgttgaaactccagactttgtctt

SEQ ID NO: 807956 - DNA, 75 bp, synthetic construct
  source 1..75: mol_type = other DNA
atcccgctttaacatagacgtccgtatctgtcatgaagtgacgtcagtggatccggttaataaaacggtgacggt

SEQ ID NO: 807957 - DNA, 75 bp, synthetic construct
  source 1..75: mol_type = other DNA
aaacgcatcgatgtcctggctgtcgtacagcgcgcggggcttaccgttaacgatctcgagcatctggagctgacc

SEQ ID NO: 807958 - DNA, 75 bp, synthetic construct
  source 1..75: mol_type = other DNA
aaaatgcgtccgtcaaaaagaacagttcgcttcgaaactcagcctggataccagctccagcacgactggggcaag

SEQ ID NO: 807959 - DNA, 75 bp, synthetic construct
  source 1..75: mol_type = other DNA
cacggacgatggcagttcgggtagacctgcgtcttcctgacaatatgctcattaaccgacagggcctgatatctc

SEQ ID NO: 807960 - DNA, 75 bp, synthetic construct
  source 1..75: mol_type = other DNA
ccgggaagtgggagaaataaacgagaagtcccattaccacatggtactctttgtaaacaaagacaccttcaacgg

SEQ ID NO: 807961 - DNA, 75 bp, synthetic construct
  source 1..75: mol_type = other DNA
atggggaaacaggaggtataaaagttaattctttaatgcaaaccagtgtacctgatatttatgcagttggagata

SEQ ID NO: 807962 - DNA, 75 bp, synthetic construct
  source 1..75: mol_type = other DNA
gctggtcctgtaaatagacaggggcggattgctgcagataacatgctgggaggacaacatttttatttgggcact

SEQ ID NO: 807963 - DNA, 75 bp, synthetic construct
  source 1..75: mol_type = other DNA
ggccaggtgggttatctgcggcagtgagagctcgcagattgtcagaaaatgccgaaattattgtgttcgaaaaag

SEQ ID NO: 807964 - DNA, 75 bp, synthetic construct
  source 1..75: mol_type = other DNA
tcctcagtaccggtgcagctccggttgtcccccccttgcccgggctacaggaagagggcgtctttacactccgaa

SEQ ID NO: 807965 - DNA, 75 bp, synthetic construct
  source 1..75: mol_type = other DNA
caatgcctgtatgcagacaagtatccctgacatctatgccgtgggggatgcagttgaaacacctgaccttgtctt

SEQ ID NO: 807966 - DNA, 75 bp, synthetic construct
  source 1..75: mol_type = other DNA
atccacagcataaattttcaaaaagaattagctattcatttatcgcatccttgatgttattattaataatatcga

SEQ ID NO: 807967 - DNA, 75 bp, synthetic construct
  source 1..75: mol_type = other DNA
cccaaacgtaagatgcggccatcgaagaaaacggttcgcttcgaaactcagcccggttaccagctacagcatgac

SEQ ID NO: 807968 - DNA, 75 bp, synthetic construct
  source 1..75: mol_type = other DNA
aagtggattcagtatttacatgattctcgcgacagcggggattagtggtgcgatgggttcggttgcactgacgta

SEQ ID NO: 807969 - DNA, 75 bp, synthetic construct
  source 1..75: mol_type = other DNA
ccattctggacccggccaatacatttaatgttcttaatcctgcgggcagttctcgttcaatttacccggtgatga

SEQ ID NO: 807970 - DNA, 75 bp, synthetic construct
  source 1..75: mol_type = other DNA
gggagagagttcactgtcactgtgactgactgcgccatccagggttctggaaatgtgttaaatcagttacatatt

SEQ ID NO: 807971 - DNA, 75 bp, synthetic construct
  source 1..75: mol_type = other DNA
acgccattttcaaaatgggtccaattcttggcgaattacaggaactgtctcaacgtctgggctatgacgaattcc

SEQ ID NO: 807972 - DNA, 75 bp, synthetic construct
  source 1..75: mol_type = other DNA
agagcccttagcggtgtcatggctgctggctccaggcaaatatttgctaatgaaatttcgtcaggagcaagtaat

SEQ ID NO: 807973 - DNA, 75 bp, synthetic construct
  source 1..75: mol_type = other DNA
ctcgccacagcagggatcagcggtgcaatgggttcagttgcgctgacttacttctgggaacgactgacaggggtg

SEQ ID NO: 807974 - DNA, 75 bp, synthetic construct
  source 1..75: mol_type = other DNA
ttgccgtttttttccttatcccggtattttgttttcgcgaagcatggaaaggctggcgtgctggcgcaattgata

SEQ ID NO: 807975 - DNA, 75 bp, synthetic construct
  source 1..75: mol_type = other DNA
tcgatctgcctcctggcagcgtaccctgccatatcgttaattcttcggaagcgttcgtgcaacttgctcgtcagg

SEQ ID NO: 807976 - DNA, 75 bp, synthetic construct
  source 1..75: mol_type = other DNA
tgggttcagaaagctacaggtaaagatgtaaaagagggtgactttgcagctgtagccaacttcaacctgacctat

SEQ ID NO: 807977 - DNA, 75 bp, synthetic construct
  source 1..75: mol_type = other DNA
ggaaatatagatctgggtgtggttggcgtgggctattttgctggtaatatttctcccgagagttatcagcctggt

SEQ ID NO: 807978 - DNA, 75 bp, synthetic construct
  source 1..75: mol_type = other DNA
gaaatttagcacccgaatgcaaaaaattgatcctgtattgagtgttacatctggtcaacttatgagccatgtgtt

SEQ ID NO: 807979 - DNA, 75 bp, synthetic construct
  source 1..75: mol_type = other DNA
ttgccgtttttttcctgatccctgtattttgttttcgcgaagcctggaaaggctggcgtgctggcgcaattgata

SEQ ID NO: 807980 - DNA, 75 bp, synthetic construct
  source 1..75: mol_type = other DNA
aaattctgcgtaaatacaaagccgtgattaatgcgcggcgtcgtgagatggggcagaaaccgctcaccaccgcac

SEQ ID NO: 807981 - DNA, 75 bp, synthetic construct
  source 1..75: mol_type = other DNA
ggcagtcaggtaaagctcctctggtctaccggcgatggactgtatctgctgaccaaacggctggagcgcggccgc

SEQ ID NO: 807982 - DNA, 75 bp, synthetic construct
  source 1..75: mol_type = other DNA
ggcagtcaggtaaagctcctctggtctaccggcgatggactgtgtctgctgaccaaacggctggagcacggccgc

SEQ ID NO: 807983 - DNA, 75 bp, synthetic construct
  source 1..75: mol_type = other DNA
atgaccagcgttaatattcattgtccccgttgtcagtcagctcaggtttaccgccatggtcagaaccctaaaggc

SEQ ID NO: 807984 - DNA, 75 bp, synthetic construct
  source 1..75: mol_type = other DNA
atgaaagagctgataactgaaatggcctttaatggtgccggggttcgcgataccgctaggacactgaaaattgat

SEQ ID NO: 807985 - DNA, 75 bp, synthetic construct
  source 1..75: mol_type = other DNA
cgcgctgtcattccgatgaagtttatcgacatggccgtagttgttcccggcatgagcgtttccgttgtcgctcat

SEQ ID NO: 807986 - DNA, 75 bp, synthetic construct
  source 1..75: mol_type = other DNA
cgcgactgggtacgacagctgccggttaaacatatgtgggatctgttctgcggtgtgggggctttggtttacact

SEQ ID NO: 807987 - DNA, 75 bp, synthetic construct
  source 1..75: mol_type = other DNA
ctaaaaccgtttatcgcccgtgcggggttaacgccctacaacgtggcgcgtaagcgtggcgaactgaaatacatt

SEQ ID NO: 807988 - DNA, 75 bp, synthetic construct
  source 1..75: mol_type = other DNA
ctcatttgcgcccgtttttgcggcgctaaaaccgtttattgcccgcgccgggctgacgccgtacaacgtggcacg

SEQ ID NO: 807989 - DNA, 75 bp, synthetic construct
  source 1..75: mol_type = other DNA
ggtgaccagataaaagtgttgtgggctgacagtgacggactgtgcctcttcaccaaacgcctggaacggggccgc

SEQ ID NO: 807990 - DNA, 75 bp, synthetic construct
  source 1..75: mol_type = other DNA
tgtgattatctctcaacgatggcaccgcgttttattatctactccagctgtaacgcccaaactatggcgaaagat

SEQ ID NO: 807991 - DNA, 75 bp, synthetic construct
  source 1..75: mol_type = other DNA
gtaccgctgtggatccgtccgcaaagtttcttccagaccaatccggcggtcgccagccagctttacgctaccgcg

SEQ ID NO: 807992 - DNA, 75 bp, synthetic construct
  source 1..75: mol_type = other DNA
cccgttgtcagtctgctcaggtttatcgtcatggacagaatctgaaaggacatgcccggtttcgttgccgtgact

SEQ ID NO: 807993 - DNA, 75 bp, synthetic construct
  source 1..75: mol_type = other DNA
cgcagaagataaaggaagactgcgagacgctggcggataacgtacagcagaatgcagaagccgttgccgaagaca

SEQ ID NO: 807994 - DNA, 75 bp, synthetic construct
  source 1..75: mol_type = other DNA
agcgccgctgaatacgcccgacaggctaaagccagccaggatgcaggtgcagacaatgcgcaggaagcgaaacag

SEQ ID NO: 807995 - DNA, 75 bp, synthetic construct
  source 1..75: mol_type = other DNA
cctgaacggggacccggaccagccgataatcatggggcggacgtaccatgaggacaaccgttcgccggggagtct

SEQ ID NO: 807996 - DNA, 75 bp, synthetic construct
  source 1..75: mol_type = other DNA
attttgcagacgaagccattattaccaccaatccggaagtctcctcagtacgcgactctgaccgtattttaggca

SEQ ID NO: 807997 - DNA, 75 bp, synthetic construct
  source 1..75: mol_type = other DNA
atgtctgtagtgatatcaggtgcgctgatagatggcgcaggcatccctatgtccggatgccacataattctgaaa

SEQ ID NO: 807998 - DNA, 75 bp, synthetic construct
  source 1..75: mol_type = other DNA
acggcgggcaacggctcgtcctcatattacaaatatccggcagttggctctcttattctcgcggtctatcaggga

SEQ ID NO: 807999 - DNA, 75 bp, synthetic construct
  source 1..75: mol_type = other DNA
atgcgtgactgccattcctcagatgataaagatgtcatggcaattgatggaaaaacgcttcggcactcttatgac

SEQ ID NO: 808000 - DNA, 75 bp, synthetic construct
  source 1..75: mol_type = other DNA
gaaccccgagactattaatgtatcaagttttacagatacatctgaggaagtgaaaatattctctaatgtaaaagg

SEQ ID NO: 808001 - DNA, 75 bp, synthetic construct
  source 1..75: mol_type = other DNA
cgcagagaagttcgccacagcaatccgaaaccactggtacgtggagaataagctgtactggcgtctggacgtggt

SEQ ID NO: 808002 - DNA, 75 bp, synthetic construct
  source 1..75: mol_type = other DNA
ggccggggttcggtaacctggcgataccgcgtgtgggtcaggaagtgatagtggacttcctgaacggggacccgg

SEQ ID NO: 808003 - DNA, 75 bp, synthetic construct
  source 1..75: mol_type = other DNA
ggaactgcgtgaccggaagtggtggtgatgatcgaggtgacgatgaggatgaacctgaaaaatatactctccagt

SEQ ID NO: 808004 - DNA, 75 bp, synthetic construct
  source 1..75: mol_type = other DNA
atgcgtgattgttattcttcatatgataaagacgtcatcgcaattgatggaaaaacactccggcattcttatgac

SEQ ID NO: 808005 - DNA, 75 bp, synthetic construct
  source 1..75: mol_type = other DNA
cgtgaagatcctcgcgatgcctttgtgtccaataactatgacagtctggatgcgttaccggcaggcagtatcgtc

SEQ ID NO: 808006 - DNA, 75 bp, synthetic construct
  source 1..75: mol_type = other DNA
ccattgctttaaaaacaaggagccaattaacggttgaagaagaaccaaattatctttggttagagaatgaaatta

SEQ ID NO: 808007 - DNA, 75 bp, synthetic construct
  source 1..75: mol_type = other DNA
actgataaacatgaagataccggaagccgcaacgcaagtcgttctcgctagcctacataatcatttgaagtttcc

SEQ ID NO: 808008 - DNA, 75 bp, synthetic construct
  source 1..75: mol_type = other DNA
aagctcgggttggatctcatcagtctattctcatctcgtatattaacttatgcacaacagtttcagttcgatatt

SEQ ID NO: 808009 - DNA, 75 bp, synthetic construct
  source 1..75: mol_type = other DNA
gcatattcaccctgtttaccctcatgctgaaggggttgacgagatcatcgtcctggatacccataacgataatcc

SEQ ID NO: 808010 - DNA, 75 bp, synthetic construct
  source 1..75: mol_type = other DNA
attacgcaactactttaaccagcaaccggcttacattctgcgcgaagatggcagcaaaggtgaagcaatggcgaa

SEQ ID NO: 808011 - DNA, 75 bp, synthetic construct
  source 1..75: mol_type = other DNA
ccagagcttgatgtcaaagcaattacgtcttccgccggaaaccagacaccagaaaaaccttacgcaatgttcttc

SEQ ID NO: 808012 - DNA, 75 bp, synthetic construct
  source 1..75: mol_type = other DNA
aacctgaagcgcatgcacctaacgaaaaaacctggaaatctcacctggtgacctgtgccgcgatgtacgctgcaa

SEQ ID NO: 808013 - DNA, 75 bp, synthetic construct
  source 1..75: mol_type = other DNA
ccagtacccagcctggtctgattaccgctggtaaagtggttggtgttgtctgcttcatcgtaggtcttgttgctc

SEQ ID NO: 808014 - DNA, 75 bp, synthetic construct
  source 1..75: mol_type = other DNA
agatccggcgcaacgtcattgatgatgaaatcgtggtggccgcgccggacgcgggcagttttaccagggcaaaat

SEQ ID NO: 808015 - DNA, 75 bp, synthetic construct
  source 1..75: mol_type = other DNA
attgaacaagagcaagatgatgaactaccggatcattttggacagatatattttgagttggctgaggaatgtata

SEQ ID NO: 808016 - DNA, 75 bp, synthetic construct
  source 1..75: mol_type = other DNA
gcattcatgccgaaacaaaatttaagaacggcattgcataaccttgcattggcgatcgaatattacaatgaaaac

SEQ ID NO: 808017 - DNA, 75 bp, synthetic construct
  source 1..75: mol_type = other DNA
tctatctgggtgtgacctcaacgccaggcggcaatgtgccgtcagacccggcgctggcggcctgtatcgccattc

SEQ ID NO: 808018 - DNA, 75 bp, synthetic construct
  source 1..75: mol_type = other DNA
gaattgtcgatgtcagcgagaaagagagcgaagccttgttaggctttttattcgcccatatcactaaaccggagt

SEQ ID NO: 808019 - DNA, 75 bp, synthetic construct
  source 1..75: mol_type = other DNA
gcaaagtgttcctcacaccggcacagctggcgatgctgttggaaggtatcgactggcggcagcctaaaagactgc

SEQ ID NO: 808020 - DNA, 75 bp, synthetic construct
  source 1..75: mol_type = other DNA
aaatttggctggttgccggtatcaccgatatgagaaatggcttcaacggcctggctgcgaaagtacaaaaggcgc

SEQ ID NO: 808021 - DNA, 75 bp, synthetic construct
  source 1..75: mol_type = other DNA
ggcagtcaggtcaaactgctgtggtccaccggcgacggactgtgcctgctgaccaaaaggctggagcgtggccgc

SEQ ID NO: 808022 - DNA, 75 bp, synthetic construct
  source 1..75: mol_type = other DNA
gatgtgattcttgatacgccgctggcgaaagtaggcggaaaaggcttatttgtaaaagagctggaagtcgcgctc

SEQ ID NO: 808023 - DNA, 75 bp, synthetic construct
  source 1..75: mol_type = other DNA
aatgggtatttcgctggcggaagagttgttgaataacggcgcgcgcgagattctcgccgaagtctacaacggaga

SEQ ID NO: 808024 - DNA, 75 bp, synthetic construct
  source 1..75: mol_type = other DNA
aatgggcatttcgctggcggaagagctactgaataacggcgcgcgcgagatcctcgccgaagtctacagcggaga

SEQ ID NO: 808025 - DNA, 75 bp, synthetic construct
  source 1..75: mol_type = other DNA
gcatattcatcctgtttaccctcatgccgaaggcgttgatgagattatcgtactggatacccataacgataatcc

SEQ ID NO: 808026 - DNA, 75 bp, synthetic construct
  source 1..75: mol_type = other DNA
ggaccagcggtattgcggcctatgaggcgctctctgttcccttccgccagctgctgagcgggctgcgtgcggagc

SEQ ID NO: 808027 - DNA, 75 bp, synthetic construct
  source 1..75: mol_type = other DNA
tgttccatccggtggtgcgtacgcatccggtgagcggtaaacaggcgctgtttgttaatgaaggttttactacgc

SEQ ID NO: 808028 - DNA, 75 bp, synthetic construct
  source 1..75: mol_type = other DNA
gtcaggttaaactgctgtggtccaccggtgacggactgtgcctcctgaccaaacggctggagcgtgggcgcttcg

SEQ ID NO: 808029 - DNA, 75 bp, synthetic construct
  source 1..75: mol_type = other DNA
cggcatggcgtctatggtttatgccggtaaaatcattaaagacctcggtctggaagatgaatataccctgctggt

SEQ ID NO: 808030 - DNA, 75 bp, synthetic construct
  source 1..75: mol_type = other DNA
ggtgaatgcctacgaagggctgtttggcaaagcgccggttgttgataagtggaccttctcaactaacggcgtatc

SEQ ID NO: 808031 - DNA, 75 bp, synthetic construct
  source 1..75: mol_type = other DNA
gtggctggtgcagtccagcgaggtcagatctgcaattttggtaaatcaaatcccattagatgatgcgctgctgca

SEQ ID NO: 808032 - DNA, 75 bp, synthetic construct
  source 1..75: mol_type = other DNA
gtccatcgcggtgaattcgttgacggaattagcgacccgaatgatccgaaatgggttaaggggattgaaacccgc

SEQ ID NO: 808033 - DNA, 75 bp, synthetic construct
  source 1..75: mol_type = other DNA
atgacggaggcggatttgtatccttatctggcgcatcttgccggcgggcaggtgtacccgtatgtggtccccctg

SEQ ID NO: 808034 - DNA, 75 bp, synthetic construct
  source 1..75: mol_type = other DNA
ggagtcattgatcgtgacaccattaaatggtggcttaagcaatcacgcgaggcgcaatctgccattctgaccgat

SEQ ID NO: 808035 - DNA, 75 bp, synthetic construct
  source 1..75: mol_type = other DNA
gccctgattgtggcgcggtgatgggcgacgcaacataccaggaaacattcgatgacaagaaccaggttgaagttc

SEQ ID NO: 808036 - DNA, 75 bp, synthetic construct
  source 1..75: mol_type = other DNA
aaaaacccgtccgcgtcaatttgcccgttgttgacgaccttccgccagaaggcgtgtttgatactgaattctgca

SEQ ID NO: 808037 - DNA, 75 bp, synthetic construct
  source 1..75: mol_type = other DNA
cgtattggtgacgctggcagcctgctttggtgggcttggcgcgtcacatattaatgactcagggttctggattgt

SEQ ID NO: 808038 - DNA, 75 bp, synthetic construct
  source 1..75: mol_type = other DNA
atgtccacaattacattgttatgcattgcgttagctggcgtaatcatgctgttgctgctggtcatcaaggcaaag

SEQ ID NO: 808039 - DNA, 75 bp, synthetic construct
  source 1..75: mol_type = other DNA
gggcagaaaccgctcaccaccgcgcagattgttgatgaaatatgtgattttgtggtgaatcagcaggctgttttc

SEQ ID NO: 808040 - DNA, 75 bp, synthetic construct
  source 1..75: mol_type = other DNA
cgtcaggctgcccgtgaggccgtactggtactggctccggaatcagtcagtgaaatgcaggactatattccggaa

SEQ ID NO: 808041 - DNA, 75 bp, synthetic construct
  source 1..75: mol_type = other DNA
cgccacatcctggccccgtcgccgcagcgggactccttcacgcagacatcggctggctgaccataatcggtattg

SEQ ID NO: 808042 - DNA, 75 bp, synthetic construct
  source 1..75: mol_type = other DNA
gaccaaatatctggggttgtcggtagcagacggtctgaaaacctggacagtgttaacgaccattctcgtaagcgt

SEQ ID NO: 808043 - DNA, 75 bp, synthetic construct
  source 1..75: mol_type = other DNA
actgctgcaactgcgggaatttatcgatgaaaactccggtgaattttttgtccgggtctgggggaatggagccaa

SEQ ID NO: 808044 - DNA, 75 bp, synthetic construct
  source 1..75: mol_type = other DNA
aaaatagacgagaaaaaaggcacagttcagcaagtctgggaatacggaaaagagcgcggctacgatttctatagc

SEQ ID NO: 808045 - DNA, 75 bp, synthetic construct
  source 1..75: mol_type = other DNA
ccggtatccttgatgcgggtccggcaactggcgcactcccttttgatatcgcgccattcacctttatcgtcgata

SEQ ID NO: 808046 - DNA, 75 bp, synthetic construct
  source 1..75: mol_type = other DNA
aaccggcgcactgccttttgatatcgcgccattcacctttatcgtcgataccgaaggtgaataccgctggtggct

SEQ ID NO: 808047 - DNA, 75 bp, synthetic construct
  source 1..75: mol_type = other DNA
cgtcaggacgcccgtgaagccataatgctgctggccccgggatccgtcagtgaaatgcagagctatattccggaa

SEQ ID NO: 808048 - DNA, 75 bp, synthetic construct
  source 1..75: mol_type = other DNA
agcaggcaaaactggaaccggatacaccgttcggtgatgctctgggtgtaggaccaggccgtaactgggcgcacg

SEQ ID NO: 808049 - DNA, 75 bp, synthetic construct
  source 1..75: mol_type = other DNA
tgatggcgtaccgatttttggtctttatcagaaatttgcaaacaaagtgaccgttgaatggaaagaaaacggcaa

SEQ ID NO: 808050 - DNA, 75 bp, synthetic construct
  source 1..75: mol_type = other DNA
aacccgcgattctgtgaaccagaaccagcaagaaacggaacagaacgaccagaaagcggaacaaaacagcccaaa

SEQ ID NO: 808051 - DNA, 75 bp, synthetic construct
  source 1..75: mol_type = other DNA
tattcccgcgccgctatttttgcacttatccggagcgcacaccctgagttttatcattacccgggacgccttcag

SEQ ID NO: 808052 - DNA, 75 bp, synthetic construct
  source 1..75: mol_type = other DNA
gcactgacaataccaacgtcaacggcgaagacatgactgatattgaggagaatatgctactcccggtttctggcc

SEQ ID NO: 808053 - DNA, 75 bp, synthetic construct
  source 1..75: mol_type = other DNA
gtcgcgccaggttttgaagaccgcctctatctggttaatacccatacctttactgcgcaaggttccgacctccac

SEQ ID NO: 808054 - DNA, 75 bp, synthetic construct
  source 1..75: mol_type = other DNA
gacgccactcatgagtccattgagacgccaaatggcacggtactgttgcgcgtaggtaagagtaactatcgtcgc

SEQ ID NO: 808055 - DNA, 75 bp, synthetic construct
  source 1..75: mol_type = other DNA
ccgtgcagatcgatgtctgggcaacagtacctgatgacgcagatgatatccgtgagcaggcgcttgatgcggtaa

SEQ ID NO: 808056 - DNA, 75 bp, synthetic construct
  source 1..75: mol_type = other DNA
acgaccactggagcgttaccgggcgctgcgcctttaccgacggttgcgaaggctggaaaacgggctgccagaaat

SEQ ID NO: 808057 - DNA, 75 bp, synthetic construct
  source 1..75: mol_type = other DNA
catccggagccagcagcgcaacatgcacagaaaaatccctgtaatgtttgtggggaaactggcgggggcacatgc

SEQ ID NO: 808058 - DNA, 75 bp, synthetic construct
  source 1..75: mol_type = other DNA
gtgagcgccacaatgcgctggatgacgctcgttaccaggcaaaatacgtttcagctatctggcaaaaactgatcc

SEQ ID NO: 808059 - DNA, 75 bp, synthetic construct
  source 1..75: mol_type = other DNA
cagaatcagccagaaacggaacagaacgaccagaaagcggaacaaaacagcccaaatacgcaacaaaacgagcca

SEQ ID NO: 808060 - DNA, 75 bp, synthetic construct
  source 1..75: mol_type = other DNA
gatgaaatctgcgattttgtggcgaatcagcaggcggttttcctgggcggtcactacatcttacagggcagcaga

SEQ ID NO: 808061 - DNA, 75 bp, synthetic construct
  source 1..75: mol_type = other DNA
tgtcgctgttttgcgtcataatgggacgttttggcggcaatctggcgctcaatctcgggacatttggcggtgtgt

SEQ ID NO: 808062 - DNA, 75 bp, synthetic construct
  source 1..75: mol_type = other DNA
gttcaggaagacgattcggagaaaatggaaggcgctgaacatccacacaaggagaatgctggcagcgctcaggac

SEQ ID NO: 808063 - DNA, 75 bp, synthetic construct
  source 1..75: mol_type = other DNA
gttgtatcgccattgcttgcccaattaccggggattgggttgcgatgaccaaccatacctgggcgttttcgattg

SEQ ID NO: 808064 - DNA, 75 bp, synthetic construct
  source 1..75: mol_type = other DNA
acatcgccctcattaacctggtctggtgctcctgaaggcaccaaaagctttgccgtaactgtgtatgatccagat

SEQ ID NO: 808065 - DNA, 75 bp, synthetic construct
  source 1..75: mol_type = other DNA
gatgatggcggcttgccaggggatggcggggctttgtggcgtgattgtcgaaggtgggcatcccgggctgcaaag

SEQ ID NO: 808066 - DNA, 75 bp, synthetic construct
  source 1..75: mol_type = other DNA
tcagcaaaactatcgatctggaaaccgcaggcggggtcatcgatcgggacaccattaagtggtggctgaaacagt

SEQ ID NO: 808067 - DNA, 75 bp, synthetic construct
  source 1..75: mol_type = other DNA
caggtcagattctgcctgttcgctggctggcgcaacacggcggcgaaaaaccagtaacgcacgtttcgcgggatg

SEQ ID NO: 808068 - DNA, 75 bp, synthetic construct
  source 1..75: mol_type = other DNA
gtcacgttgattttgcgccgaatagtgaagaagaggccattatcctcgaaatactgcgtgcggaaattggccatg

SEQ ID NO: 808069 - DNA, 75 bp, synthetic construct
  source 1..75: mol_type = other DNA
acctggaaacagaagtatttgatggcaacgccaacggatccttcagagtgtcaactcttgcgaaagaatgggata

SEQ ID NO: 808070 - DNA, 75 bp, synthetic construct
  source 1..75: mol_type = other DNA
taactacccgctgattttgtgtgaagcgttatccatcggtgtgccggtgattgccactcacagcgacgcggcgtg

SEQ ID NO: 808071 - DNA, 75 bp, synthetic construct
  source 1..75: mol_type = other DNA
ctgcgcctttaccgacggttgtgaaggctggaaaacgggctgtcagaaatgcccgactctaaataactatccgcc

SEQ ID NO: 808072 - DNA, 75 bp, synthetic construct
  source 1..75: mol_type = other DNA
tccgtgagatgctggcgctgggctgtcagtttatttcccccagccagcatgtggctgacgctttcaatagcctgt

SEQ ID NO: 808073 - DNA, 75 bp, synthetic construct
  source 1..75: mol_type = other DNA
ttcggggccggtagtcctgcattttcatgtgttgcacagctattggttgaatcttaactgcgtggtgcgcttttg

SEQ ID NO: 808074 - DNA, 75 bp, synthetic construct
  source 1..75: mol_type = other DNA
ggctggaaaacgggctgccagaaatgcccgaccttaaataactatccgccggtgaagattgatcgcgcacaccaa

SEQ ID NO: 808075 - DNA, 75 bp, synthetic construct
  source 1..75: mol_type = other DNA
ggctggaaaacgggctgccagaaatgcccgaccttaaataactatccgccggtgaagattgatcgcgcgcaccag

SEQ ID NO: 808076 - DNA, 75 bp, synthetic construct
  source 1..75: mol_type = other DNA
atgaatatcagcacagagacccgcgaaattctgcgtaattacaaagctgtgattaatgcgcggcgtcgtgagatg

SEQ ID NO: 808077 - DNA, 75 bp, synthetic construct
  source 1..75: mol_type = other DNA
tgtggcgaatcagcaaaaaaccgccgagaaccctcgcccagtgcgggcggggaggaaaggcgaaaaagcccttcg

SEQ ID NO: 808078 - DNA, 75 bp, synthetic construct
  source 1..75: mol_type = other DNA
acattacttaaaaatctggaaacggaagtatttgatggcaacaccaacggttccttcgtggtatcagctctcaca

SEQ ID NO: 808079 - DNA, 75 bp, synthetic construct
  source 1..75: mol_type = other DNA
ctacagaaccataccccgccgcgtgcgggttttttattatcaggaggcagaatgtctgctttgtatgaacgttca

SEQ ID NO: 808080 - DNA, 75 bp, synthetic construct
  source 1..75: mol_type = other DNA
tcgcgatgccgcgggtaatgcgttatcgctgattgtcggcagcctgattggcgttattgcttattatgtcagtta

SEQ ID NO: 808081 - DNA, 75 bp, synthetic construct
  source 1..75: mol_type = other DNA
gttaaaagtgggcgcttatgtctttggttatctggtgatcgccaaagcgtcactgcggttttatattctggcgga

SEQ ID NO: 808082 - DNA, 75 bp, synthetic construct
  source 1..75: mol_type = other DNA
ccatcaaaatcacccttgatgatgctgcttgcggcgatgctccaattcagtggaaagcttctctgccgattattg

SEQ ID NO: 808083 - DNA, 75 bp, synthetic construct
  source 1..75: mol_type = other DNA
tatatgcttctaaaagtggatatggcttttttggaggggttggtaaaagtgctgatgctgtagctagtaacccta

SEQ ID NO: 808084 - DNA, 75 bp, synthetic construct
  source 1..75: mol_type = other DNA
acctttgacaacctgtcactgaagaacaccgattttggccttggccgtaatgccacgctgaacaccatgcttgaa

SEQ ID NO: 808085 - DNA, 75 bp, synthetic construct
  source 1..75: mol_type = other DNA
gtaaagactggtgcagcagtaactggtctggatgcgcagattcagaaaggccagaaagtagttgatgttgctgta

SEQ ID NO: 808086 - DNA, 75 bp, synthetic construct
  source 1..75: mol_type = other DNA
cagtaacgccaccttctttggtgtttacggcgctggtatcgaaaagggcaaagccattaccatcactcttaataa

SEQ ID NO: 808087 - DNA, 75 bp, synthetic construct
  source 1..75: mol_type = other DNA
tccttatctaatccttatagccgtctttctgcaattagtggtgagtttgttgagaagtataatgaccaagggacc

SEQ ID NO: 808088 - DNA, 75 bp, synthetic construct
  source 1..75: mol_type = other DNA
ataataagcagggagaacttgtcggtacgctggataaggcagctatgcctgatttcagcgctgtggattcggaaa

SEQ ID NO: 808089 - DNA, 75 bp, synthetic construct
  source 1..75: mol_type = other DNA
atgaacagaatttattctcttcgctacagcgctgtggcccggggctttattgccgtatctgagtttgctaggaaa

SEQ ID NO: 808090 - DNA, 75 bp, synthetic construct
  source 1..75: mol_type = other DNA
acttatcccccgggacttcctttcacagatttattcagaggataacgattcaccgatcacgtttagcacattgac

SEQ ID NO: 808091 - DNA, 75 bp, synthetic construct
  source 1..75: mol_type = other DNA
aatggaattgattcgcgcgatgctttcattgctgtaaaagagatagatcccgaatttattgctaaatataactca

SEQ ID NO: 808092 - DNA, 75 bp, synthetic construct
  source 1..75: mol_type = other DNA
ccaacagctgccagtggtgctgtttgaccggtgccccaatgaaagcgcgctgccgctggtaatgaccgattcgat

SEQ ID NO: 808093 - DNA, 75 bp, synthetic construct
  source 1..75: mol_type = other DNA
taagccagctgatcgagggcgatacgcccgaaacgctacaacgctacctgcccgcaacgctgcagtttcggcatc

SEQ ID NO: 808094 - DNA, 75 bp, synthetic construct
  source 1..75: mol_type = other DNA
gggtgcgttactggcgcgtgaactgggtattcgtcatgtcgataccgtttgtatttccagctacgatcacgacaa

SEQ ID NO: 808095 - DNA, 75 bp, synthetic construct
  source 1..75: mol_type = other DNA
tcggcaacttactttctgcgggtttccggctcgtcgatggaagatggccgtatccacgatggtgacgtactggtt

SEQ ID NO: 808096 - DNA, 75 bp, synthetic construct
  source 1..75: mol_type = other DNA
ggaaaataaccagcgggcattgtggcgaacgctacgcgatttacggcaggccgtgattacggatgcccgcgagcg

SEQ ID NO: 808097 - DNA, 75 bp, synthetic construct
  source 1..75: mol_type = other DNA
ctgccgcattgctggcatggcgcgagcatggggatacaagccgacgggatgaaatcgtgcagcgtaaccgcctgc

SEQ ID NO: 808098 - DNA, 75 bp, synthetic construct
  source 1..75: mol_type = other DNA
ttacgcttcgctggtggatgcgggtttcggtgtgcgtctctctggtgaggattccgggcgcggtacattcagcca

SEQ ID NO: 808099 - DNA, 75 bp, synthetic construct
  source 1..75: mol_type = other DNA
aaaataatagaatgaaactgttgagacgtgttcagatctatcttatcattccgttgtctattgctttactggtgc

SEQ ID NO: 808100 - DNA, 75 bp, synthetic construct
  source 1..75: mol_type = other DNA
gctgtttatgctgctgggtattcagcttggcttctggtcgctgctgttctcgcatatcaccttctgcctgccgtt

SEQ ID NO: 808101 - DNA, 75 bp, synthetic construct
  source 1..75: mol_type = other DNA
gtctgctgtttggttacgcgatgaaaaacagcggcctttggctggctgcgcgtagtgctaagcccgatcagcaaa

SEQ ID NO: 808102 - DNA, 75 bp, synthetic construct
  source 1..75: mol_type = other DNA
ctattgcaatcacaacaggcattctctccggtatctggggctgggtggctgtttcccttggcttacttagctggg

SEQ ID NO: 808103 - DNA, 75 bp, synthetic construct
  source 1..75: mol_type = other DNA
cgaatataacggtgggttgctaccaaatgaatcggaaaaccgatactggaaaaactctaaagcggtggccagttt

SEQ ID NO: 808104 - DNA, 75 bp, synthetic construct
  source 1..75: mol_type = other DNA
attacgctgaaagcgtcggtatccgggatcatgaccggtatcctgttggcgattgcccgtattgctggtgaaacc

SEQ ID NO: 808105 - DNA, 75 bp, synthetic construct
  source 1..75: mol_type = other DNA
tgttatccgtaccaccgagaacatgctgaaactggtgccggacagcctgcgtgaagcggcttatgcgctgggtac

SEQ ID NO: 808106 - DNA, 75 bp, synthetic construct
  source 1..75: mol_type = other DNA
gcccgtttgcggaatggcagcaactggcctgggctggtgtgttgatcattaccctgtgcgtactgctgctgaaca

SEQ ID NO: 808107 - DNA, 75 bp, synthetic construct
  source 1..75: mol_type = other DNA
tgactggaaagcccgtcactatgatgcagagaaggctgaccgctataccgtttcgtttggtatcaacggaaagct

SEQ ID NO: 808108 - DNA, 75 bp, synthetic construct
  source 1..75: mol_type = other DNA
ggaaagtgcacctgacgccagctcagttatctatgctactggagggaatcgcgtggaaacatccaaaacggactg

SEQ ID NO: 808109 - DNA, 75 bp, synthetic construct
  source 1..75: mol_type = other DNA
cgggctgaacgtcgtctgcgagcaattgcggcaaaatatccgccaggttgaagaaaatatgcagctattgcagct

SEQ ID NO: 808110 - DNA, 75 bp, synthetic construct
  source 1..75: mol_type = other DNA
cgtatcggaagacgttatttattctaataaaaaacaacactctaaatataaaattatttcttgcagtaattataa

SEQ ID NO: 808111 - DNA, 75 bp, synthetic construct
  source 1..75: mol_type = other DNA
acagcagcacaccgtcaccggtggagctggtctccatgttccagaccggcagcgtggccatccgtgcggagcgct

SEQ ID NO: 808112 - DNA, 75 bp, synthetic construct
  source 1..75: mol_type = other DNA
taaccacccaaacaggcgaaaccttcactggcaagatgtcacgacgtcagcatgagctggttaatggctttgtgc

SEQ ID NO: 808113 - DNA, 75 bp, synthetic construct
  source 1..75: mol_type = other DNA
ggcttttagctcatcagctattgcagacatcgtaatttcaggtacacacgtagtttataaaagcgaacaaaaaaa

SEQ ID NO: 808114 - DNA, 75 bp, synthetic construct
  source 1..75: mol_type = other DNA
cgtcgctttcgaaaaatattatctgggtgcccagcctatttttcattgtctgaaaagtttgaatgatttagtgcg

SEQ ID NO: 808115 - DNA, 75 bp, synthetic construct
  source 1..75: mol_type = other DNA
aaatctggctggttgccggcattaccgacatgcgaaacggcttcaatggtctggccgcaaaggtgcagacgacgc

SEQ ID NO: 808116 - DNA, 75 bp, synthetic construct
  source 1..75: mol_type = other DNA
ttcgtctggccggtcacccgcgatggaaaggttcaccttactccggctcagttgtccatgcttctcgaaggcatc

SEQ ID NO: 808117 - DNA, 75 bp, synthetic construct
  source 1..75: mol_type = other DNA
gacctttattgccaacaaatggctaaagctttggcggttcaggtcgatgattctgtcacggcaggcatgaacact

SEQ ID NO: 808118 - DNA, 75 bp, synthetic construct
  source 1..75: mol_type = other DNA
tgctggatacccccggaccgaatgaagccggacaaccgcatctgcaaaaaatgcttaacgagcaactggcgcgcg

SEQ ID NO: 808119 - DNA, 75 bp, synthetic construct
  source 1..75: mol_type = other DNA
cgtcgatgtggggctatctggcgaatcgggcacgccatgagttagtcaacaacggtaaattaccagcaccggagc

SEQ ID NO: 808120 - DNA, 75 bp, synthetic construct
  source 1..75: mol_type = other DNA
agaaacagaaacctaatcgacgcgctgatggttgccgaggcgtgcggagaggagcatttcacgtcaatcctgatg

SEQ ID NO: 808121 - DNA, 75 bp, synthetic construct
  source 1..75: mol_type = other DNA
gatggcgacgccctgtggctgaaagccggggttgaggcagaaaaagtctccggaaatatgacgctgaaggcaggt

SEQ ID NO: 808122 - DNA, 75 bp, synthetic construct
  source 1..75: mol_type = other DNA
agttaatggttcagatccagtatcattaacgcaagatgactgggaaagacgtgactacactattgatagtttata

SEQ ID NO: 808123 - DNA, 75 bp, synthetic construct
  source 1..75: mol_type = other DNA
atgtacgaattaactctatcgccagcagagattgaagagatcacaagatacacgcgatacacaagacagcaacac

SEQ ID NO: 808124 - DNA, 75 bp, synthetic construct
  source 1..75: mol_type = other DNA
gtgaatggcagtacgctgtttaagggcgcggataacacatctcttctgaagaaagcgcgtgtcatgttttccgcc

SEQ ID NO: 808125 - DNA, 75 bp, synthetic construct
  source 1..75: mol_type = other DNA
gatatttggttacgcaatgaaaaacagcggcctgtggctggcggcgcgtagtacgaagaccgctcaccgtgagca

SEQ ID NO: 808126 - DNA, 75 bp, synthetic construct
  source 1..75: mol_type = other DNA
cggtgaaggatgcagaccgtagcgtgtttaatggcagtgctgtcctgaacgggaagacgacgctggatatcatga

SEQ ID NO: 808127 - DNA, 75 bp, synthetic construct
  source 1..75: mol_type = other DNA
ctcgcgctttggcatcaactggcagggttttaccaccaaatggtatagcctgctgatgaacaacgacagcctgtt

SEQ ID NO: 808128 - DNA, 75 bp, synthetic construct
  source 1..75: mol_type = other DNA
cagttaaggctgcacggtatcccatttgtaatcggtcctaaaaacgaaccaatagttcttcgcagggatattcca

SEQ ID NO: 808129 - DNA, 75 bp, synthetic construct
  source 1..75: mol_type = other DNA
gacgagcttgtaaagcgtctttcagccatcagaaagccccgtgacgaggttaaacctgtacggttaggggaaatc

SEQ ID NO: 808130 - DNA, 75 bp, synthetic construct
  source 1..75: mol_type = other DNA
tatcgctgctcgtcctggtatggggaaaaccgagctggcgctgaagattgccgaaggtgttgcaagccgcgttat

SEQ ID NO: 808131 - DNA, 75 bp, synthetic construct
  source 1..75: mol_type = other DNA
ctttgttgcatgtgaccaggatgaagccagacagatttgcacagcatcaaatgcacctgctgcgcgtggcagacg

SEQ ID NO: 808132 - DNA, 75 bp, synthetic construct
  source 1..75: mol_type = other DNA
aaaccatgagcagggaggatatgcttagggaaattcagctactgcgcgactcacgtgatctggcgcttgaactgg

SEQ ID NO: 808133 - DNA, 75 bp, synthetic construct
  source 1..75: mol_type = other DNA
ttccactcagaccagagtcagtgccagttcctgcaaggtggaattccgtcacggtaacatgacgctggaaaatcc

SEQ ID NO: 808134 - DNA, 75 bp, synthetic construct
  source 1..75: mol_type = other DNA
gcagggctttaattcagcatggattgagctacagcttgcccatgtggataagaacagtattcgcggcacatacaa

SEQ ID NO: 808135 - DNA, 75 bp, synthetic construct
  source 1..75: mol_type = other DNA
tggcggaagttgaagcgatgcgtacccgtattctggcgatgcgtcaggaaatggtgaaagtgctacgtgcagaaa

SEQ ID NO: 808136 - DNA, 75 bp, synthetic construct
  source 1..75: mol_type = other DNA
agcgacaaagtgaatttaagtatcggtctgtactacaacgaagacggaattattccacaactgaaagccgtggcg

SEQ ID NO: 808137 - DNA, 75 bp, synthetic construct
  source 1..75: mol_type = other DNA
atatggctatcgtcgtgtctgggccattctcagacgacagtcccgtaacgaaggactgccgttcgtgaatgcaaa

SEQ ID NO: 808138 - DNA, 75 bp, synthetic construct
  source 1..75: mol_type = other DNA
atgttctggctgatgctgcttattatttctgcaaaaatggcgtattcactctggcgctatttctccttttctgcg

SEQ ID NO: 808139 - DNA, 75 bp, synthetic construct
  source 1..75: mol_type = other DNA
taacagcagagcaatacagagactggcaattaattgcagccagtctcaggaaaaagataaatggggaaagaagct

SEQ ID NO: 808140 - DNA, 75 bp, synthetic construct
  source 1..75: mol_type = other DNA
caggagattgattttgataatcgtctgtgggaagtgccgaaagaacgcatgaagatgcgccgtcctcattgtgtg

SEQ ID NO: 808141 - DNA, 75 bp, synthetic construct
  source 1..75: mol_type = other DNA
gtcatacgccgaggaaatgatcgagacgtttgaaaaagacgtttttccgtacattggcggcaggccgatcgcaga

SEQ ID NO: 808142 - DNA, 75 bp, synthetic construct
  source 1..75: mol_type = other DNA
tcgccagcgatgtggcgaagtgtttcggtacgcaataattaccggacgcgctgaatataaccccgctcctgatct

SEQ ID NO: 808143 - DNA, 75 bp, synthetic construct
  source 1..75: mol_type = other DNA
tatgacgaagcgactaacggcgtgcgctttaatgacctgttggcgacgctgaaaacattacctgcccgcagtatt

SEQ ID NO: 808144 - DNA, 75 bp, synthetic construct
  source 1..75: mol_type = other DNA
gcgacgaagcaaagcaagctgttgctgaacctgtcgtcagtgcgccagtggagatcccggctgccgtgcgtcagg

SEQ ID NO: 808145 - DNA, 75 bp, synthetic construct
  source 1..75: mol_type = other DNA
ccagtggtacgccgactatatggactcactggaacagggcgggaatgtggtacatggcaagtttggaaaatgtgg

SEQ ID NO: 808146 - DNA, 75 bp, synthetic construct
  source 1..75: mol_type = other DNA
gcaacggtgcaggatgtcatgttaggagcaatagaaaaacgctttggcgatagaccgggatggcccatccagtgg

SEQ ID NO: 808147 - DNA, 75 bp, synthetic construct
  source 1..75: mol_type = other DNA
atactcaggcggcagtcccgaaatgaaggactaccgttcgtgaatgcaaagcgcgtttaccggataatgagcgaa

SEQ ID NO: 808148 - DNA, 75 bp, synthetic construct
  source 1..75: mol_type = other DNA
agcggtgcagtggctgacggacaacggttcagcgtataccgcgtatgaaacgcggaggttcgcgagagagctgaa

SEQ ID NO: 808149 - DNA, 75 bp, synthetic construct
  source 1..75: mol_type = other DNA
tcgacatcatcagcgatatgccgagttatggttatcgacgcgtgtggggcatcctgcgcaagcaacgtcgcacag

SEQ ID NO: 808150 - DNA, 75 bp, synthetic construct
  source 1..75: mol_type = other DNA
cgttcctacctctgaacttgctgctgccatgaagcagattaaagaactccagcgactgctcggcaaaaacgatgg

SEQ ID NO: 808151 - DNA, 75 bp, synthetic construct
  source 1..75: mol_type = other DNA
atgagtgatgtcttagggccggagaaacgcagacggcgtactacacaggaaaagatcgctattgttcagcagagc

SEQ ID NO: 808152 - DNA, 75 bp, synthetic construct
  source 1..75: mol_type = other DNA
tatttctctggcgtaagcaataccaggagggaagtcttactgctgtggctgccggagaacaggtcgttcctgcct

SEQ ID NO: 808153 - DNA, 75 bp, synthetic construct
  source 1..75: mol_type = other DNA
tagactgggccgcaagcacgggaggttacgataaagcgacagtgcaggatgtgatgttaggagcgatagaaaaac

SEQ ID NO: 808154 - DNA, 75 bp, synthetic construct
  source 1..75: mol_type = other DNA
tgctctgatgcggcagttaccttcaatggattccattcaacttacggttttacgcaagggtgcgcgccacgacat

SEQ ID NO: 808155 - DNA, 75 bp, synthetic construct
  source 1..75: mol_type = other DNA
tatgccgacatatggatatcgtcgtatctgggccattcccagacggcaatcccgtaacgaaagactgccgttcgt

SEQ ID NO: 808156 - DNA, 75 bp, synthetic construct
  source 1..75: mol_type = other DNA
ggttcagcgtacagagcgcatgaaacacggcagttcaccagagagttgaatctggagccctgcacaacgacaatc

SEQ ID NO: 808157 - DNA, 75 bp, synthetic construct
  source 1..75: mol_type = other DNA
agccatttataaatgaaataaaaatcgcctttgcaaatataaaaaacaaaggcatcaaggccaccatcagccaat

SEQ ID NO: 808158 - DNA, 75 bp, synthetic construct
  source 1..75: mol_type = other DNA
ggaagactacatcgcgttcatgccgaaaccgaatgtaagaacggcattgcataaccttgcagtggcgatcgagca

SEQ ID NO: 808159 - DNA, 75 bp, synthetic construct
  source 1..75: mol_type = other DNA
aacgggcagatagggccacaggcgctgaaggctgtttatgacgtagcccgtaaggcggcaatggatgttgtgacc

SEQ ID NO: 808160 - DNA, 75 bp, synthetic construct
  source 1..75: mol_type = other DNA
ttcgtaccctgatggatcaatacggtttaaccctttccgatctgccggaaattggtagcaaatcgatggtgtcac

SEQ ID NO: 808161 - DNA, 75 bp, synthetic construct
  source 1..75: mol_type = other DNA
aaatcgcttccggtacgctgatggtgagcgacaactcgcagcttggagatacccattataaccgccaggttatct

SEQ ID NO: 808162 - DNA, 75 bp, synthetic construct
  source 1..75: mol_type = other DNA
taaagaaaactcaacgctgaatcttactgatgttattttttccggtaacgtcgcaggcggctatggtggcgcaat

SEQ ID NO: 808163 - DNA, 75 bp, synthetic construct
  source 1..75: mol_type = other DNA
ggggcgagaactgggtgtccattggtggcaagaaggtgaaagtacaagtcgcgcactttaagctctgtcacagta

SEQ ID NO: 808164 - DNA, 75 bp, synthetic construct
  source 1..75: mol_type = other DNA
gaatctctaatcactggcgagagggggatcgagaagattgactctctgatgaacaagggagacctggcaggcgtc

SEQ ID NO: 808165 - DNA, 75 bp, synthetic construct
  source 1..75: mol_type = other DNA
ttcgtacccttatggatcaatatggtttaaccctttccgatctgccggaaattggcagtaaatcgatggtgtcac

SEQ ID NO: 808166 - DNA, 75 bp, synthetic construct
  source 1..75: mol_type = other DNA
agtatctatctttactcccgtcaatgattgcgtctctcttctctgctaatggcattgcggcagtcactgattcat

SEQ ID NO: 808167 - DNA, 75 bp, synthetic construct
  source 1..75: mol_type = other DNA
tcagaaacgtatgcaacagaaatacgggaaggacatacaaccgtctcaacagcagctttctgatgatgacttgat

SEQ ID NO: 808168 - DNA, 75 bp, synthetic construct
  source 1..75: mol_type = other DNA
atggctatctggtcagatgaacaactatcacacatgctgactacgatgtctctcggtgcgcttgggccagaaaag

SEQ ID NO: 808169 - DNA, 75 bp, synthetic construct
  source 1..75: mol_type = other DNA
atgtttagcaataacatcgctaatgatggcaaaggcggcgcaatttataccatcaataatgatgtctatctaagt

SEQ ID NO: 808170 - DNA, 75 bp, synthetic construct
  source 1..75: mol_type = other DNA
catgaagacacttctacggtgcagcttagcggcgatctgtttagcgggcgctggggcacggatggcgagtggatg

SEQ ID NO: 808171 - DNA, 75 bp, synthetic construct
  source 1..75: mol_type = other DNA
ggtgccatcgatttacgtgtcactaacgccgtgtttcgcaataacatcgctaatgacggcaaaggtggtgcaatt

SEQ ID NO: 808172 - DNA, 75 bp, synthetic construct
  source 1..75: mol_type = other DNA
ttaactcgcttgaagcgctcaatgactggctggaacaagaatgccaagcggtgtggcaacaacaacagcacccgg

SEQ ID NO: 808173 - DNA, 75 bp, synthetic construct
  source 1..75: mol_type = other DNA
gtgtggccagcatgatggcacagatgcagctggggaatgtgaaggcgttgtttgaggacaaatcctttatcacgc

SEQ ID NO: 808174 - DNA, 75 bp, synthetic construct
  source 1..75: mol_type = other DNA
atgaccacctttatcgaccatcagaacgccttcatttcgctgtttaatcagacggcccgttatcacaaacgccat

SEQ ID NO: 808175 - DNA, 75 bp, synthetic construct
  source 1..75: mol_type = other DNA
tgtgtggtgtggccggagaagtggtgattggcaactcattgtgtaatgagcggcgccgggtgctgctgacgcccg

SEQ ID NO: 808176 - DNA, 75 bp, synthetic construct
  source 1..75: mol_type = other DNA
gattcttgttctcctcggaggcatgttattcctgtggggggcgcagatgaaaaaacgagtagctttcatcaaaga

SEQ ID NO: 808177 - DNA, 75 bp, synthetic construct
  source 1..75: mol_type = other DNA
atgacgctgtcgtattgggaaaggcacttggcatatctcctcctgagctcctatttggagaacaggaatcttctg

SEQ ID NO: 808178 - DNA, 75 bp, synthetic construct
  source 1..75: mol_type = other DNA
gagcattaccggttacggaagagcaaacgcctcatagctgaagagctctatgaaaagcatccggactggtgcttt

SEQ ID NO: 808179 - DNA, 75 bp, synthetic construct
  source 1..75: mol_type = other DNA
ttagtaaagatcttaatcaattatggaatgaaggcctggtggtaaaagtcagggacgtcctgttttttttctaca

SEQ ID NO: 808180 - DNA, 75 bp, synthetic construct
  source 1..75: mol_type = other DNA
ggtagaaaggagatctggcacatctgtaaagggaaaacctaaattatctaaaattggaccaccggagataagaac

SEQ ID NO: 808181 - DNA, 75 bp, synthetic construct
  source 1..75: mol_type = other DNA
caccacgagggcaatcgctacagcgttcctgccagttacgccaacagggccatcagccttcggatttatgcagac

SEQ ID NO: 808182 - DNA, 75 bp, synthetic construct
  source 1..75: mol_type = other DNA
ggccagttttttactccctggagtgtggcctgcatgatggcacagatgcaactggggaatgtgaaagcgttgttt

SEQ ID NO: 808183 - DNA, 75 bp, synthetic construct
  source 1..75: mol_type = other DNA
gttatgaaaagcaggatgttatcaacattgcgcatttgcttgcccatgtcattgagggactggagcagggattct

SEQ ID NO: 808184 - DNA, 75 bp, synthetic construct
  source 1..75: mol_type = other DNA
cgacgccgggtgctgctgacgcccgggcattacctcggaaactggtcataccgtctgcgtcaatctcaggaacag

SEQ ID NO: 808185 - DNA, 75 bp, synthetic construct
  source 1..75: mol_type = other DNA
aaagtcactactgaagaagccagtgcgcaatgcacagctgataagggcagcaccggtacaaacaaactaatcttc

SEQ ID NO: 808186 - DNA, 75 bp, synthetic construct
  source 1..75: mol_type = other DNA
cattcagatgggtggcgtacccaagaccatgacagtgcgtggtactccatcatcaggtacagcaacgctctataa

SEQ ID NO: 808187 - DNA, 75 bp, synthetic construct
  source 1..75: mol_type = other DNA
ccatgtcgttctcgccggacagcaggctcaccatgaaagcgctggaaatggcatgggaaacccgtggtaagcccg

SEQ ID NO: 808188 - DNA, 75 bp, synthetic construct
  source 1..75: mol_type = other DNA
aaagtcactactgaagaagccagtacgcaatgcaaggcagataatggcagcactggtacaaacaacttatcttca

SEQ ID NO: 808189 - DNA, 75 bp, synthetic construct
  source 1..75: mol_type = other DNA
aaaccatggaagttgagatcctcaaagaagcggtggagtatggtcagtcgcgaaaatggatagcgcatgcgccct

SEQ ID NO: 808190 - DNA, 75 bp, synthetic construct
  source 1..75: mol_type = other DNA
gtattcagcccagcctgttgtttaagtggaaaaaacaatatctggaaggaagtctcactgctgttgctgccggag

SEQ ID NO: 808191 - DNA, 75 bp, synthetic construct
  source 1..75: mol_type = other DNA
cgtctacctgatagccagcggacgcatgtgcgttgcaggactcaattctgcaaatgtacaacgtgtggcaaaggc

SEQ ID NO: 808192 - DNA, 75 bp, synthetic construct
  source 1..75: mol_type = other DNA
attatcggatgagcagaaatgaaaacattaatttgtcagcagcctggcgttatggaatatgtggaaaaggatatt

SEQ ID NO: 808193 - DNA, 75 bp, synthetic construct
  source 1..75: mol_type = other DNA
ggcagccagccagttatttctctggcgcaagcaataccaggagggaagtcttacactagttctaattttgagatg

SEQ ID NO: 808194 - DNA, 75 bp, synthetic construct
  source 1..75: mol_type = other DNA
ctgttgcccggcaacacggtgtggcagccagccagttatttctctggcgcaagcaataccaggagggaagtctta

SEQ ID NO: 808195 - DNA, 75 bp, synthetic construct
  source 1..75: mol_type = other DNA
tgggggatttcttcagtcagggagtcgcgcagctcaatttattcgatgacaacgcaccgcgccccgggagtgagc

SEQ ID NO: 808196 - DNA, 75 bp, synthetic construct
  source 1..75: mol_type = other DNA
ttcggttgccgcactggtgctcgcccgcgaaggtgcgcaagtgttagttatcgagcgtggcaattccgcaggtgc

SEQ ID NO: 808197 - DNA, 75 bp, synthetic construct
  source 1..75: mol_type = other DNA
gatcgcgggtggcaagctggtggaatactctgctcacgtagtgccagaagcgggtatcaacatgttgccggaact

SEQ ID NO: 808198 - DNA, 75 bp, synthetic construct
  source 1..75: mol_type = other DNA
cactgaaaaactaaaaagccttggcattcatgtgtttgacctcaatgaagttgacagcctcggcatctacgttga

SEQ ID NO: 808199 - DNA, 75 bp, synthetic construct
  source 1..75: mol_type = other DNA
agttccggcagttactgtggcgttaccagatcaaacagagtctgagtcgacgaggaaattgctgggataacagcc

SEQ ID NO: 808200 - DNA, 75 bp, synthetic construct
  source 1..75: mol_type = other DNA
atgtcgttctcgccggacagcaggctcaccatgaaagcgctggaaatggcatgggaaacccgtggtaagcccggc

SEQ ID NO: 808201 - DNA, 75 bp, synthetic construct
  source 1..75: mol_type = other DNA
ctggaaatggcatgggaaacccgtggtaagcccggcggggtgatgttccacagcgatcagggcagtcattatacg

SEQ ID NO: 808202 - DNA, 75 bp, synthetic construct
  source 1..75: mol_type = other DNA
agtgggtgatcgaagataattttgtgcgcggacgaccggaatgggataaagccggcgcgatgtttgtcagcaatg

SEQ ID NO: 808203 - DNA, 75 bp, synthetic construct
  source 1..75: mol_type = other DNA
gggtaagcgctgggcgtacctcgccgttgttctcgacctgttcgcaagaaaaccagtgggctgggccatgtcgtt

SEQ ID NO: 808204 - DNA, 75 bp, synthetic construct
  source 1..75: mol_type = other DNA
tcatcgttggtgcagggctggccggttcggttgccgcgctggtgctcgcccgcgaaggggcacaagtgttagtta

SEQ ID NO: 808205 - DNA, 75 bp, synthetic construct
  source 1..75: mol_type = other DNA
aatttgatgcctggctgatggagcaggccgaagaagcgggcgcgcagttaattaccgggatccgcgtcgataacc

SEQ ID NO: 808206 - DNA, 75 bp, synthetic construct
  source 1..75: mol_type = other DNA
agccggcgcggaaactgctgggataacagcccaatggaacgcttcttcaggagtctgaagaacgaatggatgccg

SEQ ID NO: 808207 - DNA, 75 bp, synthetic construct
  source 1..75: mol_type = other DNA
gcgctggattacccgctctggtgagcaattcgttctcgaaaattttctccctttacggcgagcgcgtcggcggac

SEQ ID NO: 808208 - DNA, 75 bp, synthetic construct
  source 1..75: mol_type = other DNA
tgtttggtttctttgaaacggggcgtggcattgttgataccgtggtagcattttctgctctggcagtatttacct

SEQ ID NO: 808209 - DNA, 75 bp, synthetic construct
  source 1..75: mol_type = other DNA
gatttaaatccggggattattggctacaaaatcgtgtttggcattatggcctgcttcgcattctgtggtgcggtg

SEQ ID NO: 808210 - DNA, 75 bp, synthetic construct
  source 1..75: mol_type = other DNA
aacatggtgtagcagccagccagttatttctctggcgtaagcaataccaggaaggaagtcttactgctgtcgccg

SEQ ID NO: 808211 - DNA, 75 bp, synthetic construct
  source 1..75: mol_type = other DNA
tttgaaccgggaatgacggtctccctcgttgcacggcaacatggtgtggcagccagccagttatttctctggcgt

SEQ ID NO: 808212 - DNA, 75 bp, synthetic construct
  source 1..75: mol_type = other DNA
aagcaataccaggagggaagtcttactgctgtggccgcaggagagcaggtcgttcctgcctctgacacgagctcc

SEQ ID NO: 808213 - DNA, 75 bp, synthetic construct
  source 1..75: mol_type = other DNA
aaaaaagaagacggagcatcgaaaaacaccagtatgacctcggtgctgaaagacaaaactatctggcttattgct

SEQ ID NO: 808214 - DNA, 75 bp, synthetic construct
  source 1..75: mol_type = other DNA
cgaaactgactgaacgtgcagaagcattcctgaatacagaactgacctgggatggtatccagcaaccgctgctgg

SEQ ID NO: 808215 - DNA, 75 bp, synthetic construct
  source 1..75: mol_type = other DNA
ctggtggaagcatccaaagaagaagtgaaagccacagccgcaccggtaactggcccactggctgacgacccgatt

SEQ ID NO: 808216 - DNA, 75 bp, synthetic construct
  source 1..75: mol_type = other DNA
gttgtacaaaaccttcactgatgccgctgaagtgattggtgaagcgtgggaaagccgcgaatttggtaaagcagt

SEQ ID NO: 808217 - DNA, 75 bp, synthetic construct
  source 1..75: mol_type = other DNA
gtgcgttgcaggagcaggtggcaaacaaaatgcaggagtggtttgaatctggcctgcaacagtgggatatctccc

SEQ ID NO: 808218 - DNA, 75 bp, synthetic construct
  source 1..75: mol_type = other DNA
aagattccaccgccgagctgtaccacttcatcggtaaagatatcgtttacttccacagcctgttctggcctgcca

SEQ ID NO: 808219 - DNA, 75 bp, synthetic construct
  source 1..75: mol_type = other DNA
gcatgttcctgccggaccgttttgtaaaaggcacctgcccgaaatgtaaagcgccagatcaatacggcgataact

SEQ ID NO: 808220 - DNA, 75 bp, synthetic construct
  source 1..75: mol_type = other DNA
ccggggatggggagtaagcttagtcagccgttgtctccgggtgtcgcgtgcgcagttgcacgtcattctcagacg

SEQ ID NO: 808221 - DNA, 75 bp, synthetic construct
  source 1..75: mol_type = other DNA
cgatcggcttaggcgatggtccaaatgatgcccccttactggaggtgatggattacgcagtcattgtgaaagggc

SEQ ID NO: 808222 - DNA, 75 bp, synthetic construct
  source 1..75: mol_type = other DNA
gcatgaagcctcagtcacgctcatctggcgcgacagtgacgagcggatggcgcaatttaccgcccgcctgaacga

SEQ ID NO: 808223 - DNA, 75 bp, synthetic construct
  source 1..75: mol_type = other DNA
gtgaaagggctaaaccgtgaaggggtgcatctgcatgatgaggatccggcccgcgtctggcgaacgcagcgtgaa

SEQ ID NO: 808224 - DNA, 75 bp, synthetic construct
  source 1..75: mol_type = other DNA
cctgctggacagtcatagttatgactggcaaccggcagccccctggctcagccgtttacacgaagccaatgttcc

SEQ ID NO: 808225 - DNA, 75 bp, synthetic construct
  source 1..75: mol_type = other DNA
tgattttcaccgatctcgatggcaccctgttggacagtcatagctatgactggcagcctgccgctccctggctaa

SEQ ID NO: 808226 - DNA, 75 bp, synthetic construct
  source 1..75: mol_type = other DNA
tgatgaggatccggcccgcgtctggcgaacgcagcgtgaaggaccggaaggctggggtgaagggctggaccattt

SEQ ID NO: 808227 - DNA, 75 bp, synthetic construct
  source 1..75: mol_type = other DNA
attcagcccagcctgttgtttaagtgggaaaaacaatatcaggaaggaagtctcagtgctgttgctaccagagag

SEQ ID NO: 808228 - DNA, 75 bp, synthetic construct
  source 1..75: mol_type = other DNA
tttcctggagagtattttatctgtgaactcaggctgccagatcattatttccgatggaagcataataagcttttt

SEQ ID NO: 808229 - DNA, 75 bp, synthetic construct
  source 1..75: mol_type = other DNA
gtgataacagatgtctggaaatataggggcaaatccacctcagaactgatagtcttaatactagtttttagacta

SEQ ID NO: 808230 - DNA, 75 bp, synthetic construct
  source 1..75: mol_type = other DNA
actacacaggaaaagatcgctatcgttcagcagagctttgaaccgggaatgacggtctcccttgttgcccggcaa

SEQ ID NO: 808231 - DNA, 75 bp, synthetic construct
  source 1..75: mol_type = other DNA
ccggagaaacgcagacggcgtaccacacaggaaaagatcgcaattgttcagcagagctttgaaccagggatgacg

SEQ ID NO: 808232 - DNA, 75 bp, synthetic construct
  source 1..75: mol_type = other DNA
gtttgagctgaaggatatggcgaaagcgttacccggtatggccaaagccttcgctgcacgtggtatttacggcaa

SEQ ID NO: 808233 - DNA, 75 bp, synthetic construct
  source 1..75: mol_type = other DNA
gagctggagcaggcgtttgggattgcggcaaccggggccaagctaggctcgtttgagctgaaggatatggcgaaa

SEQ ID NO: 808234 - DNA, 75 bp, synthetic construct
  source 1..75: mol_type = other DNA
ggccaactggcttcgtctgacgctcgcactgggggaaggcggtaaactccgctggctggtgacaggctttggtgc

SEQ ID NO: 808235 - DNA, 75 bp, synthetic construct
  source 1..75: mol_type = other DNA
agtttaccgagtttggcggtcacctgattgacggactggtgaacggtatcaaaaataagtgggagtcgctcaaga

SEQ ID NO: 808236 - DNA, 75 bp, synthetic construct
  source 1..75: mol_type = other DNA
tgtattactgcgctctaaatggctgttgctcaaaacagccctgagcgatggcggcaagctgcgctggctggctac

SEQ ID NO: 808237 - DNA, 75 bp, synthetic construct
  source 1..75: mol_type = other DNA
cgggcgtagcctcgcgcctgaacaatgacctgcaacgggtcggcagaacgctggaacagcttaaccgccagcagt

SEQ ID NO: 808238 - DNA, 75 bp, synthetic construct
  source 1..75: mol_type = other DNA
ctgaatatgagcctgcatgaactggagaaaatgctggaacgtctgctggctcagaaacaacgtcgggggtacgaa

SEQ ID NO: 808239 - DNA, 75 bp, synthetic construct
  source 1..75: mol_type = other DNA
gatcgccgggcgtgccgttctctggattggccgggcgctgctgatgaatcccattggtctcgccatcaccgccgt

SEQ ID NO: 808240 - DNA, 75 bp, synthetic construct
  source 1..75: mol_type = other DNA
atggtttctatgggtacacaaaaattaaaagctcaaagcttttttattttcagcttattactgacattaatttta

SEQ ID NO: 808241 - DNA, 75 bp, synthetic construct
  source 1..75: mol_type = other DNA
ctccagatagcaaaaattggtgcgggttccaccgatgaagctgccaataactttaaaaacttcctcaccaaaatt

SEQ ID NO: 808242 - DNA, 75 bp, synthetic construct
  source 1..75: mol_type = other DNA
ggactgaaactcagcaaagttctgacgggcagcctcgttcgcggttttatgattgctgcacgcgccgttctctgg

SEQ ID NO: 808243 - DNA, 75 bp, synthetic construct
  source 1..75: mol_type = other DNA
aaatctccctctgaagccactaaagcgcttatggtcagcagtcgcgatctggctattacgctgggcgatcagctc

SEQ ID NO: 808244 - DNA, 75 bp, synthetic construct
  source 1..75: mol_type = other DNA
cacgatggcgttctgcattgctcctcgttttcgaaatgcctggtacctggttttcgtatcggttgggttgcagca

SEQ ID NO: 808245 - DNA, 75 bp, synthetic construct
  source 1..75: mol_type = other DNA
gcgataccactgttgccacaaaagccgctgttgccttcttaggtacggcaattgatgctacgcgtactgatgtac

SEQ ID NO: 808246 - DNA, 75 bp, synthetic construct
  source 1..75: mol_type = other DNA
gaatcgggtgcaggagtgagttttctgggtttcagaacagcacaaataaaaaacgattatgtatattcctataat

SEQ ID NO: 808247 - DNA, 75 bp, synthetic construct
  source 1..75: mol_type = other DNA
cctttgtgaacgtctggaaaactgctgttttactccggaccaactggcatcgactgactaccgcactcggagaag

SEQ ID NO: 808248 - DNA, 75 bp, synthetic construct
  source 1..75: mol_type = other DNA
gcacttgccggacagataaaaggctgggcgcttaaatacaatcagtatcaggatgagctgcaggaggcggtgggt

SEQ ID NO: 808249 - DNA, 75 bp, synthetic construct
  source 1..75: mol_type = other DNA
atgtcgggacagttttcagtcggcgttgttatcggcgggatgattggcagcacattccgttctgcaatgagcggt

SEQ ID NO: 808250 - DNA, 75 bp, synthetic construct
  source 1..75: mol_type = other DNA
atcctggacagaacaggcaatgctctgacgctggacggtgcgacatttagtgcacaaacaaccctgaataacggt

SEQ ID NO: 808251 - DNA, 75 bp, synthetic construct
  source 1..75: mol_type = other DNA
ccggtgaaaactggtcacgttttttccgttttaataccgcgtggcagtggggagagcgtgaagaacaggcggtaa

SEQ ID NO: 808252 - DNA, 75 bp, synthetic construct
  source 1..75: mol_type = other DNA
ttttcgcatcggttgggtcgccgcaggaaaacatgcgcgtaaaatccaacgattgcagttgatgagtacactttc

SEQ ID NO: 808253 - DNA, 75 bp, synthetic construct
  source 1..75: mol_type = other DNA
accgcgtggcagtggggagaacgtgaagaacaggcggtaaaacaattaggcaaacttattcaagaacggctgtaa

SEQ ID NO: 808254 - DNA, 75 bp, synthetic construct
  source 1..75: mol_type = other DNA
acacttcaggtgttcgcttcagtatgccgttgcccgatatcaatgggtttatgtcgtctgctaaaaatgcgatcg

SEQ ID NO: 808255 - DNA, 75 bp, synthetic construct
  source 1..75: mol_type = other DNA
ttatcatacggtttcccctgccgttcagcagtccatgtcttttcaggacaaaatgattgatatgtcgatcaccgc

SEQ ID NO: 808256 - DNA, 75 bp, synthetic construct
  source 1..75: mol_type = other DNA
gcgctggaagcactaaatctcagtttacaagcggtaaccgaaccgggtgactgggtgattgtcgagaatccttgt

SEQ ID NO: 808257 - DNA, 75 bp, synthetic construct
  source 1..75: mol_type = other DNA
caacatgtcgaaagcgcagattatccgtaagcgtaaagccaatgccgtctgtaacacctgctccttgcagactaa

SEQ ID NO: 808258 - DNA, 75 bp, synthetic construct
  source 1..75: mol_type = other DNA
gacgtgggaccctttacttcgctggccagggtattcagcaacagtggcaaatgaaacgggagatgctctcacctc

SEQ ID NO: 808259 - DNA, 75 bp, synthetic construct
  source 1..75: mol_type = other DNA
ggaaaggttttctttgctggacaaggtacgaagaaagattggtcgatgaagcgagagcatttatctcccgcctat

SEQ ID NO: 808260 - DNA, 75 bp, synthetic construct
  source 1..75: mol_type = other DNA
gaagcgaaaaaactgggattaaccgggtacgccaaaaatcttgacgatggcagcgtggaagtggttgcctgcggt

SEQ ID NO: 808261 - DNA, 75 bp, synthetic construct
  source 1..75: mol_type = other DNA
aaaacactatcaataagttggagtcattaccccccggacgagtgggaatccatggtagggatttttaccgaaatg

SEQ ID NO: 808262 - DNA, 75 bp, synthetic construct
  source 1..75: mol_type = other DNA
atgtacagaaaaaaacatcacctaatgaaaatgtttttattaaaaatggcgttcaatattttttcttttctactt

SEQ ID NO: 808263 - DNA, 75 bp, synthetic construct
  source 1..75: mol_type = other DNA
aaggtgacaaaaccctgaaggatacgatgaaatgtacaaaaaaacaccacctaatgaaaatgcttttattaaata

SEQ ID NO: 808264 - DNA, 75 bp, synthetic construct
  source 1..75: mol_type = other DNA
atgggtgagccgttcttcaagcagaaggagttgttccggcgagccggggttgtttgcttcagcagcaactacgag

SEQ ID NO: 808265 - DNA, 75 bp, synthetic construct
  source 1..75: mol_type = other DNA
tcggcgtcggcatagcccagactaaaaccctggcgaagctggccaatcacgccgcgaaacagtggcagcggcaga

SEQ ID NO: 808266 - DNA, 75 bp, synthetic construct
  source 1..75: mol_type = other DNA
ctttaacgtggtactcgagcgaactgtccgggagctgcgcggcgaaccatgtttggatctggaggagtttgcacc

SEQ ID NO: 808267 - DNA, 75 bp, synthetic construct
  source 1..75: mol_type = other DNA
cgcgcattgctgaaaaaagaggtgggcgatttggcggtggtgaatacccctgccggggaagcgagctggtatgtt

SEQ ID NO: 808268 - DNA, 75 bp, synthetic construct
  source 1..75: mol_type = other DNA
gcgacctggcggtggtcaatacccctgccggggaagcgagctggtatgttaatgctatcgagtacgtgaaaccgt

SEQ ID NO: 808269 - DNA, 75 bp, synthetic construct
  source 1..75: mol_type = other DNA
atgggtgatccatattttaagcagagggacttattccgtcgatatggcgtggtttgtttcagcagcaattacgag

SEQ ID NO: 808270 - DNA, 75 bp, synthetic construct
  source 1..75: mol_type = other DNA
gatgatatcgcttcactcggtattagtgatgggctgccacggcattatgtgaatacggctgatggccttttctac

SEQ ID NO: 808271 - DNA, 75 bp, synthetic construct
  source 1..75: mol_type = other DNA
taaaatatgtcatcgcacatgcagattatccggggagtgaatatctctttggcaaagaaatagcggagagagaat

SEQ ID NO: 808272 - DNA, 75 bp, synthetic construct
  source 1..75: mol_type = other DNA
gaaatcgctcaaaggcgagttacaggaaataaacggcgccgactgctttatcttcggtcatatgatgtttgataa

SEQ ID NO: 808273 - DNA, 75 bp, synthetic construct
  source 1..75: mol_type = other DNA
aaccgacttacttatttccacaggcgataatattgatcgtgggccggagagtcttaacgtcctgcgcctgctaaa

SEQ ID NO: 808274 - DNA, 75 bp, synthetic construct
  source 1..75: mol_type = other DNA
catccttatacctaaagaatatgatcttcagcttgaaaacggcccccctcatgtaacctatcatttacatgatga

SEQ ID NO: 808275 - DNA, 75 bp, synthetic construct
  source 1..75: mol_type = other DNA
gcgtaatatctcgcttgtcatgacggaagcagataaagcgttatgtgaggcgaaaaccgatggcggcaacaaagt

SEQ ID NO: 808276 - DNA, 75 bp, synthetic construct
  source 1..75: mol_type = other DNA
cattcagacattcgctaaccagatttatattgataccggatcgccgaaaagcggacggttatcgttttataaaat

SEQ ID NO: 808277 - DNA, 75 bp, synthetic construct
  source 1..75: mol_type = other DNA
agctgacgcaggtgatgatttcatctgccccggcgactgctgaaaccatggagaaggcggaatatctgcgtctgg

SEQ ID NO: 808278 - DNA, 75 bp, synthetic construct
  source 1..75: mol_type = other DNA
ggcgtcgtccgagatttccatgtcgggcaacttttatcttaatcaggctcagaatgccctgcgtgatgcctatga

SEQ ID NO: 808279 - DNA, 75 bp, synthetic construct
  source 1..75: mol_type = other DNA
ggtatggatgtgggcatgtttcattttcacggcgtatccaccaccggtaaaacgcttctcctgatgctggctgca

SEQ ID NO: 808280 - DNA, 75 bp, synthetic construct
  source 1..75: mol_type = other DNA
attattgaaatcattaatgacaacataaaatatgtcatcgcacatgcagattatccgggtgatgaatatcagttt

SEQ ID NO: 808281 - DNA, 75 bp, synthetic construct
  source 1..75: mol_type = other DNA
agctaacagcgatcgcctttcctttgactgggaaggtgatgcgattgaattactgaacgaactggccagagtcag

SEQ ID NO: 808282 - DNA, 75 bp, synthetic construct
  source 1..75: mol_type = other DNA
gatttccggggcggttcagctttgtatgaacgctcacagctgacgcaggtgatgatttcatctgccccggcgact

SEQ ID NO: 808283 - DNA, 75 bp, synthetic construct
  source 1..75: mol_type = other DNA
tggctgtgtttatggcacttctgctggtatttaccatcatatggctgcgggcacggctgctacagccgtggcggc

SEQ ID NO: 808284 - DNA, 75 bp, synthetic construct
  source 1..75: mol_type = other DNA
agctgattcctgcgctgctacacgcacaaagccgcgaaacggtgtcggctgacgtcagccagtttgtcgccgggc

SEQ ID NO: 808285 - DNA, 75 bp, synthetic construct
  source 1..75: mol_type = other DNA
acataaaaatcagatactctcgtttttgtggcaggctaaccgtcgtttgcattctcgcgccccgctgtgtgaacg

SEQ ID NO: 808286 - DNA, 75 bp, synthetic construct
  source 1..75: mol_type = other DNA
gtatatcgtcgacagagtatcgaccacgcacactgagtttttcagcgacggtgcagccagaaagattgatttcac

SEQ ID NO: 808287 - DNA, 75 bp, synthetic construct
  source 1..75: mol_type = other DNA
cagcttgccggtacgctttaccctgcaattactggcggccgcatttccctgcaggccgttgagctgatggccgac

SEQ ID NO: 808288 - DNA, 75 bp, synthetic construct
  source 1..75: mol_type = other DNA
cgagaaagacaagcccttaattaaagagatggaacaaacagcatttagcgccgagttaacccgagcagcagaacg

SEQ ID NO: 808289 - DNA, 75 bp, synthetic construct
  source 1..75: mol_type = other DNA
aaacgaagacccgctccgtgtctggcgtacacagcgagaaggccccgaaggctggcacgaagggttagatcattt

SEQ ID NO: 808290 - DNA, 75 bp, synthetic construct
  source 1..75: mol_type = other DNA
gttgttcaacgtttatgctacatacgtgaagttatgacgcataaagaatacgatttctttaccgccgttcatcgt

SEQ ID NO: 808291 - DNA, 75 bp, synthetic construct
  source 1..75: mol_type = other DNA
accgttaataaatccgaaatggaatcagacccattcctacttcaaaaaataatggaccaaaaactcgaaggctat

SEQ ID NO: 808292 - DNA, 75 bp, synthetic construct
  source 1..75: mol_type = other DNA
gcctgctggcagcggtgccattaagcgagaaagacacgccgttgctaaaagagatggagcaaaccgcctttagcc

SEQ ID NO: 808293 - DNA, 75 bp, synthetic construct
  source 1..75: mol_type = other DNA
ccgcgtccgccgtcgtgaatcaggtggcaccgaagtggtggtcacctttattcccgaaatactttcacagacgtc

SEQ ID NO: 808294 - DNA, 75 bp, synthetic construct
  source 1..75: mol_type = other DNA
gtacgttatcgataaagtgactcataaccacaccgagcttttcagcgacggtgcagcgagaaaaatcgagttcac

SEQ ID NO: 808295 - DNA, 75 bp, synthetic construct
  source 1..75: mol_type = other DNA
ggtttaagcgcaacctatggacaaacagggaacaaagtttcagccggaaccgtccagtcagtcattggtgtcact

SEQ ID NO: 808296 - DNA, 75 bp, synthetic construct
  source 1..75: mol_type = other DNA
atggaaggggataatagcggcttaaggaaaagcacaaatcaagcaattgatatgcttgataaccttgcggataag

SEQ ID NO: 808297 - DNA, 75 bp, synthetic construct
  source 1..75: mol_type = other DNA
aaggggataataaagggctaaagagaagcactagtgaagccgctgacctgctcgatgatttgtctgaaaaggcaa

SEQ ID NO: 808298 - DNA, 75 bp, synthetic construct
  source 1..75: mol_type = other DNA
tcaatgctcataaagcattctccattggacaagcgacggtgaacatgtggacggctgctaccgatgcatggaacg

SEQ ID NO: 808299 - DNA, 75 bp, synthetic construct
  source 1..75: mol_type = other DNA
ccggatgataaatcgccgttggttgaggttgttgtgatgtcacgtaacagccctgatacaggtatccgcgttcta

SEQ ID NO: 808300 - DNA, 75 bp, synthetic construct
  source 1..75: mol_type = other DNA
aataccattcgccatgacaaactcgatattacacgttcagcttttaccgcaggcgaaaccgttgccgattacctt

SEQ ID NO: 808301 - DNA, 75 bp, synthetic construct
  source 1..75: mol_type = other DNA
cacacattttctttgacgatcaggatgtgcatttgatcgcggctgcaaaggtagtaccttctggtaaagtacctt

SEQ ID NO: 808302 - DNA, 75 bp, synthetic construct
  source 1..75: mol_type = other DNA
caaatcagggacaacgagttagaaagccataaacggttacttgatggtaaagctatctcctatgaagaatatatg

SEQ ID NO: 808303 - DNA, 75 bp, synthetic construct
  source 1..75: mol_type = other DNA
tttgccatcaccggacttgtagtagcgctatttgtgctgctggttgcctggaacattttcgccagtaacaaaatc

SEQ ID NO: 808304 - DNA, 75 bp, synthetic construct
  source 1..75: mol_type = other DNA
acgctttccggtgttcttatgccggagataacaggtggcaggatgtcgttgctggcactggagcagatggcagaa

SEQ ID NO: 808305 - DNA, 75 bp, synthetic construct
  source 1..75: mol_type = other DNA
ctaatagcttagactatcaggattcaaataacccgtttgctaaatttaatgcaatcgatcaagagaaatcggaag

SEQ ID NO: 808306 - DNA, 75 bp, synthetic construct
  source 1..75: mol_type = other DNA
gtgaacgagtagttgatcagcgtactaacggtgatttgaaagacttcttatctgctcaaaaatcgggcggtggca

SEQ ID NO: 808307 - DNA, 75 bp, synthetic construct
  source 1..75: mol_type = other DNA
acagggaatggatggttttaaatccaatcaattaaccagcggatttgattatcaagactcaaataatccgtttgc

SEQ ID NO: 808308 - DNA, 75 bp, synthetic construct
  source 1..75: mol_type = other DNA
ttctttttccagagtacctgtcagttctgccacgaagaaagtcaaactctccagtttatgcagaattactattct

SEQ ID NO: 808309 - DNA, 75 bp, synthetic construct
  source 1..75: mol_type = other DNA
cgcgatgatgccgggcgtgctggcgcgtcttaagccatttaatcttccctgtattgtggtggatgacggcagcga

SEQ ID NO: 808310 - DNA, 75 bp, synthetic construct
  source 1..75: mol_type = other DNA
tgaccttaattcgcctggcagaaaacgcaggcaaaggcgcggcggtaatgcgcggcttacaggcggcggcagacg

SEQ ID NO: 808311 - DNA, 75 bp, synthetic construct
  source 1..75: mol_type = other DNA
gcccggtgaatctgattttcgccctgcgccagcacggcaagctgcatattcactgcgaaacctttgccgacccgc

SEQ ID NO: 808312 - DNA, 75 bp, synthetic construct
  source 1..75: mol_type = other DNA
tgccgttccaggctcgttatattgctctcgggcagtcagtagctggtactgcaaacgctgatgcgaccttcaaag

SEQ ID NO: 808313 - DNA, 75 bp, synthetic construct
  source 1..75: mol_type = other DNA
gtaatgacgatacattagcgctgcagagttcagcggcaggctctgcccaaaatgtcggtatccaaattttggacc

SEQ ID NO: 808314 - DNA, 75 bp, synthetic construct
  source 1..75: mol_type = other DNA
tctgctggagtccgtttatgggccagcctgcgcccttcccacaggggccgtttattctcgcctctattttgcgct

SEQ ID NO: 808315 - DNA, 75 bp, synthetic construct
  source 1..75: mol_type = other DNA
actaacaccattccgttccaggcgcgttattatgcaaccggtgtcgcaacccctggcgcagctaatgcggatgcg

SEQ ID NO: 808316 - DNA, 75 bp, synthetic construct
  source 1..75: mol_type = other DNA
gactggtgccctgaatatgagtctgcatgagctggaaaaaatgctggagcgtctgctggctcagaaacaacgtaa

SEQ ID NO: 808317 - DNA, 75 bp, synthetic construct
  source 1..75: mol_type = other DNA
tctgccggcaaagttcaccgacttcggtggccatcttgtcgacggtctgattaacggtatcaaaaacaaatggga

SEQ ID NO: 808318 - DNA, 75 bp, synthetic construct
  source 1..75: mol_type = other DNA
gcgtttaccgcgctgctttacccggtggtgggcgtctactggctcaccgctgctcgtgcacgtaaagcgtcgcaa

SEQ ID NO: 808319 - DNA, 75 bp, synthetic construct
  source 1..75: mol_type = other DNA
gaagacatccctaaactgctggcactcgctgaacagcagcctgcggcgctgatctccggccagccgatttacgat

SEQ ID NO: 808320 - DNA, 75 bp, synthetic construct
  source 1..75: mol_type = other DNA
caatatcaccgtgacggcaggggcgacggaggcgttatacgcggcgataaccgcattggtgcgcaatggcgacga

SEQ ID NO: 808321 - DNA, 75 bp, synthetic construct
  source 1..75: mol_type = other DNA
atgctaaaaatgaactgaatacgaatattgatagtgcgaagaatgacgcgatcaattcgtcgaacagttacactg

SEQ ID NO: 808322 - DNA, 75 bp, synthetic construct
  source 1..75: mol_type = other DNA
tgaacctgattgatgatgcctcattccagtccacgttagatgttaagcgtcaatataccatcggcgaagatggcg

SEQ ID NO: 808323 - DNA, 75 bp, synthetic construct
  source 1..75: mol_type = other DNA
aatcagacgctgtcccccatctttgacagggaaaaagagcagcagcgactgcagcaggcgcaactcattggtgag

SEQ ID NO: 808324 - DNA, 75 bp, synthetic construct
  source 1..75: mol_type = other DNA
aggccgcgaaggaagcaaccggcgaaacacttcctgctaatgcaacagagaaacaacgtcaggaatatcttgcga

SEQ ID NO: 808325 - DNA, 75 bp, synthetic construct
  source 1..75: mol_type = other DNA
caaagatgttagtgctgctgtctttgtttattactggggtccatgcaaatgaagagcaggcccttatcaaagaca

SEQ ID NO: 808326 - DNA, 75 bp, synthetic construct
  source 1..75: mol_type = other DNA
gttccaggatttctctgtacctaatgcgcagattattgatcaatttaaaatccgtgaagttccaactattttcct

SEQ ID NO: 808327 - DNA, 75 bp, synthetic construct
  source 1..75: mol_type = other DNA
ttctttttccagagtacttgccagttttgccacgaagagagccaaatacttcaatttatgcagaactattattcg

SEQ ID NO: 808328 - DNA, 75 bp, synthetic construct
  source 1..75: mol_type = other DNA
gtggactggcttcttgatgtttttgctacctggctctatggcttaaaagtaatcgcgataacgttagcggtcatc

SEQ ID NO: 808329 - DNA, 75 bp, synthetic construct
  source 1..75: mol_type = other DNA
gtgggagatgactgctttgaccagcgcgatcgcctgattgaagcgctgaataaacccggtcccggcacgcttgtc

SEQ ID NO: 808330 - DNA, 75 bp, synthetic construct
  source 1..75: mol_type = other DNA
ttaatatttcggattgtgttgatggtgtaaaaggcatagccaatagtgcgctgtcaaactcacagaatgctcaaa

SEQ ID NO: 808331 - DNA, 75 bp, synthetic construct
  source 1..75: mol_type = other DNA
gcagcgaagatggtatcgatccggtttcactggcggctctgacacgtaaggtcggacgcaaggtgcgttacgtca

SEQ ID NO: 808332 - DNA, 75 bp, synthetic construct
  source 1..75: mol_type = other DNA
ttcactggcggccctgacgcgcaaggttgggcgcaaagtacgttacgttatcgtcctgcgcggacaaatcgtgac

SEQ ID NO: 808333 - DNA, 75 bp, synthetic construct
  source 1..75: mol_type = other DNA
atctggtcgagcgtaaagatctgattcagatcccggtatacccattcgaacgcgaatggacgcacttcaccagca

SEQ ID NO: 808334 - DNA, 75 bp, synthetic construct
  source 1..75: mol_type = other DNA
cagtaggatgggcagcacttcaatatgttcagcccgggaccattgttggcgtaggcacggggtcaaccgccgcac

SEQ ID NO: 808335 - DNA, 75 bp, synthetic construct
  source 1..75: mol_type = other DNA
actgtctgatgatctcaacgtcagcctgaatgtcatgacacagcatcgtatggagatcatgcagcagttcggcga

SEQ ID NO: 808336 - DNA, 75 bp, synthetic construct
  source 1..75: mol_type = other DNA
atcgcatgtcagtacgcgaacttcgccaggccctgcgcgaagcgcgcgaaaccaacgcagcacaacagcgcgtac

SEQ ID NO: 808337 - DNA, 75 bp, synthetic construct
  source 1..75: mol_type = other DNA
gcgtctcgactgggggcagatctacaaattgcagccactttctgatgaagataagttgcaggcgctacagttacg

SEQ ID NO: 808338 - DNA, 75 bp, synthetic construct
  source 1..75: mol_type = other DNA
ccagtcgtcgcggcattgaaccacacctcgttggcgcgaccatccttcatgcagttgtgcgcaacggtcgtttgc

SEQ ID NO: 808339 - DNA, 75 bp, synthetic construct
  source 1..75: mol_type = other DNA
tttgaccttgatgccgcaccatcaggtaacgatatccctgcctggctgaccgagccggaacctgaaatcaactgc

SEQ ID NO: 808340 - DNA, 75 bp, synthetic construct
  source 1..75: mol_type = other DNA
ctgatgaagaggtgaagaagctgcgggcggaagtgacggcattagcggttgaggcggaatctgctgtcgccgtcc

SEQ ID NO: 808341 - DNA, 75 bp, synthetic construct
  source 1..75: mol_type = other DNA
gtctgggtgcgcagtttggtggtaaatacttcgctcatgacatccgcgtgattcgcctgccacgtcacggcgcat

SEQ ID NO: 808342 - DNA, 75 bp, synthetic construct
  source 1..75: mol_type = other DNA
gcgcagcaagcctttcacgatgcttctttcatgctccgcccggcacaccagaaacaggttgcggctattcttcac

SEQ ID NO: 808343 - DNA, 75 bp, synthetic construct
  source 1..75: mol_type = other DNA
tgggcgggaatgcgctgggcgatgacctggccgggcaaatgaaagcggtaaaaattacttctcaggcaattgttg

SEQ ID NO: 808344 - DNA, 75 bp, synthetic construct
  source 1..75: mol_type = other DNA
agcgtggcgatgcggtgggctatgtcccgctggataaacgcacctggtttgttccggaagtgctcgacggtatgg

SEQ ID NO: 808345 - DNA, 75 bp, synthetic construct
  source 1..75: mol_type = other DNA
gtgcatgaggctcggttttatatgtcgcagagcgccgaggcaatgctggaagcgggtaagcgcctggtgattctg

SEQ ID NO: 808346 - DNA, 75 bp, synthetic construct
  source 1..75: mol_type = other DNA
taactccgacatcgcggcaaaaggcgttctgccaacctgtcaggataccggcaccgcgattattgttggtaaaaa

SEQ ID NO: 808347 - DNA, 75 bp, synthetic construct
  source 1..75: mol_type = other DNA
tggataacaagctggtggtaggcgtagggaatatctatgccagcgaatctctgtttgcggcggggatccatccgg

SEQ ID NO: 808348 - DNA, 75 bp, synthetic construct
  source 1..75: mol_type = other DNA
tgtcacttcatcatctacgaatacgatcatgaggcactaattggtataagcatcgtgtctgcgggtggaattttg

SEQ ID NO: 808349 - DNA, 75 bp, synthetic construct
  source 1..75: mol_type = other DNA
ggaaataaattacgactttttattcgatttaattgaaaagtctgattatgacggttgggtagggtgcgaatataa

SEQ ID NO: 808350 - DNA, 75 bp, synthetic construct
  source 1..75: mol_type = other DNA
agtaataacctggagcatacgctgcataatttacctgcgggtgactgggcggcgggtgaacgcggaatagcctgt

SEQ ID NO: 808351 - DNA, 75 bp, synthetic construct
  source 1..75: mol_type = other DNA
agtcattttttttatcagccttggtttaagcttgattattgatcggttgtttgttaatccaattctcagactgaa

SEQ ID NO: 808352 - DNA, 75 bp, synthetic construct
  source 1..75: mol_type = other DNA
agaccagcctgttaaggtctggaaagcgtcggtcattgatacgacgaccaaagctgcgccaggaacgatccttga

SEQ ID NO: 808353 - DNA, 75 bp, synthetic construct
  source 1..75: mol_type = other DNA
acacctgactttgcagcgcgtcatctcgacgcgctgttgtcttctggtcataacgtcgttggcgtgttcacccag

SEQ ID NO: 808354 - DNA, 75 bp, synthetic construct
  source 1..75: mol_type = other DNA
gctgatctcaaaaatggccagcaagttgcagtgatcccttatatcgcctgtcagcaatgcccggcgtgtaaaagt

SEQ ID NO: 808355 - DNA, 75 bp, synthetic construct
  source 1..75: mol_type = other DNA
tggcggttttagtgagtatttaagcgtgccagaggcgaacattttgcccgcagatggcattgacccgcaggcggc

SEQ ID NO: 808356 - DNA, 75 bp, synthetic construct
  source 1..75: mol_type = other DNA
gtgtgcggtacgccgattgtggcgacgaaacatgcgcagcgggcaacgttttattgtcggcagtgccagaagtaa

SEQ ID NO: 808357 - DNA, 75 bp, synthetic construct
  source 1..75: mol_type = other DNA
tggaaaccgatattaatgccagtaaaacccggcaacagcgcaatgatgtggcgggaaaaatgaaaattattgagg

SEQ ID NO: 808358 - DNA, 75 bp, synthetic construct
  source 1..75: mol_type = other DNA
tggaaaccgatattaatgccagtaaaacccggcagcagcgcaacgatgcggcgggaaaaatgaaaattattgagg

SEQ ID NO: 808359 - DNA, 75 bp, synthetic construct
  source 1..75: mol_type = other DNA
ccaaacaagggagcgctcttgggattaatttgcctttctcggcgtcaatggcgtaccgcaggccgacggttcggt

SEQ ID NO: 808360 - DNA, 75 bp, synthetic construct
  source 1..75: mol_type = other DNA
gatgctggtcgcggctatcgtcgtgttgttgcttcaccaaaaccggttgatatcattgaaaaagaaacggtgaaa

SEQ ID NO: 808361 - DNA, 75 bp, synthetic construct
  source 1..75: mol_type = other DNA
tttttattgcaatatgcttaattaccggttgctcaacatcagggaaccaaaagattaaaaatgaaactgctcaaa

SEQ ID NO: 808362 - DNA, 75 bp, synthetic construct
  source 1..75: mol_type = other DNA
tctaagttaggtgagcctgatacaagaaccacactcgatgacggaaatgagcagtggaaatatttcatgtctaac

SEQ ID NO: 808363 - DNA, 75 bp, synthetic construct
  source 1..75: mol_type = other DNA
tctatttatcgtaatctagaaaatattaatttaatagaatcactgtggtattttttaaattatgcatggcgagcc

SEQ ID NO: 808364 - DNA, 75 bp, synthetic construct
  source 1..75: mol_type = other DNA
ttgatgctctggaagtgggcatgcccgactgttccggcgtggcgctgggcgttgaccgcctggtgatgttggcgc

SEQ ID NO: 808365 - DNA, 75 bp, synthetic construct
  source 1..75: mol_type = other DNA
agggagcgtctgatgcagccggttttatggctcggatggataccgttctgcagatgtatacagagaaaggaatac

SEQ ID NO: 808366 - DNA, 75 bp, synthetic construct
  source 1..75: mol_type = other DNA
attgccgccgggatattcacactcagtctggtattgattgcatttatgcttccgtctgtggcgcgggtagaactg

SEQ ID NO: 808367 - DNA, 75 bp, synthetic construct
  source 1..75: mol_type = other DNA
tgggaaatttatagaaaatatgaaaatttgagctttttatatagctgctattgtttttccctttatgcgttcaga

SEQ ID NO: 808368 - DNA, 75 bp, synthetic construct
  source 1..75: mol_type = other DNA
acggtaagtattttaaaagagttacagtcaaatgatgacaggataaaaatatttattaatgctgacaacaaagga

SEQ ID NO: 808369 - DNA, 75 bp, synthetic construct
  source 1..75: mol_type = other DNA
atgagcatagttgaaaaagattctcgagtaaaattatatagaaatagcatcaattctggcgcagctatctcacgg

SEQ ID NO: 808370 - DNA, 75 bp, synthetic construct
  source 1..75: mol_type = other DNA
aaccatcaacccggatatctgggcagaagagatcgcctggctgaaagcgcaacaaactgaaaaagcggtagcctg

SEQ ID NO: 808371 - DNA, 75 bp, synthetic construct
  source 1..75: mol_type = other DNA
tgacgaaatgcagcgctgcgaacaactaggactctctttgctcaacttccaccccggtagtcatctgatgcagat

SEQ ID NO: 808372 - DNA, 75 bp, synthetic construct
  source 1..75: mol_type = other DNA
ctggggctttctttgctcaacttccaccctggcagccatctgatgcagatttcagaagaggattgccttgcgcgt

SEQ ID NO: 808373 - DNA, 75 bp, synthetic construct
  source 1..75: mol_type = other DNA
tattgaactggcgaatggtttccatgagttgacggatgctcatgaacagcaacaacgcttcgaacaggataaccg

SEQ ID NO: 808374 - DNA, 75 bp, synthetic construct
  source 1..75: mol_type = other DNA
ctttcccccggtcttcacttcctgatcccgtttatggaccgcataggtcaacggatcaacatgatggaaaccgtc

SEQ ID NO: 808375 - DNA, 75 bp, synthetic construct
  source 1..75: mol_type = other DNA
gtggaaaaactccccgttcaagagtgggatatcccactgcctgcggtggttaccccgtcgaaagtctgggagtgg

SEQ ID NO: 808376 - DNA, 75 bp, synthetic construct
  source 1..75: mol_type = other DNA
cagttttacacccttttagtgctggtaacttactgttcctgaattaccatccgcaaagcgaattggtgatgaaca

SEQ ID NO: 808377 - DNA, 75 bp, synthetic construct
  source 1..75: mol_type = other DNA
acatgtatcgtaaacgtaaataatactgacttaatagctacagagcttgtgaactcagtgttgaatacatcctga

SEQ ID NO: 808378 - DNA, 75 bp, synthetic construct
  source 1..75: mol_type = other DNA
gctggatgccatagataaagctatcgcaaaagaaatagagctgtccaccgctcgccgggagagcgatacatcaga

SEQ ID NO: 808379 - DNA, 75 bp, synthetic construct
  source 1..75: mol_type = other DNA
acactgctaccggcgctgccggggaagggtgtaacgaaaaaagcagccttcattactccaggagtcagaaggctg

SEQ ID NO: 808380 - DNA, 75 bp, synthetic construct
  source 1..75: mol_type = other DNA
gcgcatcggatgctgccggttttatggcgcggatggataccgttctgcagatgtacggaaataaggtttcgcaat

SEQ ID NO: 808381 - DNA, 75 bp, synthetic construct
  source 1..75: mol_type = other DNA
attgaacgactctggaatccgcagggcatggccgcgcagcctgcacaaccggcagcaggcacgtcagccagaaca

SEQ ID NO: 808382 - DNA, 75 bp, synthetic construct
  source 1..75: mol_type = other DNA
ctgtcacaattagccgatgaagctaaagaattgaatgatgattctaccgtcgatttcctgcgcgatctggaaaaa

SEQ ID NO: 808383 - DNA, 75 bp, synthetic construct
  source 1..75: mol_type = other DNA
gtggaaaaactccccgtagaagaatgggacatcccgctgcctgcggtggttacgccatcgaaaatctgggagtgg

SEQ ID NO: 808384 - DNA, 75 bp, synthetic construct
  source 1..75: mol_type = other DNA
catatacagtaagcaatggcctggtaaagcagcgattggtcgcctgaaaggtgaggaacaggcgcaatataattt

SEQ ID NO: 808385 - DNA, 75 bp, synthetic construct
  source 1..75: mol_type = other DNA
ggataccgttctgcagatgtacggaggggaaaaaaggtgcgaaataagcaggtggtgttactcattgccggaata

SEQ ID NO: 808386 - DNA, 75 bp, synthetic construct
  source 1..75: mol_type = other DNA
tgatgttgatcgccatcctggcgctggtttttgttcactacaatgcgactggcgtctggaccttcaactatgaag

SEQ ID NO: 808387 - DNA, 75 bp, synthetic construct
  source 1..75: mol_type = other DNA
cctgaccggtctgctcggcgtgctggcggtactttgctcgtggaatgagatcgaaaaatatcagggcttcttcca

SEQ ID NO: 808388 - DNA, 75 bp, synthetic construct
  source 1..75: mol_type = other DNA
ggtgtctggaccttcaactatgaagagctgctgaatacgccaatgtccagtggtgtggaatatctgttgatgctg

SEQ ID NO: 808389 - DNA, 75 bp, synthetic construct
  source 1..75: mol_type = other DNA
taaattgttcatgcaagctatggggttgtttactagcctttcaaatagtggtgaaggtggggagttaatattgtt

SEQ ID NO: 808390 - DNA, 75 bp, synthetic construct
  source 1..75: mol_type = other DNA
gctgaccggtctgctcggtgtgctggcggtactctgttcgtggaaagagatcgaaaaatatcagggcttcttcca

SEQ ID NO: 808391 - DNA, 75 bp, synthetic construct
  source 1..75: mol_type = other DNA
cgattctggatacctcgcactccgcgattggcaatatccagcagtggtttgttgattccgttactactacaaggc

SEQ ID NO: 808392 - DNA, 75 bp, synthetic construct
  source 1..75: mol_type = other DNA
ggatgacacggcggaagtggcggagtatgtgcgtcgcattcatgaggctgagttactggaccatatcggtattga

SEQ ID NO: 808393 - DNA, 75 bp, synthetic construct
  source 1..75: mol_type = other DNA
cgcggtggtcagacggaagagtgaggcatcccggtttcaggattttgtggcctgtggagacatgacgattgtccg

SEQ ID NO: 808394 - DNA, 75 bp, synthetic construct
  source 1..75: mol_type = other DNA
actggcggcaggcggcgggttacacgattctggccccgactgtggaggtggcggccaacgccttcaaccctgcca

SEQ ID NO: 808395 - DNA, 75 bp, synthetic construct
  source 1..75: mol_type = other DNA
tcaccatgggattgacgctggcgctgtcgctgcaactgtggttgcagggcggttattcactgacgcaatccgccg

SEQ ID NO: 808396 - DNA, 75 bp, synthetic construct
  source 1..75: mol_type = other DNA
aggttccggcacgggtgacagccgcctccggcgaacgttttctgaaagtggagtttataccggcagaggaggaca

SEQ ID NO: 808397 - DNA, 75 bp, synthetic construct
  source 1..75: mol_type = other DNA
gccggttgtttgacccgtccgtcagactggcggcggatatccgggataacgaagggcgggtgtttgcccgtcagg

SEQ ID NO: 808398 - DNA, 75 bp, synthetic construct
  source 1..75: mol_type = other DNA
ggcgatatacacagtgtcgaatgcctatctccgcgtgctcttatggtggaagttaaggaggggccatttgaccct

SEQ ID NO: 808399 - DNA, 75 bp, synthetic construct
  source 1..75: mol_type = other DNA
agttgggtatgacgttcccggaactgtatgacgacagccatccggaagccctggctcgcaatacccagaaaattt

SEQ ID NO: 808400 - DNA, 75 bp, synthetic construct
  source 1..75: mol_type = other DNA
gtaatcagagcagcaggaaaaagaagaacagtagcaggaacaaaaacatcccaggaaacaggagaatcacaggga

SEQ ID NO: 808401 - DNA, 75 bp, synthetic construct
  source 1..75: mol_type = other DNA
tcagtgatcgctatccgctgcatctttctggtggtcagcaacaacgtgttgctatcgcccgtgcgctgatgatgg

SEQ ID NO: 808402 - DNA, 75 bp, synthetic construct
  source 1..75: mol_type = other DNA
cttgatgtctctgaccagactcccatcaacagtattattttctcccatgaagacggtacgcgactgggcgtggag

SEQ ID NO: 808403 - DNA, 75 bp, synthetic construct
  source 1..75: mol_type = other DNA
ggagagcgcgtgcgcgaaacggcgttgccccttacatcccggcggccttttgccgggatgccaggagcgcaggcc

SEQ ID NO: 808404 - DNA, 75 bp, synthetic construct
  source 1..75: mol_type = other DNA
gcctgccaggggttttcgcgcgggctgacaggcggcctccaccgcctgcccctgtatcacctgtttctgctgccc

SEQ ID NO: 808405 - DNA, 75 bp, synthetic construct
  source 1..75: mol_type = other DNA
ggtttcatgtcaaaacacgccaatgtggaaattggtcttgccctgcgctctgaccgctgggcgggggctgatttc

SEQ ID NO: 808406 - DNA, 75 bp, synthetic construct
  source 1..75: mol_type = other DNA
atcatgatgactgcactgttactgaactggcggcaggcggcgggttacacgattctggccccgacagtggaggtg

SEQ ID NO: 808407 - DNA, 75 bp, synthetic construct
  source 1..75: mol_type = other DNA
gtgaaatgccggggcctgatcgccctgattgtatgggggcagagtgtcgcagcggccgatcttggtacctggggc

SEQ ID NO: 808408 - DNA, 75 bp, synthetic construct
  source 1..75: mol_type = other DNA
ggtagttaaaaaacacccgaactggattaaagtcgtcattgctgcccatgatgaggcaagtacatggatagaaaa

SEQ ID NO: 808409 - DNA, 75 bp, synthetic construct
  source 1..75: mol_type = other DNA
caggctgaatcgctgggattaaacgtggaatggcacgaaattacttccggagccaaacaggctcaggcgctagct

SEQ ID NO: 808410 - DNA, 75 bp, synthetic construct
  source 1..75: mol_type = other DNA
aactgcagtacgcccgggatgtgcgcgacggcaaaattcatgatccgcactttctgccggtgatatttgagcatc

SEQ ID NO: 808411 - DNA, 75 bp, synthetic construct
  source 1..75: mol_type = other DNA
tggtctcaccggaatgcgcgagcgcgtaacggcgttgggcggcaccttgaccatatcctgtctgcacggcacgcg

SEQ ID NO: 808412 - DNA, 75 bp, synthetic construct
  source 1..75: mol_type = other DNA
ccgcctgggcgggccccgcggatttctgggagcagcagggcaggcgcgtcagccctggacgatatccctggagcc

SEQ ID NO: 808413 - DNA, 75 bp, synthetic construct
  source 1..75: mol_type = other DNA
gttagccgtattaatgatgcggaactgctggataaaattggcattgacccttctggtgtcggtcagatccttgat

SEQ ID NO: 808414 - DNA, 75 bp, synthetic construct
  source 1..75: mol_type = other DNA
ctgaatgggaatctcttctggttgcaaagcaatcaatcatcccaccaccaattttcccagaccaggcagaacagg

SEQ ID NO: 808415 - DNA, 75 bp, synthetic construct
  source 1..75: mol_type = other DNA
gtgacggtggggattgacggcggagggctggatgatctgctggggatgtatgtgattgggcgtgaccgggagacc

SEQ ID NO: 808416 - DNA, 75 bp, synthetic construct
  source 1..75: mol_type = other DNA
ttacgtgaagccataggcggccttgcctcccgcccggaagggtttgtggtgtatacgaccacccagtcgaatgaa

SEQ ID NO: 808417 - DNA, 75 bp, synthetic construct
  source 1..75: mol_type = other DNA
tcacctgctgatggaaaacctcgccatggttaacccgaatctcggttattcggtggatgaggcttttctgtaccg

SEQ ID NO: 808418 - DNA, 75 bp, synthetic construct
  source 1..75: mol_type = other DNA
aagcagagctggacaggcgggatgaggaaatccgacgtaccctgaccatgctgaaagagagcatcacaacccttg

SEQ ID NO: 808419 - DNA, 75 bp, synthetic construct
  source 1..75: mol_type = other DNA
tacctgccttgctggcgttaggattaatatcaacaaatgctaatgcatctgatccttgcgcttcggtactttgct

SEQ ID NO: 808420 - DNA, 75 bp, synthetic construct
  source 1..75: mol_type = other DNA
catcccttttatatttttactacatgtgatgtttgtttattttagcgttaacaaatataactttaacatataccc

SEQ ID NO: 808421 - DNA, 75 bp, synthetic construct
  source 1..75: mol_type = other DNA
gcggattgatccgactaccgaaagcacgctttgcccagtccccctggcagtggaccttatctgcactgaaaatcc

SEQ ID NO: 808422 - DNA, 75 bp, synthetic construct
  source 1..75: mol_type = other DNA
acggaataatgacacagaaaagcgtcactgaatcctcttccacaccgcatccagcaaagaaaaaaacgtcgtctg

SEQ ID NO: 808423 - DNA, 75 bp, synthetic construct
  source 1..75: mol_type = other DNA
tacgggaaggtgacaggctggggaatatcaccatcacccggattgaaccgtccagccgctcagtcatcacctctg

SEQ ID NO: 808424 - DNA, 75 bp, synthetic construct
  source 1..75: mol_type = other DNA
cgggctaagtacatgctcggcaaaatcgacagcaagtttgtcaggtcagaacaagcaatcgagttccgtgagcaa

SEQ ID NO: 808425 - DNA, 75 bp, synthetic construct
  source 1..75: mol_type = other DNA
ggaaagagtcgtggaacgcgctgttgctaacgttaactggtggcctgacgctggcccccatttgcctggtgttct

SEQ ID NO: 808426 - DNA, 75 bp, synthetic construct
  source 1..75: mol_type = other DNA
gggaaatggagctggaagggcgcggtattgtcagccatctcgaatggcgaatcgatgaatcagcgttaagcgaaa

SEQ ID NO: 808427 - DNA, 75 bp, synthetic construct
  source 1..75: mol_type = other DNA
aaaaggaactggcgcgcaatcagcatctggctgaacggttgctggaaaccgaagagagcgtgcgccgtgatgtgg

SEQ ID NO: 808428 - DNA, 75 bp, synthetic construct
  source 1..75: mol_type = other DNA
accctggagcaggctatccgttcactgatgcgagaaatggagctggaaggtcgcggcattgtcagtcatctcgaa

SEQ ID NO: 808429 - DNA, 75 bp, synthetic construct
  source 1..75: mol_type = other DNA
ggtatggaaacgagtcgtggaacgcgctgttattgaccttaactggcggtctgacgctggctcctgtttgtctcg

SEQ ID NO: 808430 - DNA, 75 bp, synthetic construct
  source 1..75: mol_type = other DNA
gagcaggccatccgctcactgatgcgggaaatggagctggaagggcgcggcattgtcagccatctcgaatggcga

SEQ ID NO: 808431 - DNA, 75 bp, synthetic construct
  source 1..75: mol_type = other DNA
ttaaggagcgggtgatccgtaacagtctgcggccccctgccgtgcccggtatcggacgcaccgagaaatacggca

SEQ ID NO: 808432 - DNA, 75 bp, synthetic construct
  source 1..75: mol_type = other DNA
ttaaggagcgggtgatccgaaacagtctgcggccccctgccgtgcccggtatcggacgcacggagaaatacggta

SEQ ID NO: 808433 - DNA, 75 bp, synthetic construct
  source 1..75: mol_type = other DNA
ttaaggagcgggtgatccgaaacagtctgcggccccctgccgtgcccggtatcggacgcactgagaaatacggga

SEQ ID NO: 808434 - DNA, 75 bp, synthetic construct
  source 1..75: mol_type = other DNA
atgaagacgttgttctcccgcttaattaccgttattgcctgcttttttatcttctctgccgcatggttttgcctg

SEQ ID NO: 808435 - DNA, 75 bp, synthetic construct
  source 1..75: mol_type = other DNA
atgagatgccgggggctgattgccctgctgatatggggacagagtgtggtcgcagccgatcttggcacctggggc

SEQ ID NO: 808436 - DNA, 75 bp, synthetic construct
  source 1..75: mol_type = other DNA
cgggataacgaagggcgggtgtttgcccgtcagggtgaagtgatgaatccgctgcagtatgtgccttttaaccag

SEQ ID NO: 808437 - DNA, 75 bp, synthetic construct
  source 1..75: mol_type = other DNA
cagccactatacaagcaggcagttccggcagttactgtggcgttaccagatcaaacagagtctgagtcgacgagg

SEQ ID NO: 808438 - DNA, 75 bp, synthetic construct
  source 1..75: mol_type = other DNA
atgtcgttctcgccggacagcaggcttaccatgaaagcactggaaatggcatgggaaacccgtggtaagcccgtc

SEQ ID NO: 808439 - DNA, 75 bp, synthetic construct
  source 1..75: mol_type = other DNA
aaacgaggtggtcgtgaacatgtcactatcccgaatcaccttgggcggcagttcgcagtgacagagccaaatcag

SEQ ID NO: 808440 - DNA, 75 bp, synthetic construct
  source 1..75: mol_type = other DNA
atggacatcgtaaaaaaaccgcttaatgcggttttttttacgtcaggaaagcaggggagaatgctgctagttggg

SEQ ID NO: 808441 - DNA, 75 bp, synthetic construct
  source 1..75: mol_type = other DNA
ttcgcggttaccgcgccggatcaggcctggtgcggcgatgtgacctatatctggacgggaaaatgctgggcttat

SEQ ID NO: 808442 - DNA, 75 bp, synthetic construct
  source 1..75: mol_type = other DNA
gccataacggactatatcgttggatattacagcgcactaagaccgcacgaatataatggtgggttaccaccaaac

SEQ ID NO: 808443 - DNA, 75 bp, synthetic construct
  source 1..75: mol_type = other DNA
tcaacaagttacagtgatggcgatggtggcgctatcgatatcactgataataatacggaaaccattcacccatca

SEQ ID NO: 808444 - DNA, 75 bp, synthetic construct
  source 1..75: mol_type = other DNA
cggcggagattatcattacacagcagcggggcaactggctcagcatgaagacacttctacggtgcagcttagcgg

SEQ ID NO: 808445 - DNA, 75 bp, synthetic construct
  source 1..75: mol_type = other DNA
cgacgccagaccctgatcccacgccggatcctgacccaacccccgacccggcccctacgcctgccaacaagccag

SEQ ID NO: 808446 - DNA, 75 bp, synthetic construct
  source 1..75: mol_type = other DNA
ttgctgaaggcagtctcagagttattaggtgggtcaccaggcctgaaaggacgtcaaattgccaaggagctgggg

SEQ ID NO: 808447 - DNA, 75 bp, synthetic construct
  source 1..75: mol_type = other DNA
caccatgaaagcactggaaatggcatgggaaacccgtggtaagcccgtcggggtgatgttccacagcgatcaagg

SEQ ID NO: 808448 - DNA, 75 bp, synthetic construct
  source 1..75: mol_type = other DNA
cgcactaagaccgcacgaatataacggtgggttccccccaaacgaatcggaaaatcgatactggaaaaactctaa

SEQ ID NO: 808449 - DNA, 75 bp, synthetic construct
  source 1..75: mol_type = other DNA
ctttcaggtgaatgccacgaatgaagagctaaccgtggagtgtacgatgaatgccgctaaatgccgcatggcatc

SEQ ID NO: 808450 - DNA, 75 bp, synthetic construct
  source 1..75: mol_type = other DNA
actcgccgggcgcgccagcacactctcgctggaagggcttatggcgttacatcccgatttggtcgttgattgcgg

SEQ ID NO: 808451 - DNA, 75 bp, synthetic construct
  source 1..75: mol_type = other DNA
accatagatgaaaccagaagttggttaagcaggttcacgcgatggtacaacctggaacacaagcacagcggtatt

SEQ ID NO: 808452 - DNA, 75 bp, synthetic construct
  source 1..75: mol_type = other DNA
cgcccaggctgcagatgcggccattgtcggtatcggcgccatcaaccagaaagatgaggccaccattattcgctc

SEQ ID NO: 808453 - DNA, 75 bp, synthetic construct
  source 1..75: mol_type = other DNA
ttgagttctaaatgcaatgaagaaacccgcagggatctttttgagcgaattaactctggtagtgacatattgaaa

SEQ ID NO: 808454 - DNA, 75 bp, synthetic construct
  source 1..75: mol_type = other DNA
accgactcgttaaccgggctaccgaatcggcgggcgatttttgaaaaacctgacgacgctgttttctctcgcccg

SEQ ID NO: 808455 - DNA, 75 bp, synthetic construct
  source 1..75: mol_type = other DNA
tcagaagtaatgagcgcaacgtctgcaattaatggtttgtatattgggcagaccagttataatggattgaactca

SEQ ID NO: 808456 - DNA, 75 bp, synthetic construct
  source 1..75: mol_type = other DNA
ccgtattttgcagtgtggtcgtgttcttgttgaaggttcgttcagtggtaaatgtacgcaattacactcccggac

SEQ ID NO: 808457 - DNA, 75 bp, synthetic construct
  source 1..75: mol_type = other DNA
agcgaccttattatccatggcgcggtattgtcgccgtattcccgtattaacagagaccgcagcccgacagggaga

SEQ ID NO: 808458 - DNA, 75 bp, synthetic construct
  source 1..75: mol_type = other DNA
agccttttcagggaacaattccgttccgtgttttgcagcgtggtcgtgttcttgttgaaggttcgttcagtggta

SEQ ID NO: 808459 - DNA, 75 bp, synthetic construct
  source 1..75: mol_type = other DNA
tgaaaccgaattacgtcgtcgctttgacctgaacaatgtgcgggtcatcccgggacttcccggcgcggatgtctg

SEQ ID NO: 808460 - DNA, 75 bp, synthetic construct
  source 1..75: mol_type = other DNA
atatgaagtggatgccacggatgaagaggtaactgttgagtgtgatagcgggatagtctcagctacattgcttca

SEQ ID NO: 808461 - DNA, 75 bp, synthetic construct
  source 1..75: mol_type = other DNA
aatgtacgcaattacactcccggacctttcaggtgaatgccacgaatgaagagctaaccgtggagtgtacgatga

SEQ ID NO: 808462 - DNA, 75 bp, synthetic construct
  source 1..75: mol_type = other DNA
cacgcagtggggcggactgatggctgacagcagcgggcagcatcaggatgagggtagcacattgactaaaacggg

SEQ ID NO: 808463 - DNA, 75 bp, synthetic construct
  source 1..75: mol_type = other DNA
tcggcctgttggtagatgacgccatcgtggtggtggaaaacgtcgaacgtattatgagtgaggaaggactcactc

SEQ ID NO: 808464 - DNA, 75 bp, synthetic construct
  source 1..75: mol_type = other DNA
cgatgtcgtatcaggagcggctttccggcgcgcaggctccggcgctgtacgccatttccttgctggtggtattcc

SEQ ID NO: 808465 - DNA, 75 bp, synthetic construct
  source 1..75: mol_type = other DNA
ctcaggcgctgggcgttgctattgacgatattaacgacacgctgcaaaccgcgtggggttcgagctatgtaaatg

SEQ ID NO: 808466 - DNA, 75 bp, synthetic construct
  source 1..75: mol_type = other DNA
tccaactatcgccgtgccggtggtgttgatgggcactttctccgtgctttacgccttcggttacagcgtcaacac

SEQ ID NO: 808467 - DNA, 75 bp, synthetic construct
  source 1..75: mol_type = other DNA
cagttacccagcggttctactcaacagcaaaccctgaaagttgtcgagcaagtggagaagtatttcttcactcac

SEQ ID NO: 808468 - DNA, 75 bp, synthetic construct
  source 1..75: mol_type = other DNA
aatacccggatctcgcgccgccgaacgtgcgagtgaccgctaactatccaggcgcttcggctcagacgctggaaa

SEQ ID NO: 808469 - DNA, 75 bp, synthetic construct
  source 1..75: mol_type = other DNA
cacgcaataacggactatatcgttggatattacagcgcactaagaccgcacgaatataatggtgggttaccgcca

SEQ ID NO: 808470 - DNA, 75 bp, synthetic construct
  source 1..75: mol_type = other DNA
atgcctcctgatacccagctttgccggggtgaaaggggatgtccgccattgtctgttatttcatggatgagttat

SEQ ID NO: 808471 - DNA, 75 bp, synthetic construct
  source 1..75: mol_type = other DNA
ttaacgcccagtcactgctgcaaacaccagaacagttccgcgatatcaccttgcgggtgaatcaggacggctcag

SEQ ID NO: 808472 - DNA, 75 bp, synthetic construct
  source 1..75: mol_type = other DNA
agccagcctccgggctgggggtaaaactggcctccggcgcgaacgaaatggcaacagcggagctggtactcaatc

SEQ ID NO: 808473 - DNA, 75 bp, synthetic construct
  source 1..75: mol_type = other DNA
ttgttctcgacctgttcgcaagaaaaccagtgggctgggccatgtcgttctcgccggacagcaggcttaccatga

SEQ ID NO: 808474 - DNA, 75 bp, synthetic construct
  source 1..75: mol_type = other DNA
attgccggaaccggaagtatcagcaaaaccggcgcaggcgaactggtgcttaatgcggataataataattttacc

SEQ ID NO: 808475 - DNA, 75 bp, synthetic construct
  source 1..75: mol_type = other DNA
atttgctaaagaaaactcaacgctgaatcttactgatgttattttttccggtaacgtcgcaggcggctatggtgg

SEQ ID NO: 808476 - DNA, 75 bp, synthetic construct
  source 1..75: mol_type = other DNA
attatcacgatccccatgcgacgaaaattgaagaagatggcagcactatcagtgacgaagcggtaaaacaacggg

SEQ ID NO: 808477 - DNA, 75 bp, synthetic construct
  source 1..75: mol_type = other DNA
cgtgacgttgacaggtgagcttaataccaaccttgaaactgacagcctgacctatcttgccgacgtgacggttaa

SEQ ID NO: 808478 - DNA, 75 bp, synthetic construct
  source 1..75: mol_type = other DNA
gtgtcgaagaaggcaccctgcaaggcgatgttgcggatatccttccttatgcttcgtcgctgtgggtcggtgacg

SEQ ID NO: 808479 - DNA, 75 bp, synthetic construct
  source 1..75: mol_type = other DNA
tccaggacgatccgcagtcgatcgtgttaaacggcggcgtgcttgatctctctgatttcgccacctggcagagcg

SEQ ID NO: 808480 - DNA, 75 bp, synthetic construct
  source 1..75: mol_type = other DNA
gctgggagccattggtggctacagcgataaccagggggacagccgctcgaatatgaccggaacccgcgccgataa

SEQ ID NO: 808481 - DNA, 75 bp, synthetic construct
  source 1..75: mol_type = other DNA
gggttggtgacggggcaacgttcgagactggcgcggatcaggatattcagtctattgatgccagttccagtggca

SEQ ID NO: 808482 - DNA, 75 bp, synthetic construct
  source 1..75: mol_type = other DNA
ggcggtacgttgtttctcgacagcgaattaaacggcgatgactcggcaagcgaccaactggtgttgaacggcaat

SEQ ID NO: 808483 - DNA, 75 bp, synthetic construct
  source 1..75: mol_type = other DNA
atgcgggggatcagcgcgtaaagctggcgaataacaacggttatctcggtaatacgcaaatcgcctccggtacgc

SEQ ID NO: 808484 - DNA, 75 bp, synthetic construct
  source 1..75: mol_type = other DNA
ggatgcttgggattgttggtggctacagcgataaccagggcgacagccgctcgaatatgaccggaactcgcgccg

SEQ ID NO: 808485 - DNA, 75 bp, synthetic construct
  source 1..75: mol_type = other DNA
ccgccgcctgatccagacccgactccagatcctgatcccacgccggatcccgacccaacccccgacccggaacct

SEQ ID NO: 808486 - DNA, 75 bp, synthetic construct
  source 1..75: mol_type = other DNA
ggcggtacgttgttgctcgacagcgaattaaacggcgatgactcggtaagcgaccggttggtgttgaacggtaat

SEQ ID NO: 808487 - DNA, 75 bp, synthetic construct
  source 1..75: mol_type = other DNA
gcgctgggcggcaccttgaccatttcctgtctgcacggcacgcgtgtcagcgtttctctacctcaacgctatgtc

SEQ ID NO: 808488 - DNA, 75 bp, synthetic construct
  source 1..75: mol_type = other DNA
gtgaaacatgccgatgccagtgcggttacgttgcaaggctggcagcaggacgaacggttgatgctggtgattgaa

SEQ ID NO: 808489 - DNA, 75 bp, synthetic construct
  source 1..75: mol_type = other DNA
ttgcgtgaacttaaccagtcgctgcaaaaagaactggcgcgcaatcagcatctggctgaacgtttgttagaaact

SEQ ID NO: 808490 - DNA, 75 bp, synthetic construct
  source 1..75: mol_type = other DNA
agctggatctcaccgttcctgaaatgacggcattactgggtggtctgcgggtaatggatattaatacaaataatt

SEQ ID NO: 808491 - DNA, 75 bp, synthetic construct
  source 1..75: mol_type = other DNA
gtgaaacatgccgatgccagcgcggtcaccctgcaaggctggcagcaggatgagcggttaatgctggtgattgaa

SEQ ID NO: 808492 - DNA, 75 bp, synthetic construct
  source 1..75: mol_type = other DNA
gctgactttaactggcggcctgacgctggccccgatatgtctggtgttctggcactatctcgccaataacacctg

SEQ ID NO: 808493 - DNA, 75 bp, synthetic construct
  source 1..75: mol_type = other DNA
aaagccggtgtaaaactggaaattccgttcactccggggagaaccgatgcatctcaggaacagactgatataacc

SEQ ID NO: 808494 - DNA, 75 bp, synthetic construct
  source 1..75: mol_type = other DNA
ttgctgtgatcccttatgttgcctgtcagcaatgcccggcgtgtaaaagcgggcgtaccaattgctgtgaaaaaa

SEQ ID NO: 808495 - DNA, 75 bp, synthetic construct
  source 1..75: mol_type = other DNA
gcagtctgaccacgggaaaccggagcaaatcagtgaaagtgacaatcaatgccctgacgccagtgctgcgtggat

SEQ ID NO: 808496 - DNA, 75 bp, synthetic construct
  source 1..75: mol_type = other DNA
ggcgcaccttgctgttacagggggcagcgctgacggcggcggcgttgttgcagtcgctgccctggctttggcacg

SEQ ID NO: 808497 - DNA, 75 bp, synthetic construct
  source 1..75: mol_type = other DNA
actggccagtgctgctgggcgcggaatggctgctgatttattggttaatgcaggcggttggtttaagccatttct

SEQ ID NO: 808498 - DNA, 75 bp, synthetic construct
  source 1..75: mol_type = other DNA
ttatgggcctttctttattcgcatggcatggcatggtgccggaacataccggacatatgatggccgtggcggagc

SEQ ID NO: 808499 - DNA, 75 bp, synthetic construct
  source 1..75: mol_type = other DNA
attcttctctcggggtatttactgagactccgggtacgctgaataatcatttttttgtgaatcttctggatatgg

SEQ ID NO: 808500 - DNA, 75 bp, synthetic construct
  source 1..75: mol_type = other DNA
ttgctgttcctgaattaccatccgcaaagcgaactggtgatgaacaggttgaagatccatgagccaaaactggat

SEQ ID NO: 808501 - DNA, 75 bp, synthetic construct
  source 1..75: mol_type = other DNA
aaagcctggctagagcgtaagcaacgagagaacgaagaaagaaaactccttagtgagttgaaatggcttagagag

SEQ ID NO: 808502 - DNA, 75 bp, synthetic construct
  source 1..75: mol_type = other DNA
ttcccctgacgggtatgttgattgcctcggcgatcggtattttcagttgtccattggttggatggttatcagatc

SEQ ID NO: 808503 - DNA, 75 bp, synthetic construct
  source 1..75: mol_type = other DNA
acggaaataactattccatcatcaaaggtaaagtaagctcagtacttctgttattaaaaatgctgcagattaatc

SEQ ID NO: 808504 - DNA, 75 bp, synthetic construct
  source 1..75: mol_type = other DNA
gagattggttatacgcccggtgttgaaaccaccaccggtccacttggacaaggtttggcgaacgccgtcggactg

SEQ ID NO: 808505 - DNA, 75 bp, synthetic construct
  source 1..75: mol_type = other DNA
tctttttctgacattatttatctgcctgttatgccttaaacatgagcgaataaaaaaagaaactatcaggcaaaa

SEQ ID NO: 808506 - DNA, 75 bp, synthetic construct
  source 1..75: mol_type = other DNA
aaaaactgcttgggcttcagcctcgacatttcgtgtaactgattatcgaggaggaaataatggtgcccgtatccg

SEQ ID NO: 808507 - DNA, 75 bp, synthetic construct
  source 1..75: mol_type = other DNA
atgatgctcaagataagtttattcatgattttgctaatgcttggaataaagtcatgaataatgaccgatttgatt

SEQ ID NO: 808508 - DNA, 75 bp, synthetic construct
  source 1..75: mol_type = other DNA
ctgggatttgccggtggaagagaagatgactgggagtccgacttggtatactggggaccaggtaacaaacctcta

SEQ ID NO: 808509 - DNA, 75 bp, synthetic construct
  source 1..75: mol_type = other DNA
aggactggtatttgcaccgctgttttatccagacagcgatccttttataggtcttatagccgcctttgcgacctt

SEQ ID NO: 808510 - DNA, 75 bp, synthetic construct
  source 1..75: mol_type = other DNA
gtgaagggctttccggtaaagccatgagacgtgtcgttatgggcagtttcgcaggcgcgttaatggaatggtatg

SEQ ID NO: 808511 - DNA, 75 bp, synthetic construct
  source 1..75: mol_type = other DNA
tgcggttattgaccgttttccgcaactgatggcgattgtcgtccccgtctatccttccagcggccggatttgcgt

SEQ ID NO: 808512 - DNA, 75 bp, synthetic construct
  source 1..75: mol_type = other DNA
tgaactggataaagaactggagcgtcgtggacacagcttctgccgctacgcagacgactgcaacatctacgtaag

SEQ ID NO: 808513 - DNA, 75 bp, synthetic construct
  source 1..75: mol_type = other DNA
gaaggcacccagcttatccaccgtatcgaatgtccttacggtccgctggtagaagagaaactcgatgcctggctg

SEQ ID NO: 808514 - DNA, 75 bp, synthetic construct
  source 1..75: mol_type = other DNA
ccggttgcggtctgtacaaatgcgccgacggttacatcgtgatggaactggtaggcattacccaaattgaagaat

SEQ ID NO: 808515 - DNA, 75 bp, synthetic construct
  source 1..75: mol_type = other DNA
ggagtacaccaatcttccggcctataacaccatcgcccaggccttcagtggttacctgattcagaacggtgatgt

SEQ ID NO: 808516 - DNA, 75 bp, synthetic construct
  source 1..75: mol_type = other DNA
acgacgtgctgaaaaaactgttcgatgatgcaggtctgattctggtcgacttcaagctggagtttggtctgtaca

SEQ ID NO: 808517 - DNA, 75 bp, synthetic construct
  source 1..75: mol_type = other DNA
ctcttgctccgggcagtaatgagaagaaaaaactttatctcctgacggacctgattactgcgctgctggcaaaaa

SEQ ID NO: 808518 - DNA, 75 bp, synthetic construct
  source 1..75: mol_type = other DNA
atgtggcccgtgaatcgatcacccagtggcaaacaatggatggtcgcacctgcaaagggccaaacgtgatgccga

SEQ ID NO: 808519 - DNA, 75 bp, synthetic construct
  source 1..75: mol_type = other DNA
catcgccatgtatgaagtgatgctgcgtatgggccagtacttcatgatggattacttcaacggcggcgaaatgtg

SEQ ID NO: 808520 - DNA, 75 bp, synthetic construct
  source 1..75: mol_type = other DNA
atgaaagacaacaacagcaccgacgaaaaaaaaccggctacccgtctccgccgcatcggtgatatcgggataaat

SEQ ID NO: 808521 - DNA, 75 bp, synthetic construct
  source 1..75: mol_type = other DNA
ccattatggcaggctacaccgatcgagccgcaacaaggggtaaaactggaaggcgcatccagcaatttcatttcg

SEQ ID NO: 808522 - DNA, 75 bp, synthetic construct
  source 1..75: mol_type = other DNA
cgctgactacttctccggcctgaccgccaccaccgcagcgctggcagcactgcataaagtgcgcgaaaccggcaa

SEQ ID NO: 808523 - DNA, 75 bp, synthetic construct
  source 1..75: mol_type = other DNA
ctggcgcggaatgccctcacatggcatggacacggctgccattttgaaaaatatcggctacagcgaaaacgacat

SEQ ID NO: 808524 - DNA, 75 bp, synthetic construct
  source 1..75: mol_type = other DNA
gatgaaggccgcgaagcgtttctgaaattaatggaaaccaccgatatcttcatcgaagccagtaaaggcccagcc

SEQ ID NO: 808525 - DNA, 75 bp, synthetic construct
  source 1..75: mol_type = other DNA
tgctgaacattaatcaactggcggcgatagcgggaatatgtcgtcagactgcggcggcaaggctgaaaaacatcc

SEQ ID NO: 808526 - DNA, 75 bp, synthetic construct
  source 1..75: mol_type = other DNA
gtggcgaattttgtgacttcgctgaccgaaaacaaatacatgttcctgttgattatcaacatattgctgctgacg

SEQ ID NO: 808527 - DNA, 75 bp, synthetic construct
  source 1..75: mol_type = other DNA
tttgctcctatatttggctcaattattggtgttttaattattgccttcaatttcgaatggttgaagatttggctt

SEQ ID NO: 808528 - DNA, 75 bp, synthetic construct
  source 1..75: mol_type = other DNA
tgacgcgacttctgtcaacattgattgatgagcacactcgctcaagaatggatatgaaaggccgcgagttgccct

SEQ ID NO: 808529 - DNA, 75 bp, synthetic construct
  source 1..75: mol_type = other DNA
taacttcctgaagcgatacagaaaagaggaaatcgtggacgggacgctgttgcaaatcattctggatgaagtccg

SEQ ID NO: 808530 - DNA, 75 bp, synthetic construct
  source 1..75: mol_type = other DNA
ccaccggacgtgatgcagaccttcttcccgaatatcccggtggccacaccgaccaccttcctggtcaacgtcaac

SEQ ID NO: 808531 - DNA, 75 bp, synthetic construct
  source 1..75: mol_type = other DNA
tgaagtcgctctgggatccgcggggtatttccggtactgaaacggcttccccgcagagcgacactccccaggcgg

SEQ ID NO: 808532 - DNA, 75 bp, synthetic construct
  source 1..75: mol_type = other DNA
cagcctggcgctgggttccattacaagaagatgccgcagacgagagcaaaaatgactgggatgaagaactctcaa

SEQ ID NO: 808533 - DNA, 75 bp, synthetic construct
  source 1..75: mol_type = other DNA
atgaggcattccgggatttggcccaggcatgggcatctgcccgcgatgatttacggcatgcaaggcaacgtctga

SEQ ID NO: 808534 - DNA, 75 bp, synthetic construct
  source 1..75: mol_type = other DNA
agaaagctgcacgcgaaaaaatggaacaacaaaaaaacggatctcttaaggaaggtgcgaacaagttcctgatat

SEQ ID NO: 808535 - DNA, 75 bp, synthetic construct
  source 1..75: mol_type = other DNA
cgacgcgtcagtgctgatttcaacaggcattgacgccacgcaaaccaatcacggtcgccaacatctcgacgaaac

SEQ ID NO: 808536 - DNA, 75 bp, synthetic construct
  source 1..75: mol_type = other DNA
atacagaagtatttttgttaccgtttcatctgtttagcgatccgacggttgcccgaagtttactgcgttatcgct

SEQ ID NO: 808537 - DNA, 75 bp, synthetic construct
  source 1..75: mol_type = other DNA
ttcatcttcagccatttaaacctgatgacagcaaccaaccgcaggtggtgattctggccgacggacaaatcacgc

SEQ ID NO: 808538 - DNA, 75 bp, synthetic construct
  source 1..75: mol_type = other DNA
gaaggcatcgccatttttaattccctgaaaaatcagggggcgaccattaccgtgtatgtggatggcgttgccgcc

SEQ ID NO: 808539 - DNA, 75 bp, synthetic construct
  source 1..75: mol_type = other DNA
cgggaagcctgcggctggaaccgcagggaaaaatatcgttgtggttgactcgggcaagaaaggtgcctggaacaa

SEQ ID NO: 808540 - DNA, 75 bp, synthetic construct
  source 1..75: mol_type = other DNA
ttcgacaaagtgaaaacagtaataatcagccggaaattaacggttctggtagtaccgaactaatttcttggccta

SEQ ID NO: 808541 - DNA, 75 bp, synthetic construct
  source 1..75: mol_type = other DNA
cctgcgcacgaaagaacgccagaaacagctggttgcagaaggcaagagccagaccatgaacagtcgtcacctgac

SEQ ID NO: 808542 - DNA, 75 bp, synthetic construct
  source 1..75: mol_type = other DNA
atgacagcttttattctgcaggagaatgttttgaaaaaaaataaacaaaaagccgcagcatcggcaaatgcagcg

SEQ ID NO: 808543 - DNA, 75 bp, synthetic construct
  source 1..75: mol_type = other DNA
gtcgcagcgaaaagaatctggagggcgttaaaccacagctggttgctgtcgttcgccgtgcccttgagctgacgg

SEQ ID NO: 808544 - DNA, 75 bp, synthetic construct
  source 1..75: mol_type = other DNA
agtgacatcctgattaatacacaggcgctgaataacgacaacggactgatttcagctgctgccggaacgggcagg

SEQ ID NO: 808545 - DNA, 75 bp, synthetic construct
  source 1..75: mol_type = other DNA
gcacaacagctggcaggagatacaccgctgaaagaggttcggccggggatctatactgcaaagctggagaacgga

SEQ ID NO: 808546 - DNA, 75 bp, synthetic construct
  source 1..75: mol_type = other DNA
catattggtccttcatgggggacagagtataaagtcaagactaatggaaagattgaggtttcgggtggaataggt

SEQ ID NO: 808547 - DNA, 75 bp, synthetic construct
  source 1..75: mol_type = other DNA
aactgagcgagacagagaagcagactgtttcgacactggcaacggttgctgccggcctggccggtggtctggtgg

SEQ ID NO: 808548 - DNA, 75 bp, synthetic construct
  source 1..75: mol_type = other DNA
ggatctgtatttagcgatggtgctaatattaagtcccaatctggaactgctctcggggcatacgcaggtggatat

SEQ ID NO: 808549 - DNA, 75 bp, synthetic construct
  source 1..75: mol_type = other DNA
gccggacataatctgaacgccacgggcagcagtgtggccggggataaccgtgtctccctggctgccggaaataac

SEQ ID NO: 808550 - DNA, 75 bp, synthetic construct
  source 1..75: mol_type = other DNA
atgccgggtaaattcagattcagccgtcgcagtgaaaaaaatctggagggtgtcaaacctcagctggttgctgta

SEQ ID NO: 808551 - DNA, 75 bp, synthetic construct
  source 1..75: mol_type = other DNA
cagcagttgctgctgagcggcatgagctgcgccagctgtgtcacccgcgtacaaaatgcgttgcaaagcgtaccg

SEQ ID NO: 808552 - DNA, 75 bp, synthetic construct
  source 1..75: mol_type = other DNA
tgtcagaccacagctggttgctgtagttcgccgtgcccttgaactgacggaggttgattttggtattacggaagg

SEQ ID NO: 808553 - DNA, 75 bp, synthetic construct
  source 1..75: mol_type = other DNA
ctgtttgaacagggaaaaagtatgacaatgaacagtcgccatctgaccggagatgcaattgatgtggtggcttac

SEQ ID NO: 808554 - DNA, 75 bp, synthetic construct
  source 1..75: mol_type = other DNA
cgtctggcggcggcgctggagcaaggttccagccacccgctggcacgggcgatcctcgataaagcaggtgatatg

SEQ ID NO: 808555 - DNA, 75 bp, synthetic construct
  source 1..75: mol_type = other DNA
atgtcacaaactatcgacctgaccctagacggcctgtcctgcggtcactgcgttaaacgcgtgaaagaaagtctc

SEQ ID NO: 808556 - DNA, 75 bp, synthetic construct
  source 1..75: mol_type = other DNA
gattgaagccgatatttcagctcaggcatcacaaggcgcaacgccggtgttactggccgttgatggcaaagcggt

SEQ ID NO: 808557 - DNA, 75 bp, synthetic construct
  source 1..75: mol_type = other DNA
cgtcaaaccacagctggttgctgtcgttcgccgtgcccttgagctgacggaggttgatttcggtattacggaagg

SEQ ID NO: 808558 - DNA, 75 bp, synthetic construct
  source 1..75: mol_type = other DNA
agaccatgaacagccgccacctgaccggtgatgcggtggatgttgtggcctacattggtagccaggtgtcatggg

SEQ ID NO: 808559 - DNA, 75 bp, synthetic construct
  source 1..75: mol_type = other DNA
cctctgtacgagaaaatcgcgcaggcatttaagcaggctgccgcagagctgggaactgccatcgaatggggcggg

SEQ ID NO: 808560 - DNA, 75 bp, synthetic construct
  source 1..75: mol_type = other DNA
acaggcatttaagcaggctgccgcagagctgggagtcgccatcgaatggggcggggactggaaaacgctgaagga

SEQ ID NO: 808561 - DNA, 75 bp, synthetic construct
  source 1..75: mol_type = other DNA
gagctgggtgtcgccatcgaatggggcggagactggaaaacgctgaaagacgggcctcatttccagttaaaacgt

SEQ ID NO: 808562 - DNA, 75 bp, synthetic construct
  source 1..75: mol_type = other DNA
gcaaggttatcccttttatcgtttcacaatttgccggtgctttctgcgccgcggcattagtttacgggctttact

SEQ ID NO: 808563 - DNA, 75 bp, synthetic construct
  source 1..75: mol_type = other DNA
accggacagcatacacaactgaacggtgcggtgattgcgtccacggcaacggcagataaaaacaggctggatacc

SEQ ID NO: 808564 - DNA, 75 bp, synthetic construct
  source 1..75: mol_type = other DNA
aagaattattatctagaaattatattgcttgtaatggtatcccgtctgggtggatgccgggtctggcaacgaaat

SEQ ID NO: 808565 - DNA, 75 bp, synthetic construct
  source 1..75: mol_type = other DNA
accagtaacagcctgactcgctgggaaggtaaatccgctaccgttgggcaacttatgggaatgcgatacaaaggc

SEQ ID NO: 808566 - DNA, 75 bp, synthetic construct
  source 1..75: mol_type = other DNA
gtggcaaaccgctggcaacgcgctgatgtatggcctgccctggagcagttgcttaaacagggtccaatggacatt

SEQ ID NO: 808567 - DNA, 75 bp, synthetic construct
  source 1..75: mol_type = other DNA
gcgcggacatcgatcaggctctggaatatgcgctggcgctcaattgcgaacaagttcatgtgatggcaggagtag

SEQ ID NO: 808568 - DNA, 75 bp, synthetic construct
  source 1..75: mol_type = other DNA
atattctatgctggaacagaccaattttgcattctccgtccaagagtttgaggggaaagtagtcagtgttttacg

SEQ ID NO: 808569 - DNA, 75 bp, synthetic construct
  source 1..75: mol_type = other DNA
aatatcatattatgaacggttacagttataaggaggcacttgcactgacatcaattgatcttggtcatggtgatg

SEQ ID NO: 808570 - DNA, 75 bp, synthetic construct
  source 1..75: mol_type = other DNA
acgactggaaggtcaaagtaggccgttttgaagcctacgatatgttcccgctgaatcaggatacctttgttgaac

SEQ ID NO: 808571 - DNA, 75 bp, synthetic construct
  source 1..75: mol_type = other DNA
ttcgctggattttcagcacagccactggcgaatatacacggttcagtgaatattgatgatgcattattatttttt

SEQ ID NO: 808572 - DNA, 75 bp, synthetic construct
  source 1..75: mol_type = other DNA
gtaaatctggtcagttagtaatgataaattccggggtaaatagtgattcagtgaatgaacggtgggaccttaatg

SEQ ID NO: 808573 - DNA, 75 bp, synthetic construct
  source 1..75: mol_type = other DNA
aggcactggcccgactaaaagggctaaaaaaagatgctactcaggtgagcaaaaacctgctcccgcgtcttgaaa

SEQ ID NO: 808574 - DNA, 75 bp, synthetic construct
  source 1..75: mol_type = other DNA
cattggtctggtgatcccggaactgagcggcaaactgaaaggtcatgcgcaacgcgtgccggtgaaaacaggttc

SEQ ID NO: 808575 - DNA, 75 bp, synthetic construct
  source 1..75: mol_type = other DNA
tatatctatatgatgaaagagggccgcgggcgctctaacgctggcggtaatttcctcgtcagcaaacaactcgat

SEQ ID NO: 808576 - DNA, 75 bp, synthetic construct
  source 1..75: mol_type = other DNA
caactagatactttccatgcgcaaaaagtagatggcaacctgacgcatttaatccgcgactacgccgggaaatat

SEQ ID NO: 808577 - DNA, 75 bp, synthetic construct
  source 1..75: mol_type = other DNA
gcgcaggctggcggtgaaacggtgaaagtggatgccggtcgtcatctgacactgaccagtgagcaggacagtgac

SEQ ID NO: 808578 - DNA, 75 bp, synthetic construct
  source 1..75: mol_type = other DNA
tccgtcagtgacatgacgctggatgtacaggacggggtactcagtaaccgtaacacgaaaacacggggtggtatc

SEQ ID NO: 808579 - DNA, 75 bp, synthetic construct
  source 1..75: mol_type = other DNA
ggcttctattacatcagaaatgacggggactgaactacaaaaagtcattaatgataaattgaagaaaggagagcg

SEQ ID NO: 808580 - DNA, 75 bp, synthetic construct
  source 1..75: mol_type = other DNA
cgggcagaaccattttgaacgtaccagtatcgacagtgtggccggcgtgtatgtgcagaacgaccagggaagact

SEQ ID NO: 808581 - DNA, 75 bp, synthetic construct
  source 1..75: mol_type = other DNA
cggttgaaaacaatatgctgaacgtgatagccactgaaacagcggctaatacggcagcagcaatagctggtgcta

SEQ ID NO: 808582 - DNA, 75 bp, synthetic construct
  source 1..75: mol_type = other DNA
cctgatactgaagcaatggcaaaggctcaaagcattatgaatacttgggggtatcataaatctaatgcaagtatt

SEQ ID NO: 808583 - DNA, 75 bp, synthetic construct
  source 1..75: mol_type = other DNA
ttactcaggttaaagacttggctaacgatggctaccgtgctattcaggtaaccaccggtgctaaaaaagctaacc

SEQ ID NO: 808584 - DNA, 75 bp, synthetic construct
  source 1..75: mol_type = other DNA
ttccagcatgaattcgggattgatgttgagtgctatgtgttaaatgatgataacaaaactgccgttattagccag

SEQ ID NO: 808585 - DNA, 75 bp, synthetic construct
  source 1..75: mol_type = other DNA
gcctggaccgacggcaaaaatctgcgtgaactgggtatttatcgacaaactggctgctacattgaacgtattcga

SEQ ID NO: 808586 - DNA, 75 bp, synthetic construct
  source 1..75: mol_type = other DNA
ctcgacactggcaacggttgctgccggcctggccggtggtctagtgggcaactcgggggcttcagcggtagccgg

SEQ ID NO: 808587 - DNA, 75 bp, synthetic construct
  source 1..75: mol_type = other DNA
ccattcagttatgtggatgcgataatggctggggtgacagctgcagctacaaccggtaaaggcatcatcgtctca

SEQ ID NO: 808588 - DNA, 75 bp, synthetic construct
  source 1..75: mol_type = other DNA
gatattgccagaacggaaggacagatagccggtgagaaagcgaagcgggacccggcagcactgaatcaggcccgt

SEQ ID NO: 808589 - DNA, 75 bp, synthetic construct
  source 1..75: mol_type = other DNA
aggtagtagagaattaggacatcaatgtcttggtttaaccatagggcgcgttggttttcgtaacacaagaggcca

SEQ ID NO: 808590 - DNA, 75 bp, synthetic construct
  source 1..75: mol_type = other DNA
aaggattgttgatctaaggggtaatacatatataacagatcaagtttttgatggaaataagtatataaatggcta

SEQ ID NO: 808591 - DNA, 75 bp, synthetic construct
  source 1..75: mol_type = other DNA
actattaaaaacacgacaattcagggagccgtccttgattattacgacaatattctttatacgctgcaaaatgtc

SEQ ID NO: 808592 - DNA, 75 bp, synthetic construct
  source 1..75: mol_type = other DNA
ggaagtgaaacagtctcttgggcaggcgattaaagtatccggggacagcaatatcaccaccacagccatcaccaa

SEQ ID NO: 808593 - DNA, 75 bp, synthetic construct
  source 1..75: mol_type = other DNA
catctgaagcatcaggagacggaagtattgttgtgggctcaaggagcacagctgcaggagacctgtctgtgtccc

SEQ ID NO: 808594 - DNA, 75 bp, synthetic construct
  source 1..75: mol_type = other DNA
acaggtaatgcatgtaaaaacaacatcaagaaatcagcctggtattatcattgattcaacccatgatattgtcac

SEQ ID NO: 808595 - DNA, 75 bp, synthetic construct
  source 1..75: mol_type = other DNA
atgcagggacgttggggtagtacaactgatatgaaggatatgcgtagtttgcgcgagataagagaagcggtgatt

SEQ ID NO: 808596 - DNA, 75 bp, synthetic construct
  source 1..75: mol_type = other DNA
tgtcacaacccgtctttgccagatatatgaatgtcagtaaaaacctgatatctgactgggaacgcggagtgaaac

SEQ ID NO: 808597 - DNA, 75 bp, synthetic construct
  source 1..75: mol_type = other DNA
tcagactgggaacgtggtgtaaaacggccgggaggtgccgctcttcgccttctttcagtcgtagagaaaaacggg

SEQ ID NO: 808598 - DNA, 75 bp, synthetic construct
  source 1..75: mol_type = other DNA
cgccagagcctttcaggtagtacacaggtctggaatgttgctgacgggcaatggcttattttttcttctatgaaa

SEQ ID NO: 808599 - DNA, 75 bp, synthetic construct
  source 1..75: mol_type = other DNA
ctggtttagttttagcgtttagcgtatcggcggcgcagtatgaagatggtaaacagtacaccactctggaaaaac

SEQ ID NO: 808600 - DNA, 75 bp, synthetic construct
  source 1..75: mol_type = other DNA
gctgaaattaatgccgtgtcagagccggtggtggagaaaacagggccagaaaacaaagaatcgaccacaggaata

SEQ ID NO: 808601 - DNA, 75 bp, synthetic construct
  source 1..75: mol_type = other DNA
gactattgaatacaagggctttgccggaaataacgcagcatcagtagtatctgttggtgataccgataaagagcg

SEQ ID NO: 808602 - DNA, 75 bp, synthetic construct
  source 1..75: mol_type = other DNA
aatgaggatgtaacagacagtaacattcgtgttgatgcaaatgaaaagggagatggtcttctcgtccggatgacc

SEQ ID NO: 808603 - DNA, 75 bp, synthetic construct
  source 1..75: mol_type = other DNA
tcttgatactatcactgataatgaaaagtttaatgctgctagcatcgcagacttgaaaactgcaattgatggtgt

SEQ ID NO: 808604 - DNA, 75 bp, synthetic construct
  source 1..75: mol_type = other DNA
actgggtgatgacattgatgtcattaatcctagatggatacttgaggataaagacggaaattcggcaacgattaa

SEQ ID NO: 808605 - DNA, 75 bp, synthetic construct
  source 1..75: mol_type = other DNA
gtgatgacttaacgccgttgcatggtcatcaatatggaaaatataccatatcaaatgagtacaagtcatctgagg

SEQ ID NO: 808606 - DNA, 75 bp, synthetic construct
  source 1..75: mol_type = other DNA
cattgctgtcaatgcaggtaaaggtggattaacagatgttgccggtaccacgaagacacgtctgacttatacccc

SEQ ID NO: 808607 - DNA, 75 bp, synthetic construct
  source 1..75: mol_type = other DNA
gaaatagggacgacaaaagaagttaaaaaagacgatgataataaacttaatttcgatcataactctcctatagct

SEQ ID NO: 808608 - DNA, 75 bp, synthetic construct
  source 1..75: mol_type = other DNA
gcggtaagacaacggtgaatggtggtgtacataaaacaccggataatgtggctgatgcagtgaatatgctgaacc

SEQ ID NO: 808609 - DNA, 75 bp, synthetic construct
  source 1..75: mol_type = other DNA
ggatgcggttaacgggagccagctggcatctgcagccagaattgctggcggtgataatgttgtctggaaagacgg

SEQ ID NO: 808610 - DNA, 75 bp, synthetic construct
  source 1..75: mol_type = other DNA
gagataactgcagaaacagccagttttacgcctgatggaaatggtggtaacgggaagattacagtaagcaatggt

SEQ ID NO: 808611 - DNA, 75 bp, synthetic construct
  source 1..75: mol_type = other DNA
ataggaactactaatgaggttccagaagattccgataagggtatttatttcgctcatacttctccagttgctttg

SEQ ID NO: 808612 - DNA, 75 bp, synthetic construct
  source 1..75: mol_type = other DNA
ggtttcaaaacgggtgaatctattgctataggtgccaaggcaaaagctaccaaggagcagtctattgctatcggc

SEQ ID NO: 808613 - DNA, 75 bp, synthetic construct
  source 1..75: mol_type = other DNA
agggaacagaaacactgataaaacccggtgatatggttacgctgaaagccggtaaaaatctcagcgtgaaacaaa

SEQ ID NO: 808614 - DNA, 75 bp, synthetic construct
  source 1..75: mol_type = other DNA
cggtattgatgtccggccggggcgcggtaacgtactgggtgatgaggaaaacgccgccctgtggcgtcagtggca

SEQ ID NO: 808615 - DNA, 75 bp, synthetic construct
  source 1..75: mol_type = other DNA
tatggcattgctagaacagctcaaacagatcagtggtgataaagaactcctatttccgggggatcatgatgcaac

SEQ ID NO: 808616 - DNA, 75 bp, synthetic construct
  source 1..75: mol_type = other DNA
gagttcaatttcgagaaagctatatggcgcataccggcaaagcgggaggaaattaaaggcgtacgttattcttac

SEQ ID NO: 808617 - DNA, 75 bp, synthetic construct
  source 1..75: mol_type = other DNA
gacgcagtcaccggcgtcctggtgggatttatcactttttactccctgcgctggatagccggaatagttctgcgt

SEQ ID NO: 808618 - DNA, 75 bp, synthetic construct
  source 1..75: mol_type = other DNA
ttctattgtaaagcagttgagagaactaagcggaagctacgatgttgtgtttccgaatgaaagaaacaccaaagg

SEQ ID NO: 808619 - DNA, 75 bp, synthetic construct
  source 1..75: mol_type = other DNA
caagtaaccttacttggagcgaagatcatagccgtcgtgttctgctgacacttgagcagtatattttcccctcga

SEQ ID NO: 808620 - DNA, 75 bp, synthetic construct
  source 1..75: mol_type = other DNA
agaccgcaaagccgaaagagaaagcctataaaatggctgatggaggcggcttgtatcttgaagtctcccctaaag

SEQ ID NO: 808621 - DNA, 75 bp, synthetic construct
  source 1..75: mol_type = other DNA
gtcaggtacttgagctgcatggcatcagtcacggttcggccggagcaagaagcatcgccacaatggcaacccaaa

SEQ ID NO: 808622 - DNA, 75 bp, synthetic construct
  source 1..75: mol_type = other DNA
ctaaacaactcatgcgggcgcaaggtatgagccaggattcattggcggatctcatggggatcacaaagggcggct

SEQ ID NO: 808623 - DNA, 75 bp, synthetic construct
  source 1..75: mol_type = other DNA
gccggagcgagaaaaatctggagggtgttaaaccacagctggttgctgtagttcgccgtgcccttgaactgacgg

SEQ ID NO: 808624 - DNA, 75 bp, synthetic construct
  source 1..75: mol_type = other DNA
gatgtttttactcagggcgtattgtggacaggactgattgcggcatgggcgcagcagagtccgctcacgctacaa

SEQ ID NO: 808625 - DNA, 75 bp, synthetic construct
  source 1..75: mol_type = other DNA
accccgcggcgatgcccatactggcaaccgtcggaggattgatcatcggcagttttttgaatgtggtgatttggc

SEQ ID NO: 808626 - DNA, 75 bp, synthetic construct
  source 1..75: mol_type = other DNA
agttttttgaatgtggtgatttggcgttaccccatcatgctgcgccaacaaatggcggagtttcatggtgaaatg

SEQ ID NO: 808627 - DNA, 75 bp, synthetic construct
  source 1..75: mol_type = other DNA
ttgcttttggggtatatccaaccaccagcttacaagacgccagagaaaaacgagacgacgccaggaagctgctat

SEQ ID NO: 808628 - DNA, 75 bp, synthetic construct
  source 1..75: mol_type = other DNA
ttttgagggtaatgacggagaggttattcataaaaaactgaatgaaaaactgaccatcaaaggtggggctggtga

SEQ ID NO: 808629 - DNA, 75 bp, synthetic construct
  source 1..75: mol_type = other DNA
accgggtggaagagcttaaccgggatatccgtggtgttggcgcatcggctgcggccatgagcgggatacctcagg

SEQ ID NO: 808630 - DNA, 75 bp, synthetic construct
  source 1..75: mol_type = other DNA
aaaatggtgttgttatcagtggtgtggcaagtggattgaataataaggacctggcaggcctgaaagcagacgatg

SEQ ID NO: 808631 - DNA, 75 bp, synthetic construct
  source 1..75: mol_type = other DNA
ggtgaacagtggttacggagtgcaggctgatgacggaaacaaagtcacccgtccactgggagaacatgtcagtat

SEQ ID NO: 808632 - DNA, 75 bp, synthetic construct
  source 1..75: mol_type = other DNA
ccattgcattaggcactgatgcagtggtttcggttggcgacaataacgttgctctgggggccggttcacaggata

SEQ ID NO: 808633 - DNA, 75 bp, synthetic construct
  source 1..75: mol_type = other DNA
tctgtggcaattggtgctgacaccaacgccactggctgggggagcgtcgtcatcgggggcgacgatatacggccc

SEQ ID NO: 808634 - DNA, 75 bp, synthetic construct
  source 1..75: mol_type = other DNA
tctaacgtcttgaatagaatgaaactcgatattgaaactctggaggaagaattaaacatttcgtttaaaaaaata

SEQ ID NO: 808635 - DNA, 75 bp, synthetic construct
  source 1..75: mol_type = other DNA
acaataaatggagattactcgcaaatacaattgattatgatataaaaaaatttctgattatccatccttttattt

SEQ ID NO: 808636 - DNA, 75 bp, synthetic construct
  source 1..75: mol_type = other DNA
catgagtgagaatacagtaaatagtgcgttacgggtcatggggtatgatacaaaagttgaggtctgtggtcatgg

SEQ ID NO: 808637 - DNA, 75 bp, synthetic construct
  source 1..75: mol_type = other DNA
gcacattgcgcgggctgggcgtgagcggtgaagctgaaggtcatgcgttattgctgggcaatcaggcgttgttaa

SEQ ID NO: 808638 - DNA, 75 bp, synthetic construct
  source 1..75: mol_type = other DNA
ccggagcggcaatggcgctctcgtcgattaccgtagtgagtaacgctaaccggttgctgcggtttaaaccgaagg

SEQ ID NO: 808639 - DNA, 75 bp, synthetic construct
  source 1..75: mol_type = other DNA
gaaaaagaaattcgccagaaagttgatagattagagaaaaatcttgcgatgatgacaaatgaactgactctgaaa

SEQ ID NO: 808640 - DNA, 75 bp, synthetic construct
  source 1..75: mol_type = other DNA
ctgaaaatgctcggagaaaaaggcgtaggtcatattcaggtgatgtgtccgggctttgctgcggattgtctggag

SEQ ID NO: 808641 - DNA, 75 bp, synthetic construct
  source 1..75: mol_type = other DNA
aatggcggagtttcatggtgaaatgccgagtgcgcagtcaaaaataagccttgcgctaccgcgttcgcactgccc

SEQ ID NO: 808642 - DNA, 75 bp, synthetic construct
  source 1..75: mol_type = other DNA
tgtttattgaaagcgttgacggcagcaatttcaaagatgtgttcctcgcgcaaattcgtccaaaaggcaatgcac

SEQ ID NO: 808643 - DNA, 75 bp, synthetic construct
  source 1..75: mol_type = other DNA
gcgccgtagatgaactcctggcagagcatgtagatcatattgtggtgctgccgctttatccgcaatactcctgtt

SEQ ID NO: 808644 - DNA, 75 bp, synthetic construct
  source 1..75: mol_type = other DNA
ccggaaaaagtgatgatgacctttcagtcgcgctttggtcgggaaccctggttgatgccttataccgacgaaacg

SEQ ID NO: 808645 - DNA, 75 bp, synthetic construct
  source 1..75: mol_type = other DNA
ccggaaaaagtgatgatgacctttcagtcgcgctttggccgggaaccctggctgatgccttataccgacgaaacg

SEQ ID NO: 808646 - DNA, 75 bp, synthetic construct
  source 1..75: mol_type = other DNA
gtgtggaatgtcggcgcttatattcagatctaatcgtacacttccacttgagcagctcgtcgcttccttgcctga

SEQ ID NO: 808647 - DNA, 75 bp, synthetic construct
  source 1..75: mol_type = other DNA
tagcatagacaggcaaactgctaccggatggttcgtggcagcaattgaagaggatgccagctaccgttacaacag

SEQ ID NO: 808648 - DNA, 75 bp, synthetic construct
  source 1..75: mol_type = other DNA
gaacatagacaggcgaaccgctaccggatggctcgtggctgcaatcgaagaggacgcccattaccgttataacag

SEQ ID NO: 808649 - DNA, 75 bp, synthetic construct
  source 1..75: mol_type = other DNA
gacccgacgctgtggatgtggaccgttaacctgatttatctggcgctggcgattgttctgaacctttgggatacg

SEQ ID NO: 808650 - DNA, 75 bp, synthetic construct
  source 1..75: mol_type = other DNA
tggcgatactcttcatcttgcttttgatcttcttctgtcaaaagttagtgaggatcctcggcgcagcggttgacg

SEQ ID NO: 808651 - DNA, 75 bp, synthetic construct
  source 1..75: mol_type = other DNA
gatagttcaaagtcccaaattagccttgcccgacctcgctcacactgcccacattgtcgtcagactttacgggtt

SEQ ID NO: 808652 - DNA, 75 bp, synthetic construct
  source 1..75: mol_type = other DNA
cgggaaaaaatacgaatatattccggcgcttaatgccacaccggaacatatcgaaatgatggctaatcttgttgc

SEQ ID NO: 808653 - DNA, 75 bp, synthetic construct
  source 1..75: mol_type = other DNA
ggcgggatatcagtctgaccaccaccactcgcacggcacaaagtgacgccggacagaaccattttgaacgcacca

SEQ ID NO: 808654 - DNA, 75 bp, synthetic construct
  source 1..75: mol_type = other DNA
accgggcaacggtacctggacggatacagtaatgatgaagagcagtttaaggcgttaatggatgcgggtattgca

SEQ ID NO: 808655 - DNA, 75 bp, synthetic construct
  source 1..75: mol_type = other DNA
gctaagggagaggccagaatcattcttaatgaagtgaacagtcgcaatcccagccagttgaacggttttgttgag

SEQ ID NO: 808656 - DNA, 75 bp, synthetic construct
  source 1..75: mol_type = other DNA
gaaggggcaggggctggatttaagcaacagccggatacagggacaacatactgagctggatgcaaccagtggaaa

SEQ ID NO: 808657 - DNA, 75 bp, synthetic construct
  source 1..75: mol_type = other DNA
gctttatttatgagcttggcggtggtgctgtctctgagtttaccaatggaattatcaaggatttcaataatcctc

SEQ ID NO: 808658 - DNA, 75 bp, synthetic construct
  source 1..75: mol_type = other DNA
tgagcgccggacaaatcaataacgtgaatgaccatttcaccacggagcgcgtggtggtttccacggaaaaggtga

SEQ ID NO: 808659 - DNA, 75 bp, synthetic construct
  source 1..75: mol_type = other DNA
tcgacggttaccagttcaaagtggcgatggccgatagtcggcgtattattcaggttcatgtcaaaatcccggatg

SEQ ID NO: 808660 - DNA, 75 bp, synthetic construct
  source 1..75: mol_type = other DNA
tgagcctgctgtatctggccaccttcggttcctttatcggcttctccgcgggctttgctatgctgtcgaaaacgc

SEQ ID NO: 808661 - DNA, 75 bp, synthetic construct
  source 1..75: mol_type = other DNA
tgcccccacacctgaagcggtaaaacgctatctgaaacaatttttaagcgacagacgtgtggtcgatacctcacg

SEQ ID NO: 808662 - DNA, 75 bp, synthetic construct
  source 1..75: mol_type = other DNA
aggaaacaggccgcccacgggtggaaattggtttaggtgtcggtaccattttcgggctgatcccatttttaattg

SEQ ID NO: 808663 - DNA, 75 bp, synthetic construct
  source 1..75: mol_type = other DNA
atcccgtttttagtaggctgcctcatttttgcagtggtggcgctatggctgcactggcgacatcgccgccagtaa

SEQ ID NO: 808664 - DNA, 75 bp, synthetic construct
  source 1..75: mol_type = other DNA
ggtgatgcaggcgtttgggcatcttccggcgcgtggcgaaaccatcgacatcgacggttaccagttcaaagtggc

SEQ ID NO: 808665 - DNA, 75 bp, synthetic construct
  source 1..75: mol_type = other DNA
gataagacgcgtcagcgtcgcatcaggcatctgcgcatggtgtcggatgcggcgcgagcgccttatccgacctac

SEQ ID NO: 808666 - DNA, 75 bp, synthetic construct
  source 1..75: mol_type = other DNA
cagccaaaatgttacacattttgtggagttacctccagatgaacaaacaacccctgtttccgttcaatttagatc

SEQ ID NO: 808667 - DNA, 75 bp, synthetic construct
  source 1..75: mol_type = other DNA
aacggacagattgccaagttcgtaactgtgcaaggccattctatggctgtttatgatgcatatggtgcacagcag

SEQ ID NO: 808668 - DNA, 75 bp, synthetic construct
  source 1..75: mol_type = other DNA
gtatcaaaaataacaattggcactcaagtatttattagagttaattttcagaacgcgcaaatatcccaagcgatt

SEQ ID NO: 808669 - DNA, 75 bp, synthetic construct
  source 1..75: mol_type = other DNA
ttatattgatggaagtactattcagggaacgccttacccaaaagcgccaagcatgggtggcgtcgatttaacagg

SEQ ID NO: 808670 - DNA, 75 bp, synthetic construct
  source 1..75: mol_type = other DNA
gattctacttctgcagatgataacggcatggtcattgtcactgtgggtggtaaacgctggaaacgtgatcttcaa

SEQ ID NO: 808671 - DNA, 75 bp, synthetic construct
  source 1..75: mol_type = other DNA
attatcagagccaataccaatgtcgtggtttttcttttggtgaaacatttatctttcagaaggaaaccactggta

SEQ ID NO: 808672 - DNA, 75 bp, synthetic construct
  source 1..75: mol_type = other DNA
ttattacctgtagaaataacgccggatgagcagaaagaacctgtggcggtggcggccattgcaccgtctttatcc

SEQ ID NO: 808673 - DNA, 75 bp, synthetic construct
  source 1..75: mol_type = other DNA
agaacgaagggcgtatatcgcagcgtcttccggtaacaacctcttctggcgctggcgttgaattattacctgtag

SEQ ID NO: 808674 - DNA, 75 bp, synthetic construct
  source 1..75: mol_type = other DNA
ttcctgcaaggtggaattccgtcacggtaacatgacgctggaaaatccatcgccagagctgctcacagtgttgat

SEQ ID NO: 808675 - DNA, 75 bp, synthetic construct
  source 1..75: mol_type = other DNA
gcgccggagcagtacctctggatccaccgtcgctttaaaacgcgcccggtgggtgaatcgtcgttatacatttaa

SEQ ID NO: 808676 - DNA, 75 bp, synthetic construct
  source 1..75: mol_type = other DNA
acgcgcacaaatgcaaaatcgcggcgtaatggttgtcggcgtccattttatgtcgctggaactgggcggtcgcgt

SEQ ID NO: 808677 - DNA, 75 bp, synthetic construct
  source 1..75: mol_type = other DNA
gcaggcgttgaattattacctgtagagataacgcctgatgagccgaaagaaccgatggctgctcttactccgtcc

SEQ ID NO: 808678 - DNA, 75 bp, synthetic construct
  source 1..75: mol_type = other DNA
ccgacgttcacgctgcccgtaactttcattgctttgaacaatccattcattgaagtttcaggcgctatcgccgcg

SEQ ID NO: 808679 - DNA, 75 bp, synthetic construct
  source 1..75: mol_type = other DNA
gcaaaaaataatatattctttattagtaaaaacattagccaaaaggaaaagagaaaaattcatcaaaaatcctga

SEQ ID NO: 808680 - DNA, 75 bp, synthetic construct
  source 1..75: mol_type = other DNA
tcagcatgcttatccctctggctaatgttcttggctgtgatccaatgttgttattgactgatgcttataaacaaa

SEQ ID NO: 808681 - DNA, 75 bp, synthetic construct
  source 1..75: mol_type = other DNA
ttattactcctttctcgacagcgacgacaagctgagtcagggggatgatgacgatcgctacggcgcgcgggtgcg

SEQ ID NO: 808682 - DNA, 75 bp, synthetic construct
  source 1..75: mol_type = other DNA
attgatactatcgcagatgaagtattagaaaaacatgggtttgataaacagtcaaaattaacgtcgaatgatgtt

SEQ ID NO: 808683 - DNA, 75 bp, synthetic construct
  source 1..75: mol_type = other DNA
gccttgactctcttgtcccatacataaaaaaatatcatccccaagatgattatttttgtaaagagctttcagcac

SEQ ID NO: 808684 - DNA, 75 bp, synthetic construct
  source 1..75: mol_type = other DNA
gaggatataaggaaaaaatattctaaaatagtattatttccattgcaaattgataattatttcatggtttcatcg

SEQ ID NO: 808685 - DNA, 75 bp, synthetic construct
  source 1..75: mol_type = other DNA
attagaaagtgccgcctcgaggctggcgaactcaaagatatcggacgctggactcctgatatatctatggttcca

SEQ ID NO: 808686 - DNA, 75 bp, synthetic construct
  source 1..75: mol_type = other DNA
atgaacatggcccagaattgggaagcaccttttactggtatgtccatgggttctgttgctggtgccttcagtggt

SEQ ID NO: 808687 - DNA, 75 bp, synthetic construct
  source 1..75: mol_type = other DNA
aatgggcatttcctgaaaaacaccgtcaacctccagttgaccggttcttcgatatataacagctccgatattgtt

SEQ ID NO: 808688 - DNA, 75 bp, synthetic construct
  source 1..75: mol_type = other DNA
gcgctcttgatgtttttgatgtgattcgtcttcctggaggaaaagtcaggttgtctaataaaactgctgagtttg

SEQ ID NO: 808689 - DNA, 75 bp, synthetic construct
  source 1..75: mol_type = other DNA
gactggtcaaatttccaatttgaatttgcaagattcgtcaccgttgaaaggaaaagcactttatgacgagatttt

SEQ ID NO: 808690 - DNA, 75 bp, synthetic construct
  source 1..75: mol_type = other DNA
gtcaggttatcaaataagtctgctgagtttgaatgtaatatttcagatatcacaccatcaggtgcggttattttt

SEQ ID NO: 808691 - DNA, 75 bp, synthetic construct
  source 1..75: mol_type = other DNA
tgtgcgccgggcgctggtcgcctttttggggattttgctgctaaccggcgtgcttatcgccaacctgtataatct

SEQ ID NO: 808692 - DNA, 75 bp, synthetic construct
  source 1..75: mol_type = other DNA
cacattatgctgggcgataacaacaccgatctgcctgcggaaaacccagcggttaccgcagcggaggaccattaa

SEQ ID NO: 808693 - DNA, 75 bp, synthetic construct
  source 1..75: mol_type = other DNA
accgatccgcgtacaggtggggtgctggcgctggtttccacgcctagttatgacccaaacctgtttgttgacggt

SEQ ID NO: 808694 - DNA, 75 bp, synthetic construct
  source 1..75: mol_type = other DNA
tacagttacattgggtagcggagctgggcattctgatgctgctgactattctgatattggtggagcacagcataa

SEQ ID NO: 808695 - DNA, 75 bp, synthetic construct
  source 1..75: mol_type = other DNA
tcgcggcattatctacgatcgtaacggcatccctctggcactcaaccgcactatctatcaggtagagatgatgcc

SEQ ID NO: 808696 - DNA, 75 bp, synthetic construct
  source 1..75: mol_type = other DNA
tcaaactggtgcctatcgcccccagtcgcggcattatctacgatcgtaacggcatccctctggcactcaaccgca

SEQ ID NO: 808697 - DNA, 75 bp, synthetic construct
  source 1..75: mol_type = other DNA
tttgaccagctagaacatatagttgaaggaagtattgatgaaagtggattattttccgggaaagtgaaagccttc

SEQ ID NO: 808698 - DNA, 75 bp, synthetic construct
  source 1..75: mol_type = other DNA
atgaaaaaacaggaatttttagattttatcagtgcagaacagaggcggggggctgtccggttttcgctgggattt

SEQ ID NO: 808699 - DNA, 75 bp, synthetic construct
  source 1..75: mol_type = other DNA
gtatttcgacacaaacgcacagccggacatggccaacatcaaccgcaaaaaagcgaacgttatgcgcccggtgga

SEQ ID NO: 808700 - DNA, 75 bp, synthetic construct
  source 1..75: mol_type = other DNA
ctatctaccagatagaaatgatgccggagaaagtcgataacgtgcagcaaacgctggacgctttgcgcagcgtgg

SEQ ID NO: 808701 - DNA, 75 bp, synthetic construct
  source 1..75: mol_type = other DNA
ccatcgtgctttttatccgtatggcgctcaatgcgctggatggcatgttggcgcgtgagtgcaatcagcaaacac

SEQ ID NO: 808702 - DNA, 75 bp, synthetic construct
  source 1..75: mol_type = other DNA
aacagtatcaatatttctaccgccagtgcgtttgtcgccgcggcctgtgggctgaaagtggcgaaacacggcaac

SEQ ID NO: 808703 - DNA, 75 bp, synthetic construct
  source 1..75: mol_type = other DNA
acgggaacatctgataacgttacggcagctactgacatcgttgataatgcgggagcatccgcaacaggtgttatt

SEQ ID NO: 808704 - DNA, 75 bp, synthetic construct
  source 1..75: mol_type = other DNA
tatgggagcgatgggaaaacagcttactgaagcctggtctgtcgccagagcccttggcgtggaagacaaagtgga

SEQ ID NO: 808705 - DNA, 75 bp, synthetic construct
  source 1..75: mol_type = other DNA
acgttcgcgctggactgttgcgacagagaggccatagactgggcagcgagtacgggaggctacgacagttcgacc

SEQ ID NO: 808706 - DNA, 75 bp, synthetic construct
  source 1..75: mol_type = other DNA
gcggatacggcagtgataatattacggtaactaaaaatctgaccggtaatatttctgtcggtgacaatgcggata

SEQ ID NO: 808707 - DNA, 75 bp, synthetic construct
  source 1..75: mol_type = other DNA
aacgatttggccgccgcatcgatcttcgtgtgaaaacgggggctgaagctatccgggcgctggccacacagctcc

SEQ ID NO: 808708 - DNA, 75 bp, synthetic construct
  source 1..75: mol_type = other DNA
caattcaacgatttatatttccggtgatgccaatgacaaagttgatttgggggctgacggagcgggaagtctggg

SEQ ID NO: 808709 - DNA, 75 bp, synthetic construct
  source 1..75: mol_type = other DNA
atttgatgcaacttctggtgtaatgggggattctgcttatgccactgtcgttaatggtgaagacggcaatgatac

SEQ ID NO: 808710 - DNA, 75 bp, synthetic construct
  source 1..75: mol_type = other DNA
tattgagcatacttatacgttatacagcagtgtaagtggcgcaaatgtgtatattgataacaatattattgatgc

SEQ ID NO: 808711 - DNA, 75 bp, synthetic construct
  source 1..75: mol_type = other DNA
tgatccaacgcttgaggctaaccaagatgcctttaatgccgagggtatggaaaaagttgttgcgaccattacggg

SEQ ID NO: 808712 - DNA, 75 bp, synthetic construct
  source 1..75: mol_type = other DNA
cggtattaaaagcagaggatgatggttctgtttctgttgagctgccgggtgatgccaataaaggcgataccgtgg

SEQ ID NO: 808713 - DNA, 75 bp, synthetic construct
  source 1..75: mol_type = other DNA
aaccgtaacaattgttattcctgccggttcaaaaagtgtttcatttatagttgatccaacgcttgaggctaacca

SEQ ID NO: 808714 - DNA, 75 bp, synthetic construct
  source 1..75: mol_type = other DNA
tgagaacggcgaacgccgcaacgctatcagcccgaacagcttcaagtcggaatggtctgcgccgttcggtggcac

SEQ ID NO: 808715 - DNA, 75 bp, synthetic construct
  source 1..75: mol_type = other DNA
gtgcagcgccgtatctggctgaagtggtgaaaaccatgaccacagacccggttacaggtgaggtgaataaggctg

SEQ ID NO: 808716 - DNA, 75 bp, synthetic construct
  source 1..75: mol_type = other DNA
gcctaacggtaacgtaaggatttatgctacatggacaatattacctgatggcacgaaaagactttcaactgttaa

SEQ ID NO: 808717 - DNA, 75 bp, synthetic construct
  source 1..75: mol_type = other DNA
ggatacgcagagccagaaacaggatgtggcagacctgaaccgtgacgcagcacatgcaaaccagacgctgtcccc

SEQ ID NO: 808718 - DNA, 75 bp, synthetic construct
  source 1..75: mol_type = other DNA
aaagccattgagaaaatcaggaacggcgataagacattagccactgctaatgagctgattaagctggaaaatgca

SEQ ID NO: 808719 - DNA, 75 bp, synthetic construct
  source 1..75: mol_type = other DNA
ggcacagggaaataacgcccttgccggtgccgcaggcgctgccaccggcgagatggtgggaatgattgccacaca

SEQ ID NO: 808720 - DNA, 75 bp, synthetic construct
  source 1..75: mol_type = other DNA
acggtctcgacactggcaacggttgctgccggtctggccggtggtctggtgggagactcagggggggcagcggta

SEQ ID NO: 808721 - DNA, 75 bp, synthetic construct
  source 1..75: mol_type = other DNA
tgataatcgcagggggaaagtgcaggcggcgcagtcaggcagtctgcaggtgaagacaaccggtgccgtggacaa

SEQ ID NO: 808722 - DNA, 75 bp, synthetic construct
  source 1..75: mol_type = other DNA
ctgactgcaggcgtggttaacaatacatccggtcaggtggtggcaaacggtctgctcggctggaacagccaggcg

SEQ ID NO: 808723 - DNA, 75 bp, synthetic construct
  source 1..75: mol_type = other DNA
tggcacgataaatgccgacacactgcagatatcggcacagagcctgtcaaaccacaggggtaaactgattcagac

SEQ ID NO: 808724 - DNA, 75 bp, synthetic construct
  source 1..75: mol_type = other DNA
acttatgatggaatgaaggttgtagctgcttcgatggcaccagtaataggtgctgcggcggccagtaagatagaa

SEQ ID NO: 808725 - DNA, 75 bp, synthetic construct
  source 1..75: mol_type = other DNA
tcagcattaccgccgccacagaccagcatgtacagacgcatacggtggagcagaaaacctccggtctgacgcttg

SEQ ID NO: 808726 - DNA, 75 bp, synthetic construct
  source 1..75: mol_type = other DNA
ctgccactgagcgagtatttcgatacaaacgcacagccggacatggccaacatcaaccgcaaaaaagcgaacgtc

SEQ ID NO: 808727 - DNA, 75 bp, synthetic construct
  source 1..75: mol_type = other DNA
gacagcagtctgtttaaaacaaatccggcagtgaatgtgccatatctggttgaaacggacccgcgttttacgaac

SEQ ID NO: 808728 - DNA, 75 bp, synthetic construct
  source 1..75: mol_type = other DNA
attatcagcaggcaattgaaaatgggtttgtcaggatgacgcagcgcatggtggagatcatgcatggcgaggagg

SEQ ID NO: 808729 - DNA, 75 bp, synthetic construct
  source 1..75: mol_type = other DNA
atgagcgagaaattgaagatcgtctatcgcccgttacaaaaactgtctccgtatgcgcacaacgccaggacacac

SEQ ID NO: 808730 - DNA, 75 bp, synthetic construct
  source 1..75: mol_type = other DNA
ttttgatatctccctgacaggattctgcccgacagaaattgacgaactattaacggatgttttgccaggtacagc

SEQ ID NO: 808731 - DNA, 75 bp, synthetic construct
  source 1..75: mol_type = other DNA
tcagcgatcgctttgtccagacgaccgacacgcaataccagtacagtgatgtgaatgtcattgccattcatcacg

SEQ ID NO: 808732 - DNA, 75 bp, synthetic construct
  source 1..75: mol_type = other DNA
cgacacgcaataccagtacagcgatgtgaatgtaatcgccattcatcacgcgctggtcaaatcaggcatcacgcc

SEQ ID NO: 808733 - DNA, 75 bp, synthetic construct
  source 1..75: mol_type = other DNA
atcgcccgttacaaaaactgtctccatatgcgcacaacgccaggacccacagccctgagcaggtggctcaactgg

SEQ ID NO: 808734 - DNA, 75 bp, synthetic construct
  source 1..75: mol_type = other DNA
atgaatacacccgtaccgtggaggaaacccgggtaaaagactccgacccggggaaaatactgtccggtgccggca

SEQ ID NO: 808735 - DNA, 75 bp, synthetic construct
  source 1..75: mol_type = other DNA
agaacaactgaaaccggttattaaagaaggtagtgctgaggtaattggggcagttacgggggctgtctcaggaga

SEQ ID NO: 808736 - DNA, 75 bp, synthetic construct
  source 1..75: mol_type = other DNA
gccggagcacagtcaggtaagacgacagttgagaataatttccttggaacaacatcttcagacaagctcgacaaa

SEQ ID NO: 808737 - DNA, 75 bp, synthetic construct
  source 1..75: mol_type = other DNA
agagcgtctttaactctgcaggtctggaagttcgtgaatacgcttattatgatgcggaaaatcacacccttgact

SEQ ID NO: 808738 - DNA, 75 bp, synthetic construct
  source 1..75: mol_type = other DNA
tattcagcgtatgcgtcagttgttcgtcaatacgctgcaggaaaaaggcgcaaaccgcgacttcagctttatcat

SEQ ID NO: 808739 - DNA, 75 bp, synthetic construct
  source 1..75: mol_type = other DNA
ctaacccaccagctcatggggcttcggttgttgccacaatcctgagcaacgatgctttgcgtgcaatctgggaac

SEQ ID NO: 808740 - DNA, 75 bp, synthetic construct
  source 1..75: mol_type = other DNA
tgaaagttctattgcaatagggccgtactcgaagtcaacagcagtaaactcagtagtgattggactggatgcgac

SEQ ID NO: 808741 - DNA, 75 bp, synthetic construct
  source 1..75: mol_type = other DNA
tccacacaccaagacttgataagctcgtaactgaggttgctccggctaccgtaaccagctcatcaacagctgata

SEQ ID NO: 808742 - DNA, 75 bp, synthetic construct
  source 1..75: mol_type = other DNA
acctgaactttgccggagctggtaaacagaacttccgcagccattcactgtatgcaggtgcagaagtcggatacc

SEQ ID NO: 808743 - DNA, 75 bp, synthetic construct
  source 1..75: mol_type = other DNA
tctactgttatggacgaaatagcatcctgacgaacaacaagaaaaaaacctgtatcttgttgctggcgctgatac

SEQ ID NO: 808744 - DNA, 75 bp, synthetic construct
  source 1..75: mol_type = other DNA
ttgatatattctcttattcctcagagttttctctcacagatctattcagaggataatgacgctcccgtctttttt

SEQ ID NO: 808745 - DNA, 75 bp, synthetic construct
  source 1..75: mol_type = other DNA
gcggccgcccgacagtcgtgctggcagacaaccagcaggttaatccggacaatatatcctggggctaccggggtg

SEQ ID NO: 808746 - DNA, 75 bp, synthetic construct
  source 1..75: mol_type = other DNA
tgactgggagaacaggacgttcagctttggttcgctcgtgttaaaagatacagtgtcaacgccaagattattggc

SEQ ID NO: 808747 - DNA, 75 bp, synthetic construct
  source 1..75: mol_type = other DNA
ttactctggatttacgcacggtggaaatgctcgatggggtgaaatgtagcaatattttgtttgtcgggatcaacc

SEQ ID NO: 808748 - DNA, 75 bp, synthetic construct
  source 1..75: mol_type = other DNA
tatcagggagggaataaaaccggagaacatgcttgatggcgtgaagcggtatgccgcctgggtacgtgctacagg

SEQ ID NO: 808749 - DNA, 75 bp, synthetic construct
  source 1..75: mol_type = other DNA
cgcggacacgggaaacccctcgccgcggtgaagggaaaaccaatttcgatcttacagagattacaacagagatta

SEQ ID NO: 808750 - DNA, 75 bp, synthetic construct
  source 1..75: mol_type = other DNA
gctcagggagggaataaaacctgaagccatgcttgatggcgtgaaacgctatgctgcctgggtacgtgccacagg

SEQ ID NO: 808751 - DNA, 75 bp, synthetic construct
  source 1..75: mol_type = other DNA
tgtctctggaaatacctgtacccagttcgtgaagcaggcgtcgacgttctttggtccggatcgtcatttcgaaga

SEQ ID NO: 808752 - DNA, 75 bp, synthetic construct
  source 1..75: mol_type = other DNA
gggatatcgcaagcgttttcagggcgacaaactgcaaagaagctaccaggcgtttgctgagcagtttggtttcgg

SEQ ID NO: 808753 - DNA, 75 bp, synthetic construct
  source 1..75: mol_type = other DNA
ctgcttgcaaacagaattaataataaagggtatctgtatcatggcaagttgctgggaaatattaatttctcaaat

SEQ ID NO: 808754 - DNA, 75 bp, synthetic construct
  source 1..75: mol_type = other DNA
ttatctacggtcctcagcttatttcttgtactaataacaacatgctaatccgctgtcttagacaagatacttcaa

SEQ ID NO: 808755 - DNA, 75 bp, synthetic construct
  source 1..75: mol_type = other DNA
tcctcgtattactgataccagtaactatgaacaaattatcgccgaagaattcaccctgttgatatctaaatcagc

SEQ ID NO: 808756 - DNA, 75 bp, synthetic construct
  source 1..75: mol_type = other DNA
tatttctggcaatgtcacaccagcgaactggtggaaacatattcggctaccaagtggtcgtccggatgcgactgc

SEQ ID NO: 808757 - DNA, 75 bp, synthetic construct
  source 1..75: mol_type = other DNA
tggtgaccgattcggcagagaaagcacagagtgtgacgtctgttgaatgcaccgtgacagtgagcgcagctgccg

SEQ ID NO: 808758 - DNA, 75 bp, synthetic construct
  source 1..75: mol_type = other DNA
tatatttcctataacaaggcttcgttgaacaaccttgtcttctcccgattcatagatcgtttaaatgatagcttc

SEQ ID NO: 808759 - DNA, 75 bp, synthetic construct
  source 1..75: mol_type = other DNA
gccgaagaactgttggttcaacgcaaaactgacctggcaattacactgcaaccagtaattagtcgctctgtcatc

SEQ ID NO: 808760 - DNA, 75 bp, synthetic construct
  source 1..75: mol_type = other DNA
ggccgcaatgccacactgaacacaaccatccaggcagataactccagcgtcacgctgggcgacagtcgggtattt

SEQ ID NO: 808761 - DNA, 75 bp, synthetic construct
  source 1..75: mol_type = other DNA
tacaaccggcgcattggttatggacggctcagcgaatatgtccggtacatttactcaggaaaacggtcgtctgac

SEQ ID NO: 808762 - DNA, 75 bp, synthetic construct
  source 1..75: mol_type = other DNA
cagtcagtgctgaatatcaatgatatattcaatggcggaatacaggcgaacaacagtaccgtgaatatctcctca

SEQ ID NO: 808763 - DNA, 75 bp, synthetic construct
  source 1..75: mol_type = other DNA
ttactggcaacagccagccgctcccggaggtgggcgacagcgacaggtcgatgtcctggctggcctgggagccat

SEQ ID NO: 808764 - DNA, 75 bp, synthetic construct
  source 1..75: mol_type = other DNA
aaagcccgaatcagggaaggtgtgacacccgaaaccatgctcgacggtgtgaaacgctatgccgcctgggtgcgt

SEQ ID NO: 808765 - DNA, 75 bp, synthetic construct
  source 1..75: mol_type = other DNA
attatatctatttcgccagctaagttttattttcttaaccgcactggctctctactgttatggacgaaatagcat

SEQ ID NO: 808766 - DNA, 75 bp, synthetic construct
  source 1..75: mol_type = other DNA
cgacagcgacaggtcgatgtcctggctggcctgggagccatgtctgacaaattcggtaaatccagtaacaaattg

SEQ ID NO: 808767 - DNA, 75 bp, synthetic construct
  source 1..75: mol_type = other DNA
gatcaacgccggtgtcggcggtatgatcccactaatcattatggctatcctcgcgttcccgatgacgtttttcgc

SEQ ID NO: 808768 - DNA, 75 bp, synthetic construct
  source 1..75: mol_type = other DNA
ggtatgatgaccatcgttcgcttcggtgagcagatgatcgttaaagcgatgagtattctggtattcccgtttgtt

SEQ ID NO: 808769 - DNA, 75 bp, synthetic construct
  source 1..75: mol_type = other DNA
tctggtattcccgtttgttggcgtactgatgctgctggctctgtacctgatcccgcagtggaacggcgcagcact

SEQ ID NO: 808770 - DNA, 75 bp, synthetic construct
  source 1..75: mol_type = other DNA
attaccctgctctacttcttcgctatctacccgattctgttggtatacagcgtagctatcaccaacaccgttgaa

SEQ ID NO: 808771 - DNA, 75 bp, synthetic construct
  source 1..75: mol_type = other DNA
aagatcctggcattcgcacacatcatgatggtgctgaccgtaatgttcttcgtcttcagctgcgtactgagcctg

SEQ ID NO: 808772 - DNA, 75 bp, synthetic construct
  source 1..75: mol_type = other DNA
cctggtattcccgttcgttgcagttctgatgctgctggctctgtacctgatcccgcagtggaatggcgcggcgct

SEQ ID NO: 808773 - DNA, 75 bp, synthetic construct
  source 1..75: mol_type = other DNA
gcgaggggcgtcaggtcgcaatggtgggtgacggtattaacgacgcgccagcactggcccaggcggatgtcggta

SEQ ID NO: 808774 - DNA, 75 bp, synthetic construct
  source 1..75: mol_type = other DNA
cggtctgattaatctcggccatatgctggaagcgcgcgcacgtcagcgctcttctaaagcgctggagaaattact

SEQ ID NO: 808775 - DNA, 75 bp, synthetic construct
  source 1..75: mol_type = other DNA
tttcgcgccagcgcagtcggcagccataccacgctgtcgcggatcattcgcatggtgcgccaggctcagagcagt

SEQ ID NO: 808776 - DNA, 75 bp, synthetic construct
  source 1..75: mol_type = other DNA
tggcgctattcgtgcaggtcaggcgcagcagccatccagtcttgcgcgtggtattggtggggcggcatcaggcgc

SEQ ID NO: 808777 - DNA, 75 bp, synthetic construct
  source 1..75: mol_type = other DNA
cggtagcggtattaataacggcctgggcgcgattggcggtcagatgttgattgccggattgattgtcagtctggt

SEQ ID NO: 808778 - DNA, 75 bp, synthetic construct
  source 1..75: mol_type = other DNA
gttacattccgcagggtgcgttaagtatggtgaaagagttcggcttgatggtatttatggcaggtgttggactaa

SEQ ID NO: 808779 - DNA, 75 bp, synthetic construct
  source 1..75: mol_type = other DNA
gaaggcttcaacggtatggtgattaaatctctgcgtggtaaaggtaagtctattgaaatcaacaagctgaaccgt

SEQ ID NO: 808780 - DNA, 75 bp, synthetic construct
  source 1..75: mol_type = other DNA
caaactgatgtcttccgcacgtcaactgatcaacaccgttcacgttgatatgctgattgttccgctgcgcgacga

SEQ ID NO: 808781 - DNA, 75 bp, synthetic construct
  source 1..75: mol_type = other DNA
ttttcagtcgatacgaaacacgcttatctgtagcgcaacccatccgagaataacggaaaacagtagccgcgaaga

SEQ ID NO: 808782 - DNA, 75 bp, synthetic construct
  source 1..75: mol_type = other DNA
tatatttcttataataaatcatcattaaacaacctgagtttctctcgttttattgatcgtttgaatgacaactta

SEQ ID NO: 808783 - DNA, 75 bp, synthetic construct
  source 1..75: mol_type = other DNA
gggtagtgcaggagattcacccagaaccagtcactcttttgaaccagtcaatgaaccaatagctgttggtgcatc

SEQ ID NO: 808784 - DNA, 75 bp, synthetic construct
  source 1..75: mol_type = other DNA
gtcgacccgtacacggcttacggtgctggctttgtccaggcacattgcgaattactgccgtttgatgggggaact

SEQ ID NO: 808785 - DNA, 75 bp, synthetic construct
  source 1..75: mol_type = other DNA
gtgcaaacggtggatgaggacgggatcggcagcgacagcgaagttaaaaagcagtttgccggagtcgtaactgtt

SEQ ID NO: 808786 - DNA, 75 bp, synthetic construct
  source 1..75: mol_type = other DNA
gcaggtgcagtacggtgaaacagatttcgattttattcagcgcctgatgcaggagtggggtatctactggtggtt

SEQ ID NO: 808787 - DNA, 75 bp, synthetic construct
  source 1..75: mol_type = other DNA
gaatccggcagtggcaatcgaggaagttggaaagaatatgtggtggacggataccacttccggttatgtgttgcc

SEQ ID NO: 808788 - DNA, 75 bp, synthetic construct
  source 1..75: mol_type = other DNA
atcactgcgctgttcatgctggttaccacctggattgtggcgaccctgaacccaagcatcctgggtatgattgaa

SEQ ID NO: 808789 - DNA, 75 bp, synthetic construct
  source 1..75: mol_type = other DNA
caatttaatgaccccttgtttattcgctccgggaaaggtattgcaccaacaacaacagggttaaatttgcatcat

SEQ ID NO: 808790 - DNA, 75 bp, synthetic construct
  source 1..75: mol_type = other DNA
ttctggcattaccgctgttatgcacaacagcgcaggcaaacagttttcttcattatgctggtgagttcaacttcc

SEQ ID NO: 808791 - DNA, 75 bp, synthetic construct
  source 1..75: mol_type = other DNA
gctggtgtgttattaccagaaagggctgaaactggacaaggagtttatccataccatcacagcaaatgaaagtct

SEQ ID NO: 808792 - DNA, 75 bp, synthetic construct
  source 1..75: mol_type = other DNA
attcgaaaataatattgtgtgggggccaaacagcaaattagcgactcaactcaccacatccgaacatctaaggtc

SEQ ID NO: 808793 - DNA, 75 bp, synthetic construct
  source 1..75: mol_type = other DNA
acagaaggaaaacatcattacagccggatagttataaaacagtgtgcattttcatgcacatgcaagccattggtg

SEQ ID NO: 808794 - DNA, 75 bp, synthetic construct
  source 1..75: mol_type = other DNA
cagctttgctgttgctggcgtatgaaagtttgtggcccgatgcctggcatttcctttctattttcagcggcagcg

SEQ ID NO: 808795 - DNA, 75 bp, synthetic construct
  source 1..75: mol_type = other DNA
gtattgctaccggtttgccgaatatgcctggtatgcaaggcctggtaatgaccccgggctttgcattctatttca

SEQ ID NO: 808796 - DNA, 75 bp, synthetic construct
  source 1..75: mol_type = other DNA
gtattgctaccggtctgccgaatatgcttggtatgcaaggcctggtgattaacccaggctttgcattctacttca

SEQ ID NO: 808797 - DNA, 75 bp, synthetic construct
  source 1..75: mol_type = other DNA
tgtgttactctatgcgtctgcaatcatcttcttctgtttcttctactcggcgttggttttcaacccgcgtgaaac

SEQ ID NO: 808798 - DNA, 75 bp, synthetic construct
  source 1..75: mol_type = other DNA
aactggctgacccgcaactgtacaaaacctttactgatgctgctgaagtgattggtgaagcatgggaaagccgcg

SEQ ID NO: 808799 - DNA, 75 bp, synthetic construct
  source 1..75: mol_type = other DNA
tcctgccggatcgttttgtaaaaggcacctgcccgaaatgtaaagcgccagatcaatacggcgataactgtgaag

SEQ ID NO: 808800 - DNA, 75 bp, synthetic construct
  source 1..75: mol_type = other DNA
tcggtggtttctggcgctaccccggtaatgcgtgattctgaacacttcttctttgatctgccctctttcagcgaa

SEQ ID NO: 808801 - DNA, 75 bp, synthetic construct
  source 1..75: mol_type = other DNA
atggagttactagaatacttagagttaagaaatgaattattcaatgacatagaagaagtaatgggtagctatgct

SEQ ID NO: 808802 - DNA, 75 bp, synthetic construct
  source 1..75: mol_type = other DNA
caggtatcgttagataaaagtttagaagtgatgagtaatctcccatttattttggatgtcacaaaggataattct

SEQ ID NO: 808803 - DNA, 75 bp, synthetic construct
  source 1..75: mol_type = other DNA
aacgtaatgtcttctccggcattcgttccgcttatccagatccacaggcactgattggtcgtcacaccattatgg

SEQ ID NO: 808804 - DNA, 75 bp, synthetic construct
  source 1..75: mol_type = other DNA
caatgacacggtgtatgcgtttaaggtgcagtttccgtccggtaagggctttaagttcctggcggaagtgcgcca

SEQ ID NO: 808805 - DNA, 75 bp, synthetic construct
  source 1..75: mol_type = other DNA
gatcttgaagctactggggctgcagccagttggtgaggtctggggagtaggacgcagactgacggaaaagctgaa

SEQ ID NO: 808806 - DNA, 75 bp, synthetic construct
  source 1..75: mol_type = other DNA
gtattgtccgctttgacctgaagtttgtcgaagcgggagaactctcttaccccacatcaggtgcggcgacggcgc

SEQ ID NO: 808807 - DNA, 75 bp, synthetic construct
  source 1..75: mol_type = other DNA
gaaactgatatccttgagcgaaatgccatctctcatccgggctttgttccggtcagggcattaagggtacccgtc

SEQ ID NO: 808808 - DNA, 75 bp, synthetic construct
  source 1..75: mol_type = other DNA
ctgtcggggttggcatcgcgcagacaaaaacactcgctaagctggcaaatcacgccgcaaagaaatggcagcggc

SEQ ID NO: 808809 - DNA, 75 bp, synthetic construct
  source 1..75: mol_type = other DNA
gaacgaatcacagacaaagatgccatgcaccaggctgttgttcagtatgcagagcgggccgcagagaaactacgt

SEQ ID NO: 808810 - DNA, 75 bp, synthetic construct
  source 1..75: mol_type = other DNA
aggtaaagagctggacaggactcaccatgggggtgggcattgcgcctacaaaaacgctggctaaaagtgcacagt

SEQ ID NO: 808811 - DNA, 75 bp, synthetic construct
  source 1..75: mol_type = other DNA
gtcgagattgagtgccatgatatcctcatgtcagcagagaatgctgaagaactgttggttcaccgcaaagccgat

SEQ ID NO: 808812 - DNA, 75 bp, synthetic construct
  source 1..75: mol_type = other DNA
gcagggcattccagaagactgggccaaagcctgcgtagtcgctatcgctcgcgggaaagttccggcaacaaccat

SEQ ID NO: 808813 - DNA, 75 bp, synthetic construct
  source 1..75: mol_type = other DNA
gaagcagagaagaaggaagccgcagatcgtgccgagcgcgaaaaacaggaagctatcgcagttgagcaacgcaaa

SEQ ID NO: 808814 - DNA, 75 bp, synthetic construct
  source 1..75: mol_type = other DNA
gcagttcggtgaaatgcagggctgtattgacggacaggtgaccgtttctcactccagcactgaaggccgtatgtg

SEQ ID NO: 808815 - DNA, 75 bp, synthetic construct
  source 1..75: mol_type = other DNA
aaccagacaaatcaccccccccggtaaaacaacagcaaacgctcaatcgctatggctccgcgtcaaaactgtcaa

SEQ ID NO: 808816 - DNA, 75 bp, synthetic construct
  source 1..75: mol_type = other DNA
atgaaaccccggcgcaatgaacaggaaccagacaaatcaccccccccggtaaaacaacagcaaacgctcaatcgc

SEQ ID NO: 808817 - DNA, 75 bp, synthetic construct
  source 1..75: mol_type = other DNA
aaagccgcgaatttggtaaagctgtgcgcgaaatcatggcgctggctgacctggctaaccgctatgttgacgagc

SEQ ID NO: 808818 - DNA, 75 bp, synthetic construct
  source 1..75: mol_type = other DNA
cctgaatggcggtttcgctaccgcaatggcgctgaatgccgatgcgaccgaaaaagtgatttcggtacaagaaat

SEQ ID NO: 808819 - DNA, 75 bp, synthetic construct
  source 1..75: mol_type = other DNA
gaaatcgtctacgatgaagccgacctgcgccgttacttccagacggcggtgagtgtctctaacgatgcgccggtg

SEQ ID NO: 808820 - DNA, 75 bp, synthetic construct
  source 1..75: mol_type = other DNA
ttacgaaaccattatggttaactgtaacccggaaaccgtctccactgattacgacacttccgacccccccccccc

SEQ ID NO: 808821 - DNA, 75 bp, synthetic construct
  source 1..75: mol_type = other DNA
gggcgtgggccgcaccttcgctgaagcgtttgccaaagcgcagctgggcagcaactccaccatgaagaaacacgg

SEQ ID NO: 808822 - DNA, 75 bp, synthetic construct
  source 1..75: mol_type = other DNA
tgtgatggctggcaaatcgctggctgagcagggcgtaacaaaagaagttaccccgccgtactactcggtgaaaga

SEQ ID NO: 808823 - DNA, 75 bp, synthetic construct
  source 1..75: mol_type = other DNA
tgccatcgaccgtgcggaagaccgtgaacgcttccagcatgcggttgaccgtctgaaactgaaacaaccggcgaa

SEQ ID NO: 808824 - DNA, 75 bp, synthetic construct
  source 1..75: mol_type = other DNA
ttcgctggcggccctgacgcgtaaagtcggacgcaaagtgcgttacgtcattgttctgcggggacaaattgtcac

SEQ ID NO: 808825 - DNA, 75 bp, synthetic construct
  source 1..75: mol_type = other DNA
agtacactgatccagacaaagtcgaatgatgtttctattttctatattttccgccaactcagttttatttgttta

SEQ ID NO: 808826 - DNA, 75 bp, synthetic construct
  source 1..75: mol_type = other DNA
aagacacttaccgtgaataccggtgcgctgctgacaatgtcagtcagtgccaacgggggaatgccgccgtataaa

SEQ ID NO: 808827 - DNA, 75 bp, synthetic construct
  source 1..75: mol_type = other DNA
catgtactccacttatgaagaagagtgcgaagcgaatccgtctaccgaccgtgaaaaaatcatggttctcggcgg

SEQ ID NO: 808828 - DNA, 75 bp, synthetic construct
  source 1..75: mol_type = other DNA
cgctcgcggtctggatctctccccaaccaaagagctgctgattgacgagtcgctgattggctggaaagagtacga

SEQ ID NO: 808829 - DNA, 75 bp, synthetic construct
  source 1..75: mol_type = other DNA
agggttacgtcactggtatgcacgccgacgcggtcacgatccgcgggcaatgttgtacaatgcggttcagcatca

SEQ ID NO: 808830 - DNA, 75 bp, synthetic construct
  source 1..75: mol_type = other DNA
cctgaacggtggtttcgctactgcgatggcgctgaatgctgatgcgaccgaaaaagtaatttcggtgcaggaaat

SEQ ID NO: 808831 - DNA, 75 bp, synthetic construct
  source 1..75: mol_type = other DNA
aagattccaccgccgagctgtatcacttcatcggcaaagatatcgtttacttccacagcctgttctggcctgcca

SEQ ID NO: 808832 - DNA, 75 bp, synthetic construct
  source 1..75: mol_type = other DNA
ttggctacatgggttccttcaagaatctgtgcgacaaacgcggcgacaccaccagcttcgatgaatactggaaga

SEQ ID NO: 808833 - DNA, 75 bp, synthetic construct
  source 1..75: mol_type = other DNA
gcatgttcctgccggaccgttttgtaaaaggcacctgcccgaaatgtaaagcaccggatcaatacggcgataact

SEQ ID NO: 808834 - DNA, 75 bp, synthetic construct
  source 1..75: mol_type = other DNA
gtgaagtctgcggcgcgacctacagcccgactgaactgatcgagccgaaatctgtggtttctggtgctacgccgg

SEQ ID NO: 808835 - DNA, 75 bp, synthetic construct
  source 1..75: mol_type = other DNA
gagcgtgcagaagcattcctgaatacggaactgacctgggatggtatccagcaaccgctgctggcgcataaagtg

SEQ ID NO: 808836 - DNA, 75 bp, synthetic construct
  source 1..75: mol_type = other DNA
ctggcccactggcagatgatccgattcaggaaaccatcacctttgacgacttcgccaaagttgacctgcgcgtgg

SEQ ID NO: 808837 - DNA, 75 bp, synthetic construct
  source 1..75: mol_type = other DNA
cgccgaaatactgaccacgctcggtcatattaatcgttcagcaattaacgtgttgttattgcgccatgaacgcag

SEQ ID NO: 808838 - DNA, 75 bp, synthetic construct
  source 1..75: mol_type = other DNA
catcgtgcagcgggtgattttcgttactggctactacggcctgacgcaggggctgctatctgtcctgcgtctttt

SEQ ID NO: 808839 - DNA, 75 bp, synthetic construct
  source 1..75: mol_type = other DNA
gaaaaaggtatgacggaaatttttgtccgttttccggtggtggacgaagccaaagaacgcgagcagcgtaaattt

SEQ ID NO: 808840 - DNA, 75 bp, synthetic construct
  source 1..75: mol_type = other DNA
ccagcgcaggcgtcggcacctgtttcagccgccgcgccgtgaccgcactgttagctgacggtgacggtattgctt

SEQ ID NO: 808841 - DNA, 75 bp, synthetic construct
  source 1..75: mol_type = other DNA
ctgaactactttctctggcgcgaccgcaaaggggcaatcagtaactttgtcagcttcctcgcgatgctggtgatg

SEQ ID NO: 808842 - DNA, 75 bp, synthetic construct
  source 1..75: mol_type = other DNA
ttagctgacggtgacggtattgctttcgacgtgcagagtctgactgaagattacgacattggtttccgcctgaaa

SEQ ID NO: 808843 - DNA, 75 bp, synthetic construct
  source 1..75: mol_type = other DNA
tcggcggcgagcagcagaccgcgcaggccattgccgattcggtgtctacccagatgcgcgtagcgatgcctggca

SEQ ID NO: 808844 - DNA, 75 bp, synthetic construct
  source 1..75: mol_type = other DNA
caactggcagggaatcgttgagtcgctgacgctgccgaaattcactcgcaaatatgagaagtatcgcggcggcgg

SEQ ID NO: 808845 - DNA, 75 bp, synthetic construct
  source 1..75: mol_type = other DNA
gtggaaaaccggcgagagcagcagcactaaggtcagcagcaccaacagctacgcgaagctgaccattaacggtga

SEQ ID NO: 808846 - DNA, 75 bp, synthetic construct
  source 1..75: mol_type = other DNA
aatggcaagccaatcgatgatacacacactcatggtggtgttcagcgtggtggaagcagtaccgacggggtaaac

SEQ ID NO: 808847 - DNA, 75 bp, synthetic construct
  source 1..75: mol_type = other DNA
atcagagcgggacacaacaaagaaccagatccgtgttgctttgcctggcatcgtccagtcattcgatcctgacgc

SEQ ID NO: 808848 - DNA, 75 bp, synthetic construct
  source 1..75: mol_type = other DNA
ggatgagtgtcttgtcgtttttgccgatcgttgtattgatttctggtggcagagcggcgggatacaggagacggt

SEQ ID NO: 808849 - DNA, 75 bp, synthetic construct
  source 1..75: mol_type = other DNA
acacagaattttccattggtggtactgaactgctgctgtttaagcagatgggcaaagctacggtggatggcatcc

SEQ ID NO: 808850 - DNA, 75 bp, synthetic construct
  source 1..75: mol_type = other DNA
aatgccgggtgcagtggatgttgatctggggctggatgacggcgcactggatacggaattttccattggtggtac

SEQ ID NO: 808851 - DNA, 75 bp, synthetic construct
  source 1..75: mol_type = other DNA
gtattcaatgaaaattttagcgactcaagcaaagcatttgagaagagcatcgctgagaatcttcatgaattaaca

SEQ ID NO: 808852 - DNA, 75 bp, synthetic construct
  source 1..75: mol_type = other DNA
ctgaccttgcccaaatttacccggaagtttgagaagtatcgcgccggcggtatgccgggcgcggtggatgtggac

SEQ ID NO: 808853 - DNA, 75 bp, synthetic construct
  source 1..75: mol_type = other DNA
ttttctgttatgaccgaaacagcattctgacaaacaacaagaaaaaaacctgcatcctgttgctggcactaatac

SEQ ID NO: 808854 - DNA, 75 bp, synthetic construct
  source 1..75: mol_type = other DNA
tgaactgctgctgtttaagcagatgggcaaagctacggtggatggcatccagttgcgctttaccggctctatcca

SEQ ID NO: 808855 - DNA, 75 bp, synthetic construct
  source 1..75: mol_type = other DNA
ttgagcttaatcctgataccaggaaaattaaaattgtcgctccgggtggtcttgatgtggttgcccctctggctg

SEQ ID NO: 808856 - DNA, 75 bp, synthetic construct
  source 1..75: mol_type = other DNA
tggcggagcaatttattctgcgggaacaaacgatgccggtgatgtggatttaaatatcactaatgcgatatttga

SEQ ID NO: 808857 - DNA, 75 bp, synthetic construct
  source 1..75: mol_type = other DNA
acatattggcggcagtgatgccagccagaatggcgtttatgtcgtcattaatgcgggggatcagcgcgtaacgct

SEQ ID NO: 808858 - DNA, 75 bp, synthetic construct
  source 1..75: mol_type = other DNA
gggcaatgcagagcgatccgcaatcgatcgtgctaaatggcggagtattggatctctctgatttcaccacctggg

SEQ ID NO: 808859 - DNA, 75 bp, synthetic construct
  source 1..75: mol_type = other DNA
aagacgatggcgtggatcattaccactcgtcggggattatcgcctcgctggaagccggttatcagtggttaccgg

SEQ ID NO: 808860 - DNA, 75 bp, synthetic construct
  source 1..75: mol_type = other DNA
ttatcattacacagcagcggggcaactggctcagcatgaagacacttctacggtgcagcttagcggcgacttgtt

SEQ ID NO: 808861 - DNA, 75 bp, synthetic construct
  source 1..75: mol_type = other DNA
cgacatctacaggcattaaagtggttgatttcgcagccgatccaacgcaatttcaaaacaatgcgcagttcagtc

SEQ ID NO: 808862 - DNA, 75 bp, synthetic construct
  source 1..75: mol_type = other DNA
gatgctttctgtatcgtcgggccgcagtctcaggcgcagaaaataagcggaataagcaccagtggcgcgcagctg

SEQ ID NO: 808863 - DNA, 75 bp, synthetic construct
  source 1..75: mol_type = other DNA
aaagctggtggtaagagcctgatgacgcacacgcacggcggagtacagaccggcggcggtaacacaggagcgcct

SEQ ID NO: 808864 - DNA, 75 bp, synthetic construct
  source 1..75: mol_type = other DNA
aagcagaagaagccggagtagacttagtcgagatcagccctaacgccgatccgccggtttgtcgtataatggatt

SEQ ID NO: 808865 - DNA, 75 bp, synthetic construct
  source 1..75: mol_type = other DNA
ggtgacggcggttgtacagcctgctatccgttacgttgaaattgataacgacggcaaccgcattaccaaaaatta

SEQ ID NO: 808866 - DNA, 75 bp, synthetic construct
  source 1..75: mol_type = other DNA
cgctaacgttcccggttaaagccggtgatgaatgcctggtgattttcgccgatcgctgcatcgatttctggtggc

SEQ ID NO: 808867 - DNA, 75 bp, synthetic construct
  source 1..75: mol_type = other DNA
atccgttcggttgaaacggataacgacgggaaccgcgttaccaaaaattacccgctgctggtggatgtaccggtg

SEQ ID NO: 808868 - DNA, 75 bp, synthetic construct
  source 1..75: mol_type = other DNA
aaatcccagctcgctcaaatatgagacaattacttagcaatgtaaaatatgtctatattcctgcaatcaaggaca

SEQ ID NO: 808869 - DNA, 75 bp, synthetic construct
  source 1..75: mol_type = other DNA
tgaggttagttagaaaatttactaaggaattcaaagctgaactaaatgcgataaactcaaatttatatgtttcag

SEQ ID NO: 808870 - DNA, 75 bp, synthetic construct
  source 1..75: mol_type = other DNA
gattaatatctcctaccgccatggaaagggttatgcaagttgcatatactgtaaaactaaattctggatgtatat

SEQ ID NO: 808871 - DNA, 75 bp, synthetic construct
  source 1..75: mol_type = other DNA
gtgttattaaaataattagaaaagtaaagaataataaagcgtatatagtcattgatgcgatacgtaacccgtatg

SEQ ID NO: 808872 - DNA, 75 bp, synthetic construct
  source 1..75: mol_type = other DNA
cccgtttcactgcgtttgaacggtcagcttataaccgtggctgaagaatctgttttctgtttgggtgattttatt

SEQ ID NO: 808873 - DNA, 75 bp, synthetic construct
  source 1..75: mol_type = other DNA
tgcaaagttctggattagccgcgcggtgagggttaacgaccgtctggaaattcatgatgttattgggcctgacga

SEQ ID NO: 808874 - DNA, 75 bp, synthetic construct
  source 1..75: mol_type = other DNA
gctgagtattataaaggattggatttgcggcgttatgaaatagtaaaaaattttgcagagactcattggaagaac

SEQ ID NO: 808875 - DNA, 75 bp, synthetic construct
  source 1..75: mol_type = other DNA
gttcagctgaatggaaaaggaaataacggaagtgtaacgctctcatccgaaggtaataagctgacattgtcaggc

SEQ ID NO: 808876 - DNA, 75 bp, synthetic construct
  source 1..75: mol_type = other DNA
gagttggcccaataaaaacccaagtggtaggagataaacttgagataactgccgatactgccagttttacgtcta

SEQ ID NO: 808877 - DNA, 75 bp, synthetic construct
  source 1..75: mol_type = other DNA
gcaagggcccaataaaaacccaggtggtagacgataaacttgagataactgccgatacagccagttttacgccta

SEQ ID NO: 808878 - DNA, 75 bp, synthetic construct
  source 1..75: mol_type = other DNA
caggcagcaaaagcggaaggacgtgacagcattgctgtcggacagggggccgtttcccggggacaaaacagcatt

SEQ ID NO: 808879 - DNA, 75 bp, synthetic construct
  source 1..75: mol_type = other DNA
gaaatcaatcaaatgccttaggctttaatgctaaagcagatgctgaaaacagtattgctttggggagttatacta

SEQ ID NO: 808880 - DNA, 75 bp, synthetic construct
  source 1..75: mol_type = other DNA
taaagaggagctaattaatcccggtgatatggttacgctgaaagccggtaaaaatctcagcgtgaaacaaagtga

SEQ ID NO: 808881 - DNA, 75 bp, synthetic construct
  source 1..75: mol_type = other DNA
caaccgaccaagaaagagctgattgataaccaggtagcgggcggttttgatgaagccgcttaccaacagttactt

SEQ ID NO: 808882 - DNA, 75 bp, synthetic construct
  source 1..75: mol_type = other DNA
gctgggcgtgtgggataaagaccggatccccgcaggggttgaagtgacaaatacaggtgaaatcgagatgggaaa

SEQ ID NO: 808883 - DNA, 75 bp, synthetic construct
  source 1..75: mol_type = other DNA
tggggaaattatgaggggatctctcagtatcaggcattttttagcgatgttagtgatgctcaaggcgcatgccag

SEQ ID NO: 808884 - DNA, 75 bp, synthetic construct
  source 1..75: mol_type = other DNA
tggatgcagcgcagtcagcaaacgctcgaacaatggtttgaacccggaaccgcccgcgcgcttgatgcgtttatt

SEQ ID NO: 808885 - DNA, 75 bp, synthetic construct
  source 1..75: mol_type = other DNA
tccataaacatcatcaaaacaaatataaatgtgttggcattgtagatgcagataaagatggtataaatgtcaaaa

SEQ ID NO: 808886 - DNA, 75 bp, synthetic construct
  source 1..75: mol_type = other DNA
caagcaaagcatttgagaagagtatagctgagaatcttcatgagttaacaaaagagattaacgaatctcttggtt

SEQ ID NO: 808887 - DNA, 75 bp, synthetic construct
  source 1..75: mol_type = other DNA
accgtctccggtgaaattctccaacatgtggctggtgaatttgcgaataaccggaaccgggcttgcctatcgcgc

SEQ ID NO: 808888 - DNA, 75 bp, synthetic construct
  source 1..75: mol_type = other DNA
tttccccgagagtattcagcggatcctcgccaaccaactgggtctggattttatcgaccgttcaaagaaccgcga

SEQ ID NO: 808889 - DNA, 75 bp, synthetic construct
  source 1..75: mol_type = other DNA
tggcccagaagatcctcaccgatcgcttcccggcaagtattcagcggatcctggccaaccaactgggattcgatt

SEQ ID NO: 808890 - DNA, 75 bp, synthetic construct
  source 1..75: mol_type = other DNA
tccgcgactgtttaactacggcctggagatccacgaaccgcttactcgcctgctgaaagagtttggccccaagcg

SEQ ID NO: 808891 - DNA, 75 bp, synthetic construct
  source 1..75: mol_type = other DNA
cagcaaggcaaaggcgtctctttgtcaaaagcgatcaacatcattgagaacggactgcgggtgagtcttgatgaa

SEQ ID NO: 808892 - DNA, 75 bp, synthetic construct
  source 1..75: mol_type = other DNA
atggatagccatacgctgattcaggcgctgatttatctcggttcggcagcgctgattgtacccattgcggtacgt

SEQ ID NO: 808893 - DNA, 75 bp, synthetic construct
  source 1..75: mol_type = other DNA
aagtcgccgacttctgtggcgtttcagtatcgaccgttcttcgctggaacagtgtaaacaggagaactggccaga

SEQ ID NO: 808894 - DNA, 75 bp, synthetic construct
  source 1..75: mol_type = other DNA
aacgtgcggctgagattgttgccgatgccggaatggtgattgttagtgtgccgattcatgttactgagcaggtca

SEQ ID NO: 808895 - DNA, 75 bp, synthetic construct
  source 1..75: mol_type = other DNA
tcgccaaattaccgcctttaccgcaggattgtattctggtcgatctggcatcggtgaaaaatggaccgttacagg

SEQ ID NO: 808896 - DNA, 75 bp, synthetic construct
  source 1..75: mol_type = other DNA
cacagaaagaagtcttgaacttttccgggcatatagctatactccccgcatagctgaattgttggctatacggtt

SEQ ID NO: 808897 - DNA, 75 bp, synthetic construct
  source 1..75: mol_type = other DNA
tgattaacattggtacggcaatcagccagcagggcgatcgccaggcagcattaatgcagcaggtggctgaaacta

SEQ ID NO: 808898 - DNA, 75 bp, synthetic construct
  source 1..75: mol_type = other DNA
tttctggagcaaattcaggtctggggcgctcggctgcatcgtattagcgccgtcgagcacgatcagaatatggcg

SEQ ID NO: 808899 - DNA, 75 bp, synthetic construct
  source 1..75: mol_type = other DNA
agagctgctgaatttattagcgaagcgtctggaactggttgccgaagtgggcgaagtaaaaagccgctttggact

SEQ ID NO: 808900 - DNA, 75 bp, synthetic construct
  source 1..75: mol_type = other DNA
tcaggttatattggatttgtcaggatttacatctcagcgaaaggttatccatcagtagcgtctagtgccggggat

SEQ ID NO: 808901 - DNA, 75 bp, synthetic construct
  source 1..75: mol_type = other DNA
aactaatgctaaatccagtgaaacaaacgcggcgaaatctgcggcggacgcacttaattatcgcaaccaggccca

SEQ ID NO: 808902 - DNA, 75 bp, synthetic construct
  source 1..75: mol_type = other DNA
cgcgtgattgtcctgatatttccggcaacccatcagggtatatcggatttatgcgcattatgagtaatgcaaaag

SEQ ID NO: 808903 - DNA, 75 bp, synthetic construct
  source 1..75: mol_type = other DNA
aatggcggcggtgttgttattaacgccccgcagaaaaaacaaaaagatgctgattacagcaaacttatcttttat

SEQ ID NO: 808904 - DNA, 75 bp, synthetic construct
  source 1..75: mol_type = other DNA
gtgattttagccatgcggtacgcgatataaaccagtggattaatggttattacaacgtttatcgacctcacacga

SEQ ID NO: 808905 - DNA, 75 bp, synthetic construct
  source 1..75: mol_type = other DNA
ttatcagggattggttgttcacacagggcaaaactggagcactcaacatacagagaatgtaaataagtttaagcc

SEQ ID NO: 808906 - DNA, 75 bp, synthetic construct
  source 1..75: mol_type = other DNA
agccaccgtccgccatgttttgttgcactatatcaaccgactttccgattgcttgtatgccctcgcccgcgtgga

SEQ ID NO: 808907 - DNA, 75 bp, synthetic construct
  source 1..75: mol_type = other DNA
tcattcatagcaggtacgaagagaaaataaacatgagacagaatgcccagttaaatacagcggcagcctcgctct

SEQ ID NO: 808908 - DNA, 75 bp, synthetic construct
  source 1..75: mol_type = other DNA
acgatagaacaacgtacttctcagcgccggatgtggacttgagtttgtacgaccacatcattgtttgcctgtctg

SEQ ID NO: 808909 - DNA, 75 bp, synthetic construct
  source 1..75: mol_type = other DNA
gggaggaaagtgcaaacagatccaagtacaaccagcttgaggctcatgcctgtgacagaagatatgggaagactg

SEQ ID NO: 808910 - DNA, 75 bp, synthetic construct
  source 1..75: mol_type = other DNA
ttcccgatggaggcgcggcatctttactacgaagccagcacgatgattattggtctgattaacctcggccatatg

SEQ ID NO: 808911 - DNA, 75 bp, synthetic construct
  source 1..75: mol_type = other DNA
tgatgttgatgaagcgcaggcattgcgtctggcggcggcactggagcaaggttccagccatccgctggcacgggc

SEQ ID NO: 808912 - DNA, 75 bp, synthetic construct
  source 1..75: mol_type = other DNA
gaaaagcctgctgaacggtgcagcgacgatggatacgctggtggcgctgggtactggcgtggcgtggctctattc

SEQ ID NO: 808913 - DNA, 75 bp, synthetic construct
  source 1..75: mol_type = other DNA
ttcgtagcgcggcaatgcgcgcagatgaactgcatattcccgtagtcattagcatcgttgatgccaacggtacgg

SEQ ID NO: 808914 - DNA, 75 bp, synthetic construct
  source 1..75: mol_type = other DNA
gcatcagcggtggtagcgttgaacaagatatggatattgcacaagccgcaatggcagcaattaatgcaggagcaa

SEQ ID NO: 808915 - DNA, 75 bp, synthetic construct
  source 1..75: mol_type = other DNA
cactatatcaaccgactttccgattgcttgtatgccctcgcccgcgtggaagacaacgttgttcatcaaaacctg

SEQ ID NO: 808916 - DNA, 75 bp, synthetic construct
  source 1..75: mol_type = other DNA
atgatttttggttacgcgagagtctcaacaaaggatcagaatcttgagcgtcagttggcagtactggaacctgtt

SEQ ID NO: 808917 - DNA, 75 bp, synthetic construct
  source 1..75: mol_type = other DNA
ctcaatgagcttcgacaactccccacaatcccgcctaatcctaaccatgatgggagccgttgcagaatttgagcg

SEQ ID NO: 808918 - DNA, 75 bp, synthetic construct
  source 1..75: mol_type = other DNA
gtatcagcggcggtagcgttgaacaagacatggatattgcacaaaccgcaatggcagcaattaacgcaggagcaa

SEQ ID NO: 808919 - DNA, 75 bp, synthetic construct
  source 1..75: mol_type = other DNA
atgagtaaccgttattggatgatctccttccataaaaatacgcgtaatctaatggttcgctctgtaccaaaagaa

SEQ ID NO: 808920 - DNA, 75 bp, synthetic construct
  source 1..75: mol_type = other DNA
atggtctccagcggatagggccgtcggccattgcccgccttgggataaaacggctcgatgacagcggtcatattc

SEQ ID NO: 808921 - DNA, 75 bp, synthetic construct
  source 1..75: mol_type = other DNA
tgcccggtttggcgacaatacgcgtctggggctggaagttgaacgctctgcatttggtaaatacaacacagatga

SEQ ID NO: 808922 - DNA, 75 bp, synthetic construct
  source 1..75: mol_type = other DNA
atctcgttttgagggaatgtctatgtttgcccttgaagcattatatactcaaaatttatgtctattcagcaacac

SEQ ID NO: 808923 - DNA, 75 bp, synthetic construct
  source 1..75: mol_type = other DNA
tggatttgtccgagtccgtatcggcctcatcatgggcgcaaaaactggtttctgggcattgggcgttttactgct

SEQ ID NO: 808924 - DNA, 75 bp, synthetic construct
  source 1..75: mol_type = other DNA
cgtaaccgcacaatgtggggaatgatgctcggattcagtggcatcaactacactgcgtggctgtatctggcctag

SEQ ID NO: 808925 - DNA, 75 bp, synthetic construct
  source 1..75: mol_type = other DNA
ttcatctgcgcctcttttgcgccgatcattactggttttattgttgataccacccactcattccgtctggcacta

SEQ ID NO: 808926 - DNA, 75 bp, synthetic construct
  source 1..75: mol_type = other DNA
ttgtcggcgcaccactgcatgacccatgcaccatcgcctggctgttgaaaccggagttattggtaatgactccaa

SEQ ID NO: 808927 - DNA, 75 bp, synthetic construct
  source 1..75: mol_type = other DNA
attatcgcggacaacgtgcacggcgaaagtggactggacggcccggcattaccggaacccgcattcgcaccgcaa

SEQ ID NO: 808928 - DNA, 75 bp, synthetic construct
  source 1..75: mol_type = other DNA
agtgggaatcacaggcaatatcagtcagcgagtttccctgcgcggtagcgtggcgtggcagaaaggaagcgacga

SEQ ID NO: 808929 - DNA, 75 bp, synthetic construct
  source 1..75: mol_type = other DNA
ttaatagccatcctgagttgcatagcaaaattgcccgaattgtgattatgggcggcgcaatgggactcggtaact

SEQ ID NO: 808930 - DNA, 75 bp, synthetic construct
  source 1..75: mol_type = other DNA
cgcatgttgaccttacttaaccgcaccgatattccggttgctggcggcgcggtgaaaccactcatgcgtgatttg

SEQ ID NO: 808931 - DNA, 75 bp, synthetic construct
  source 1..75: mol_type = other DNA
ataaaccgaatgccactgtaatggtcgatattgatcgtcagggctttgttgatttactggctgagcgtctgaaat

SEQ ID NO: 808932 - DNA, 75 bp, synthetic construct
  source 1..75: mol_type = other DNA
gttttcctcaggttaagaacccgcaccagcttgctaaatcaggtaattgtgactggcggaatcatggctggaata

SEQ ID NO: 808933 - DNA, 75 bp, synthetic construct
  source 1..75: mol_type = other DNA
tgctgattgcctggaagctggaacaacagcaacaggaaaatagcgcggcgctgaaatcgcagcggcgaatgttcc

SEQ ID NO: 808934 - DNA, 75 bp, synthetic construct
  source 1..75: mol_type = other DNA
ctgcgttcggcgctggtctctttggatggcgataatgcatgggcattaagtgaacgctggtgtggtacgattcag

SEQ ID NO: 808935 - DNA, 75 bp, synthetic construct
  source 1..75: mol_type = other DNA
ttcaccgtgctaacaaaacgtacccgggtttatatctccttagcgatgcagcaagaacaaagcagccattagaaa

SEQ ID NO: 808936 - DNA, 75 bp, synthetic construct
  source 1..75: mol_type = other DNA
agaaacgggccgctactctgacacgctgcgttcagctctggtttctctggatggcgataacgcatgggcattaag

SEQ ID NO: 808937 - DNA, 75 bp, synthetic construct
  source 1..75: mol_type = other DNA
gcagcaacaggaaaatagcgcggcgctgaaatcgcagcggcgaatgttccatcaccagattgaacgtggcaaccc

SEQ ID NO: 808938 - DNA, 75 bp, synthetic construct
  source 1..75: mol_type = other DNA
ttgccatgaaaacggcgacccatgaacttgcttctgcggtacaacccggcgcgccgctgtatggactggaaagcc

SEQ ID NO: 808939 - DNA, 75 bp, synthetic construct
  source 1..75: mol_type = other DNA
aaaccggtagccgccgttctggaagcaaccgcgccagatggctattccggtgcgattcagctgctggtgggagcc

SEQ ID NO: 808940 - DNA, 75 bp, synthetic construct
  source 1..75: mol_type = other DNA
cacccattttgcgggtaaaaaaatcagtggtgcagatgatgcgcactgggcggtgaagaaagatggtggtgattt

SEQ ID NO: 808941 - DNA, 75 bp, synthetic construct
  source 1..75: mol_type = other DNA
gcaccgcaagcacaagctgcggccatacaaccggaagggcaatgcagcgaaaacaagccgaaagttgttccaatg

SEQ ID NO: 808942 - DNA, 75 bp, synthetic construct
  source 1..75: mol_type = other DNA
gtgctggaaaccgaagccgggcgttatcctgacacgctgcgttcgtcggggccgggcggtcaacatgtcaataaa

SEQ ID NO: 808943 - DNA, 75 bp, synthetic construct
  source 1..75: mol_type = other DNA
gtatcacgctggcgctgtttgccgcaggctcaaccggattaaccgcagctattaaccagatgactaaaaccacta

SEQ ID NO: 808944 - DNA, 75 bp, synthetic construct
  source 1..75: mol_type = other DNA
atgctgaaaactatccgaaaacacggtattacactggcgctgtttgctgcgggttcaacaggtttaacggcggcc

SEQ ID NO: 808945 - DNA, 75 bp, synthetic construct
  source 1..75: mol_type = other DNA
ctgccagcaatccttgtgcgcaatatcatccagttactgcgcgaagggaaaaaggtcgaaattattgttggtgat

SEQ ID NO: 808946 - DNA, 75 bp, synthetic construct
  source 1..75: mol_type = other DNA
cggaaatcaagaacgatattcgtctgttccgccaggagctgcgtgatgccgcttatcatttccagggcgatgccg

SEQ ID NO: 808947 - DNA, 75 bp, synthetic construct
  source 1..75: mol_type = other DNA
ctggtgggcgttgacgctacgcaagaactacgcgttcactccggcggcacgccaaaaaatctaagtcacctgcct

SEQ ID NO: 808948 - DNA, 75 bp, synthetic construct
  source 1..75: mol_type = other DNA
tgggcgttctgcattttaaaggctttatcatcgatgactgtgtgctttacagcggtgccagtctgaacgacgttt

SEQ ID NO: 808949 - DNA, 75 bp, synthetic construct
  source 1..75: mol_type = other DNA
cggaagatgaacctttcaagataattggcgcactgccttatctctatgagatcaatctgcgtcgtttcctgagcc

SEQ ID NO: 808950 - DNA, 75 bp, synthetic construct
  source 1..75: mol_type = other DNA
ccagctagtggttcggttatggaaagatgacgacaacacctatcacctgaaagggatgtgggttgatgataagtg

SEQ ID NO: 808951 - DNA, 75 bp, synthetic construct
  source 1..75: mol_type = other DNA
ccacagccgatgacaccacgcgccaggatatcgtgcgcctgctggggctgaacgatccgctgattcaaatcagca

SEQ ID NO: 808952 - DNA, 75 bp, synthetic construct
  source 1..75: mol_type = other DNA
actggtggcggaaaatccctttgctatcaaatccctgccttattgctaaacggccttaccgtggttgtctcaccg

SEQ ID NO: 808953 - DNA, 75 bp, synthetic construct
  source 1..75: mol_type = other DNA
atgacacaaacaagttacagcaaactatcacagcgcgacgttgatcgcgcagaaacagatttactcatcaacctg

SEQ ID NO: 808954 - DNA, 75 bp, synthetic construct
  source 1..75: mol_type = other DNA
attatggcttcttatttcctttattttgttgcgattcttgtttttgccagttatctctatgtcacgttacgtagt

SEQ ID NO: 808955 - DNA, 75 bp, synthetic construct
  source 1..75: mol_type = other DNA
acgatagcaccaactccgacgcttggggcttcggcttgaaagccggttacgacttcaaactgggtgatgctggtt

SEQ ID NO: 808956 - DNA, 75 bp, synthetic construct
  source 1..75: mol_type = other DNA
gccagcgaaatgctcagcgttaacggcgttgggatgcgcaagctggaacgctttggcaaaccgtttatggcgctg

SEQ ID NO: 808957 - DNA, 75 bp, synthetic construct
  source 1..75: mol_type = other DNA
cggcagcgtccggaactggatgtgcgggtgctggtcgactggcatcgtgcacaacgtggacgcattggcgctgcg

SEQ ID NO: 808958 - DNA, 75 bp, synthetic construct
  source 1..75: mol_type = other DNA
tattaatagatgaatattctgacatccctaaaattctagctaagatagagcaatcatttaaaaagaaaacgatat

SEQ ID NO: 808959 - DNA, 75 bp, synthetic construct
  source 1..75: mol_type = other DNA
agactccactctggtttcagactctatctctctgacgggcggttcggcactgaacatcaacgaagatggtcatgt

SEQ ID NO: 808960 - DNA, 75 bp, synthetic construct
  source 1..75: mol_type = other DNA
cattcgacaattccacactgatgggcgatgtattcttctcaagtaattttgatgagaacttcttcccacaaggtc

SEQ ID NO: 808961 - DNA, 75 bp, synthetic construct
  source 1..75: mol_type = other DNA
aatgttttcttctgcaaaagctcaagtattaatgatgattgtgtgaagaaaagctataacaaaaacgtttatcca

SEQ ID NO: 808962 - DNA, 75 bp, synthetic construct
  source 1..75: mol_type = other DNA
tagcggacatcaacaccatctttactgagatggaagaaggcaaaatccgtggccgcatggtgattgatttccgtc

SEQ ID NO: 808963 - DNA, 75 bp, synthetic construct
  source 1..75: mol_type = other DNA
caatgatgagcagttaaaactggcaaccgaaatgggcgcagatttagcgattaactcacacaccgaagacgccgc

SEQ ID NO: 808964 - DNA, 75 bp, synthetic construct
  source 1..75: mol_type = other DNA
tggctacgactttgaaatcgtgaaagccgaagagattcaggaatatctggatgctggttggtttgcacatcccga

SEQ ID NO: 808965 - DNA, 75 bp, synthetic construct
  source 1..75: mol_type = other DNA
ctttttttatgggttttagttcattacctgcatgggcaatggactgctatgctgaacatgaaggtggaaataccg

SEQ ID NO: 808966 - DNA, 75 bp, synthetic construct
  source 1..75: mol_type = other DNA
gccaaaaaatctaagtcacctgcctttgttattccagtctgcgcgtgaacagattgacgttgtttcatgcgggaa

SEQ ID NO: 808967 - DNA, 75 bp, synthetic construct
  source 1..75: mol_type = other DNA
tcctgaacgtccagctgctgcagaacagcatggacgcgccgaaaatcattggatctttcccgtgtaaaaaggcgt

SEQ ID NO: 808968 - DNA, 75 bp, synthetic construct
  source 1..75: mol_type = other DNA
atggggcttatgcctgctaaagatggcaacaattatggctttgaatacattcgccgtccgggtaccgaaacgcga

SEQ ID NO: 808969 - DNA, 75 bp, synthetic construct
  source 1..75: mol_type = other DNA
gcttatgccagccaaagacggtaacaattacggtttcgagttcattcgccgtccgggtaccgaaacgcgtttctt

SEQ ID NO: 808970 - DNA, 75 bp, synthetic construct
  source 1..75: mol_type = other DNA
ctgtaacagccttgatatccagcaaaagcagctgatgttaaagtttctgagtcaggacggcactgctgccgcata

SEQ ID NO: 808971 - DNA, 75 bp, synthetic construct
  source 1..75: mol_type = other DNA
ttgttgcgattcttgtgttttccagttatctctatgtcacgttacgcaatctgtttctgaataatttaacgctgg

SEQ ID NO: 808972 - DNA, 75 bp, synthetic construct
  source 1..75: mol_type = other DNA
tcatgctaccgggcgaatgaaacacgtcagttcgccaggatgttggtaagcgtacagcctgaaccgtctggtcag

SEQ ID NO: 808973 - DNA, 75 bp, synthetic construct
  source 1..75: mol_type = other DNA
gaattggatggagagcactacacaaaaagtgtagtgcaaaaagcgaacaaaacttcgatggttatcattgagatg

SEQ ID NO: 808974 - DNA, 75 bp, synthetic construct
  source 1..75: mol_type = other DNA
atttttgttggggatagtgaattcaaactcgataaaataaaagctggagggttttaccttggttcaaagattagt

SEQ ID NO: 808975 - DNA, 75 bp, synthetic construct
  source 1..75: mol_type = other DNA
aacacgccttattctgatgctattggtgctggctttactaagtatgaaaccattcataatggtattgctgcaact

SEQ ID NO: 808976 - DNA, 75 bp, synthetic construct
  source 1..75: mol_type = other DNA
gctgtttactgtcagtgcgggtgggcagccagcctattcacaggattttgcgccactgccggcggatattcgtca

SEQ ID NO: 808977 - DNA, 75 bp, synthetic construct
  source 1..75: mol_type = other DNA
ctcgcccggtcactgcttcagtcccagcagaactcagacgaggcgctgaacatcaaacgggatgccgacccgacg

SEQ ID NO: 808978 - DNA, 75 bp, synthetic construct
  source 1..75: mol_type = other DNA
atgaggccgggatatggaaaatcattccgccgtcggattttgcccgcgacgtggccgggttgttccagcgtctgc

SEQ ID NO: 808979 - DNA, 75 bp, synthetic construct
  source 1..75: mol_type = other DNA
ggtttgcgctgctggttgcgctgttatgtatcgcagcgccagaactggccctcgcagctggcggggcagacaccg

SEQ ID NO: 808980 - DNA, 75 bp, synthetic construct
  source 1..75: mol_type = other DNA
gaattggaaggcgagacctacacaaaaagtgtaggtcggaaaaacggggctgacattgatgttatctccatgact

SEQ ID NO: 808981 - DNA, 75 bp, synthetic construct
  source 1..75: mol_type = other DNA
caggaaaaatggagcggtgacggcgcaggactcaaggccatcaccggcggcgatgcagtttcagttgacccgaaa

SEQ ID NO: 808982 - DNA, 75 bp, synthetic construct
  source 1..75: mol_type = other DNA
ccgcgttctggcgctggcttgaccgtgccgccggtggtcgtgcggaaaaacgcgacgtgattctggccgcactgt

SEQ ID NO: 808983 - DNA, 75 bp, synthetic construct
  source 1..75: mol_type = other DNA
cgacaacgaagtaccaccgggtcaaccaggtgagctttgtgtcaaaggaccgcaggtgatgctgggttactggca

SEQ ID NO: 808984 - DNA, 75 bp, synthetic construct
  source 1..75: mol_type = other DNA
acgtctcgatccggttcgagtgatgattgaaaactacgaacctggtaagggaagaatcaccatcacctgctacgg

SEQ ID NO: 808985 - DNA, 75 bp, synthetic construct
  source 1..75: mol_type = other DNA
tttgttggtattggtgtcaacaaagcctttaatgcggaagcaggcccactgattgccgtttgtatgggggtgatc

SEQ ID NO: 808986 - DNA, 75 bp, synthetic construct
  source 1..75: mol_type = other DNA
atgtggaatgaccttacattaccgaagccgctattaccgaagctgttcacccgcgtgtgggtgcagactgatacc

SEQ ID NO: 808987 - DNA, 75 bp, synthetic construct
  source 1..75: mol_type = other DNA
tcggaatggcatcagacatcagtccgattagcagggcttttaagtatgcattggatggaatcgcaaagaaaaaat

SEQ ID NO: 808988 - DNA, 75 bp, synthetic construct
  source 1..75: mol_type = other DNA
agaccatagacgcgcagagttagcctgtcaccagatttttgataaagttcctaaatcggcttggaaatttgttaa

SEQ ID NO: 808989 - DNA, 75 bp, synthetic construct
  source 1..75: mol_type = other DNA
tggccaacgataccaaacccgaaataccagtatctggaacgcgtacttaatgcagtgagagacggtcttaagcaa

SEQ ID NO: 808990 - DNA, 75 bp, synthetic construct
  source 1..75: mol_type = other DNA
ttcaccgacacgggcggcttcaccgatcacgtctttgccgcatgtgccattctcggctaccggttcgctccgcgc

SEQ ID NO: 808991 - DNA, 75 bp, synthetic construct
  source 1..75: mol_type = other DNA
tcggctacaatctcgttctgcgaatcagggatctgccatcgaagcggttgtacgtatttaatcccgatacgaccc

SEQ ID NO: 808992 - DNA, 75 bp, synthetic construct
  source 1..75: mol_type = other DNA
gtggatgcgctgattaatcgtagtcgccgcgctcctaaccttaagaaccgtaccgatgaggcaactgaacaggct

SEQ ID NO: 808993 - DNA, 75 bp, synthetic construct
  source 1..75: mol_type = other DNA
atgatgctggtgaatgggtaattctttgcccgcacgtagctaaaacccatccgaaaatcgttaaatggagctatg

SEQ ID NO: 808994 - DNA, 75 bp, synthetic construct
  source 1..75: mol_type = other DNA
gtaccctgaatatcaatcatagtgctttggccagcatacctgcccatcgcattgcccggctgcgtcggcagggtg

SEQ ID NO: 808995 - DNA, 75 bp, synthetic construct
  source 1..75: mol_type = other DNA
tgcggaaactcgcctcctatccgcggcagaacgagctcgcgacagccctgcgggaagtcggtcgcgtcgagcgca

SEQ ID NO: 808996 - DNA, 75 bp, synthetic construct
  source 1..75: mol_type = other DNA
ggttaggaacgctgatggcgatgaccctggagtcggtggcgcgtcaggaaggcgttaagcgcgtgacctgtagcg

SEQ ID NO: 808997 - DNA, 75 bp, synthetic construct
  source 1..75: mol_type = other DNA
gacaaaatcatcgaccatatccctggcctcaaccgcattcatatcgacccggaaaccgtgcagaaaaagtttggc

SEQ ID NO: 808998 - DNA, 75 bp, synthetic construct
  source 1..75: mol_type = other DNA
ccaccttcatccgttctacatcatccataaccatgaagactttatcgaacgcttcatgaagcgcctggacgagaa

SEQ ID NO: 808999 - DNA, 75 bp, synthetic construct
  source 1..75: mol_type = other DNA
taaaaacggtgagtgcttatcgggtgacatatatccgcgaaggttatgcgcatccctgcgtgtcgtcacatatgc

SEQ ID NO: 809000 - DNA, 75 bp, synthetic construct
  source 1..75: mol_type = other DNA
catacgctgtttgccgggagtttattctcactggcaacgctcaccggttgggggcttatctggctgatgctgcgc

SEQ ID NO: 809001 - DNA, 75 bp, synthetic construct
  source 1..75: mol_type = other DNA
gccgattgtatattaatgccgacaatgaagcgtccattcgctttatggccgttcacccggaggtgcaggacaaag

SEQ ID NO: 809002 - DNA, 75 bp, synthetic construct
  source 1..75: mol_type = other DNA
agcaatcatccacgcaccggttaacggggttgttcttggcattccagaccatgggttcgacggaaaagagctcgc

SEQ ID NO: 809003 - DNA, 75 bp, synthetic construct
  source 1..75: mol_type = other DNA
aaaaaacttgtattacctgacgaatatatagcacttgaatttaaaggtatgagcggagcaggtgctatagaagta

SEQ ID NO: 809004 - DNA, 75 bp, synthetic construct
  source 1..75: mol_type = other DNA
agaactgagtgcgaacccggcagaaacggttgttgagggactagactggccccctgaatctccagacaaccaata

SEQ ID NO: 809005 - DNA, 75 bp, synthetic construct
  source 1..75: mol_type = other DNA
atcatcgacttcgagcctggcgatccggattctggatttgcgcatacgctaggcaagatagtgattcgtctggag

SEQ ID NO: 809006 - DNA, 75 bp, synthetic construct
  source 1..75: mol_type = other DNA
acagcgaacgccgatgtaaacggcgctcgtaacattttagctgcggggcacgccgttcttgcctgtggagagatg

SEQ ID NO: 809007 - DNA, 75 bp, synthetic construct
  source 1..75: mol_type = other DNA
catgatcgccggcaatcacgatctggaaaccaaagactcatgtcctatgggcaatgcagctgcggcgcttaattc

SEQ ID NO: 809008 - DNA, 75 bp, synthetic construct
  source 1..75: mol_type = other DNA
cgcctattcgccattttttgatgattaaacccgtcgctactctggatgacattttgcatcgcggcgactggtgcg

SEQ ID NO: 809009 - DNA, 75 bp, synthetic construct
  source 1..75: mol_type = other DNA
acccctgctggctcgatgaagatgacgaaaacctgcccgtggtgctcgatgccatcgtgaaccggggagcacgtt

SEQ ID NO: 809010 - DNA, 75 bp, synthetic construct
  source 1..75: mol_type = other DNA
ccagtggtctggtctgtgatgtgctgcgtataccggatgaaccgtcccgtcgctggtttgacagggatattctgc

SEQ ID NO: 809011 - DNA, 75 bp, synthetic construct
  source 1..75: mol_type = other DNA
tgttacatgaggtcatggcagaagcgcgtgcagaaatcagtcttgtccgcaatgccctgtcagcaatccggccag

SEQ ID NO: 809012 - DNA, 75 bp, synthetic construct
  source 1..75: mol_type = other DNA
tatcctgtccagtgggctgcctgcgatgtgctgcgtatacctgatgaaccgtcccgtcgctgtttgaccgggatt

SEQ ID NO: 809013 - DNA, 75 bp, synthetic construct
  source 1..75: mol_type = other DNA
gctggcgcagggctggccggaagagacggatgttgaccagcggaacccgaagtatccgggctggatcagcattta

SEQ ID NO: 809014 - DNA, 75 bp, synthetic construct
  source 1..75: mol_type = other DNA
ggcgacgttacttatcaaccgtcacggcggcgtactgccgccgctcctggcctccgccattcagagactgaccgg

SEQ ID NO: 809015 - DNA, 75 bp, synthetic construct
  source 1..75: mol_type = other DNA
ggcgtgcgcattcaacaatataccgggcaaaaatttatcaccaccatgccagaaaccggcaatcagaatccgcac

SEQ ID NO: 809016 - DNA, 75 bp, synthetic construct
  source 1..75: mol_type = other DNA
gagcagggtaatctggtggcggtgggccgactgtatattaatactgacaatgaagcgtccattcgctttatggcc

SEQ ID NO: 809017 - DNA, 75 bp, synthetic construct
  source 1..75: mol_type = other DNA
tatcaactctttgtggcggaactggcgatccttgcaaaggaatcgataagtattgaaaggctggcgtcttgtact

SEQ ID NO: 809018 - DNA, 75 bp, synthetic construct
  source 1..75: mol_type = other DNA
tcgacagttgcatttatctcgtggctggagaataacggagctttccgacatccatactggatgtgtaaagggtca

SEQ ID NO: 809019 - DNA, 75 bp, synthetic construct
  source 1..75: mol_type = other DNA
gagcgtggctggatgccgccaatggcaagacgttgccgacggcgtttctggtcggcgggggttttatggcggcgg

SEQ ID NO: 809020 - DNA, 75 bp, synthetic construct
  source 1..75: mol_type = other DNA
atggcaagcgttgctgcaatctctggcacacgatctcgaacagggcattgctttttccaatgccttattacccta

SEQ ID NO: 809021 - DNA, 75 bp, synthetic construct
  source 1..75: mol_type = other DNA
gcggcctgtacagagcaatttaatattttagggagttttttcactacggatattttgactgattatagccatctg

SEQ ID NO: 809022 - DNA, 75 bp, synthetic construct
  source 1..75: mol_type = other DNA
cgtgcgtcatctgcacgaggccccgttcggcccctggctctgtctggctattactgttcaactgatcttcttctg

SEQ ID NO: 809023 - DNA, 75 bp, synthetic construct
  source 1..75: mol_type = other DNA
atactcgatttttatctgttcagaacgctgaatgaagtgcgggaaatcacggaaagatgggtgtcagaatataac

SEQ ID NO: 809024 - DNA, 75 bp, synthetic construct
  source 1..75: mol_type = other DNA
caaacaagcgagcgaagtctttgcagtattaatcaacaaagataacgcggctggtatttctctgtttgatgcaaa

SEQ ID NO: 809025 - DNA, 75 bp, synthetic construct
  source 1..75: mol_type = other DNA
ccagccaatgcaaaatgctttcaaaatgcgtaaacgtgttgagaaagttaagcatgttgctgttaaaagccttga

SEQ ID NO: 809026 - DNA, 75 bp, synthetic construct
  source 1..75: mol_type = other DNA
gtcttgatcaataaagataaagcagcaggcatttccttatttgatgctaactctcagtttaagaaagccaagttt

SEQ ID NO: 809027 - DNA, 75 bp, synthetic construct
  source 1..75: mol_type = other DNA
tcacgcacgccgctgtccctgccactgtcgctgagcatgggactgctgtgtgcatgtaccgtgaccgacagcctg

SEQ ID NO: 809028 - DNA, 75 bp, synthetic construct
  source 1..75: mol_type = other DNA
atgaaacgttctataccgctctgggtgttgcagtaaatcttgatgttgaaagcaatatcaatattactaacaact

SEQ ID NO: 809029 - DNA, 75 bp, synthetic construct
  source 1..75: mol_type = other DNA
tgaagtaattgctccggcagatatgtatgatgttgcgccgaacagcctgacccctggtgccactatcgaagctaa

SEQ ID NO: 809030 - DNA, 75 bp, synthetic construct
  source 1..75: mol_type = other DNA
gcatacacctatcaggctgagcagcgtggtaacaccgttgttctgcatcagaccgagttgaccgactacgctaac

SEQ ID NO: 809031 - DNA, 75 bp, synthetic construct
  source 1..75: mol_type = other DNA
cttacgacagcatgcgttatgaactgggtgtagatgcaggttataccttcacctacagcgaagaccaggctctga

SEQ ID NO: 809032 - DNA, 75 bp, synthetic construct
  source 1..75: mol_type = other DNA
actacatcagcgaatgttgacgttgactctactgtatcgactgactggtatgatgttacaggtaatagcctgtat

SEQ ID NO: 809033 - DNA, 75 bp, synthetic construct
  source 1..75: mol_type = other DNA
cttgataccaacggtggttgggtagatgatgctcagaacgttgatgaactgaacattactctgaacaacggtagt

SEQ ID NO: 809034 - DNA, 75 bp, synthetic construct
  source 1..75: mol_type = other DNA
caaaatgctttcaaaatgcgtaaacgtgttgagaaagttaagcatgttgctgttaaaagccttgacatgcaatta

SEQ ID NO: 809035 - DNA, 75 bp, synthetic construct
  source 1..75: mol_type = other DNA
catgcgcaggtgaaatgcaacggcttgcagatcaatatgttgatggctgccgccgtgtgcgctgtcatcgccagt

SEQ ID NO: 809036 - DNA, 75 bp, synthetic construct
  source 1..75: mol_type = other DNA
gcctgctaataccaccgtttctcaaccgatgatcacactgttgctgattgcctgcccgctgctgccattcatcat

SEQ ID NO: 809037 - DNA, 75 bp, synthetic construct
  source 1..75: mol_type = other DNA
ccacagtagtgatgaaaattggcctgctgggcattttaaccctgtctttgctgggcggtaatgcgccgctgtggt

SEQ ID NO: 809038 - DNA, 75 bp, synthetic construct
  source 1..75: mol_type = other DNA
gctgaacatgaaggtggaaataccgttgtcattggttacgtaccaagaatctctatccccagcgatggtaaaaaa

SEQ ID NO: 809039 - DNA, 75 bp, synthetic construct
  source 1..75: mol_type = other DNA
atgcgctacttgttaattgttattactttttttatgggttttagttcattacctgcatgggcaatggactgctat

SEQ ID NO: 809040 - DNA, 75 bp, synthetic construct
  source 1..75: mol_type = other DNA
taatgcattacctgccccatcacctggagaagaatacccatcagcctggactaatataatgatgtttttaccagg

SEQ ID NO: 809041 - DNA, 75 bp, synthetic construct
  source 1..75: mol_type = other DNA
ggcaaactgtggtttgcgctggggcgtcttggcactctgctgctggcgattgcttgctggctgctgtggcagcgt

SEQ ID NO: 809042 - DNA, 75 bp, synthetic construct
  source 1..75: mol_type = other DNA
tatggcacgctggatctgcgcctgctggatatgcgtatgcaacaactgccgctcggttccgatatctggctgctc

SEQ ID NO: 809043 - DNA, 75 bp, synthetic construct
  source 1..75: mol_type = other DNA
aaagaactcacacctacaatgcaaagtatagacccccatattgaagtgagccctacaataggtaaaactatatct

SEQ ID NO: 809044 - DNA, 75 bp, synthetic construct
  source 1..75: mol_type = other DNA
ttgttgcccgtctgctggggccgctgctcgctgtgggtctggcaattaccggtgcgctggcggtgatgtgtatgg

SEQ ID NO: 809045 - DNA, 75 bp, synthetic construct
  source 1..75: mol_type = other DNA
tagcctgtacacggctgccgcgggtgttaccgtgctgactggcgcggttggcgtgagcggcgcgctttcgctggt

SEQ ID NO: 809046 - DNA, 75 bp, synthetic construct
  source 1..75: mol_type = other DNA
tggatatgcgtatgcaacagctgccgctcggttccgatatctggctgctcggtgtgattggttttggcctgctgg

SEQ ID NO: 809047 - DNA, 75 bp, synthetic construct
  source 1..75: mol_type = other DNA
gccgcagacgctgaaacggaggccgaccgcaaagcggcggccgcgctggccgccagactgatggagaaaacccaa

SEQ ID NO: 809048 - DNA, 75 bp, synthetic construct
  source 1..75: mol_type = other DNA
agcagaactccgacgaggctctcagcatcaagcgcgatgccgacccgacatttgatttttgcggctatctggaag

SEQ ID NO: 809049 - DNA, 75 bp, synthetic construct
  source 1..75: mol_type = other DNA
ccttgaaggacagaatcaggccggaaaacgtctgtggatagcggagggatacgcgaccgcacttaccgtgcatca

SEQ ID NO: 809050 - DNA, 75 bp, synthetic construct
  source 1..75: mol_type = other DNA
cgcagcggcggggtgtcacgtcgccgggtgattattcacttcccggagcagattgccccggaagagcgcgacccg

SEQ ID NO: 809051 - DNA, 75 bp, synthetic construct
  source 1..75: mol_type = other DNA
cttcagcttatcaattcagacggcctcaaacgcaccctgaaaggcggtcaggtcaaaggtgcatgccataccatt

SEQ ID NO: 809052 - DNA, 75 bp, synthetic construct
  source 1..75: mol_type = other DNA
gaccgcgctcaccgtgcatcacctgaccggcgaaaccgttatggtggcgctgtcgtccgtgaacctcctttctct

SEQ ID NO: 809053 - DNA, 75 bp, synthetic construct
  source 1..75: mol_type = other DNA
ctggcagctctttctcgaagtgaccggtcccggcgggagtggcaaaagtattctggccgaaatcgcgaccctgct

SEQ ID NO: 809054 - DNA, 75 bp, synthetic construct
  source 1..75: mol_type = other DNA
accggggaaaccgtcatggtggcgctgtcctccgtgaacctcctttctctggcgagccttgcccgtcagaaatat

SEQ ID NO: 809055 - DNA, 75 bp, synthetic construct
  source 1..75: mol_type = other DNA
ccgaccgtgacctgaacggcgacggccagagcaaagccgctgcggccgcagatgcctgtgagggcattgttgccc

SEQ ID NO: 809056 - DNA, 75 bp, synthetic construct
  source 1..75: mol_type = other DNA
agctggccgtcattgtgcgccagcttatgcagaaattcagcgacccgatgaccgcgcgcgcactgctccagtcgc

SEQ ID NO: 809057 - DNA, 75 bp, synthetic construct
  source 1..75: mol_type = other DNA
cgatgcggtctcagttgacccgaaataccagaacccatactcaacacatattccggcggtgattctggccgtgaa

SEQ ID NO: 809058 - DNA, 75 bp, synthetic construct
  source 1..75: mol_type = other DNA
ggggaaacgctggagactcacgcgccgaacttctggcgctggctcgaccgtgcggccggtaaaaatccacaaaaa

SEQ ID NO: 809059 - DNA, 75 bp, synthetic construct
  source 1..75: mol_type = other DNA
tataggtaatgccagcatcgtcccgcgtaattaccgcaaatatctctatcacgcgtatctggcctatatggaagc

SEQ ID NO: 809060 - DNA, 75 bp, synthetic construct
  source 1..75: mol_type = other DNA
tgtcctccgtgaacctcctttctctggcgagccttgcccgtcacaaattcccggcctgtcggattgtcattgccg

SEQ ID NO: 809061 - DNA, 75 bp, synthetic construct
  source 1..75: mol_type = other DNA
ggcgagccttgcccgtcagaaatatccggcctgtcagattgtgctcgccgccgaccgtgaccttaacggcgacgg

SEQ ID NO: 809062 - DNA, 75 bp, synthetic construct
  source 1..75: mol_type = other DNA
ggcgaaacgctggaaacccatgcgccggatttctggcgctggctcgaccgtgccgccggtggccgaccggaaaaa

SEQ ID NO: 809063 - DNA, 75 bp, synthetic construct
  source 1..75: mol_type = other DNA
caggagaagtggagcggcgacggcgccgggcttaaggctataactggtggcgatgcagtatctgtggaccccaaa

SEQ ID NO: 809064 - DNA, 75 bp, synthetic construct
  source 1..75: mol_type = other DNA
tgcctcagtggtggaaaccctgaaactgattattccgcagcaggattccccggcacggcgtctgattggttttcg

SEQ ID NO: 809065 - DNA, 75 bp, synthetic construct
  source 1..75: mol_type = other DNA
cccgcaagggcttccccggccgggaatgtctgacgctcaccgtcatgcataaaaccggcggcgtgacgttccgcg

SEQ ID NO: 809066 - DNA, 75 bp, synthetic construct
  source 1..75: mol_type = other DNA
tgtcctccgtgaacctcctttctctggcgagccttgcccgtcagaagtacccggcctgtcagattgtcctcgccg

SEQ ID NO: 809067 - DNA, 75 bp, synthetic construct
  source 1..75: mol_type = other DNA
accgcccgcgcactgctccagtcacagcagaactccgacgaggcgctcagtattaaacgtgatgccgacccgaca

SEQ ID NO: 809068 - DNA, 75 bp, synthetic construct
  source 1..75: mol_type = other DNA
acggccagtggcaacgcctatctgacccgcaagggcttccccgaccgggaatgtccggtactgtcggtcatgcat

SEQ ID NO: 809069 - DNA, 75 bp, synthetic construct
  source 1..75: mol_type = other DNA
cggcgcgccgtctgattggttttcgtaacggcgtactcgataccgctaccggtactttcagcccgcatcataaat

SEQ ID NO: 809070 - DNA, 75 bp, synthetic construct
  source 1..75: mol_type = other DNA
gcctgtggattgcggagggttatgcgacggcactcaccgtacatcacctgaccagcgaaaccgtcatggtggcgc

SEQ ID NO: 809071 - DNA, 75 bp, synthetic construct
  source 1..75: mol_type = other DNA
caggagaagtggagcggggacggcgcgggcctcaaggcgattaccggcggtgatgcggtatccgttgacccgaaa

SEQ ID NO: 809072 - DNA, 75 bp, synthetic construct
  source 1..75: mol_type = other DNA
cagggaatgcagactaacctggctctcagggaggaaagcaattctgactggctccccaaatgcggggatattgga

SEQ ID NO: 809073 - DNA, 75 bp, synthetic construct
  source 1..75: mol_type = other DNA
acagcgattttaaagtacgtcagtacctgactaaggaactggctaaagcgtccgtatctcgtatcgttatcgagc

SEQ ID NO: 809074 - DNA, 75 bp, synthetic construct
  source 1..75: mol_type = other DNA
acgttacgagaagagcgcgatgatcctgacctccaacctgccgttcgggcagtgggatcagacgttcgccggtga

SEQ ID NO: 809075 - DNA, 75 bp, synthetic construct
  source 1..75: mol_type = other DNA
caggggcgttacaaaacgaccctcaatcgcggtgtcatggccccaaaactgctcatcatcgacgaaataggctat

SEQ ID NO: 809076 - DNA, 75 bp, synthetic construct
  source 1..75: mol_type = other DNA
ataaaaatgcgccaatcttcaactatgccgactacggtctggtgggcgatatctacaaagtcgtccctgccctga

SEQ ID NO: 809077 - DNA, 75 bp, synthetic construct
  source 1..75: mol_type = other DNA
ggcggtgctgaatgctgaagtcggctgttcacgtccaattgccgaaggcgagaactggatggagcgtgaacgtta

SEQ ID NO: 809078 - DNA, 75 bp, synthetic construct
  source 1..75: mol_type = other DNA
caaagcaaaacgtgtggttggcgtcggtcgtggtctggcggcgcaggatgacctgaaaatggtccacgaactggc

SEQ ID NO: 809079 - DNA, 75 bp, synthetic construct
  source 1..75: mol_type = other DNA
gccagaagggcaaaaatcagtatcagaaactgggcgagaagggcgagtttcttgaagtcaccgaatataacgcgc

SEQ ID NO: 809080 - DNA, 75 bp, synthetic construct
  source 1..75: mol_type = other DNA
aattatcacgtcgctgaaagcacgccagacagcaaaccggcaatggtggcggaagactacgccaatcgtctgcgt

SEQ ID NO: 809081 - DNA, 75 bp, synthetic construct
  source 1..75: mol_type = other DNA
cttcccggcggtaaagacgttcgaggagtacgacttcaccttcgccaccggcgctcctcagaagcaaatccagtc

SEQ ID NO: 809082 - DNA, 75 bp, synthetic construct
  source 1..75: mol_type = other DNA
ctcgaagtcaccgaatataacgctcacttgtgggtgaacctgacggattacctcgataccggtctgttcctcgat

SEQ ID NO: 809083 - DNA, 75 bp, synthetic construct
  source 1..75: mol_type = other DNA
cggatgtatggcgggttagcgttcgctcaggaaaagatcaacagcccgctggcgatcattacccttgcacccggt

SEQ ID NO: 809084 - DNA, 75 bp, synthetic construct
  source 1..75: mol_type = other DNA
gtctatagctaattccgaagtcaggacgttaaccgccgataccgatagcgggaaagatgcagcggcagcacttgc

SEQ ID NO: 809085 - DNA, 75 bp, synthetic construct
  source 1..75: mol_type = other DNA
caggagaagtggagcggcgatggcgccgggcttaaggctataaccggtggcgatgcagtatctgtggaccccaaa

SEQ ID NO: 809086 - DNA, 75 bp, synthetic construct
  source 1..75: mol_type = other DNA
caggaaccttgcaccagtgacgcctcgcatcagtgtccgattgaaactgtgccttacgttgctccgcgtcatgaa

SEQ ID NO: 809087 - DNA, 75 bp, synthetic construct
  source 1..75: mol_type = other DNA
aggaaagcgccctgcataacggcctgacaccggttgaggttggaccgggtaatacggtgcagattgtgcgtgcgg

SEQ ID NO: 809088 - DNA, 75 bp, synthetic construct
  source 1..75: mol_type = other DNA
tcagctgacggtgaccacccggaccaaaggggcctggggggatgatatcaccctgtcagcgtccaccacggcagg

SEQ ID NO: 809089 - DNA, 75 bp, synthetic construct
  source 1..75: mol_type = other DNA
cgcaattaagttcgactctttatttaatgagctgaaaatattgcttcggaaggagattccaggggtggacttgat

SEQ ID NO: 809090 - DNA, 75 bp, synthetic construct
  source 1..75: mol_type = other DNA
ttatttttcctgcgctgtcggcgtttaatctcgccttttacagcagtaacaatgaattgcgctttcgtttctcca

SEQ ID NO: 809091 - DNA, 75 bp, synthetic construct
  source 1..75: mol_type = other DNA
actgcaacagccgcgacgggaaaagtcaccctgaccggcacagcatcttccagcgggaagctgagcgtgaccatt

SEQ ID NO: 809092 - DNA, 75 bp, synthetic construct
  source 1..75: mol_type = other DNA
cgataacggctatatgcatccgggagacaaaccgggtcttggcatcgaattcgatgaaaagctggcggcgaaata

SEQ ID NO: 809093 - DNA, 75 bp, synthetic construct
  source 1..75: mol_type = other DNA
ccgcatggacactgattcttactggcctggcgacatgcctcagtgcgggggcagccctggctgccctgctgatgc

SEQ ID NO: 809094 - DNA, 75 bp, synthetic construct
  source 1..75: mol_type = other DNA
ctcgatctcggtctgcccgatggcgatgggattgagtttatccgcgatctgcgccagtggagcgcggtgccgata

SEQ ID NO: 809095 - DNA, 75 bp, synthetic construct
  source 1..75: mol_type = other DNA
cgtcgtcacatccagactgaaatcaaccgcagacttttccgcgcattccgcgtcgcgaaaatcatgcacatcaat

SEQ ID NO: 809096 - DNA, 75 bp, synthetic construct
  source 1..75: mol_type = other DNA
gtgtatttttgaaattgggagttttgttgcccataatcatcggagagatcaaggcgagataaaggatatcatgct

SEQ ID NO: 809097 - DNA, 75 bp, synthetic construct
  source 1..75: mol_type = other DNA
gaatagagagagtgttgagaagattaaaggatgggagtttcactgatagtgatattgatgttctttttgttacgg

SEQ ID NO: 809098 - DNA, 75 bp, synthetic construct
  source 1..75: mol_type = other DNA
gccgccagtgcgcaaagccagcgtaactatcagatttcggcactggtgtttatcagcatgattattgttgcggcg

SEQ ID NO: 809099 - DNA, 75 bp, synthetic construct
  source 1..75: mol_type = other DNA
gttatcgctgctataccggcgaaaaggtcgatgtctatttcaacaccgcaatatgtcagcattccggtaattgtg

SEQ ID NO: 809100 - DNA, 75 bp, synthetic construct
  source 1..75: mol_type = other DNA
ctgtgcctgttagaaaaaaacataaaggactgatggggttagcgttgaccgcggctgttatatttattggctcga

SEQ ID NO: 809101 - DNA, 75 bp, synthetic construct
  source 1..75: mol_type = other DNA
ccgtggggtattcacacttgaaaagtacacctgacgccccgcaactggtaaaagagtcaattaacagtccaagaa

SEQ ID NO: 809102 - DNA, 75 bp, synthetic construct
  source 1..75: mol_type = other DNA
gctttaactgctctatgctccgtgcatggtgggttatgttagggctgcctgttctgttggcgttagctttttggt

SEQ ID NO: 809103 - DNA, 75 bp, synthetic construct
  source 1..75: mol_type = other DNA
tacgaaccaagacattaacaagacaaataaggttggagtccaaaaatatcgtgctctaaccgaatgggttaaata

SEQ ID NO: 809104 - DNA, 75 bp, synthetic construct
  source 1..75: mol_type = other DNA
aagatgaaagagaagaacttgaacaactcagggtcgagaatgcctacttaaaaaagctgaaagccttggttcaac

SEQ ID NO: 809105 - DNA, 75 bp, synthetic construct
  source 1..75: mol_type = other DNA
atgagtattattatcaacaactggcggatggacccgtcactcaatgccttaatacattgcgaaacgggtgaaaca

SEQ ID NO: 809106 - DNA, 75 bp, synthetic construct
  source 1..75: mol_type = other DNA
ccggatgaagtcgacgttgccactgtggtgaaagtgattgatacgtgcccgagcggcgcgctgaaataccgtcat

SEQ ID NO: 809107 - DNA, 75 bp, synthetic construct
  source 1..75: mol_type = other DNA
ccggatgaagttgatgtcaccactgtaatgaaagtgattgatatgtgcccgagcggcgcgctgaaataccgtcat

SEQ ID NO: 809108 - DNA, 75 bp, synthetic construct
  source 1..75: mol_type = other DNA
ccggatgaagtagacgtcgccaccgtaataaaagtgattgatacgtgccccagcggcgcgctgaaataccgtcat

SEQ ID NO: 809109 - DNA, 75 bp, synthetic construct
  source 1..75: mol_type = other DNA
gacgttcagggcaaatccagcatcaccgactgcatgatcatctgtacgggtacgtccagccgtcatgttatgtcc

SEQ ID NO: 809110 - DNA, 75 bp, synthetic construct
  source 1..75: mol_type = other DNA
caaaaactggagcaggatcccacccgcccccgccattttattactgaaaccggtattgggtatcgcttaaataat

SEQ ID NO: 809111 - DNA, 75 bp, synthetic construct
  source 1..75: mol_type = other DNA
cgttcgcggtatgctgggcttcaccggtacttacaaaggccgcaaaatttccgtaatgggccacggtatgggtat

SEQ ID NO: 809112 - DNA, 75 bp, synthetic construct
  source 1..75: mol_type = other DNA
ctatgcacgcgcacaaccgcgccagcggtttttttgtgcgtaccgtatcgccacgtctttttcgcgtcagaatta

SEQ ID NO: 809113 - DNA, 75 bp, synthetic construct
  source 1..75: mol_type = other DNA
gcaatcacccaacacgtaaaagctgtctattctgaagaagagcttgagcaaatttcaacttgtaaggattactta

SEQ ID NO: 809114 - DNA, 75 bp, synthetic construct
  source 1..75: mol_type = other DNA
gcaaacctgatggggatttctacccgtagcactactattcgcatttatatgctctccaccggactggcaacgctg

SEQ ID NO: 809115 - DNA, 75 bp, synthetic construct
  source 1..75: mol_type = other DNA
ggcatgacctttgtgatcctctccggtgggatcgatctctccgtcggttcggtgatcgcttttaccggcgtgttt

SEQ ID NO: 809116 - DNA, 75 bp, synthetic construct
  source 1..75: mol_type = other DNA
aaatcgcgacgcaatctgatgtcgaaatggaaggataaaaaacataattctttgatggtttttgaaacatcaaac

SEQ ID NO: 809117 - DNA, 75 bp, synthetic construct
  source 1..75: mol_type = other DNA
taaaggggggattatatccctttccttgcaaacttcccggttgcaatgttttgggggaatgtcgatacgacaccg

SEQ ID NO: 809118 - DNA, 75 bp, synthetic construct
  source 1..75: mol_type = other DNA
cagtcttccggttattcttgcagtaggataccgagttcgctcaacacgtggcacccagttccgccaatgggcaac

SEQ ID NO: 809119 - DNA, 75 bp, synthetic construct
  source 1..75: mol_type = other DNA
atgaagcgggggcctggaaagttatctcttacgcagatttttcccgtgatgtggctgcgctgtttcagcgcctcg

SEQ ID NO: 809120 - DNA, 75 bp, synthetic construct
  source 1..75: mol_type = other DNA
gaatctggttctcctgaaaaagaggacgggagaaaagctgcagcagtgctggctgcccgtttgtttgataagtcc

SEQ ID NO: 809121 - DNA, 75 bp, synthetic construct
  source 1..75: mol_type = other DNA
gtaaatgtactgaaaaatcggcaccagccctgcccggtctgtgccgggaaagaccgctttcgatttgatgaccag

SEQ ID NO: 809122 - DNA, 75 bp, synthetic construct
  source 1..75: mol_type = other DNA
tcccggcggtaattctggccgtgaacaataacccgatgcgcttcaccgaccgcagcggcggcgtgtcacgccggc

SEQ ID NO: 809123 - DNA, 75 bp, synthetic construct
  source 1..75: mol_type = other DNA
ctcactggtggaaacattaaagttaattgttccgcagcagcaaaatccggcacgtcatctgattggttttcgtaa

SEQ ID NO: 809124 - DNA, 75 bp, synthetic construct
  source 1..75: mol_type = other DNA
tatcagaatgcttattcaacacatattccggcggttatcctggccgtaaataataatcctatgcgcttcactgat

SEQ ID NO: 809125 - DNA, 75 bp, synthetic construct
  source 1..75: mol_type = other DNA
ttcttttttaataaagaatttgacagccatgatttagctcatgaggagtgtatgaagattatagagaagtgctac

SEQ ID NO: 809126 - DNA, 75 bp, synthetic construct
  source 1..75: mol_type = other DNA
cgtctttttcgcgtcagaattatggcggggcgtacggggccgacttcggtcgggccggggtcttgtgtagccggt

SEQ ID NO: 809127 - DNA, 75 bp, synthetic construct
  source 1..75: mol_type = other DNA
catgccgcaatcagtcaggttacattcccactgcacctcataaaacgggtgccgggattaccaccccgccgacta

SEQ ID NO: 809128 - DNA, 75 bp, synthetic construct
  source 1..75: mol_type = other DNA
gttgagaaccccatacgtcctgccaccccgagattctcaactcgcggcggtgggttatcacaactcactacgtac

SEQ ID NO: 809129 - DNA, 75 bp, synthetic construct
  source 1..75: mol_type = other DNA
accgcagactttcccgcgcatcacgcgtcgcgcaaatcatgcacatcaatatgctgcatgagcgcagccacgcac

SEQ ID NO: 809130 - DNA, 75 bp, synthetic construct
  source 1..75: mol_type = other DNA
ccgcgtcgcgcatatcatgcacatcaatatgctgcatgaacgcagtcacgcactatcgaacagctattccgcctc

SEQ ID NO: 809131 - DNA, 75 bp, synthetic construct
  source 1..75: mol_type = other DNA
aaaagcaaatcaaaggaagttcagggaactggcatcgtgccgatattgtggcagcacttcacaagcgagggttaa

SEQ ID NO: 809132 - DNA, 75 bp, synthetic construct
  source 1..75: mol_type = other DNA
gaggggcagaaacaggccggaaaacgcctgtggattgcggagggctatgcaaccgcactcaccgtgcatcacctg

SEQ ID NO: 809133 - DNA, 75 bp, synthetic construct
  source 1..75: mol_type = other DNA
caccggcggcgatgcggtgtccgtggacccgaaataccgggatgcgtactccacgcatatcccggcggtgattct

SEQ ID NO: 809134 - DNA, 75 bp, synthetic construct
  source 1..75: mol_type = other DNA
gtggatagcggagggatacgcgaccgcacttaccgtcatcacctgaccggtgaaacggtgatggtggcgctttct

SEQ ID NO: 809135 - DNA, 75 bp, synthetic construct
  source 1..75: mol_type = other DNA
tggcggggcgtacggggccgacttcggtcgggccgggttctatgtttgccggtactgcgaacctcgtacgtctcg

SEQ ID NO: 809136 - DNA, 75 bp, synthetic construct
  source 1..75: mol_type = other DNA
gggcaagtcgcctttttggggcgcaacgatacccaagtgaaggtgaatggttaccgtatcgaactgggggaagtc

SEQ ID NO: 809137 - DNA, 75 bp, synthetic construct
  source 1..75: mol_type = other DNA
cccggctgacccggcagtgacggccgccgccggtgctgaaacagacgctgcccggaagaacgccgccgcactggc

SEQ ID NO: 809138 - DNA, 75 bp, synthetic construct
  source 1..75: mol_type = other DNA
ccgctggtttgaccgtggtgttctgcgggaggtggtccgggaagcccggaacgaaatccgcagcatggcggatgc

SEQ ID NO: 809139 - DNA, 75 bp, synthetic construct
  source 1..75: mol_type = other DNA
aacccgacaactcagggcgagaaatttgaccgcgaaggcgaatttatccgccagtggctaccggagctgcgcgat

SEQ ID NO: 809140 - DNA, 75 bp, synthetic construct
  source 1..75: mol_type = other DNA
aacccgacaactcagggcgagaaatttgaccgcgaaggcgagtttatccgccagtggctaccggaactgcgcgat

SEQ ID NO: 809141 - DNA, 75 bp, synthetic construct
  source 1..75: mol_type = other DNA
atgaccatccatctggtctggtttcgccaggatttacgtctgcacgataatttcgcactggctgccgcttgccgc

SEQ ID NO: 809142 - DNA, 75 bp, synthetic construct
  source 1..75: mol_type = other DNA
tttacgccatttaaaaacgcctggctgaaacggctgcgagaagggatgccggagtgcgtcgctgcgccaaaagta

SEQ ID NO: 809143 - DNA, 75 bp, synthetic construct
  source 1..75: mol_type = other DNA
tgtgaaggatttgatgacagcgtgatcctgccgcctggcgcggtgatgactggcaatcatgagatgtacaaagtc

SEQ ID NO: 809144 - DNA, 75 bp, synthetic construct
  source 1..75: mol_type = other DNA
aacagccgcaggcgctggacggtggggccggtagtgtctggcttaatgagctgatctggcgcgagttctaccgtc

SEQ ID NO: 809145 - DNA, 75 bp, synthetic construct
  source 1..75: mol_type = other DNA
ggggcaatgccttgcttcagcgcggtgaggcgctgacggcagaaaatcaatatcgcaatatcgccagcgctgtac

SEQ ID NO: 809146 - DNA, 75 bp, synthetic construct
  source 1..75: mol_type = other DNA
ttggctatatgctggcgcagagtttgagcgcacagccgcagatgccgcctgtgacgacggtgctgacacgcattg

SEQ ID NO: 809147 - DNA, 75 bp, synthetic construct
  source 1..75: mol_type = other DNA
tttgcagccagagaagtttatcggtccggtttatcagccagaagaacaagaggcactggaagcggcttacggctg

SEQ ID NO: 809148 - DNA, 75 bp, synthetic construct
  source 1..75: mol_type = other DNA
gcggcggtgtgcctgtgacggaagacggggcagggagtgaagcggtgattgataaagatctcgccgctgcgttgc

SEQ ID NO: 809149 - DNA, 75 bp, synthetic construct
  source 1..75: mol_type = other DNA
caccaggcaattggcacatctagcctgatgcgatgctggcgcgtcttatcaggtctacaggcggtgtcggaacgg

SEQ ID NO: 809150 - DNA, 75 bp, synthetic construct
  source 1..75: mol_type = other DNA
gggcatgtggtgatttgcagtggcggcggcggtgttccggtgacggatgacggagcagggagtgaagcggtgatt

SEQ ID NO: 809151 - DNA, 75 bp, synthetic construct
  source 1..75: mol_type = other DNA
ctggacgccccgaaaaacgaaacaacgcgccttcagctaatgagcgccacggtgattgcgctgacgcaatgggaa

SEQ ID NO: 809152 - DNA, 75 bp, synthetic construct
  source 1..75: mol_type = other DNA
gaaccggacagcatcttccgcgtacgcgacgatatgaatacattgcatatcgagccgctgccgtattcgctggaa

SEQ ID NO: 809153 - DNA, 75 bp, synthetic construct
  source 1..75: mol_type = other DNA
aaactgcgcggtgaagcggaactgaacaatagccaacagtggctggcattaaacattgaagcgggtttcccggtg

SEQ ID NO: 809154 - DNA, 75 bp, synthetic construct
  source 1..75: mol_type = other DNA
gtcgcaactgactgaactgaaaaaatatgcggtgttctctaaagtgaccatcgcgccagacgacgagcgtgtgct

SEQ ID NO: 809155 - DNA, 75 bp, synthetic construct
  source 1..75: mol_type = other DNA
cagcggatggttggcaacagcaaagcagatgcggctctgctggatgaaatgatcaacaacatccagtttattccc

SEQ ID NO: 809156 - DNA, 75 bp, synthetic construct
  source 1..75: mol_type = other DNA
ggctgatgaaagcgcaggatgcccgcagcaatgccgtagcagaacaggggcgtaaaactcaggagtttacccagc

SEQ ID NO: 809157 - DNA, 75 bp, synthetic construct
  source 1..75: mol_type = other DNA
tcaggtagtcatgaataacgatatggagccggacagcatcttccgcgttcgtgacgatgcgaatacgctgcatat

SEQ ID NO: 809158 - DNA, 75 bp, synthetic construct
  source 1..75: mol_type = other DNA
agcaagagtccttcatccatcatatccagattggtcgtgaactgaacaagccggttatcgtccatacccgtgacg

SEQ ID NO: 809159 - DNA, 75 bp, synthetic construct
  source 1..75: mol_type = other DNA
cagcgtgacccgctttcccaggtgattgatatccgtattccggcgtcgttaaagcccaccgtggccgatgccatg

SEQ ID NO: 809160 - DNA, 75 bp, synthetic construct
  source 1..75: mol_type = other DNA
gtagccgcattgctcgccgtgaatatggttccctgctgttggcactgatagaccagccacaaaatccggcattac

SEQ ID NO: 809161 - DNA, 75 bp, synthetic construct
  source 1..75: mol_type = other DNA
tacacaccggaaactaaagtacttcagcgagagtccttcatccatcatatccagatcgctcgtgaactgaacaag

SEQ ID NO: 809162 - DNA, 75 bp, synthetic construct
  source 1..75: mol_type = other DNA
ttttccggcattgtgaccttccgtaatgcggagcaactgcgcgatgctgcgcgttatgtccccctggatcggtta

SEQ ID NO: 809163 - DNA, 75 bp, synthetic construct
  source 1..75: mol_type = other DNA
tacacgccggaaactaaggttcgtcagcaagagtccttcatccatcatattcagattggtcgtgaactgaacaaa

SEQ ID NO: 809164 - DNA, 75 bp, synthetic construct
  source 1..75: mol_type = other DNA
gcggtttatgaaaactggggaacgccgcagcaacgcgccattcgccgtgccacaccggatgagttagcgccattt

SEQ ID NO: 809165 - DNA, 75 bp, synthetic construct
  source 1..75: mol_type = other DNA
aaatggataagggtaagcgtgcagcaagaaccgtattgacggggatgtgttattcagtcggcagtgctacgcgcc

SEQ ID NO: 809166 - DNA, 75 bp, synthetic construct
  source 1..75: mol_type = other DNA
gaaaaaaaatattgcacaagcagaattgcagattaaacagtcgcagcaaggttatcgcgcttaccagaatcgccg

SEQ ID NO: 809167 - DNA, 75 bp, synthetic construct
  source 1..75: mol_type = other DNA
caggctttttacatcacatcagattggttccgttatttgcctgcattcttggcggcatattatttctttttgctt

SEQ ID NO: 809168 - DNA, 75 bp, synthetic construct
  source 1..75: mol_type = other DNA
tgaggcggtggacgtattccgtctgaacaaacattctgtgtcggcagaaccacgaggagctggtgaaccagttag

SEQ ID NO: 809169 - DNA, 75 bp, synthetic construct
  source 1..75: mol_type = other DNA
gaagcgaaatatcgcacaagcggaattgcagattaaacaatcgcagcaaggttatcgtacttaccagaatcgcca

SEQ ID NO: 809170 - DNA, 75 bp, synthetic construct
  source 1..75: mol_type = other DNA
atgaatacaactccctcacagcgattaggttttttgcatcacatcaggctggttccgttatttgcctgcattcta

SEQ ID NO: 809171 - DNA, 75 bp, synthetic construct
  source 1..75: mol_type = other DNA
tgtgaagctggattatccgcaaccgatagtcgatcacaaagaagcgagagtacgaacgttggcaacgtatgaggc

SEQ ID NO: 809172 - DNA, 75 bp, synthetic construct
  source 1..75: mol_type = other DNA
tgtgaaggatttgatgacagcgtgatcctgccgcctggcgcggtgatgaccggcaatcacgagatgtacaaagtc

SEQ ID NO: 809173 - DNA, 75 bp, synthetic construct
  source 1..75: mol_type = other DNA
aacccgacaacccagggcgagaaatttgaccgcgaaggcgagtttatccgccagtggttaccggagctgcgcgat

SEQ ID NO: 809174 - DNA, 75 bp, synthetic construct
  source 1..75: mol_type = other DNA
caattaaggtcacccaaccatacggcgaattctttcagacggttatgtctgccgaagatttattgaaatgtattt

SEQ ID NO: 809175 - DNA, 75 bp, synthetic construct
  source 1..75: mol_type = other DNA
agtgccggaggcggaacgtgatccccatctgctcgataaaattaaagccgaactgccggtaatcgtccgtggtct

SEQ ID NO: 809176 - DNA, 75 bp, synthetic construct
  source 1..75: mol_type = other DNA
tgtgatgctggattatccgcaaccgatagttgatcacaaagaggcaaggctgcgaacgctggcagcgtacgaaga

SEQ ID NO: 809177 - DNA, 75 bp, synthetic construct
  source 1..75: mol_type = other DNA
ttgaacaaagccgttaagatacgtagcaccagagccaaccaactggcggaactggcccatcagcgcacccgcctg

SEQ ID NO: 809178 - DNA, 75 bp, synthetic construct
  source 1..75: mol_type = other DNA
ctgattatctggttattctccggcgtctttggtgggctaatcagcgcctgttatgcgttacgcgaaagtgagcag

SEQ ID NO: 809179 - DNA, 75 bp, synthetic construct
  source 1..75: mol_type = other DNA
ggctcgttacggaaggcgggattattgttgcggtcactcttcttctgactgggactatctggtttgtgcagcagc

SEQ ID NO: 809180 - DNA, 75 bp, synthetic construct
  source 1..75: mol_type = other DNA
gccaatttgaagctggcacaggccgtaatcaatagttatcgcggacagtggatcgcaaaagtgaaacatgttgtt

SEQ ID NO: 809181 - DNA, 75 bp, synthetic construct
  source 1..75: mol_type = other DNA
gcagatgaaacgtgatggtaaatatttgcgccgggtggtggcgtctccgcaaccgcgtaaaattctcgacagcga

SEQ ID NO: 809182 - DNA, 75 bp, synthetic construct
  source 1..75: mol_type = other DNA
taaatgttcaattacccgcaataacccttatcctttttgcgctctgtgttgggatattttgttacttcgcacaat

SEQ ID NO: 809183 - DNA, 75 bp, synthetic construct
  source 1..75: mol_type = other DNA
gtcaggcaaagcctgcgtgaagcgttttatccgcaggagattgaacaagagcgacgacaaaaaaacaacagttag

SEQ ID NO: 809184 - DNA, 75 bp, synthetic construct
  source 1..75: mol_type = other DNA
tgacacgaatcaaaaacaaccagcctctgaacagtgaaaaccaagcgtttatcaaccagaccaatatcccggttt

SEQ ID NO: 809185 - DNA, 75 bp, synthetic construct
  source 1..75: mol_type = other DNA
caaacgtttctctctcgatgatatgcttaacggtcgctcttacatcaagactatcgaccagcaatgtgtaccgtc

SEQ ID NO: 809186 - DNA, 75 bp, synthetic construct
  source 1..75: mol_type = other DNA
tggataagtcagctgatgccggggcttaacagccgtgaaccgtttaatccggcgtgggccatccgggcgctggtc

SEQ ID NO: 809187 - DNA, 75 bp, synthetic construct
  source 1..75: mol_type = other DNA
ctcaacaggccaccaatatggagtggtctatcgctaactgtaagatcgtgtcatgcaatgccacgcgtactgatg

SEQ ID NO: 809188 - DNA, 75 bp, synthetic construct
  source 1..75: mol_type = other DNA
cctgcacctggacctatcgcggtgatgagtgcggttatcacggtccggcggtcgcggatgaatatgatcagccga

SEQ ID NO: 809189 - DNA, 75 bp, synthetic construct
  source 1..75: mol_type = other DNA
agtcgcctgaatattgagagtacagtaggaaaaggaacacgtttcagttttgttatcccggaacgtttaattgcc

SEQ ID NO: 809190 - DNA, 75 bp, synthetic construct
  source 1..75: mol_type = other DNA
atgcgcaatctggttaaatatgtcggaattggcctgctggttatggggcttacggcctgtgatgataaagacact

SEQ ID NO: 809191 - DNA, 75 bp, synthetic construct
  source 1..75: mol_type = other DNA
attgaacacaaatacccttcccgcagtaccactcagggacgggaagccggaaatgcacgggatgctaacctgtcc

SEQ ID NO: 809192 - DNA, 75 bp, synthetic construct
  source 1..75: mol_type = other DNA
gtggcgcgttccatcatgattgaaatccgtgaaggtcgcggctgtgatggtccgtggggccacacgcgaaactga

SEQ ID NO: 809193 - DNA, 75 bp, synthetic construct
  source 1..75: mol_type = other DNA
cacgtcaccaaattaacttatcgaattcgacctcattttccaaagatggctattcctccaacaatactggaatta

SEQ ID NO: 809194 - DNA, 75 bp, synthetic construct
  source 1..75: mol_type = other DNA
agcggaagagtcttgctgagcagcagaaactgattgaagaggcgctgcgtgcagcagaaggggctcacagggagg

SEQ ID NO: 809195 - DNA, 75 bp, synthetic construct
  source 1..75: mol_type = other DNA
gtattatctccgcgaaaggccagacggcgtactcttccgttattctgggtaacgtgggtaatcaactgctgacca

SEQ ID NO: 809196 - DNA, 75 bp, synthetic construct
  source 1..75: mol_type = other DNA
cgtaacggtgaagatccggtggcgattcgcaaagcactgcaagaatgtatgcagcataacttctcggtcttccgt

SEQ ID NO: 809197 - DNA, 75 bp, synthetic construct
  source 1..75: mol_type = other DNA
atttcccagagcggtcaaacctgtgcgctgctctctaaagtcttcccaacccgttcccataccgtttctgcgcaa

SEQ ID NO: 809198 - DNA, 75 bp, synthetic construct
  source 1..75: mol_type = other DNA
ccacattaacactggcgacggcgtcggcatggctatccgtgcaggcgtaccggtgcaggatatggaaatgtggca

SEQ ID NO: 809199 - DNA, 75 bp, synthetic construct
  source 1..75: mol_type = other DNA
atcggtacacggcgctaaccgtcttggcggtaactcgctgctggacctggtggtctttggtcgcgcagcgggcct

SEQ ID NO: 809200 - DNA, 75 bp, synthetic construct
  source 1..75: mol_type = other DNA
ttcggcggcgagcaggcggcacgtactgcggcagcggctgaccgtaccggtcacgcactgttgcacacgctttat

SEQ ID NO: 809201 - DNA, 75 bp, synthetic construct
  source 1..75: mol_type = other DNA
tcacgcactgttgcacaccctttatcagcagaacctgaaaaaccacaccaccattttctccgagtggtatgcgct

SEQ ID NO: 809202 - DNA, 75 bp, synthetic construct
  source 1..75: mol_type = other DNA
gtgattgcagattttgacggcaaaccctccattacgctgaccgaatttgctgaacaatgccgttacgaagaagac

SEQ ID NO: 809203 - DNA, 75 bp, synthetic construct
  source 1..75: mol_type = other DNA
atgaacatttttccgcagcaaaatcaaagatatcaattctattacgatgaatctaataacgttcgtaaactatat

SEQ ID NO: 809204 - DNA, 75 bp, synthetic construct
  source 1..75: mol_type = other DNA
tcgacttctgggttacggacaacaacaaactggccggtcgtgggcgtaaatatcacgctgtgctgattgatgagg

SEQ ID NO: 809205 - DNA, 75 bp, synthetic construct
  source 1..75: mol_type = other DNA
ccgcattgcgacatgattttcgcagtgatggatacggcgctgaaaggcgggaccgaaaatgatggtactggcgtg

SEQ ID NO: 809206 - DNA, 75 bp, synthetic construct
  source 1..75: mol_type = other DNA
ttcctcaagtcctatgacttcccatacatagaaggtaaggagaaggatttcatacaagggctatcaagccagatc

SEQ ID NO: 809207 - DNA, 75 bp, synthetic construct
  source 1..75: mol_type = other DNA
ttgctattttctaccagaaccgggcgcagatgtttgaggcttccaaccatatctttgacatagagaaggtagtcg

SEQ ID NO: 809208 - DNA, 75 bp, synthetic construct
  source 1..75: mol_type = other DNA
aaagatatcaattctattacgatgaatctaataacgttcgtaaactatatctatcaaaacaaattgatggatata

SEQ ID NO: 809209 - DNA, 75 bp, synthetic construct
  source 1..75: mol_type = other DNA
tgtcagaagccgtggtaaacctgcgtggattggggcgttatcgcggattgaagagacgctggcgggcgaagcggg

SEQ ID NO: 809210 - DNA, 75 bp, synthetic construct
  source 1..75: mol_type = other DNA
gcggcggtgtgcctgtgacggaagatggggcagggagtgaagcggtgattgataaagatctcgctgctgcgttgc

SEQ ID NO: 809211 - DNA, 75 bp, synthetic construct
  source 1..75: mol_type = other DNA
acactgactgggcaaaaaggacgttatgacgataacttcagattgaatgtagtcagagatgttattgataattct

SEQ ID NO: 809212 - DNA, 75 bp, synthetic construct
  source 1..75: mol_type = other DNA
tcgacttttgggtaacggacaataacaaactggccggacgtgggcgtaagtatcacgctgtgctgattgatgagg

SEQ ID NO: 809213 - DNA, 75 bp, synthetic construct
  source 1..75: mol_type = other DNA
accgcagtgtggccggaaaactgacgttcgaccatctccatgcctcggagatggtagctgcattgcgtattgatc

SEQ ID NO: 809214 - DNA, 75 bp, synthetic construct
  source 1..75: mol_type = other DNA
ttcgcagccagagaagtttatcggtccggtttatcagccggaagagcaagagtcgctggaaacggcatatggctg

SEQ ID NO: 809215 - DNA, 75 bp, synthetic construct
  source 1..75: mol_type = other DNA
tatgcggggtttcgagaagggcagaacgtcagactgcaccgaccggtcagtgggcgggaacaacagaaactggag

SEQ ID NO: 809216 - DNA, 75 bp, synthetic construct
  source 1..75: mol_type = other DNA
cggcgaaactgccgcgtaccgaagggctgactggctccgatcgcagtgagttcctggcgcaggccaaagagattg

SEQ ID NO: 809217 - DNA, 75 bp, synthetic construct
  source 1..75: mol_type = other DNA
acaattgagctggaacagaacgaaatccgttcactcttacctgaagccagtgaaccgattgatcaaaccgcacaa

SEQ ID NO: 809218 - DNA, 75 bp, synthetic construct
  source 1..75: mol_type = other DNA
tattgtcgtgccgctactgcttgccaccgccagacgttatccgttaacgccgctgctctatacgctcattttcct

SEQ ID NO: 809219 - DNA, 75 bp, synthetic construct
  source 1..75: mol_type = other DNA
ggtgaaaccaggacagaaagtgaaacgtggcgaccgtatcgcgctttccggtaataccggacgttcaaccgggcc

SEQ ID NO: 809220 - DNA, 75 bp, synthetic construct
  source 1..75: mol_type = other DNA
gggtgatatcacccaactggctgctgccgacaaagaattgcgtaacctgaaaatcggtcaacaactttcctggac

SEQ ID NO: 809221 - DNA, 75 bp, synthetic construct
  source 1..75: mol_type = other DNA
cggcgaaactgccgcgtaccgaagggctgacaggttccgatcgtcgcgagttcctggcgcaggccaaagagattg

SEQ ID NO: 809222 - DNA, 75 bp, synthetic construct
  source 1..75: mol_type = other DNA
actcaagacacctttaacaaacaaaatccttgctgaatatgctcgtacaaaacatcccgtgcacatctttgaagg

SEQ ID NO: 809223 - DNA, 75 bp, synthetic construct
  source 1..75: mol_type = other DNA
tggacggatcgtgtacagtggcaaagcaatcccgcccatttaaaggcctggcaggaaggcataacgggatacccg

SEQ ID NO: 809224 - DNA, 75 bp, synthetic construct
  source 1..75: mol_type = other DNA
tcattttcttcgggtctgttatggtactttctgattgttattcatgggctaacgagcagtttggacatgcccgtc

SEQ ID NO: 809225 - DNA, 75 bp, synthetic construct
  source 1..75: mol_type = other DNA
ttcttaacactggcgcgttggcgctaacattcatcctgatttacaccggcatttcggctcatgacaaactgacct

SEQ ID NO: 809226 - DNA, 75 bp, synthetic construct
  source 1..75: mol_type = other DNA
cgctgctctatacgctcattttctttcacgccatcatcctgatggtcggcggacaatacacctacgcgaaagtcc

SEQ ID NO: 809227 - DNA, 75 bp, synthetic construct
  source 1..75: mol_type = other DNA
ccctcaatactggcgcgctggcgctaacgttaattctgctttatacgggtatatcggcccatgacaaactcacct

SEQ ID NO: 809228 - DNA, 75 bp, synthetic construct
  source 1..75: mol_type = other DNA
gcatttacattatgaagtatggattaaccagcaggctgtgaacccactgacggcgaaactgccgcgtactgaagg

SEQ ID NO: 809229 - DNA, 75 bp, synthetic construct
  source 1..75: mol_type = other DNA
ctgacggagcagaaaaagacggagctgaaccaggtggccaaccgggtggtggccggcctggcgtcggcagggctg

SEQ ID NO: 809230 - DNA, 75 bp, synthetic construct
  source 1..75: mol_type = other DNA
cgtcagccgaaagtatccgtaacctgctggtcgtgctggctaacccgtccggtaactgcgacgacacctttatgt

SEQ ID NO: 809231 - DNA, 75 bp, synthetic construct
  source 1..75: mol_type = other DNA
ctgccggtggtggcggataaccaggtctgccggcagggcctgcccataccgtcttaccgtaatcagctctccttt

SEQ ID NO: 809232 - DNA, 75 bp, synthetic construct
  source 1..75: mol_type = other DNA
tcagctgaaaaaggcgcgtcagcagtatatcagtgcacagaacaaaagaataaaaaccgccacccgcaccagccg

SEQ ID NO: 809233 - DNA, 75 bp, synthetic construct
  source 1..75: mol_type = other DNA
gatcaaccccgtctcatccctcgagggtatgggcagaatggtcggagaggtgtatcccgccacccatatgttcag

SEQ ID NO: 809234 - DNA, 75 bp, synthetic construct
  source 1..75: mol_type = other DNA
tcggtctggaaaagtactgctcctggggaatttacggtgagtacttcaacagtgaaaagccgtcgctggatgaca

SEQ ID NO: 809235 - DNA, 75 bp, synthetic construct
  source 1..75: mol_type = other DNA
gttatatagctatcagctagccgaaggaatacttgagaataatttactcgatatacttaatcgggtaagtgaacc

SEQ ID NO: 809236 - DNA, 75 bp, synthetic construct
  source 1..75: mol_type = other DNA
tcgggaataaagcagcacgggaaatggctgagcgtatcacagaacgattgccagaaagtggcggcaagctaaaag

SEQ ID NO: 809237 - DNA, 75 bp, synthetic construct
  source 1..75: mol_type = other DNA
tatcaaaaaaatccaatgtacagctttagatattttccagcacagcaatgagtggagggaattgctggagctagt

SEQ ID NO: 809238 - DNA, 75 bp, synthetic construct
  source 1..75: mol_type = other DNA
gccaataaaaaaggctatccactgacgttacgtcattaccgtctgtttgtttcgtatgcggaagaggtcagcagc

SEQ ID NO: 809239 - DNA, 75 bp, synthetic construct
  source 1..75: mol_type = other DNA
cgttctctggattatttgcaacaggcagggattatcgtaaaaatagaatgctgtagcaaatttatcaaaaaaata

SEQ ID NO: 809240 - DNA, 75 bp, synthetic construct
  source 1..75: mol_type = other DNA
atcgtctggaaaatatgcgagagcttaaggatatggatgttcaggcgctaatggctgaatttcctctgctggata

SEQ ID NO: 809241 - DNA, 75 bp, synthetic construct
  source 1..75: mol_type = other DNA
gcgtataccggatgaaccgccccgccgctggtttgaccgtggtgttctgcgggaggtggtccgggaagcccggac

SEQ ID NO: 809242 - DNA, 75 bp, synthetic construct
  source 1..75: mol_type = other DNA
tcttgatgcggtgcacgatgtggtacgcagtgtcagttgccgggtggcagaagatgcgcggcgtatcagggcggc

SEQ ID NO: 809243 - DNA, 75 bp, synthetic construct
  source 1..75: mol_type = other DNA
aaagcgatcacccctgctggctcgatgaggacgacgaaaacctgcccgtggtgctcgatgccatcctgaaccggg

SEQ ID NO: 809244 - DNA, 75 bp, synthetic construct
  source 1..75: mol_type = other DNA
tcccgtcgctggtttgaccgggatattctgcgggaggtggtcctggaagcccggactgaaatccgcagcatggcg

SEQ ID NO: 809245 - DNA, 75 bp, synthetic construct
  source 1..75: mol_type = other DNA
atgcgcccgtacatatccgttcgcggcgggatactgattctgccaactggtctgaatgggcgcaggtctatacgt

SEQ ID NO: 809246 - DNA, 75 bp, synthetic construct
  source 1..75: mol_type = other DNA
tcttttccgtatgccggtgaatggctgaccgaagacgaaatcagggctgtacttgcggcggtgcgcgatgcggta

SEQ ID NO: 809247 - DNA, 75 bp, synthetic construct
  source 1..75: mol_type = other DNA
tcttgatgcggtgcgcgatgcagtatgcagtgtcagttgccgggtggcagaagatgcgcggcgtatccgggcggc

SEQ ID NO: 809248 - DNA, 75 bp, synthetic construct
  source 1..75: mol_type = other DNA
actatccgggctggatcagcatttacgtgcagctggatgcgccccggctggcgacgttactcgttaaccgccacg

SEQ ID NO: 809249 - DNA, 75 bp, synthetic construct
  source 1..75: mol_type = other DNA
gatgacgaaaacctgcccgtggtgctcgatgccatcgtgaaccggggagcacgtttttcgtcggtggaaatgtat

SEQ ID NO: 809250 - DNA, 75 bp, synthetic construct
  source 1..75: mol_type = other DNA
gttgtgcgctgttagtcagcagcatttccctgtcgtatgctgcagatgttccgggcggcacagtactggcagaga

SEQ ID NO: 809251 - DNA, 75 bp, synthetic construct
  source 1..75: mol_type = other DNA
cccgctttaacaatccggcatacgacaaagtgctgactcaggcatcgactgaaaacaccgttaaagcacgcaacg

SEQ ID NO: 809252 - DNA, 75 bp, synthetic construct
  source 1..75: mol_type = other DNA
agccgtaataccggcaattttgatgttatccgcgcctcgtgggtaggggattataatgaaccctccactttcctg

SEQ ID NO: 809253 - DNA, 75 bp, synthetic construct
  source 1..75: mol_type = other DNA
ttctgcgggaggtggtccgggaagcccgggaacgaaatccgcagcatggcggatgccctggcaaaaatccggaaa

SEQ ID NO: 809254 - DNA, 75 bp, synthetic construct
  source 1..75: mol_type = other DNA
cgcctgtttttatttcaggcaatcggggtgaatgtggcgcaggcggaagtgttgaatctggagtccggagctaaa

SEQ ID NO: 809255 - DNA, 75 bp, synthetic construct
  source 1..75: mol_type = other DNA
ggtggcgaccgtggcgttcggcatgggcatcaacaagcctaacgttcgcttcgtggtgcattttgatattccgcg

SEQ ID NO: 809256 - DNA, 75 bp, synthetic construct
  source 1..75: mol_type = other DNA
tatttactgcaacagccgggcgaaagtggaagacaccgccgcgcgcttgcaaagtcggggtattagcgcagcggc

SEQ ID NO: 809257 - DNA, 75 bp, synthetic construct
  source 1..75: mol_type = other DNA
gcgtgccgggatgatcgtcgtaaacgttaacccgttgtataccccgcgtgagcttgagcatcagcttaacgatag

SEQ ID NO: 809258 - DNA, 75 bp, synthetic construct
  source 1..75: mol_type = other DNA
atgaaagatcaggtggatcaactgcaagccaacggcgtggcggcggcgtgccttaactcgacgcaaacccgcgaa

SEQ ID NO: 809259 - DNA, 75 bp, synthetic construct
  source 1..75: mol_type = other DNA
ctatcaaattcctgccttattgctaaacggccttaccgtggttgtttcaccgctgatttcgttgatgaaagatca

SEQ ID NO: 809260 - DNA, 75 bp, synthetic construct
  source 1..75: mol_type = other DNA
aaaggtaaggcgcgtgatttcctttatgcgggtgcggatgcaggtgtaatggtgctgaacgccggaccagatgtg

SEQ ID NO: 809261 - DNA, 75 bp, synthetic construct
  source 1..75: mol_type = other DNA
aaccggcgctgcgtcttgggcgtaaactgattgaggcaacgtttgccgaacgcgtggtgtttatgaactccggca

SEQ ID NO: 809262 - DNA, 75 bp, synthetic construct
  source 1..75: mol_type = other DNA
cgtcatagcccgttcaaaaccaaaattattgccttccataacgcttttcatggtcgctcgctgtttaccgtctcg

SEQ ID NO: 809263 - DNA, 75 bp, synthetic construct
  source 1..75: mol_type = other DNA
cggcagatgaaagagtccggttatttgtggccagtggtcgatgcgcgggtgaaatatcgccacgccctcaccttt

SEQ ID NO: 809264 - DNA, 75 bp, synthetic construct
  source 1..75: mol_type = other DNA
catcatccacgtgccttttaacgatcttcacgcagtaaaagcggtgatggatgaccatacctgtgcggtggtggt

SEQ ID NO: 809265 - DNA, 75 bp, synthetic construct
  source 1..75: mol_type = other DNA
gtgcgttttgcgccgtcgctggtggtggaagatgcggatatcgacgaagggatgcagcgttttgcccgcgcagtg

SEQ ID NO: 809266 - DNA, 75 bp, synthetic construct
  source 1..75: mol_type = other DNA
cctgctgctggcgcagggctggccggaagagacggatgttgaccagcgtaacccgaagtatccgggctggatcag

SEQ ID NO: 809267 - DNA, 75 bp, synthetic construct
  source 1..75: mol_type = other DNA
atattctgcgggaggtggtccgggaagccagggccgaaatccgcagcatggcggatgctctggcaaaaatccgga

SEQ ID NO: 809268 - DNA, 75 bp, synthetic construct
  source 1..75: mol_type = other DNA
tggtttgaccgtggtgttctgcgggaagttgtccgggaagcccgggccgaaatccgcagcatggcggatgccctg

SEQ ID NO: 809269 - DNA, 75 bp, synthetic construct
  source 1..75: mol_type = other DNA
agcgattgtattgagcatatcctgtccagtgggctggcctgcgatgtgctgcgtataccggatgaaccgccccgc

SEQ ID NO: 809270 - DNA, 75 bp, synthetic construct
  source 1..75: mol_type = other DNA
accggagcggaacttgttctgtccggcagtcagtggcagtcgctgccggtacttccggcagacggaacgcaggtg

SEQ ID NO: 809271 - DNA, 75 bp, synthetic construct
  source 1..75: mol_type = other DNA
atgaacgaaaacagcacgctgaacgcactgatttgtcgccacgcccgtaacctgctgctggcgcagggctggccg

SEQ ID NO: 809272 - DNA, 75 bp, synthetic construct
  source 1..75: mol_type = other DNA
tgccggtacttccggcagacggaacgcaggtgtctttcccgtatgccggagaatggctgaccgaagacgaaatca

SEQ ID NO: 809273 - DNA, 75 bp, synthetic construct
  source 1..75: mol_type = other DNA
tagatggcgatgatgaagccatcttcaggccaatacaaaaatacatcaatggcacatggtataacgtcgcacagg

SEQ ID NO: 809274 - DNA, 75 bp, synthetic construct
  source 1..75: mol_type = other DNA
gacgttgctgacccgccagacgcgccgctttcgcctggtggtgaaggaaagcgatcacccctgctggctcgatga

SEQ ID NO: 809275 - DNA, 75 bp, synthetic construct
  source 1..75: mol_type = other DNA
cggctggcgacgttacttatcaaccgccacgatggcgtgctgccaccgcgcctggcgtctgccatgcaaaaaatg

SEQ ID NO: 809276 - DNA, 75 bp, synthetic construct
  source 1..75: mol_type = other DNA
ttctcaaggggcattcaatcacccatactggatgtgcaaatgttcatggtcgtacggcaataataaaattataac

SEQ ID NO: 809277 - DNA, 75 bp, synthetic construct
  source 1..75: mol_type = other DNA
cccctgctggctcgatgaatacgacgaaaacctgcccgtggtgctcgatgccatcctgaaccggggcgctcgttt

SEQ ID NO: 809278 - DNA, 75 bp, synthetic construct
  source 1..75: mol_type = other DNA
gcggcgtactgccgccgctcctggcctccgccattcacaaactgaccggaaccggagcggaacttgttctgtccg

SEQ ID NO: 809279 - DNA, 75 bp, synthetic construct
  source 1..75: mol_type = other DNA
acctgctgctggcgcagggctggccggaagagacggatgttgaccagcgaaatccgaactatccgggctggatca

SEQ ID NO: 809280 - DNA, 75 bp, synthetic construct
  source 1..75: mol_type = other DNA
cactgatttgtcgtcacgcccgcgacctgctgctggcgcagggctggccggaagagacggatgttgaccagcgta

SEQ ID NO: 809281 - DNA, 75 bp, synthetic construct
  source 1..75: mol_type = other DNA
ggcgacgttgctcgtcaaccgccacgattgcgtactgccgccggtcctggcttccgccatgcaaaaactgaccgg

SEQ ID NO: 809282 - DNA, 75 bp, synthetic construct
  source 1..75: mol_type = other DNA
acctgcccgtggtgctcgatgccatcgtgaaccggggagcacgtttttcgtcggtggaaatgtacctggtcagcg

SEQ ID NO: 809283 - DNA, 75 bp, synthetic construct
  source 1..75: mol_type = other DNA
acgttgctgacccgccagacgcgccgctttcgtctggttgtgaaggaaagcgatcacccctgctggctcgatgaa

SEQ ID NO: 809284 - DNA, 75 bp, synthetic construct
  source 1..75: mol_type = other DNA
atggcgtactgccgccgcacctggcctccgccattcagaaactgaccggaaccggagcggaacttgttctgtccg

SEQ ID NO: 809285 - DNA, 75 bp, synthetic construct
  source 1..75: mol_type = other DNA
ttcctctgtggaaatgtacctggtctgtgagtgtgtggagcatatcctggccagtggtctggtctgtgatgtgct

SEQ ID NO: 809286 - DNA, 75 bp, synthetic construct
  source 1..75: mol_type = other DNA
gcctgccgcgccattaacgaaatggtcttcgccatactgttcgtggtcgccgtcggcctcggcccattcgctggc

SEQ ID NO: 809287 - DNA, 75 bp, synthetic construct
  source 1..75: mol_type = other DNA
gaaaacctgcccgtggtgctcgatgccatcctgaaccggggcgcacgtttttcggcggtggaaatgtatctggtc

SEQ ID NO: 809288 - DNA, 75 bp, synthetic construct
  source 1..75: mol_type = other DNA
atcctgtccagtgggctggcctgcgatgtgctgcgtataccggatgaaccgccccgccgctggtttgaccgtggt

SEQ ID NO: 809289 - DNA, 75 bp, synthetic construct
  source 1..75: mol_type = other DNA
cggctggatgcgccccggctggcgacgttacttatcaaccgtcacggcggcgtactgccgccgctcctggcctcc

SEQ ID NO: 809290 - DNA, 75 bp, synthetic construct
  source 1..75: mol_type = other DNA
ctgacccgccagacgcgccgctttcgcctggtcgtgaaggaaagcgatcacccctgctggctcgatgaagacgac

SEQ ID NO: 809291 - DNA, 75 bp, synthetic construct
  source 1..75: mol_type = other DNA
gccgccgacttcttcccgcctgatttcagccagtggcaggattacctcaccgaaatggccgtcacgctgcaaatc

SEQ ID NO: 809292 - DNA, 75 bp, synthetic construct
  source 1..75: mol_type = other DNA
tagcgattaactcacgcactgaagacgccgccaaaattgtgcaagaaaaaccggtggcgctcacgccgcggtggt

SEQ ID NO: 809293 - DNA, 75 bp, synthetic construct
  source 1..75: mol_type = other DNA
gcctggattccgcggcagccagcagcattacctgcgcgggcgtcaccacctataaagccgtaaaactgtcaaaga

SEQ ID NO: 809294 - DNA, 75 bp, synthetic construct
  source 1..75: mol_type = other DNA
aaaaccggcgtgattctggggcatgaaggcattggtattgtgacagagatcggcccgggcgtgacctcattaaag

SEQ ID NO: 809295 - DNA, 75 bp, synthetic construct
  source 1..75: mol_type = other DNA
gagtatgaaaataatacatcagaagtttgctcaatagcagagttaattgagaaagcaaaaattgttttttctact

SEQ ID NO: 809296 - DNA, 75 bp, synthetic construct
  source 1..75: mol_type = other DNA
atatgggcatatatcgtaaaggtggagttaaagtctgaaataacttcttaccgtagcgaatctgataaatttaat

SEQ ID NO: 809297 - DNA, 75 bp, synthetic construct
  source 1..75: mol_type = other DNA
tccggaagccctgcaatctcgcgccgaattgcgtcaaaaagtacgtaattgtgcagatttcaaaccactttcggc

SEQ ID NO: 809298 - DNA, 75 bp, synthetic construct
  source 1..75: mol_type = other DNA
caacggcagattgctactgataacctgacgcaactcaccgcgtttcggcataccttcagccatttccatttagat

SEQ ID NO: 809299 - DNA, 75 bp, synthetic construct
  source 1..75: mol_type = other DNA
aagcgagcaggtgacgcccgcggttggcgtggaacggtttaaccaggcgatgatggatttgggcgcgatgatttg

SEQ ID NO: 809300 - DNA, 75 bp, synthetic construct
  source 1..75: mol_type = other DNA
caacggcagattgctgccgataacctgacgcagctgaccgcgtttcggcataccttcagccatttccacttagat

SEQ ID NO: 809301 - DNA, 75 bp, synthetic construct
  source 1..75: mol_type = other DNA
gtctggattcggctgctgccagcagcattacctgtgcgggcgtcaccacctataaagcagtgaagctgtcaaaaa

SEQ ID NO: 809302 - DNA, 75 bp, synthetic construct
  source 1..75: mol_type = other DNA
ctatgagcctggatatcccacgccttgtgctggatggcattgaagtggtcggttcgctggtcggcacgcgccagg

SEQ ID NO: 809303 - DNA, 75 bp, synthetic construct
  source 1..75: mol_type = other DNA
ccctacgcgacaccctgctcccgaaactcatctccggcgagctatccctggacgatattccggatctcaacaccg

SEQ ID NO: 809304 - DNA, 75 bp, synthetic construct
  source 1..75: mol_type = other DNA
gctttagcggtgaaggcaaactgtctaatggtgaactgacagccaaagggctggcaatgacccgtatgatgtgcg

SEQ ID NO: 809305 - DNA, 75 bp, synthetic construct
  source 1..75: mol_type = other DNA
attgccgctcatgaaggcaaagcgccgcagcagatcattattatggcgcatctggatacctacgccccgcagagc

SEQ ID NO: 809306 - DNA, 75 bp, synthetic construct
  source 1..75: mol_type = other DNA
tattgaactggcacaaattctgtttaacccgtggattgccgggattttgctgtcggcgattctggcggcggtaat

SEQ ID NO: 809307 - DNA, 75 bp, synthetic construct
  source 1..75: mol_type = other DNA
atgaacaccactatttccagcctaatcgctcttgagatcggacacgtacagaaattagctgatgagtgtgtagct

SEQ ID NO: 809308 - DNA, 75 bp, synthetic construct
  source 1..75: mol_type = other DNA
cgggcgcgtatgtggggctggggatcatcctgattttcacgctcggtaacctgctcgatccatctgttcgtcctc

SEQ ID NO: 809309 - DNA, 75 bp, synthetic construct
  source 1..75: mol_type = other DNA
cgcgacgaccaatcctggtttgaataaaaattatccaaaaggcaccgggtgttgtaatgacgctgaagtttttga

SEQ ID NO: 809310 - DNA, 75 bp, synthetic construct
  source 1..75: mol_type = other DNA
aattggaatcttgggaataaggatggttatcagcaacgcgcaaaaacagctgcattccctgcgggaaatagctgg

SEQ ID NO: 809311 - DNA, 75 bp, synthetic construct
  source 1..75: mol_type = other DNA
caccaagttatcaggtagcagtacattcttcttgccgttcaataaaggtcacaatcttggacaaggcaacccgcc

SEQ ID NO: 809312 - DNA, 75 bp, synthetic construct
  source 1..75: mol_type = other DNA
gtcaggttcgatggttctacgaacatttcgataccaacaattacgtctagaggacgcgttactgcgcttaccggt

SEQ ID NO: 809313 - DNA, 75 bp, synthetic construct
  source 1..75: mol_type = other DNA
cttccacaatgatgagtttattaaatggaaggtcaccgttatttacgcactgtttgccggtgccctgttggttag

SEQ ID NO: 809314 - DNA, 75 bp, synthetic construct
  source 1..75: mol_type = other DNA
gaagctaaagttgactttaagattaaagccaaacagttcgttaaaatctatgggcagatggcttctatcatgcct

SEQ ID NO: 809315 - DNA, 75 bp, synthetic construct
  source 1..75: mol_type = other DNA
ttttttcaactcggttgaagatattcaatcagcattcgatcctttctatacagcaacgtcattgtcccaagctac

SEQ ID NO: 809316 - DNA, 75 bp, synthetic construct
  source 1..75: mol_type = other DNA
gatgagatcgcgtaagatgcgcgggaatgcgtcgtacctggcatttacagcgacaccaaaaaacagcactttgga

SEQ ID NO: 809317 - DNA, 75 bp, synthetic construct
  source 1..75: mol_type = other DNA
gcgcaaccgccgtcagttggcctggcggctcccgtggagcgtttgttacagcagttacgcactggcgcgccggtt

SEQ ID NO: 809318 - DNA, 75 bp, synthetic construct
  source 1..75: mol_type = other DNA
gaaaatcaggtaaagggcaacattcagtaagttttgctcaggcatggcgagatgtgatgctcaaagccatgacaa

SEQ ID NO: 809319 - DNA, 75 bp, synthetic construct
  source 1..75: mol_type = other DNA
atgctgcgcgaaggcgatactttggtcgtctggaagctcgaccggctgggccggtcggtcaagcaactggtcgat

SEQ ID NO: 809320 - DNA, 75 bp, synthetic construct
  source 1..75: mol_type = other DNA
agcgaaatgcagcaaggagagtgggttaacaatctgctgaaaggtaccgtcggggggagctttgttgccagcgcc

SEQ ID NO: 809321 - DNA, 75 bp, synthetic construct
  source 1..75: mol_type = other DNA
acaagatgcgtaagctggcaagtttggttattgccatcgatccgaaaaagctcggcaatcctgtttttgcaaaaa

SEQ ID NO: 809322 - DNA, 75 bp, synthetic construct
  source 1..75: mol_type = other DNA
tatgatcaagaacatcgcacacggattgcaatgagtgcgtttaacgttattgggatttcgcaggatatcgcggaa

SEQ ID NO: 809323 - DNA, 75 bp, synthetic construct
  source 1..75: mol_type = other DNA
tactgattgaacctattaaccattttgatattcctggtttccatctcaccggaactcggcaggcgctgaaattga

SEQ ID NO: 809324 - DNA, 75 bp, synthetic construct
  source 1..75: mol_type = other DNA
gaggatttcggggcgctttccacggcggcaacgtattttttctcgccgaaggccttgcccggcaagaaaaagacg

SEQ ID NO: 809325 - DNA, 75 bp, synthetic construct
  source 1..75: mol_type = other DNA
gtatgatattgattatcatagcggtagcatcggtttgccggtgccgtcgacggaagccaaactggtggatgatga

SEQ ID NO: 809326 - DNA, 75 bp, synthetic construct
  source 1..75: mol_type = other DNA
aactctccgggggggaatcagcagaaagtcctgatctccaaatggctgtgctgtcacccggaagtgatcattttc

SEQ ID NO: 809327 - DNA, 75 bp, synthetic construct
  source 1..75: mol_type = other DNA
ctggaaaatttatatattggtcgtcatctgacgaaaaaaatctgtggcgtcaatattatcgactggcgagaaatg

SEQ ID NO: 809328 - DNA, 75 bp, synthetic construct
  source 1..75: mol_type = other DNA
cgactggcgagaaatgcgtgtccgcgccgccatgatgttattacgcgtgggcttgaaagttgatctagatgagaa

SEQ ID NO: 809329 - DNA, 75 bp, synthetic construct
  source 1..75: mol_type = other DNA
aaaatttaaaatcactggtgcaccacaaattacataccgccgggctggataccgacaccacacaacaggtgacag

SEQ ID NO: 809330 - DNA, 75 bp, synthetic construct
  source 1..75: mol_type = other DNA
tgcaatgccacgcggtgcaaagcccagagcgattttactgatcctcgtaacctttgcgatttcgttgtggtttgt

SEQ ID NO: 809331 - DNA, 75 bp, synthetic construct
  source 1..75: mol_type = other DNA
cgcagacactggcaaacaaggcgagatattgagattgcaatcttcgaatatataaggggtctgacgctcagtgga

SEQ ID NO: 809332 - DNA, 75 bp, synthetic construct
  source 1..75: mol_type = other DNA
taagtcgcaaggtacgtggggcaagaagaccttcatcttcaccgacactctcgacggtaacaaccgtttgtacca

SEQ ID NO: 809333 - DNA, 75 bp, synthetic construct
  source 1..75: mol_type = other DNA
aggtcgagaataaactgtggagtttgagcgagcaggtgacgcccgcgctcggcgtggagcggtttaatcaggcga

SEQ ID NO: 809334 - DNA, 75 bp, synthetic construct
  source 1..75: mol_type = other DNA
agacggtaacgtcaaacgcgtgttagcacgctgctatgctgtaagcggctggccagggaaaaaagaggtcgaaaa

SEQ ID NO: 809335 - DNA, 75 bp, synthetic construct
  source 1..75: mol_type = other DNA
tgaagtattgctggcgcagcgtccgccgagtggattgtggggcggtttatactgtttcccgcagtttgccgatga

SEQ ID NO: 809336 - DNA, 75 bp, synthetic construct
  source 1..75: mol_type = other DNA
ttcatcacatacttgatactcttgaagcacaggaaaataccttactggtctggggggatacagggggatttttca

SEQ ID NO: 809337 - DNA, 75 bp, synthetic construct
  source 1..75: mol_type = other DNA
ccctttgtattgtttgtgtcagtggatacataggacaggtattgggcgtggtatcagcagtctcttccttcttcg

SEQ ID NO: 809338 - DNA, 75 bp, synthetic construct
  source 1..75: mol_type = other DNA
ctattgatgcactgactggcgtgctgatgaatgcgaattttggcaaccatattgttcgcatgtatggtgattatg

SEQ ID NO: 809339 - DNA, 75 bp, synthetic construct
  source 1..75: mol_type = other DNA
tcgaatttagctgggtgaatgacggtgaaaatgttggggtcggtagtcgacagtgggttgatgccatgcgactgc

SEQ ID NO: 809340 - DNA, 75 bp, synthetic construct
  source 1..75: mol_type = other DNA
gaggcgaataaaaatctgcatctgatgctttcacgccgcggtttccgtctgtctcacagttttaccacggtgctc

SEQ ID NO: 809341 - DNA, 75 bp, synthetic construct
  source 1..75: mol_type = other DNA
ggatgaaatctgccgtgattcttcgcgtaaggttcgtattctggcgatctatccgcgtaccgaactgttgaagga

SEQ ID NO: 809342 - DNA, 75 bp, synthetic construct
  source 1..75: mol_type = other DNA
gagccgggttcaaatccgaaaggctacgagttcatcaacgacattaaaggtggtgtaatccctggcgaatacatc

SEQ ID NO: 809343 - DNA, 75 bp, synthetic construct
  source 1..75: mol_type = other DNA
gaagttcgcgcgggcgacatcgctgctgcaatcggtctgaaagacgtaaccactggtgacaccctgtgtgacccg

SEQ ID NO: 809344 - DNA, 75 bp, synthetic construct
  source 1..75: mol_type = other DNA
cgctgtctgaaatgttcggatacgcaactcagctgcgttctctgaccaagggtcgtgcatcatacactatggaat

SEQ ID NO: 809345 - DNA, 75 bp, synthetic construct
  source 1..75: mol_type = other DNA
tgacgctatcattgtaacggctgcaccgcccgaaattccgacagcgttaatgacgcaactggacgaaggcggcat

SEQ ID NO: 809346 - DNA, 75 bp, synthetic construct
  source 1..75: mol_type = other DNA
atggtaagcagacgcgtacaagcacttctggatcaattacgtgcgcagggcattaaagatgagcaggtgctgaat

SEQ ID NO: 809347 - DNA, 75 bp, synthetic construct
  source 1..75: mol_type = other DNA
gagaacaccggtgacgttatcggtgacttgagccgtcgtcgtggtatgctcaaaggccaggaatctgaagttact

SEQ ID NO: 809348 - DNA, 75 bp, synthetic construct
  source 1..75: mol_type = other DNA
aaagggcaactctatcgcgccgatcttgatcgtaacggcattcaggatctggttatctggttaccaagtaccggt

SEQ ID NO: 809349 - DNA, 75 bp, synthetic construct
  source 1..75: mol_type = other DNA
cagggcatgacacgctggctgatgtgcctgccgatgacatcgatggcgaaagcgtgcgctgtttccactatttcc

SEQ ID NO: 809350 - DNA, 75 bp, synthetic construct
  source 1..75: mol_type = other DNA
ttgctcggcgaggcagcggttgaatcgctgcgtcatgccctgttttttgagaaaacgctcactacaggtgaagat

SEQ ID NO: 809351 - DNA, 75 bp, synthetic construct
  source 1..75: mol_type = other DNA
tcctgacagtgactattacccgtttctggaacggtttattgttgctgtggaaaaacgctggcccggcgtgttgct

SEQ ID NO: 809352 - DNA, 75 bp, synthetic construct
  source 1..75: mol_type = other DNA
caaacccatcgccgggcgcgacccgcaaacggaagatctggcgcagacgcagcgttgcttgataaagggggatgt

SEQ ID NO: 809353 - DNA, 75 bp, synthetic construct
  source 1..75: mol_type = other DNA
tgggcgttgctggcgtgacgcttgagaagatgccaaatgaagaggattactggcaattaactgctaaagaccgcg

SEQ ID NO: 809354 - DNA, 75 bp, synthetic construct
  source 1..75: mol_type = other DNA
atgacagctataaaaggaaagcgaaaaccgcagcgtaatgtactctaccttcctacagaagttcgtgttgaagtt

SEQ ID NO: 809355 - DNA, 75 bp, synthetic construct
  source 1..75: mol_type = other DNA
actcgccattcgtgcactggtgaaagaaggtaaaaccggacaggcggtggagttgtttaaccaactaccgcaaga

SEQ ID NO: 809356 - DNA, 75 bp, synthetic construct
  source 1..75: mol_type = other DNA
cagacgtagcagaacaacctcagccgcaaaccgtggatggcgttgccagcccggcacaagcctcggttagcgatc

SEQ ID NO: 809357 - DNA, 75 bp, synthetic construct
  source 1..75: mol_type = other DNA
cccggcgcaagcttcagttagcgatctgacgggtgaagaaactacgccccaacccgcgccagttagcgctccgtc

SEQ ID NO: 809358 - DNA, 75 bp, synthetic construct
  source 1..75: mol_type = other DNA
tcggcccgctgctgaaaaataacgttgaagagttgctgaagagcaacaccccgctgaacgtgctggcgcttaacc

SEQ ID NO: 809359 - DNA, 75 bp, synthetic construct
  source 1..75: mol_type = other DNA
gcacctgccgcagacgtagcagaacaacctcagccgcaaaccgtggatggcgttgccagcccggcacaagcctcg

SEQ ID NO: 809360 - DNA, 75 bp, synthetic construct
  source 1..75: mol_type = other DNA
tgcaaccaccgcagcagtaagcgcaccagcaaatccgtcagcagaactgaaaatctacgatacttcttcacaacc

SEQ ID NO: 809361 - DNA, 75 bp, synthetic construct
  source 1..75: mol_type = other DNA
gtaaccaggtttggctgatcaccgcgggcggcgcactctttgctgcctggccgatggtctatgccgctgcgttct

SEQ ID NO: 809362 - DNA, 75 bp, synthetic construct
  source 1..75: mol_type = other DNA
aatccactctggcgtaccgtggtactgcgcgacggcctgctggtgcgccgcacttgctgccagcgttatcgctta

SEQ ID NO: 809363 - DNA, 75 bp, synthetic construct
  source 1..75: mol_type = other DNA
ctgcgccatgccctcttttttgagaaaatgctcacgaacggtgaagataatccactctggcgtaccgtggtactg

SEQ ID NO: 809364 - DNA, 75 bp, synthetic construct
  source 1..75: mol_type = other DNA
cagagaagctagaaaaaattcttgaagaaaaagcaaaggaagagtgtcgctcattcagtgcagaagtaattaaac

SEQ ID NO: 809365 - DNA, 75 bp, synthetic construct
  source 1..75: mol_type = other DNA
cggaagccattaccttcgatccgcagcaaagtgcgctgatcgtggtggatatgcaaaacgcctatgccacgccag

SEQ ID NO: 809366 - DNA, 75 bp, synthetic construct
  source 1..75: mol_type = other DNA
atgatgacaaccttaaccgctcgaccggaagccattaccttcgatccgcagcaaagtgcgctgatcgtggtggat

SEQ ID NO: 809367 - DNA, 75 bp, synthetic construct
  source 1..75: mol_type = other DNA
gtttatccgtctggatgaacccgccccgcttaacgccatgacactggcgcaatggtcatcaccgaatgcgctacg

SEQ ID NO: 809368 - DNA, 75 bp, synthetic construct
  source 1..75: mol_type = other DNA
ttagccgaagtgcttgccagtggtgaaaccaatctctttaacagcgcgcggaatattgcctgtgccattaaaata

SEQ ID NO: 809369 - DNA, 75 bp, synthetic construct
  source 1..75: mol_type = other DNA
cggtgcagggcgcagcactggtgatcaccggggaagggcgcattgactcgcaaacggcaggcggtaaagcgccgc

SEQ ID NO: 809370 - DNA, 75 bp, synthetic construct
  source 1..75: mol_type = other DNA
cctgaaaagcgtaatccgctactggcgtcaagttatggcaccggtgagttaattcgccatgcgcttgataacagc

SEQ ID NO: 809371 - DNA, 75 bp, synthetic construct
  source 1..75: mol_type = other DNA
ttagccgaagtgctcgccagcggtgaaaccaatctcttcaacagcgcacgaaatattgcctgcgccggtgatgct

SEQ ID NO: 809372 - DNA, 75 bp, synthetic construct
  source 1..75: mol_type = other DNA
tattcctcaatgcggatattaaaccgggtattgagattgtactgcgggcggtcaacctggagcaggcggtgcagg

SEQ ID NO: 809373 - DNA, 75 bp, synthetic construct
  source 1..75: mol_type = other DNA
gaatgcgatccgcgtctggcaaattgtcatatcgaagtggcgtgtgatgttgataacccgctggtggggccacgc

SEQ ID NO: 809374 - DNA, 75 bp, synthetic construct
  source 1..75: mol_type = other DNA
ttttgtaaacctgcttcccgcctggtcgacgaatggcctggcaattgccggtaatattctgcctgcactcggttt

SEQ ID NO: 809375 - DNA, 75 bp, synthetic construct
  source 1..75: mol_type = other DNA
atgcgaaaccttacactgcgccggtagctgctacagcaccggttgcagccagcggcccgaaacgcgtggttgcgg

SEQ ID NO: 809376 - DNA, 75 bp, synthetic construct
  source 1..75: mol_type = other DNA
gctggtaaaccgatgtatcgcacctctaccggtctggcgctgaagaaaaccgcgcaggaactggataaagcggtt

SEQ ID NO: 809377 - DNA, 75 bp, synthetic construct
  source 1..75: mol_type = other DNA
ggtcgcggcggccatctcggccaagcgtacctcgatcacgcctgaagatgccaaagtgatcgccaagcgtgctgc

SEQ ID NO: 809378 - DNA, 75 bp, synthetic construct
  source 1..75: mol_type = other DNA
tgatcgccgtcgatgaattccaccatgtgtcagctaacccggataacaagcttggtcagcatctggggcagttca

SEQ ID NO: 809379 - DNA, 75 bp, synthetic construct
  source 1..75: mol_type = other DNA
cttccgtttccgttacttatgcacgtaatggcgcatcaaccaaagctaatgtgcttgggatgcgtcctatgcagg

SEQ ID NO: 809380 - DNA, 75 bp, synthetic construct
  source 1..75: mol_type = other DNA
gcgatggtcgccgcgacgggcggcaacatcgtgacgcttgaagtctgcgggccgatgggcgaaacagtgaatgct

SEQ ID NO: 809381 - DNA, 75 bp, synthetic construct
  source 1..75: mol_type = other DNA
ggacattattacgccaaacgaaacggaagcagaaaagctcaccggtattcgtgttgaaaatgatgaagatgcagc

SEQ ID NO: 809382 - DNA, 75 bp, synthetic construct
  source 1..75: mol_type = other DNA
ttcttggcagcattaatgctgaccatatccttaatcttcaatcttttcctactccaggcgaaaccgtaaccggta

SEQ ID NO: 809383 - DNA, 75 bp, synthetic construct
  source 1..75: mol_type = other DNA
tcattggtattcatgctggcgcgaatgcagccctttcccctgcgctggtggacgcgcaacgtgagcgtattgcta

SEQ ID NO: 809384 - DNA, 75 bp, synthetic construct
  source 1..75: mol_type = other DNA
tggagtaataccggttatttgatcaactggtatcttactgagatgaagcaactgctcggcgaggcgacggttgaa

SEQ ID NO: 809385 - DNA, 75 bp, synthetic construct
  source 1..75: mol_type = other DNA
cgtggtgattcccacaccggagacgggcgacgcagtgattaaaaacacgttctttttccctgatgtggatccgaa

SEQ ID NO: 809386 - DNA, 75 bp, synthetic construct
  source 1..75: mol_type = other DNA
atgccagttagccgttatctctgcattttcataaacgttggtttgggagaagcggcaaaacgaaatgtgggaaca

SEQ ID NO: 809387 - DNA, 75 bp, synthetic construct
  source 1..75: mol_type = other DNA
ttgtctcaacgccatgaaactctacccggacgtacacattgccgggcttgacgtattactcacgcaaaagttaac

SEQ ID NO: 809388 - DNA, 75 bp, synthetic construct
  source 1..75: mol_type = other DNA
aacgcctgcgtcgtcagcggcatgacccgcttttttcatgtggtgtttccggcaaacagcgaaaaacagaggggg

SEQ ID NO: 809389 - DNA, 75 bp, synthetic construct
  source 1..75: mol_type = other DNA
tcaacatctataacaacagattgttactatgctcccaagggaacaacgcaatatctgaagatggacgctgtttct

SEQ ID NO: 809390 - DNA, 75 bp, synthetic construct
  source 1..75: mol_type = other DNA
tgctgccctttccccggcgctggtggaagcgcaacgtgagcgtattgccaacgcgtcagcattattaatgcagct

SEQ ID NO: 809391 - DNA, 75 bp, synthetic construct
  source 1..75: mol_type = other DNA
ggttatctggcgaggtgtttcgggaaacgggctggcgccttcctcgtttttgatcctgatgacctttaatcagca

SEQ ID NO: 809392 - DNA, 75 bp, synthetic construct
  source 1..75: mol_type = other DNA
tattacttttttacaaaaaatggctaccagaagggagatccgttttattaactcaccagaaggtattattcatct

SEQ ID NO: 809393 - DNA, 75 bp, synthetic construct
  source 1..75: mol_type = other DNA
gaaaaacggcgacctgatgattgtcatcaatggtaaatcgggtgcggacaacgagcagttgctggtggagattga

SEQ ID NO: 809394 - DNA, 75 bp, synthetic construct
  source 1..75: mol_type = other DNA
tcggatttggatcgcatgaagatccggtcggttccaccatcgaggcgatcaaagaagcgaaagcgatcgccgctg

SEQ ID NO: 809395 - DNA, 75 bp, synthetic construct
  source 1..75: mol_type = other DNA
tacgccactattgccagcgccaaaaagcatatcccggaaagtaacctggcggtgatttcggtcaacggtctgttt

SEQ ID NO: 809396 - DNA, 75 bp, synthetic construct
  source 1..75: mol_type = other DNA
ttcagagaaaggtaaaaaattctggtttatgggttgtgcaattctttcccttgttttgtgttttatattttttga

SEQ ID NO: 809397 - DNA, 75 bp, synthetic construct
  source 1..75: mol_type = other DNA
gccgctcgcgaagcgcgtcaggcgctgcaaaatgacctcaacgtgatgctgttctccgataacgtctcggttgaa

SEQ ID NO: 809398 - DNA, 75 bp, synthetic construct
  source 1..75: mol_type = other DNA
tgtcatcaatggtaaatcgggtgcggacaacgagcagttgctggtggagattgaagaactgttcaacaccaaagc

SEQ ID NO: 809399 - DNA, 75 bp, synthetic construct
  source 1..75: mol_type = other DNA
gctttcaatggataaactacgcagcaaactgctgtggcaaggtgccggtttaccggtcgcgccgtgggtagcgtt

SEQ ID NO: 809400 - DNA, 75 bp, synthetic construct
  source 1..75: mol_type = other DNA
aacccgcgcagagtttgaaaaaggcctgagtgataagcagttagcagaaatttctgctctgggtttgccggttat

SEQ ID NO: 809401 - DNA, 75 bp, synthetic construct
  source 1..75: mol_type = other DNA
gttgttcgatacccagttaatgctgtttgccaaacgattaagtacgctcgatcttaacgaaattaatgcggcaga

SEQ ID NO: 809402 - DNA, 75 bp, synthetic construct
  source 1..75: mol_type = other DNA
attattgcgttgccacaggtgcgtaaaatttacccttttgagggggttgtagagtggcataggaaagagtttttt

SEQ ID NO: 809403 - DNA, 75 bp, synthetic construct
  source 1..75: mol_type = other DNA
tatgctaagctcatctcgcggtccgttgtttctctcacgctctccgcgtaatcgggcagaacctattagcaactg

SEQ ID NO: 809404 - DNA, 75 bp, synthetic construct
  source 1..75: mol_type = other DNA
ttgtgactacctgcgagaagaaggattaatagtactgaaccccgttatgagaggcagctggcatcctggcggagg

SEQ ID NO: 809405 - DNA, 75 bp, synthetic construct
  source 1..75: mol_type = other DNA
aaatacaataaagaaggagaaacagaatggcggtgtacatcaggtttagccatgatgcaggagagtaataaacta

SEQ ID NO: 809406 - DNA, 75 bp, synthetic construct
  source 1..75: mol_type = other DNA
tgattatgaagcgtatgcacgggatttgtttctggacagcctgacctttattgatggccatgtgttctgccggtg

SEQ ID NO: 809407 - DNA, 75 bp, synthetic construct
  source 1..75: mol_type = other DNA
acgttggaacctggcacaaatacaactgtggaagcatcgctggccgctggtttgacctgacaacgtttgatgatg

SEQ ID NO: 809408 - DNA, 75 bp, synthetic construct
  source 1..75: mol_type = other DNA
aacgcgattttttcgccgcctgccgtgcccttcaccaggatgaaaccgatccggaactgatgtttcaggattatg

SEQ ID NO: 809409 - DNA, 75 bp, synthetic construct
  source 1..75: mol_type = other DNA
ggcaaaacatacggtgagagaaatgaccgcctttgcaagataatcaaagaaattgctgatgggttgaaacagttc

SEQ ID NO: 809410 - DNA, 75 bp, synthetic construct
  source 1..75: mol_type = other DNA
gtgtctttcgagggttgttctcagaaatcaatcttgcctcagaaaaacttggcaaaacatacggtgagagaaatg

SEQ ID NO: 809411 - DNA, 75 bp, synthetic construct
  source 1..75: mol_type = other DNA
ttttcctgccggtccccggacagagcacaaaggaagtcgccgccggctctgctttacccggccatgcagggcatg

SEQ ID NO: 809412 - DNA, 75 bp, synthetic construct
  source 1..75: mol_type = other DNA
atgaatctgaatggcgctgtcctacatcaattgcaatgatgcaggaatcaggaaagatttttattccatggcctg

SEQ ID NO: 809413 - DNA, 75 bp, synthetic construct
  source 1..75: mol_type = other DNA
tggcaatgatgcaggaatcaggaaagatgtttattccatggcctgattataaagatggtcaaagcaaagatttga

SEQ ID NO: 809414 - DNA, 75 bp, synthetic construct
  source 1..75: mol_type = other DNA
cgctttcactaacgtttataagtatgatgttgaaaagcgtattgtatggggtgaatggtgaaagagaaatgcagc

SEQ ID NO: 809415 - DNA, 75 bp, synthetic construct
  source 1..75: mol_type = other DNA
ggaggcttttgcggttgagttcgccagtgataccggcctgctggctgacgtgccggagacggtggcgctctattt

SEQ ID NO: 809416 - DNA, 75 bp, synthetic construct
  source 1..75: mol_type = other DNA
gaccaatgccaatatcctcaagaaactgagctttccgcggatctgtttaccgatcattgtcaccgcctcggcgtt

SEQ ID NO: 809417 - DNA, 75 bp, synthetic construct
  source 1..75: mol_type = other DNA
tgagaatggttccgctaattcgatgtttattcaaaccatttccccggatgttaagtgtgaacgtggaatggttgt

SEQ ID NO: 809418 - DNA, 75 bp, synthetic construct
  source 1..75: mol_type = other DNA
tgtccagcgaatcgccaaattgcatggcatgaatgttgagtttgggaatgcggaacaaggtggatttgaggcgaa

SEQ ID NO: 809419 - DNA, 75 bp, synthetic construct
  source 1..75: mol_type = other DNA
ggtgtttggtgaggaatgcgaacaccgcccgcgtggcggtgaggtgtaccggctgacggggatttttgaccgggc

SEQ ID NO: 809420 - DNA, 75 bp, synthetic construct
  source 1..75: mol_type = other DNA
ttttggtattggaatgcaaattgccggagcatgtgcgtcaggaacactctattgttgtggtgagggccgtccggc

SEQ ID NO: 809421 - DNA, 75 bp, synthetic construct
  source 1..75: mol_type = other DNA
cttatgggaacaggaggagcgtatgcttcctgtaatttgggaggattcttcgatggaactgcatcaggaagttta

SEQ ID NO: 809422 - DNA, 75 bp, synthetic construct
  source 1..75: mol_type = other DNA
ggtaaggtcatcatgtcacgacagaatgaagaacaggacgaccctgtgatttcgcagtttttgacttttcttgaa

SEQ ID NO: 809423 - DNA, 75 bp, synthetic construct
  source 1..75: mol_type = other DNA
tttgggtggtttcagacggtagtaggggccgctttgttggttgtatcggcggtaatgatgcctgctttagcacct

SEQ ID NO: 809424 - DNA, 75 bp, synthetic construct
  source 1..75: mol_type = other DNA
atcaacaataatatcgctcatcaatggacattatcacagatcgccaacgagttactgatgagtcagagtctgtta

SEQ ID NO: 809425 - DNA, 75 bp, synthetic construct
  source 1..75: mol_type = other DNA
aaccagtgcctgtaagcgccccggcggcaaacactgcggcggtaagcgcccccgcgaatccatccgcagagctga

SEQ ID NO: 809426 - DNA, 75 bp, synthetic construct
  source 1..75: mol_type = other DNA
tcaattgaattgctgcgtgcgttagtcgcccaggaacctctgctcggcgcgaaagaaaagcagcagaatattgac

SEQ ID NO: 809427 - DNA, 75 bp, synthetic construct
  source 1..75: mol_type = other DNA
aggcgctctcctccatgactcaggaacaggcgaatacgctggtgatcaacgccgacgaaaatattctgcaaggct

SEQ ID NO: 809428 - DNA, 75 bp, synthetic construct
  source 1..75: mol_type = other DNA
atggaaaaagaagttagcagaattttggtgagaatgcctcagtcgctaaaagatgcgattactggaaaggccaaa

SEQ ID NO: 809429 - DNA, 75 bp, synthetic construct
  source 1..75: mol_type = other DNA
aaatggaaggtttgcaatatagcgaaatcccgatgctggcgggcggtaatctgccattaatgcagcaggcgctca

SEQ ID NO: 809430 - DNA, 75 bp, synthetic construct
  source 1..75: mol_type = other DNA
ttcagggattgcgttaacgggtagtccggtagccaccagcatgactgtcgattctggcgcggcaacgggtaaccc

SEQ ID NO: 809431 - DNA, 75 bp, synthetic construct
  source 1..75: mol_type = other DNA
acattcagcccgtaccggtgacgttctgggaacgcgctaaagcattaactgctggagttgaggtcgatttagacg

SEQ ID NO: 809432 - DNA, 75 bp, synthetic construct
  source 1..75: mol_type = other DNA
catgacggcgggccagttaacaggggcgacatcaagttacgcgcgaaaatatgctttaaacggcttgttctgtat

SEQ ID NO: 809433 - DNA, 75 bp, synthetic construct
  source 1..75: mol_type = other DNA
accactgcttcaaaatatcacgctgactgttagtgatgaaattgtcctgatcggcaatcgctattatgtgaaagc

SEQ ID NO: 809434 - DNA, 75 bp, synthetic construct
  source 1..75: mol_type = other DNA
acctggtgttactggaaaatgttcggacgtatcaccaaagaagacattgaacgtaacacccactctctgtactaa

SEQ ID NO: 809435 - DNA, 75 bp, synthetic construct
  source 1..75: mol_type = other DNA
ccgttaacggcgctgaaagtacaaaccgaagttgcgcagctctctgacgacgatccacaggcacggaaaaaagca

SEQ ID NO: 809436 - DNA, 75 bp, synthetic construct
  source 1..75: mol_type = other DNA
actgacgcatacgctaagcagacaggccagcagcctcgccagcagaaaaacccaccaaaacaacaaccacagcag

SEQ ID NO: 809437 - DNA, 75 bp, synthetic construct
  source 1..75: mol_type = other DNA
cccaccaaaacaacaaccgcagcagaagaaagcgccgccaaatcctgatgaagtattagcacgtttctgtgatgc

SEQ ID NO: 809438 - DNA, 75 bp, synthetic construct
  source 1..75: mol_type = other DNA
taataacctcggagtttcaataaaaactgtttcgaattataaaaagtctttaatgaataggctgtatgtctgtaa

SEQ ID NO: 809439 - DNA, 75 bp, synthetic construct
  source 1..75: mol_type = other DNA
ctaccctgcgggaacaagagttattgttacagacatgcaaggaataactcttaaagtaatgaccatcgaagacaa

SEQ ID NO: 809440 - DNA, 75 bp, synthetic construct
  source 1..75: mol_type = other DNA
gggatgaaaaaagtgagcgttttgggttcggtctgcgagccagttgcagctgttcggcaggaagaatgctggtac

SEQ ID NO: 809441 - DNA, 75 bp, synthetic construct
  source 1..75: mol_type = other DNA
tttttgctggtttttttgactgctcgcgacattcacctgccagtaataataatggactggactatttttttagta

SEQ ID NO: 809442 - DNA, 75 bp, synthetic construct
  source 1..75: mol_type = other DNA
gatactcgtatgcaaaatcataaagatatttattacacggcatgggtacgagctgaactgtttctcgatttttat

SEQ ID NO: 809443 - DNA, 75 bp, synthetic construct
  source 1..75: mol_type = other DNA
agtggaaaagatattgctaataacctcggcgtttcaataaaaactgtttcgagttataaaaagtctttaatgaat

SEQ ID NO: 809444 - DNA, 75 bp, synthetic construct
  source 1..75: mol_type = other DNA
atgcgcatcgtgattgaagttaaacgcgatgcggtcggtgaagttgtgcttaacaacctctactcccagacccag

SEQ ID NO: 809445 - DNA, 75 bp, synthetic construct
  source 1..75: mol_type = other DNA
caccggtcaacattgaggaagagctgaagagctcctatctggattatgctatgtcggtcattgttggccgtgcgc

SEQ ID NO: 809446 - DNA, 75 bp, synthetic construct
  source 1..75: mol_type = other DNA
atcgacggcagtgccgcggaaggggacgatgaaatcgctccggaagtggacgttgacgacgagccagaagaagaa

SEQ ID NO: 809447 - DNA, 75 bp, synthetic construct
  source 1..75: mol_type = other DNA
cgtgctcatatccttgaagcattagctgtggcgctggcgaacatcgacccgatcatcgaactgatccgtcatgcg

SEQ ID NO: 809448 - DNA, 75 bp, synthetic construct
  source 1..75: mol_type = other DNA
cttccgtccgtgcgatgggctgcaacaccaccggtgtgcgcggtatccgtttaggcgaaggcgataaagtcgttt

SEQ ID NO: 809449 - DNA, 75 bp, synthetic construct
  source 1..75: mol_type = other DNA
aaaatctgcccgtgtcgttggtgacgtaatcggtaaataccatccccatggtgactcggcggtttatgacacgat

SEQ ID NO: 809450 - DNA, 75 bp, synthetic construct
  source 1..75: mol_type = other DNA
cgccgctggtgggattattcctcatcgcttcgctatttcagctactctttgcttctgacgtcgcagcattatgcg

SEQ ID NO: 809451 - DNA, 75 bp, synthetic construct
  source 1..75: mol_type = other DNA
tgcagcagctgcgcttcacgcgccggttgcggtagccgcgtgttgaataaacttggcccgcaaaccacgcatacc

SEQ ID NO: 809452 - DNA, 75 bp, synthetic construct
  source 1..75: mol_type = other DNA
aaagaaacgttgcgtccggttggtgttatgagcaggagagcattttggcggcttgagaatagagagtcacgattt

SEQ ID NO: 809453 - DNA, 75 bp, synthetic construct
  source 1..75: mol_type = other DNA
ctggttgaaggcgatgaactgattggcgttgacctgaccagcggcgaagacgaagtgatgttgttctccgctgaa

SEQ ID NO: 809454 - DNA, 75 bp, synthetic construct
  source 1..75: mol_type = other DNA
ggtgaacggttcttccggtatcgccgtaggtatggcaaccaacatcccgccgcacaacctgacggaagtcatcaa

SEQ ID NO: 809455 - DNA, 75 bp, synthetic construct
  source 1..75: mol_type = other DNA
cactgcgtgaagcagcgcaaaactatcagtcgatgctggcgtggtatcaggagaaaccagacagtccaaacgctg

SEQ ID NO: 809456 - DNA, 75 bp, synthetic construct
  source 1..75: mol_type = other DNA
atccgtcagtatgctggtttttcaacagcaaaagagtccaacgctttttatcgccgtaacctggccgccgggtaa

SEQ ID NO: 809457 - DNA, 75 bp, synthetic construct
  source 1..75: mol_type = other DNA
ggcgaatacctccagccgcgataatgccatctaacaccgaagacccgaccgcgacaggtaagttaaggtcgggag

SEQ ID NO: 809458 - DNA, 75 bp, synthetic construct
  source 1..75: mol_type = other DNA
tccgtacccgtgtatttgaggaaatgcgcgggctgacagcacagatcaaaaaggatatggcccgccgactaactg

SEQ ID NO: 809459 - DNA, 75 bp, synthetic construct
  source 1..75: mol_type = other DNA
gacgaagcgttatgaatacaacgcgttgttagccgcgaacccaccggatagcagcaaaatcaatgccgttgctaa

SEQ ID NO: 809460 - DNA, 75 bp, synthetic construct
  source 1..75: mol_type = other DNA
tggctgcggcggctcgtgccgcgcaaaaaggccgcgcgtcactcgttcccgcctcgccagcttccgctgcccgcc

SEQ ID NO: 809461 - DNA, 75 bp, synthetic construct
  source 1..75: mol_type = other DNA
tcgtttgaacacatccagcagttgtacgaacttgctatcagtctgggcgccagggatgaaggtacaccggggcac

SEQ ID NO: 809462 - DNA, 75 bp, synthetic construct
  source 1..75: mol_type = other DNA
acgaagacggtaatatattaaacgaaagaatattagatcgggcgcaagaaaactacaaagttgcgcacgctaaat

SEQ ID NO: 809463 - DNA, 75 bp, synthetic construct
  source 1..75: mol_type = other DNA
gacgaagcgttatgaatacaatgccctgttagccgcgaacccaccggatagcagcaaaattaacgcggtcgccaa

SEQ ID NO: 809464 - DNA, 75 bp, synthetic construct
  source 1..75: mol_type = other DNA
gaagaccgtgagtcgtttggtgggaaagtgaaatcaaggttattcagatatactcgagtaagtgaagaccatgtt

SEQ ID NO: 809465 - DNA, 75 bp, synthetic construct
  source 1..75: mol_type = other DNA
aaaagaatggaaagaaaaagctccattggccgagttctcgaagtgtggagattatcgtaaagcatgcgtgttagt

SEQ ID NO: 809466 - DNA, 75 bp, synthetic construct
  source 1..75: mol_type = other DNA
cgaacaacagacagtctggcaaaaaattcataatgacttttacgcccaaagcagcgtgctgcaacaaaaactggt

SEQ ID NO: 809467 - DNA, 75 bp, synthetic construct
  source 1..75: mol_type = other DNA
atgaaacggaacacgaaaattgccctggtgatgatggcgctttcagcaatggcgatgggatcgacatctgcattt

SEQ ID NO: 809468 - DNA, 75 bp, synthetic construct
  source 1..75: mol_type = other DNA
ccgcgcggagccggaatgggcatgggttacggcggctgcggtggtggcggtcatatgggtatgggccactggtaa

SEQ ID NO: 809469 - DNA, 75 bp, synthetic construct
  source 1..75: mol_type = other DNA
cactggtgacaccctgtgtgacccggatgcgccgatcattctggaacgtatggaattccctgagccggtaatctc

SEQ ID NO: 809470 - DNA, 75 bp, synthetic construct
  source 1..75: mol_type = other DNA
gcacctctgaaacgcaggccgccacaccaaaggccgtcaaggctgcatatgacctggctgccggcaaggcgcccg

SEQ ID NO: 809471 - DNA, 75 bp, synthetic construct
  source 1..75: mol_type = other DNA
atggtatgcaggctactattctgacctctatcagaagcgggtatgcgaagggtatcactgtcagaccccgtagca

SEQ ID NO: 809472 - DNA, 75 bp, synthetic construct
  source 1..75: mol_type = other DNA
acgtacgttcccgtaaccacccggacgcgacactgacagctaaggggttcacccaactgagcagtgccaccaaca

SEQ ID NO: 809473 - DNA, 75 bp, synthetic construct
  source 1..75: mol_type = other DNA
cggcaccgataaaaacagcggtgtgaaactggcaggcgacaaccagaatatctggaaatcactccccttcctgcg

SEQ ID NO: 809474 - DNA, 75 bp, synthetic construct
  source 1..75: mol_type = other DNA
ttcgataccggtattcgcccgatcactatggcaaccgacctgctgaaacctggcggctatctgcgtttaagcgcc

SEQ ID NO: 809475 - DNA, 75 bp, synthetic construct
  source 1..75: mol_type = other DNA
taagaagattgtcgataatcaggggaatgatatgggggtaactatcccttcatctatccctgaaggctcaattgt

SEQ ID NO: 809476 - DNA, 75 bp, synthetic construct
  source 1..75: mol_type = other DNA
accaaaagcggtcaaggctgcatacgacctagcagccggcaaggcgcctgccagccacactcacccgtggagtca

SEQ ID NO: 809477 - DNA, 75 bp, synthetic construct
  source 1..75: mol_type = other DNA
ataccgggcgtgcgctactttcatttcaggaagggactatcgtatccggttttgatgataatgataccggagata

SEQ ID NO: 809478 - DNA, 75 bp, synthetic construct
  source 1..75: mol_type = other DNA
gttttgccttttctgctgcggtttatgcccaggaagatagcatttctgttattaactcatcagcggagcttgcat

SEQ ID NO: 809479 - DNA, 75 bp, synthetic construct
  source 1..75: mol_type = other DNA
accaaaagcggtcaaggctgcatacgacctggcagccggcaaggcgcccgtcagccacactcacccgtggagtca

SEQ ID NO: 809480 - DNA, 75 bp, synthetic construct
  source 1..75: mol_type = other DNA
accaaaagcggtcaaggctgcatacgacctcgcagccggcaaggcgcctgacagccacactcacccgtggagtca

SEQ ID NO: 809481 - DNA, 75 bp, synthetic construct
  source 1..75: mol_type = other DNA
accaaaagcggtcaaggctgcatacgaccttgcagccggcaaggcgcccggcagccacactcacccgtggagtca

SEQ ID NO: 809482 - DNA, 75 bp, synthetic construct
  source 1..75: mol_type = other DNA
tgtgccactcccgtcggccctgccgctggtccgcacacgcagctcgcgcaaaatattgtcacatcctggctgact

SEQ ID NO: 809483 - DNA, 75 bp, synthetic construct
  source 1..75: mol_type = other DNA
cgccgagcgtggatgcccaagcgcgcgccattgctcaggcacagcggttggcaggtttgacaccgcaggatatca

SEQ ID NO: 809484 - DNA, 75 bp, synthetic construct
  source 1..75: mol_type = other DNA
attatgacggagacagcggcgattgcattgatggttctcgatcgtcgcccggaccttgtgatcttacccagcaat

SEQ ID NO: 809485 - DNA, 75 bp, synthetic construct
  source 1..75: mol_type = other DNA
tcccggggcggttcagtggataaatgcttattacaacgtttatcgacctcatacaaacaatggtggtttatcgcc

SEQ ID NO: 809486 - DNA, 75 bp, synthetic construct
  source 1..75: mol_type = other DNA
atttaggtacagtagaaccagattttgaaaataatatcctgtacggaaaactggcgtttattcgagacctggtaa

SEQ ID NO: 809487 - DNA, 75 bp, synthetic construct
  source 1..75: mol_type = other DNA
gggtagcagaaatggcgatggaagaagatttatcactgaacgcctttgttaataaggcgctggaaaaagaagtca

SEQ ID NO: 809488 - DNA, 75 bp, synthetic construct
  source 1..75: mol_type = other DNA
atgaaacatttaaaatataaaggatatttaggcacggttgaacccgattttgaaaataatgtcctgtatggaaaa

SEQ ID NO: 809489 - DNA, 75 bp, synthetic construct
  source 1..75: mol_type = other DNA
cctgtgttactgcctgcgctatcaagcaagatattccggaatacatccgtttgcttggcgaacaccgctatgccg

SEQ ID NO: 809490 - DNA, 75 bp, synthetic construct
  source 1..75: mol_type = other DNA
ctgcatgtagacagcctgatcaccgccattggtgaacagcaggatactgaagccctgaatgcgatgggcgtgccg

SEQ ID NO: 809491 - DNA, 75 bp, synthetic construct
  source 1..75: mol_type = other DNA
tgtaactacgtttgcagcaagtgtgtggatgtctgcccgaaccgcgccaacgtatccattgcggtccctggcttc

SEQ ID NO: 809492 - DNA, 75 bp, synthetic construct
  source 1..75: mol_type = other DNA
ctggacaaaaacggctggcctgatgtcgaccataacggcgaaactcgtctgactgacgtctttatgattggtgac

SEQ ID NO: 809493 - DNA, 75 bp, synthetic construct
  source 1..75: mol_type = other DNA
acagcaggatactgaagccctgaatgcgatgggcgtgccgctggacaaaaacggctggccagacgtcgaccataa

SEQ ID NO: 809494 - DNA, 75 bp, synthetic construct
  source 1..75: mol_type = other DNA
agccctgaatgcgatgggcgtgccgctggacaaaaacggctggcctgatgtcgaccataacggtgagacccgcct

SEQ ID NO: 809495 - DNA, 75 bp, synthetic construct
  source 1..75: mol_type = other DNA
gttggttgccgtctgcagggattgtgtggcgaaggactacgccaactctgcgtatccgtgacccgcataaagatg

SEQ ID NO: 809496 - DNA, 75 bp, synthetic construct
  source 1..75: mol_type = other DNA
gctggttgccgtcagccgggcttgtatggcgcagggctgcgccaactctgcgtatccgtgacccgcataaagatg

SEQ ID NO: 809497 - DNA, 75 bp, synthetic construct
  source 1..75: mol_type = other DNA
caggcgcttcatgagacaataacccgaaatcaacagtgccgtttaatgtggcagttgttgaaaaaggttcgtcac

SEQ ID NO: 809498 - DNA, 75 bp, synthetic construct
  source 1..75: mol_type = other DNA
cagcggctgcgtcaatgagcaaaaggtcaatcagctggcgagcaacgtacagacgttaaatgccaaaattgcccg

SEQ ID NO: 809499 - DNA, 75 bp, synthetic construct
  source 1..75: mol_type = other DNA
ccgaagctaacagagccaatacacgccttgatgcgcaggactattttgattgcctgcgctgcttgcgtatgtata

SEQ ID NO: 809500 - DNA, 75 bp, synthetic construct
  source 1..75: mol_type = other DNA
agtgaaaattgatgtgatgcgcgatccgatggctgcattaaacttgcttcgttccttcaagggaaaatcctattt

SEQ ID NO: 809501 - DNA, 75 bp, synthetic construct
  source 1..75: mol_type = other DNA
ccggatgcctgttggtgatgctgccagcgatgggcctgttctatgtgtccgacctgatgggcggtgcgaaaaacc

SEQ ID NO: 809502 - DNA, 75 bp, synthetic construct
  source 1..75: mol_type = other DNA
ccctgactatcgtaatgggtctgatgctgctggtttactggcgcgcttctcgtttgctgaacaagaaggtggaac

SEQ ID NO: 809503 - DNA, 75 bp, synthetic construct
  source 1..75: mol_type = other DNA
cgctctattttgaagtgctcgtgcactcactgaatatggcgctgatcgccactctcgcctgcctggtgctgggct

SEQ ID NO: 809504 - DNA, 75 bp, synthetic construct
  source 1..75: mol_type = other DNA
ctcgctgaatatggcactgatcgccaccctcgcctgcctggtactgggttatccatttgcctggtttctggcgaa

SEQ ID NO: 809505 - DNA, 75 bp, synthetic construct
  source 1..75: mol_type = other DNA
ccggatgtctgctggtgatgctgccagcgatgggcctgttctatgtgtccgacctgatgggcggtgcgaaaaacc

SEQ ID NO: 809506 - DNA, 75 bp, synthetic construct
  source 1..75: mol_type = other DNA
atgggcctgatgttgctggtttactggcgcgcttctcgtttgctgaataagaaggcaacagaaatagataattag

SEQ ID NO: 809507 - DNA, 75 bp, synthetic construct
  source 1..75: mol_type = other DNA
ctgttgttctggcaacctgcttgctcagcggctgcgtcaatgagcaaaaggtcaatcagctggcgagcaatgtgc

SEQ ID NO: 809508 - DNA, 75 bp, synthetic construct
  source 1..75: mol_type = other DNA
aaagctcatgcaggaattacacattctttttttaaagattatttccaccaaagagaaaaggcttttgctatttcc

SEQ ID NO: 809509 - DNA, 75 bp, synthetic construct
  source 1..75: mol_type = other DNA
gaagaagcgaaagcgcgtgttcaggcacagcgtgctgaacagcaagcgaaaaaacgcgaagctgccgcagctgct

SEQ ID NO: 809510 - DNA, 75 bp, synthetic construct
  source 1..75: mol_type = other DNA
ctgaacgccttagagcaattgcagcaggactatacgcagcggctgaaagactgggagagcgccttcacggatttg

SEQ ID NO: 809511 - DNA, 75 bp, synthetic construct
  source 1..75: mol_type = other DNA
tcagcctttgcgctgatggtgccggtactggcaggttacattgccttctccattgccgatcgtccgggtctcacg

SEQ ID NO: 809512 - DNA, 75 bp, synthetic construct
  source 1..75: mol_type = other DNA
tcagcctttgcgctgatggtgccggtactggcaggttatattgccttttccattgccgatcgtccgggtctcacg

SEQ ID NO: 809513 - DNA, 75 bp, synthetic construct
  source 1..75: mol_type = other DNA
atcaaaagccctaaaagatataaattccctgtcgacttaaatgagttgattcccggcggcgtcgccccacagtct

SEQ ID NO: 809514 - DNA, 75 bp, synthetic construct
  source 1..75: mol_type = other DNA
aagaaattggactactttactataatctcactgctattctattttagaaacagaagatcattccgaaaattgaag

SEQ ID NO: 809515 - DNA, 75 bp, synthetic construct
  source 1..75: mol_type = other DNA
gtcgacaaacgcggtgtaccggttaacactattctggtgtctgcgctggttacggcattgtgcgtactgattaac

SEQ ID NO: 809516 - DNA, 75 bp, synthetic construct
  source 1..75: mol_type = other DNA
ccgcatcctgattttctatattggttcgttagccgttctgctctcgctgatgccgtggacccgcgttactgctga

SEQ ID NO: 809517 - DNA, 75 bp, synthetic construct
  source 1..75: mol_type = other DNA
tcattgcagccgtctgctcaaacgttatcgccagtatgggccgcttggcatgaacaaccagagtcgtggccgcac

SEQ ID NO: 809518 - DNA, 75 bp, synthetic construct
  source 1..75: mol_type = other DNA
tacgcattcggtttcttgggcattaaaaaataaatcatatatcaaaaaacatgttaaacacagcaatcaatttgg

SEQ ID NO: 809519 - DNA, 75 bp, synthetic construct
  source 1..75: mol_type = other DNA
ttacattttactccggtttcttctttcttaaaaaaaatagttaaccctaatttagactcttctattagtgtcgca

SEQ ID NO: 809520 - DNA, 75 bp, synthetic construct
  source 1..75: mol_type = other DNA
cgctctattttgaagtgctattgcactcgctgaatatggcgctgatcgccaccctcgcctgcctggtgctgggct

SEQ ID NO: 809521 - DNA, 75 bp, synthetic construct
  source 1..75: mol_type = other DNA
atgatgctgtaccacgatgatgagccgctaacgtttgacctggtctggcagaaggggagctggcatcgcacgatg

SEQ ID NO: 809522 - DNA, 75 bp, synthetic construct
  source 1..75: mol_type = other DNA
aagaaggtcgccgacgctgacagcctgatggcggtcatcatcgcgcaagcgatgaaccacggcaaccacgtcatg

SEQ ID NO: 809523 - DNA, 75 bp, synthetic construct
  source 1..75: mol_type = other DNA
agaaagcgcgcgaaaaggcattctacgagaagcttccgttctgcgacgtggccgacgtgtttcgcttcgtcaacg

SEQ ID NO: 809524 - DNA, 75 bp, synthetic construct
  source 1..75: mol_type = other DNA
tatgacttccagtgcgctggcgacagcggaaaaatggcccagtcactggcgcgcaaggcaggagaagcggcatga

SEQ ID NO: 809525 - DNA, 75 bp, synthetic construct
  source 1..75: mol_type = other DNA
gtcaacatggtcacctgcggcggccaggccaccattccaatggtagcggcagtttcacgcgtggcgcgtgttcat

SEQ ID NO: 809526 - DNA, 75 bp, synthetic construct
  source 1..75: mol_type = other DNA
atcaggcttctggcgcattacagaaaaaccagaacggtgcagatattccaggaaaagataccttcaccaaaaata

SEQ ID NO: 809527 - DNA, 75 bp, synthetic construct
  source 1..75: mol_type = other DNA
gggcgtatgctcgcggtaaaacaactttgcgggtggcgacccagatgggcaacaccgccgcgcttaaacgataca

SEQ ID NO: 809528 - DNA, 75 bp, synthetic construct
  source 1..75: mol_type = other DNA
acgggtgcaggccaaaattgcggcatcaaatacgggggaactggatgccctgcaacagctgggattctccctggt

SEQ ID NO: 809529 - DNA, 75 bp, synthetic construct
  source 1..75: mol_type = other DNA
gactgccgaactgcgcacgcagtggctggcgttcaaccgcgagctgaaacagggcaagctgacgcacctcgaata

SEQ ID NO: 809530 - DNA, 75 bp, synthetic construct
  source 1..75: mol_type = other DNA
ggggcggtgctgaagacgaggtgtatatggggatggaacctccctatctggcagccaaccagccgatgcaggacg

SEQ ID NO: 809531 - DNA, 75 bp, synthetic construct
  source 1..75: mol_type = other DNA
ggctttgaagctgactggtcagagttttacaccacaacccgcaaaccctctgcgggggatgttggtgcatatacg

SEQ ID NO: 809532 - DNA, 75 bp, synthetic construct
  source 1..75: mol_type = other DNA
ttcaaagatgatatcgaagcctcaatcaatgaaatggctgaggcggtgcaggcttacgtaccgggttatcgcctg

SEQ ID NO: 809533 - DNA, 75 bp, synthetic construct
  source 1..75: mol_type = other DNA
gggcggcggcggaattccggtagtgcgtactgacgcgggggattaccaaagcgtggacgcggttatcgacaaaga

SEQ ID NO: 809534 - DNA, 75 bp, synthetic construct
  source 1..75: mol_type = other DNA
gccggaaccgaaacgtattgtcgaagcacctgccattaaggcgctgatccaacaaggctttgtggtgattggcgc

SEQ ID NO: 809535 - DNA, 75 bp, synthetic construct
  source 1..75: mol_type = other DNA
gcaccgcagcttctcgccgtagagctcgtcgcgcaaacctgcaaagtcaggaggcgattagctccgacaagctac

SEQ ID NO: 809536 - DNA, 75 bp, synthetic construct
  source 1..75: mol_type = other DNA
gcttgtgccggaatattaatttcctttttgttgcctcaaaaatggaccagtgcagcggtagttactcctgcagaa

SEQ ID NO: 809537 - DNA, 75 bp, synthetic construct
  source 1..75: mol_type = other DNA
atacgcaaggcggcatcggctacctgatacaacaagcgctgaacaaccgactggcgcgtcacggcgagaaaaaag

SEQ ID NO: 809538 - DNA, 75 bp, synthetic construct
  source 1..75: mol_type = other DNA
tctggcgttggtcataaccccatcaccctctgtagcggacataacaagatgaaagaacttgtggtcgttgccatt

SEQ ID NO: 809539 - DNA, 75 bp, synthetic construct
  source 1..75: mol_type = other DNA
ggctgattgccgatgccaaacccgcaagtcgccaccttatcggcctgaacattatccaggacattcccggctatc

SEQ ID NO: 809540 - DNA, 75 bp, synthetic construct
  source 1..75: mol_type = other DNA
caacgcgatcgtttattacaactctgcgatcctgtcacgtttgctgaagcgactggaaacagaaggtaatgaaaa

SEQ ID NO: 809541 - DNA, 75 bp, synthetic construct
  source 1..75: mol_type = other DNA
gattgtctggatgatacacaactcaccgtgtgagttcaggcttaacatcatgtggtcagaatttgcggcgttctt

SEQ ID NO: 809542 - DNA, 75 bp, synthetic construct
  source 1..75: mol_type = other DNA
atgtccagaaaaacagaatttaaaggcacctcagcttctcgccgtagagctcgtcgcgcaaacctgcaaagtcag

SEQ ID NO: 809543 - DNA, 75 bp, synthetic construct
  source 1..75: mol_type = other DNA
attttcgtgaaacactaaatacccgccgcgaaaaatcgtggcacaagaccactgtcggggaagtggtgaaggaaa

SEQ ID NO: 809544 - DNA, 75 bp, synthetic construct
  source 1..75: mol_type = other DNA
acgcagcgtgtactgttagcgcgagcattgttaaatcgaccgcaattattagtgctggatgaacccactcaaggc

SEQ ID NO: 809545 - DNA, 75 bp, synthetic construct
  source 1..75: mol_type = other DNA
gtggggtaagcagaaagaatttacaacatggtgataatcagattacttattatttaaatgaagctcaatatcaaa

SEQ ID NO: 809546 - DNA, 75 bp, synthetic construct
  source 1..75: mol_type = other DNA
ttggaagcatcacccaaacagcaagagttgcaaaaaggtaaaatagaacaacttgaaaaacaacaagaacaagat

SEQ ID NO: 809547 - DNA, 75 bp, synthetic construct
  source 1..75: mol_type = other DNA
tgaccggtgaagccgataacgtgctggcgctgacgacggtctacgcatcaaaggcacaggcgatgcgcgccgctc

SEQ ID NO: 809548 - DNA, 75 bp, synthetic construct
  source 1..75: mol_type = other DNA
attaaccgcagcgatgttagatcgtttactccaccattcacatgtattgcaattgagtggtgaaagctatcgatt

SEQ ID NO: 809549 - DNA, 75 bp, synthetic construct
  source 1..75: mol_type = other DNA
cagtgtggccccgcgtttctgggtaccgtatgacacggtgtacagcgtcgagaaaaatgaagatcgacggacagc

SEQ ID NO: 809550 - DNA, 75 bp, synthetic construct
  source 1..75: mol_type = other DNA
taagaacggcaaatcggcaatctctgccggtgtcgccctgtattgttttgcctgtgataacgagttcggcgcgga

SEQ ID NO: 809551 - DNA, 75 bp, synthetic construct
  source 1..75: mol_type = other DNA
ctggaaacgaacaccttatgaccgaccgatttacaccacatctactggtgctacaggaaataaaatatattcctg

SEQ ID NO: 809552 - DNA, 75 bp, synthetic construct
  source 1..75: mol_type = other DNA
acctattaagcgttcccgtatcaaatattggctttcatgctacatggggcaatgaaaaacctgccgatcctaaag

SEQ ID NO: 809553 - DNA, 75 bp, synthetic construct
  source 1..75: mol_type = other DNA
aacacctggattcgtcagtatgtggctgaccaggaaaacccgccttcagaagttcgcagccgcaagccattacgc

SEQ ID NO: 809554 - DNA, 75 bp, synthetic construct
  source 1..75: mol_type = other DNA
gaatcactggtgatgttattgctctctgttctggacgtaaaaacatacagagatgatgcgcgattaaatcaatgg

SEQ ID NO: 809555 - DNA, 75 bp, synthetic construct
  source 1..75: mol_type = other DNA
tgttaacaatatcgtcactctgggcattgacaggctgtgactatattgaaaaatctcacctgatcgacgatctcg

SEQ ID NO: 809556 - DNA, 75 bp, synthetic construct
  source 1..75: mol_type = other DNA
cgtggggcggcgaaaaaccgtctgatactaaagcctacgcaaaatggcaacagttattatttagcacatcaatga

SEQ ID NO: 809557 - DNA, 75 bp, synthetic construct
  source 1..75: mol_type = other DNA
gacctgaaccccatcactatcattcagaactacaccaacatgtccgatccgatgaaagagctggaagcggcgatt

SEQ ID NO: 809558 - DNA, 75 bp, synthetic construct
  source 1..75: mol_type = other DNA
agatccggaggtgctcgcgtttatagcccgtaaacagtgcgaaacggtggaggtggatgaggttcctgtttaccg

SEQ ID NO: 809559 - DNA, 75 bp, synthetic construct
  source 1..75: mol_type = other DNA
gccggttattcggcgaagaccgccagggttaaaggctcgcagctggcaaaagatccggaggtgcttgcgtttata

SEQ ID NO: 809560 - DNA, 75 bp, synthetic construct
  source 1..75: mol_type = other DNA
tgacattacttcgccctgttacgagaagcgtgtgcagatagtggaaattctccgccgtaaccggacaggagaaga

SEQ ID NO: 809561 - DNA, 75 bp, synthetic construct
  source 1..75: mol_type = other DNA
taccggtagtggtattcctgaatacgcgctgtcacgtatttttgaacgcttttactctttgccgcgtgcaaatgg

SEQ ID NO: 809562 - DNA, 75 bp, synthetic construct
  source 1..75: mol_type = other DNA
ctgaagttagccatcaatatggagaatattcagtttgacaaccttccctctgctgaaaatcggcagaaaagaagc

SEQ ID NO: 809563 - DNA, 75 bp, synthetic construct
  source 1..75: mol_type = other DNA
gccatcaacatggaaaatattcagttcgacaatcttccttctgctgaaaatcggcagaaaagaagcaaaaaataa

SEQ ID NO: 809564 - DNA, 75 bp, synthetic construct
  source 1..75: mol_type = other DNA
tatcgcgattaatatatcgacagctttacttttattaatgctctcaatctatataaaaaatcctcttgagctaac

SEQ ID NO: 809565 - DNA, 75 bp, synthetic construct
  source 1..75: mol_type = other DNA
aaaaagcagagtcatatcacgatcttattctggctctcttcttctttatggctgtaatgatgatgattattccac

SEQ ID NO: 809566 - DNA, 75 bp, synthetic construct
  source 1..75: mol_type = other DNA
aaaatcagcccggtcagcgagtcacccatcgaccccttcggggcgaccgggttgtcacatgaccttgctgatgaa

SEQ ID NO: 809567 - DNA, 75 bp, synthetic construct
  source 1..75: mol_type = other DNA
ggaccaggcccgaagcgctgattaaagcaaatcccaactttggtgtttctgttaaagagcattttcttcgggcga

SEQ ID NO: 809568 - DNA, 75 bp, synthetic construct
  source 1..75: mol_type = other DNA
aatggcgtcattctgaccgctttagatatcaggcgctatgtgaagaaaatgattgaaggttcgttcccgtcagtc

SEQ ID NO: 809569 - DNA, 75 bp, synthetic construct
  source 1..75: mol_type = other DNA
atgaataaactcttaaatatatttaaaaaagtggagtcatatcacgatcttattctggctctcttcttctttatg

SEQ ID NO: 809570 - DNA, 75 bp, synthetic construct
  source 1..75: mol_type = other DNA
agtttgtttttcgcatacttgaaaatcaaaaagggacagtttgggtatatgaccaggatgatgcgtttcttgata

SEQ ID NO: 809571 - DNA, 75 bp, synthetic construct
  source 1..75: mol_type = other DNA
gcaaaccaatcaaccaggcgcgcgctgaagtggcgaaatcggcgaatttgtgtgactggtatgcagaacatggtc

SEQ ID NO: 809572 - DNA, 75 bp, synthetic construct
  source 1..75: mol_type = other DNA
gcagcggcaaaacgctttattatcgaagagggaattgcttcggcatttaccgaacgttttgtgtcagctgcggca

SEQ ID NO: 809573 - DNA, 75 bp, synthetic construct
  source 1..75: mol_type = other DNA
ccaatggggacaatccttgcggttatgccgtggaacttcccgttatggcaggttatgcgcggtgctgttcctatc

SEQ ID NO: 809574 - DNA, 75 bp, synthetic construct
  source 1..75: mol_type = other DNA
ccagagtggcggaggccttttaatgagaaccgtcatctacggcaagactgtcccgatgttacgggcgtttaaagt

SEQ ID NO: 809575 - DNA, 75 bp, synthetic construct
  source 1..75: mol_type = other DNA
tgcacatgttcatcgctggcttaaatgtatcaaagacggcatttttccacctgaaatttatcaaccattcgatgc

SEQ ID NO: 809576 - DNA, 75 bp, synthetic construct
  source 1..75: mol_type = other DNA
tgtgccaaagaccttttccgcttcactttgagcctgattcatttctacctgaccggctcgcctctatctttttaa

SEQ ID NO: 809577 - DNA, 75 bp, synthetic construct
  source 1..75: mol_type = other DNA
tgtgcttaacgatgccgatctggaactggcggttaaagcggcggtagccggacgttatcagaataccggacaggt

SEQ ID NO: 809578 - DNA, 75 bp, synthetic construct
  source 1..75: mol_type = other DNA
cctgatcacaatgtggtatgaacgccacggcgtagctttgcgcaatggtcaaaagcgtaaagacgctatgacctg

SEQ ID NO: 809579 - DNA, 75 bp, synthetic construct
  source 1..75: mol_type = other DNA
gcgcatttcgccccaagccaccttgaagacgctgtgcggcttaatcccttaaaatgccgcagcagcttagaaata

SEQ ID NO: 809580 - DNA, 75 bp, synthetic construct
  source 1..75: mol_type = other DNA
caatttcgataaatcctgccacgggtgaacaactttctgtgctgccgtgggctggcgctgacgatatcgaaaacg

SEQ ID NO: 809581 - DNA, 75 bp, synthetic construct
  source 1..75: mol_type = other DNA
cggcacgtctggaatgcggtggggtgtttatcaatggttattgtgccagcgacgcgcgagtcgcctttggtggcg

SEQ ID NO: 809582 - DNA, 75 bp, synthetic construct
  source 1..75: mol_type = other DNA
gacgaaacacaggccagacagatggcggcacgtctggaatgcggtggggtgtttatcaatggttattgtgccagc

SEQ ID NO: 809583 - DNA, 75 bp, synthetic construct
  source 1..75: mol_type = other DNA
ctgccggtagcgaggcgcaggcgtataaagcgcgcagcccggtgtttgcggcggtgtatcaccacagcttgctgg

SEQ ID NO: 809584 - DNA, 75 bp, synthetic construct
  source 1..75: mol_type = other DNA
acgccctgtgccagcaactcaaactcgaacgggtggcaacgcattaccccgtcctggcgcagcaggcggtgcgcg

SEQ ID NO: 809585 - DNA, 75 bp, synthetic construct
  source 1..75: mol_type = other DNA
gtacatgatattttttatattatgcaagttcacatcaaaaacaacattcatatcaattttaatagttgcattatc

SEQ ID NO: 809586 - DNA, 75 bp, synthetic construct
  source 1..75: mol_type = other DNA
attcaaaagctgcaagacggtgacattgatctggtgaaacaggccaagcagcaatacgaagacaaccagatgtcg

SEQ ID NO: 809587 - DNA, 75 bp, synthetic construct
  source 1..75: mol_type = other DNA
accagaggatatcaaaagctccctggtttcctgtgtcgatatattcaaggttttgattaaacaatattatgatta

SEQ ID NO: 809588 - DNA, 75 bp, synthetic construct
  source 1..75: mol_type = other DNA
ctggcgctcggtcgcgctgatttatttcccgagacgccagtgcgcgtatcaggctttaagcgtgtcatagacgag

SEQ ID NO: 809589 - DNA, 75 bp, synthetic construct
  source 1..75: mol_type = other DNA
tcagttatgcgacagacatggcaagccagcaagccgtgatcaggttgagcggatgcttcaggtttttgtgaaaga

SEQ ID NO: 809590 - DNA, 75 bp, synthetic construct
  source 1..75: mol_type = other DNA
aagagagctgaaagcggtaaaaacgccggtcaggaatggctggcggtggttggttattacccgaaattaagccag

SEQ ID NO: 809591 - DNA, 75 bp, synthetic construct
  source 1..75: mol_type = other DNA
gacctggcgtctgtgctatttgttgggtgaggctggaagtggaaaaacctggctggcgcagcaactgcaaaaaga

SEQ ID NO: 809592 - DNA, 75 bp, synthetic construct
  source 1..75: mol_type = other DNA
taccgcgtattaggtgataagcgcccccggaaaatgcagcttgccgtggtgatgagtggaaccattctcgcactt

SEQ ID NO: 809593 - DNA, 75 bp, synthetic construct
  source 1..75: mol_type = other DNA
cacgctatccaaacatttcaattaacggtaattgcctgatcatcggcgttgtcaaaggcgttcagtacgagcttt

SEQ ID NO: 809594 - DNA, 75 bp, synthetic construct
  source 1..75: mol_type = other DNA
gtgcagggcagcagaagtgtttagtgaagtggacaagtgggtagatacatcattaaagattggtgataactcatt

SEQ ID NO: 809595 - DNA, 75 bp, synthetic construct
  source 1..75: mol_type = other DNA
ttttgctgatttaaacgcgcaggttgagcaactcagcaggcgttgttcagaggcttttggctcatatggacgtta

SEQ ID NO: 809596 - DNA, 75 bp, synthetic construct
  source 1..75: mol_type = other DNA
atgaacatagtgatcaccggagggacaggattaattggtcgccatttgattccgcgtttgctggagctgggccat

SEQ ID NO: 809597 - DNA, 75 bp, synthetic construct
  source 1..75: mol_type = other DNA
ttggcctgggcgggccgattggctccggtcggcagtatctggcctggattcatattgatgatatggtcaacggca

SEQ ID NO: 809598 - DNA, 75 bp, synthetic construct
  source 1..75: mol_type = other DNA
ccgctgggaagagattgcctgccgggcgcaaagtgacaaaacgcgagtgtgcctgctgcgaaccggcgtggtact

SEQ ID NO: 809599 - DNA, 75 bp, synthetic construct
  source 1..75: mol_type = other DNA
ttccatatctcacaggcaaagctatgccgagagttagatattaaaaagtcaaatatgtcccttgtctttaaaaag

SEQ ID NO: 809600 - DNA, 75 bp, synthetic construct
  source 1..75: mol_type = other DNA
ctaagaaagatatccagcaaacaattgagagtataaacctacactgtggtattaactccagtattgatgtaaagt

SEQ ID NO: 809601 - DNA, 75 bp, synthetic construct
  source 1..75: mol_type = other DNA
ttttcgggttacgggcgggtgatggttgtcggtggaggggcggagattgtggcacccgctatccgcgaagcctgc

SEQ ID NO: 809602 - DNA, 75 bp, synthetic construct
  source 1..75: mol_type = other DNA
gaaaacgatgcttacaatcagtgcgtcgccgttatttcaaaaaattttggtgattccattcttgccaaacaagca

SEQ ID NO: 809603 - DNA, 75 bp, synthetic construct
  source 1..75: mol_type = other DNA
aatggaaaagggaaagccgtacctggcagtaacactgatatacaaacaatcagtactatttgcaaaaatacggca

SEQ ID NO: 809604 - DNA, 75 bp, synthetic construct
  source 1..75: mol_type = other DNA
gcaaaatgctcgtgtccgcatggtgtcgggtcaggtggtcagtggcgtggtggatgctgatgggaatattcttat

SEQ ID NO: 809605 - DNA, 75 bp, synthetic construct
  source 1..75: mol_type = other DNA
cgggattaattggtcgccatttgattccgcgtttgctggagctgggccatcaaatcacggtagtgacgcgtaacc

SEQ ID NO: 809606 - DNA, 75 bp, synthetic construct
  source 1..75: mol_type = other DNA
ggcagtaacactgatataaaaagaatcagtactatttgcaaaaatgcggcaggcattacattatttattcgttaa

SEQ ID NO: 809607 - DNA, 75 bp, synthetic construct
  source 1..75: mol_type = other DNA
ttttccaagtggacaagtcaaatctataacaaatcgagtaggctctacatcgacaggtgttacattaaatggtat

SEQ ID NO: 809608 - DNA, 75 bp, synthetic construct
  source 1..75: mol_type = other DNA
cggttgaatgtggaatcgcgcggtgatgtgccgctgatggaagcgcgaacgcgaactctgctgacgttgctgaac

SEQ ID NO: 809609 - DNA, 75 bp, synthetic construct
  source 1..75: mol_type = other DNA
ggatcgtgaaagccagcgggtcacgtttattgtcagcccggaaggtggtgtggaaattgaaaaagtcgcccatga

SEQ ID NO: 809610 - DNA, 75 bp, synthetic construct
  source 1..75: mol_type = other DNA
tttgcagctatcgctgatttcgacatggtgcgtaacgcagtagacgcagctaaagcactgggcgttgatgcacgt

SEQ ID NO: 809611 - DNA, 75 bp, synthetic construct
  source 1..75: mol_type = other DNA
gcccttgatctcagtggtgatggcttgcatctgcgtggctatcgtgatcgtgctggtattgcaccgatcaaagaa

SEQ ID NO: 809612 - DNA, 75 bp, synthetic construct
  source 1..75: mol_type = other DNA
tgctggtattgcgccgatcaaagaaaccctggcagccgctattgtgatgcgatccggctggcagccaggaacacc

SEQ ID NO: 809613 - DNA, 75 bp, synthetic construct
  source 1..75: mol_type = other DNA
acggaaatatcggctgcatggtcaatggtgcagggctggctatggcaaccatggacatcatcaagctatacggtg

SEQ ID NO: 809614 - DNA, 75 bp, synthetic construct
  source 1..75: mol_type = other DNA
cctcgtcgcagttaatcaacagcattgatattctccgggctcgccgggcatccactctccatctacgactcattc

SEQ ID NO: 809615 - DNA, 75 bp, synthetic construct
  source 1..75: mol_type = other DNA
cagcgaggaggaaaaaatcgaggtattcggctgcgtccccatgttgtcggacgtggtgaacatcagcgcaggtga

SEQ ID NO: 809616 - DNA, 75 bp, synthetic construct
  source 1..75: mol_type = other DNA
ccctggtcaccagcagataaccctgttaaaagctttaactatcacgaagatgtcagccagaaccacgaagattat

SEQ ID NO: 809617 - DNA, 75 bp, synthetic construct
  source 1..75: mol_type = other DNA
ccggatcactatctgcatctggcgaattttgtcctgcaacaactcgacgcgctgaaaggtcactatggcggatag

SEQ ID NO: 809618 - DNA, 75 bp, synthetic construct
  source 1..75: mol_type = other DNA
acaacctgccggatcactatctgcatctggcgaattttgtcctgcaacaactcgacgcgctgaaaggtcactatg

SEQ ID NO: 809619 - DNA, 75 bp, synthetic construct
  source 1..75: mol_type = other DNA
aaaacgcggacggctggataccttaccgccgcgtactgtactggatgtcaatcaacttgttgatgccgtcagcct

SEQ ID NO: 809620 - DNA, 75 bp, synthetic construct
  source 1..75: mol_type = other DNA
ctataccgacccatcctgaagcttctgttgaagaggctaaagactggctgacagcagaggaattcactcatattg

SEQ ID NO: 809621 - DNA, 75 bp, synthetic construct
  source 1..75: mol_type = other DNA
ataatcataaacgtatttaccggctctatcgcgagcagggtctgtccctgagcctcaaacgcccacgccgaaatg

SEQ ID NO: 809622 - DNA, 75 bp, synthetic construct
  source 1..75: mol_type = other DNA
ttcctgattatgactggagcatattcggggtcaggggcagcaacagggggtccccagataatatggtaattaaga

SEQ ID NO: 809623 - DNA, 75 bp, synthetic construct
  source 1..75: mol_type = other DNA
ttaactcattgaatattgatatcctgaaaatcgataaatcgtttgttgagacgttgaccacgcataaaaccagcc

SEQ ID NO: 809624 - DNA, 75 bp, synthetic construct
  source 1..75: mol_type = other DNA
tttagttctctttcccatcattctgtcgctatggattgccttcctttgggcaaaatcagaagtgaataatcagct

SEQ ID NO: 809625 - DNA, 75 bp, synthetic construct
  source 1..75: mol_type = other DNA
cggtgcgtccgcagcaaattaaatttgaagtgactgagcatgcatttcttgatgtcgacaaaatgacgccgatta

SEQ ID NO: 809626 - DNA, 75 bp, synthetic construct
  source 1..75: mol_type = other DNA
ctggaataagtggtgttggcgaagtaggattagcctatggtgcaggtgcaaaatctggtgttggtattatcagag

SEQ ID NO: 809627 - DNA, 75 bp, synthetic construct
  source 1..75: mol_type = other DNA
ttggcggatccgtcatgctggcggttccccccgccgtgctgaaaacgctagggctgtcgacggacagcgaagtgg

SEQ ID NO: 809628 - DNA, 75 bp, synthetic construct
  source 1..75: mol_type = other DNA
atgcaggcactggtggaaacgttactacaccaggcaagactggagaatcgtcaggaagtcgttttgactgctgtt

SEQ ID NO: 809629 - DNA, 75 bp, synthetic construct
  source 1..75: mol_type = other DNA
ctggggacatgccaccagcgacgatatgatccactggcagcatgagcctattgcgctagcgccaggagacgataa

SEQ ID NO: 809630 - DNA, 75 bp, synthetic construct
  source 1..75: mol_type = other DNA
caacgatgaactgttcgggatcatctataccgttgacgaaggtgacgactggaccgacccacaggtgctggaaaa

SEQ ID NO: 809631 - DNA, 75 bp, synthetic construct
  source 1..75: mol_type = other DNA
gcccgtaaacaatgcgagacggtggagctggatgaggttcctgtttaccggcagaaaaagatgcagacggaggag

SEQ ID NO: 809632 - DNA, 75 bp, synthetic construct
  source 1..75: mol_type = other DNA
acgcggcgtgcgctattgtcagggctggtactttgcaaaggcgatgccgccgcaggtttttatggcatgggcaga

SEQ ID NO: 809633 - DNA, 75 bp, synthetic construct
  source 1..75: mol_type = other DNA
cttttgattatagcaatgggtatttagtttcttcggctggtgatgcatttagttacaagggatggtttatcacgc

SEQ ID NO: 809634 - DNA, 75 bp, synthetic construct
  source 1..75: mol_type = other DNA
tcttgttgttgttattgttgtgttttaatgttaaggcaagcatcacttctgataaagatgttattatagatgata

SEQ ID NO: 809635 - DNA, 75 bp, synthetic construct
  source 1..75: mol_type = other DNA
gtaaaattgacactgacccggtaaatcctgaaaaccagattcaggtttatgtggagaacgaagacggatctcacg

SEQ ID NO: 809636 - DNA, 75 bp, synthetic construct
  source 1..75: mol_type = other DNA
gggtttagcgccaatgccgagggtcaggcgctgaacaatgccggcgtcgcgcaaaatgcgcgggtacgcatggtg

SEQ ID NO: 809637 - DNA, 75 bp, synthetic construct
  source 1..75: mol_type = other DNA
atccagttaacccagtttcgccaggcatggcgggtaaaagcgggacaacgcgtcaatgtgatcgccagcggtgat

SEQ ID NO: 809638 - DNA, 75 bp, synthetic construct
  source 1..75: mol_type = other DNA
atcaaaatcattggttatcatgtatgctttaggtgattataaaaaaagatttgctcagttatattatgttccttt

SEQ ID NO: 809639 - DNA, 75 bp, synthetic construct
  source 1..75: mol_type = other DNA
tatcaacgaattgatatatgcccacgataacctttttttatgttcaacattaatagttcccgttaacggctacag

SEQ ID NO: 809640 - DNA, 75 bp, synthetic construct
  source 1..75: mol_type = other DNA
tggttctttgcaaaagcgatgccgccgcaggtatttatggcatgggcggagcaagtacccgcgcgcgagttaacg

SEQ ID NO: 809641 - DNA, 75 bp, synthetic construct
  source 1..75: mol_type = other DNA
acgcggcgtgcgctattgccagggatggttctttgctaaggcgatgccaccgcaggtgttcatgcaatggatgga

SEQ ID NO: 809642 - DNA, 75 bp, synthetic construct
  source 1..75: mol_type = other DNA
ttgtggtaagcatgccttcgcaactattcactatggctcgttcttttaaagccgtagccaatggtaaaatttata

SEQ ID NO: 809643 - DNA, 75 bp, synthetic construct
  source 1..75: mol_type = other DNA
ctggtggactgtgtggcagagctggaaaccaaagttggaaagtttgaaaaactggtgcaggaggtactgcgctga

SEQ ID NO: 809644 - DNA, 75 bp, synthetic construct
  source 1..75: mol_type = other DNA
tggatgagatggtggattgtgtggcagaactggaaaccaaagttggtaagtttgaaaaactggtgcaggaggtac

SEQ ID NO: 809645 - DNA, 75 bp, synthetic construct
  source 1..75: mol_type = other DNA
atgtgccgtcccgtactggctgtgatctgttgccggaaacggtggggcgtttggcggaagtaaaaaatattatcg

SEQ ID NO: 809646 - DNA, 75 bp, synthetic construct
  source 1..75: mol_type = other DNA
ttatcccggatgttattgatggcggagaggaggaaaatgatgcgcttctgaatgagtggcctcacggaaaactag

SEQ ID NO: 809647 - DNA, 75 bp, synthetic construct
  source 1..75: mol_type = other DNA
ccgtgaaaagtcgtggcacaagaccaccgtcggggaagtggtgaaggaaatagctgtgcggcacaaactgaagat

SEQ ID NO: 809648 - DNA, 75 bp, synthetic construct
  source 1..75: mol_type = other DNA
aactctgctgttatctgcggaacaggctgcacgtatcagggaaatgacggtcatcacgtctggtttgatgatgaa

SEQ ID NO: 809649 - DNA, 75 bp, synthetic construct
  source 1..75: mol_type = other DNA
cattgaatcttcaggtgatcgccgaaggtgtagagagtgcaaaggaagatgcttttttaaccaagaacgggatca

SEQ ID NO: 809650 - DNA, 75 bp, synthetic construct
  source 1..75: mol_type = other DNA
cgaagtggcgggataaaggtattaacctgcgagtggcggtaaatatttctgcacgtcagctcgccgatcaaacca

SEQ ID NO: 809651 - DNA, 75 bp, synthetic construct
  source 1..75: mol_type = other DNA
gcaaacactcgaacaacagacaaaactctatggattaacgacatcagttaaatttcttggaaatagagatgatat

SEQ ID NO: 809652 - DNA, 75 bp, synthetic construct
  source 1..75: mol_type = other DNA
acgggtaaaaataagtcatgagttttttcattatgccctgaaaaacaggagtgcaatgccgcttctccatgctgt

SEQ ID NO: 809653 - DNA, 75 bp, synthetic construct
  source 1..75: mol_type = other DNA
acgggtaaaaataagtcatgagttttttcattatgtcctgaaaaacgggtgtgcaatgccacttctccgtgctgt

SEQ ID NO: 809654 - DNA, 75 bp, synthetic construct
  source 1..75: mol_type = other DNA
ttaactggtagtaaacaatattcgttagctaataaaaaggttaagagcgtaacagtgagtatcccaattcccaaa

SEQ ID NO: 809655 - DNA, 75 bp, synthetic construct
  source 1..75: mol_type = other DNA
acttcaacgctgtcgctggctttcggctgatgtcattatggtgctggttggcctgatttgcggcatcacgctctt

SEQ ID NO: 809656 - DNA, 75 bp, synthetic construct
  source 1..75: mol_type = other DNA
acttcaacgctgtcgctggctttccgctgatgtcattatggtgctggttggcctgatttgcggcatcacgctgtt

SEQ ID NO: 809657 - DNA, 75 bp, synthetic construct
  source 1..75: mol_type = other DNA
cgtcgcgcattttaacccgtcttcgccagcccttcagtattggtttaattgaagtctatactggctgttcagtcg

SEQ ID NO: 809658 - DNA, 75 bp, synthetic construct
  source 1..75: mol_type = other DNA
gttaggaaaacgcgatattgatgagaatcgcacagaatatatggtcgcttctgaaagcgttgcgctcgacaccct

SEQ ID NO: 809659 - DNA, 75 bp, synthetic construct
  source 1..75: mol_type = other DNA
gacaacatttttgctgccattgccgccacaaaccgcctgatccgtggcgcgtatgcctgtgtggcgatgattatc

SEQ ID NO: 809660 - DNA, 75 bp, synthetic construct
  source 1..75: mol_type = other DNA
ggggaaaccgtaccgccagggctttgttaaaaaccgctatgttggtcgcaccttcatcatgccaggccagcaact

SEQ ID NO: 809661 - DNA, 75 bp, synthetic construct
  source 1..75: mol_type = other DNA
ctccccatttgcgaggcaggagaaaacgagaacgaagagccttatgtcagttttagtgttgcgccagatactgat

SEQ ID NO: 809662 - DNA, 75 bp, synthetic construct
  source 1..75: mol_type = other DNA
aagcgaataccgctttccgcagcagatttaagcaacgtatacgaaagtgtaattcgcgccgtccatgacagccgt

SEQ ID NO: 809663 - DNA, 75 bp, synthetic construct
  source 1..75: mol_type = other DNA
cgtttatcatgccgggtcagcagctgcgtcgtaagtccgtgcgccgtaaactgaacgccaaccgcgctgaattcc

SEQ ID NO: 809664 - DNA, 75 bp, synthetic construct
  source 1..75: mol_type = other DNA
cacacctaaaagttagattatatgaatatacgattgtgtacacaaataaatgtacgctacatgttacatacggta

SEQ ID NO: 809665 - DNA, 75 bp, synthetic construct
  source 1..75: mol_type = other DNA
gtggtgccattaaatactgtatatcaatcacagttcacaactatgtataaagaaatacaggggggtaaaattgac

SEQ ID NO: 809666 - DNA, 75 bp, synthetic construct
  source 1..75: mol_type = other DNA
tactctgcagttatctgccgaacaggctgctcgtatccgggaaatgacggtcatcacctccagcctgatgatgag

SEQ ID NO: 809667 - DNA, 75 bp, synthetic construct
  source 1..75: mol_type = other DNA
cagcgtataccgcgcatgaaacgcgaaggttcgcgagagaactgaatctggagccctgcacaacagcggtgagca

SEQ ID NO: 809668 - DNA, 75 bp, synthetic construct
  source 1..75: mol_type = other DNA
tggaagctttctgatatttctgaagaaatgaacatgtcagaggtagcagtaaggaaaaatctcgagaatgagaac

SEQ ID NO: 809669 - DNA, 75 bp, synthetic construct
  source 1..75: mol_type = other DNA
ttttggacagatgcaaagaaaaagaagattacagcagagaatattcatgatagatggggacataatttccactga

SEQ ID NO: 809670 - DNA, 75 bp, synthetic construct
  source 1..75: mol_type = other DNA
accttctggtcgggaggggctcatatttccggaggagtaatgtcaggggcagttaacagtatactggaggtgaaa

SEQ ID NO: 809671 - DNA, 75 bp, synthetic construct
  source 1..75: mol_type = other DNA
aagaaaaaattgcgtgaagaagagacatcgtattcacagttactgactgaatgtagaatgcagcgggcgttgcaa

SEQ ID NO: 809672 - DNA, 75 bp, synthetic construct
  source 1..75: mol_type = other DNA
tattctcaccatggttaatggtgaatatcgctattttaatggcggtgacctggtttttgcggatgcaagccaaat

SEQ ID NO: 809673 - DNA, 75 bp, synthetic construct
  source 1..75: mol_type = other DNA
aactaaatttgacgggtatcttgctgatgctgaacaatggcgcaatctgtcagttactgtaaacgctgccgatgt

SEQ ID NO: 809674 - DNA, 75 bp, synthetic construct
  source 1..75: mol_type = other DNA
cggcaatggcttcactgcgacacttgatttcctgcttaaaccaaaaacgctacgtgatacacgcgctggcgctct

SEQ ID NO: 809675 - DNA, 75 bp, synthetic construct
  source 1..75: mol_type = other DNA
aatgaggcggaatacttccaattgtccgtagtgatgggtgatctggacgaaataatattcatgtcagactgtata

SEQ ID NO: 809676 - DNA, 75 bp, synthetic construct
  source 1..75: mol_type = other DNA
ttataacagtgcgtcgtattttatttatgtctttcgaaactattatggtatgacgccgacagagtatcaggagcg

SEQ ID NO: 809677 - DNA, 75 bp, synthetic construct
  source 1..75: mol_type = other DNA
acatggtgataatcagattacttattatttaaatgaagctcaatatcaaaagatagtgaaaacacaaatacctat

SEQ ID NO: 809678 - DNA, 75 bp, synthetic construct
  source 1..75: mol_type = other DNA
tcagaacggaagaaacgacgtgatatacagaaagttaaggtcaatatgtcaggttgtggttatggtaatgttccg

SEQ ID NO: 809679 - DNA, 75 bp, synthetic construct
  source 1..75: mol_type = other DNA
gatattttatttggaatgtggggcgcatatccgaagtcctgagaaagtcggcagagaggaaaatgctcttatcag

SEQ ID NO: 809680 - DNA, 75 bp, synthetic construct
  source 1..75: mol_type = other DNA
ctactgacagaaacaaaaacacgtaaggcatacacggaggatgagatcacattagtaatcgaatgggctttgacg

SEQ ID NO: 809681 - DNA, 75 bp, synthetic construct
  source 1..75: mol_type = other DNA
ttcatcgaaattggtttgtttgaatgttctcaaggccacataacttgtttaaagttattgaaaaggctggaccaa

SEQ ID NO: 809682 - DNA, 75 bp, synthetic construct
  source 1..75: mol_type = other DNA
gggcattagtgtcatctccgtgcatactggatacaccagaagtaaaagttcccctgcagaaagataaagggcaat

SEQ ID NO: 809683 - DNA, 75 bp, synthetic construct
  source 1..75: mol_type = other DNA
gtagtgtcacagtgacaccgggggtagtgtcagagagacaccagggtagtgtcacagtgacaccgggggtagtgt

SEQ ID NO: 809684 - DNA, 75 bp, synthetic construct
  source 1..75: mol_type = other DNA
tcaccctttaaagatgttttttctaaggaaggtgcgaataagcaggtcatttcttcccaagctgactcgttgatt

SEQ ID NO: 809685 - DNA, 75 bp, synthetic construct
  source 1..75: mol_type = other DNA
ttcctggaacttctgtcgggttctggtcttagcaaggaacaacgggtggaggcgatttcacttgcctacgccacc

SEQ ID NO: 809686 - DNA, 75 bp, synthetic construct
  source 1..75: mol_type = other DNA
tgattgcagtacacaagtcccaaacagctacgttgttgcataccgattcgcagcaacggattcgtggtattaatg

SEQ ID NO: 809687 - DNA, 75 bp, synthetic construct
  source 1..75: mol_type = other DNA
tccccctttaaagatgttttttctggtaatgactccaacttactgatagtgttttatgttcagataatgcccgat

SEQ ID NO: 809688 - DNA, 75 bp, synthetic construct
  source 1..75: mol_type = other DNA
atgagtcacgaaataagaacaccaataagctctattatgggcttcctggaacttctgtcgggttctggtcttagc

SEQ ID NO: 809689 - DNA, 75 bp, synthetic construct
  source 1..75: mol_type = other DNA
aagttgccattccatattattatgagctgcattcgcaattaaaagagatgtatccggaggttgaatggatacagg

SEQ ID NO: 809690 - DNA, 75 bp, synthetic construct
  source 1..75: mol_type = other DNA
catccacgcggcgtttcattatttgaaaaagaattacatttcaggttgcgttatgacagtcccaacagggtggta

SEQ ID NO: 809691 - DNA, 75 bp, synthetic construct
  source 1..75: mol_type = other DNA
ccagggtaagccgctttgatgaataccgggcaaaggctgaacaatggcgaagagttacagctactgtaaacgctg

SEQ ID NO: 809692 - DNA, 75 bp, synthetic construct
  source 1..75: mol_type = other DNA
caaggtcaaggaaggcgaacttgatgctctggtcgcgacacagttaaattcacgttacatgatcgaccattacta

SEQ ID NO: 809693 - DNA, 75 bp, synthetic construct
  source 1..75: mol_type = other DNA
tggaacttctgtcgggttctggtcttagcaaggagcaacgggtggaggcgatttcacttgcctacgccggtgatg

SEQ ID NO: 809694 - DNA, 75 bp, synthetic construct
  source 1..75: mol_type = other DNA
tgattgcagtacacaagtcccaaacggctacgttgttgcataccgattcgcagcaacgggttcgtggtattaatg

SEQ ID NO: 809695 - DNA, 75 bp, synthetic construct
  source 1..75: mol_type = other DNA
tcagtttatgcgaggcgattggtacactcgaattactgaagcagtcactgattgaaggcgcgaaagagtcctcag

SEQ ID NO: 809696 - DNA, 75 bp, synthetic construct
  source 1..75: mol_type = other DNA
atgacggcgaagcacacaaaaaaccataattccgtggtgaagttcgtatctgcacgaggcagggcgtcgcttttg

SEQ ID NO: 809697 - DNA, 75 bp, synthetic construct
  source 1..75: mol_type = other DNA
tgacctgaaagcagaagacgcagaaaaagcagcgtgtgatttatttgatatgacaatggatattatccaggagta

SEQ ID NO: 809698 - DNA, 75 bp, synthetic construct
  source 1..75: mol_type = other DNA
ctctatctgggcgctggggccgctggtggcacgtttcggtcagggacaagtttctctacctggtggttgtacgat

SEQ ID NO: 809699 - DNA, 75 bp, synthetic construct
  source 1..75: mol_type = other DNA
ttatgcgaggcgattggcacactcgaattgctgaagcagtcactgattgaaggcgcgaaagagtcctcaacctga

SEQ ID NO: 809700 - DNA, 75 bp, synthetic construct
  source 1..75: mol_type = other DNA
atgacaagcgtcgttgatcttggtaaggagaagaaattcccaattactcaagagctatacgagaggctggaaagc

SEQ ID NO: 809701 - DNA, 75 bp, synthetic construct
  source 1..75: mol_type = other DNA
ctgaacagttaaagaagaatgtaattgaatatcgcaaatcgctttatatctggctgaattcgcagctcactgctg

SEQ ID NO: 809702 - DNA, 75 bp, synthetic construct
  source 1..75: mol_type = other DNA
gtttcaacggctattggtctggctggttgctaatgtctatccaacgttcactttcgccgattaccctgagcgttg

SEQ ID NO: 809703 - DNA, 75 bp, synthetic construct
  source 1..75: mol_type = other DNA
aaattgcgttgataaactccggcagtttacgtgctgatataaatgcaggcacgattacctttggtgacattacca

SEQ ID NO: 809704 - DNA, 75 bp, synthetic construct
  source 1..75: mol_type = other DNA
cctaagcgttgggcatctgacgcacctgaacagttaaagaagaatgtaattgaatatcgcaaatcgctttatatc

SEQ ID NO: 809705 - DNA, 75 bp, synthetic construct
  source 1..75: mol_type = other DNA
ctgtaattgaatatcgcaaatcgctttatatctggctgaattcgcaattgactgctgaaccgtatgtgtttggag

SEQ ID NO: 809706 - DNA, 75 bp, synthetic construct
  source 1..75: mol_type = other DNA
agctgggtgcgaaagtagaacgtaatggttctgtgcatattgatgcccgcgacgttaatgtattctgcgcacctt

SEQ ID NO: 809707 - DNA, 75 bp, synthetic construct
  source 1..75: mol_type = other DNA
acaacatgcgtgaagatgaaggtctggctgaccgtgcgaccttcgttgttgacccgcagggtatcatccaggcaa

SEQ ID NO: 809708 - DNA, 75 bp, synthetic construct
  source 1..75: mol_type = other DNA
aaacgcgccagaataatcagctttgttctgggcactgtcagcgtagcaagtttctgtataaccctgtacgaaata

SEQ ID NO: 809709 - DNA, 75 bp, synthetic construct
  source 1..75: mol_type = other DNA
aaaaataatgatatctatttactggcaaaacgctggtctgtcagacatgaagatatagaaaaaatactactgttt

SEQ ID NO: 809710 - DNA, 75 bp, synthetic construct
  source 1..75: mol_type = other DNA
gggatttaagcgcgtcatagacgagcaggcatggttaatcagtaaggtgactcatagcctgaataatagtggctt

SEQ ID NO: 809711 - DNA, 75 bp, synthetic construct
  source 1..75: mol_type = other DNA
ggcgctgggtaaagacctgacggataaggcactggatcatctggaccagaccaatgaaagcgatgcaagttttct

SEQ ID NO: 809712 - DNA, 75 bp, synthetic construct
  source 1..75: mol_type = other DNA
acaattgaccgctgaaccttatgcgtttggtgagcaactaacgctggtggactgttatctctgcaccatgcgcac

SEQ ID NO: 809713 - DNA, 75 bp, synthetic construct
  source 1..75: mol_type = other DNA
accgttatttgtcacggtgttgaaaaactttctggcgcacaggttatggcaaccgatctgcgtgcatcagcaagc

SEQ ID NO: 809714 - DNA, 75 bp, synthetic construct
  source 1..75: mol_type = other DNA
ggcgaagactggattagcctggatatgcatggcaaacgtccgaaggctgttaacgtacgtaccgcgccgcatccg

SEQ ID NO: 809715 - DNA, 75 bp, synthetic construct
  source 1..75: mol_type = other DNA
cgacgatcaaactggaagaaggttacgtaaaagcttccgttgatgggcgtctgaaaggcgcgcatatcgtgatgg

SEQ ID NO: 809716 - DNA, 75 bp, synthetic construct
  source 1..75: mol_type = other DNA
ttcttctggcagtctatctcatcggcctgatattcattatcctgattttcaatgacatagacataacatcgaaaa

SEQ ID NO: 809717 - DNA, 75 bp, synthetic construct
  source 1..75: mol_type = other DNA
tacccgatgtcagtgagtcagaagtgcagttattagccacgtcacttcatgacatttataattcctgtcagaaaa

SEQ ID NO: 809718 - DNA, 75 bp, synthetic construct
  source 1..75: mol_type = other DNA
gcgctgttcgccttaagtttacccatgcagggattgtggtggctgggcaagcgttctgtaacgccattacctcct

SEQ ID NO: 809719 - DNA, 75 bp, synthetic construct
  source 1..75: mol_type = other DNA
tgaaaaagagaaactggcccaggatcggataaaaaccagaaatcagcttgatgcaaatattcagcgcctcaatta

SEQ ID NO: 809720 - DNA, 75 bp, synthetic construct
  source 1..75: mol_type = other DNA
ggaattgaacggtgaattacgtaatcgtcaatatcttgttgagcaattaacaaaagcaaatgttgatgacgttaa

SEQ ID NO: 809721 - DNA, 75 bp, synthetic construct
  source 1..75: mol_type = other DNA
aggtattcaccaaactccgcgtgctggatctggatgccaatatcgatcgcaacggtgtgtttaacctgtttatca

SEQ ID NO: 809722 - DNA, 75 bp, synthetic construct
  source 1..75: mol_type = other DNA
aaggcaaactattgttatatttttaggggcatggattttttccatgatattaagtgatttagacatttcttacta

SEQ ID NO: 809723 - DNA, 75 bp, synthetic construct
  source 1..75: mol_type = other DNA
tatacaagagggggggggctactattgctctatatattatctttgggtattgcgttaggtatccagaatttaaca

SEQ ID NO: 809724 - DNA, 75 bp, synthetic construct
  source 1..75: mol_type = other DNA
attcagtgcgaacagattgcaaatgtattcttcttgaacaccatatgcctttgctgagacttttccctaaaggga

SEQ ID NO: 809725 - DNA, 75 bp, synthetic construct
  source 1..75: mol_type = other DNA
cgtcagtatcttgttgagcagttaacaaaagcaaatatcaacgatgtgaattttacgccgtttaaatatcagtta

SEQ ID NO: 809726 - DNA, 75 bp, synthetic construct
  source 1..75: mol_type = other DNA
gacggtattgaacgcaaactggaaattgaaaaagcggtcactgacgttgcggaactgaacggtgaattacgtaat

SEQ ID NO: 809727 - DNA, 75 bp, synthetic construct
  source 1..75: mol_type = other DNA
atgaaaattcccgttctccagtctggcttcaacttttttgctcctgctggatactctgctgccgtagcccctaat

SEQ ID NO: 809728 - DNA, 75 bp, synthetic construct
  source 1..75: mol_type = other DNA
ggtcatggcggtcgtttttgcgtttgcctgcgcaggtttactgatctctttcatcctgccgcaaaaatggaccag

SEQ ID NO: 809729 - DNA, 75 bp, synthetic construct
  source 1..75: mol_type = other DNA
gatcctttctgcgttggtcggcggatggtggcttgtggtggtgtgttgttgcgtcatgcgatggcatccagaaaa

SEQ ID NO: 809730 - DNA, 75 bp, synthetic construct
  source 1..75: mol_type = other DNA
ataaactggagatcaaaacccagtttgaaaaagaaaaactggctcaggaccgcattaaaatgaaaaatcaacttg

SEQ ID NO: 809731 - DNA, 75 bp, synthetic construct
  source 1..75: mol_type = other DNA
ttattggcattataagtattcttttacagaagactgagattatacatgataaaagtatgattctttttcctgaac

SEQ ID NO: 809732 - DNA, 75 bp, synthetic construct
  source 1..75: mol_type = other DNA
cagagaatgtgggcgtcagggatttcaggatgctgttgatgaccgggctggaccgggaggttcataaaatggaag

SEQ ID NO: 809733 - DNA, 75 bp, synthetic construct
  source 1..75: mol_type = other DNA
caacgacaggcactgaaacgcctttctgagagaggaagagaccgtcccctgaatctgaaacagagtgaacggggg

SEQ ID NO: 809734 - DNA, 75 bp, synthetic construct
  source 1..75: mol_type = other DNA
actatctgctgccgcaaaaagcgtttggtttgctgatggcgctggtggtggcaacgctgctacttaactggatta

SEQ ID NO: 809735 - DNA, 75 bp, synthetic construct
  source 1..75: mol_type = other DNA
ggcggcaaaactcagcgtgctgctgcatagcgggctggtgaatgatgcaatagccatggaatataaaaatggcac

SEQ ID NO: 809736 - DNA, 75 bp, synthetic construct
  source 1..75: mol_type = other DNA
aaatgctggttctggtgccggaaaggctggagatgctgaaggtgttgcgaaatatctgcccggtgtacagcggat

SEQ ID NO: 809737 - DNA, 75 bp, synthetic construct
  source 1..75: mol_type = other DNA
ggtgttacgaaatatctgcccggtgtacagcggatgcatgcctttgtcggacctggaaagaactgtgcgcatggc

SEQ ID NO: 809738 - DNA, 75 bp, synthetic construct
  source 1..75: mol_type = other DNA
ttcaaactgagcaatagtggcgcgtttgttgcacgtctgctggggccgctgctcgctgtggggctggcaattacc

SEQ ID NO: 809739 - DNA, 75 bp, synthetic construct
  source 1..75: mol_type = other DNA
cgcgagaggccgctggtttatcccaggaaaaattatctgaactggtaggtgtggaaggggttaatcctcggtcaa

SEQ ID NO: 809740 - DNA, 75 bp, synthetic construct
  source 1..75: mol_type = other DNA
aaaagtatgattctttttcctgaaccatcagcatttgcattggtttttatacctatcttttcattttgtttatac

SEQ ID NO: 809741 - DNA, 75 bp, synthetic construct
  source 1..75: mol_type = other DNA
gcaacgctgctgttgaactggattatgaatctgcctggcgcatctgcgttttcgcgcggcgatgcgacgccaggg

SEQ ID NO: 809742 - DNA, 75 bp, synthetic construct
  source 1..75: mol_type = other DNA
cattgccttcctcggcatgattttgctgctgatgtgcacgatggatgatatgcgcttgtcggcaattttgctgcc

SEQ ID NO: 809743 - DNA, 75 bp, synthetic construct
  source 1..75: mol_type = other DNA
ctgattgggattactgccgctgaagcgcgcgatccggaaaaaagcattccaaaagcggtaaatcaggtggtgtat

SEQ ID NO: 809744 - DNA, 75 bp, synthetic construct
  source 1..75: mol_type = other DNA
ggaactggttgagaaacgcggagccgccagtctggaagaggcatttatcgcttatttgcaggaagcggcagggca

SEQ ID NO: 809745 - DNA, 75 bp, synthetic construct
  source 1..75: mol_type = other DNA
atgaccattctggactacatcactactcatccggggtgtagcggcggagagatcgccgcagcactgaatacccca

SEQ ID NO: 809746 - DNA, 75 bp, synthetic construct
  source 1..75: mol_type = other DNA
ccaatccgggctgtagcggtggagaaatcgccgcagcactgaataccccaaccacagccattaatgcggagttac

SEQ ID NO: 809747 - DNA, 75 bp, synthetic construct
  source 1..75: mol_type = other DNA
aggcttcttaccacgtaaacccgatgccgttcgggtgcggcaatccacttaccaacatgtttaaccagctactga

SEQ ID NO: 809748 - DNA, 75 bp, synthetic construct
  source 1..75: mol_type = other DNA
gcaacgataactatgcaggcgatgaaatggttaccaaagtggtgccggtacgtaatgtgtcggtacgcgagctgg

SEQ ID NO: 809749 - DNA, 75 bp, synthetic construct
  source 1..75: mol_type = other DNA
gcatggcgattcccggaaggtacatcggaagaacagattgataaaatcgttgatgactttattaacgaggttatc

SEQ ID NO: 809750 - DNA, 75 bp, synthetic construct
  source 1..75: mol_type = other DNA
gccgactctggcgcagcggttcagtcataagaaaagagcgcaaaacaggcggtcgcttttcttaccagataaacc

SEQ ID NO: 809751 - DNA, 75 bp, synthetic construct
  source 1..75: mol_type = other DNA
gcctgctgtccggtaaaaaactgaccggtctggacaagagggaaatcaggagtctctggtgggaaaagatggatg

SEQ ID NO: 809752 - DNA, 75 bp, synthetic construct
  source 1..75: mol_type = other DNA
atggatgcaatgcaggagtctgccacccgtcagcgtgaacaggataccatccggaagtttgctgaagagagtaaa

SEQ ID NO: 809753 - DNA, 75 bp, synthetic construct
  source 1..75: mol_type = other DNA
ctgccggaatcactcatggtcctcagccgtcagagcctgcttcagcttatgcgtctgactgaagacgtaccggat

SEQ ID NO: 809754 - DNA, 75 bp, synthetic construct
  source 1..75: mol_type = other DNA
ttcagtatgttgttctgggccttcgcacaacaggggggtagctcgattagcctttatatcgaccgcttcgttaac

SEQ ID NO: 809755 - DNA, 75 bp, synthetic construct
  source 1..75: mol_type = other DNA
cagattacgcgcattgaaatccccggcgtgaccggcgtattaaccggcatttatatgctgctttccggcgcgatt

SEQ ID NO: 809756 - DNA, 75 bp, synthetic construct
  source 1..75: mol_type = other DNA
atgaccattctggactacatcgctactcatccggggtgtagcggcagagagatcgccgcagcactgaatacccca

SEQ ID NO: 809757 - DNA, 75 bp, synthetic construct
  source 1..75: mol_type = other DNA
gctaccaccattaatccggataccaacggcgatctctccacactcgcccagcttctttccggctttagcggtacg

SEQ ID NO: 809758 - DNA, 75 bp, synthetic construct
  source 1..75: mol_type = other DNA
ttctgaaaatagtccccggtcgcgtctcaacagaggttgacgcccgcctctctttcgataaagaaaaaagcatcg

SEQ ID NO: 809759 - DNA, 75 bp, synthetic construct
  source 1..75: mol_type = other DNA
agatttctaatcgtataaccaccatttatccacaatacgccatgcgtggcactgttttagatgaaaaggaaacaa

SEQ ID NO: 809760 - DNA, 75 bp, synthetic construct
  source 1..75: mol_type = other DNA
aaacgcaaaacacactcaatcaactgaataaacagattgatgagatgaacgcgtcgattgccaaactggagcagc

SEQ ID NO: 809761 - DNA, 75 bp, synthetic construct
  source 1..75: mol_type = other DNA
gtatcagcaacaaggcgttgagaaatcacgcattctgatcaaactggcttcgacctgggaaggaattcgcgcggc

SEQ ID NO: 809762 - DNA, 75 bp, synthetic construct
  source 1..75: mol_type = other DNA
aatttgtgcccggcaaacaggtcacactggcgcatctcatcgcgcatcccggcgaggaactggcgaagaaaatcg

SEQ ID NO: 809763 - DNA, 75 bp, synthetic construct
  source 1..75: mol_type = other DNA
ctcaacgattaccactccatcatacgtagagttgatgccatcgctcagggaattaaatcccgggtgcgcatttgt

SEQ ID NO: 809764 - DNA, 75 bp, synthetic construct
  source 1..75: mol_type = other DNA
gaccattctgcgtgacggtatggcggcagacggcgtgtcgcagcgcaaatataactatatgcgcgccgaacagat

SEQ ID NO: 809765 - DNA, 75 bp, synthetic construct
  source 1..75: mol_type = other DNA
atcaacttcggcgtgcagtgggcgtcgaaagatgccggattaatgcagtttgctaacggtacgcagatccctatc

SEQ ID NO: 809766 - DNA, 75 bp, synthetic construct
  source 1..75: mol_type = other DNA
gcgccgcctgatccgtcggctggactcagaaatggagcgcagcggcaacagccaggttttctatctcaaatacag

SEQ ID NO: 809767 - DNA, 75 bp, synthetic construct
  source 1..75: mol_type = other DNA
gcgcactggtgagcgttggttcgcaggttcgcgcgggccagccaattgcactggtgggcagcagtggcggtcagg

SEQ ID NO: 809768 - DNA, 75 bp, synthetic construct
  source 1..75: mol_type = other DNA
ggtggttgagcacggtaaaggcgacatgagtctttacggctataatcagagcgcactggtgagcgttggttcgca

SEQ ID NO: 809769 - DNA, 75 bp, synthetic construct
  source 1..75: mol_type = other DNA
aggtactgaagttaaagcgattgccgacggtcgggtgattctggctgactggctgcaaggttacggtctggtggt

SEQ ID NO: 809770 - DNA, 75 bp, synthetic construct
  source 1..75: mol_type = other DNA
gttattttggctgaagcaggtgctgaattgaatggggaacaaaaaattgaagtaaaacaagggcaatctacggtg

SEQ ID NO: 809771 - DNA, 75 bp, synthetic construct
  source 1..75: mol_type = other DNA
ccagcaaaaaagagggggattatctggccggggcagaaggtaacgtttttgttatccgtaaaaccttcaagacgg

SEQ ID NO: 809772 - DNA, 75 bp, synthetic construct
  source 1..75: mol_type = other DNA
aagcctttgccgaaatgcgcgctgacggtacttacgagaaattagcgaaaaatacttcgattttgatgtttatgg

SEQ ID NO: 809773 - DNA, 75 bp, synthetic construct
  source 1..75: mol_type = other DNA
cactgggcaccaaaaggcattgaaatcgtctcgtatcaggggcaggacaacatttattctgacctgactgccgga

SEQ ID NO: 809774 - DNA, 75 bp, synthetic construct
  source 1..75: mol_type = other DNA
agagcgcaaaaagcctgctgaatgcgggtgctgagaaattcaaaaattatcctggcgacttgtcacgtgtgccag

SEQ ID NO: 809775 - DNA, 75 bp, synthetic construct
  source 1..75: mol_type = other DNA
gacccgctcggatggcgacagtcatcgctttcgcattgctgacagaaaagcctataccggagtgaaagcttactg

SEQ ID NO: 809776 - DNA, 75 bp, synthetic construct
  source 1..75: mol_type = other DNA
gacaaacaaagggacgtttgttgtggatgaagtggcgcacgacggaccaccggataagctcaccatctccgcgaa

SEQ ID NO: 809777 - DNA, 75 bp, synthetic construct
  source 1..75: mol_type = other DNA
atcttcctgcgatttctcacaaaaaagattcgttgacaaaaagtgacaaaattatgagatttccatcacacattt

SEQ ID NO: 809778 - DNA, 75 bp, synthetic construct
  source 1..75: mol_type = other DNA
aaggctacgcatctttcatttataaaagccctactaagagccgcagagcgtgaatggaaaatgctggataaggca

SEQ ID NO: 809779 - DNA, 75 bp, synthetic construct
  source 1..75: mol_type = other DNA
gggtcagcaaacttggtgaaatacctgatataacgttcgaggaagcgtgtgtcaggtggcttgaagagaaagcac

SEQ ID NO: 809780 - DNA, 75 bp, synthetic construct
  source 1..75: mol_type = other DNA
cgtggcactgtgatttcgtcgcgccagatggatcaagagttagacgctctcttgaaacatcggacaaaaggcaag

SEQ ID NO: 809781 - DNA, 75 bp, synthetic construct
  source 1..75: mol_type = other DNA
ccactgaaatctgtcgtcaagtttgcgctggtaactgttctgagaaagtcgaacatcataaatctggagtggcaa

SEQ ID NO: 809782 - DNA, 75 bp, synthetic construct
  source 1..75: mol_type = other DNA
ttggcagggagaaaaactggtacacaaagggattttcatcgtggatgaaattgcgcactcagggccgccggaccg

SEQ ID NO: 809783 - DNA, 75 bp, synthetic construct
  source 1..75: mol_type = other DNA
cattgctaacttgtgtaccctggcggcatttaatatcaaactggcgattcaggtctattacacccagggtgatgc

SEQ ID NO: 809784 - DNA, 75 bp, synthetic construct
  source 1..75: mol_type = other DNA
aaatgcaccgaagaacatcaggcgattgtgcgtaagtggctggaagagcgcaaactgggcgaggtacgcaccagc

SEQ ID NO: 809785 - DNA, 75 bp, synthetic construct
  source 1..75: mol_type = other DNA
tacataatatctattacttcattcatggcgttgagtatctatttattccgcgatttggtaataacagttttattt

SEQ ID NO: 809786 - DNA, 75 bp, synthetic construct
  source 1..75: mol_type = other DNA
ctgtatctgaaatccctgtgcttgtcctttgcctgctgttgtggggtattcaatcgtatttttaattattacagc

SEQ ID NO: 809787 - DNA, 75 bp, synthetic construct
  source 1..75: mol_type = other DNA
gatgtgagacaggaactgcttaaccgtttgttgtccggtaaaaaactgactggtcgggatgaacaggatatccgg

SEQ ID NO: 809788 - DNA, 75 bp, synthetic construct
  source 1..75: mol_type = other DNA
aatgagcagactgaaatattattttcccgtggtgcagaaatcatcgttcttggttgtacggaaattccggttatt

SEQ ID NO: 809789 - DNA, 75 bp, synthetic construct
  source 1..75: mol_type = other DNA
gcccgtgcggatacatgggcgctctggcaggacagctacccggaagataagccgctggaaagtctgctggatatt

SEQ ID NO: 809790 - DNA, 75 bp, synthetic construct
  source 1..75: mol_type = other DNA
gacaaccggggatttgaagcagaccagttaaccctcacgattgacgactgcgacggcagcgtgcgtctcccgaag

SEQ ID NO: 809791 - DNA, 75 bp, synthetic construct
  source 1..75: mol_type = other DNA
agcgggaggtgtcgtggcatgatgttacagtagagcgcatcgtctctgctatagctcacaggtacaagttaaaac

SEQ ID NO: 809792 - DNA, 75 bp, synthetic construct
  source 1..75: mol_type = other DNA
ccaagtgcaaagtttaatcacaatagttgcaggtactacctctgcacctgtaagcactggtcttgttcgatatac

SEQ ID NO: 809793 - DNA, 75 bp, synthetic construct
  source 1..75: mol_type = other DNA
atttactatccccatatattatatctgttgctgtttttcttgctgtttcaatttacattttacgtgatgtatgtc

SEQ ID NO: 809794 - DNA, 75 bp, synthetic construct
  source 1..75: mol_type = other DNA
gccctggaaataccccacagccccgaaaaagagccagtcagttgcttaactgactggcattactttttcagcggt

SEQ ID NO: 809795 - DNA, 75 bp, synthetic construct
  source 1..75: mol_type = other DNA
gaagggaaaaagcacgccgtcgtcaatggcgtccttatggttcatcgcggatggggtaaagatactgatgcgtga

SEQ ID NO: 809796 - DNA, 75 bp, synthetic construct
  source 1..75: mol_type = other DNA
cgcaatatcatttcaggctggcccgggagcttaatattcctccccaggcaatcgtgtatgccaatctactggcgt

SEQ ID NO: 809797 - DNA, 75 bp, synthetic construct
  source 1..75: mol_type = other DNA
tccggagtgcggagaacagactacatcctcaaacggttgctgactgagtatttggatggttatgagacattatcc

SEQ ID NO: 809798 - DNA, 75 bp, synthetic construct
  source 1..75: mol_type = other DNA
tatctacttggagtaaaacttcatcgccaaccttattatttgaatgaaggcaattggtctgtttttcgggacagc

SEQ ID NO: 809799 - DNA, 75 bp, synthetic construct
  source 1..75: mol_type = other DNA
ttgatattcatattgaaaccagtgcctcagataaagcatctattgacgaagccgtcgccatcgcactgaaaaccg

SEQ ID NO: 809800 - DNA, 75 bp, synthetic construct
  source 1..75: mol_type = other DNA
gaacagcatgaagatttaaaaagccatgaactggtgtcgctggtcaaagacagtgagatgaaatcactttcctta

SEQ ID NO: 809801 - DNA, 75 bp, synthetic construct
  source 1..75: mol_type = other DNA
atgaaagaattttcagaaatagcaaaaagtgctcatatatcaaatgatgccatcgttgagtatccgatacattgt

SEQ ID NO: 809802 - DNA, 75 bp, synthetic construct
  source 1..75: mol_type = other DNA
accactgaaaaactgatgcctggaattgaacagtttgcatgtcgcttgctgctgatttttgatcaactctatccc

SEQ ID NO: 809803 - DNA, 75 bp, synthetic construct
  source 1..75: mol_type = other DNA
ggtgatttgacggcggggctgctggcaaaatcactcggcttaccggtgaagcgttttatcgctgccactaacgtt

SEQ ID NO: 809804 - DNA, 75 bp, synthetic construct
  source 1..75: mol_type = other DNA
aggcggctatgagacttcttcagtcattccggggaagctgtgggagttcaaaacaggtaatatgatcctacccac

SEQ ID NO: 809805 - DNA, 75 bp, synthetic construct
  source 1..75: mol_type = other DNA
aaacaggtaatgcaatctgtttcagaattgcccatccaagggctatgcgcggacaccagaagtacagagatgagg

SEQ ID NO: 809806 - DNA, 75 bp, synthetic construct
  source 1..75: mol_type = other DNA
gatgtaatgtcggccaattcacatttataaatatatcaagtgtcttatatccgaatgttaaaataggtcgtttct

SEQ ID NO: 809807 - DNA, 75 bp, synthetic construct
  source 1..75: mol_type = other DNA
catggcgtcagggcggcgccacgctgggcctgctgctgtgtacggtggggttcgtgccagtgatgaatcttatcg

SEQ ID NO: 809808 - DNA, 75 bp, synthetic construct
  source 1..75: mol_type = other DNA
ccgcaatagtgaaaaaatatctttaagtgacagcgaactggatgctgcattttattcaatagttgtcatgcttga

SEQ ID NO: 809809 - DNA, 75 bp, synthetic construct
  source 1..75: mol_type = other DNA
atgttgctcacctggcgaatgtcagtatccgtgggcagatttcagttacagtttatcgtttccggggacaaaaca

SEQ ID NO: 809810 - DNA, 75 bp, synthetic construct
  source 1..75: mol_type = other DNA
tttaggggtaaatattctgtaagcaatgatgatgaagtcaatgattatatatcaagacttaagaaacaatgcgga

SEQ ID NO: 809811 - DNA, 75 bp, synthetic construct
  source 1..75: mol_type = other DNA
agtgatagtgatcttgatgcagcgttttattcaatagttgtaatgcttgatgaggtgatattatgctctgaactt

SEQ ID NO: 809812 - DNA, 75 bp, synthetic construct
  source 1..75: mol_type = other DNA
ttttttgtatataatcgaatgtgggtatggtttgatggaatgtttataatattatcgcctttttatttttttgtg

SEQ ID NO: 809813 - DNA, 75 bp, synthetic construct
  source 1..75: mol_type = other DNA
atgaatatttatgtcatggaggtactggtgaatatcgttgaatgctatatgccagtatttaaactcatatcatct

SEQ ID NO: 809814 - DNA, 75 bp, synthetic construct
  source 1..75: mol_type = other DNA
ctttaccgatatgggtaccggcattatgttggattcccgacgcaagatcggtccaaaaggtaagttccgtccttt

SEQ ID NO: 809815 - DNA, 75 bp, synthetic construct
  source 1..75: mol_type = other DNA
cggcgttcgttcggaaggaacggtctacaccggcttcaccttctttcgcaaaggtctcaggcgctggctggtttc

SEQ ID NO: 809816 - DNA, 75 bp, synthetic construct
  source 1..75: mol_type = other DNA
ttttcagcatgggttgcatcttcatcggcgtattcctgatgcctggcgcggtcagacgtttcggtaaaaagaaag

SEQ ID NO: 809817 - DNA, 75 bp, synthetic construct
  source 1..75: mol_type = other DNA
tcgcaatagtgaaaaaatatcgttaagtgacagcgaacttgatgcggcattttattcaatagtcgttatgattga

SEQ ID NO: 809818 - DNA, 75 bp, synthetic construct
  source 1..75: mol_type = other DNA
ctgggtaagtgcaggtgaatggatggaagccgtagaaccttatcataagcgggctatagaccgctggtatgaaac

SEQ ID NO: 809819 - DNA, 75 bp, synthetic construct
  source 1..75: mol_type = other DNA
gttcccgattttcggggcgggctgggatcgactgatgggacgccagaacgagacggtgaaagtgactacctttaa

SEQ ID NO: 809820 - DNA, 75 bp, synthetic construct
  source 1..75: mol_type = other DNA
actcagctaactcgattaacatcagccgtttgctggcgcagatttgctactactttgaagctgttgcgcagctgc

SEQ ID NO: 809821 - DNA, 75 bp, synthetic construct
  source 1..75: mol_type = other DNA
gcgcttcaggcgctggatttaagtgatgtgacggatgagtcgagttacaacgcgacagtctggccggatgagccg

SEQ ID NO: 809822 - DNA, 75 bp, synthetic construct
  source 1..75: mol_type = other DNA
gaggatggtcaggactggtatgaatgccagacgcagtttgcagaggatacatacaaagttgcgtatgacagtgac

SEQ ID NO: 809823 - DNA, 75 bp, synthetic construct
  source 1..75: mol_type = other DNA
gtgtttctcactgtacctcagatggcaaattcgtttgcaatgatggaactattagtaaatccaaaaaaatctgta

SEQ ID NO: 809824 - DNA, 75 bp, synthetic construct
  source 1..75: mol_type = other DNA
tatcaacaaaaataccttcagcacaaataatagaggagatagatcctaatgctattactattatagatagtattg

SEQ ID NO: 809825 - DNA, 75 bp, synthetic construct
  source 1..75: mol_type = other DNA
tataaaacctgcaaaattctcacttatccaagacattgaatcattgttttaccctaagcgtctgagttggtttgg

SEQ ID NO: 809826 - DNA, 75 bp, synthetic construct
  source 1..75: mol_type = other DNA
tatcggttcaggtgcgattggctgcacgatcgttacggactcgcttttctggctggtgaagcaatattgcggcgc

SEQ ID NO: 809827 - DNA, 75 bp, synthetic construct
  source 1..75: mol_type = other DNA
aaaactgtctgaaggcatccgcctgttcgccgtcgatcaacgcaaactggaagatcttcttgccgccaaactata

SEQ ID NO: 809828 - DNA, 75 bp, synthetic construct
  source 1..75: mol_type = other DNA
tttatcctggatagcgataaaaataaaaaaaatctcacagtgcatattcatcaaatcaatccaaaagaaatccac

SEQ ID NO: 809829 - DNA, 75 bp, synthetic construct
  source 1..75: mol_type = other DNA
ttgcaggaaaaaacctcgccggtagtgcgtaaattaatcccgccttctcagacgttcccgcgccctgctcccatg

SEQ ID NO: 809830 - DNA, 75 bp, synthetic construct
  source 1..75: mol_type = other DNA
ggtacacgacttcgtttatggcgatgaacgccacaacatgattaatcgcctgcttcgactaaaccaccgaccaga

SEQ ID NO: 809831 - DNA, 75 bp, synthetic construct
  source 1..75: mol_type = other DNA
ccgtggtgaagacctcagccatgctgatttttccctgaaaattaatcagggccgtcacctggtggatgcgggcgg

SEQ ID NO: 809832 - DNA, 75 bp, synthetic construct
  source 1..75: mol_type = other DNA
atgaccacagtaacaacagcccaggcgaataagctgtatcaggtggcgcttttcacggctgccaaccgaaaccgc

SEQ ID NO: 809833 - DNA, 75 bp, synthetic construct
  source 1..75: mol_type = other DNA
catgtccttcaggtgttgcccatacctatatggcagcagaggcgctggaaagtgccgcgaaagcgaaaggctggg

SEQ ID NO: 809834 - DNA, 75 bp, synthetic construct
  source 1..75: mol_type = other DNA
tcaaaagggtttaaccatccgctgttcaaaggcgaatgtgcgatgtggcgcaatattctggtccgtaagtatgcg

SEQ ID NO: 809835 - DNA, 75 bp, synthetic construct
  source 1..75: mol_type = other DNA
gctggcaaatgcttacggtcagaaggcgggcggtcacttcaacatggttgagaagaaaacggatatggataaccg

SEQ ID NO: 809836 - DNA, 75 bp, synthetic construct
  source 1..75: mol_type = other DNA
tcgatggtcaatatcctcactgaacagcaggaagcgccaaaagcggtttcgccggacaagaaaagcacgaagcag

SEQ ID NO: 809837 - DNA, 75 bp, synthetic construct
  source 1..75: mol_type = other DNA
ttcccgtatgagatcggccatacgctcaatacgattgtggccaccggcttaataccggatacaaaatcacaccag

SEQ ID NO: 809838 - DNA, 75 bp, synthetic construct
  source 1..75: mol_type = other DNA
cccgcgccatgccgcagagcgccaaaaaacacgggcaccaaagcagttcgggctaatccagaagacgatctccgt

SEQ ID NO: 809839 - DNA, 75 bp, synthetic construct
  source 1..75: mol_type = other DNA
acaaaatcgttatgaacccgccgtactcgcttggtcgtcatagagagcacacgctggctgcgctggggcatctga

SEQ ID NO: 809840 - DNA, 75 bp, synthetic construct
  source 1..75: mol_type = other DNA
gctggtggggcagccgaaaggctggccggtttccttttgcgccggtattgctacccccgccagcgtcaccgccat

SEQ ID NO: 809841 - DNA, 75 bp, synthetic construct
  source 1..75: mol_type = other DNA
tctggcagaaggagtatgcactggaactgcaacgtcaccgtctgacgctgcatgatattgaactggagctgcaaa

SEQ ID NO: 809842 - DNA, 75 bp, synthetic construct
  source 1..75: mol_type = other DNA
gtacagacgtttgcgaccgcttcagagccgcctgcgaaaaaagcggcgcaggattttctgactcgctttgcgcag

SEQ ID NO: 809843 - DNA, 75 bp, synthetic construct
  source 1..75: mol_type = other DNA
agtgttttggtcgtattctggcgagcgatgtcgtttcgccgcttgatgttccggggtttgataactccgcaatgg

SEQ ID NO: 809844 - DNA, 75 bp, synthetic construct
  source 1..75: mol_type = other DNA
atcgctttaatctgccgcgcggcactatcaaggcgacgttgctgatcgaaacgctgcctgccgtgttccagatgg

SEQ ID NO: 809845 - DNA, 75 bp, synthetic construct
  source 1..75: mol_type = other DNA
acggactggaaaattcgtggtattcccgcggacttacaagatcgtcgagtcgagataactggcccggttgagcgc

SEQ ID NO: 809846 - DNA, 75 bp, synthetic construct
  source 1..75: mol_type = other DNA
acggctacgcggtgcgtttagccgatattgcctccgggcaaccgctgcccgttgccggtaaatcctttgccggtc

SEQ ID NO: 809847 - DNA, 75 bp, synthetic construct
  source 1..75: mol_type = other DNA
cgcgatcgcggcaatgtggacgtgggcgaatgggtggaagtagaaccgtttaacgcgttgttcggaggcctgtaa

SEQ ID NO: 809848 - DNA, 75 bp, synthetic construct
  source 1..75: mol_type = other DNA
attacaccaaaaccattctcgaagagctgggtgaaatcgccttctggaagctggcgattaaaccgggtaaaccgt

SEQ ID NO: 809849 - DNA, 75 bp, synthetic construct
  source 1..75: mol_type = other DNA
atgctaggactgcctgttctgttggcgttagttttttggttcgcactgtatcttattgcgcaagtgacgacatcg

SEQ ID NO: 809850 - DNA, 75 bp, synthetic construct
  source 1..75: mol_type = other DNA
tttcagccgtcggattgggtgttgtccacggtattacctatagcaaatggatgccgttgctgggtaataacgcga

SEQ ID NO: 809851 - DNA, 75 bp, synthetic construct
  source 1..75: mol_type = other DNA
ataatcctcgtcacgcatttgtttttacaggcaagggtggtgagtattttcttatttgtcttgtgaattttttac

SEQ ID NO: 809852 - DNA, 75 bp, synthetic construct
  source 1..75: mol_type = other DNA
acgctcggtgcgattgttgaggcgatagcctcccgtaacaagctggaagccagtgtcgcgccgtcactggccgga

SEQ ID NO: 809853 - DNA, 75 bp, synthetic construct
  source 1..75: mol_type = other DNA
gctaccggtcgggcagatatttacacggaaacgccggtcaaagtatcaggctttaagcgcgtcatagacgagcag

SEQ ID NO: 809854 - DNA, 75 bp, synthetic construct
  source 1..75: mol_type = other DNA
ttattcctgtttgctctcttgatctgcggtattccttgcatggcagtgaagagtctgcaatatcaggcgaacatg

SEQ ID NO: 809855 - DNA, 75 bp, synthetic construct
  source 1..75: mol_type = other DNA
aagcggtggtgatgcaggaacagaccgaacagactgacgctggcgtgcgttttactgctgaagtgcgtagcgggc

SEQ ID NO: 809856 - DNA, 75 bp, synthetic construct
  source 1..75: mol_type = other DNA
attaatccgcgcaaaggaaatggacgcattactacttaagttaattgatgtgccggaaagtggcgaagatcattc

SEQ ID NO: 809857 - DNA, 75 bp, synthetic construct
  source 1..75: mol_type = other DNA
atctgttattcatccggcagggacagggcaaaagcgccagcggtaaacctctgtcggtgatcactatcacacgta

SEQ ID NO: 809858 - DNA, 75 bp, synthetic construct
  source 1..75: mol_type = other DNA
ttggttctgcggcctgccgggcaacccggtttcagcgacgctgaccttctatcaactggtacagcctttgctggc

SEQ ID NO: 809859 - DNA, 75 bp, synthetic construct
  source 1..75: mol_type = other DNA
gcccggagtgcagattttcgcgggacgctcaattcccgccgtgaaggctcctggcatgacaccacgctcggtgcg

SEQ ID NO: 809860 - DNA, 75 bp, synthetic construct
  source 1..75: mol_type = other DNA
atatttacacggaaacaccggttaaagtgtcaggctttaagcgcgtcatagacgagcaggactggacaatcacta

SEQ ID NO: 809861 - DNA, 75 bp, synthetic construct
  source 1..75: mol_type = other DNA
tcacccgcagcgacggcgaccgtcatcattttgcgattgctgaccgtggagcctacaccggcgtaacggcaaagt

SEQ ID NO: 809862 - DNA, 75 bp, synthetic construct
  source 1..75: mol_type = other DNA
tcctttagcctcggcaactgctttatcgtactggagcgcgagcgcggcaatgtagaagcgggcgaatgggtggaa

SEQ ID NO: 809863 - DNA, 75 bp, synthetic construct
  source 1..75: mol_type = other DNA
ggcctgcccgcgcgccagcgtgtgcgcacggcatcgcctctgaagaaatcgccaggacgccttgatttccagcgc

SEQ ID NO: 809864 - DNA, 75 bp, synthetic construct
  source 1..75: mol_type = other DNA
ctgaacaaacggacaatggcgtgcgttttactgctgaagtgcgtagcgggcaaaatattcgccgtcgcggtgaag

SEQ ID NO: 809865 - DNA, 75 bp, synthetic construct
  source 1..75: mol_type = other DNA
tcgtgcttgaacgcgatcgcggcaatgtggaagtgggcgagtgggtggaagtcgagccatttaacgcgttattcg

SEQ ID NO: 809866 - DNA, 75 bp, synthetic construct
  source 1..75: mol_type = other DNA
tcctttagcctcggcaactgttttatcgtgcttgaacgcgatcgcggcaatgtggaagtgggcgagtgggtggaa

SEQ ID NO: 809867 - DNA, 75 bp, synthetic construct
  source 1..75: mol_type = other DNA
cgctcgacaccgcgcttaatgagatgctttctcgcgttaccccactgaccgcccaggaaacgctgccactggttc

SEQ ID NO: 809868 - DNA, 75 bp, synthetic construct
  source 1..75: mol_type = other DNA
attttctgaataatagcggcttcacaacgtccttggagcttgaggtcaggctttctgatgtagagtacgaaacag

SEQ ID NO: 809869 - DNA, 75 bp, synthetic construct
  source 1..75: mol_type = other DNA
gttcgatgtgatggaaaaatacggcatcctcggcgtggaaatggaagcggcaggtatctacggtgtggctgcaga

SEQ ID NO: 809870 - DNA, 75 bp, synthetic construct
  source 1..75: mol_type = other DNA
cccgtcctgctccatctacaccaaagaactgatcaccgatttcggcgtgaagaaaattatccgcgtaggttcctg

SEQ ID NO: 809871 - DNA, 75 bp, synthetic construct
  source 1..75: mol_type = other DNA
ctgtttctgaataatctggcgctggcaaatggaacaatccgttttcattcgtccattaccacgttcggtatactt

SEQ ID NO: 809872 - DNA, 75 bp, synthetic construct
  source 1..75: mol_type = other DNA
tgatttctctcaccatgacggacaataggggctttgaagctgaccagctcgacattgagctcgatgacaccgatg

SEQ ID NO: 809873 - DNA, 75 bp, synthetic construct
  source 1..75: mol_type = other DNA
tcgcgcagcgtaataagctgacggccagtgttgctgactccctgaaagctatcgccattccccatatcgaccaga

SEQ ID NO: 809874 - DNA, 75 bp, synthetic construct
  source 1..75: mol_type = other DNA
gttcgacgtgatggaaaaatacggcatccttggcgtggaaatggaagccgctggcatctacggcgtagcagcaga

SEQ ID NO: 809875 - DNA, 75 bp, synthetic construct
  source 1..75: mol_type = other DNA
tcttaagtttgctttccgtcatcggactgggtgttatcaacggtattacctatagcaagtggatgccattactgg

SEQ ID NO: 809876 - DNA, 75 bp, synthetic construct
  source 1..75: mol_type = other DNA
tttaacttagtcgcgttaagtttgctttctgccatcgggctgggtgtcgtcaatggtataacctacagtaaatgg

SEQ ID NO: 809877 - DNA, 75 bp, synthetic construct
  source 1..75: mol_type = other DNA
ttttatcgttcagcacgtgatggttatggctttgaagctaactggtcagagttttacaccacaacacgcaaaccc

SEQ ID NO: 809878 - DNA, 75 bp, synthetic construct
  source 1..75: mol_type = other DNA
tggtattatgattgcgccagtattccagcagttaataataatgagcatgttggggcagtctgatgcaggaggtga

SEQ ID NO: 809879 - DNA, 75 bp, synthetic construct
  source 1..75: mol_type = other DNA
ttgtcgcgatccttgtgtttgccagttatctctatgtcacgttacgcaatctgtttttgaataatctgacgctgg

SEQ ID NO: 809880 - DNA, 75 bp, synthetic construct
  source 1..75: mol_type = other DNA
gtccgttaccacgttcggtgtgcttttacgcatgtttgcggtattaatgggttcttcaattacctgtggactggc

SEQ ID NO: 809881 - DNA, 75 bp, synthetic construct
  source 1..75: mol_type = other DNA
caaaaagacaaaggccaaaaaagagccggaggcgcgcgagggtgagtatatggccggtgaggccgataacgtgct

SEQ ID NO: 809882 - DNA, 75 bp, synthetic construct
  source 1..75: mol_type = other DNA
gcaccggggggcgccggatacggtaaccattcgcgcccggggtgcggattttcgcgggacgcttaattcccgtcg

SEQ ID NO: 809883 - DNA, 75 bp, synthetic construct
  source 1..75: mol_type = other DNA
gatctggagctggacgacgctgacggaaaaatcgtgctgccgcgccgtggtgcagtcattacgctggcgctgggc

SEQ ID NO: 809884 - DNA, 75 bp, synthetic construct
  source 1..75: mol_type = other DNA
gatctggagctggacgacgccgatggaaaaatagtgctgccgcgccgtggtgcggtcattacgctggcgctgggc

SEQ ID NO: 809885 - DNA, 75 bp, synthetic construct
  source 1..75: mol_type = other DNA
ttcctggcagtaaatagccgatttaatgcttctggtgatggcgtcgcgcagttgggtcgctcgctggatgttgat

SEQ ID NO: 809886 - DNA, 75 bp, synthetic construct
  source 1..75: mol_type = other DNA
agtggtgttcgataataccgaattccgcgtggtgaactcacgtactcagcaagaagcgtatgtgttcgcaccggc

SEQ ID NO: 809887 - DNA, 75 bp, synthetic construct
  source 1..75: mol_type = other DNA
gcaagcggtgaagctgaagcgcaagcccaaagagcagcacctccgggcgctacagcacccgaaagcaaaagtcgt

SEQ ID NO: 809888 - DNA, 75 bp, synthetic construct
  source 1..75: mol_type = other DNA
gcaaagtcgagttacctctgcgcggggcggtgctgacgctgtggcttggctggcagggttcggcgcttctgaata

SEQ ID NO: 809889 - DNA, 75 bp, synthetic construct
  source 1..75: mol_type = other DNA
agcacccgaaagcaaagcctgtcagcaaaaagacaaaggccaaaaaagagcaggaggctcgcgagggtgagtata

SEQ ID NO: 809890 - DNA, 75 bp, synthetic construct
  source 1..75: mol_type = other DNA
ctcacaatctgaataatagcggcttcacgacgggcttagagcttgaggttaaactgtctgatgtggagtacagct

SEQ ID NO: 809891 - DNA, 75 bp, synthetic construct
  source 1..75: mol_type = other DNA
aataatagggcgaggcgaccgcgttattggcgtaataaaagatggccaaaagaaatggcgacgggtacagcaaaa

SEQ ID NO: 809892 - DNA, 75 bp, synthetic construct
  source 1..75: mol_type = other DNA
tgcggtcatcacgctggcgctgggctggaaggggcagcagcttttcccgaaaggggcattcacggtggacgagat

SEQ ID NO: 809893 - DNA, 75 bp, synthetic construct
  source 1..75: mol_type = other DNA
tggggttacagccagcggaaaggccattccgcaggtcacgatcacccgcagtgatggcgaccgccatcagttttc

SEQ ID NO: 809894 - DNA, 75 bp, synthetic construct
  source 1..75: mol_type = other DNA
tgtggttcagcgctctcccttaagtcgaggcatggcaacatactggtttctgaaaggagagaggcaggcgggcca

SEQ ID NO: 809895 - DNA, 75 bp, synthetic construct
  source 1..75: mol_type = other DNA
tgtggttcagcgctctcccttaagacgaggcatggcaacatactgggttctgaaaggagagaggcaggcgggaca

SEQ ID NO: 809896 - DNA, 75 bp, synthetic construct
  source 1..75: mol_type = other DNA
gatttcaggctgtaaagaagaaaataaaacccatgtatccatcgaatttatgcattcttcggtggagcaggagct

SEQ ID NO: 809897 - DNA, 75 bp, synthetic construct
  source 1..75: mol_type = other DNA
gccggaggcgattcgacgcctcaaagaggggctggaggatggcctcgcgcatcagactctgcttggcgtgacggg

SEQ ID NO: 809898 - DNA, 75 bp, synthetic construct
  source 1..75: mol_type = other DNA
tgtggttcagcgctctcccttaaggcgaggcatggcaacatactggcttctgaaaggagagaggcaggcggggca

SEQ ID NO: 809899 - DNA, 75 bp, synthetic construct
  source 1..75: mol_type = other DNA
tgtggttcagcgctctcccttaagccgaggcatggcaacatactggtttctgaaaggagagaggcaggcgggtca

SEQ ID NO: 809900 - DNA, 75 bp, synthetic construct
  source 1..75: mol_type = other DNA
tagaactggatatgaatgacgttgaagcgagcctggcagggccaaaacgcccacaggatcgcgttgcactgcccg

SEQ ID NO: 809901 - DNA, 75 bp, synthetic construct
  source 1..75: mol_type = other DNA
cgacggttccggtgacgtttacgcgcgcggatggtagccaggaagtcgtaccctgccgttgtcgtatcgacaccg

SEQ ID NO: 809902 - DNA, 75 bp, synthetic construct
  source 1..75: mol_type = other DNA
gtctctacagagatgttccgtaaagagtacgcagaagttttcgaagggacagctgagtggaaagaaattaacgtt

SEQ ID NO: 809903 - DNA, 75 bp, synthetic construct
  source 1..75: mol_type = other DNA
gcatcaccgttaagcaagtgcccgtggaagaagatgcctataacactaaagtcatggtaatgactccaacttatt

SEQ ID NO: 809904 - DNA, 75 bp, synthetic construct
  source 1..75: mol_type = other DNA
agtggctgagcgtggtggccccggattcacaccctttattaccttcagcagtaacggacagcctttcgccgtaac

SEQ ID NO: 809905 - DNA, 75 bp, synthetic construct
  source 1..75: mol_type = other DNA
gagcgcaatcacgaacgttatgtattcctgaaatggggacagcaggcgttcagtcgttttagggtggtgccgcca

SEQ ID NO: 809906 - DNA, 75 bp, synthetic construct
  source 1..75: mol_type = other DNA
gtctggatatgccggaagtttcgctggtggcgatcctcgacgccgacaaagaaggcttcctgcgttccgaacgtt

SEQ ID NO: 809907 - DNA, 75 bp, synthetic construct
  source 1..75: mol_type = other DNA
ggctggatgatcctgattggcctgtgtgcggcaattccgggaatgattattgccgggccgctgtggggtaatttc

SEQ ID NO: 809908 - DNA, 75 bp, synthetic construct
  source 1..75: mol_type = other DNA
gccacaccggtacgaacctggtgaagctggtaatcccattattcgcaggcgtggcggcagcggcggcgttcctgg

SEQ ID NO: 809909 - DNA, 75 bp, synthetic construct
  source 1..75: mol_type = other DNA
attagcgttgcattctcaatggcgcgccacacgggcacaaacctggtaaagctggttatcccgctgtttgcaggc

SEQ ID NO: 809910 - DNA, 75 bp, synthetic construct
  source 1..75: mol_type = other DNA
ggcatcgcagatgaatgccgactttggctggatgatcctgattggtctgtgtgcggcaattccgggaatgattat

SEQ ID NO: 809911 - DNA, 75 bp, synthetic construct
  source 1..75: mol_type = other DNA
atcagccgctacgtggagttgcatattcctgacgacatcagcgaaccgcatctcggcgaaggcaaaatgccgtcc

SEQ ID NO: 809912 - DNA, 75 bp, synthetic construct
  source 1..75: mol_type = other DNA
gaccacgggaaaccggagcaaatcagtgaaagcgacaatcaatgccctgacgccagtgctgcgtggatggataag

SEQ ID NO: 809913 - DNA, 75 bp, synthetic construct
  source 1..75: mol_type = other DNA
ggagtgctggaagagctggacggctggatcaaacggaaactgcggtgcctgttgtggcggcagtggaagaggccg

SEQ ID NO: 809914 - DNA, 75 bp, synthetic construct
  source 1..75: mol_type = other DNA
cggaagatcttacggaatatctcgaagaacacggcgagcgtgtgcgttatcttcactcagatatcgataccgtcg

SEQ ID NO: 809915 - DNA, 75 bp, synthetic construct
  source 1..75: mol_type = other DNA
gaactccggtcatggcattttcagcgataacgatgaacaagaaacgaaagctgacagtaaagaatcggcgcaaaa

SEQ ID NO: 809916 - DNA, 75 bp, synthetic construct
  source 1..75: mol_type = other DNA
gaagattcattctatcaaataacctcctcgattatatctgagggtttcgactggaatgacggacaagtagttgat

SEQ ID NO: 809917 - DNA, 75 bp, synthetic construct
  source 1..75: mol_type = other DNA
tcactttgtcttgtctgaatctatcttttacagagggataaaagaactcatcgaaaaacgtattatagctaaaac

SEQ ID NO: 809918 - DNA, 75 bp, synthetic construct
  source 1..75: mol_type = other DNA
gtcgctggcaccgggttcgaaagtggtttctgattatctggcaaaagccaaactgactccgtatctcgatgaact

SEQ ID NO: 809919 - DNA, 75 bp, synthetic construct
  source 1..75: mol_type = other DNA
aactgctgtttctcaaagcggggcagggggtgacggccagcggtaaaaaaatcccgcagattaccatcacccgca

SEQ ID NO: 809920 - DNA, 75 bp, synthetic construct
  source 1..75: mol_type = other DNA
cccgcgaacctgcgaagaaagaaagtaccacggtgaagcgtaagcgcagaactaagaagcagaagaatgagccgg

SEQ ID NO: 809921 - DNA, 75 bp, synthetic construct
  source 1..75: mol_type = other DNA
acgatctgcgtgcgggcgtcagcgaagaactggcgaagattgagatagatcacgccgatcagacgagtgaatcag

SEQ ID NO: 809922 - DNA, 75 bp, synthetic construct
  source 1..75: mol_type = other DNA
gcggcttcacgacgggcttagagcttgaggttaaactctctgatgtggagtacagctcggaatcggataacgaat

SEQ ID NO: 809923 - DNA, 75 bp, synthetic construct
  source 1..75: mol_type = other DNA
cgcaggagtccgatgcgaaattcctgacccgtcttgctgaacgcaacggcggtgaggtgtcggtaaaaatgggaa

SEQ ID NO: 809924 - DNA, 75 bp, synthetic construct
  source 1..75: mol_type = other DNA
taacggcaaagtggttacacaccaaagacccgaagccgcaaaagcagaaggtaaaactgaaacgcaaaaagaaag

SEQ ID NO: 809925 - DNA, 75 bp, synthetic construct
  source 1..75: mol_type = other DNA
tggaaaggttttgccctggtatgcaaagggaaatttaccgttgatgaggttgaacaccggggcgcgccggatgtg

SEQ ID NO: 809926 - DNA, 75 bp, synthetic construct
  source 1..75: mol_type = other DNA
gcagtgggaacgcctgcaacacggcgttgcgtcattttcgctacaactggcagaagggcgggcagatctctacac

SEQ ID NO: 809927 - DNA, 75 bp, synthetic construct
  source 1..75: mol_type = other DNA
gggcaaaagcgccagcggtaaaccactaccggtgatcactatcacacgtaaggacggcgacagccaccgctttac

SEQ ID NO: 809928 - DNA, 75 bp, synthetic construct
  source 1..75: mol_type = other DNA
ttgcactggaccgactggtctactacactccaacgcatgaacaaacacaccgaacatgatactcgcgaacatctc

SEQ ID NO: 809929 - DNA, 75 bp, synthetic construct
  source 1..75: mol_type = other DNA
ctcgcgaacatctcctgactacgggtgagcaactttgcctgcaacgtgggttcaccgggatggggctaagcgaat

SEQ ID NO: 809930 - DNA, 75 bp, synthetic construct
  source 1..75: mol_type = other DNA
gctaccggtcgggcagatatttacacggaaacaccggtcaaagtgtcaggctttaagcgcgtcatagacgagcag

SEQ ID NO: 809931 - DNA, 75 bp, synthetic construct
  source 1..75: mol_type = other DNA
aagggaaatttaccgttgatgaggttgaacaccggggcgctccggatgtggtcaccatccgcgcccggagtgcag

SEQ ID NO: 809932 - DNA, 75 bp, synthetic construct
  source 1..75: mol_type = other DNA
caaagttttgctcgaaaacctgctgcgctggcaggatggtaactcggttaccgaagaggatatccacgcgctggc

SEQ ID NO: 809933 - DNA, 75 bp, synthetic construct
  source 1..75: mol_type = other DNA
gggggtgacggcaagcggtaaaaaaatcccgcaggtcaccatcacccgcagcgacggcgaccgccatcattttgc

SEQ ID NO: 809934 - DNA, 75 bp, synthetic construct
  source 1..75: mol_type = other DNA
gcagaagaaagcgcctaaagtaccggaagcgcgcgaaggtgaatacatggccggtgaggctgacaacgtttttgc

SEQ ID NO: 809935 - DNA, 75 bp, synthetic construct
  source 1..75: mol_type = other DNA
gtccgctgcctgaacctatcgaaaccgccatcaaaaaaggggatttaaccgtaggggcggtgctgtctggcaacc

SEQ ID NO: 809936 - DNA, 75 bp, synthetic construct
  source 1..75: mol_type = other DNA
cgctggcaggacggcaattccattaccggaaaagatattcaggcgttggccggatggttgaaaaacgcccatgcc

SEQ ID NO: 809937 - DNA, 75 bp, synthetic construct
  source 1..75: mol_type = other DNA
tccgatacctacggttggcaggaggattcaacctatattcgcttatcgcctttctttgatgaaatgcaggcaaca

SEQ ID NO: 809938 - DNA, 75 bp, synthetic construct
  source 1..75: mol_type = other DNA
gattgctgaccgtggagcctataccggcgtaacggcaaagtggcttcacaccaaagacccgaagccgcaaaagca

SEQ ID NO: 809939 - DNA, 75 bp, synthetic construct
  source 1..75: mol_type = other DNA
ggctggaagccagtgtcgctccgtcactggccggaattaaaatcccgcacatcgaccagtcgcaggagtctgatg

SEQ ID NO: 809940 - DNA, 75 bp, synthetic construct
  source 1..75: mol_type = other DNA
tcatcattttgcgattgctgaccgtggagcctataccggcgtaacggcaaagtggttacacaccaaagacccgaa

SEQ ID NO: 809941 - DNA, 75 bp, synthetic construct
  source 1..75: mol_type = other DNA
aaagaaaaacacctgcgcgcactggagcacccgaaagcaaaaccggtcaggcagaagaaagcgccaaaagtaccg

SEQ ID NO: 809942 - DNA, 75 bp, synthetic construct
  source 1..75: mol_type = other DNA
gtgaatttcagctctgagctgcttaacaaaggcaacaaaactccggcattcagtatcagtattgagggcagggat

SEQ ID NO: 809943 - DNA, 75 bp, synthetic construct
  source 1..75: mol_type = other DNA
gatctggagctggatgacgccgatggaaaaatagcgctgccgcgccgtggtgcggtcattacgctggcgctgggc

SEQ ID NO: 809944 - DNA, 75 bp, synthetic construct
  source 1..75: mol_type = other DNA
atgaatgcttatattatggaggttctggtgaacattattgagtgttatatgccaatatttaaactcatatcatct

SEQ ID NO: 809945 - DNA, 75 bp, synthetic construct
  source 1..75: mol_type = other DNA
cgaactgatggagtgggctgacgggcaactttccatcactcttaatctcggtaattttctgcaactgaccgacga

SEQ ID NO: 809946 - DNA, 75 bp, synthetic construct
  source 1..75: mol_type = other DNA
atgagtacacttgaacctgctgcccagccgggtggattaaagcagtggcttacacagtggcaaatgaagcacggg

SEQ ID NO: 809947 - DNA, 75 bp, synthetic construct
  source 1..75: mol_type = other DNA
atgttgctgctgctaattgtgccgataatgtggttccacaaacaccagcaaaaaagcgtgggagaacacggatga

SEQ ID NO: 809948 - DNA, 75 bp, synthetic construct
  source 1..75: mol_type = other DNA
attatgtccaccgctgaagccgtgaacgtggcccatgctgtgggcgtccgcgcctggtttttagcgaatcgcgcg

SEQ ID NO: 809949 - DNA, 75 bp, synthetic construct
  source 1..75: mol_type = other DNA
aagaaaacgtcaatggatacactgacagcgattatgtccaccgctgaagccgtgaacgtggcccacgccgtaggc

SEQ ID NO: 809950 - DNA, 75 bp, synthetic construct
  source 1..75: mol_type = other DNA
gctcggtggcccggacagcatcatgatcgggcgcgtgctatggcaagagtttttcaataaccgcgactggccggt

SEQ ID NO: 809951 - DNA, 75 bp, synthetic construct
  source 1..75: mol_type = other DNA
aaaaaaagaaagaccggcaacctgtcaaaacgaagccggatcagcgaagttgaccccgatctcattgcaaagtaa

SEQ ID NO: 809952 - DNA, 75 bp, synthetic construct
  source 1..75: mol_type = other DNA
atctgtttatcgactggctgtttgaagtgattgcagagtgccaccgcgttctgaaaaagcagggcagcatgtaca

SEQ ID NO: 809953 - DNA, 75 bp, synthetic construct
  source 1..75: mol_type = other DNA
tacatcgagaaaaagaaaggtcgccagacgactcatatagtattttccttccgtgatatcacctcgatgacaaca

SEQ ID NO: 809954 - DNA, 75 bp, synthetic construct
  source 1..75: mol_type = other DNA
cctcggcggtagcgatcatcatgttgctgctgctaattgtgccgataatgtggttccacaaacaccagcaaaaaa

SEQ ID NO: 809955 - DNA, 75 bp, synthetic construct
  source 1..75: mol_type = other DNA
tttaacaaccgcgactggccggtggcctcggcggtagcgatcatcatgttgctgctgctaattgtgccgataatg

SEQ ID NO: 809956 - DNA, 75 bp, synthetic construct
  source 1..75: mol_type = other DNA
tgtccttgacccatttgcgggtagctttaccaccggagcagtcgctatcgcgaccgggcgaaaatttattggcat

SEQ ID NO: 809957 - DNA, 75 bp, synthetic construct
  source 1..75: mol_type = other DNA
agggtgatgacggtgccggaactcactggtgaagccagtcaactctatgcgcgggaaggctttaatattattgcc

SEQ ID NO: 809958 - DNA, 75 bp, synthetic construct
  source 1..75: mol_type = other DNA
cattcgccctgctgatcctggtactgttggtgatgccgaccggtattctgggtcgcccggaggtagagaaagtat

SEQ ID NO: 809959 - DNA, 75 bp, synthetic construct
  source 1..75: mol_type = other DNA
aattctaagcgcctgattgcgcttatttccgcaatcggtatgtccatcttcctgcaaaactacgtcagcctgacc

SEQ ID NO: 809960 - DNA, 75 bp, synthetic construct
  source 1..75: mol_type = other DNA
cccaaaggttgcactggagcttcttggtgaaattaagcgcctggaggacacaaatattgatgctatgtgtcgaat

SEQ ID NO: 809961 - DNA, 75 bp, synthetic construct
  source 1..75: mol_type = other DNA
cagccgcaacagccgcaacagccgcaacagccgcaacagccgcaacagccgcaacagccgcaacagccgcaacag

SEQ ID NO: 809962 - DNA, 75 bp, synthetic construct
  source 1..75: mol_type = other DNA
gaggaaagacctctgcgaggtacgaatccgaaccggccagacggaggtcgctgtcttcacagcttacgaacctga

SEQ ID NO: 809963 - DNA, 75 bp, synthetic construct
  source 1..75: mol_type = other DNA
atgagtttaatcactcgcatccatcagaagttgaaaaaagagaaagcctgattaaagaaatgtttgccacggtag

SEQ ID NO: 809964 - DNA, 75 bp, synthetic construct
  source 1..75: mol_type = other DNA
ttttagaaaacatcttgcggcaagtacggccgctcattggtcagggtaaagtcgcggattatattccggcgctgg

SEQ ID NO: 809965 - DNA, 75 bp, synthetic construct
  source 1..75: mol_type = other DNA
atgtgacgaccgtactgcaaaactattttcactactgcgcactgaaaatgagttgcgtggagctggcgcggacgt

SEQ ID NO: 809966 - DNA, 75 bp, synthetic construct
  source 1..75: mol_type = other DNA
tgagggctggaccccgtcgattcacatgccgcgctgggcttcgcgtattttgctggaaattaccgacgtgcgtgt

SEQ ID NO: 809967 - DNA, 75 bp, synthetic construct
  source 1..75: mol_type = other DNA
tacgtttggcaaacatatttaacgtttctgaggctgctatgcactggcgtcttaaagcgttgggtatggcttact

SEQ ID NO: 809968 - DNA, 75 bp, synthetic construct
  source 1..75: mol_type = other DNA
ttaatcgctattgggatcgccgactacctgtcgatccgtttaagctcgccgcagcgtggggtgcaagagtggagc

SEQ ID NO: 809969 - DNA, 75 bp, synthetic construct
  source 1..75: mol_type = other DNA
ttatgattaacgtgctgatatgcattttaatatgttgcacaaatgcgcaggcaggagttgttgttggcggtactc

SEQ ID NO: 809970 - DNA, 75 bp, synthetic construct
  source 1..75: mol_type = other DNA
ggctccctgcaggaacatgacggcatctgcgaaattcacgttgctaaatacgctgaaacattcgggctgacctcc

SEQ ID NO: 809971 - DNA, 75 bp, synthetic construct
  source 1..75: mol_type = other DNA
ctgaaaattcgtggtgttaatgcgctgaggattttcaacgaagcctttggtctgatttttcgtcgttcggaagag

SEQ ID NO: 809972 - DNA, 75 bp, synthetic construct
  source 1..75: mol_type = other DNA
ggtcctcatgcccaactggcgctggtgggcacgttgcatcaggatctgcatttaacatcggcacgtttggcaaaa

SEQ ID NO: 809973 - DNA, 75 bp, synthetic construct
  source 1..75: mol_type = other DNA
ttggatcacgacgcaacgggggattggcagaatatattgtggtgaatcgaaaaaatgtctttgcactaccagagg

SEQ ID NO: 809974 - DNA, 75 bp, synthetic construct
  source 1..75: mol_type = other DNA
agcgaatgatatcattaagggtattcctttgatttgccttcttgatagcgagaaaagctatttcagtgtgataaa

SEQ ID NO: 809975 - DNA, 75 bp, synthetic construct
  source 1..75: mol_type = other DNA
tttgccacgcgtggttcggaaaaccatttcgtacagatagcgcagcttcagagtggtcattatattgcgggagtt

SEQ ID NO: 809976 - DNA, 75 bp, synthetic construct
  source 1..75: mol_type = other DNA
aaaaatgtctttgctctacccacggatatgcctattgaggatggggcttttattgagccgattaccgttggcctg

SEQ ID NO: 809977 - DNA, 75 bp, synthetic construct
  source 1..75: mol_type = other DNA
ccaatggtcagcacgtattccgttttcagaatggcgcgttacaaagtaaccaggcagtgaatgtttcagggcggg

SEQ ID NO: 809978 - DNA, 75 bp, synthetic construct
  source 1..75: mol_type = other DNA
gaggccagagggtcgacggacactatgatgatgattttaccgttccttcggggtatgtcgtggttggtggtgatg

SEQ ID NO: 809979 - DNA, 75 bp, synthetic construct
  source 1..75: mol_type = other DNA
aacagtcactgtgactttcagactgacagcagaacatatcgagaatcagcccgtcattcaactgaacagggtgtg

SEQ ID NO: 809980 - DNA, 75 bp, synthetic construct
  source 1..75: mol_type = other DNA
gcaaaatctttcggtgcgatgcaaacatttaacagtagcgaaatgagcgcgccgcaaatgcagagcgttttacgc

SEQ ID NO: 809981 - DNA, 75 bp, synthetic construct
  source 1..75: mol_type = other DNA
atcaggtcatttactgagtggtgttgatggcggtcaaagtgtggactgggccaatgcacgcccggtgcaggttct

SEQ ID NO: 809982 - DNA, 75 bp, synthetic construct
  source 1..75: mol_type = other DNA
aaggtcagggcgagaatggcgatattggcccactgcgaccgttcagcattaacctgcggacgggtgaaatatcca

SEQ ID NO: 809983 - DNA, 75 bp, synthetic construct
  source 1..75: mol_type = other DNA
tatcagcggtcttgatggtggtgaaagtatggactgggccaatgcccgcccggtgcaggttctgattaatggcgt

SEQ ID NO: 809984 - DNA, 75 bp, synthetic construct
  source 1..75: mol_type = other DNA
tgcccgatccgctgcacccgcaaaattttccggacgaaagaagccgcaatatctacctcgctctgccggtcgcca

SEQ ID NO: 809985 - DNA, 75 bp, synthetic construct
  source 1..75: mol_type = other DNA
tgcaggcaagtgttgatgagatcaatagccggacaccaatgcgtctctcttacatcgagaaaaagaaaggccgcc

SEQ ID NO: 809986 - DNA, 75 bp, synthetic construct
  source 1..75: mol_type = other DNA
cgttaatcgtgcatactgtgcgcttttttgtgggccaagggactaagcacacatttcatatttcaacgaaagact

SEQ ID NO: 809987 - DNA, 75 bp, synthetic construct
  source 1..75: mol_type = other DNA
gccctgcccgcttgatgtgtatgatcatcatgacctgaccaaaacatttaaaacactgttaccggaagtcaaacg

SEQ ID NO: 809988 - DNA, 75 bp, synthetic construct
  source 1..75: mol_type = other DNA
tttcccggacgaaaaaagccgtaacatttacctggctctgccgatcgccagtgatgtgagaaatgaaatcagcga

SEQ ID NO: 809989 - DNA, 75 bp, synthetic construct
  source 1..75: mol_type = other DNA
ttcctcgccggaaaaaatccgcaatatggtcagtgtgcagatcccgggtattcctctgcgcgcactgatggtggc

SEQ ID NO: 809990 - DNA, 75 bp, synthetic construct
  source 1..75: mol_type = other DNA
atgaaatggaaagaggtaattttacgtccgtctgccataaacattaaatgttctgtggtttgtcttcatccgtgg

SEQ ID NO: 809991 - DNA, 75 bp, synthetic construct
  source 1..75: mol_type = other DNA
ctgttttgcgaccagcccccatagctattacctgttcaatggtttgcctccacccatggtcagaaaatacgggaa

SEQ ID NO: 809992 - DNA, 75 bp, synthetic construct
  source 1..75: mol_type = other DNA
atgaaatgggaaaaggcaattctgcgcccgtcagccatgaacattaaatgttcagtggtttgccttcatccatgg

SEQ ID NO: 809993 - DNA, 75 bp, synthetic construct
  source 1..75: mol_type = other DNA
tgacaaaagaggcggtgccgctggccgttggccccatgattaataataaattagcaggtgaggggcgacgtaacc

SEQ ID NO: 809994 - DNA, 75 bp, synthetic construct
  source 1..75: mol_type = other DNA
cagggagccagatccgtctgctgtgcatgatcgaccgggtactgaatcggcggaccggacaggcgatcccgatgg

SEQ ID NO: 809995 - DNA, 75 bp, synthetic construct
  source 1..75: mol_type = other DNA
ggtgcagaccgcctacctgataatttgactttttggcttgaagaagggctatggaagcaaaccgaggctggtatt

SEQ ID NO: 809996 - DNA, 75 bp, synthetic construct
  source 1..75: mol_type = other DNA
gtgcctgcgatatgggcgcgctgccagatacttaccctggctaccagtacgtgaaagatccggctaaccgcgaga

SEQ ID NO: 809997 - DNA, 75 bp, synthetic construct
  source 1..75: mol_type = other DNA
cgatgaccggtaactgtgcggcactggcggcgctggctgatgaacctggctacgcacaaatcaataccgaagacg

SEQ ID NO: 809998 - DNA, 75 bp, synthetic construct
  source 1..75: mol_type = other DNA
ttttaccgtcaacgtcgtggggcgagcatgaaggcgtgtttactgcggctgaccgtggcttccagcgtttcttca

SEQ ID NO: 809999 - DNA, 75 bp, synthetic construct
  source 1..75: mol_type = other DNA
gcgccgcctgatccgtcggctggactcagaaatggagcgcagcggcaacagccaggtgttctatctcaaatacag

SEQ ID NO: 810000 - DNA, 75 bp, synthetic construct
  source 1..75: mol_type = other DNA
ttgcagatggttggcaaccgacgacagtcctgctaaaacgttcgtttgatatcatttttcctaaaattgaatggc

SEQ ID NO: 810001 - DNA, 75 bp, synthetic construct
  source 1..75: mol_type = other DNA
cgcatcagcgagctgccgcaccgcgtggcgcatggtgaagtgagagcggcgtacattatgggcgaagatccgctg

SEQ ID NO: 810002 - DNA, 75 bp, synthetic construct
  source 1..75: mol_type = other DNA
cattaaagtgtttgacaatgcaagtaaaaaaataagtgttagccagccaataaaaaaagacttcattcctaaaaa

SEQ ID NO: 810003 - DNA, 75 bp, synthetic construct
  source 1..75: mol_type = other DNA
gtggtgaagtcatccgcatttgcaacctcgaaggtcgcgatatcgcccacggcgtcagtcgttacaacagcgatg

SEQ ID NO: 810004 - DNA, 75 bp, synthetic construct
  source 1..75: mol_type = other DNA
aattacgaaggcaaagaatatgatatatgggtaggtaacagatggtacgcatacgggcatatttattcaattggc

SEQ ID NO: 810005 - DNA, 75 bp, synthetic construct
  source 1..75: mol_type = other DNA
gaacggatccgcagcgtcgccgctatggcgttgcgttacttgtgggtgtactttcaggaattatttcagcatttg

SEQ ID NO: 810006 - DNA, 75 bp, synthetic construct
  source 1..75: mol_type = other DNA
atttaacgccgccgctcactcaattgccttttgacgaatatgcgtctgaaatcctggggcatattttctggttct

SEQ ID NO: 810007 - DNA, 75 bp, synthetic construct
  source 1..75: mol_type = other DNA
atttaacgccgccgctcactcaattgccttttgacgaatatgcatctgaaatccttgggcacattttctggttct

SEQ ID NO: 810008 - DNA, 75 bp, synthetic construct
  source 1..75: mol_type = other DNA
acatcgcgcagccggtactgccagcgcaaaatcaggccttaccgccagaagttcgtgcgttcctcaatgccggga

SEQ ID NO: 810009 - DNA, 75 bp, synthetic construct
  source 1..75: mol_type = other DNA
atgaccaaaattaaaattctggcgctcagtatgctggccgccttatcagtaaacacggcttatgctgaaagtact

SEQ ID NO: 810010 - DNA, 75 bp, synthetic construct
  source 1..75: mol_type = other DNA
acgagtcttgcagcggatgtactggataacagtaatggtgtggttggtgatatagcgtggttataccgttatgtg

SEQ ID NO: 810011 - DNA, 75 bp, synthetic construct
  source 1..75: mol_type = other DNA
ggtcgccaatgtattttaaaccggatgacagtaatgactatcggttacgctggctggatgaacgtaaaagtactc

SEQ ID NO: 810012 - DNA, 75 bp, synthetic construct
  source 1..75: mol_type = other DNA
gagatcgcttctctggcgtataaagttgcgcagacgaaaacatatctcgacggtcttggcaaagaccttgttgct

SEQ ID NO: 810013 - DNA, 75 bp, synthetic construct
  source 1..75: mol_type = other DNA
ttttattgcgttaactgctttattacaatctttattggtgtttgttattgtttttcagttatggaaaaactatgg

SEQ ID NO: 810014 - DNA, 75 bp, synthetic construct
  source 1..75: mol_type = other DNA
aataattagtttaacaataggtcattttgggttcgcaagctacctgctttcctcatatgttatgataatcacata

SEQ ID NO: 810015 - DNA, 75 bp, synthetic construct
  source 1..75: mol_type = other DNA
ccgcctttggcttctcgataaacacactaacgatgttcggatggtactcgccatcggcctgttggtggatgacgc

SEQ ID NO: 810016 - DNA, 75 bp, synthetic construct
  source 1..75: mol_type = other DNA
accgtaacaagcaacaggcagtagtgacagccagcaaaccaaaactcgacttgacaaacacagactggatttacg

SEQ ID NO: 810017 - DNA, 75 bp, synthetic construct
  source 1..75: mol_type = other DNA
gttggcggcgcgttgctggcgtcgggttgcggttggatagctgcgcggctggatatgcgcaataagcaggaaagg

SEQ ID NO: 810018 - DNA, 75 bp, synthetic construct
  source 1..75: mol_type = other DNA
acgagtgggtcatgaccatgattgcccgcaatcatctgactcccgtcatcactcaggaagaacaaaataccggag

SEQ ID NO: 810019 - DNA, 75 bp, synthetic construct
  source 1..75: mol_type = other DNA
gtagaaagcccagtggatgcagatgcggaatctgaaccgcagccactgaaaagtaagaaagagaaggaggcaacc

SEQ ID NO: 810020 - DNA, 75 bp, synthetic construct
  source 1..75: mol_type = other DNA
aggaacttatccgccgttcagttttcagggagatgacggcaaattaaccggttttgaagtggaatttgcccaaca

SEQ ID NO: 810021 - DNA, 75 bp, synthetic construct
  source 1..75: mol_type = other DNA
cgtttcgcgccgcactcaccaaagaaaccccgttgcaaattgtcggcaccattaacgctaaccatgcgttgctgg

SEQ ID NO: 810022 - DNA, 75 bp, synthetic construct
  source 1..75: mol_type = other DNA
atgtctctacactctcctggcaaagcgtttcgcactgcactcaccaaagaaaatccattgcaaattgtcggcacc

SEQ ID NO: 810023 - DNA, 75 bp, synthetic construct
  source 1..75: mol_type = other DNA
gcaaacccgcaacgagctgtacgaaagcatcaactactaccagtacgaagagaagctcgacgacctgctgcccgt

SEQ ID NO: 810024 - DNA, 75 bp, synthetic construct
  source 1..75: mol_type = other DNA
tcttcgccatacttattgcttggtatactctcttaacggatgagagacgtgttgatttaaggttacgcatatcta

SEQ ID NO: 810025 - DNA, 75 bp, synthetic construct
  source 1..75: mol_type = other DNA
gtctccacgcatcgtcaggcattggcggccttgctgttcttctacggcaaggtgctgtgcacggatctgccctgg

SEQ ID NO: 810026 - DNA, 75 bp, synthetic construct
  source 1..75: mol_type = other DNA
gcaaacccgcaacgagctgtacgaaagcatcaattactaccagtacgaagagaagctcgacgacctgtttgcccg

SEQ ID NO: 810027 - DNA, 75 bp, synthetic construct
  source 1..75: mol_type = other DNA
gggcggcgtagcggcaacgtatattggtatcccgctgttcctgattatttggttcggctacaagctgattaaagg

SEQ ID NO: 810028 - DNA, 75 bp, synthetic construct
  source 1..75: mol_type = other DNA
atgctgggaatttgcaggtaaagtgcggtaggtttgatataaaaatctatccgaacgccatatttctgaatggga

SEQ ID NO: 810029 - DNA, 75 bp, synthetic construct
  source 1..75: mol_type = other DNA
gagtgtacaggcatctatggatcaggtctgcttcactatttacagaatgccgggttagaagttcttgaggtgatt

SEQ ID NO: 810030 - DNA, 75 bp, synthetic construct
  source 1..75: mol_type = other DNA
gcctatgttgaagcgggtgccgagatgttgttcccggaagcaattaccgaactcgccatgtaccgccagtttgcc

SEQ ID NO: 810031 - DNA, 75 bp, synthetic construct
  source 1..75: mol_type = other DNA
cgatggaaaacgacgtgctgaaggtggtgaaatccagcgccgcgaaagtcgagccgctgccgctggtcggtgaag

SEQ ID NO: 810032 - DNA, 75 bp, synthetic construct
  source 1..75: mol_type = other DNA
tttctcaggcaaaaccgcagaaaggctccacggtgatcagtgaaaacggcgctaccaccataaatccggatacta

SEQ ID NO: 810033 - DNA, 75 bp, synthetic construct
  source 1..75: mol_type = other DNA
gtcgggatcgcgatgggcttaagcccgacggtgcgcggcatactcgacccgctgattgagctttaccgtccggtg

SEQ ID NO: 810034 - DNA, 75 bp, synthetic construct
  source 1..75: mol_type = other DNA
tatcgcacgttcagtgatataaacatggccggttatacatttagtgagtattcatatacgcgtcgtattaccgac

SEQ ID NO: 810035 - DNA, 75 bp, synthetic construct
  source 1..75: mol_type = other DNA
tctggatatttccggtaaacatttcgcgaccagccgctttgaatacgacgatgtctgtagtgagatcctgagtaa

SEQ ID NO: 810036 - DNA, 75 bp, synthetic construct
  source 1..75: mol_type = other DNA
ggtgtcagtcgttataacagcgatgcattacgccgtattgccggacaccactcgcaagaaattgatgcaatactg

SEQ ID NO: 810037 - DNA, 75 bp, synthetic construct
  source 1..75: mol_type = other DNA
taaacgcattgatgtggtgattaatcaggtcaccatttctgacgagcgcaagaaaaaatacgatttctctacccc

SEQ ID NO: 810038 - DNA, 75 bp, synthetic construct
  source 1..75: mol_type = other DNA
gctgccggaaatcctcaccggattacgcattggtctgggtgtgggctggtctacgctggtggcggcggagctgat

SEQ ID NO: 810039 - DNA, 75 bp, synthetic construct
  source 1..75: mol_type = other DNA
ggcgctgcaactgattagcccgctgtttttgccgccaccgcaacaggtactggcaaaactgctcaccattgccgg

SEQ ID NO: 810040 - DNA, 75 bp, synthetic construct
  source 1..75: mol_type = other DNA
ggctggttatcaggttgataccgtcgacggcgtctgacagtcgtaacaggctgactattccggttgtgctgagac

SEQ ID NO: 810041 - DNA, 75 bp, synthetic construct
  source 1..75: mol_type = other DNA
gatgataagagattcactgtgtgaattgcatattaaacaggggagttatgagctggcggcatttttagcctgcaa

SEQ ID NO: 810042 - DNA, 75 bp, synthetic construct
  source 1..75: mol_type = other DNA
tcttactcgttggaaatcaacacagggggctgggaatgccgcagaaatatagattgctttctttaatagtgattt

SEQ ID NO: 810043 - DNA, 75 bp, synthetic construct
  source 1..75: mol_type = other DNA
ggtgaaattaccgttgatgaaggggcgaccgccgctattcttgaacgcggcagctccctgttgccgaaaggtatt

SEQ ID NO: 810044 - DNA, 75 bp, synthetic construct
  source 1..75: mol_type = other DNA
gtgttttggcgtgatatgacgttgtctatctggcgtaagaagacaactggcctcaaaacaaaaaagcgtttactg

SEQ ID NO: 810045 - DNA, 75 bp, synthetic construct
  source 1..75: mol_type = other DNA
tgaaagtgtttctacgttcacgttcggccggagtggaacaagaaaagccagttctgtcctgcgaccttcgttcgg

SEQ ID NO: 810046 - DNA, 75 bp, synthetic construct
  source 1..75: mol_type = other DNA
cgatcagccgaaagcgtggttgaagtacgtggcgcgggttactgacgtcaatatgtatgacgccatttttatgga

SEQ ID NO: 810047 - DNA, 75 bp, synthetic construct
  source 1..75: mol_type = other DNA
atatgcgcgtcggaatggatgcgatgaaagaagttgtcagaaataaaattaatgtctgtggttcctacaaaaggt

SEQ ID NO: 810048 - DNA, 75 bp, synthetic construct
  source 1..75: mol_type = other DNA
acgaatcgctggatgatattcgccgtaaagtccacgcaggcgtgcgcagcgcgatgatcgacggcagtcacttcc

SEQ ID NO: 810049 - DNA, 75 bp, synthetic construct
  source 1..75: mol_type = other DNA
atggatttaccgcattacgggttggtgacctttacctggggcaacctgattaacttcatggccaactggcgcgcg

SEQ ID NO: 810050 - DNA, 75 bp, synthetic construct
  source 1..75: mol_type = other DNA
acggcgatccacgtcgtgtcgcgtgggataaaacaacgcatgacttccccagcgtgactggcgatacccgctcgt

SEQ ID NO: 810051 - DNA, 75 bp, synthetic construct
  source 1..75: mol_type = other DNA
tggaactttgctaccaagcgcgtggcgctggccgataccaataatccgccgcctgactggcaatacgcttatcag

SEQ ID NO: 810052 - DNA, 75 bp, synthetic construct
  source 1..75: mol_type = other DNA
ccaaccagttcagaaagtatttatacccaattagaccgtcaaggtttaattctgcaaatgtcagacctgttgtca

SEQ ID NO: 810053 - DNA, 75 bp, synthetic construct
  source 1..75: mol_type = other DNA
ggacagccagattcccgattattttttacgtttctccccggttgttatgccggtgaaggtggcgcgctgttttca

SEQ ID NO: 810054 - DNA, 75 bp, synthetic construct
  source 1..75: mol_type = other DNA
ggtgaagagcgaaaggctaaacttgaggcgatttgttctaggttgggtgatccgtttgcttctcaatttgataaa

SEQ ID NO: 810055 - DNA, 75 bp, synthetic construct
  source 1..75: mol_type = other DNA
ggcggttacattgtcagcgcctttgactggcgtattttattctgggtgatggcaggaattagtaccgtactgttg

SEQ ID NO: 810056 - DNA, 75 bp, synthetic construct
  source 1..75: mol_type = other DNA
gcgccattgtcgggatttggcggagaaacactgttaaaaatgagtctggcaattacggtgtgttatacactggca

SEQ ID NO: 810057 - DNA, 75 bp, synthetic construct
  source 1..75: mol_type = other DNA
atggtattgacccggtttcgctggcggccctgacgcgtaaagtcggacgcaaagtgcgttacgtcattgttctgc

SEQ ID NO: 810058 - DNA, 75 bp, synthetic construct
  source 1..75: mol_type = other DNA
tcagagtcaaccctgaatttcaggatttttctcttcaaccgaaccggctgtttgtgtgaagtgattcacatccgc

SEQ ID NO: 810059 - DNA, 75 bp, synthetic construct
  source 1..75: mol_type = other DNA
aaaaaatcggtaagcttaaattcttggcaatccgcactctatagttgtctctcggaaaataactggttttgtgag

SEQ ID NO: 810060 - DNA, 75 bp, synthetic construct
  source 1..75: mol_type = other DNA
cgaagataacggcatgtacatctgcccggaatgtgcctacgaatggaacgacgcagaacctgcacaggaaagcga

SEQ ID NO: 810061 - DNA, 75 bp, synthetic construct
  source 1..75: mol_type = other DNA
aagaaattaataaaataatttctttctgtatggttaaaggtgttcaacctcatgaattaattagtgcaatattcg

SEQ ID NO: 810062 - DNA, 75 bp, synthetic construct
  source 1..75: mol_type = other DNA
tggaaatggtgtttatttttctttcttagcgtgtattagcgagacgcaacaagacaagaagaaaaaaaaggttaa

SEQ ID NO: 810063 - DNA, 75 bp, synthetic construct
  source 1..75: mol_type = other DNA
caagtattgcgggaatatattattgtgatattccagagagatatttacaagctgatttgaccagtataataccgg

SEQ ID NO: 810064 - DNA, 75 bp, synthetic construct
  source 1..75: mol_type = other DNA
gtggcgctcaaacagcctgcggtgaaaaaaaccgaagaagccgccgcggcaaaagcagaaactgtaaaacgcagc

SEQ ID NO: 810065 - DNA, 75 bp, synthetic construct
  source 1..75: mol_type = other DNA
aaatgagagctacacgccattcattcaatacgtggttgaatggatgcagccccttatgcgggaatatgacacgat

SEQ ID NO: 810066 - DNA, 75 bp, synthetic construct
  source 1..75: mol_type = other DNA
atgagttaattgtcggcagtgaagatggtattgacccggtttcgctggcggccctgacgcgtaaagtcggacgca

SEQ ID NO: 810067 - DNA, 75 bp, synthetic construct
  source 1..75: mol_type = other DNA
gctggctgacggcgacagcgttaccatcattaaagatctgaaggtgaaaggtagctcttcgatgctgaaaattgg

SEQ ID NO: 810068 - DNA, 75 bp, synthetic construct
  source 1..75: mol_type = other DNA
tgagatgattgacaaggctctaaatacacgtcgtttctcacaactgattctggaaactgcaggtaattcggcggc

SEQ ID NO: 810069 - DNA, 75 bp, synthetic construct
  source 1..75: mol_type = other DNA
ttggcatggtgctggcatttgccttcgtgaccaactattccggcatgtccaccacgttggcgctggtactggctg

SEQ ID NO: 810070 - DNA, 75 bp, synthetic construct
  source 1..75: mol_type = other DNA
cgctctcttatgagcgccgtttaatgaacagtaatttagggggcgagtttcaggatggttctggcccccgtcttt

SEQ ID NO: 810071 - DNA, 75 bp, synthetic construct
  source 1..75: mol_type = other DNA
gtgagtcactggactacattcaaacaaacagcaacaaatttatgggtgaccctacggcacgacattctcgcgctg

SEQ ID NO: 810072 - DNA, 75 bp, synthetic construct
  source 1..75: mol_type = other DNA
agcaacgcttaggcgataacgctgatgttatccccggtgacagtaatgacagttcagtattaaagaaagcgggaa

SEQ ID NO: 810073 - DNA, 75 bp, synthetic construct
  source 1..75: mol_type = other DNA
gcttgccgtcagtgatagcaaaaatctcaacaaaattaaaatggtacatccggacatcattctctcgccgcaact

SEQ ID NO: 810074 - DNA, 75 bp, synthetic construct
  source 1..75: mol_type = other DNA
aaataaaaggggctcatcattgctattaaccggacgaagcgtggtgcagaaccgccgttttatgcgcttttgcct

SEQ ID NO: 810075 - DNA, 75 bp, synthetic construct
  source 1..75: mol_type = other DNA
agagtaaaaaaaccggagcttgtggagcaagagctgtggggtgtcttactggcttataatctggtgagatatcag

SEQ ID NO: 810076 - DNA, 75 bp, synthetic construct
  source 1..75: mol_type = other DNA
acttgcctgaagatgatatcaagcaacttgagcaacgcttaggcgataacgctgatgttatccccggtgacagta

SEQ ID NO: 810077 - DNA, 75 bp, synthetic construct
  source 1..75: mol_type = other DNA
cccctcactttgaagggatcggagctataaaaatggtgttatccggaatcctcaaattgaggattgtggaagaat

SEQ ID NO: 810078 - DNA, 75 bp, synthetic construct
  source 1..75: mol_type = other DNA
atgctctctctgttttggcaaattacccctcactttgaagggatcggagctataaaaatggtgttatccggaatc

SEQ ID NO: 810079 - DNA, 75 bp, synthetic construct
  source 1..75: mol_type = other DNA
gccctgcttatcaaccatggtccgtcaacggaagcgctggtccctgccccgctttaccagggaatgcgcgacggc

SEQ ID NO: 810080 - DNA, 75 bp, synthetic construct
  source 1..75: mol_type = other DNA
gtctgcgccgttacttcgaacaacgtgtcgctacacataaagaagctcactggcaggcttattatcaagctcgcc

SEQ ID NO: 810081 - DNA, 75 bp, synthetic construct
  source 1..75: mol_type = other DNA
cgcgtacaccgctggaagtacaagactgtctgttaggtatgctttctgacagggtgatgacggtgccggaactca

SEQ ID NO: 810082 - DNA, 75 bp, synthetic construct
  source 1..75: mol_type = other DNA
cggcatcatagtccggcctgcacccggctggtgaaatcgttaatcgaaagccagcggccacgatacgtgttgatt

SEQ ID NO: 810083 - DNA, 75 bp, synthetic construct
  source 1..75: mol_type = other DNA
accgatagcatccaatgcttctgatgctttgaaccagccgagcagtagtctaaatgatggtgttgagactttttt

SEQ ID NO: 810084 - DNA, 75 bp, synthetic construct
  source 1..75: mol_type = other DNA
cttcaaaccaattccgtatcacaatatcaaagctgtctttaaacatgaaaaaggggcgtttgttgcggcatggca

SEQ ID NO: 810085 - DNA, 75 bp, synthetic construct
  source 1..75: mol_type = other DNA
gacggttacattgagtgcggcagtgactatgtgacctggtgttttggtcatatgtttgagcaggctgaacctgat

SEQ ID NO: 810086 - DNA, 75 bp, synthetic construct
  source 1..75: mol_type = other DNA
actatcgttctggatatcaaaggcgaaacatttgctgcgggcggtaaagtcgtgaccaaaaacggctggaaagat

SEQ ID NO: 810087 - DNA, 75 bp, synthetic construct
  source 1..75: mol_type = other DNA
gtgtattcgtcataccgcgaatacattcgcttgcatgagaatacctcctgtcagggcaagccccgacaccccaaa

SEQ ID NO: 810088 - DNA, 75 bp, synthetic construct
  source 1..75: mol_type = other DNA
tatttaaagtttggtcgaacttttgcggatgagcattacctgaaatcgcgtgtaaccgtcgttgatgttagcgat

SEQ ID NO: 810089 - DNA, 75 bp, synthetic construct
  source 1..75: mol_type = other DNA
tacgggaacgttattcacctaagccagtacctgaatgctctgtttgtggcgaggaaatgtcgatgcagcgcatat

SEQ ID NO: 810090 - DNA, 75 bp, synthetic construct
  source 1..75: mol_type = other DNA
attattaattgccgaacaaaataccgagtgcattattggtagcgccttttgtctgatcatccacaataatgacgt

SEQ ID NO: 810091 - DNA, 75 bp, synthetic construct
  source 1..75: mol_type = other DNA
ttaccttcccgaacgctgtaccgtctttatcaccatcggtactacggtcgaagccgttgccagggcattactcaa

SEQ ID NO: 810092 - DNA, 75 bp, synthetic construct
  source 1..75: mol_type = other DNA
cctcccaattctttctgccagttgttaagtgaagagaatgttgaactggtggttgccgagcaagaagtatcctga

SEQ ID NO: 810093 - DNA, 75 bp, synthetic construct
  source 1..75: mol_type = other DNA
cccgaaaaatggattattaatcctcgtgaagatgctgagaagcagctgaaaactatccggcatttggttgaacgg

SEQ ID NO: 810094 - DNA, 75 bp, synthetic construct
  source 1..75: mol_type = other DNA
aaaagtaaaatcaaaaacttttgatgactctaaggttacagcgcatcacggcattatcccaacgatgcacaaagg

SEQ ID NO: 810095 - DNA, 75 bp, synthetic construct
  source 1..75: mol_type = other DNA
aatattaggcgcaaccaataaaaaagacggttacattgagtgcggcagtgactatgtgacctggtgttttggtca

SEQ ID NO: 810096 - DNA, 75 bp, synthetic construct
  source 1..75: mol_type = other DNA
gtggcgttaatctggcgaaccgtctttccgaaccgtctttccgaaacgtttgctgtgatgaatgcgccaggaatt

SEQ ID NO: 810097 - DNA, 75 bp, synthetic construct
  source 1..75: mol_type = other DNA
tttatcagaaagaggttcctcctggcccgttcgcgattacagatttgcagttggccggtggtggagcagatcttg

SEQ ID NO: 810098 - DNA, 75 bp, synthetic construct
  source 1..75: mol_type = other DNA
aaaatagcttttccgccaatatgagtcagtcattgccagaaggctggggttctgtgtcattaagcacattatggc

SEQ ID NO: 810099 - DNA, 75 bp, synthetic construct
  source 1..75: mol_type = other DNA
acctttgatacccattttatgatggggggaatgaaagaccaacaggttgctcatattcgtctggatgataatcaa

SEQ ID NO: 810100 - DNA, 75 bp, synthetic construct
  source 1..75: mol_type = other DNA
atatttatgtcaataagcaatggcgagggaaatacgaggttatcgttaaagataatcacgaagaaacatgcctgg

SEQ ID NO: 810101 - DNA, 75 bp, synthetic construct
  source 1..75: mol_type = other DNA
atatttatgtcaataagcaatggcgcgggaaatatgagatcattgttaaagacaacccgcaagaaacatgtttat

SEQ ID NO: 810102 - DNA, 75 bp, synthetic construct
  source 1..75: mol_type = other DNA
acctctgattcatgatattgatgaattaagaggaggagggggtagtgattctgtgcggcttgctacctgtgatat

SEQ ID NO: 810103 - DNA, 75 bp, synthetic construct
  source 1..75: mol_type = other DNA
tattactcacgtcatcttttgaaggtttcccgatgactctgcttgaagccttatcgtgggggattccttgtatca

SEQ ID NO: 810104 - DNA, 75 bp, synthetic construct
  source 1..75: mol_type = other DNA
ggcgaaacggcaaccttcatttatgtcggacgcatgaaattcgaaggtcagaaacgagtaaaagatcttcttgat

SEQ ID NO: 810105 - DNA, 75 bp, synthetic construct
  source 1..75: mol_type = other DNA
tccaccagaaaactgggagcggggtattaatgcgttttatacctcttattatgtgagtcagtattacagcgatta

SEQ ID NO: 810106 - DNA, 75 bp, synthetic construct
  source 1..75: mol_type = other DNA
atgtttaattgtattcgaatttcgaccacgctgtttttaattttgattctctgcgggatcttgcagattggcagt

SEQ ID NO: 810107 - DNA, 75 bp, synthetic construct
  source 1..75: mol_type = other DNA
aaagaagtacctcgtttacactctacagtctggaacaggcagaaactgaagtgatcgaacagcttcaaacaagtt

SEQ ID NO: 810108 - DNA, 75 bp, synthetic construct
  source 1..75: mol_type = other DNA
attgataaacaacaagggctttcatgcacaatcaccttcggtaaagtgattgatgaaactagaacttatatttgc

SEQ ID NO: 810109 - DNA, 75 bp, synthetic construct
  source 1..75: mol_type = other DNA
tccggatctgcgccacacccagcagcagttctctttgccggtggttattgaagacggcgctggctgggcaccggg

SEQ ID NO: 810110 - DNA, 75 bp, synthetic construct
  source 1..75: mol_type = other DNA
atgcagatgttgcctgactcgaagcaaaattttaccccacgagtgcaggggattgcgcagagtaacgcgctggta

SEQ ID NO: 810111 - DNA, 75 bp, synthetic construct
  source 1..75: mol_type = other DNA
attatcggggaccgttgggagccgcgatcaatttaattatggtgtaaacctgagccatcaacgtcaggagaatga

SEQ ID NO: 810112 - DNA, 75 bp, synthetic construct
  source 1..75: mol_type = other DNA
atcgcagtctggagtccggaactggatgatgcaggtaactcgcttgcgggtatcgccgtccttgaacaattgacg

SEQ ID NO: 810113 - DNA, 75 bp, synthetic construct
  source 1..75: mol_type = other DNA
cggtgggattatcaacgcttttcagctccctggcggtaacgaaacccgcccacgaaatgttgcatttaactatat

SEQ ID NO: 810114 - DNA, 75 bp, synthetic construct
  source 1..75: mol_type = other DNA
tcctcactacgagctcttagctctcgtagtgttaaacgttatggtgaaattagtggaaatgtaggtacagaaacc

SEQ ID NO: 810115 - DNA, 75 bp, synthetic construct
  source 1..75: mol_type = other DNA
aacccggcgtgtcgaaatatgattttgcggcgggtcgtagccatattgaaggggcgagcaaacaaagtgattttg

SEQ ID NO: 810116 - DNA, 75 bp, synthetic construct
  source 1..75: mol_type = other DNA
atgtgtttgacgggcaaagttatcaaattgcctacaacaaatttgtgagccaaacgtcgacgcgttttggtctgg

SEQ ID NO: 810117 - DNA, 75 bp, synthetic construct
  source 1..75: mol_type = other DNA
gcgccaggaattaaagatgcttatgtcaatgggcaaaatatcgcacaacaaaccgtaatggagtggtggtatacg

SEQ ID NO: 810118 - DNA, 75 bp, synthetic construct
  source 1..75: mol_type = other DNA
agttatgttcgttttagcagtggattaaatctgctggggtggcaactgcattctgatgccagtttcagcaaaacg

SEQ ID NO: 810119 - DNA, 75 bp, synthetic construct
  source 1..75: mol_type = other DNA
tggccgtaaaaatagcttttctgccaatatgagccagtcattgccagaaggctggggttctgtgtccttaagtac

SEQ ID NO: 810120 - DNA, 75 bp, synthetic construct
  source 1..75: mol_type = other DNA
atcgacagctggtgcaaatttaacctggaacgcgccgatggcgacagtgaatggtagttatagtcagtccagcac

SEQ ID NO: 810121 - DNA, 75 bp, synthetic construct
  source 1..75: mol_type = other DNA
ttgggcgtatgaaattcgagggccagaagagggttaaagacctgcttgatggtttatcacaagcgcaaggtgact

SEQ ID NO: 810122 - DNA, 75 bp, synthetic construct
  source 1..75: mol_type = other DNA
cacgtcgcgatggcggtttttcgctgatgtatgcggcgggtaatgtcggctctatcatcgcacctatcgcctgtg

SEQ ID NO: 810123 - DNA, 75 bp, synthetic construct
  source 1..75: mol_type = other DNA
gtgtgttcctggcgtgggtggttaaagaaagcgtcgcaggtaatcgtaccgtgcgcatctggggaaaatttgctc

SEQ ID NO: 810124 - DNA, 75 bp, synthetic construct
  source 1..75: mol_type = other DNA
ggttctgctggtcgcaacacctgcgctgattaccgtattgttctggaaagaatggtcggtatacgccttagttgt

SEQ ID NO: 810125 - DNA, 75 bp, synthetic construct
  source 1..75: mol_type = other DNA
cgcgctggacgccgcaaaagcaattgtctggtttagtcgccagtgtgctatagagattgaaacctgcgtcgccat

SEQ ID NO: 810126 - DNA, 75 bp, synthetic construct
  source 1..75: mol_type = other DNA
ggcttgtgtggggctggtactgatgatttggctgtaccaggcgcttaagttcagaaaccgtgcgctggcgctgga

SEQ ID NO: 810127 - DNA, 75 bp, synthetic construct
  source 1..75: mol_type = other DNA
gctgggtgccagcgaaatccacccgacattcctttatctctcgctggcgattatcgtctgcggctatggcctgtt

SEQ ID NO: 810128 - DNA, 75 bp, synthetic construct
  source 1..75: mol_type = other DNA
gatgccgcgtgcgcagaacctgccgctggtcttctcggatgggttttatgtcgccaccgttaacgatcctacact

SEQ ID NO: 810129 - DNA, 75 bp, synthetic construct
  source 1..75: mol_type = other DNA
gccagtgccgggattcgagtgaatgccgtatcaccgggaatcgtgcatacgccaatttatgaagggttcatggat

SEQ ID NO: 810130 - DNA, 75 bp, synthetic construct
  source 1..75: mol_type = other DNA
gcaatgggaccgtagtgaaaaacttgatgaaatgctaaataaattagccttaaaattacctaaagatagcttggt

SEQ ID NO: 810131 - DNA, 75 bp, synthetic construct
  source 1..75: mol_type = other DNA
cagatttgccgtaaacctggatgccttatcgcgtagtggtgtaaaggtcaacccggatgtcttaatgctcgcacg

SEQ ID NO: 810132 - DNA, 75 bp, synthetic construct
  source 1..75: mol_type = other DNA
caatggtttttattttggcaacgagtcaccgacattccagatggaattaaccgaacaatatccgtcaatgcgtta

SEQ ID NO: 810133 - DNA, 75 bp, synthetic construct
  source 1..75: mol_type = other DNA
tcaccgacattccagatggaattaatcgaacaatatccgtctaaggcgttattattaattgccgaacaaaatgca

SEQ ID NO: 810134 - DNA, 75 bp, synthetic construct
  source 1..75: mol_type = other DNA
gcgaaataacgcccgacccaactatccagaccgtggtgaaaggcattgcgcaaatgcagactttacgcccggatg

SEQ ID NO: 810135 - DNA, 75 bp, synthetic construct
  source 1..75: mol_type = other DNA
tgacaaaatggataagggatggctggaaggtattaagtactcgtgttcattttccaatattcgcttaggtttttt

SEQ ID NO: 810136 - DNA, 75 bp, synthetic construct
  source 1..75: mol_type = other DNA
atggaaacagtcattcgagatgttattaccaccttcagacaacaaaatatccaaagtgaaatgtttttcttttgc

SEQ ID NO: 810137 - DNA, 75 bp, synthetic construct
  source 1..75: mol_type = other DNA
gggagattcttcattacaatcctgtgagtggtgacttttattggaagccgagagcaaagcatttgtttgcggata

SEQ ID NO: 810138 - DNA, 75 bp, synthetic construct
  source 1..75: mol_type = other DNA
gataaattttatcaaccgaaatattacgacagattgcaaaagataattatttctgttatttcccggaggaaataa

SEQ ID NO: 810139 - DNA, 75 bp, synthetic construct
  source 1..75: mol_type = other DNA
ctccgatttcgaaaaatgccaggcttatggtagagaattaaatattgatgatcgaattgtctggtatggttggca

SEQ ID NO: 810140 - DNA, 75 bp, synthetic construct
  source 1..75: mol_type = other DNA
ggggtgtaccagaatcaacgataaacgttatttttaaccctgtcgaagcgaaagattccgtcattcccgcacccg

SEQ ID NO: 810141 - DNA, 75 bp, synthetic construct
  source 1..75: mol_type = other DNA
gtctggcaaatgcgctccttctgacatcagttatccgctttaatgctggcgatccacgcgccgccaaacgctacg

SEQ ID NO: 810142 - DNA, 75 bp, synthetic construct
  source 1..75: mol_type = other DNA
gataacggccaataccgggatggatgttttaacccatgcgcttgaagcttatgtttctccccgcgccagcgactt

SEQ ID NO: 810143 - DNA, 75 bp, synthetic construct
  source 1..75: mol_type = other DNA
gtctggttcggtcgccagtgtggcattgaaattgaaacctgcgtagccattcccaccaccagcggtaccggttcc

SEQ ID NO: 810144 - DNA, 75 bp, synthetic construct
  source 1..75: mol_type = other DNA
ggcggcactggcggatgcaacgttgcgtaccaacccgcgtgcggctgatgtctccgcgattgcagaactgctcga

SEQ ID NO: 810145 - DNA, 75 bp, synthetic construct
  source 1..75: mol_type = other DNA
caatacgcataccagatatggttcaggcggcactggcggatgcaacgttgcgtaccaacccgcgtgcggctgatg

SEQ ID NO: 810146 - DNA, 75 bp, synthetic construct
  source 1..75: mol_type = other DNA
atgcagactttacgcccggatgtggttatcggttttggcggcggttctgccctggacgccgcaaaagcgattgtc

SEQ ID NO: 810147 - DNA, 75 bp, synthetic construct
  source 1..75: mol_type = other DNA
gctctatgccgaagcagaacaaaccagcgcgctgctgagacaacgacaacaccggatcgaggaactgaaacgtga

SEQ ID NO: 810148 - DNA, 75 bp, synthetic construct
  source 1..75: mol_type = other DNA
gccagccagaccattagcacgcaggcagacgagctgcagagcaaaagccaggcactggcaaagagcaacagccag

SEQ ID NO: 810149 - DNA, 75 bp, synthetic construct
  source 1..75: mol_type = other DNA
attcgtgtgctggacggtgatactctggagatattacaggcccggcatcccgtcagaattcgtcttgttaatatt

SEQ ID NO: 810150 - DNA, 75 bp, synthetic construct
  source 1..75: mol_type = other DNA
ttctatccagagaagaaagccttttacttcacactattcagcctgaacgattaaacaccgacttctctttattca

SEQ ID NO: 810151 - DNA, 75 bp, synthetic construct
  source 1..75: mol_type = other DNA
gcgcggcgctgaaaagtaaagcgcaagaactgacgaagaaaaacagccagctgatcggtctgtccattctggctg

SEQ ID NO: 810152 - DNA, 75 bp, synthetic construct
  source 1..75: mol_type = other DNA
ggaggtgcagcttatcgtcagtggttgtccgcgagtgacaccgtgtcggctggagcaggcagcgccgcgcactaa

SEQ ID NO: 810153 - DNA, 75 bp, synthetic construct
  source 1..75: mol_type = other DNA
agcgcgctgctgagacaacgacaacaccggatcgaggaactgaaacgtgagaacgaggatttacgccgctgggct

SEQ ID NO: 810154 - DNA, 75 bp, synthetic construct
  source 1..75: mol_type = other DNA
tgatatgtattccgcgattattggcgcgattggcgcactgcgcgggccgaagcacggcggggcgaatgaagtgtc

SEQ ID NO: 810155 - DNA, 75 bp, synthetic construct
  source 1..75: mol_type = other DNA
ttcgctggtgctgtacgccgagcacgagtttaacgcctccacttttaccagccgggtgattgcgggcaccggctc

SEQ ID NO: 810156 - DNA, 75 bp, synthetic construct
  source 1..75: mol_type = other DNA
tggagatattacaggcccggcatcctgtgaggattcgtcttgttaatattgatgcaccggaaaagaaacagcctt

SEQ ID NO: 810157 - DNA, 75 bp, synthetic construct
  source 1..75: mol_type = other DNA
cagcatggtgcagcctgggtatatcctgatttcaacacagattacaccctgccggcataccagagagaggccaga

SEQ ID NO: 810158 - DNA, 75 bp, synthetic construct
  source 1..75: mol_type = other DNA
gctttatgcggcagcggaacataccaccgcgctgctgcgaagccgccagcgccggatcgaggaactgaaacgtga

SEQ ID NO: 810159 - DNA, 75 bp, synthetic construct
  source 1..75: mol_type = other DNA
atgccccacagataccccgcagccaaaatcaacaaaatgccaaaaggttctgttcctgccctgcaacaagaaatg

SEQ ID NO: 810160 - DNA, 75 bp, synthetic construct
  source 1..75: mol_type = other DNA
aagcgcccgcccgtgaaggttgaggactttggcgacatgcataaagctgttaccgaaacgcaacaccgcatgggg

SEQ ID NO: 810161 - DNA, 75 bp, synthetic construct
  source 1..75: mol_type = other DNA
acaattgatgaaattcagtccaccgagacattgatcgtcctgcaaaacccgatcatgcgtaccatcaagccataa

SEQ ID NO: 810162 - DNA, 75 bp, synthetic construct
  source 1..75: mol_type = other DNA
accaccggccactacagcatctttatcaaagtgatgtgccgttcgatcgacgccctccagcatgtacttatcaac

SEQ ID NO: 810163 - DNA, 75 bp, synthetic construct
  source 1..75: mol_type = other DNA
ctggttgatgatggtgttatcgaatggaatgacccggaggtcgtgaaggcgctcaggggcgcattaaaacacggg

SEQ ID NO: 810164 - DNA, 75 bp, synthetic construct
  source 1..75: mol_type = other DNA
aaatcacccgtatccgcgttgaccttgctcagaacggtatcaggccgcagcgatgggagcttgaggcgctggcgc

SEQ ID NO: 810165 - DNA, 75 bp, synthetic construct
  source 1..75: mol_type = other DNA
aaagaggacgggcacgaaaagggagcggcaaaacagcgctttgagtcacgtcatcttaatcagggcggtgcggcg

SEQ ID NO: 810166 - DNA, 75 bp, synthetic construct
  source 1..75: mol_type = other DNA
ttaagtactgttcatacaatgaaaggacttgaaaaagatatagttttccttatcggtatgtgtgagggggttttt

SEQ ID NO: 810167 - DNA, 75 bp, synthetic construct
  source 1..75: mol_type = other DNA
aaattgaagttgttaaagctcctatgggaggggctatacaagttcttgcatctgcagggtctggtaaaacaagag

SEQ ID NO: 810168 - DNA, 75 bp, synthetic construct
  source 1..75: mol_type = other DNA
gtcagcgaagccgtctggtgggtgtcaacgctgcctgctcacgtcaatatcaataccctggaaatgatgccggtt

SEQ ID NO: 810169 - DNA, 75 bp, synthetic construct
  source 1..75: mol_type = other DNA
caaaaaattccgtgtgctgctgagtcgtattaacccggaagatgcaccagacattgtctggccggaggtaccggg

SEQ ID NO: 810170 - DNA, 75 bp, synthetic construct
  source 1..75: mol_type = other DNA
atgagtttattaaggtgctatgcggtgatgtaataaaaagtattctaatggtaggtgaccctaatcaaatgattt

SEQ ID NO: 810171 - DNA, 75 bp, synthetic construct
  source 1..75: mol_type = other DNA
ttatgatgatattttagtatatgcacatcggattctactcacgcatgattggatagcaaaaatatatcgttcaaa

SEQ ID NO: 810172 - DNA, 75 bp, synthetic construct
  source 1..75: mol_type = other DNA
ctgaagatgtacaacatcgccgatcgcctggaaacggtgatgtgggagagcaaaaagatgttccccaatctcgac

SEQ ID NO: 810173 - DNA, 75 bp, synthetic construct
  source 1..75: mol_type = other DNA
ccgtaaaggttgggtttaccggcgttgcagatagccacaatgccaacctgcttgcacttgaaaatacggtgtcag

SEQ ID NO: 810174 - DNA, 75 bp, synthetic construct
  source 1..75: mol_type = other DNA
cctgaggccgtagcgcaggccattaaaacgcgatttctgctctggtacgggcagtggtttctggacaccacagaa

SEQ ID NO: 810175 - DNA, 75 bp, synthetic construct
  source 1..75: mol_type = other DNA
acggcgattacactttcgggcaaggtgacgacaccttccttatcgacagtccggaatgtgtcgcccaggccgtaa

SEQ ID NO: 810176 - DNA, 75 bp, synthetic construct
  source 1..75: mol_type = other DNA
tcaccctgtggtaatgccgtttctgccgtaaaagttgggtttaccggcgttgcagatagccacaatgccaacctg

SEQ ID NO: 810177 - DNA, 75 bp, synthetic construct
  source 1..75: mol_type = other DNA
ggcaccatcgaagaattgcaaaacattcagcagccattactgatgggcaccaccacccatgccgcccgccgcgac

SEQ ID NO: 810178 - DNA, 75 bp, synthetic construct
  source 1..75: mol_type = other DNA
agcaacgtcatcattcacgtggcaagcggtattactcatataggcccggcgcgtcaacaggatggtgattacagc

SEQ ID NO: 810179 - DNA, 75 bp, synthetic construct
  source 1..75: mol_type = other DNA
atgtctgtgtatacaactgccgagttgctggcgtcgactgagcatcactttaagtttgatccgctgtttctgcgt

SEQ ID NO: 810180 - DNA, 75 bp, synthetic construct
  source 1..75: mol_type = other DNA
cttattgaaaacaaccctgccgacgatattgagataaagaacatgttactcagaaagatgaatgcagcgttttat

SEQ ID NO: 810181 - DNA, 75 bp, synthetic construct
  source 1..75: mol_type = other DNA
gacggcaatgtcattattcatgtggcaaacggtatcacgcatattggtccggcacggcaacaggacggcgattac

SEQ ID NO: 810182 - DNA, 75 bp, synthetic construct
  source 1..75: mol_type = other DNA
ccgcaagagattatgcagatatgcgaagaagtcgcggcggtgatcgaacgcgaagggcatcatacttcagcggaa

SEQ ID NO: 810183 - DNA, 75 bp, synthetic construct
  source 1..75: mol_type = other DNA
atacgcaattagggcagggagaggtcgtttcccaaacccaaaacatcacaagcagttccgattctgaaatagttg

SEQ ID NO: 810184 - DNA, 75 bp, synthetic construct
  source 1..75: mol_type = other DNA
atggtgactgagcaagtaaactcattacgccaggaacgggaggcggctgtgataggtggcctcctgttgggcggt

SEQ ID NO: 810185 - DNA, 75 bp, synthetic construct
  source 1..75: mol_type = other DNA
tgacgcgtcgcagttaacggttgaggaaatacgcgcaacaacggaacgcatgaagcaggatcacccgaacctggg

SEQ ID NO: 810186 - DNA, 75 bp, synthetic construct
  source 1..75: mol_type = other DNA
ggcccgcgcggcgtccgcgtgtatccagtcaatgcaacaacgtcaggcgataagccgattctcccagcgaaataa

SEQ ID NO: 810187 - DNA, 75 bp, synthetic construct
  source 1..75: mol_type = other DNA
gctttatgcggcagcggaacagaccaccgcactgttgcgaggccgccagcgccggatcgaggaactgaaacgtga

SEQ ID NO: 810188 - DNA, 75 bp, synthetic construct
  source 1..75: mol_type = other DNA
gttcaatatccgtcgttcttacccatattccgacagcgagtgggtttttttatcccgcaaggggaatccgctctc

SEQ ID NO: 810189 - DNA, 75 bp, synthetic construct
  source 1..75: mol_type = other DNA
tcttgggcatcgcaatattcgtcatactgtctggtataccgccagcaatgcagggcgtttttacggcatctggga

SEQ ID NO: 810190 - DNA, 75 bp, synthetic construct
  source 1..75: mol_type = other DNA
agcaagaactgtcacggcattcataacgcttcttaagcctgtaataatggaactgcaagagatagacctattgca

SEQ ID NO: 810191 - DNA, 75 bp, synthetic construct
  source 1..75: mol_type = other DNA
tgtaacccgaaaagtcatgtttccattattccgctggcgcgattcatgcgtcgttttgtgaaagtggagttctgg

SEQ ID NO: 810192 - DNA, 75 bp, synthetic construct
  source 1..75: mol_type = other DNA
tttgaaccccctcggaggtgattgtaatggtgaaaatagcatagctggtggttgtgatggtggcggtggaggagg

SEQ ID NO: 810193 - DNA, 75 bp, synthetic construct
  source 1..75: mol_type = other DNA
tactacaacgaacaatcagttgcccgcgaatacatggagatcattgtttcaaaaaaccgtcacgggaaaacgggg

SEQ ID NO: 810194 - DNA, 75 bp, synthetic construct
  source 1..75: mol_type = other DNA
gaaagtcaaatggtaataaaaaatcgcgaacgatatccgcaaaaagttctgcactaaaagttctctctcaaacca

SEQ ID NO: 810195 - DNA, 75 bp, synthetic construct
  source 1..75: mol_type = other DNA
gtaaagaagttcaggccatgatgcaggcggtgtgttacggggcaacgggagcaagagattattgtcttattctgt

SEQ ID NO: 810196 - DNA, 75 bp, synthetic construct
  source 1..75: mol_type = other DNA
ctggttgatgaaggtgttatcgaatggaatgacccggatgtagtgagggcgctcaggggcgcattaaaacacggc

SEQ ID NO: 810197 - DNA, 75 bp, synthetic construct
  source 1..75: mol_type = other DNA
cgagagtaaattatggtgatatgtcattcaaatttccaattgatgatcgattttatgatgatgttaactctttga

SEQ ID NO: 810198 - DNA, 75 bp, synthetic construct
  source 1..75: mol_type = other DNA
gggtgatgtggggatgtttatcacgctgaccgcgccgtcaaagtatcacccgacacgtcaggtcagaaaaggcga

SEQ ID NO: 810199 - DNA, 75 bp, synthetic construct
  source 1..75: mol_type = other DNA
gctttggcggctggcaaaatgtgtatcggcattattcccaatcactgaaatgtgaaatgaatgtcggcgtctatc

SEQ ID NO: 810200 - DNA, 75 bp, synthetic construct
  source 1..75: mol_type = other DNA
ctacactcttttacgaaggaaaatattatagttttaatgagcgctcgcaagaggaatgggggctttttgctaact

SEQ ID NO: 810201 - DNA, 75 bp, synthetic construct
  source 1..75: mol_type = other DNA
gcagtgcttaatctggttgatgacggtgttatcgaatggagtgacccggaggtcgtgagggcgctcagaggtgca

SEQ ID NO: 810202 - DNA, 75 bp, synthetic construct
  source 1..75: mol_type = other DNA
gcaccactgcgtagctttgacccgatgatcactgaaactctggtcgaagtgatgaataccgaaggccccacattg

SEQ ID NO: 810203 - DNA, 75 bp, synthetic construct
  source 1..75: mol_type = other DNA
atattctgatcgccaccggtggtcgtccaagccacccggatattccgggcgtggaatacggcattgattccgatg

SEQ ID NO: 810204 - DNA, 75 bp, synthetic construct
  source 1..75: mol_type = other DNA
gacgctggagctggaagatggtcgcagtgaaacggtggattgcctgatttgggcgattggtcgcgagcctgccaa

SEQ ID NO: 810205 - DNA, 75 bp, synthetic construct
  source 1..75: mol_type = other DNA
gtcgaggctgcacgcgccgccgcagacagtggtgattttgcgctgtatatcagcgcgcagggcggggcaaatgtc

SEQ ID NO: 810206 - DNA, 75 bp, synthetic construct
  source 1..75: mol_type = other DNA
gccagcgtaaccagattatcgaaatcatgcgtcgctatgcgctcaaagaggatggagacgaaagaggagctgcgc

SEQ ID NO: 810207 - DNA, 75 bp, synthetic construct
  source 1..75: mol_type = other DNA
ctggagcccgaagaatgttaagcatgccgttggattcgcgttgccatggctgatttatgatgtgagccaagtatt

SEQ ID NO: 810208 - DNA, 75 bp, synthetic construct
  source 1..75: mol_type = other DNA
tttgcgaatattcatggatacacctgttcgcatcgccctgatgacaacgattggcgtaactgagcggctcagtag

SEQ ID NO: 810209 - DNA, 75 bp, synthetic construct
  source 1..75: mol_type = other DNA
aattccatatttagatgtattgcatccaaagattaacattaatgatgaggtcaggttaaaacttaatgaggtttt

SEQ ID NO: 810210 - DNA, 75 bp, synthetic construct
  source 1..75: mol_type = other DNA
cgccatcgggtgtcacggacagactgtctggcacgaacctactggcgttgcaccgcatactctacagattggtga

SEQ ID NO: 810211 - DNA, 75 bp, synthetic construct
  source 1..75: mol_type = other DNA
ggcgggattaccaggaaatctgccttcccgtcactggcgcaagccaggagacggtactgggggctattttccctg

SEQ ID NO: 810212 - DNA, 75 bp, synthetic construct
  source 1..75: mol_type = other DNA
gcttctgtttcttcatgcctgtcatttgtctgttactgatgttgttgttcctgctactgctactgctactgttct

SEQ ID NO: 810213 - DNA, 75 bp, synthetic construct
  source 1..75: mol_type = other DNA
ttacaaaatgggtttaggcacggttgaactgaccacccttcccagcctcggaatggtgcgttttaaaaccagcga

SEQ ID NO: 810214 - DNA, 75 bp, synthetic construct
  source 1..75: mol_type = other DNA
tctcccaaacaccatggtgccgccaaaaggtgaagtatcggtggatatcccgcatgctgcaaccggggatatcag

SEQ ID NO: 810215 - DNA, 75 bp, synthetic construct
  source 1..75: mol_type = other DNA
atgaccactttaaccgacaaagaactgattaaagaaatcaaagagcgcataggtagcctggatgtgagagacaat

SEQ ID NO: 810216 - DNA, 75 bp, synthetic construct
  source 1..75: mol_type = other DNA
caacgaagggatgaattaccaggacccgaatgttgatctggcgtggatattctggaagtccagtcgtgaacatat

SEQ ID NO: 810217 - DNA, 75 bp, synthetic construct
  source 1..75: mol_type = other DNA
attcatcgctaggcgctgatgaagtagaggaaattaaggccggtttgcgtgctgcctttgccaacgtcactatcc

SEQ ID NO: 810218 - DNA, 75 bp, synthetic construct
  source 1..75: mol_type = other DNA
ttatgccttttccgggcgtccccctggcggggcgggctgtcgtgaacggagccagcgaagctgtctccgccctgg

SEQ ID NO: 810219 - DNA, 75 bp, synthetic construct
  source 1..75: mol_type = other DNA
ggcaataacccattgctggttcagagttggttagatactggagatgataacgctgaaccaggacagtattactgt

SEQ ID NO: 810220 - DNA, 75 bp, synthetic construct
  source 1..75: mol_type = other DNA
gggaataacccgttgcttgtccagagttggttagatactggcgatgacaacgctgagcctggtgatcctacccac

SEQ ID NO: 810221 - DNA, 75 bp, synthetic construct
  source 1..75: mol_type = other DNA
taaagcaagtgttgacgactgggaaaccatgatcgataccaacaataaaggcctggtatatatgacgcgtgccgt

SEQ ID NO: 810222 - DNA, 75 bp, synthetic construct
  source 1..75: mol_type = other DNA
gctaaagcgatcgaatgggatgaagcgttcaagaaaatggacgatccgtctggtcgcgcggttggtgttcaccag

SEQ ID NO: 810223 - DNA, 75 bp, synthetic construct
  source 1..75: mol_type = other DNA
gggcgcaacctctctacaaccaacaaaaaacccacgtgctggcagtaaacggtgaaatctacaaccaccaggcat

SEQ ID NO: 810224 - DNA, 75 bp, synthetic construct
  source 1..75: mol_type = other DNA
gccgcccgtcgcgtggaagatcaggaacgctctgaagcctggtggccgcagctgcactcctttgctgtaggtctg

SEQ ID NO: 810225 - DNA, 75 bp, synthetic construct
  source 1..75: mol_type = other DNA
accgggtctgactgtgaagtgatcctcgcgctgtatcaggaaaaagggccggaatttctcgacgacttgcagggc

SEQ ID NO: 810226 - DNA, 75 bp, synthetic construct
  source 1..75: mol_type = other DNA
gcgtgttcttccgctaaagcgattgagtgggatgaggcgttcaagaaaatggacgatccgtctggtcgtgcggtt

SEQ ID NO: 810227 - DNA, 75 bp, synthetic construct
  source 1..75: mol_type = other DNA
cgcgtggaagatcaggaacgctctgaagcctggtggccgcagttacactcctttgctgtaggtctgccgggttca

SEQ ID NO: 810228 - DNA, 75 bp, synthetic construct
  source 1..75: mol_type = other DNA
taaccggggcggtgctgcggggtatatcgcaaaatacatctcaaaaaacatcgatggctatgcactggatggtca

SEQ ID NO: 810229 - DNA, 75 bp, synthetic construct
  source 1..75: mol_type = other DNA
ggcttaccgtgaactacgcaaattgcctcgcggcgtcagtattgctgatgagtttgacgaacgcgtcgaggctgc

SEQ ID NO: 810230 - DNA, 75 bp, synthetic construct
  source 1..75: mol_type = other DNA
gtggagcaactgtaaattatgacgggaaaaaattcacgtatccggttgctgatgtttggccgggaattgaagatg

SEQ ID NO: 810231 - DNA, 75 bp, synthetic construct
  source 1..75: mol_type = other DNA
cttgcagggcatgtttgcctttgccctgtacgacagcgaaaaagatgcatatctgattggtcgcgaccatctggg

SEQ ID NO: 810232 - DNA, 75 bp, synthetic construct
  source 1..75: mol_type = other DNA
gcgtaagaaagcactcgagctgtcacgcctgatgcgtcatcgtggcccggactggtccggtatttatgccagcga

SEQ ID NO: 810233 - DNA, 75 bp, synthetic construct
  source 1..75: mol_type = other DNA
taaatcagcgaatcgaagttatgttaaaatctgatggttttaataacgtagaaacgctgatgctaaaaagatatc

SEQ ID NO: 810234 - DNA, 75 bp, synthetic construct
  source 1..75: mol_type = other DNA
gatcatccctctgtatatgggttatgacgaacacggccagctatatgtggcctcagaaatgaaagccctggtgcc

SEQ ID NO: 810235 - DNA, 75 bp, synthetic construct
  source 1..75: mol_type = other DNA
ggaaatcgcaggaaataacattctgcttgctggcaggtatcctgatgtttatggcaatgatggttgccggacgcg

SEQ ID NO: 810236 - DNA, 75 bp, synthetic construct
  source 1..75: mol_type = other DNA
tagtgtttccagaatacaggaaagactggctaagggttgtcctgttgccactaatcttgatcttaaattgcataa

SEQ ID NO: 810237 - DNA, 75 bp, synthetic construct
  source 1..75: mol_type = other DNA
actcctggattgtacagcctgttgcgaacgaaaaaacgctccactcgctggcgcatggggcagggcgtaaatggg

SEQ ID NO: 810238 - DNA, 75 bp, synthetic construct
  source 1..75: mol_type = other DNA
gaaccgggtctggtgggtggtaccgagttttccaatgtccgctttaaaggcgatgacggtaaagcagaaaaaacc

SEQ ID NO: 810239 - DNA, 75 bp, synthetic construct
  source 1..75: mol_type = other DNA
ctcacggtgcatccggggatatcagctttcagacgatcaatgattacggtgcattaacaccgcgtattaaggcaa

SEQ ID NO: 810240 - DNA, 75 bp, synthetic construct
  source 1..75: mol_type = other DNA
ccgaccccctacttcattaccgtaacgaatatgaaagcaggaaatagcgatctcccaaacaccatggtgcctcca

SEQ ID NO: 810241 - DNA, 75 bp, synthetic construct
  source 1..75: mol_type = other DNA
ttaaccggggcggtgctgcgggatatatcgcgaaatacatctcaaaaaacatcgacggctatgcactggatggtc

SEQ ID NO: 810242 - DNA, 75 bp, synthetic construct
  source 1..75: mol_type = other DNA
tcccgtacaacacgccaacctctaaagaagcgtacttgtatcgggagatctttgaagaactattcccgcttccga

SEQ ID NO: 810243 - DNA, 75 bp, synthetic construct
  source 1..75: mol_type = other DNA
tgcatcacgaaattcacttcactgtacaggaaggtctggatgccatccgcgacgtgatttaccacatcgaaacct

SEQ ID NO: 810244 - DNA, 75 bp, synthetic construct
  source 1..75: mol_type = other DNA
gcaatggtgttgattcatctgatgggttcaatactatcagtgatgtttatcttaagacgacagcaacctatgagc

SEQ ID NO: 810245 - DNA, 75 bp, synthetic construct
  source 1..75: mol_type = other DNA
tgcctgagtccggtgaaatccgggcacgggcacgccgtcccacctttggcgggcgcgatggcttactggagaaat

SEQ ID NO: 810246 - DNA, 75 bp, synthetic construct
  source 1..75: mol_type = other DNA
aaaatctgatggttttaataacgtagaaacgctgatgctaaaaaggattaatcagataacatttttttacggcgt

SEQ ID NO: 810247 - DNA, 75 bp, synthetic construct
  source 1..75: mol_type = other DNA
tttctggcctataacggctcactggctatgaatttatctggcaatgcatggaagacgctgattttcgttccatta

SEQ ID NO: 810248 - DNA, 75 bp, synthetic construct
  source 1..75: mol_type = other DNA
actgatcgaaaacttaaatgcgcaaaatgggctgttttcggttgtggaaacatctgcatcgcaatctacctcacg

SEQ ID NO: 810249 - DNA, 75 bp, synthetic construct
  source 1..75: mol_type = other DNA
atgagcgaaacggcatcctggcagccgagcgcgtctattcctaacttattaaaacgtgcggcgattatggcggag

SEQ ID NO: 810250 - DNA, 75 bp, synthetic construct
  source 1..75: mol_type = other DNA
cgggttttgcgtcagggatggaagcccgccagggcggagacagcttcgctggctccgttcacgacagcccgcccc

SEQ ID NO: 810251 - DNA, 75 bp, synthetic construct
  source 1..75: mol_type = other DNA
ttggtgccagacccggcgcggttattgaagaaggcggcaaacagcaggtctatttgctgggcgaacggcttgact

SEQ ID NO: 810252 - DNA, 75 bp, synthetic construct
  source 1..75: mol_type = other DNA
atcgccattgcgctaaatcagcaggatttcactgatccacgagcaatgattgctctgatgcggcagttaccttca

SEQ ID NO: 810253 - DNA, 75 bp, synthetic construct
  source 1..75: mol_type = other DNA
gtttttgcctgcttttgggcaaaaacttttgcgggatgtacatttcacccctggactggcggagacggttgtggc

SEQ ID NO: 810254 - DNA, 75 bp, synthetic construct
  source 1..75: mol_type = other DNA
cccgccagggcggagacagcttcgctggctccgttcacgacagcccgccccgccagggggacgcccggaaaaggc

SEQ ID NO: 810255 - DNA, 75 bp, synthetic construct
  source 1..75: mol_type = other DNA
ctggactggcggagacggttgtggctgtctttgcccccggcgacaggggcttacacgggtgtatggcaccggata

SEQ ID NO: 810256 - DNA, 75 bp, synthetic construct
  source 1..75: mol_type = other DNA
ttgaagccttgaaagtcggtatgcctgactgttccggcgtggcattaggtgttgatcgtctggtgatgttggcgc

SEQ ID NO: 810257 - DNA, 75 bp, synthetic construct
  source 1..75: mol_type = other DNA
aacaacgctttgaacaagataaccgtaagcgcgcggcgcgcggtttgccgcagcaccccattgaccagaatctga

SEQ ID NO: 810258 - DNA, 75 bp, synthetic construct
  source 1..75: mol_type = other DNA
gttgaccgcctggtgatgttggcgctgggagcggagactctggcagaagtgattgcctttagcgttgaccgggca

SEQ ID NO: 810259 - DNA, 75 bp, synthetic construct
  source 1..75: mol_type = other DNA
atcagtgatctgaatgcactgggcgatatcacccacattaatctccatatcaattcaccgggtggcgatgtcttt

SEQ ID NO: 810260 - DNA, 75 bp, synthetic construct
  source 1..75: mol_type = other DNA
aagttgccagctgctggtgtgctccagtgcgattaccgaagatttatacaaagcgtttctgcgtaaacatgccag

SEQ ID NO: 810261 - DNA, 75 bp, synthetic construct
  source 1..75: mol_type = other DNA
tgggccattcgtgacggcattatcggcgggtgcgtcggatatgagcggctggctgttaatggggttgccgggcgc

SEQ ID NO: 810262 - DNA, 75 bp, synthetic construct
  source 1..75: mol_type = other DNA
gtgacacccgctgttgaggcaatggcatgtattcagtcaaaacgtacagaggaatttaaaaagatgccggaatcc

SEQ ID NO: 810263 - DNA, 75 bp, synthetic construct
  source 1..75: mol_type = other DNA
ggtatttctttccgggatttccgaaagctggattgctattggcctgacattaggcgcatggattaactggaaact

SEQ ID NO: 810264 - DNA, 75 bp, synthetic construct
  source 1..75: mol_type = other DNA
tggcgatcaaccaaaaattttgacgactatattctgggaggacgcagccttgggccatttgtgacggcattatcg

SEQ ID NO: 810265 - DNA, 75 bp, synthetic construct
  source 1..75: mol_type = other DNA
tgacattttgtgtctatatctttggcatgatattgattggatttatcgcctggcgatcaacgaaaaactttgacg

SEQ ID NO: 810266 - DNA, 75 bp, synthetic construct
  source 1..75: mol_type = other DNA
tggacccgtaagggacgcctgtcagacttcaaaacagcgtatcgcgtggggatgggcggttttggttctttgcgt

SEQ ID NO: 810267 - DNA, 75 bp, synthetic construct
  source 1..75: mol_type = other DNA
ggcattaacgatctgtttgccatgttcggcggtcgctatcagacgcttcaggcacagtgcgtggctgatcctgac

SEQ ID NO: 810268 - DNA, 75 bp, synthetic construct
  source 1..75: mol_type = other DNA
ccccgcgtgataccacagtgacaatccctgcaccggcggtaacagaaccatcaccggtaccggcagtgtctgatg

SEQ ID NO: 810269 - DNA, 75 bp, synthetic construct
  source 1..75: mol_type = other DNA
tggtttctggggagttaccgcgaagcagtttgtcagcgatatgaatgccctgggtgatatcacccacattaatct

SEQ ID NO: 810270 - DNA, 75 bp, synthetic construct
  source 1..75: mol_type = other DNA
ggggatgctgaggatatgcgcagttatgccgatttgctggataaagtcgaatcggtactgttgccagcctatgcg

SEQ ID NO: 810271 - DNA, 75 bp, synthetic construct
  source 1..75: mol_type = other DNA
ctgttgtgaaggatttttgtattatgctggtagatattaaccagttcaaacgcataaatgctcaatggggtcatc

SEQ ID NO: 810272 - DNA, 75 bp, synthetic construct
  source 1..75: mol_type = other DNA
gactgtccgggggcagaccgcaaaagtttttgcctgcttttgggcaaaaacttttgtgggatgtgcatttcaccc

SEQ ID NO: 810273 - DNA, 75 bp, synthetic construct
  source 1..75: mol_type = other DNA
cggcccatttattaaacaagttaaggttttttctgagccagttgaagctacatatttaatcgcgtcaggctgtct

SEQ ID NO: 810274 - DNA, 75 bp, synthetic construct
  source 1..75: mol_type = other DNA
tgcggcggctgccggtctcagcgtgccgggcgttgcccgcgccgttgttggtcagcaggaagccatcaaatggga

SEQ ID NO: 810275 - DNA, 75 bp, synthetic construct
  source 1..75: mol_type = other DNA
atgttttgcggctttacgctgggttcggcgtttggcgggattgtcagtgcgcaactggtgccggtgattggctgg

SEQ ID NO: 810276 - DNA, 75 bp, synthetic construct
  source 1..75: mol_type = other DNA
ggcggcacgttgggcgcgctggctctgggcgtactgatggataaattcaatcctttccgcgtgttggctgtgagc

SEQ ID NO: 810277 - DNA, 75 bp, synthetic construct
  source 1..75: mol_type = other DNA
gcagctggtgccggtgattggctggcacgggatcctggtgttgggtggcgtattaccgctgatgctgtttgtcgc

SEQ ID NO: 810278 - DNA, 75 bp, synthetic construct
  source 1..75: mol_type = other DNA
cggcgtttggcgggattgtcagtgcgcagctggtgccggtgataggctggcacgggattctggtgttggggggcg

SEQ ID NO: 810279 - DNA, 75 bp, synthetic construct
  source 1..75: mol_type = other DNA
actcgattagcggggtttataacgctaatattggtggagcatctacgttgattctccatttttatatgggagctg

SEQ ID NO: 810280 - DNA, 75 bp, synthetic construct
  source 1..75: mol_type = other DNA
gaagtggagatcgataaactgcacgcgctgcgctacgccgattcggtatccatgaccttaagctggcagcgttaa

SEQ ID NO: 810281 - DNA, 75 bp, synthetic construct
  source 1..75: mol_type = other DNA
aggcagtttcctgactctcactctggcggcgctgctgtatatcatcatcgccaccggaatggggctgctgatctc

SEQ ID NO: 810282 - DNA, 75 bp, synthetic construct
  source 1..75: mol_type = other DNA
aaccatgtaccgtctaatcgatactgcgtatgctgaaaaccgggagagtatcaatgcatatattggagaagatga

SEQ ID NO: 810283 - DNA, 75 bp, synthetic construct
  source 1..75: mol_type = other DNA
ttgttaatcagactgccttaaaaacacttggtgttgtgcaaaataatattattgggaaactggtaatggtgccaa

SEQ ID NO: 810284 - DNA, 75 bp, synthetic construct
  source 1..75: mol_type = other DNA
gttgatgatgaaaatcgggttcagtttgttaatcagactgccttaaaaacacttggtgttgtgcaaaataatatt

SEQ ID NO: 810285 - DNA, 75 bp, synthetic construct
  source 1..75: mol_type = other DNA
atgactcaacgacgtgatttacaagcactgatcgatgctgctccggtcggcaagatgcagtggcgcgttatcatc

SEQ ID NO: 810286 - DNA, 75 bp, synthetic construct
  source 1..75: mol_type = other DNA
tgcgcgaaacggcggtgccccttacatcccggcggccttttgccgggatgccaggagcgcaggccacggcgcgac

SEQ ID NO: 810287 - DNA, 75 bp, synthetic construct
  source 1..75: mol_type = other DNA
ggctccgttcacgacagcccgccccgccagggggacgcccggaaaaggcataagcaggagaacaacaaaacagac

SEQ ID NO: 810288 - DNA, 75 bp, synthetic construct
  source 1..75: mol_type = other DNA
ggcccatgacatggcatcgcgtctcatgaagacggagctgaatgtggcgcttgaacaggctttaaagacggcgaa

SEQ ID NO: 810289 - DNA, 75 bp, synthetic construct
  source 1..75: mol_type = other DNA
cgcttcccttccggcaggcgtcagcctgtcaggggttttcgcgcgggctgacaggcggcctccaccgccagccct

SEQ ID NO: 810290 - DNA, 75 bp, synthetic construct
  source 1..75: mol_type = other DNA
agatgaatgcacgaaaagcggtactggcagacaatccggaattgatcctgcgtgtgctacagctgagatttgacg

SEQ ID NO: 810291 - DNA, 75 bp, synthetic construct
  source 1..75: mol_type = other DNA
ccaggagcgcaggccacggcgcgacagaggcggcgcgaccggaacggtcgctgcaagccagggtttcgcgtcagg

SEQ ID NO: 810292 - DNA, 75 bp, synthetic construct
  source 1..75: mol_type = other DNA
gcgtgatggttatggctttgaagctaactggtcagagttttacaccacgacccgcaaaccctctgcgggagatgt

SEQ ID NO: 810293 - DNA, 75 bp, synthetic construct
  source 1..75: mol_type = other DNA
agtctcgcctctgcgttttcaccagatctgcaaacgctggtattactgcgttttctcacagggcttgggcttggc

SEQ ID NO: 810294 - DNA, 75 bp, synthetic construct
  source 1..75: mol_type = other DNA
gcagctggtgccggtgattggctggcacggcattctggtgttggggggcgtattaccgctgatgctgtttgtcgc

SEQ ID NO: 810295 - DNA, 75 bp, synthetic construct
  source 1..75: mol_type = other DNA
tctccgataacatggtgtatacggagaagcacatccgtatcatcagtgtgacgactgcggcggccatccatccag

SEQ ID NO: 810296 - DNA, 75 bp, synthetic construct
  source 1..75: mol_type = other DNA
ccgacgataaccatacgtgggcagctctccgataacatggtgtatacggagaagcacatccgtatcatcagtgtg

SEQ ID NO: 810297 - DNA, 75 bp, synthetic construct
  source 1..75: mol_type = other DNA
agattgttgatgaaatctgcgattttgtggcgaatcagcaggctgttttcctcggcggtcagtacatacttcagg

SEQ ID NO: 810298 - DNA, 75 bp, synthetic construct
  source 1..75: mol_type = other DNA
cttggaaaaaaaggaaaaaccgaaagacagagtatgtatacgttaccttgagtacaaaaaggaacaagtcaggaa

SEQ ID NO: 810299 - DNA, 75 bp, synthetic construct
  source 1..75: mol_type = other DNA
gcatctggttcatgttgataaacgctgggtaagcctgccaggcgaaggcggtcacgttgattttgcgccaaacag

SEQ ID NO: 810300 - DNA, 75 bp, synthetic construct
  source 1..75: mol_type = other DNA
agttgcactgattgccgtcgggcattatcgctgttttgtgtgattatggggcgttttggcggcaacctggcgtta

SEQ ID NO: 810301 - DNA, 75 bp, synthetic construct
  source 1..75: mol_type = other DNA
atcaataaattcaactgggaaacgttgatcgccagccgtaccgcctatatcgaccgtattcatacttcctatgag

SEQ ID NO: 810302 - DNA, 75 bp, synthetic construct
  source 1..75: mol_type = other DNA
tttcccggtctttctgttatcagaaatccactgaaagcacaggggctggctgagaagataaataataaacaggag

SEQ ID NO: 810303 - DNA, 75 bp, synthetic construct
  source 1..75: mol_type = other DNA
aagggcgctttaaagaatatgtccatgatattccggtgtatctcatcgtccatgacaatccgggtcttctcggtt

SEQ ID NO: 810304 - DNA, 75 bp, synthetic construct
  source 1..75: mol_type = other DNA
atattgcgtgcggaaattggtcatgtttcggcggagcgcgtgctttctggccctgggctggtgaatttgtatcgc

SEQ ID NO: 810305 - DNA, 75 bp, synthetic construct
  source 1..75: mol_type = other DNA
gctgtattgccatcgcttgcccaattaccggtgactgggtggcaatgaccaaccatacctgggcgttctcaattg

SEQ ID NO: 810306 - DNA, 75 bp, synthetic construct
  source 1..75: mol_type = other DNA
tctccgctgaacgcgtgctgtccgggcctgggctggtgaacctgtatcgcgctattgtgaaagccgacaaccgcc

SEQ ID NO: 810307 - DNA, 75 bp, synthetic construct
  source 1..75: mol_type = other DNA
cgatgctgaaaaaagagcatctgattcagtttggtggcgcagaaccggtagaaggtaagcctattgcggtttacg

SEQ ID NO: 810308 - DNA, 75 bp, synthetic construct
  source 1..75: mol_type = other DNA
tttacagccgtttcgatggcgatcccgatgctgaaaaaagagcatcttatccagtttggtggtcaggaaccggtc

SEQ ID NO: 810309 - DNA, 75 bp, synthetic construct
  source 1..75: mol_type = other DNA
atgagaaacaaacctttttatcttctgtgcgcttttttgtggctggcggtgagtcacgctttggctgcggatagc

SEQ ID NO: 810310 - DNA, 75 bp, synthetic construct
  source 1..75: mol_type = other DNA
tcacagcgtagacagtgacgaagtaatcctgacccgcgtctcgctgatgaaaaacccgcctgacatcctgtttac

SEQ ID NO: 810311 - DNA, 75 bp, synthetic construct
  source 1..75: mol_type = other DNA
cgcgggcggcttaatcatggtgtggggcgtggagagtccggttccgcatggcggcatgtttgttgtgcctctgtt

SEQ ID NO: 810312 - DNA, 75 bp, synthetic construct
  source 1..75: mol_type = other DNA
acggtgattgctgacctgggcggcagggatgccacgcctttttttgagggtatcaaccggcaggcaccggcttct

SEQ ID NO: 810313 - DNA, 75 bp, synthetic construct
  source 1..75: mol_type = other DNA
tttattttcctgtatggcttctgttttcagcgagcgtcagtgctgaactgacggtgattgctgacctgggcggca

SEQ ID NO: 810314 - DNA, 75 bp, synthetic construct
  source 1..75: mol_type = other DNA
acatggctgcagatgaatgcagcagtactcagggagcggaaggcggcgggaatggtagtgaatgtggcggatgag

SEQ ID NO: 810315 - DNA, 75 bp, synthetic construct
  source 1..75: mol_type = other DNA
tgatcactgaaggagtcattccaatcgccgcgcgtgacttgctgcgagtggtgggatcttgtgtggtggcttctg

SEQ ID NO: 810316 - DNA, 75 bp, synthetic construct
  source 1..75: mol_type = other DNA
actgactgtgcgcggctgtgaagtgatggcggagctgtaccgcacgcttccggcggcctttgatgacttctgcag

SEQ ID NO: 810317 - DNA, 75 bp, synthetic construct
  source 1..75: mol_type = other DNA
tcaccctccttcccctgaccagccatgctgaactgaacgtcattgctgacctgggcggtcaggatgccgccccgt

SEQ ID NO: 810318 - DNA, 75 bp, synthetic construct
  source 1..75: mol_type = other DNA
atgtgggcggcaccaacgcacgtcttgctctgtgtgatattgccagtggtgaaatctcgcaggctaagacctatt

SEQ ID NO: 810319 - DNA, 75 bp, synthetic construct
  source 1..75: mol_type = other DNA
aaaaatagttatgtatactcttgatggtatagagttagaactatccacgaataaaataaggcccgtagtcgcagc

SEQ ID NO: 810320 - DNA, 75 bp, synthetic construct
  source 1..75: mol_type = other DNA
tttcacttgctgatacccgagggctaagagtggattatatttccttattagccaacagaatcgacccgcaaattc

SEQ ID NO: 810321 - DNA, 75 bp, synthetic construct
  source 1..75: mol_type = other DNA
ccggcgggcaatacggcgctctgcaccgtgggtaaaagtggcaatgacttgcattaccgtggctacgatattctt

SEQ ID NO: 810322 - DNA, 75 bp, synthetic construct
  source 1..75: mol_type = other DNA
cgcagattgttgatgaaatctgcgattttgtggcgaatcagcaggctgttttcctgggcggtcactacatcttac

SEQ ID NO: 810323 - DNA, 75 bp, synthetic construct
  source 1..75: mol_type = other DNA
tggtatgaaaaggctgcagctcaaaatagtcctgatgcgcagttcgctcttggaattctgtatgccaatgctaat

SEQ ID NO: 810324 - DNA, 75 bp, synthetic construct
  source 1..75: mol_type = other DNA
atgtatttgtatggagaaattctggatgttgattatcagcaggcaaagatttggtatgaaaaagccgctgaccaa

SEQ ID NO: 810325 - DNA, 75 bp, synthetic construct
  source 1..75: mol_type = other DNA
gcgcgggccgaaacacggcggggcgaatgaagtgtcgctggagatccagcaacgctacgaaacgccggacgaagc

SEQ ID NO: 810326 - DNA, 75 bp, synthetic construct
  source 1..75: mol_type = other DNA
agtcatcaaacaaaagagtattgaaaacgtcgatatgctcaaaggactgaactttgtcgccattatttctctgat

SEQ ID NO: 810327 - DNA, 75 bp, synthetic construct
  source 1..75: mol_type = other DNA
ctgtttgaaagcactttcggcatgagctatgaaaccgcactgtgggcgggcgcggcggcaaccatcctgtatacc

SEQ ID NO: 810328 - DNA, 75 bp, synthetic construct
  source 1..75: mol_type = other DNA
gcattaccgtggctacgatattcttgatctggcggaacattgtgaatttgaagaagtggcgcatctgctgatcca

SEQ ID NO: 810329 - DNA, 75 bp, synthetic construct
  source 1..75: mol_type = other DNA
gccgggtgattgcgggcactggctctgatatgtattccgcgattattggcgcgattggcgcactgcgcgggccga

SEQ ID NO: 810330 - DNA, 75 bp, synthetic construct
  source 1..75: mol_type = other DNA
gctggagatccagcaacgctacgaaacgccggacgaagccgaagctgatatccgtaagcgggtggaaaacaaaga

SEQ ID NO: 810331 - DNA, 75 bp, synthetic construct
  source 1..75: mol_type = other DNA
cttacagggcagcagaaacaggtgatacagggcaggcggtggaggccgcctgtcagcccgcgcgaaaacccctgg

SEQ ID NO: 810332 - DNA, 75 bp, synthetic construct
  source 1..75: mol_type = other DNA
atgaatatcagcacagaaacccgcgaaattctgcgtaattacaaaaccgtgattaatgcgcagcgtcgtgaaatg

SEQ ID NO: 810333 - DNA, 75 bp, synthetic construct
  source 1..75: mol_type = other DNA
atgatcggtcgactgctccgcggcggttttatgaccgctatctatgcgtacctgtatattccaatcatcattttg

SEQ ID NO: 810334 - DNA, 75 bp, synthetic construct
  source 1..75: mol_type = other DNA
gcatcgtattaaagaagagatggaaaaagttggtttcgataaagttgaaatcgacccgatgggcaacgttctcgg

SEQ ID NO: 810335 - DNA, 75 bp, synthetic construct
  source 1..75: mol_type = other DNA
agattgttgatgaaatctgcgattttgttgcgaatcagcatgctgttttcctgggcggtcagtacatccttcagg

SEQ ID NO: 810336 - DNA, 75 bp, synthetic construct
  source 1..75: mol_type = other DNA
atgaatatcagcacggaaacccgcgaaattctgcgtaaatacaaagccgtgattaatgcgcgacgccgtgaaatg

SEQ ID NO: 810337 - DNA, 75 bp, synthetic construct
  source 1..75: mol_type = other DNA
atgaatatcagcacggaaacccgcgaaattctgcacaattacagggctgtgattaatgcgcggcgtcgtgaaatg

SEQ ID NO: 810338 - DNA, 75 bp, synthetic construct
  source 1..75: mol_type = other DNA
cgtatggaaattcgcattgatgttcagggtgttagctgccacggttcggcaccagaacgtggtgataacgccatt

SEQ ID NO: 810339 - DNA, 75 bp, synthetic construct
  source 1..75: mol_type = other DNA
ttatatcggccacggcccgcgtctggtggcaatggacgctcatatcgataccgtcggcattggcaacatcaaaaa

SEQ ID NO: 810340 - DNA, 75 bp, synthetic construct
  source 1..75: mol_type = other DNA
tgatgaattaattgatataacacaggcaaggccaattcagtattgcattaatggaacgtggtataacgcggggag

SEQ ID NO: 810341 - DNA, 75 bp, synthetic construct
  source 1..75: mol_type = other DNA
cgttgcgctgtcgcagatagctgcgcagtttctattgaccgccgtctcacctggggcgaaacatgggaaggcgcg

SEQ ID NO: 810342 - DNA, 75 bp, synthetic construct
  source 1..75: mol_type = other DNA
tggcatggcgtctatggtttatgccggtaagatcattaaagacctcggtctggaagacgaatacaccctgctggt

SEQ ID NO: 810343 - DNA, 75 bp, synthetic construct
  source 1..75: mol_type = other DNA
gtctgtttggcaaagcgccggtcgttgataagtggaccttctcaactaacggcgtatccatcatgggtcgtcacg

SEQ ID NO: 810344 - DNA, 75 bp, synthetic construct
  source 1..75: mol_type = other DNA
cttttcagacctgtcatttgtctgttactgatgatgttgttgttcctgctactgctactgctactgctactgcta

SEQ ID NO: 810345 - DNA, 75 bp, synthetic construct
  source 1..75: mol_type = other DNA
gtaaatgctacatggtggttgcaggtgatatttctgatgttaataacgcagtctctgttgccagcgagtgtgcgg

SEQ ID NO: 810346 - DNA, 75 bp, synthetic construct
  source 1..75: mol_type = other DNA
caatcagcggacttaaccatgttgagcagcaccgggctgtcggcgtagtcgaaacctggagtgtcgccgcctgca

SEQ ID NO: 810347 - DNA, 75 bp, synthetic construct
  source 1..75: mol_type = other DNA
tctctacgttgagcgaatggtgctggcgctccatgatcggcttgggctctctctcatggatagatggccgtggat

SEQ ID NO: 810348 - DNA, 75 bp, synthetic construct
  source 1..75: mol_type = other DNA
tggcagtatcggtgatgctataactctggggacaccattcacaccagagcatgtctcaggtcaggttccggccag

SEQ ID NO: 810349 - DNA, 75 bp, synthetic construct
  source 1..75: mol_type = other DNA
ccggtgcgtcgcctgattgcccgtcgggcagcgcgggaactggtggcaggtgcttcaaccaactttggctttggt

SEQ ID NO: 810350 - DNA, 75 bp, synthetic construct
  source 1..75: mol_type = other DNA
tggaacaaagtgatcgatgggcaaattaacctgcgcgatgcggttaacggcaccatcagctataccaatgaagca

SEQ ID NO: 810351 - DNA, 75 bp, synthetic construct
  source 1..75: mol_type = other DNA
cccggaagagatgcgcttttttaaagaagcggtgttcaaatatgcgctgtatgagccgggattactggagccgga

SEQ ID NO: 810352 - DNA, 75 bp, synthetic construct
  source 1..75: mol_type = other DNA
ttggggcgatcgcgtcaacgtcagtttctctaccctaacttgtctggaagtgatggcgggcggcgtttcaaaagg

SEQ ID NO: 810353 - DNA, 75 bp, synthetic construct
  source 1..75: mol_type = other DNA
taggtgttcacgctgatggcggttttagcgaatatgcagtcgttccggcgaagaatgcgtggaaaattcccgatg

SEQ ID NO: 810354 - DNA, 75 bp, synthetic construct
  source 1..75: mol_type = other DNA
tacccaggcggaaatgttcaccggctttgatggattttggattaacccagccatagcaacagtgggcgggggagc

SEQ ID NO: 810355 - DNA, 75 bp, synthetic construct
  source 1..75: mol_type = other DNA
aaactgggctacagcctgaaggattgcattgcgtttggtgacgggatgaacgacgccgaaatgctgtcgatggcg

SEQ ID NO: 810356 - DNA, 75 bp, synthetic construct
  source 1..75: mol_type = other DNA
tccggaactggaagtcattgggactaatgccgaagacgcggtgccgcattatctgcgtaagctctatttatcgta

SEQ ID NO: 810357 - DNA, 75 bp, synthetic construct
  source 1..75: mol_type = other DNA
ggaagcatttttattatgacaagataaataaagacgacatcgtgattaacgatatcgcggtttccctatcaaata

SEQ ID NO: 810358 - DNA, 75 bp, synthetic construct
  source 1..75: mol_type = other DNA
tctgtcgctttgccggccatctttcgcacttctacagggtcgcccaacatgcggttctttgcagccagctagtgc

SEQ ID NO: 810359 - DNA, 75 bp, synthetic construct
  source 1..75: mol_type = other DNA
tctgtcgctttgctggccatctttcgcacttctacagggtcgcccaacatgcggtcctttgcagccagctggtgc

SEQ ID NO: 810360 - DNA, 75 bp, synthetic construct
  source 1..75: mol_type = other DNA
tctgtcgctttgcaggccatctttcgcacttctacagggtcgcccaacatgcggttctttgcagccagctcgtgc

SEQ ID NO: 810361 - DNA, 75 bp, synthetic construct
  source 1..75: mol_type = other DNA
ggcggccgccagttagatggcgtactctcttctgcccgtgcgctgcctgctattgcggatgcggtgaaaggcgat

SEQ ID NO: 810362 - DNA, 75 bp, synthetic construct
  source 1..75: mol_type = other DNA
cgtcgaaggatgcgggattaatgcaatttgccaatgggacacaaatacctattggtacgttaggggcagcaattg

SEQ ID NO: 810363 - DNA, 75 bp, synthetic construct
  source 1..75: mol_type = other DNA
tctgtcgctttgccggccatctttcgcacttctacagggtcgcccaacatgcggtgctttgcagccagcttgtgc

SEQ ID NO: 810364 - DNA, 75 bp, synthetic construct
  source 1..75: mol_type = other DNA
ttatgagcacgcctgtgaaatatgccgatctcatcatgctggcaaccgaacgccgcgatctcgggcttgatgatg

SEQ ID NO: 810365 - DNA, 75 bp, synthetic construct
  source 1..75: mol_type = other DNA
ctgaaacgccttcttcctgactataaacggatggaagaaaaaatagacgccgtaatccgtgagaaatacgggtta

SEQ ID NO: 810366 - DNA, 75 bp, synthetic construct
  source 1..75: mol_type = other DNA
tgccaggacatccccgcaccactgaaacgccttcttcctgactataaacggatggaagaaaaaatagatgcagta

SEQ ID NO: 810367 - DNA, 75 bp, synthetic construct
  source 1..75: mol_type = other DNA
aacgccttcttcctgactataaacggatggaagaaaaaatagatgccgtaatccgtgagaaatacgggttacccc

SEQ ID NO: 810368 - DNA, 75 bp, synthetic construct
  source 1..75: mol_type = other DNA
aaagttattccactggctccgagccatgcctacgggatgtttatggaacgttttaacgagttatcggagttacgc

SEQ ID NO: 810369 - DNA, 75 bp, synthetic construct
  source 1..75: mol_type = other DNA
tatcaatatgccgtgggtgatcctctcttccggtgtcgacgaaaaactgttcccgcgtgccgtacgcgtggcaat

SEQ ID NO: 810370 - DNA, 75 bp, synthetic construct
  source 1..75: mol_type = other DNA
gcttctccagtgaaccgcctgaagtgattcagcaaggaattaccggaaaagtgatcttacccagcaatagtggac

SEQ ID NO: 810371 - DNA, 75 bp, synthetic construct
  source 1..75: mol_type = other DNA
cgggatttaacggcgcgttaatcatcgacgacccattaaaacccgctgacgcttactctgacgtggtgagaaagc

SEQ ID NO: 810372 - DNA, 75 bp, synthetic construct
  source 1..75: mol_type = other DNA
aagcaagcaaacggtacgaagatgtttgtctcaggtcatcacatagctatccgcgatgcactacaacgcgttatt

SEQ ID NO: 810373 - DNA, 75 bp, synthetic construct
  source 1..75: mol_type = other DNA
taaccgccgcgcaccggatgcagataacgcaggacaagatccgcacggtgatagccatcgacccggcgacaacat

SEQ ID NO: 810374 - DNA, 75 bp, synthetic construct
  source 1..75: mol_type = other DNA
ggcggtaagaatgctcagtattctgttgatggtgactattcaggccgcatgtcgcctaacgactgggcgcaagca

SEQ ID NO: 810375 - DNA, 75 bp, synthetic construct
  source 1..75: mol_type = other DNA
cctgtacacgctggaaaatcaaatgatggaatacgttccagctaccgctaaaaaatcacctgaccgcctcgacgc

SEQ ID NO: 810376 - DNA, 75 bp, synthetic construct
  source 1..75: mol_type = other DNA
gaccatgatcgcaactatcaatatgatggcgcggtccctcgcaataaatccccgcacgcgttttcttcatgtctc

SEQ ID NO: 810377 - DNA, 75 bp, synthetic construct
  source 1..75: mol_type = other DNA
ctggcggagttgcaatatacccgcaacgaccaggcttttcagcgcgggactttccgtgtacgtggcgaggtgatt

SEQ ID NO: 810378 - DNA, 75 bp, synthetic construct
  source 1..75: mol_type = other DNA
ttatgactactatcagccagaagcctacgtaccgagttctgacactttcattgagaaagatgcttcggtaaacga

SEQ ID NO: 810379 - DNA, 75 bp, synthetic construct
  source 1..75: mol_type = other DNA
catcaatggcgaaagcgattggcgaaaccgaacgtcgccgcgagaaacagcagaagtacaacgaggaacacggca

SEQ ID NO: 810380 - DNA, 75 bp, synthetic construct
  source 1..75: mol_type = other DNA
aatggtgagattacccggctcatcattaacattcccccagggtacggtaaaaccatgattgcgaccattaacatg

SEQ ID NO: 810381 - DNA, 75 bp, synthetic construct
  source 1..75: mol_type = other DNA
tagctatgcccgtcgatcaggaattaataaatatcatattaaatgaagcgggaaatccaccgccgcataaagcca

SEQ ID NO: 810382 - DNA, 75 bp, synthetic construct
  source 1..75: mol_type = other DNA
agccgtgacgatgctgttaccgaactctggaagctgaagcgtcgtggcgaagctgataatgtggtggctgacgag

SEQ ID NO: 810383 - DNA, 75 bp, synthetic construct
  source 1..75: mol_type = other DNA
aagcaggcaaacggcgcgaagatgttaatatcaggccatcaaatagccatccatgatgcgctacaacgtgttatt

SEQ ID NO: 810384 - DNA, 75 bp, synthetic construct
  source 1..75: mol_type = other DNA
tgtttgatacccgcatggccaacgcgcaatacgtcgggctggataactttgcccgcctgtttgccgataacgtct

SEQ ID NO: 810385 - DNA, 75 bp, synthetic construct
  source 1..75: mol_type = other DNA
gtgtttgatatcggttttagcgaactgctattggtattcattatcggcctcgttgttttggggccgcaacgactg

SEQ ID NO: 810386 - DNA, 75 bp, synthetic construct
  source 1..75: mol_type = other DNA
aaaccttactttccgcctgccagaaacttaacgatcagatgaagatgccgtgggtaattctttcttctggcgtcg

SEQ ID NO: 810387 - DNA, 75 bp, synthetic construct
  source 1..75: mol_type = other DNA
tgaaattccgaccccggcagtgggggaagttcgagtaaaagtgaaactcgcgggaatttgtggatcggatagtca

SEQ ID NO: 810388 - DNA, 75 bp, synthetic construct
  source 1..75: mol_type = other DNA
gatcaaaaacattgctgcaaagtcttactcactttttctggtaatgactccaacttattgatagtgttttatgtt

SEQ ID NO: 810389 - DNA, 75 bp, synthetic construct
  source 1..75: mol_type = other DNA
agcattccggcctcgacgcgggaagcggcgctgatggagggggctacccgcacgcaggtcttttttaaggtcacg

SEQ ID NO: 810390 - DNA, 75 bp, synthetic construct
  source 1..75: mol_type = other DNA
caacatccatgaagctgacgcgatggttatcgaaaccaaccagggcggcgaaatggcagaggccacgctgcgtaa

SEQ ID NO: 810391 - DNA, 75 bp, synthetic construct
  source 1..75: mol_type = other DNA
gcaatgattattgatgaccccctgaaaccagctgacgcttattctgatgtggtgcgaaagcaggttaataccaat

SEQ ID NO: 810392 - DNA, 75 bp, synthetic construct
  source 1..75: mol_type = other DNA
cgcaatagaaccccgcaccagattcctgcatgtatcgtattcacacggactcgccttgcttaattcctcagagac

SEQ ID NO: 810393 - DNA, 75 bp, synthetic construct
  source 1..75: mol_type = other DNA
gcggatcactcaagagcttgtccgtacggtcgtggcaatcgacccgcaggccaccaacagcgaagcgagtgacga

SEQ ID NO: 810394 - DNA, 75 bp, synthetic construct
  source 1..75: mol_type = other DNA
gttatcgatggtgagattacgcgcctgatcatcaacgttccgcctgggtacacgaagacggaactggcgaccatc

SEQ ID NO: 810395 - DNA, 75 bp, synthetic construct
  source 1..75: mol_type = other DNA
atggctgccattaatacgaaagtcaaaaaagccgttatccccgttgcgggattaggaaccaggatgttgccggcg

SEQ ID NO: 810396 - DNA, 75 bp, synthetic construct
  source 1..75: mol_type = other DNA
tgtgaaccttgacgaacagcgtgaagggtacgcctcgtttgaatcacggggttgggacattctgacgcagaatct

SEQ ID NO: 810397 - DNA, 75 bp, synthetic construct
  source 1..75: mol_type = other DNA
accccgccgttaaccctgatctctatgtgaatcttgatgaacaacgcgagggatacgcgccgattgaatcacggg

SEQ ID NO: 810398 - DNA, 75 bp, synthetic construct
  source 1..75: mol_type = other DNA
gcttggtgcgaatttgcaggccaaaatttcgcgcagtttcgagccactggaaaacgcgctggcccatgtaaaaaa

SEQ ID NO: 810399 - DNA, 75 bp, synthetic construct
  source 1..75: mol_type = other DNA
tttgccgctatcgctgacttcgacatggtgcgtaacgcggtagacgcggctaaagcactgggcgttgatgctcgc

SEQ ID NO: 810400 - DNA, 75 bp, synthetic construct
  source 1..75: mol_type = other DNA
ttaccggacaccattttgacgaaaaatatcgccgaactgtctggtggtgaaaaacaacgcatctcattgattcgt

SEQ ID NO: 810401 - DNA, 75 bp, synthetic construct
  source 1..75: mol_type = other DNA
ccagaaatctaccgccagcaagtctcttactgcgcccagacgccgacgctgtttggcgatacggtatacgataat

SEQ ID NO: 810402 - DNA, 75 bp, synthetic construct
  source 1..75: mol_type = other DNA
aaaatgtccggttagtccggttaagccagttacaactatcgaacctgctgagtcaatcttcttacgactggagaa

SEQ ID NO: 810403 - DNA, 75 bp, synthetic construct
  source 1..75: mol_type = other DNA
ggattttttgttcttcctccaagcccagatactcctgtggataatcgtattcactcacccaaaaagtataagagt

SEQ ID NO: 810404 - DNA, 75 bp, synthetic construct
  source 1..75: mol_type = other DNA
cgggtgttgcattatgccttttaacggggatgcgtgacccttttaaaccgtcggaggatatatgccggattagcg

SEQ ID NO: 810405 - DNA, 75 bp, synthetic construct
  source 1..75: mol_type = other DNA
taacgctgagaaccggaaaaaactgcgaaccgccacagtggttgtggcaacggcaaggagataaaaatgaagcaa

SEQ ID NO: 810406 - DNA, 75 bp, synthetic construct
  source 1..75: mol_type = other DNA
atgccgctggcgcggcatatcctggtgacgatatccgaatcgttatatactgtgtatatacgtagtaatgacgag

SEQ ID NO: 810407 - DNA, 75 bp, synthetic construct
  source 1..75: mol_type = other DNA
atgatttcaaaatccgtttataatcgcctcatgatacaaatttgtttcatgcaaacgggacttaagatgaagtgt

SEQ ID NO: 810408 - DNA, 75 bp, synthetic construct
  source 1..75: mol_type = other DNA
gacagcttgttgatactggcaggcgcattgattgcccagggggttatggattttctgcctacgattgcgattctg

SEQ ID NO: 810409 - DNA, 75 bp, synthetic construct
  source 1..75: mol_type = other DNA
tggttatggttttgaagccgactggtccgaattttacaccaccaccagaaaaccttcagcaggagatgttggtgc

SEQ ID NO: 810410 - DNA, 75 bp, synthetic construct
  source 1..75: mol_type = other DNA
gtgaacacattttcagtttcccgtctggcgctggcattggcttttggcgtgacgctgacagcctgtagctcaacc

SEQ ID NO: 810411 - DNA, 75 bp, synthetic construct
  source 1..75: mol_type = other DNA
cggtggcctgctgcatgtggcggaatgcaacccgggaacgaacgtcacctttctgccgttgccgcggtttaagcg

SEQ ID NO: 810412 - DNA, 75 bp, synthetic construct
  source 1..75: mol_type = other DNA
gcgtatgcaaatagtgcatccataccagacagtgaaactggttgtggcattattccactggcgggtgctgtgata

SEQ ID NO: 810413 - DNA, 75 bp, synthetic construct
  source 1..75: mol_type = other DNA
actggtcggaattttatactacaacacgtaaaccatctgcgggagatgttggggcatataccaaagcagaatgta

SEQ ID NO: 810414 - DNA, 75 bp, synthetic construct
  source 1..75: mol_type = other DNA
agttagcggcggcgctgggaaacgacccgaattttgcgaccaccatgactaaagcgcttgcgggtaagcaaccga

SEQ ID NO: 810415 - DNA, 75 bp, synthetic construct
  source 1..75: mol_type = other DNA
ttgccgccaaaggttcaccgattcagccaacgctggattcactgaaaggtaaacatgttggtgtgctgcagggat

SEQ ID NO: 810416 - DNA, 75 bp, synthetic construct
  source 1..75: mol_type = other DNA
gatggtagggcgaggcgagcgcatcatcggtgtaataaaagacgggcaaaagaaatggcgacgggtgcagcaaaa

SEQ ID NO: 810417 - DNA, 75 bp, synthetic construct
  source 1..75: mol_type = other DNA
ctaaagaaaatggcagttggctttgcctgattgacttagaacacgcactacgcgtcgctggcattcgcatcaaag

SEQ ID NO: 810418 - DNA, 75 bp, synthetic construct
  source 1..75: mol_type = other DNA
tgtaatccaggctcgggggttacgtttctgcctctgtcgcgatttatccgccgctttaaccgcgtggagttctgg

SEQ ID NO: 810419 - DNA, 75 bp, synthetic construct
  source 1..75: mol_type = other DNA
ttaaatactaaagtaaaaagccaagataaacactggagcgacaagcttgactattttcagcgtcaggctaagagg

SEQ ID NO: 810420 - DNA, 75 bp, synthetic construct
  source 1..75: mol_type = other DNA
gcatttgtattttggataaaactggaagatatgataaggaaatagaagaattttctaaaaatataatttcattgg

SEQ ID NO: 810421 - DNA, 75 bp, synthetic construct
  source 1..75: mol_type = other DNA
gctgccactgagcgcgaagcccgcgcccagttgccgcacgcacatcttatttttgtcgcccgtattcgccagggg

SEQ ID NO: 810422 - DNA, 75 bp, synthetic construct
  source 1..75: mol_type = other DNA
accgtaccggctgcggactgttgctcgatgtgaataacctctatatcagcagcgtgaatcacaatcgcgatccgt

SEQ ID NO: 810423 - DNA, 75 bp, synthetic construct
  source 1..75: mol_type = other DNA
gtgaggcagcaatggcagaaaacagaatgaaagaaggagccaggcatgcaaaacagtctgtaccaggcactgctt

SEQ ID NO: 810424 - DNA, 75 bp, synthetic construct
  source 1..75: mol_type = other DNA
atagcctggtctttactgtgttgctggcaatcccgttgggaatttatttccttggcggcgaagagcagtaagtaa

SEQ ID NO: 810425 - DNA, 75 bp, synthetic construct
  source 1..75: mol_type = other DNA
acgtccggggctttttacccacgttgggctgggatcgtttgttgatccacgcaatggcggcggtaagtcgaatga

SEQ ID NO: 810426 - DNA, 75 bp, synthetic construct
  source 1..75: mol_type = other DNA
ggatgatgattccgttctttcagcagttcagggagatgggggagaaagacaaagcagccggagtatcagcagaaa

SEQ ID NO: 810427 - DNA, 75 bp, synthetic construct
  source 1..75: mol_type = other DNA
aatcgttcttacaggatgcacaccaaagaccagcctggaacgacatacccggcattatgtttatgcttcagatga

SEQ ID NO: 810428 - DNA, 75 bp, synthetic construct
  source 1..75: mol_type = other DNA
aagctactgttaaagctgttcctgatcagcttccccctacggaagataataaacagccttcttttgatgctcttg

SEQ ID NO: 810429 - DNA, 75 bp, synthetic construct
  source 1..75: mol_type = other DNA
atgtgggacagcatgcttgttcctctgttgaaagagaggccggctctgacaccaacaactctgctggagatgcta

SEQ ID NO: 810430 - DNA, 75 bp, synthetic construct
  source 1..75: mol_type = other DNA
cagcaggttatgcggcacaaccgtaacaatcaggatctggtcaaggaagaacgtcttcatctgaaaccgctgccg

SEQ ID NO: 810431 - DNA, 75 bp, synthetic construct
  source 1..75: mol_type = other DNA
gaattgagtctcgcaatagcaaaggcgggggagattgccgaatccaacatgatgattgacagcacggcaggtgta

SEQ ID NO: 810432 - DNA, 75 bp, synthetic construct
  source 1..75: mol_type = other DNA
attaatcatgcggataaggtgattacactgcaaccgcatgccggagaaatgcaggaagcacgctatgaactcgca

SEQ ID NO: 810433 - DNA, 75 bp, synthetic construct
  source 1..75: mol_type = other DNA
atatcgccgagctatctggtggtgaaaaacaacgcatctcattgattcgtaacctgcaatttatgccgaaggttt

SEQ ID NO: 810434 - DNA, 75 bp, synthetic construct
  source 1..75: mol_type = other DNA
ttttagcgccgcctacgcacagcacagcggtcaggaagtactgtatatcactgaacgtgcggtattccagttaac

SEQ ID NO: 810435 - DNA, 75 bp, synthetic construct
  source 1..75: mol_type = other DNA
gattatttcagatttataaatggtaattcttacttttcaaataaactaagcacagttctacatgaaaacactatt

SEQ ID NO: 810436 - DNA, 75 bp, synthetic construct
  source 1..75: mol_type = other DNA
ctaaccgctcccttattaagaataagatggaagatatcccgctacaacagattcacgatattatatctaagttta

SEQ ID NO: 810437 - DNA, 75 bp, synthetic construct
  source 1..75: mol_type = other DNA
gacgttcccacgcccagctcccatgagcgaagcggagttccgttgggagcacaatcaggatgcaatggcggtaga

SEQ ID NO: 810438 - DNA, 75 bp, synthetic construct
  source 1..75: mol_type = other DNA
gctgccactgagcgcgaagcacgcgcgcagctgccgcacgcacatctgatttttgtcgcccgtatccgtcagggg

SEQ ID NO: 810439 - DNA, 75 bp, synthetic construct
  source 1..75: mol_type = other DNA
attctcgaaaggtaacgctctgtgctctaatatatttttcatctctcgcagtgaagtaagtcaagatatgaagga

SEQ ID NO: 810440 - DNA, 75 bp, synthetic construct
  source 1..75: mol_type = other DNA
aacgtaatgtcctccaatattttccttatttcccgagggaaactattgcaacctattaaagattactatttttcc

SEQ ID NO: 810441 - DNA, 75 bp, synthetic construct
  source 1..75: mol_type = other DNA
gcaatcctttcaatacggtagagaggaaaaaagtcggcatcatgctgaaagtcacgccgcagattaacgaaggta

SEQ ID NO: 810442 - DNA, 75 bp, synthetic construct
  source 1..75: mol_type = other DNA
cactgcgcgaaggcgtgccttatcaaagtttgtggctgagtgtagaacagggtgtacataacggcatgatgctgg

SEQ ID NO: 810443 - DNA, 75 bp, synthetic construct
  source 1..75: mol_type = other DNA
gcgacattctgccgtatatggccttccgtccaattatcaaccagccgcgcctgatggaaagtagcctttttacgc

SEQ ID NO: 810444 - DNA, 75 bp, synthetic construct
  source 1..75: mol_type = other DNA
atgaacgagttagacggcatcaaacagttcaccactgtcgtggcagacagcggcgatattgagtccattcgccat

SEQ ID NO: 810445 - DNA, 75 bp, synthetic construct
  source 1..75: mol_type = other DNA
accagcctcgacgtcgtgtttggcgagcgcaaactgaaaaccaccgtgctggcaaacgatggtgagctgatcgtg

SEQ ID NO: 810446 - DNA, 75 bp, synthetic construct
  source 1..75: mol_type = other DNA
cgcaccaacagtgtgattgtcagtggtgacccggccacgcgggacaaaatgcgccgcctgatccgtcggctggac

SEQ ID NO: 810447 - DNA, 75 bp, synthetic construct
  source 1..75: mol_type = other DNA
gctggcaatggcacgcgcttttcacgaaaagaacaccccgaggcattgctttcgctggtgggaaaacattcctcc

SEQ ID NO: 810448 - DNA, 75 bp, synthetic construct
  source 1..75: mol_type = other DNA
ctgcgctctggcaacacgactttgccgcgctggcggatcctcatattgttagcgttgtttactttgtcatgtttg

SEQ ID NO: 810449 - DNA, 75 bp, synthetic construct
  source 1..75: mol_type = other DNA
gctgataagcgacatgtcatgatacctaaagaaaatggcagttggctttgcctgattgacttagaacacgcacta

SEQ ID NO: 810450 - DNA, 75 bp, synthetic construct
  source 1..75: mol_type = other DNA
acagaatggcataaaatcgttttgttcggaaaacttgctgaaattgcgagtgagtatttacgaaaaggttctcag

SEQ ID NO: 810451 - DNA, 75 bp, synthetic construct
  source 1..75: mol_type = other DNA
cgacgattcacagtcctcaaatggctgggggcaatcaaaccaacctcaaaaccaccagcaatacagcggtggcgg

SEQ ID NO: 810452 - DNA, 75 bp, synthetic construct
  source 1..75: mol_type = other DNA
accaccagcaatacagcggtggcagtaaacctcagagcaacgccaatagcgaacctccaatggactttgaagacg

SEQ ID NO: 810453 - DNA, 75 bp, synthetic construct
  source 1..75: mol_type = other DNA
actttcaagctataaaaccgcaccaattattgagcattctgttagtgagaataaaataaaaaatactgagcaagt

SEQ ID NO: 810454 - DNA, 75 bp, synthetic construct
  source 1..75: mol_type = other DNA
tttgtggagctcaccaaccgcagtggcaaacgggaatactggggaaacggcctggaagaactggtcaaaaaccat

SEQ ID NO: 810455 - DNA, 75 bp, synthetic construct
  source 1..75: mol_type = other DNA
tacggaggcggaaaaagcacagggactgaccgatttcaatgacctggacgccagcaggggacgagacgcctttca

SEQ ID NO: 810456 - DNA, 75 bp, synthetic construct
  source 1..75: mol_type = other DNA
cgactcgctacgaccttcgatatggacacccgataaatgcagatgagcgacatgtcatgatacctaaagaaaatg

SEQ ID NO: 810457 - DNA, 75 bp, synthetic construct
  source 1..75: mol_type = other DNA
gtggtggcctatgccaaccaggatttagtctattccgatctggctgcaggacgtctggatgctgcgttacaagat

SEQ ID NO: 810458 - DNA, 75 bp, synthetic construct
  source 1..75: mol_type = other DNA
ccttttccccgtgctggtcacaccggtcaaccagaaactggttgttaccgcaatgacaaaggacggtccgcgcta

SEQ ID NO: 810459 - DNA, 75 bp, synthetic construct
  source 1..75: mol_type = other DNA
accaccagcaatacagcggtggcggtaaacctcagagcaacgccaataacgaacctccaatggactttgaagacg

SEQ ID NO: 810460 - DNA, 75 bp, synthetic construct
  source 1..75: mol_type = other DNA
agatgcctggttggattacgatccggtgagtcttatttcacaaggtcaacgcgttgcggaaatcatggttgatca

SEQ ID NO: 810461 - DNA, 75 bp, synthetic construct
  source 1..75: mol_type = other DNA
cgaagtgaaagcgcgtccggcgcgtatcactgagtccgagttcctgtggcagcataaccaggatccaatggcagt

SEQ ID NO: 810462 - DNA, 75 bp, synthetic construct
  source 1..75: mol_type = other DNA
gtgttatctattatggttagtgcgttaggaacatctcttgggtttataattggctattattttaaagacaaaaaa

SEQ ID NO: 810463 - DNA, 75 bp, synthetic construct
  source 1..75: mol_type = other DNA
ttctgatgcgcctgcaggacaaaatcaatccggaacgtcacctgcgcaaattaaccgaagagctggcgattgccg

SEQ ID NO: 810464 - DNA, 75 bp, synthetic construct
  source 1..75: mol_type = other DNA
atgaatatcaagacgttaatccgttatcacgagggttacgaccacagctattattttgtctccagttttattggc

SEQ ID NO: 810465 - DNA, 75 bp, synthetic construct
  source 1..75: mol_type = other DNA
gtgagtcttatttcacaaggtcaacgcgttgcggaaatcatggttgatcaggggttgagtgatgatttttacgcg

SEQ ID NO: 810466 - DNA, 75 bp, synthetic construct
  source 1..75: mol_type = other DNA
agccgtgctggatatgctctgtgaggagaatgaagcaacccccgaacacgcccccatgcaacttgctaaggcgtt

SEQ ID NO: 810467 - DNA, 75 bp, synthetic construct
  source 1..75: mol_type = other DNA
aaatgtatctgtacggtacaaaagatatcgcaaaagatgaaaatcatgcgctgcactggtacgaaaaagcggcgc

SEQ ID NO: 810468 - DNA, 75 bp, synthetic construct
  source 1..75: mol_type = other DNA
tccatttacagccttgacgtgcgacgaaactccagtttttagtggttcagtgcttaacttagtggcacattctgt

SEQ ID NO: 810469 - DNA, 75 bp, synthetic construct
  source 1..75: mol_type = other DNA
tgctaaatgccataaaattaaaaggtcttttttattatccatcttctgtataccagtcctgcttacatgctgcag

SEQ ID NO: 810470 - DNA, 75 bp, synthetic construct
  source 1..75: mol_type = other DNA
gtattacgaaggtgatgaggtttcacaggatctaaaattagcctttaactggtttacccgcgccgcgcagcataa

SEQ ID NO: 810471 - DNA, 75 bp, synthetic construct
  source 1..75: mol_type = other DNA
ttaaaaggtcttttttattatccatcttctgtattccagtcctgcttacatgctgcagagcaaggctattcactt

SEQ ID NO: 810472 - DNA, 75 bp, synthetic construct
  source 1..75: mol_type = other DNA
aggcatccgcaccaccggtcacacccgtaccgccggcaacagaaacgcagaacgctccggcacccacaaccagcg

SEQ ID NO: 810473 - DNA, 75 bp, synthetic construct
  source 1..75: mol_type = other DNA
cgctgcaggcgatggatttcagcaccatcacagataaagccacatataacgccatcaactggccggagcgtcccg

SEQ ID NO: 810474 - DNA, 75 bp, synthetic construct
  source 1..75: mol_type = other DNA
tttgttttcgactacaaacttaaagcggaagatgaacgcgatgccctgttaaaacaggtcagcatcatgaccagc

SEQ ID NO: 810475 - DNA, 75 bp, synthetic construct
  source 1..75: mol_type = other DNA
ctaaccgccgcattaccgcaccgggttactggttctaccgcaatgatgaatttgtttttgactacaaacttaaag

SEQ ID NO: 810476 - DNA, 75 bp, synthetic construct
  source 1..75: mol_type = other DNA
ctgaattcaaatttgtgcgttaagggaattcctcgtcgtttcaatgaagatctgatggataaattcaggaagtcc

SEQ ID NO: 810477 - DNA, 75 bp, synthetic construct
  source 1..75: mol_type = other DNA
aaaaatgaaagcctggcgtatatatgcgaaatcgttgcaggcgatggatttcagtgccgttactgataaagtctc

SEQ ID NO: 810478 - DNA, 75 bp, synthetic construct
  source 1..75: mol_type = other DNA
atgttacatttaaaaaatattacagcgggtaatccaaaaactgttgagcaatatcagatgacaaaacgatattcg

SEQ ID NO: 810479 - DNA, 75 bp, synthetic construct
  source 1..75: mol_type = other DNA
ctaaccgccgcattaccgcaccgggttactggttttaccgcaatgatgaatttgttttcgactacaaacttaaag

SEQ ID NO: 810480 - DNA, 75 bp, synthetic construct
  source 1..75: mol_type = other DNA
taccggtatgacagccagtcagcacaggtattcagtggtctgaatttgtctgtggctccgggagaaagtgtggct

SEQ ID NO: 810481 - DNA, 75 bp, synthetic construct
  source 1..75: mol_type = other DNA
tatcttacctggatagttctcggttttaccatggtttacgttcttattcgtctggtgacatacggctattaccgg

SEQ ID NO: 810482 - DNA, 75 bp, synthetic construct
  source 1..75: mol_type = other DNA
ccatcaagccgctgtataccgaagccgatctcgataatctggaggtgacgggtacccttcctggtttgccaccct

SEQ ID NO: 810483 - DNA, 75 bp, synthetic construct
  source 1..75: mol_type = other DNA
gttaaaacaggtcagcatcatgaccagcgaatgggaaaaagacctgctgctgggattaatcagcgacgaagacag

SEQ ID NO: 810484 - DNA, 75 bp, synthetic construct
  source 1..75: mol_type = other DNA
cattctgccaggttacagataaagcatcgtatgccgcaattgcgtggccagaattaccgcagaacattgacgaga

SEQ ID NO: 810485 - DNA, 75 bp, synthetic construct
  source 1..75: mol_type = other DNA
ggatccctcataaatttaatgaggaccaaatgaataaatttaaaaattcaaaagcggagactgaagtctttacta

SEQ ID NO: 810486 - DNA, 75 bp, synthetic construct
  source 1..75: mol_type = other DNA
cgcagaggccttcatgctgagttgtccaacattttggaggactgccgcatagaacgcgccatgatggagctcttc

SEQ ID NO: 810487 - DNA, 75 bp, synthetic construct
  source 1..75: mol_type = other DNA
acaccgatggcaagaccatcgtggttccgaatattcccgacgactatccgcacatggatgctgtctggggatatt

SEQ ID NO: 810488 - DNA, 75 bp, synthetic construct
  source 1..75: mol_type = other DNA
aaattcatttgaacagtgctcatttctgggggagaagcgtgtattaataccacatggctatgatgaaagattaca

SEQ ID NO: 810489 - DNA, 75 bp, synthetic construct
  source 1..75: mol_type = other DNA
ggacggcagacctgccggctggtacagggattatcgcagcgcggatgattcgccggtcaactggaccttctccgg

SEQ ID NO: 810490 - DNA, 75 bp, synthetic construct
  source 1..75: mol_type = other DNA
agtcgaactgtggataccaacacgtaaaggccagcggctgtttctgtttcgcaataaatttgtccacagcggcag

SEQ ID NO: 810491 - DNA, 75 bp, synthetic construct
  source 1..75: mol_type = other DNA
ctatgtggtatgcagcttttgaactcaccaagacccgtgaagagcgaaaaatgttgatcgtagtgactgacgggc

SEQ ID NO: 810492 - DNA, 75 bp, synthetic construct
  source 1..75: mol_type = other DNA
gctggcagcgattaagatgttaaaagcggaagggattccgacgctgggtacggcagtgtatggtgcggcacaagg

SEQ ID NO: 810493 - DNA, 75 bp, synthetic construct
  source 1..75: mol_type = other DNA
tcagatgattagctatccggctgtcgatgctgccgtggcgaagtttgagcaggactggcagggggcgtttggcag

SEQ ID NO: 810494 - DNA, 75 bp, synthetic construct
  source 1..75: mol_type = other DNA
acgttgttgcggtgaaggcgctgtcacgtatttttccgctggcgggtgtgaccactaacccaagcattatcgccg

SEQ ID NO: 810495 - DNA, 75 bp, synthetic construct
  source 1..75: mol_type = other DNA
agaacttgaacatcctgttgtagcagaactggctgcacttgctcacgatattggcaaccctccgtttggtcattc

SEQ ID NO: 810496 - DNA, 75 bp, synthetic construct
  source 1..75: mol_type = other DNA
aaacattatcatcgaagatttatttaatttttataattatagagataacatagaattcatatcccctcaactgta

SEQ ID NO: 810497 - DNA, 75 bp, synthetic construct
  source 1..75: mol_type = other DNA
cgggtaaaaaaccgctggacgttgtgcttccgcaacttcacgaggcgatgggcggtcaggggcgtctgtttgccc

SEQ ID NO: 810498 - DNA, 75 bp, synthetic construct
  source 1..75: mol_type = other DNA
cttagatagtgatgacttatggcgaccaaataaactagaagtacaattagagcatatggtttcaggtggttatcc

SEQ ID NO: 810499 - DNA, 75 bp, synthetic construct
  source 1..75: mol_type = other DNA
atgtgaaaacatggggttgcggaggttttttgaatgagacgaacatttacagcagaggaaaaagcctctgttttt

SEQ ID NO: 810500 - DNA, 75 bp, synthetic construct
  source 1..75: mol_type = other DNA
aactggccggagcgcgtcggcaaactggtgctgatgggcggcggtacaggtggcatgagtttgtttacgccgatg

SEQ ID NO: 810501 - DNA, 75 bp, synthetic construct
  source 1..75: mol_type = other DNA
cgcaacatcagacaggagacagtctgcggtacagttacagaggcaatacagaaccaactgagcaccatagcgata

SEQ ID NO: 810502 - DNA, 75 bp, synthetic construct
  source 1..75: mol_type = other DNA
taggtgtgcacgctgacggtggtttcagtgaatatgctgtggttccggcaaaaaatgcgtggaaaattcctgaag

SEQ ID NO: 810503 - DNA, 75 bp, synthetic construct
  source 1..75: mol_type = other DNA
tgaaatacccaccccgtcagcgggtgaagtacgagtaaaagtgaaacttgccggaatttgtggttcagatagcca

SEQ ID NO: 810504 - DNA, 75 bp, synthetic construct
  source 1..75: mol_type = other DNA
gttatccggcattgcactgtcgggcatgtggcagttacccgccgttgtttgacgagcaacaatttcgtgactggt

SEQ ID NO: 810505 - DNA, 75 bp, synthetic construct
  source 1..75: mol_type = other DNA
cctggggttttcagggaacaacttatcacggctggtggaaaaatcagtggcaactctggaagcagggaaaaaacc

SEQ ID NO: 810506 - DNA, 75 bp, synthetic construct
  source 1..75: mol_type = other DNA
ggagttggttgagaaacgcggagccgccagtctcgaagaggcttttatcgcttatttgcaggaagcggcagggca

SEQ ID NO: 810507 - DNA, 75 bp, synthetic construct
  source 1..75: mol_type = other DNA
gaaatcaaagcccagaccctgattgtctggggacgcaatgaccgctttgtgccgatggatgccggtctgcgcctg

SEQ ID NO: 810508 - DNA, 75 bp, synthetic construct
  source 1..75: mol_type = other DNA
cggtgaagcaaaagcccgccgcgcgaagaaagagatggttgaagcgaacctgcgtctggttatttctatcgccaa

SEQ ID NO: 810509 - DNA, 75 bp, synthetic construct
  source 1..75: mol_type = other DNA
atgtcgactctgtttacgattaatgcctgtaaaacgttcggttgccgaaatttgggattggcctcatcggaagat

SEQ ID NO: 810510 - DNA, 75 bp, synthetic construct
  source 1..75: mol_type = other DNA
tcttgacgccactcgtggcaacattcttcatctctccacgaattatacgcaacatcagacaggagacagtctgcg

SEQ ID NO: 810511 - DNA, 75 bp, synthetic construct
  source 1..75: mol_type = other DNA
gttctattcagacgataagagactgtaccaagatgatcgcatcggttccgttgcgacattggaatgactcgctcc

SEQ ID NO: 810512 - DNA, 75 bp, synthetic construct
  source 1..75: mol_type = other DNA
aggaaatgagaacgatctattcttctcaaggatcgggaaatggaatagtgaggcaaaatggcattcttataaaaa

SEQ ID NO: 810513 - DNA, 75 bp, synthetic construct
  source 1..75: mol_type = other DNA
cggaaacgagaatgatctattcttctctcgtgccgggaagtggaatagcgaaagccgctggcactcgtctaaaaa

SEQ ID NO: 810514 - DNA, 75 bp, synthetic construct
  source 1..75: mol_type = other DNA
aacgttatcgctgatctgcaacgtccaaccatggtgttggcgccgaataaaacgctggcggcccagttgtacggc

SEQ ID NO: 810515 - DNA, 75 bp, synthetic construct
  source 1..75: mol_type = other DNA
aacgaagtatgtcaacgaggctgggatacaagaatattactgggaaagcggggcgtgggcaaaatgcaactggaa

SEQ ID NO: 810516 - DNA, 75 bp, synthetic construct
  source 1..75: mol_type = other DNA
cgccgtcgtccgctgtacgagcagattgacgccgtctggggcgggcgggtgttgcccaatatccgcagcacttta

SEQ ID NO: 810517 - DNA, 75 bp, synthetic construct
  source 1..75: mol_type = other DNA
gcgatgaaagatgctctcatgaaatatgagactatcgacgcaccgcagattgatgacctgatggcacgtcgcgat

SEQ ID NO: 810518 - DNA, 75 bp, synthetic construct
  source 1..75: mol_type = other DNA
ataaaactactcacggaggttccgttctgaccgcttctgaaacgatgaaattcggtgggataggcgtcgcccgta

SEQ ID NO: 810519 - DNA, 75 bp, synthetic construct
  source 1..75: mol_type = other DNA
tctagatagtgatgatttatggcataaagataaattatacattcagatctcttttatgaagtctaaaaatttagg

SEQ ID NO: 810520 - DNA, 75 bp, synthetic construct
  source 1..75: mol_type = other DNA
gggcgattaataacagccagacaccgcttggcgagattttcgctgaaaaaggcatcaagccgacattaattatcg

SEQ ID NO: 810521 - DNA, 75 bp, synthetic construct
  source 1..75: mol_type = other DNA
tggcctgtcactggcatggtttccttttccgattgcttatgttgttctgcgcttccttcttgatgatttacagca

SEQ ID NO: 810522 - DNA, 75 bp, synthetic construct
  source 1..75: mol_type = other DNA
aacgcgcacagcactatagatattgtcgatatcgcatcattaatattggcggggtctgtaccggagtctgaacat

SEQ ID NO: 810523 - DNA, 75 bp, synthetic construct
  source 1..75: mol_type = other DNA
ctgttaccgcaagcgcaacgccaggcgcatcaggcggtagtgatcccaccgtatcaacctgaaaacgcagagatt

SEQ ID NO: 810524 - DNA, 75 bp, synthetic construct
  source 1..75: mol_type = other DNA
ccgacaatgggggcttaccgtgaactacgcaaattgcctcgcggcgtcagcattgctgatgagtttgacgaacgc

SEQ ID NO: 810525 - DNA, 75 bp, synthetic construct
  source 1..75: mol_type = other DNA
caaccgtaaattacgacgggaaaaaattcacgtatccggtcgctgatgagtggccgggattctcgttatccattt

SEQ ID NO: 810526 - DNA, 75 bp, synthetic construct
  source 1..75: mol_type = other DNA
cgggccagaaactgtatgttctgctcacctttgataccacacgtggcaatattcttcacctctccactaatttta

SEQ ID NO: 810527 - DNA, 75 bp, synthetic construct
  source 1..75: mol_type = other DNA
ggaagaggtcgagagagtggtcggcatttacgcgccgcatctcggcgcgcgtcatattcatatcaccagaacgac

SEQ ID NO: 810528 - DNA, 75 bp, synthetic construct
  source 1..75: mol_type = other DNA
accgcatgacgttgccccatcaggcaggctgactaaatccgaacgcgcgcaaataccgcgtatccgctttgacct

SEQ ID NO: 810529 - DNA, 75 bp, synthetic construct
  source 1..75: mol_type = other DNA
gaatttgacgaacgcgtggaggctgcacgcgccgccgcagacagtggcgattttgcgctgtatatcagcgcgcag

SEQ ID NO: 810530 - DNA, 75 bp, synthetic construct
  source 1..75: mol_type = other DNA
caacatcaatgtgcgcatgaaacacgctgatcagcgtctggagctcgatacattacgtaaggaaatggctgtcgg

SEQ ID NO: 810531 - DNA, 75 bp, synthetic construct
  source 1..75: mol_type = other DNA
tggttctgaaagaactgccggtcatggacgggaaaatccaccgtgtcccgactgccgatgacaaaaaaggacaaa

SEQ ID NO: 810532 - DNA, 75 bp, synthetic construct
  source 1..75: mol_type = other DNA
gcggctttatgcgtaacgcgctggagagagcaaaagcagcgggttgttcgacgctggttttcaccgtggatatgc

SEQ ID NO: 810533 - DNA, 75 bp, synthetic construct
  source 1..75: mol_type = other DNA
agtagcatcaagataaatagtgaaactgttcctgtttatcagttgcgctataacggcaataacgccctgatgttc

SEQ ID NO: 810534 - DNA, 75 bp, synthetic construct
  source 1..75: mol_type = other DNA
aaacgagcagacagaaccgtcctgtacaaactggatggcaaacctgccttcattgaccgggtaaaccggctggaa

SEQ ID NO: 810535 - DNA, 75 bp, synthetic construct
  source 1..75: mol_type = other DNA
atggtatcgactggtttttcaatttcctatacgtcaagccggggacgggccgcttttcagcatgtcatcaacgcc

SEQ ID NO: 810536 - DNA, 75 bp, synthetic construct
  source 1..75: mol_type = other DNA
gctcgataacgataccggcagaccgctgaaagacactgccgcggctgttaccgcatgggcgtcaacgtggcgcat

SEQ ID NO: 810537 - DNA, 75 bp, synthetic construct
  source 1..75: mol_type = other DNA
tttttcctgctctgcgccctgtcggtatttgtatttggcgtaccgcataaaggcagtttcctgacgctcaccctg

SEQ ID NO: 810538 - DNA, 75 bp, synthetic construct
  source 1..75: mol_type = other DNA
cgcgtcagggatttagcctgcgccgtctgtttagctacagccgccgcgaagcactggaactgcgacgcgatccgg

SEQ ID NO: 810539 - DNA, 75 bp, synthetic construct
  source 1..75: mol_type = other DNA
ttgtttcacatcccggaagcggaaattcccgcgcgagtggctgaaatgagcgagcgttttaagctcaacgacgtt

SEQ ID NO: 810540 - DNA, 75 bp, synthetic construct
  source 1..75: mol_type = other DNA
acgcctgtggaactcggtgtctggatcgacggtgcgatgccgagccgcgccgaaactgtaaaaggttacgtgcag

SEQ ID NO: 810541 - DNA, 75 bp, synthetic construct
  source 1..75: mol_type = other DNA
gagacgcgctatcgctataacccggacgtaaaaagcctgccagcgattgttccggcggtgatcccgcttctgctg

SEQ ID NO: 810542 - DNA, 75 bp, synthetic construct
  source 1..75: mol_type = other DNA
tggaagaggccgaacgcttcgactggctggtagcgatgaatgccggagaagtgctggcaaccggcagcgccgaag

SEQ ID NO: 810543 - DNA, 75 bp, synthetic construct
  source 1..75: mol_type = other DNA
gaactcgacgtactggcgcgtggaacaaccataatttatgatagtaaaaaatttaactttccgactgatgatgga

SEQ ID NO: 810544 - DNA, 75 bp, synthetic construct
  source 1..75: mol_type = other DNA
gaaacggaagcccgttaaaaccgcatgaaatggcaccatcggccagactgacccggtcggaacgaatgcaaatta

SEQ ID NO: 810545 - DNA, 75 bp, synthetic construct
  source 1..75: mol_type = other DNA
cgaccgtaaattatgacgggaaaacattcacgtatccggtcgctgatgagtggccggggtattcaacagaaatgg

SEQ ID NO: 810546 - DNA, 75 bp, synthetic construct
  source 1..75: mol_type = other DNA
tggcgtagtcaacgacaatccggacatcattactaacgtttatcgcgacgacgaatggtttatgaatcgccaccg

SEQ ID NO: 810547 - DNA, 75 bp, synthetic construct
  source 1..75: mol_type = other DNA
cgaccgtaaattatgacgggaaaaaattcgcttatccggtcgctgatggatggccagggttcacaactgtaatag

SEQ ID NO: 810548 - DNA, 75 bp, synthetic construct
  source 1..75: mol_type = other DNA
gtatatcagcgcgcagggtggggcaaatgtcccgcgcgattgtcagactgtcagggtcgcccgtagcccgtcgga

SEQ ID NO: 810549 - DNA, 75 bp, synthetic construct
  source 1..75: mol_type = other DNA
ccgcaatttgccttattacagccttggcgcatggtttggcgcaacaataatgacctgtgttaaagaggtgccgtt

SEQ ID NO: 810550 - DNA, 75 bp, synthetic construct
  source 1..75: mol_type = other DNA
ctggcactttggggcgtagtgcagtggctggcgataagtgcactaaatcagtggctggcacctgagcgcaattta

SEQ ID NO: 810551 - DNA, 75 bp, synthetic construct
  source 1..75: mol_type = other DNA
acggccatggatccgctggatgctcaggcgcagtacagtgaactgtttgatcgcggtcgcgcaacgtcgctgctg

SEQ ID NO: 810552 - DNA, 75 bp, synthetic construct
  source 1..75: mol_type = other DNA
atcatgaagttgttttatcagtatgaacaacgttttggcatgcgttccaccagtctgctgaatgtgattggctcc

SEQ ID NO: 810553 - DNA, 75 bp, synthetic construct
  source 1..75: mol_type = other DNA
ccgttctggcggtcggtgcctggttgtttaatatctcgctgctgttgtcgctggtatcgattgtggtgatcatga

SEQ ID NO: 810554 - DNA, 75 bp, synthetic construct
  source 1..75: mol_type = other DNA
atgcctccaatgccgcttatgccgattccaccgggtgagttcctgcacgggatgatcaccgccagcaccagcttg

SEQ ID NO: 810555 - DNA, 75 bp, synthetic construct
  source 1..75: mol_type = other DNA
cggcattaaacaaaatgcaggcgcactcggaagaaacggtgattgtcggcgataacctgcgcaccgatattctgg

SEQ ID NO: 810556 - DNA, 75 bp, synthetic construct
  source 1..75: mol_type = other DNA
caccaacccggacacccacgggcgcggtttttatcccgcctgtggcgcgttgtgtgcagggattgagaaaatctc

SEQ ID NO: 810557 - DNA, 75 bp, synthetic construct
  source 1..75: mol_type = other DNA
gcgcgaactggccagaaagcccgaccaagatcttttcccgattgctggtacgacctatccggttgaagagaagag

SEQ ID NO: 810558 - DNA, 75 bp, synthetic construct
  source 1..75: mol_type = other DNA
tgcgctgggcattttcctgcgcgatttaacggcgatggatccgctcgatgcccaggcccagtacagcgaactgtt

SEQ ID NO: 810559 - DNA, 75 bp, synthetic construct
  source 1..75: mol_type = other DNA
aggcgcagtacagcgaactgttcgaccgtggtcgtgccacgtcgctgttactgtttgaacatgtgcacggcgaat

SEQ ID NO: 810560 - DNA, 75 bp, synthetic construct
  source 1..75: mol_type = other DNA
ttcggaagaaacggtgattgtcggcgataacctgcgtaccgacattctggcgggcttccaggccggtctggagac

SEQ ID NO: 810561 - DNA, 75 bp, synthetic construct
  source 1..75: mol_type = other DNA
cttaagcctgattccgcaaatgaacgccgggcactggtcgccgcaagtggaactagcgctcctgttggtttatcc

SEQ ID NO: 810562 - DNA, 75 bp, synthetic construct
  source 1..75: mol_type = other DNA
tcgcctcgatagcgcgaaagccgcgggtaaaaatatcagcctgaacttcaatatgagcaatggcgataacctcaa

SEQ ID NO: 810563 - DNA, 75 bp, synthetic construct
  source 1..75: mol_type = other DNA
tgccgtggtgtttaaaccgcacagaataaattgtcgcgatttcacctttaaaatagaattaaaagagaaaaaaat

SEQ ID NO: 810564 - DNA, 75 bp, synthetic construct
  source 1..75: mol_type = other DNA
gccaacagtcagcgcgccgcgctcgcggcctggctggaggaatatcccaatcaacttggcattgcattaaccgat

SEQ ID NO: 810565 - DNA, 75 bp, synthetic construct
  source 1..75: mol_type = other DNA
ccgcttttcaaccttctggcgatcagccggaggcgattcgacgtctcgaagaggggctggaagatggcctggcgc

SEQ ID NO: 810566 - DNA, 75 bp, synthetic construct
  source 1..75: mol_type = other DNA
gagtctgtgctttcggttttctgtgctcaatctttagaaaaaacctactcatacctagtttgattacatctgtgt

SEQ ID NO: 810567 - DNA, 75 bp, synthetic construct
  source 1..75: mol_type = other DNA
tatgaagaaattgtttaccgaacatgtctattcggccttctatgtacgatttataaaaaagaattattcactccc

SEQ ID NO: 810568 - DNA, 75 bp, synthetic construct
  source 1..75: mol_type = other DNA
tacggcactgacgttcaccataaaacactgggcattgtcgggatgggacggatcggcatggcgctggcacaacgt

SEQ ID NO: 810569 - DNA, 75 bp, synthetic construct
  source 1..75: mol_type = other DNA
aacgcactaaatcactggctacatcgtatccataaaacagatatcattgttctgtctgttgttctaatgcaatag

SEQ ID NO: 810570 - DNA, 75 bp, synthetic construct
  source 1..75: mol_type = other DNA
gcggcacgctggtcgccgcaagtcgaactgacgctcctgctggtttacccctttgtcagtttgttgatttgtact

SEQ ID NO: 810571 - DNA, 75 bp, synthetic construct
  source 1..75: mol_type = other DNA
ccactgaatattgtgattaagctggtggagtgtaacggtaaaccggtggcgaaactttctgacagccctggcaaa

SEQ ID NO: 810572 - DNA, 75 bp, synthetic construct
  source 1..75: mol_type = other DNA
accagcaactacgatctggcgcgtcggctttccctcacgccgatgggaacacaggcacacgaatggttccaggcg

SEQ ID NO: 810573 - DNA, 75 bp, synthetic construct
  source 1..75: mol_type = other DNA
ccggaaacgctggataaaaactgggccagccgtggctattatggctccgtcagtcataacgctcgcgcggtatat

SEQ ID NO: 810574 - DNA, 75 bp, synthetic construct
  source 1..75: mol_type = other DNA
ttgatcttaaaacgcagaaagcattagctctggaaggagaattgcgcgaaaagctggagcagatggttaaggtga

SEQ ID NO: 810575 - DNA, 75 bp, synthetic construct
  source 1..75: mol_type = other DNA
ctggtcgtagggctgacctttatgttcgccacctttattgcggtgtttacggtagataaagcaggggtaaaccgg

SEQ ID NO: 810576 - DNA, 75 bp, synthetic construct
  source 1..75: mol_type = other DNA
ggctctctgttggcatgacgatgatgtgtattgccggttatgcgatgagcgccgcgccagtggtgtggatcctgt

SEQ ID NO: 810577 - DNA, 75 bp, synthetic construct
  source 1..75: mol_type = other DNA
gctaagttcttattcccggccaagagtcagcaatgataacccttactcagaatctttgttccggactctcaaata

SEQ ID NO: 810578 - DNA, 75 bp, synthetic construct
  source 1..75: mol_type = other DNA
gggatattagttatatcccatcgtgggttaaggggcagcatttttatctctatatgatcgtcgatatttatagcc

SEQ ID NO: 810579 - DNA, 75 bp, synthetic construct
  source 1..75: mol_type = other DNA
tatattttctcccagaaaccccaagtgaattaaaaaaatggtatttcgcaacccctgcttacataatcagttatt

SEQ ID NO: 810580 - DNA, 75 bp, synthetic construct
  source 1..75: mol_type = other DNA
ttgagcgcaggacgcccgaataaaaaaatgctgggtatcgtgatgctgttatcggctggactgcttctggcgggc

SEQ ID NO: 810581 - DNA, 75 bp, synthetic construct
  source 1..75: mol_type = other DNA
gatgttgacatcccactacagttaaatggcatcacgcctgaacaattaggctttgtacgcattcacgacattcag

SEQ ID NO: 810582 - DNA, 75 bp, synthetic construct
  source 1..75: mol_type = other DNA
actcagcaaaacaggctgaatgcaaaatccagcagtggggtttaccttctgcctggagcgaaaacaccggcaaga

SEQ ID NO: 810583 - DNA, 75 bp, synthetic construct
  source 1..75: mol_type = other DNA
atgcaaaaaatcgtgatcgttgccaatggcgcaccttacgggagcgaatccttgtttaacagcttgcggctggcc

SEQ ID NO: 810584 - DNA, 75 bp, synthetic construct
  source 1..75: mol_type = other DNA
actcacgcttcctctccggccgtggaccaggtgagccaccgccgacgctgtttgattacctgcctgccgatgggt

SEQ ID NO: 810585 - DNA, 75 bp, synthetic construct
  source 1..75: mol_type = other DNA
gctcagaagcacgatcagcaatctgtgttgatgatgcgatgccgatatcatctgccctatctgaactgagccatt

SEQ ID NO: 810586 - DNA, 75 bp, synthetic construct
  source 1..75: mol_type = other DNA
cacgctgaatcatcaatttactgggaagatccggaaacaggaattttgtgtcggtgccgtccggacaaaattatt

SEQ ID NO: 810587 - DNA, 75 bp, synthetic construct
  source 1..75: mol_type = other DNA
tctcaggaaaaagatccggaggaaatggaaggccctgaacatccgcacaacgagaatgctggcagcgatccgcat

SEQ ID NO: 810588 - DNA, 75 bp, synthetic construct
  source 1..75: mol_type = other DNA
atcccggtagaagaagttatcttcgcccagaagatgatgatcgaaaaatgtatccgtgcacgtaaagtcgttatt

SEQ ID NO: 810589 - DNA, 75 bp, synthetic construct
  source 1..75: mol_type = other DNA
gtggatgacggcccataacatcgccttcgtcgtggtcaatatcaatattaactatcgtcgcccagcggtattaag

SEQ ID NO: 810590 - DNA, 75 bp, synthetic construct
  source 1..75: mol_type = other DNA
gctcacctggattattcccgcgcgatagtggttgcgtccgtgaaagaagcaccaattggtatcgaggctactccc

SEQ ID NO: 810591 - DNA, 75 bp, synthetic construct
  source 1..75: mol_type = other DNA
aggatgatgaagaaaaactgcaaccatctggaacaacggcagatgaacagggagaggctgaaacaatggaaccgg

SEQ ID NO: 810592 - DNA, 75 bp, synthetic construct
  source 1..75: mol_type = other DNA
atcatgatgtacgcacgattgttaccctcggtcgcagtgttggtttcgatccgaagcgtgacatgcctttcattg

SEQ ID NO: 810593 - DNA, 75 bp, synthetic construct
  source 1..75: mol_type = other DNA
aactctggcagacaggggtatttatattgcttctgaatcaagcttttatcgtgtactgaaatcagccaaccagtt

SEQ ID NO: 810594 - DNA, 75 bp, synthetic construct
  source 1..75: mol_type = other DNA
tggcgaaaatgtatgcgcttggtgtgctaagttcttattcccggccaagagtcagcaatgataatccttactcag

SEQ ID NO: 810595 - DNA, 75 bp, synthetic construct
  source 1..75: mol_type = other DNA
atcgaaatccgtgaacatctgaaagcacacggtggtgaaaacatccaaatcatctccaaaatcgaaaaccaggaa

SEQ ID NO: 810596 - DNA, 75 bp, synthetic construct
  source 1..75: mol_type = other DNA
gcaaataacaagttgctggaagagcagcggctgacccagcgtacccagtttgatctggagatgatgaatgagctg

SEQ ID NO: 810597 - DNA, 75 bp, synthetic construct
  source 1..75: mol_type = other DNA
gtttcgcaacagttccatgcaggcggcctatctgatcgtcgcttgccgtgcgctgggactggataccggcccgat

SEQ ID NO: 810598 - DNA, 75 bp, synthetic construct
  source 1..75: mol_type = other DNA
ttcgcacgacgattacccatgcaggcggcattaccgggatgcgacggattgccgattttgcatcgctttatctgg

SEQ ID NO: 810599 - DNA, 75 bp, synthetic construct
  source 1..75: mol_type = other DNA
ctttaaggcgattcgtgtgcagtgtggtgtaccgggtatgcaaaccacctatggtctggcgaagggcaaaggact

SEQ ID NO: 810600 - DNA, 75 bp, synthetic construct
  source 1..75: mol_type = other DNA
gcaggcgttctgaaaccaggtatttacccgctttacttatccaaaggatcggataaaaaaaatgcctataacggg

SEQ ID NO: 810601 - DNA, 75 bp, synthetic construct
  source 1..75: mol_type = other DNA
gaattagtgagtaaaactttcaatctttacgcttatgaaccaaaatcaagcaactggcttggtggctggacatta

SEQ ID NO: 810602 - DNA, 75 bp, synthetic construct
  source 1..75: mol_type = other DNA
ggtggcgatcctcgacgccgacaaagaaggcttcctgcgttctgaacgttcgttaatccagactattggtcgtgc

SEQ ID NO: 810603 - DNA, 75 bp, synthetic construct
  source 1..75: mol_type = other DNA
taatatcaaatattggggatctatttcctatatattaagccacgctatgttgattcgagatagcatgataggtgg

SEQ ID NO: 810604 - DNA, 75 bp, synthetic construct
  source 1..75: mol_type = other DNA
attatgctcgtcatcaggaactgggattcaaagccatccgcgtgcagtgtggtattcccggtatgaaaacgactt

SEQ ID NO: 810605 - DNA, 75 bp, synthetic construct
  source 1..75: mol_type = other DNA
ggtaagagcattgaagattatcgcatgttctggatggaagacccgacgcctgcggaaaaccaggaatgcttccgt

SEQ ID NO: 810606 - DNA, 75 bp, synthetic construct
  source 1..75: mol_type = other DNA
cagtggccagaagagcagttgtggtcaacggaaaaatatctcgactttatgccaaaactgttcgacgcagtgcgc

SEQ ID NO: 810607 - DNA, 75 bp, synthetic construct
  source 1..75: mol_type = other DNA
aattagatgctttgcatccattcagggaagggaacagccgaacgctcagacagttcacggcagatctggcgttaa

SEQ ID NO: 810608 - DNA, 75 bp, synthetic construct
  source 1..75: mol_type = other DNA
acattatctgttagcgctacgccatcaacggatccgatcaaaaaaattagattacacagcggttactttactgaa

SEQ ID NO: 810609 - DNA, 75 bp, synthetic construct
  source 1..75: mol_type = other DNA
atgattgagaatcatctctactgtctggtgactgttgtgaaatacaaattactaccatgcttactcgcgatatta

SEQ ID NO: 810610 - DNA, 75 bp, synthetic construct
  source 1..75: mol_type = other DNA
tcggcctgatgttctttggcgttgccgaacctgtaatgcattatctttcgccacccgttggcactccagaaaccg

SEQ ID NO: 810611 - DNA, 75 bp, synthetic construct
  source 1..75: mol_type = other DNA
atgaaaattattgctgcagatgtttttgttacttgcccaagacgtaatttcgttacgcttaaaataaccactgca

SEQ ID NO: 810612 - DNA, 75 bp, synthetic construct
  source 1..75: mol_type = other DNA
tcgatgagaaactggcggcgaaatatccgtatgacccggcgtatctccccgtcgcacgactggaagatggcacat

SEQ ID NO: 810613 - DNA, 75 bp, synthetic construct
  source 1..75: mol_type = other DNA
cgttacgcttaaaataaccactgaaagcggactttgtggattgggagatgccacattaaatggtcgcgaattgtc

SEQ ID NO: 810614 - DNA, 75 bp, synthetic construct
  source 1..75: mol_type = other DNA
tgtggttcagcgctctcccttaagccgaggcatggcaacatactggtttctgaaaggagagaggcaggcgggaca

SEQ ID NO: 810615 - DNA, 75 bp, synthetic construct
  source 1..75: mol_type = other DNA
tgtggttcagcgctctcccttaaggcgaggcatggcaacatactggcttctgaaaggagagaggcaggcgggtca

SEQ ID NO: 810616 - DNA, 75 bp, synthetic construct
  source 1..75: mol_type = other DNA
atggctaacctacaacttgccgtcaaaggtgaatacttcgatgccatgattcgcagagagaaaacggaagagtat

SEQ ID NO: 810617 - DNA, 75 bp, synthetic construct
  source 1..75: mol_type = other DNA
tttcagctatcactcctggtttgcgatgcttttttcggcagggatggggatcggcctgatgttctttggcgttgc

SEQ ID NO: 810618 - DNA, 75 bp, synthetic construct
  source 1..75: mol_type = other DNA
tgtgaaacgttttatggacgacgttatccagcctgccatgacgctggttcaggaggaactgaacaagcaggggac

SEQ ID NO: 810619 - DNA, 75 bp, synthetic construct
  source 1..75: mol_type = other DNA
gacttgcggctgaaactatcgaggcaagaggggagcaaaacggatacgatcgaaaagaagaaaaatcagcgccaa

SEQ ID NO: 810620 - DNA, 75 bp, synthetic construct
  source 1..75: mol_type = other DNA
cttcagaaaagtatctcgattttacgccgaagttatttgaagcggtgcgtaataagttcggttttaacgaacatc

SEQ ID NO: 810621 - DNA, 75 bp, synthetic construct
  source 1..75: mol_type = other DNA
ggtcgcttcttatctgaaagatcatctttgtccacaactaattggccgcgatgccagccgtatcgaagatatctg

SEQ ID NO: 810622 - DNA, 75 bp, synthetic construct
  source 1..75: mol_type = other DNA
gcgccactgacctcgccaataccgttcagcaggatgttgcgcttgccctgtttaatttcctggagcatttcccgt

SEQ ID NO: 810623 - DNA, 75 bp, synthetic construct
  source 1..75: mol_type = other DNA
ttgttacctgtccgggacgtaatttcgtcaccttaaaaatcaccaccgaggacggtattaccggtcttggtgatg

SEQ ID NO: 810624 - DNA, 75 bp, synthetic construct
  source 1..75: mol_type = other DNA
ggttttgatatggagttgcaggaccacgctggggcaggtcacgatgcgctgatggcagcacgaaaccagttgctg

SEQ ID NO: 810625 - DNA, 75 bp, synthetic construct
  source 1..75: mol_type = other DNA
gcgacctcacgctgggagacaggctcgccgcgtctggaacgctataacggttattctgcggttgagattgttggg

SEQ ID NO: 810626 - DNA, 75 bp, synthetic construct
  source 1..75: mol_type = other DNA
atggatggcagccagaaattaccgcaacgcatgttggcaggtattcgcatacatctggggcgcgaaacggactgg

SEQ ID NO: 810627 - DNA, 75 bp, synthetic construct
  source 1..75: mol_type = other DNA
tgatatggaaaaattaattagcgcttatcggcgtatactgcgacaggggaatcatgcgctgacggttattgttgg

SEQ ID NO: 810628 - DNA, 75 bp, synthetic construct
  source 1..75: mol_type = other DNA
ccgcgtttaaaccttctggcgatcagccggaggcgattcgacgcctcaaagaggggctggaggatggcctcgcgc

SEQ ID NO: 810629 - DNA, 75 bp, synthetic construct
  source 1..75: mol_type = other DNA
ccggttccaccctggatatggagacaccgtaaataaagcgatggcaatcttatcatttatctgttctcagcagga

SEQ ID NO: 810630 - DNA, 75 bp, synthetic construct
  source 1..75: mol_type = other DNA
tttcgctcattctcggcggcgctggtgcaaaactggaagatatggcggcagcgtataccgcgtttgctcgccacg

SEQ ID NO: 810631 - DNA, 75 bp, synthetic construct
  source 1..75: mol_type = other DNA
tgtggatgaggtcctgctcatcaacgaatacacctttacccgctctcagttaataaacagtattgataccgggcc

SEQ ID NO: 810632 - DNA, 75 bp, synthetic construct
  source 1..75: mol_type = other DNA
gctgaaaaccgctttccagattggctttatgatttacatcccgtttctggttatcgacctgattgtcgccagcgt

SEQ ID NO: 810633 - DNA, 75 bp, synthetic construct
  source 1..75: mol_type = other DNA
tcgtggtcgcgcaacgtcgctgttgttgtttgagcacgttcacggggaatcccgtgatcgcggtcaggcgatggt

SEQ ID NO: 810634 - DNA, 75 bp, synthetic construct
  source 1..75: mol_type = other DNA
tctgcatttgacagagaaaggcgattatcaattgctggtaatggacgaaatggggcaggtggcgacagtgagatt

SEQ ID NO: 810635 - DNA, 75 bp, synthetic construct
  source 1..75: mol_type = other DNA
ggctggcaccccgacaaatgccgcaactggcaccgctgttttcgcgcatgatgctcggtaaaagcaaaagcgaca

SEQ ID NO: 810636 - DNA, 75 bp, synthetic construct
  source 1..75: mol_type = other DNA
ttaatggacaatattcatgacacgctttcaggattacgccgactggatattgataaacgctgggattttttacac

SEQ ID NO: 810637 - DNA, 75 bp, synthetic construct
  source 1..75: mol_type = other DNA
ggtggctaatgatatcagataaactcataacgctggtgaagagcctctgtgtacttgtcggcatttcattttcac

SEQ ID NO: 810638 - DNA, 75 bp, synthetic construct
  source 1..75: mol_type = other DNA
cagaagtacaacgaggaacacggcattacgccgcaaggcttgaacaagaaagtggtcgatatcctggcgctgggg

SEQ ID NO: 810639 - DNA, 75 bp, synthetic construct
  source 1..75: mol_type = other DNA
ccggtttccccctggatatggagacaccgtaaataaagcgatggcaatcttatcattcatctgttctcagcggga

SEQ ID NO: 810640 - DNA, 75 bp, synthetic construct
  source 1..75: mol_type = other DNA
cgtaatgatgatctgaaagtatttgtgatgggtgaagtgaagaaacagagcaccctgaaaatggactttagcggc

SEQ ID NO: 810641 - DNA, 75 bp, synthetic construct
  source 1..75: mol_type = other DNA
cggcatttcatttttagtcatgctggttgccattttcttttccaccgcctggagagtcctgacgttatcgggact

SEQ ID NO: 810642 - DNA, 75 bp, synthetic construct
  source 1..75: mol_type = other DNA
ctggtaaatgaagcgaatatgtctgtattcgattttgtccgtggctggaatactaggcaaagggaaaataacaaa

SEQ ID NO: 810643 - DNA, 75 bp, synthetic construct
  source 1..75: mol_type = other DNA
gagtcgtgctgtgctcggtgaacatagtctcgaagatggcatagatggtttcctgggattgacctggaatcagga

SEQ ID NO: 810644 - DNA, 75 bp, synthetic construct
  source 1..75: mol_type = other DNA
gagtcgtgccgtgcttggtgaacacagcctcgaagatggcatagatggtttcctgggattgacctggaatcagga

SEQ ID NO: 810645 - DNA, 75 bp, synthetic construct
  source 1..75: mol_type = other DNA
tcgatccagcgaagaatgatccgctgagtcgtgccgtgcttggtgaacacagcctcgaagatggcatagatggct

SEQ ID NO: 810646 - DNA, 75 bp, synthetic construct
  source 1..75: mol_type = other DNA
atgaggaaatatattccactggtattatttatcttttcatggccggtattgtctgcagatattcacgggcgggtt

SEQ ID NO: 810647 - DNA, 75 bp, synthetic construct
  source 1..75: mol_type = other DNA
ttttcagcgagatcgttatggtcgtattctcgggcaggtttatgcaccagacggaatgaatgttaatcagtttat

SEQ ID NO: 810648 - DNA, 75 bp, synthetic construct
  source 1..75: mol_type = other DNA
agaacacggcgagcgcgtgcgttatcttcactcagatatcgacaccgtcgaacgtatggagattatccgcgactt

SEQ ID NO: 810649 - DNA, 75 bp, synthetic construct
  source 1..75: mol_type = other DNA
caacggcgattcttgtgcatgccgggagaaccgctgaattcattaccggaaaacagcctgatacggtgaagccca

SEQ ID NO: 810650 - DNA, 75 bp, synthetic construct
  source 1..75: mol_type = other DNA
gccgggatacttctggtgccctgctgtcgtggtggttctgcattcaccaccggggatgatggcacattcagtgag

SEQ ID NO: 810651 - DNA, 75 bp, synthetic construct
  source 1..75: mol_type = other DNA
gcttcctttaccggactcttatgaccggccggacccgcgcattaagcagctggcacgccgcagtacggtgacgcc

SEQ ID NO: 810652 - DNA, 75 bp, synthetic construct
  source 1..75: mol_type = other DNA
tccgttatctcgccggaaggttgtgcgtccattctgtggaagagcgccgataaagcgccgctggcggctgaagcg

SEQ ID NO: 810653 - DNA, 75 bp, synthetic construct
  source 1..75: mol_type = other DNA
tccgggcgtgggcgcagaagagcgcggtcagtctgaagccattgcacgcaacctgcgtgaaatgtctcgccttag

SEQ ID NO: 810654 - DNA, 75 bp, synthetic construct
  source 1..75: mol_type = other DNA
ggacctgcttacccgtactcaggccgcactgaaggctaaccctaaaaatattctgcttgcagtggtctggatgca

SEQ ID NO: 810655 - DNA, 75 bp, synthetic construct
  source 1..75: mol_type = other DNA
cacgcactgccagtaactggacgtcagccgatcgtaaaacgcacttcagttcatgggcgcgaagaggccttgttt

SEQ ID NO: 810656 - DNA, 75 bp, synthetic construct
  source 1..75: mol_type = other DNA
ctggaaaaacagccgggtaaactgacctcctggaagatgttccgtactgttgcggtggaggaggcaaaaaatctt

SEQ ID NO: 810657 - DNA, 75 bp, synthetic construct
  source 1..75: mol_type = other DNA
gatttgtggcgacacgacctactactggaagcagacttattcttcgcaatacgatgcggtgtatggtgcatacaa

SEQ ID NO: 810658 - DNA, 75 bp, synthetic construct
  source 1..75: mol_type = other DNA
tatgtcgtatggtgaaggtcttccgctgccggagacatatgaccgtccggacccgcgcattaagcagctggcgcg

SEQ ID NO: 810659 - DNA, 75 bp, synthetic construct
  source 1..75: mol_type = other DNA
cggggcagtcaaactcaatgtcttttggtgaagggctgccgctgccggagacatatgaccgtccggacccgcgca

SEQ ID NO: 810660 - DNA, 75 bp, synthetic construct
  source 1..75: mol_type = other DNA
aaaatgttccgtactgttgcagtggaggaggcaaaaaatcttctcagcaaggggggtgaaattgccgtacggttc

SEQ ID NO: 810661 - DNA, 75 bp, synthetic construct
  source 1..75: mol_type = other DNA
cttcgttttatagctgttgatggtgagactaggattaaagagttttcagaaaactggcagcaagtgtttggcgag

SEQ ID NO: 810662 - DNA, 75 bp, synthetic construct
  source 1..75: mol_type = other DNA
caaaagatcccgatcttagtaagcaatttaaaggcagtaataagacgaacattcaaaagggaaaagcaccttttg

SEQ ID NO: 810663 - DNA, 75 bp, synthetic construct
  source 1..75: mol_type = other DNA
cagttggtgataaatggctggatgatgcgggtaaagattcaggtgtaccgattccagatcgtattgctgataagt

SEQ ID NO: 810664 - DNA, 75 bp, synthetic construct
  source 1..75: mol_type = other DNA
gtaaagacttaggttctcctgttccagatcgtatagctaataaactacgtgataaggagtttaaaagtttcgatg

SEQ ID NO: 810665 - DNA, 75 bp, synthetic construct
  source 1..75: mol_type = other DNA
agagttgataatccggcatgcagaaagccgcccggcttccggcggactggcaaacatcacggtgaaacaggctct

SEQ ID NO: 810666 - DNA, 75 bp, synthetic construct
  source 1..75: mol_type = other DNA
tgctggcggctggtttacgccgctttctgacactttcacttttgcggattgggtaacacaggaacaactgccggt

SEQ ID NO: 810667 - DNA, 75 bp, synthetic construct
  source 1..75: mol_type = other DNA
gacaagccaatcagtcaggatggtggtgtttatgatatggacaacctccgtatcactacgccgaaacgccatatt

SEQ ID NO: 810668 - DNA, 75 bp, synthetic construct
  source 1..75: mol_type = other DNA
gatcattatcttgtttaaagttctttcacgagaacaggtcgttcagcaaacacctcttgagaagtctgacgagac

SEQ ID NO: 810669 - DNA, 75 bp, synthetic construct
  source 1..75: mol_type = other DNA
aataacgttgtgtcaactgactaaagatctctattcagataatggtgaaacattactggctcgccgtggcgctat

SEQ ID NO: 810670 - DNA, 75 bp, synthetic construct
  source 1..75: mol_type = other DNA
taaaaatcacgaagaagaggcagaaccgtttttcccaataatggccgcagaggaaccagaggcacatttgcaccc

SEQ ID NO: 810671 - DNA, 75 bp, synthetic construct
  source 1..75: mol_type = other DNA
taggtggtagggaacgctttgaattacatcatgataaaccaatcagtcaggatggtggtgtctatgatatggata

SEQ ID NO: 810672 - DNA, 75 bp, synthetic construct
  source 1..75: mol_type = other DNA
ctgaaaaggacttgattaaatcatcaatatgccttagtaatgacgatgttctgaaatacagggcccgtgatttta

SEQ ID NO: 810673 - DNA, 75 bp, synthetic construct
  source 1..75: mol_type = other DNA
caccctcatttcaaacggcctggcaaacctgaccgaaaaagtcgatcatgtcgtggtagaagggactggcggctg

SEQ ID NO: 810674 - DNA, 75 bp, synthetic construct
  source 1..75: mol_type = other DNA
ggtggtcagtgatgcgggggctacgggaggtaaggccctgcaactgaacaaaccggaaaaccacatctggtttct

SEQ ID NO: 810675 - DNA, 75 bp, synthetic construct
  source 1..75: mol_type = other DNA
acacaaggaaattatagagacatcattaagcaagtaattataggtttcgaagaaaccaatatccggattattaat

SEQ ID NO: 810676 - DNA, 75 bp, synthetic construct
  source 1..75: mol_type = other DNA
acaaactttttctgcagcatttattcatcctaaacgtactcagcaatggggatgggctgataattacctacatat

SEQ ID NO: 810677 - DNA, 75 bp, synthetic construct
  source 1..75: mol_type = other DNA
agaaaaattcgtttttaaaaacaaggaagtatgggacgggcaagatgggattggtgttctcgaaggtttgatcag

SEQ ID NO: 810678 - DNA, 75 bp, synthetic construct
  source 1..75: mol_type = other DNA
gtaacaaggcggttgcggcgaatgcaagtttctttaaacaatactacgcttcccgtgaaaactttcttgttaatt

SEQ ID NO: 810679 - DNA, 75 bp, synthetic construct
  source 1..75: mol_type = other DNA
tatttgtctgttcttgggttaaacagtttacaagattttaaagatagaatgctaagcataacgtatctaaacacc

SEQ ID NO: 810680 - DNA, 75 bp, synthetic construct
  source 1..75: mol_type = other DNA
caatttcaaccactccagaaagtgaacaaaataaaataagtgaagaggaaaacaatttattaagcattattgcat

SEQ ID NO: 810681 - DNA, 75 bp, synthetic construct
  source 1..75: mol_type = other DNA
ggtgaatatgcagaccgtaaccgtgctgttgcgaatcagcggctgaccgggagtaatgcgcggtggaaatggaca

SEQ ID NO: 810682 - DNA, 75 bp, synthetic construct
  source 1..75: mol_type = other DNA
acagaaaaatcagggcagcatcggcagacggcgcttacgacacccgactctgtcacgatgaactgcggcgtaaga

SEQ ID NO: 810683 - DNA, 75 bp, synthetic construct
  source 1..75: mol_type = other DNA
actacgatggtcaggttgcggaggctatggccctggtacgagcgctgaacaaaatgacgaaagcaggtatgcctg

SEQ ID NO: 810684 - DNA, 75 bp, synthetic construct
  source 1..75: mol_type = other DNA
cgggccttatccggcagactcacagaaaaatcagggcagccgcggcagacggggcttacgacacccggctctgtc

SEQ ID NO: 810685 - DNA, 75 bp, synthetic construct
  source 1..75: mol_type = other DNA
aagacattgaagagcagacaagaattcctggctgcgattatcagtattaatgaaacacgtcttcgtgcagcagat

SEQ ID NO: 810686 - DNA, 75 bp, synthetic construct
  source 1..75: mol_type = other DNA
acgagggaaaacctgatgctggcgtaccagcgcgtggtggaaaacaaaggcgcggcgggggtagataacctgagc

SEQ ID NO: 810687 - DNA, 75 bp, synthetic construct
  source 1..75: mol_type = other DNA
ggtgacgccgggtggtgccgcctgtaaatataacgacatcattccggcagaccactgtctgcatgatgtgcagga

SEQ ID NO: 810688 - DNA, 75 bp, synthetic construct
  source 1..75: mol_type = other DNA
atgcataaaataccctttgatgttcttattcattctgaaaacgcattaatccgcgcaaaggaaatgaatgcgttg

SEQ ID NO: 810689 - DNA, 75 bp, synthetic construct
  source 1..75: mol_type = other DNA
gctggcagaggaaggcaacgacatgctgatgtccttcttcctgcagacggatgcgacgaacctgaacgcgatgta

SEQ ID NO: 810690 - DNA, 75 bp, synthetic construct
  source 1..75: mol_type = other DNA
ccggcgaatgcgggcattctgctggttccgtgctgccgtggtgcttcggcattcacaacgggtgcagacggcaca

SEQ ID NO: 810691 - DNA, 75 bp, synthetic construct
  source 1..75: mol_type = other DNA
ggtgatgtcaccacacctgtgctggtgaagccgtcggatggagaaggcacagttatcagcaccaccagcgaaccg

SEQ ID NO: 810692 - DNA, 75 bp, synthetic construct
  source 1..75: mol_type = other DNA
ttacatattgccaaaaaattactggcgtttatcccgaaaaatgcagggatcctcctggtaccttgctgtcgtgga

SEQ ID NO: 810693 - DNA, 75 bp, synthetic construct
  source 1..75: mol_type = other DNA
taaagatttggtaaattatttcaatgagttatatataattaaagtcaattctggaaaaataggcaaaacggtaga

SEQ ID NO: 810694 - DNA, 75 bp, synthetic construct
  source 1..75: mol_type = other DNA
agcgtaggaatgagatcctgcgtgctcaagttattagtggtcttcaggcgtcagaggaactggcaaaacttctta

SEQ ID NO: 810695 - DNA, 75 bp, synthetic construct
  source 1..75: mol_type = other DNA
agttcagtgttaaaaaaagcgggcattaatcactgtcgcgctattctggcattaagcgataacgatgccgataac

SEQ ID NO: 810696 - DNA, 75 bp, synthetic construct
  source 1..75: mol_type = other DNA
gtgcaggatatgagtacgctgaatcatccgagggctgacctgagcaaagggcagtacggctgtgtcggccagggt

SEQ ID NO: 810697 - DNA, 75 bp, synthetic construct
  source 1..75: mol_type = other DNA
cgcagtacagtgacgctgggcggggctgcctgcagatataacgatattattccggctgaccactgtctgcatgat

SEQ ID NO: 810698 - DNA, 75 bp, synthetic construct
  source 1..75: mol_type = other DNA
acacggaaagagcatcgcatcattggcattgacagccattaccggataaacccggcacaacacggagagatatct

SEQ ID NO: 810699 - DNA, 75 bp, synthetic construct
  source 1..75: mol_type = other DNA
tacaaaaaatacaggcgcatgggatctccgataacacaatttatgcgactgcaggaacccaaattatcttcaccg

SEQ ID NO: 810700 - DNA, 75 bp, synthetic construct
  source 1..75: mol_type = other DNA
acacgcaaagagcaccgcatcatcggcattgacagccattaccggataaacccggcacaacacggagatatcact

SEQ ID NO: 810701 - DNA, 75 bp, synthetic construct
  source 1..75: mol_type = other DNA
ctgcacagtaaggtgctatggactggcaacaagaccactgacgatctgattatggcgaagcgtatcgctgacttt

SEQ ID NO: 810702 - DNA, 75 bp, synthetic construct
  source 1..75: mol_type = other DNA
cgcatcatcgtggtattcgacgaagcatccaacattgccgatctggtgtgggaggtagcagagggtgcgctgacg

SEQ ID NO: 810703 - DNA, 75 bp, synthetic construct
  source 1..75: mol_type = other DNA
tatggcgaagcgtatcgctgactttgaagaccagtatcaggctgacgcggtgttcatcgacttcggttacggtac

SEQ ID NO: 810704 - DNA, 75 bp, synthetic construct
  source 1..75: mol_type = other DNA
cagcaatgatccggggcacgataagcgctggcgcgctgatgctataccgtggtctgagcataacaccgaggcatt

SEQ ID NO: 810705 - DNA, 75 bp, synthetic construct
  source 1..75: mol_type = other DNA
ggctggtggatccggaagcctttggcgtacatggtattgccgatgagtttttgctcgataagcccacgtttgccg

SEQ ID NO: 810706 - DNA, 75 bp, synthetic construct
  source 1..75: mol_type = other DNA
tgtttttgcgacagatgaagagcttgcagctcatgaagcccgtcttgatctggtggagaagaagggcggaagctg

SEQ ID NO: 810707 - DNA, 75 bp, synthetic construct
  source 1..75: mol_type = other DNA
ctccccgatattctgcacttgctttccccggaatacgcatcggaaatggtgcatagcgccgtcttacccgatctg

SEQ ID NO: 810708 - DNA, 75 bp, synthetic construct
  source 1..75: mol_type = other DNA
cccactaaccctactttaccaggaataccgccaggcattattgtcccctgaacaagatatccatcgttatgccga

SEQ ID NO: 810709 - DNA, 75 bp, synthetic construct
  source 1..75: mol_type = other DNA
gaaacaataagcgaatatctcgatcttgactggtttcgacaacagcaacgacagtcgcaaaatccgtttgatatc

SEQ ID NO: 810710 - DNA, 75 bp, synthetic construct
  source 1..75: mol_type = other DNA
agatggatgctcgatacggttggtgagcacctcaggaacccagaaacccgtcatcagccgctgatgattgccgtt

SEQ ID NO: 810711 - DNA, 75 bp, synthetic construct
  source 1..75: mol_type = other DNA
tggagatagacggcgctatcgaaacaacgctctggcgggctaacaatatcaaactgttaacggttgctcccttat

SEQ ID NO: 810712 - DNA, 75 bp, synthetic construct
  source 1..75: mol_type = other DNA
attaaataagctacgtagggcacaggagatttttgctgaggtctgcgcttttacgcagcgctatcaagactgctt

SEQ ID NO: 810713 - DNA, 75 bp, synthetic construct
  source 1..75: mol_type = other DNA
ttattatgatttctcgcaacgaacgcattccgaagagcagatagtccgtctggtacgctatgaccagctatccgg

SEQ ID NO: 810714 - DNA, 75 bp, synthetic construct
  source 1..75: mol_type = other DNA
ttatttgacccgctgaccgggcagattgtttccaccattccacgttttaccatctacccgaaaacgcactacgtc

SEQ ID NO: 810715 - DNA, 75 bp, synthetic construct
  source 1..75: mol_type = other DNA
tacagcctaaaaataaaccagacaacgccaggtatacttgttagctgtgatagcaataataattttgcctgtcag

SEQ ID NO: 810716 - DNA, 75 bp, synthetic construct
  source 1..75: mol_type = other DNA
ccagagataatacccttttccgggaaacgctggaaaaaggtgcactcatacccttgctgtcccattcccccgaca

SEQ ID NO: 810717 - DNA, 75 bp, synthetic construct
  source 1..75: mol_type = other DNA
cgttcaaacctgtaaatgcccaggcgatgaaggcattaaaaacactcccggaatgggtccaggttgcattcatac

SEQ ID NO: 810718 - DNA, 75 bp, synthetic construct
  source 1..75: mol_type = other DNA
tctctaccccagcaacagccatgtacagcaatgatccgggccacgataaacgctggcgcgctgacgcaatcccgt

SEQ ID NO: 810719 - DNA, 75 bp, synthetic construct
  source 1..75: mol_type = other DNA
ctggggtatgtcaacctgcgaagactgcaaagcagtagtcactgccaacaccgaaaatcagctgcgtaccaagac

SEQ ID NO: 810720 - DNA, 75 bp, synthetic construct
  source 1..75: mol_type = other DNA
agatcatgaaaaatgcttggatatcattgagatatgtttcaaactgatagacgggtatataagatcaaatgagtg

SEQ ID NO: 810721 - DNA, 75 bp, synthetic construct
  source 1..75: mol_type = other DNA
cacccgcatgattcccgcgccgctgctgggagagatcccctggcttgcagaaaatgcggcaaccggaaagtacat

SEQ ID NO: 810722 - DNA, 75 bp, synthetic construct
  source 1..75: mol_type = other DNA
tactgcacgcgttcgtcaaaacgtgcaatggacctgataagaagaatatggcgactactgcctcacgctacaagt

SEQ ID NO: 810723 - DNA, 75 bp, synthetic construct
  source 1..75: mol_type = other DNA
gccgatgcattccgcgagatacgcgatcaccttcagaatcctgccactcgtcaccagccgctgatgctggcccgc

SEQ ID NO: 810724 - DNA, 75 bp, synthetic construct
  source 1..75: mol_type = other DNA
atttaaatacttgatattctaccccggaaactttccttcattacgatttaaaaaatattctggattttcgtctaa

SEQ ID NO: 810725 - DNA, 75 bp, synthetic construct
  source 1..75: mol_type = other DNA
tccataaaaaaaattgaagtattaccggaagatattatcgacatacaaaatttaaaaaaatattataaagataac

SEQ ID NO: 810726 - DNA, 75 bp, synthetic construct
  source 1..75: mol_type = other DNA
ttatctatttcaaacgtaagttttataaaaatgaaattacaaaacggatttgggataagggtcgcgaattatatt

SEQ ID NO: 810727 - DNA, 75 bp, synthetic construct
  source 1..75: mol_type = other DNA
tatgttgacgctgtcgtaaatgtgtattcaaatatatatatgccagccatgcttttagggaaaccaattttcagc

SEQ ID NO: 810728 - DNA, 75 bp, synthetic construct
  source 1..75: mol_type = other DNA
tagtttattcaaaacattcgttagacaagtcggaaaatgatcattacatcaatcataatgaaagaataatcgata

SEQ ID NO: 810729 - DNA, 75 bp, synthetic construct
  source 1..75: mol_type = other DNA
tagtttattcaaaacattcgttagatagaacagaaaatgatcattatattgatcataacgaaagaataataaacc

SEQ ID NO: 810730 - DNA, 75 bp, synthetic construct
  source 1..75: mol_type = other DNA
attccacgcagcggaacattcgttttttccgtaacagataaagatattaatgacctcataaaaatgcgagtaatt

SEQ ID NO: 810731 - DNA, 75 bp, synthetic construct
  source 1..75: mol_type = other DNA
cagtgtgatgaaggtgacccgtacaccaacagacccggtgctgtaccggagtggagacacgacgcctcttcccga

SEQ ID NO: 810732 - DNA, 75 bp, synthetic construct
  source 1..75: mol_type = other DNA
ccttggctctgggtgtactcagtattcagcctgtgctggctgctgaatacagcgagaaaacgcagtatttgggag

SEQ ID NO: 810733 - DNA, 75 bp, synthetic construct
  source 1..75: mol_type = other DNA
gcactgacctcacttgagacaaaaccaataggtgcattccacattgcagaacagcaagttgacggtacaagtgac

SEQ ID NO: 810734 - DNA, 75 bp, synthetic construct
  source 1..75: mol_type = other DNA
gtcttgttgattttcttatccggcttgttattacagcaattgtcatttccccggtaattatctggtcatggaata

SEQ ID NO: 810735 - DNA, 75 bp, synthetic construct
  source 1..75: mol_type = other DNA
ggcaattgctgttgcaacccttctgacactgttaattactgtatttgtcaacaataaggaaaattccgagtttca

SEQ ID NO: 810736 - DNA, 75 bp, synthetic construct
  source 1..75: mol_type = other DNA
ttttatatttgaaaagtataattaaaaatattaaagataatgattatattaactatttaccgcaattagggacaa

SEQ ID NO: 810737 - DNA, 75 bp, synthetic construct
  source 1..75: mol_type = other DNA
cgtcattcgtcgcggttgtttccggtgcgcttatttctggcggcgtttaccgggttttacctggtgatttcgatt

SEQ ID NO: 810738 - DNA, 75 bp, synthetic construct
  source 1..75: mol_type = other DNA
tatcatgcttgacgatttaggtgatggtcgtgaacaactggatttattcagtaatcatcagccagataagaacag

SEQ ID NO: 810739 - DNA, 75 bp, synthetic construct
  source 1..75: mol_type = other DNA
cgttttattgcagcgtggaacaggtcttcagaccagatcttgagggaaaacccgtcattgttgccacgaacaacg

SEQ ID NO: 810740 - DNA, 75 bp, synthetic construct
  source 1..75: mol_type = other DNA
ccagtgccgcccaggaagccgttgacgtgttgctatcgctggaaaatgaacccgtgcatgttaatggctggattg

SEQ ID NO: 810741 - DNA, 75 bp, synthetic construct
  source 1..75: mol_type = other DNA
gccagacggaagcgccattttaatgcggaacaccagcatacgcgcaaaaaatcgatcgatctggaatttattgtc

SEQ ID NO: 810742 - DNA, 75 bp, synthetic construct
  source 1..75: mol_type = other DNA
ttcccgacgctatcgtttatggcatttatgccggaaatatcagctatgcaattcatctcaaaaatggcagcggta

SEQ ID NO: 810743 - DNA, 75 bp, synthetic construct
  source 1..75: mol_type = other DNA
tagctgatcttatggggattgatatacctttatttatgttccgtgaaaggaaacataaatgtgtaaatgacataa

SEQ ID NO: 810744 - DNA, 75 bp, synthetic construct
  source 1..75: mol_type = other DNA
gtgagtatttttatatatctcgaacagctacattgcctgcatatactaataaagccttaaggggaacgcttcttt

SEQ ID NO: 810745 - DNA, 75 bp, synthetic construct
  source 1..75: mol_type = other DNA
ttttcattagccaaaatacatcataaaagattgtttatcgcctctgatatgtacttatcagagacctttttaaga

SEQ ID NO: 810746 - DNA, 75 bp, synthetic construct
  source 1..75: mol_type = other DNA
tgtaatttgcaagcattgcggatacattatgcagtacaacacaggtgttgtgttaagctggtatctaagggagaa

SEQ ID NO: 810747 - DNA, 75 bp, synthetic construct
  source 1..75: mol_type = other DNA
ggtgcgtattggcgcgctggactggacgcccgcgcgttcacgccgcgagcgtatgaacccggaaacgaacagtat

SEQ ID NO: 810748 - DNA, 75 bp, synthetic construct
  source 1..75: mol_type = other DNA
aacaatatattcataaattatgaacaaactggatttgagagaatacttgggcacttaattaatgataacatagag

SEQ ID NO: 810749 - DNA, 75 bp, synthetic construct
  source 1..75: mol_type = other DNA
tgaaatcaagacaatcacacatccgcacttcggtgataaaccggtaaaggtgttcgcgataaaggtgaatatcgg

SEQ ID NO: 810750 - DNA, 75 bp, synthetic construct
  source 1..75: mol_type = other DNA
cagagtcatcgggagcgattgcactgacgatgatgtatagcttctcggaagagtttttccgcgcagctcgcattg

SEQ ID NO: 810751 - DNA, 75 bp, synthetic construct
  source 1..75: mol_type = other DNA
acttcttaaggaacgtgcgggaatgaagctcatatcttctgttgatgtcagggatattgctcaaattcttgaaga

SEQ ID NO: 810752 - DNA, 75 bp, synthetic construct
  source 1..75: mol_type = other DNA
cgggctttaaaccgagccacgaagtgaaagcgatgctcgacgacgcggatgtcttcctgttgccatcggttacag

SEQ ID NO: 810753 - DNA, 75 bp, synthetic construct
  source 1..75: mol_type = other DNA
atggatgtcaaaaccttctgatatagatggtgatggccgttatactgtaatggattcttataagcatgctggtat

SEQ ID NO: 810754 - DNA, 75 bp, synthetic construct
  source 1..75: mol_type = other DNA
tgaatccggcacatgcccgttggctaatgggattacctccagagtgggacgactgcgcgcctacggcaacgcgat

SEQ ID NO: 810755 - DNA, 75 bp, synthetic construct
  source 1..75: mol_type = other DNA
gagaaatacaacaacctcctggacaacatccgcaagcaaaaatacatgctcgcaactttgtctaaccctcctagc

SEQ ID NO: 810756 - DNA, 75 bp, synthetic construct
  source 1..75: mol_type = other DNA
gtctattggcggtataagcatccaataacagggaaattccatgctttgggaacaaacgaagctgaagctatcgct

SEQ ID NO: 810757 - DNA, 75 bp, synthetic construct
  source 1..75: mol_type = other DNA
ctgggccataaaacccagcagcaaaccgatcgttaccatgatgacaggggaaaagattggaataagttagaatta

SEQ ID NO: 810758 - DNA, 75 bp, synthetic construct
  source 1..75: mol_type = other DNA
tgccgtgactatgcagtcagtccatacctagtgcattttttccgttcaacttcacaagcagaacgtggggcacag

SEQ ID NO: 810759 - DNA, 75 bp, synthetic construct
  source 1..75: mol_type = other DNA
caaaactacgggaactgggtgtcattcgcggcaaaatcgctactatcttccacggcattgatatctccagtcggg

SEQ ID NO: 810760 - DNA, 75 bp, synthetic construct
  source 1..75: mol_type = other DNA
ccagaacacccacgcggcatggacgaaatacaaccttgccgccagaacccgctggttacaggacgaacctacggg

SEQ ID NO: 810761 - DNA, 75 bp, synthetic construct
  source 1..75: mol_type = other DNA
aaaatttttgatatcgcagactccactcatcgttacatgggaaatgccatgctgttagcgctggttactggccaa

SEQ ID NO: 810762 - DNA, 75 bp, synthetic construct
  source 1..75: mol_type = other DNA
aaaaaaaactcaactccaaaacttattgattgcgcaccacacccatcaagaatgctggatattaaacgcaagacc

SEQ ID NO: 810763 - DNA, 75 bp, synthetic construct
  source 1..75: mol_type = other DNA
tgttgattatctggtcacactgcatcaaaacggtggcaaccaacagggcttcggtggcgaaggcattgaaacgtt

SEQ ID NO: 810764 - DNA, 75 bp, synthetic construct
  source 1..75: mol_type = other DNA
tagtgttatcaatgctttcagagctgtattcttgctcaatgggaataaacaacttcatttcaaaaaccttgctca

SEQ ID NO: 810765 - DNA, 75 bp, synthetic construct
  source 1..75: mol_type = other DNA
tgtcgatgggaagttttttgatctatcagttgttgcagaaactaaccaactattaattaacaaagaattaattca

SEQ ID NO: 810766 - DNA, 75 bp, synthetic construct
  source 1..75: mol_type = other DNA
gcgattggcgataaatggttgattagtgaaggactgaaatctggcgatcaagtcattgtcagcggcctgcaaaaa

SEQ ID NO: 810767 - DNA, 75 bp, synthetic construct
  source 1..75: mol_type = other DNA
acacaacccgctacgggggagacttacccgaaatctgatttattcaacaaagccgaagttcgcccacaggttagc

SEQ ID NO: 810768 - DNA, 75 bp, synthetic construct
  source 1..75: mol_type = other DNA
gaagttcgcccacaggttagcgggatcgtactgaatcgcaatttcactgaaggcagcgatgtgcaagcaggccag

SEQ ID NO: 810769 - DNA, 75 bp, synthetic construct
  source 1..75: mol_type = other DNA
attgatatgggctttgaggtggagattgtcgcgctgcaaaaaggcgatacagagaacacccacgcggcatggacg

SEQ ID NO: 810770 - DNA, 75 bp, synthetic construct
  source 1..75: mol_type = other DNA
tcggcattggcccgtgggaacgacgcctgcgcacgctcatcgaacaatatcaactggaagatgtggtggagatgc

SEQ ID NO: 810771 - DNA, 75 bp, synthetic construct
  source 1..75: mol_type = other DNA
gacagccctaacagaaatttagatggttttttttcatcagcctcgaagtatccttatacgtcgaaagcatcagca

SEQ ID NO: 810772 - DNA, 75 bp, synthetic construct
  source 1..75: mol_type = other DNA
aagaaaacaataaacgaattcccttgcatttactccaagcatctatataagagcaagcctgtaggtgtttcagat

SEQ ID NO: 810773 - DNA, 75 bp, synthetic construct
  source 1..75: mol_type = other DNA
caaaactacgcgaactgggtgtcattcgcggcaaaattgccaccattttccacggcattgatatctccagtcggg

SEQ ID NO: 810774 - DNA, 75 bp, synthetic construct
  source 1..75: mol_type = other DNA
gccggagatgttcaacgatgccggggagttcctgaccctggacgaactgcgccgcgtggatgcatcggcttttga

SEQ ID NO: 810775 - DNA, 75 bp, synthetic construct
  source 1..75: mol_type = other DNA
atttcagtaaagcgagggattttgcaggaattgactggggtgatggctcacccgcaacattccatgaacaaaggt

SEQ ID NO: 810776 - DNA, 75 bp, synthetic construct
  source 1..75: mol_type = other DNA
tgctggaaaatctcgctgcctcccctgccgtaacgacgctggaatataccctgttcgacggcgaacgcgtggtgc

SEQ ID NO: 810777 - DNA, 75 bp, synthetic construct
  source 1..75: mol_type = other DNA
cgaaggttttccgttccccatcgatgtgccgtttgtccccagcgataacccaaccggtgcctatcaacgtatttt

SEQ ID NO: 810778 - DNA, 75 bp, synthetic construct
  source 1..75: mol_type = other DNA
tctgttgcgcaagcgcgtacctttgcccgcgaaaccagcagcctgtttctgcccttaagcggtcagtggaatttc

SEQ ID NO: 810779 - DNA, 75 bp, synthetic construct
  source 1..75: mol_type = other DNA
gacgcagcagattaaactgcgcgacgttgcgccgaacagcgaagcccccttacagatcacgctgccgcagctgga

SEQ ID NO: 810780 - DNA, 75 bp, synthetic construct
  source 1..75: mol_type = other DNA
aactacgccgacagccagcaggctaacatcatcgatatctggcgcagcaccgtcgatgccatgttcgagaactat

SEQ ID NO: 810781 - DNA, 75 bp, synthetic construct
  source 1..75: mol_type = other DNA
cgtgccgctgatgaatgagtttggtgaatatccgcatccgaagccgcgcatcatctgtgaatacgcccatgcgat

SEQ ID NO: 810782 - DNA, 75 bp, synthetic construct
  source 1..75: mol_type = other DNA
gtgattcgtctggcaggttcactcaccgcgcgcgctacgcgcctggcccatgaagcgcaactggatgtcgcgccg

SEQ ID NO: 810783 - DNA, 75 bp, synthetic construct
  source 1..75: mol_type = other DNA
tgggtattgggccatgggaaaagtatttgcgcacacttattgagcattatcagttgagtgatatggttgagatcg

SEQ ID NO: 810784 - DNA, 75 bp, synthetic construct
  source 1..75: mol_type = other DNA
cagtatcaactggcggacaaagttcgctggttacaggatgagccgtcaacggcgctggagaagctacgctatcgc

SEQ ID NO: 810785 - DNA, 75 bp, synthetic construct
  source 1..75: mol_type = other DNA
gtcagcgaaacgctctcgacgatccgcgatcctcgctccttcctgtgcactatcgccaaacgcgtgatggtggac

SEQ ID NO: 810786 - DNA, 75 bp, synthetic construct
  source 1..75: mol_type = other DNA
ggactccaccgccatccagattgaatgtattgatgaaattgccaaactggccggaacgggcgagatggtggcgga

SEQ ID NO: 810787 - DNA, 75 bp, synthetic construct
  source 1..75: mol_type = other DNA
agtatgaaatcccgctggcgcagaccgtggcgattggcgatggagccaatgacctgccgatgatcaaagcggcag

SEQ ID NO: 810788 - DNA, 75 bp, synthetic construct
  source 1..75: mol_type = other DNA
accgacggcacaggacagctctatctcacgggcctgctaactcctaactttgccgctcgcgcctggcaccatacc

SEQ ID NO: 810789 - DNA, 75 bp, synthetic construct
  source 1..75: mol_type = other DNA
tcatgccgatgtctttatcgctcattttggtccagcgggagtaacagcagcaaaactccgcgaactgggtgtcat

SEQ ID NO: 810790 - DNA, 75 bp, synthetic construct
  source 1..75: mol_type = other DNA
ggcaagcagctggcgcagcacaacgcgcaatttttagtcgagtttatggcgaagctcagtgccgaactggcgggg

SEQ ID NO: 810791 - DNA, 75 bp, synthetic construct
  source 1..75: mol_type = other DNA
gaagagttcgtgcaatttccggcggagaaaatcgaggccgtttgtcatgccattgccgctcacagtttcagcgcg

SEQ ID NO: 810792 - DNA, 75 bp, synthetic construct
  source 1..75: mol_type = other DNA
acaagggattgataccagaaagttactgggccataaaacccagcagcaaaccgatcgttaccatgatgaccgagg

SEQ ID NO: 810793 - DNA, 75 bp, synthetic construct
  source 1..75: mol_type = other DNA
taattgatgtattcaaggaggcacaacactatggggaagtccctccgggctataatcctgcactggcaaccaaac

SEQ ID NO: 810794 - DNA, 75 bp, synthetic construct
  source 1..75: mol_type = other DNA
atgaaacaccaaaaagttaatatagtcaaaaagaatggtgaattctctttaagtctacttagcttcaagttggtt

SEQ ID NO: 810795 - DNA, 75 bp, synthetic construct
  source 1..75: mol_type = other DNA
ggcgcatcgctgccgatggccaggttaatgtggcgctttccggcgaacgttatggcgactatccgcacatcattc

SEQ ID NO: 810796 - DNA, 75 bp, synthetic construct
  source 1..75: mol_type = other DNA
aaataaactgtggtttaccacgcttgatgactacaccctgcacgcagaggtgcgcgccgaaggtgaaacactcgc

SEQ ID NO: 810797 - DNA, 75 bp, synthetic construct
  source 1..75: mol_type = other DNA
cactctcagcgacggctggcaaggcaagcagacactgattaaattcgacggcgtcgaaacctattttgaagtcta

SEQ ID NO: 810798 - DNA, 75 bp, synthetic construct
  source 1..75: mol_type = other DNA
acgctacgcgctggatcatttccagacgaagttgctgaagctaccgcaaactatgcaaacggcaaaaggtaaact

SEQ ID NO: 810799 - DNA, 75 bp, synthetic construct
  source 1..75: mol_type = other DNA
cctacgtggaagaccaggatatgtggtggtcggcggggatcttccgcgatgtttatctggtcggaaaacaactaa

SEQ ID NO: 810800 - DNA, 75 bp, synthetic construct
  source 1..75: mol_type = other DNA
tggtggttccgcagcgcccaattaacttcagcgcctggcgctatacccaggaaaacatccacgctgcccagcact

SEQ ID NO: 810801 - DNA, 75 bp, synthetic construct
  source 1..75: mol_type = other DNA
aaagcaggatatcagctccagatacacaaaaactgaagttgataataagctgaaaaacaaactggaagtgaacgc

SEQ ID NO: 810802 - DNA, 75 bp, synthetic construct
  source 1..75: mol_type = other DNA
ggtttcagtcagtgttatgtctgatgccgttcagtcagacccgtcgaatcctgccccgcaggttttgtctgtaaa

SEQ ID NO: 810803 - DNA, 75 bp, synthetic construct
  source 1..75: mol_type = other DNA
tacttcaagaacgggttttacagcccgtatgtcaggtagcggtgggtttaatctttgctatatagcgaaagggag

SEQ ID NO: 810804 - DNA, 75 bp, synthetic construct
  source 1..75: mol_type = other DNA
gtacaggtcgcaatgcgaaaatgacaggcgtgactggggtttctaaggattgattgccgaggaagtaggagaaat

SEQ ID NO: 810805 - DNA, 75 bp, synthetic construct
  source 1..75: mol_type = other DNA
gtacaggtcgcaatgcgaaaatgacaggcgtgactggggattctatggattgattgccgaggaagtcggagaaat

SEQ ID NO: 810806 - DNA, 75 bp, synthetic construct
  source 1..75: mol_type = other DNA
atttcgtctgtactgcggtcaacatcgtctatccgctataaacattcagtagagacgatagattcagagcacgcc

SEQ ID NO: 810807 - DNA, 75 bp, synthetic construct
  source 1..75: mol_type = other DNA
atgcgccagcagctttccgcccgcatgctcagccgttaccagaacaactatcacttcggagggagcacgctgtga

SEQ ID NO: 810808 - DNA, 75 bp, synthetic construct
  source 1..75: mol_type = other DNA
atgcgtcagcagctttccgcccgcatgctcagtcgttaccagaacaactatcacttcggagggagcacgctgtga

SEQ ID NO: 810809 - DNA, 75 bp, synthetic construct
  source 1..75: mol_type = other DNA
gcactgatgtacggaggacagaccactatttttggttgcacggatactaaaaaatgcaccaaaacaaataatcgc

SEQ ID NO: 810810 - DNA, 75 bp, synthetic construct
  source 1..75: mol_type = other DNA
taaagattccctgcattacggtgttgtggattacctgatcaaacccttccaggcttcccgctttgaagaggcgct

SEQ ID NO: 810811 - DNA, 75 bp, synthetic construct
  source 1..75: mol_type = other DNA
gtaaaagccggacagatgaatttgggggtatgactattctggtcacaaaggatacccactattaccaggatggct

SEQ ID NO: 810812 - DNA, 75 bp, synthetic construct
  source 1..75: mol_type = other DNA
ggtaccgcgaaaatttatcactgcaatgattcggataagtgcctcaaagtggtggccgatgcgaatgtgaccatc

SEQ ID NO: 810813 - DNA, 75 bp, synthetic construct
  source 1..75: mol_type = other DNA
gtacaggtcgcaatgcgaaaatgacaggcgtgactgggggttctaaggattgattgccgaggaagttggagaaat

SEQ ID NO: 810814 - DNA, 75 bp, synthetic construct
  source 1..75: mol_type = other DNA
ccagctaacgaagatgatgctcctgaagctatttccagcaatggccttggttgccgaaggtgtaatgtacgaacg

SEQ ID NO: 810815 - DNA, 75 bp, synthetic construct
  source 1..75: mol_type = other DNA
gatgatcgtgttggttgttggcatcggtgttatgggctggcctgccagcgtctgtttattaatttcagcggcgtt

SEQ ID NO: 810816 - DNA, 75 bp, synthetic construct
  source 1..75: mol_type = other DNA
caaaatcgcggcggcaatcggccttaaagttccgcaagaaacgcgcctgctgtttgtggaaaccaccgcagaaca

SEQ ID NO: 810817 - DNA, 75 bp, synthetic construct
  source 1..75: mol_type = other DNA
tatcagcactggtttcctgcgccctgatttcaggctgtaaagaagaaaataaaacgaatgtatccatcgaattta

SEQ ID NO: 810818 - DNA, 75 bp, synthetic construct
  source 1..75: mol_type = other DNA
cagaaagaaaagctacaaagagagcaggccccatcactaagtaaagggaatggtctgagccttacaagaacaata

SEQ ID NO: 810819 - DNA, 75 bp, synthetic construct
  source 1..75: mol_type = other DNA
atgctgccatcaggcagtgtgattgccggcagggattttttcttcccggggttcgggtttgaattttcccaggaa

SEQ ID NO: 810820 - DNA, 75 bp, synthetic construct
  source 1..75: mol_type = other DNA
ggcaaatccggatatcgaaaccgcgcaacgcttgttcaagtttccgggtatcggcctgctggtggtaaccggcgg

SEQ ID NO: 810821 - DNA, 75 bp, synthetic construct
  source 1..75: mol_type = other DNA
tccagaaactgactgaaagaattgatgaacttgagtcagaattaaagttgttatcaacttcccgaagtgatatct

SEQ ID NO: 810822 - DNA, 75 bp, synthetic construct
  source 1..75: mol_type = other DNA
ccgtgaagcgttttatttatggggattgggcacaactacagcggcggcaaatctttatcttaatcctgaccctgc

SEQ ID NO: 810823 - DNA, 75 bp, synthetic construct
  source 1..75: mol_type = other DNA
atgaccatcaccacgccaaccggtgaaggggtaaccagcgcgcggacgtttgtccgtctgcgtcgctgtgtatta

SEQ ID NO: 810824 - DNA, 75 bp, synthetic construct
  source 1..75: mol_type = other DNA
ccgaactgatgatgccggtgctgcccgtcgtgcgcgtcgccaacgtggcggatgccattgcgctggcggtgaaac

SEQ ID NO: 810825 - DNA, 75 bp, synthetic construct
  source 1..75: mol_type = other DNA
agtggtggatgaaaccgccgacctcgcccgtgccgctcagtccatcgtcaaaggcgcttctttcgataacaacat

SEQ ID NO: 810826 - DNA, 75 bp, synthetic construct
  source 1..75: mol_type = other DNA
gaacgagatgatgaacggtaacactgaactgatggagctggtgatgaacgttaccggaacgctgatttttgatga

SEQ ID NO: 810827 - DNA, 75 bp, synthetic construct
  source 1..75: mol_type = other DNA
tgggcagacataatggagggaaaaccgcagaaattgcggaggcgctggcggtaacggattatcaggcacgctatt

SEQ ID NO: 810828 - DNA, 75 bp, synthetic construct
  source 1..75: mol_type = other DNA
cattgaggtgatgggaacgtatgaggctgccatagtccgggtcaccattggcgaatacggtgcaacggggtttat

SEQ ID NO: 810829 - DNA, 75 bp, synthetic construct
  source 1..75: mol_type = other DNA
aattcatttctgctgccgctcaacggaaacgttcattctgaaatcagcgaaggaactgggtattgatgttcgtga

SEQ ID NO: 810830 - DNA, 75 bp, synthetic construct
  source 1..75: mol_type = other DNA
tgaaggacggggccggtaagccggtaccgggatgcacgatagagctgaaagcgcgacgcacaacggagacggtta

SEQ ID NO: 810831 - DNA, 75 bp, synthetic construct
  source 1..75: mol_type = other DNA
accgggatgcacgatagagctgaaagcgcgacgcacaacggagacggttattgtcaccacggtggcgtatggtca

SEQ ID NO: 810832 - DNA, 75 bp, synthetic construct
  source 1..75: mol_type = other DNA
cggtaatacattgccaggaacatggcgggtctgtagtccacttcaggtcagttcaatatatccttactgtgtggg

SEQ ID NO: 810833 - DNA, 75 bp, synthetic construct
  source 1..75: mol_type = other DNA
agggaccgaaaggggagaaaggcgaccccggtcccagaggtgagcgtggagaaaccgggccgatggggccgcccg

SEQ ID NO: 810834 - DNA, 75 bp, synthetic construct
  source 1..75: mol_type = other DNA
aggagggggaccatggctggtcagttaatctggctgatggttcagtcattacagggctttcggggaacactcagg

SEQ ID NO: 810835 - DNA, 75 bp, synthetic construct
  source 1..75: mol_type = other DNA
cgacatgttgcacattactcaggaaaaaaccggttcaaaacttgctattccgcttaacctgaaatgcgatgctct

SEQ ID NO: 810836 - DNA, 75 bp, synthetic construct
  source 1..75: mol_type = other DNA
aagcaatggttatcaacgcttgataatcgtactacgccacaatgtcgaatcagggatcgcctcaaatatacgctg

SEQ ID NO: 810837 - DNA, 75 bp, synthetic construct
  source 1..75: mol_type = other DNA
ctcaggcgtattacaaatacggtacgtcagggttttttgctgggtgataccaatgagcagatcgcaagaaaaatt

SEQ ID NO: 810838 - DNA, 75 bp, synthetic construct
  source 1..75: mol_type = other DNA
tttgatggctctcactggcgcaccgttggtgttggtgagtatgtgtcgtcaggagcttcggggtttgagtatttt

SEQ ID NO: 810839 - DNA, 75 bp, synthetic construct
  source 1..75: mol_type = other DNA
atgaccaccgaagaactggcggaatgcctcggtgtggctaaacaaaccgttaaccgctggattagagaaaaaggc

SEQ ID NO: 810840 - DNA, 75 bp, synthetic construct
  source 1..75: mol_type = other DNA
cgaacatcggggcatgataacggtggttcctgatgtcgaaaataatacgttgcaagtgaacttaagttcgggatt

SEQ ID NO: 810841 - DNA, 75 bp, synthetic construct
  source 1..75: mol_type = other DNA
ccggatgattatctgattaaacagcgatttccgggaatgacaccggcacaaatccgccgttatgccgaacgctgg

SEQ ID NO: 810842 - DNA, 75 bp, synthetic construct
  source 1..75: mol_type = other DNA
gcagtgttgatgcttttgagcagggcgtgcgggcgattttaggccaactggtgagcgtggcgatggcggcaaaat

SEQ ID NO: 810843 - DNA, 75 bp, synthetic construct
  source 1..75: mol_type = other DNA
gagtaccatagcgtaattggtaaagtgaacaagcgtattgataaagatggaaactggaaaacgtatatgacactt

SEQ ID NO: 810844 - DNA, 75 bp, synthetic construct
  source 1..75: mol_type = other DNA
gttgctggccgcctgaaagacgcctttccaaacagcactcattacttccttgctgacaatgacatttataaagac

SEQ ID NO: 810845 - DNA, 75 bp, synthetic construct
  source 1..75: mol_type = other DNA
ccggtggccagcgcccccgcagctgccgaaccggaggaaaccgcgccggtggccagcgcccctgcagctgctgaa

SEQ ID NO: 810846 - DNA, 75 bp, synthetic construct
  source 1..75: mol_type = other DNA
ctgccgtggctgcacagcaaactggttccagctggcaccgggcacgccaccgtaagctggatcgtgccggagtaa

SEQ ID NO: 810847 - DNA, 75 bp, synthetic construct
  source 1..75: mol_type = other DNA
tggtaaaacacttcaaccgtagcggacagttgcgttactaccccggttcgccgttgattgcccgtcagttactgc

SEQ ID NO: 810848 - DNA, 75 bp, synthetic construct
  source 1..75: mol_type = other DNA
agacggggcatggcaacatactggtttctgaaaggagaaaagcaggtgggacaaaactgttcttccacaacttaa

SEQ ID NO: 810849 - DNA, 75 bp, synthetic construct
  source 1..75: mol_type = other DNA
atttctcgccgcccgtgcggtgagcggtgtggaaacggtcgcggacagttattatgcccgtagtctggcggtggg

SEQ ID NO: 810850 - DNA, 75 bp, synthetic construct
  source 1..75: mol_type = other DNA
ccttaataccggacgtattccgacgcgtattggtaaccgctatgaagcaatttatccgtatgactctttccaggc

SEQ ID NO: 810851 - DNA, 75 bp, synthetic construct
  source 1..75: mol_type = other DNA
gcctcggtgtggctaaacaaactgttaaccgttggatcagagaaaaaggctggaaaacggaaaaatttcccggcg

SEQ ID NO: 810852 - DNA, 75 bp, synthetic construct
  source 1..75: mol_type = other DNA
agcgcattatgctgcgtacagaacacgataacgaagaaatgtcagtaccgatgcataagcagcgcagtcagccgc

SEQ ID NO: 810853 - DNA, 75 bp, synthetic construct
  source 1..75: mol_type = other DNA
ccgcctgattatcacaaagggatatccgaagcgcgacgattccagccgcagaattgacgtcccgtatgacggata

SEQ ID NO: 810854 - DNA, 75 bp, synthetic construct
  source 1..75: mol_type = other DNA
tgaaatcaagacaatcatacatccacacttcggtgataaaccggtaaaggtgttcgcgataaaggtgaataccgg

SEQ ID NO: 810855 - DNA, 75 bp, synthetic construct
  source 1..75: mol_type = other DNA
gtggtcatcaccactcatttatcaaccgtttgatgccggcatatcgcgggatgatcaataagttgagtgcggatt

SEQ ID NO: 810856 - DNA, 75 bp, synthetic construct
  source 1..75: mol_type = other DNA
aatattcaatggccgaagacaaaactgcgtattgaacgcggagaaatgccggaaacactgctggaaattatgcaa

SEQ ID NO: 810857 - DNA, 75 bp, synthetic construct
  source 1..75: mol_type = other DNA
tagtgatgatggcacggcgctcgactggctgggctatgccagcttgccgaagctggattatcagtcggaaagtct

SEQ ID NO: 810858 - DNA, 75 bp, synthetic construct
  source 1..75: mol_type = other DNA
ccgaagcgcgacgattccagtcgcagaattgatgttccgtatgacggatatgaagtgaagacaatcacacatgtc

SEQ ID NO: 810859 - DNA, 75 bp, synthetic construct
  source 1..75: mol_type = other DNA
tgaagtgaaaacaatcacacccccccacttcggtgataaaccggtaaaggtatacgcgataaaggtgaatatcaa

SEQ ID NO: 810860 - DNA, 75 bp, synthetic construct
  source 1..75: mol_type = other DNA
aaggtgaatacttcgatgccatgattcgcggagagaaaacggaagagtatcgcctgtttaatgactactggaata

SEQ ID NO: 810861 - DNA, 75 bp, synthetic construct
  source 1..75: mol_type = other DNA
atggctaacctgcaacttgccgtcaaaggtgaatacttcgatgccataattcgcggggagaaaacagaagaatat

SEQ ID NO: 810862 - DNA, 75 bp, synthetic construct
  source 1..75: mol_type = other DNA
atggctaaccttcaactggcagttaacggtgaatacttcgaccagatgaagtcaggtgagaaaacggaagagtat

SEQ ID NO: 810863 - DNA, 75 bp, synthetic construct
  source 1..75: mol_type = other DNA
tgaaatcaagacaatcacacatccgcacttcggagataaaccggtaaaggtgttcgcgataaaggtaaatattga

SEQ ID NO: 810864 - DNA, 75 bp, synthetic construct
  source 1..75: mol_type = other DNA
taattgtcgcaggcaagttatccaatacataagtacgtattgggatagagtcagtaacagaatcccattgctggg

SEQ ID NO: 810865 - DNA, 75 bp, synthetic construct
  source 1..75: mol_type = other DNA
ggctggggattgcctaccatgccaagccaaaagtgaatgaaaaaacggaagtcaccatccgtcacgctgacctga

SEQ ID NO: 810866 - DNA, 75 bp, synthetic construct
  source 1..75: mol_type = other DNA
gtgcgggaaaatctgccgctgatgccaggcttaacgcaactggtactcaagctggaaacgctaggctggaaagtg

SEQ ID NO: 810867 - DNA, 75 bp, synthetic construct
  source 1..75: mol_type = other DNA
ctctaacgccagcggcatctttgtcattcgtccgctgaaaggagagggcgggcgcggcggcaagattgccaacat

SEQ ID NO: 810868 - DNA, 75 bp, synthetic construct
  source 1..75: mol_type = other DNA
agcaaactggatatttcggtcaactggcaaggggcagcaaaagcgtattcattcgatgaggtgattgtcgacagt

SEQ ID NO: 810869 - DNA, 75 bp, synthetic construct
  source 1..75: mol_type = other DNA
tgagcaagtcagcttagaatttgctggcgagattgtcacgatgaagcatgagagttacctcaatgttctatataa

SEQ ID NO: 810870 - DNA, 75 bp, synthetic construct
  source 1..75: mol_type = other DNA
catcgttgacgcgcagtacaaagcgaaaactctgactcgcctcgcgcaggagtatgaaatcccgctggcgcagac

SEQ ID NO: 810871 - DNA, 75 bp, synthetic construct
  source 1..75: mol_type = other DNA
accagaagacgaacagaaagccagtatactgaaattgatttctcaggcctctcagacattgatagctccgcctcc

SEQ ID NO: 810872 - DNA, 75 bp, synthetic construct
  source 1..75: mol_type = other DNA
caatccggtggactgccaattaatcattgtggatgagggggaaaaaaccgctgtcgaacgggtttacaccatcaa

SEQ ID NO: 810873 - DNA, 75 bp, synthetic construct
  source 1..75: mol_type = other DNA
tatttatacagccatcaagctgaacgcagaagatacccccattatttctcaaggttatcttgataacattgcaga

SEQ ID NO: 810874 - DNA, 75 bp, synthetic construct
  source 1..75: mol_type = other DNA
aatgtttatccgcttaccccacgtctggttgatcaattacgcccacgccccaacgtggcgcgccctaatatgacg

SEQ ID NO: 810875 - DNA, 75 bp, synthetic construct
  source 1..75: mol_type = other DNA
tgtggttcagcgctctcccttaagtcgaggcatggcaacatactggcttctgaaaggagagaggcaggcggggca

SEQ ID NO: 810876 - DNA, 75 bp, synthetic construct
  source 1..75: mol_type = other DNA
tctattatccagacgattaagtttcaacagttctttccttgtattggcattcagcaaggtgaaaagattgagata

SEQ ID NO: 810877 - DNA, 75 bp, synthetic construct
  source 1..75: mol_type = other DNA
tgaaataaacacaatcacacatccccacttcggcgataaaccggtaaaggtgttcgcgataaaggtaaatattga

SEQ ID NO: 810878 - DNA, 75 bp, synthetic construct
  source 1..75: mol_type = other DNA
aaacgcataaacgcacaggagcagttgcggcagatggagaaagaactggtgattgacagagagaagacgctctga

SEQ ID NO: 810879 - DNA, 75 bp, synthetic construct
  source 1..75: mol_type = other DNA
caggaagcagaaaaagcggtcagggaaaccctgcagcaggatgaggcgcggaacatactgccggcagagaatgag

SEQ ID NO: 810880 - DNA, 75 bp, synthetic construct
  source 1..75: mol_type = other DNA
ctatgccggtacggcacaccgggcacagggggccagcgaggcctttgtgatagccctggccggggcaactgacgc

SEQ ID NO: 810881 - DNA, 75 bp, synthetic construct
  source 1..75: mol_type = other DNA
ccgccaggaccgggagcagggacgggatacccagacgctgtgggaggtttccgggatagctgataacggtgatat

SEQ ID NO: 810882 - DNA, 75 bp, synthetic construct
  source 1..75: mol_type = other DNA
ccacgcaccgggccgtcagtgaaatgcagggtgtgggggtgaaagcgcagaccatcgcctcttttctgatggaca

SEQ ID NO: 810883 - DNA, 75 bp, synthetic construct
  source 1..75: mol_type = other DNA
gaccggggaagggctgaagcatgacagcacgctggtgattgccggcgcggaaaaactgtcggtgaaggagacagt

SEQ ID NO: 810884 - DNA, 75 bp, synthetic construct
  source 1..75: mol_type = other DNA
ggcccgggacagtgtgatgccggtgaccgaaaaagccgtacgtcaggccataacgctggcacagggcagcagtgt

SEQ ID NO: 810885 - DNA, 75 bp, synthetic construct
  source 1..75: mol_type = other DNA
tggcatgagcgtattgaccggacaggattcagttaccgggcattgcgggagaaagcggcagaacgggaagccctg

SEQ ID NO: 810886 - DNA, 75 bp, synthetic construct
  source 1..75: mol_type = other DNA
gtggctaaccttcaactggcagttaatggtgaatatttcgaccagatgaagtctggagagaaaacggaagagtat

SEQ ID NO: 810887 - DNA, 75 bp, synthetic construct
  source 1..75: mol_type = other DNA
ccaccaggaccgggagcaggggcgggatacccagacactgtgggaagtcacccggatagtcggtaacggtgatat

SEQ ID NO: 810888 - DNA, 75 bp, synthetic construct
  source 1..75: mol_type = other DNA
ccggcagggggagcgccggcatcgtcttccggtggctgatggactgaaaatcagtcagggatatgttaccacgcc

SEQ ID NO: 810889 - DNA, 75 bp, synthetic construct
  source 1..75: mol_type = other DNA
ggcgtgaaatccggctgtcagaaggtgacctggtgcgcttcacccgtcaggaccgggagcagggacgggatatcc

SEQ ID NO: 810890 - DNA, 75 bp, synthetic construct
  source 1..75: mol_type = other DNA
ggcgtgatgatgccggcgttgtggttctgcagcagagccacaatggcgtaacgctgacggcatcagacccggcat

SEQ ID NO: 810891 - DNA, 75 bp, synthetic construct
  source 1..75: mol_type = other DNA
atcacacatccgcactttggcgataaaccggtaagggtgttcgctcttagggtaaatagcagcactgaatgtcaa

SEQ ID NO: 810892 - DNA, 75 bp, synthetic construct
  source 1..75: mol_type = other DNA
atcacacatccgcactttggcgataaaccggtaacggtgttcgctcttaaggtaaataacagcactgaatgtcaa

SEQ ID NO: 810893 - DNA, 75 bp, synthetic construct
  source 1..75: mol_type = other DNA
atcacacatccgcactttggcgataaaccggtaaaggtgttcgctcttacggtaaataacagcactgaatgtcaa

SEQ ID NO: 810894 - DNA, 75 bp, synthetic construct
  source 1..75: mol_type = other DNA
gtatcgcctgtgtaatgactactggaataagcgaattatgttccgggagtatgaccgcctgattatcacaaaggg

SEQ ID NO: 810895 - DNA, 75 bp, synthetic construct
  source 1..75: mol_type = other DNA
tgaaatcaagacaatcacacatccgcacttcggcgataaaccggtaaaggtgtttgaaccgccccgggtttcctg

SEQ ID NO: 810896 - DNA, 75 bp, synthetic construct
  source 1..75: mol_type = other DNA
tgaaatcaagacaatcacacatccgcacttcggcgataaaccggtaaaggtgttcgctataaaggtaaatatcag

SEQ ID NO: 810897 - DNA, 75 bp, synthetic construct
  source 1..75: mol_type = other DNA
atgctgagtattgctcccattgccggtggtggcgcaggctactatatcgcgcaggataactactattttctgggc

SEQ ID NO: 810898 - DNA, 75 bp, synthetic construct
  source 1..75: mol_type = other DNA
atgaagtggctgccctgaaacgcataaacgcacaggagcagttgcggcagatggagaaagaactggtgattgaca

SEQ ID NO: 810899 - DNA, 75 bp, synthetic construct
  source 1..75: mol_type = other DNA
gcacagaatctgtgggacagtgcccggacgcttaatcagaatgcgctggggcgggcgttgctgcgggaaaccggg

SEQ ID NO: 810900 - DNA, 75 bp, synthetic construct
  source 1..75: mol_type = other DNA
atcacacatccgcactttggcgataaaccggtaaaggtgttcgctcttaaggtaaataccagcactgaatgtcaa

SEQ ID NO: 810901 - DNA, 75 bp, synthetic construct
  source 1..75: mol_type = other DNA
agcgaattatgttccgggaatatgaccgcctgattatcacaaagggatatccgaagcgcgacgattccagtcgca

SEQ ID NO: 810902 - DNA, 75 bp, synthetic construct
  source 1..75: mol_type = other DNA
tcacctcctccattcatctgctcgatgagctgagtgtgcagcagctggcacagcaggcgatgcgcgaaaaccggg

SEQ ID NO: 810903 - DNA, 75 bp, synthetic construct
  source 1..75: mol_type = other DNA
ttgccgggatgcagggagcgcaggtcacggcgcgacagaggcggcgcgaccggaacggtcgctgcaagccagggg

SEQ ID NO: 810904 - DNA, 75 bp, synthetic construct
  source 1..75: mol_type = other DNA
cccctttcagcgccaccggcgcgcggtcttttcccggcgcgggcagacgggcatttatcctcccgcctgccctgt

SEQ ID NO: 810905 - DNA, 75 bp, synthetic construct
  source 1..75: mol_type = other DNA
ttacatcccggcgtcttttgccgggatgccgggagcgcaggccacggcgcgacaagggtggcgcgaccgttccgg

SEQ ID NO: 810906 - DNA, 75 bp, synthetic construct
  source 1..75: mol_type = other DNA
ggaaaaaaggactggctgcactctgtttactggcagtggcgggacttagcggttgcgatcaaaaagagagcacga

SEQ ID NO: 810907 - DNA, 75 bp, synthetic construct
  source 1..75: mol_type = other DNA
aagcccggggtttcgcgtcagggatggaagcccgccagggcggagacagctccgctggctccgttcacgacagcc

SEQ ID NO: 810908 - DNA, 75 bp, synthetic construct
  source 1..75: mol_type = other DNA
atgctcaagacagttgcttacatcccggcggccttttgccgggatgccaggagcgcaggccacggcgcgacaagg

SEQ ID NO: 810909 - DNA, 75 bp, synthetic construct
  source 1..75: mol_type = other DNA
aacgttaaacgcaccattgaacacctggcggaacggggcgtaataacttttcctcaaattgaggaaaagcccacc

SEQ ID NO: 810910 - DNA, 75 bp, synthetic construct
  source 1..75: mol_type = other DNA
atcctgtgcctgaaagtccaaaggcaaacctgtcgttgcataccgccagagagaggattaaaacagggtatgcaa

SEQ ID NO: 810911 - DNA, 75 bp, synthetic construct
  source 1..75: mol_type = other DNA
ggctacattggctatcgccagttagcggcgaaatgcggcctgactgaagccaaatgccgcaacctggtcaacgct

SEQ ID NO: 810912 - DNA, 75 bp, synthetic construct
  source 1..75: mol_type = other DNA
aaacaatcagttggccctcgtcgattttccaaggcttacatatttgaaggcgaacaaggaaaacgagacagcatc

SEQ ID NO: 810913 - DNA, 75 bp, synthetic construct
  source 1..75: mol_type = other DNA
aattcaccgcccggctggtggaccgctggcgcgaactggagaatgccagggaaccgttaaaatcaaaagccgaaa

SEQ ID NO: 810914 - DNA, 75 bp, synthetic construct
  source 1..75: mol_type = other DNA
tcctcaaattgaggttttcgaaaaaatcaacaacttaggactacgccgtagtgtcgaggcttacgtcttcgaagg

SEQ ID NO: 810915 - DNA, 75 bp, synthetic construct
  source 1..75: mol_type = other DNA
gagcaaaagtggaatacgacgggctttccgccagccagccactgcgtgtcgatgccaataaccatacggtcacca

SEQ ID NO: 810916 - DNA, 75 bp, synthetic construct
  source 1..75: mol_type = other DNA
cgaaactgcgcgaactgggcgtgatccgcggcaaaatcgctaccgtttttcacggtattgatatctccagccgtg

SEQ ID NO: 810917 - DNA, 75 bp, synthetic construct
  source 1..75: mol_type = other DNA
caggtggggagtggcaagaacttcccgggcgacgcaatgaagcgtggctacgtgaccgttaatctcggttctgat

SEQ ID NO: 810918 - DNA, 75 bp, synthetic construct
  source 1..75: mol_type = other DNA
cacggcattgatatctccagccgtgaagtgctgaaccactacacgccggagtatcagcagctgttccagcgcggc

SEQ ID NO: 810919 - DNA, 75 bp, synthetic construct
  source 1..75: mol_type = other DNA
ccgcggcaaaatcgcgaccgtctttcacggcattgatatctccagccgcgatgtgctgagccactacacgccgga

SEQ ID NO: 810920 - DNA, 75 bp, synthetic construct
  source 1..75: mol_type = other DNA
cgctgcacagcgggatccctgagctgatcaagtcagatcattccggctggctggtccccgaaaataacgccatgg

SEQ ID NO: 810921 - DNA, 75 bp, synthetic construct
  source 1..75: mol_type = other DNA
aagtgctcaagcgttatacgccggaatatcaacagcttttctgccgtggcgatttgatgctcccaataagcaatc

SEQ ID NO: 810922 - DNA, 75 bp, synthetic construct
  source 1..75: mol_type = other DNA
cgcgtcagcgcggcccctttcagcgccaccggcgcgcggtcttttcccggcgcgggcagacgggcatttatcctc

SEQ ID NO: 810923 - DNA, 75 bp, synthetic construct
  source 1..75: mol_type = other DNA
tgtcttgatagctgcccggtcggtattgtcagcaatgcgacgtacacttatggtgcggtagaaaaacgcggcgaa

SEQ ID NO: 810924 - DNA, 75 bp, synthetic construct
  source 1..75: mol_type = other DNA
tgtctcgatagctgcccagtcggcattgtcagcaatgcgacatacacttatggtgcggtggaaaaacgcagcgaa

SEQ ID NO: 810925 - DNA, 75 bp, synthetic construct
  source 1..75: mol_type = other DNA
tgtggttcagcgctctcccttaagacgaggcatggcaacatactggtttctgaaaggagagaggcaggcgggcca

SEQ ID NO: 810926 - DNA, 75 bp, synthetic construct
  source 1..75: mol_type = other DNA
atggtgccgatgtggtgtgtgatgggtgtgtgtgtggccatcacctgcacggcatgtctggtgctgacgctgatg

SEQ ID NO: 810927 - DNA, 75 bp, synthetic construct
  source 1..75: mol_type = other DNA
gaaaggtgataccgcaggtactggcggcaaaccggctaccctgtctactggcgctgtggttaaagttccgctgtt

SEQ ID NO: 810928 - DNA, 75 bp, synthetic construct
  source 1..75: mol_type = other DNA
atgaatctgtccatctctcaaaaagcgacaatgaccagcattgagatcgcggaactggtaggtaagcgccctgat

SEQ ID NO: 810929 - DNA, 75 bp, synthetic construct
  source 1..75: mol_type = other DNA
gtttaccgggggcaataattctaaaatcacgacctccaacaatatggtagatcttacgctgtcatggaaaaaagg

SEQ ID NO: 810930 - DNA, 75 bp, synthetic construct
  source 1..75: mol_type = other DNA
cgcggcgtgtttaacgtgccaagttttgttgccacgctgggtttatggagcgcctgcgcggaatggggctgttta

SEQ ID NO: 810931 - DNA, 75 bp, synthetic construct
  source 1..75: mol_type = other DNA
gacgttccgctggcgattgcttgtctgctggtgttgctgttaggtgcgctgatgggaacgctcgccggggtgctg

SEQ ID NO: 810932 - DNA, 75 bp, synthetic construct
  source 1..75: mol_type = other DNA
cacacggtccttccgatttgtcaccagtctgcatggctgcggcgctgcactttgatctgtgggtccccaatttcg

SEQ ID NO: 810933 - DNA, 75 bp, synthetic construct
  source 1..75: mol_type = other DNA
tcgctgtatcaggtacgtactggctcacacggtccttccgatttgtcaccagtctgcatggctgcggcgctgcac

SEQ ID NO: 810934 - DNA, 75 bp, synthetic construct
  source 1..75: mol_type = other DNA
gccgattttgcatcgctttatcaggtacgtaccggttcgcatggcccttcagatttatcgcctgtttgtcatgcg

SEQ ID NO: 810935 - DNA, 75 bp, synthetic construct
  source 1..75: mol_type = other DNA
ctggtggcctcgttggtctgtttctgcaagaagacgtaaacaataaagaccttgatgctgaaacctatctggaaa

SEQ ID NO: 810936 - DNA, 75 bp, synthetic construct
  source 1..75: mol_type = other DNA
atgccgttaaaatgtcctaagtgtggtagccgaaatacagtgacagaaactgccggaaatatagcaaaggtgact

SEQ ID NO: 810937 - DNA, 75 bp, synthetic construct
  source 1..75: mol_type = other DNA
ggatatgattgttcatgaagaagcgttgcagtgtgccattgctgatattatcgccagtgaaaacgagatgcgagc

SEQ ID NO: 810938 - DNA, 75 bp, synthetic construct
  source 1..75: mol_type = other DNA
aagattccatgaagtcaatgaaacaatatttgccaaagcaagttatagtttaatacccgaagccggaggtttcat

SEQ ID NO: 810939 - DNA, 75 bp, synthetic construct
  source 1..75: mol_type = other DNA
agtatggtggactgatttaacgaaaattgaaataatttcaacctctgctctctcaaggattaatgagtattcaaa

SEQ ID NO: 810940 - DNA, 75 bp, synthetic construct
  source 1..75: mol_type = other DNA
aacggaaatggtttgttccacaggggaaaaatccaatttattttattcggtggataaaagaattaaatgaacatg

SEQ ID NO: 810941 - DNA, 75 bp, synthetic construct
  source 1..75: mol_type = other DNA
aactggtgaggtgcctgtaagcccatcttcatggtggtatctgcagacaccttacggcgctgcctactggcaggc

SEQ ID NO: 810942 - DNA, 75 bp, synthetic construct
  source 1..75: mol_type = other DNA
cttcaaagttcaatacgttaagcgcaatggtgataatacttctgattgctttattgctcgtgcagggggtacaca

SEQ ID NO: 810943 - DNA, 75 bp, synthetic construct
  source 1..75: mol_type = other DNA
ggcggtagcggaggaagtggcggtgctaaaacacctggcactggcgctaatgccattcagcatcaggctcagaac

SEQ ID NO: 810944 - DNA, 75 bp, synthetic construct
  source 1..75: mol_type = other DNA
tcagaaacagtttggcgaagcacggaaggagcttgcgggtaatcttgctcagtccggcgttgacccatccagtgg

SEQ ID NO: 810945 - DNA, 75 bp, synthetic construct
  source 1..75: mol_type = other DNA
gacccgccgccagatgaagaaccgattaaattgtcgcatcgtgagcgtagatctgcgaggatacgcgcctgctaa

SEQ ID NO: 810946 - DNA, 75 bp, synthetic construct
  source 1..75: mol_type = other DNA
agattgacacgaccacacgggggcaggtatcgcaggcagataaatatattgccgggctacaggatgttgcggctc

SEQ ID NO: 810947 - DNA, 75 bp, synthetic construct
  source 1..75: mol_type = other DNA
attaagcgcaatggtgataatacttgtgattgctttatcactttagcagggggtacacatgctcgctaccgttaa

SEQ ID NO: 810948 - DNA, 75 bp, synthetic construct
  source 1..75: mol_type = other DNA
ctggcactaatcatctgcggttgcgtcactgcggcgggtgcactggcgtacatcttcctggttcgtcagccgatc

SEQ ID NO: 810949 - DNA, 75 bp, synthetic construct
  source 1..75: mol_type = other DNA
ctggcactaatcatctgcggttgcgtcaccgcagcgggggcactggcgtacatcttcctggttcgtcagccgatc

SEQ ID NO: 810950 - DNA, 75 bp, synthetic construct
  source 1..75: mol_type = other DNA
atgagaaaacccacctataacgtgtacgtcacgcaggaaacccagcccgacgagaacggcgaaaaaaatacgtac

SEQ ID NO: 810951 - DNA, 75 bp, synthetic construct
  source 1..75: mol_type = other DNA
ggcgctggtctgggtgcggcaggtgcgtacgcgatgcataaggctggcggtagcggagctggcggcgctaaaaca

SEQ ID NO: 810952 - DNA, 75 bp, synthetic construct
  source 1..75: mol_type = other DNA
tagcggaggaagtggcggtgctaaaacaccgggtactggcgctaacgccattcagcatcaggctcagaactggag

SEQ ID NO: 810953 - DNA, 75 bp, synthetic construct
  source 1..75: mol_type = other DNA
ggcgctggtctgggtgcggcaggtgcatatgcgatgcataaggctggcggtagcggaggaagtggcggtgctaaa

SEQ ID NO: 810954 - DNA, 75 bp, synthetic construct
  source 1..75: mol_type = other DNA
atggaaaaaacggcgctaatacaatttattactgactacatcgcttcgcgaaggcaacccaaaatagatgccttt

SEQ ID NO: 810955 - DNA, 75 bp, synthetic construct
  source 1..75: mol_type = other DNA
accagcagctttggctggatccgtggcgaagcttgtcagatgaggctttcaaactggagcgtgagaaaaacgact

SEQ ID NO: 810956 - DNA, 75 bp, synthetic construct
  source 1..75: mol_type = other DNA
cgctacctgccacgtaactggttaacggatgcggcgaagcgtgccgggcaaattaagttagtcactcatggcgct

SEQ ID NO: 810957 - DNA, 75 bp, synthetic construct
  source 1..75: mol_type = other DNA
caaaagtgcgcttaaccacagaccgactggtcgtgcgtctggtgcatgatcgtgatgcctggcgtctggcggatt

SEQ ID NO: 810958 - DNA, 75 bp, synthetic construct
  source 1..75: mol_type = other DNA
aggttgacataaataatgtccatatccgaactgtgcgggcgaaatatattgatgagttgatcgatttgctgttca

SEQ ID NO: 810959 - DNA, 75 bp, synthetic construct
  source 1..75: mol_type = other DNA
gtcaatgccgcccacctgggcgacgctggatcgcgcgccacaaaacatgcgcagtattttttccctacgcggcga

SEQ ID NO: 810960 - DNA, 75 bp, synthetic construct
  source 1..75: mol_type = other DNA
tttgtggcgaaaaaaacgcggctggtttatgtacgccaccgcgctggctattttcggctactggctgtggcagtt

SEQ ID NO: 810961 - DNA, 75 bp, synthetic construct
  source 1..75: mol_type = other DNA
tttggctgtcggggctctgtttgggctaacatggtttatcggtgctgcgcggtcagcatataaagaagctccgcc

SEQ ID NO: 810962 - DNA, 75 bp, synthetic construct
  source 1..75: mol_type = other DNA
cggatccccgcccggcgattccgcatgatgaggtaatggcggaaatggaacaaattattgcccaaattgctgctg

SEQ ID NO: 810963 - DNA, 75 bp, synthetic construct
  source 1..75: mol_type = other DNA
accggaaaagacattatgctaggcaagacttacaccccggcagaatgtgaggcattgcttaataaagatcttcac

SEQ ID NO: 810964 - DNA, 75 bp, synthetic construct
  source 1..75: mol_type = other DNA
agattctggcggctgcggcgggtggggcaatagcaattgctgccgtgatgattaaaccgctggagggcgtggaat

SEQ ID NO: 810965 - DNA, 75 bp, synthetic construct
  source 1..75: mol_type = other DNA
gctgcatttggttcttcgtatctgttctctggattctgatactgtccacgctggacaaagagtggatgattgagg

SEQ ID NO: 810966 - DNA, 75 bp, synthetic construct
  source 1..75: mol_type = other DNA
gcgttaatcaccacgttgttattgcgtggtgcccagacgccgggtgaactgcgcagccgcgccgcgcgaatgtat

SEQ ID NO: 810967 - DNA, 75 bp, synthetic construct
  source 1..75: mol_type = other DNA
ggtttcgcctgtactaccgcttcaatgagtgaacaaaacaaagtgtttgagcaggcttttttcacgatgataaac

SEQ ID NO: 810968 - DNA, 75 bp, synthetic construct
  source 1..75: mol_type = other DNA
cagcaaaagccctggtgaaatatgtggctgcgccgctggcactttatcttgtggcgcaaggagttgctcaggctg

SEQ ID NO: 810969 - DNA, 75 bp, synthetic construct
  source 1..75: mol_type = other DNA
atggctgaaatgactgttttaaataatgtcatggcaacgtctgcgaaaaaacgcaagccgggtttgttgtcatgt

SEQ ID NO: 810970 - DNA, 75 bp, synthetic construct
  source 1..75: mol_type = other DNA
ggaactacgtaaagccagagctcagttgaaactgaatgagctgctactgaaactggatcgctaccgggtgatagt

SEQ ID NO: 810971 - DNA, 75 bp, synthetic construct
  source 1..75: mol_type = other DNA
cgatcgtggatggcgtagtaggccagggctaccgggcccggttctacagcgcaggagagttgttgcaggaactac

SEQ ID NO: 810972 - DNA, 75 bp, synthetic construct
  source 1..75: mol_type = other DNA
ctgttaaaaatgagtgtgtatgggggagggatcttaggcttgggtattggtttgttgcatatcatgaaagttaag

SEQ ID NO: 810973 - DNA, 75 bp, synthetic construct
  source 1..75: mol_type = other DNA
caacgccgttcgtcaggtaaaagcggcattgttgtcatctcaggatttatctgtttattctatgaatgccccagg

SEQ ID NO: 810974 - DNA, 75 bp, synthetic construct
  source 1..75: mol_type = other DNA
acccttacccggcaatgtcctggctttatcctgaacggggtgactttattgccgtggtcggcagaatacaggata

SEQ ID NO: 810975 - DNA, 75 bp, synthetic construct
  source 1..75: mol_type = other DNA
aggacgttcccattacgggaggtccctacaaaaatattgtagctgattatggtcctgccaatggaccgctgatta

SEQ ID NO: 810976 - DNA, 75 bp, synthetic construct
  source 1..75: mol_type = other DNA
tgatgattgggtattgcagtttaatcatcatcagcactggcagtcgatgtaccgttttgatctctgcgagcagca

SEQ ID NO: 810977 - DNA, 75 bp, synthetic construct
  source 1..75: mol_type = other DNA
acctatacgccgggcgcggatgataacgccagcggcgtggcaggattactcgaactggcacgtttgttacagcag

SEQ ID NO: 810978 - DNA, 75 bp, synthetic construct
  source 1..75: mol_type = other DNA
atattgataatctgaataggtccgcagagtatataaaagaggtctttgtcagtagcggtgccagagttaccgcgc

SEQ ID NO: 810979 - DNA, 75 bp, synthetic construct
  source 1..75: mol_type = other DNA
cagaccctcgccccgcaattccacatgacgaggtaatagctgaaatggaaaatcttattgctcaaattgctgtaa

SEQ ID NO: 810980 - DNA, 75 bp, synthetic construct
  source 1..75: mol_type = other DNA
gacgtggcctgccaccggcggggttgtagcgctcagtgatcctgcgcgactgaaaaagctgatgagcctggtggc

SEQ ID NO: 810981 - DNA, 75 bp, synthetic construct
  source 1..75: mol_type = other DNA
gtgatgacgccgcaggcgtttggccagcttttgcgggctgaagtgctgcgccagacaacgctcacctgtggagtc

SEQ ID NO: 810982 - DNA, 75 bp, synthetic construct
  source 1..75: mol_type = other DNA
atcgacgctctggacaaatggtttggtgacggactaggccattcagtagataaattgctggcagggggtaacgat

SEQ ID NO: 810983 - DNA, 75 bp, synthetic construct
  source 1..75: mol_type = other DNA
ccatttatatgccgacctggaaccgacagcagctggccattcgcgccatcaaatcggtactgcgtcaggactatc

SEQ ID NO: 810984 - DNA, 75 bp, synthetic construct
  source 1..75: mol_type = other DNA
cgttcgtcgccgggcacgcgctgaactgctacaacgcggtgacgctgaaaatattgctcaaacagggcatgatgc

SEQ ID NO: 810985 - DNA, 75 bp, synthetic construct
  source 1..75: mol_type = other DNA
tcacttttctcgccaactggaagaacgtctggggctgatcgaagtccaggcgccgattcttagccgtgtggggga

SEQ ID NO: 810986 - DNA, 75 bp, synthetic construct
  source 1..75: mol_type = other DNA
ccagcatccgtgacaataataactctggcatcggggggcagggattgagcaagggactcaaggaaatcatgattg

SEQ ID NO: 810987 - DNA, 75 bp, synthetic construct
  source 1..75: mol_type = other DNA
atgagtgcaataatcaccccatatgtcgtaaatgaaactggtgtggctgtctttcctgtagataagcccaccagc

SEQ ID NO: 810988 - DNA, 75 bp, synthetic construct
  source 1..75: mol_type = other DNA
aactacattggcgcaggtcgccgtttcattatctccccacttccgcgtgaacaggctgaaaacacgccagatggc

SEQ ID NO: 810989 - DNA, 75 bp, synthetic construct
  source 1..75: mol_type = other DNA
gttattactacgccagaagaccagcatggatttattagactactaggggatggaacccaatttggtattaatctc

SEQ ID NO: 810990 - DNA, 75 bp, synthetic construct
  source 1..75: mol_type = other DNA
tggtgaaaactttattggaaatgatacagtatgccttgtgcttggagataacatcttttttggacaaggttttac

SEQ ID NO: 810991 - DNA, 75 bp, synthetic construct
  source 1..75: mol_type = other DNA
aggttttgcgtggcttgacacagggacacacgatagtttaattgaagcaggcagtttcgttgagacagttcaaaa

SEQ ID NO: 810992 - DNA, 75 bp, synthetic construct
  source 1..75: mol_type = other DNA
gtcacccaaaaagttttccggctacttcagcttctaccgcaagcacaaagagaagtttgatcgggcgagtaagaa

SEQ ID NO: 810993 - DNA, 75 bp, synthetic construct
  source 1..75: mol_type = other DNA
atgaataattcaattcccgagagatttatttttcaatgtgctttatttaaaaatctcgagagggaggtgttcatg

SEQ ID NO: 810994 - DNA, 75 bp, synthetic construct
  source 1..75: mol_type = other DNA
acaattcacggggacaacagaagctggtggtgcagctactgatttaggtctttccagaactaatgcaattattcg

SEQ ID NO: 810995 - DNA, 75 bp, synthetic construct
  source 1..75: mol_type = other DNA
gaagaaagatcttgatattaagttggttaactgtgatgtcaatgaactggctagtactggtagtgtaaaagtatc

SEQ ID NO: 810996 - DNA, 75 bp, synthetic construct
  source 1..75: mol_type = other DNA
tatggtacgcctcgtactcgctcccgggcgggaagcgaattaaggagtctcttggcacaaaggacaagcggcaag

SEQ ID NO: 810997 - DNA, 75 bp, synthetic construct
  source 1..75: mol_type = other DNA
atgaggggatctctcagggctacgcatctttcatttataaaggccctactaagagccgcagagcgtgaatggaaa

SEQ ID NO: 810998 - DNA, 75 bp, synthetic construct
  source 1..75: mol_type = other DNA
atgaataattcaatccccgagagatttatttttcaatgtgctttgtttaaaaatctcgagagggaggtgctcatg

SEQ ID NO: 810999 - DNA, 75 bp, synthetic construct
  source 1..75: mol_type = other DNA
tcggtcctgcgccaggactacagcaactgggagatgatcatcgtggatgattgctccacctcctgggaacaactg

SEQ ID NO: 811000 - DNA, 75 bp, synthetic construct
  source 1..75: mol_type = other DNA
tcagttgtttaccctctaccagatccgcaataaacgcatgacatggcgcactttgttgacgttgctgtcggtgcg

SEQ ID NO: 811001 - DNA, 75 bp, synthetic construct
  source 1..75: mol_type = other DNA
ttgcaatgattctggtttctttttgtgctaatgctgcaaatcagggacagggcgctattaacttcaaaggtactg

SEQ ID NO: 811002 - DNA, 75 bp, synthetic construct
  source 1..75: mol_type = other DNA
cagtctattgattttggacagatttcaaaagcgcatttaaacaatggaggtctttctattaaaaaggatgttgat

SEQ ID NO: 811003 - DNA, 75 bp, synthetic construct
  source 1..75: mol_type = other DNA
aaatccagtgctgataatgcagcgattaaagaaggtgaatttactgcggttactaacttcaatctgacctacgag

SEQ ID NO: 811004 - DNA, 75 bp, synthetic construct
  source 1..75: mol_type = other DNA
tctgcactacagtgcttgggtcaaaaaatccagtgctgataatgcagcgattaaagaaggtgaatttactgcggt

SEQ ID NO: 811005 - DNA, 75 bp, synthetic construct
  source 1..75: mol_type = other DNA
ggatgttctgaaaccaggaaggcttcagacaaaaagccgggtgaagccgctgttctctgggtcaagcgtggtgat

SEQ ID NO: 811006 - DNA, 75 bp, synthetic construct
  source 1..75: mol_type = other DNA
acggcgaaatgcagatcacctcgtcaccgaaaaaattctccggatacttccacttttaccgcaagcacaaagaca

SEQ ID NO: 811007 - DNA, 75 bp, synthetic construct
  source 1..75: mol_type = other DNA
caggaagaacgcctgtctgaactggagtctgctctgcagaagcagcaacgggcaatgcctgtagttccacactgg

SEQ ID NO: 811008 - DNA, 75 bp, synthetic construct
  source 1..75: mol_type = other DNA
cgcaagcagaaccctgaaaacctgtttaccgccgccgaagaaacggcgatcgaactggaagaaacccgcgacgat

SEQ ID NO: 811009 - DNA, 75 bp, synthetic construct
  source 1..75: mol_type = other DNA
tgccacgcacaacccactggcgaaccgcaagcagaaccctgaaaacctgtttaccgccgccgaagaaacggcgat

SEQ ID NO: 811010 - DNA, 75 bp, synthetic construct
  source 1..75: mol_type = other DNA
ctggcaggcaagatggcgctgtatgccgatgttgagccaacggagtctctggtggagctggtgaaaaaaggccag

SEQ ID NO: 811011 - DNA, 75 bp, synthetic construct
  source 1..75: mol_type = other DNA
atgacagtgaaagcaaagcgtttccgtatcggggtggaaggtgccaccactgacgggcgcgagatccagcgtgaa

SEQ ID NO: 811012 - DNA, 75 bp, synthetic construct
  source 1..75: mol_type = other DNA
gtgcataaggccgtggagctggtcgccactgagcagcagaacctgagcgcacgcactgaaaaatccctgtctgag

SEQ ID NO: 811013 - DNA, 75 bp, synthetic construct
  source 1..75: mol_type = other DNA
cagcctatatacctaaatcggtgagcacgcaaacaaaagcaacacacctggcaatgatcaaggctattctgcgcg

SEQ ID NO: 811014 - DNA, 75 bp, synthetic construct
  source 1..75: mol_type = other DNA
ctgagccaggaagatagccgcaaagattatcgccagcgcacgccgggcggctctgcacctgctggctctctgacc

SEQ ID NO: 811015 - DNA, 75 bp, synthetic construct
  source 1..75: mol_type = other DNA
gctacggcaaggtgactgcgctgtttgctgaagaaatcacggaaggcccgctggcaggcaagatggcgctgtatg

SEQ ID NO: 811016 - DNA, 75 bp, synthetic construct
  source 1..75: mol_type = other DNA
gctctgcaggagcagcaaaccgcctttaaagaactggtgaataagctgagtcatgaagacagccgccaggactac

SEQ ID NO: 811017 - DNA, 75 bp, synthetic construct
  source 1..75: mol_type = other DNA
ctggcaggcaagatggcattgtatgccgacgttgagccaacggagtccttggtggaactggtgaaaaaaggccag

SEQ ID NO: 811018 - DNA, 75 bp, synthetic construct
  source 1..75: mol_type = other DNA
tcggcaagcctgacaggtgctgcatctgaaggggcgacggtatccaactggaccgagcaaggcgatggttcctat

SEQ ID NO: 811019 - DNA, 75 bp, synthetic construct
  source 1..75: mol_type = other DNA
gttaccctgttctcggcaaataaccctgttggggggaatgtgtgggtcgacattgaggctccggaaggagtgacg

SEQ ID NO: 811020 - DNA, 75 bp, synthetic construct
  source 1..75: mol_type = other DNA
gttctacggcatctggctggacaaataatggtgatgggacgtggactgcgcagattactctcggctctacggcgg

SEQ ID NO: 811021 - DNA, 75 bp, synthetic construct
  source 1..75: mol_type = other DNA
agccgctgttctctggatcaagcgtggtgatgtgggagcgctgcagaaagcccggaacagagccagttatctcgt

SEQ ID NO: 811022 - DNA, 75 bp, synthetic construct
  source 1..75: mol_type = other DNA
tcacggtgaaattcaacgcggatgccagcaccggtcaggcaaacctgcaggtagacaccgctgttcaaaaagtgg

SEQ ID NO: 811023 - DNA, 75 bp, synthetic construct
  source 1..75: mol_type = other DNA
cagttgcctacgataacaaaggcaatgcctcgaaacgtgtgcagacagaagtggttattagcggagctggtatga

SEQ ID NO: 811024 - DNA, 75 bp, synthetic construct
  source 1..75: mol_type = other DNA
atgaagcaaccaatacacaatgcttactggttatcccgttttgaaagcattctcaacagtgccctgacgcaacac

SEQ ID NO: 811025 - DNA, 75 bp, synthetic construct
  source 1..75: mol_type = other DNA
attcagcaatgcagaaaatgacgaaccggcgtaatgaggaaaactggaaactcagggcagaagcatgcagaaaaa

SEQ ID NO: 811026 - DNA, 75 bp, synthetic construct
  source 1..75: mol_type = other DNA
gcatcggggtggaaggtgccactaccgacggacgtgaaatccagcgtgaatggttggaacagatggcagccagct

SEQ ID NO: 811027 - DNA, 75 bp, synthetic construct
  source 1..75: mol_type = other DNA
ctttcaaaccggctggaaatattgtgactcgttccctgaaggccactaaatcacaggcaaagccaacactgggtg

SEQ ID NO: 811028 - DNA, 75 bp, synthetic construct
  source 1..75: mol_type = other DNA
ctctgcattatttctggtgtcgggagtttggcaaggaaaaaggcaggaaacattatcacgtgatattactgctca

SEQ ID NO: 811029 - DNA, 75 bp, synthetic construct
  source 1..75: mol_type = other DNA
gcgacgctgatccaactggcatggtgcagtactctgcatcttgagccttggcagggtaatggactggttcatttt

SEQ ID NO: 811030 - DNA, 75 bp, synthetic construct
  source 1..75: mol_type = other DNA
agcctatctggtcggcctggctgcaactgatgaccctgccagtctgggtacggaaatgctgacattcagcgccag

SEQ ID NO: 811031 - DNA, 75 bp, synthetic construct
  source 1..75: mol_type = other DNA
ttgaaacagctgacggcgagtatcaggcgaaaaaagcgatcgtctgcgcgggaacctgggtaaaagacctgctgc

SEQ ID NO: 811032 - DNA, 75 bp, synthetic construct
  source 1..75: mol_type = other DNA
aggtgcttttgtggtgattatggtggtgacaatcgggttaagtttccttgatttcaccctcgcctttacgctggg

SEQ ID NO: 811033 - DNA, 75 bp, synthetic construct
  source 1..75: mol_type = other DNA
tgtgctgttcgagttaatagcgcatcgctatgaacgtgggagcctggtgataaccagtaaccatccgttcagcat

SEQ ID NO: 811034 - DNA, 75 bp, synthetic construct
  source 1..75: mol_type = other DNA
tgcgtcggttttaggggaaatagccgctgactttgcacaagacaaaaaaagcaattttgatttgacgccattcag

SEQ ID NO: 811035 - DNA, 75 bp, synthetic construct
  source 1..75: mol_type = other DNA
gaaggaagcgggctgtgcgcagctgttcaactgcccggtcaccgcaattcgtcatgacgatgatggcgtaactat

SEQ ID NO: 811036 - DNA, 75 bp, synthetic construct
  source 1..75: mol_type = other DNA
ttgtgcgctctggcgtcatcaaccttggtccttctgactccaaattcctcaccaacgttgcccacagtgcggaac

SEQ ID NO: 811037 - DNA, 75 bp, synthetic construct
  source 1..75: mol_type = other DNA
cggcgtgaagggtgtgattgtgggccgggcactgcttgaaggaaaatttactgtgacggaggccattcaatgctg

SEQ ID NO: 811038 - DNA, 75 bp, synthetic construct
  source 1..75: mol_type = other DNA
ccctgcgtggtactggcgtgcgcggcgtaatagttggtcgtgcattactggaaggtaaattcaccgtgaaggagg

SEQ ID NO: 811039 - DNA, 75 bp, synthetic construct
  source 1..75: mol_type = other DNA
atccatcacggatatatgttcgaactgaaaggagaaagctacaggaaaaagacagcgaaggcagtaacaagcgcg

SEQ ID NO: 811040 - DNA, 75 bp, synthetic construct
  source 1..75: mol_type = other DNA
aaggctggtttgaacgcttcggtgccgatgccttagtgctggcgctggatgtccgtattgacgagcaaggcaaca

SEQ ID NO: 811041 - DNA, 75 bp, synthetic construct
  source 1..75: mol_type = other DNA
tcgacggcaccgtggtgcgtctccatcagggcgattacggcaaacaacgcgattacggtaacgacccgctgccac

SEQ ID NO: 811042 - DNA, 75 bp, synthetic construct
  source 1..75: mol_type = other DNA
acgcttcggtgccgatgcgctggtgctggcgctggatgtacgcattgacgagcaaggcaacaaacaggtggcagt

SEQ ID NO: 811043 - DNA, 75 bp, synthetic construct
  source 1..75: mol_type = other DNA
ctggctaatggacagtctgctaaccagataactctgaccgtcgtggatacctatggcaacccgttacaggggcaa

SEQ ID NO: 811044 - DNA, 75 bp, synthetic construct
  source 1..75: mol_type = other DNA
caggaagaacgcctgtctgagctggagactgctctgcaggcacagcaaaccgcctttaacgaactggtggacaag

SEQ ID NO: 811045 - DNA, 75 bp, synthetic construct
  source 1..75: mol_type = other DNA
agactgccctgcaggcacagcaaaccgtctttaacgaactggtggacaagctgagtcatgaagacagtcgccagg

SEQ ID NO: 811046 - DNA, 75 bp, synthetic construct
  source 1..75: mol_type = other DNA
gcccgaagttcgctgatacggacaaagcctacctggttggcctggctgccactgatgatccagccagtctgggta

SEQ ID NO: 811047 - DNA, 75 bp, synthetic construct
  source 1..75: mol_type = other DNA
gtgcataaggccgtggaactggtcgctaccgagcagcagaacctgagtacgcgcaccgaaaaatccctgtctgaa

SEQ ID NO: 811048 - DNA, 75 bp, synthetic construct
  source 1..75: mol_type = other DNA
cgaactggaagaaatccaggaggacaagccgtccctgtttgcccgcgtcacggcgctgtttaccaaaaaagagca

SEQ ID NO: 811049 - DNA, 75 bp, synthetic construct
  source 1..75: mol_type = other DNA
agcctatctggtcggcctggctgccactgatgatcccgccagtctgggtacggaaatgctgacattcagcgccag

SEQ ID NO: 811050 - DNA, 75 bp, synthetic construct
  source 1..75: mol_type = other DNA
ccctgagcgctaacgagccgtcaggtgatgtggttgctgatggtcagcaagcctatacgttgacgttgactgcgg

SEQ ID NO: 811051 - DNA, 75 bp, synthetic construct
  source 1..75: mol_type = other DNA
gtctttcgttgtcggcaagtttgacggggaccgcctctgaaggggcgaccgtttccagttggaccgaaaaaggtg

SEQ ID NO: 811052 - DNA, 75 bp, synthetic construct
  source 1..75: mol_type = other DNA
gacgttctgtagcgaacaggtcgaccaaattcgcgctgagctgtctgaactgcaaacgcagcatcagcagctaca

SEQ ID NO: 811053 - DNA, 75 bp, synthetic construct
  source 1..75: mol_type = other DNA
tgcagcccataacccgttggcaaaccgcaagcagaatcccgccaatctttttaccgctgcagaggaaacggtgat

SEQ ID NO: 811054 - DNA, 75 bp, synthetic construct
  source 1..75: mol_type = other DNA
gcccgaagtttgctgatacgggcaaagcctacctggttggcctggctgccactgatgatcccgccagtctgggca

SEQ ID NO: 811055 - DNA, 75 bp, synthetic construct
  source 1..75: mol_type = other DNA
ggcagggaaagtggacattgagcttatgtcaacggttgcgggggaacacagcatcacggcctcagtgaataatgc

SEQ ID NO: 811056 - DNA, 75 bp, synthetic construct
  source 1..75: mol_type = other DNA
ggggacaactgagcattgcgaacgcgtcagctacgatgttccggtgattgctgatcagcccctgttgtattcata

SEQ ID NO: 811057 - DNA, 75 bp, synthetic construct
  source 1..75: mol_type = other DNA
gcaggaaattccgcgaaggcggcaaagacgtccgagacgaacgccaggtcttctgaaacggcagcgggacagagt

SEQ ID NO: 811058 - DNA, 75 bp, synthetic construct
  source 1..75: mol_type = other DNA
tagcgacaaggcatccggcaaggatgtcaagcgtccgcaactggaagcgctgataagcttcgcccgcaccggcga

SEQ ID NO: 811059 - DNA, 75 bp, synthetic construct
  source 1..75: mol_type = other DNA
gctgcctcatcgctaactttgcaacagtgccagcgtccgcaactggaagcgctgataagcttcgcccgcaccggc

SEQ ID NO: 811060 - DNA, 75 bp, synthetic construct
  source 1..75: mol_type = other DNA
atgatatggattttttcggattgtggcctatggttggtcgtctaagacaacaacataaaaatggtcagtttatac

SEQ ID NO: 811061 - DNA, 75 bp, synthetic construct
  source 1..75: mol_type = other DNA
ggttttcctggattctggggggcaacaccagaatataaagcagcatttaaagcattaaaagtaagacaacgctta

SEQ ID NO: 811062 - DNA, 75 bp, synthetic construct
  source 1..75: mol_type = other DNA
atatttatttgtcctggggttatggaaaaaagcaattatagttctattacttggtattctatctctatttgttgg

SEQ ID NO: 811063 - DNA, 75 bp, synthetic construct
  source 1..75: mol_type = other DNA
ttggcgtggcgactatgccgtggatggcgaaaatcggcgtcttactggcggggccgggttttcgctggtgttccc

SEQ ID NO: 811064 - DNA, 75 bp, synthetic construct
  source 1..75: mol_type = other DNA
ggggatagtacagctcagcagtgcgaccaacagcacttccgagtcactggcggcaacgccaaaagcggttaaggc

SEQ ID NO: 811065 - DNA, 75 bp, synthetic construct
  source 1..75: mol_type = other DNA
ctgcgccgaaagggactaataatactcagatcgcaagcacggcttatgtgatggccgcgattgccgcacttgtag

SEQ ID NO: 811066 - DNA, 75 bp, synthetic construct
  source 1..75: mol_type = other DNA
tttcgcatcaatgccctgtttatggcggcatacaacgaaattcttgagttggatgcctgctttaaggacagagga

SEQ ID NO: 811067 - DNA, 75 bp, synthetic construct
  source 1..75: mol_type = other DNA
tccgcgcagaagtggcggaagtcgccaacagcatgtgtgacctgcgggcgacgctgaacgggatggagcaccgct

SEQ ID NO: 811068 - DNA, 75 bp, synthetic construct
  source 1..75: mol_type = other DNA
agacggcgctggctgcggcggcatcagccattatggcgggatttccgaaccggcgttatacggcgtggcgatccg

SEQ ID NO: 811069 - DNA, 75 bp, synthetic construct
  source 1..75: mol_type = other DNA
ggcctgacgccgggggcgaccttgcaacttagcgatcttgttgccctggttcgccatccgcaaggtgcgtttaaa

SEQ ID NO: 811070 - DNA, 75 bp, synthetic construct
  source 1..75: mol_type = other DNA
caacatgacgtagaggcaatctggctgggcgatatacaagaacatcctgcaatcgcgcgcagatttgtgaattag

SEQ ID NO: 811071 - DNA, 75 bp, synthetic construct
  source 1..75: mol_type = other DNA
cgaacgcctgacccgtcagaccctttttcgcatcaatgccctgtttatggcggcatacaacgaaattcttgagct

SEQ ID NO: 811072 - DNA, 75 bp, synthetic construct
  source 1..75: mol_type = other DNA
tcaaaatttactactacaccaacctgctcctcgctgcgctggcggtgttgatgtggttcctgccctccggcccgg

SEQ ID NO: 811073 - DNA, 75 bp, synthetic construct
  source 1..75: mol_type = other DNA
cttatcaaacgctgtggctggcggtgatcctcggtaatggcgtgattcttggcttcacattgccactgcacttct

SEQ ID NO: 811074 - DNA, 75 bp, synthetic construct
  source 1..75: mol_type = other DNA
gcgttcggtacttacctgctcctttcagtcggttataccgccatcaacgtaccgtactgcgcgctgatcaacacc

SEQ ID NO: 811075 - DNA, 75 bp, synthetic construct
  source 1..75: mol_type = other DNA
gaggatattcctgttgaggaagcggctgcccaggcgcgaaagcatcagagcgtacaaccgaccgtcgccaaagaa

SEQ ID NO: 811076 - DNA, 75 bp, synthetic construct
  source 1..75: mol_type = other DNA
agcgccatttcggcgctggtttacaccattcatggttatctggctggctttcagtcgccattatgggcgcgctgt

SEQ ID NO: 811077 - DNA, 75 bp, synthetic construct
  source 1..75: mol_type = other DNA
agccattatggcggggatttccgaaccggcgttatacggcgtggcgatccgcctgaaacgtccgcttatcgccag

SEQ ID NO: 811078 - DNA, 75 bp, synthetic construct
  source 1..75: mol_type = other DNA
agttgggcaggcgtgtcggtgatttacctgtcggcggcggggctggtggcaatcgcgctattgctggcgtggcga

SEQ ID NO: 811079 - DNA, 75 bp, synthetic construct
  source 1..75: mol_type = other DNA
cggttaacttcattggtcaacttgcgcaagcgaaaccagaagctctcgacaaactcaacgttgatcaggcgatcg

SEQ ID NO: 811080 - DNA, 75 bp, synthetic construct
  source 1..75: mol_type = other DNA
ttgaaaccggcgtctggtgtaaagattttcattcctttgccgatggggaaagtatgttgatgcacatgcgcagcg

SEQ ID NO: 811081 - DNA, 75 bp, synthetic construct
  source 1..75: mol_type = other DNA
acgctgcaacggatttttgatttctggcatcgcccttacggcaggagcgcctctgtgtattagctggtttggcct

SEQ ID NO: 811082 - DNA, 75 bp, synthetic construct
  source 1..75: mol_type = other DNA
tcgagagaggaattacttaagagaaattcttttccgtcagtaaatcaaaacaaatatctgaatgcgatgttgcgt

SEQ ID NO: 811083 - DNA, 75 bp, synthetic construct
  source 1..75: mol_type = other DNA
tcgagagaggaattgcttaagagaaatagtttcggctctgttaatgacaacaaatatctgaatgcgatgtggcgg

SEQ ID NO: 811084 - DNA, 75 bp, synthetic construct
  source 1..75: mol_type = other DNA
tgaccgtcagcaacataatccgttactcatctgtgggcacagcgattttacggcgatccagtgtggtctgctggc

SEQ ID NO: 811085 - DNA, 75 bp, synthetic construct
  source 1..75: mol_type = other DNA
cgcttattgaccgcgtgttctccattatggcgcgcaaaaatatgcttccgccaccgcctgacgttatgcagggta

SEQ ID NO: 811086 - DNA, 75 bp, synthetic construct
  source 1..75: mol_type = other DNA
atctggctggaagtcgtgcagcgccgcatgaacgaagtgttcaacaaatcgaatttgtatcagtcactgcctgtt

SEQ ID NO: 811087 - DNA, 75 bp, synthetic construct
  source 1..75: mol_type = other DNA
ccgttggcttcatcggtcaactcgcacaattcaaacctgaagcactcgacaagctcgacgtggatgaggctatcg

SEQ ID NO: 811088 - DNA, 75 bp, synthetic construct
  source 1..75: mol_type = other DNA
agccgcgtcttccgcgtgggcgaagcgctggagtacggcatcgtcggcatcaataccgggattatttccaatgaa

SEQ ID NO: 811089 - DNA, 75 bp, synthetic construct
  source 1..75: mol_type = other DNA
agtggcgcgtgtgttcaggagtcatggcgtacttacattaatggtcagggagtatgaaaatgcgcttcttcatca

SEQ ID NO: 811090 - DNA, 75 bp, synthetic construct
  source 1..75: mol_type = other DNA
aacattagtttcagccaaggattcacacatcgacagcctcaaacaagcgatgctgttgattgagcacaagcatac

SEQ ID NO: 811091 - DNA, 75 bp, synthetic construct
  source 1..75: mol_type = other DNA
ggcctgatgactgttgttctggaaagctatctcagggaagaatttcccgatacgaacaaaagaagggggtcgcag

SEQ ID NO: 811092 - DNA, 75 bp, synthetic construct
  source 1..75: mol_type = other DNA
tcgtggtctcccggttcgcggtcagcgtaccaagaccaacgcgcgtacccgtaagggtccgcgcaaaccgatcaa

SEQ ID NO: 811093 - DNA, 75 bp, synthetic construct
  source 1..75: mol_type = other DNA
accgagcgtcattaccgcatcaatcagtgggaatcgagcgcctcctcgattgatgaatcgccggacgtgattttc

SEQ ID NO: 811094 - DNA, 75 bp, synthetic construct
  source 1..75: mol_type = other DNA
cattaatttatggtgaaacggggtatggcgaccagcacccggttgaaagcgtaaaaatcacctcgccagatgatc

SEQ ID NO: 811095 - DNA, 75 bp, synthetic construct
  source 1..75: mol_type = other DNA
ttgccgggttatgtccatgatgtgatgggctttagcgccttctgggcggggctggttatcagtctgcaatatttc

SEQ ID NO: 811096 - DNA, 75 bp, synthetic construct
  source 1..75: mol_type = other DNA
gagtccgttataacaccgatggaaatatatttggcgggtgttggggttcaaatttagctgattatctcaatagca

SEQ ID NO: 811097 - DNA, 75 bp, synthetic construct
  source 1..75: mol_type = other DNA
cgcccagcgtagtgctatcgttcgctggttttcagaaggtgacgggaataatgctatcacatggcccggcatgga

SEQ ID NO: 811098 - DNA, 75 bp, synthetic construct
  source 1..75: mol_type = other DNA
aaacggctttgattacaggggcagcaagtgggcttgggctggcgatggcgaaatgcatgcttgtcagcggtgcga

SEQ ID NO: 811099 - DNA, 75 bp, synthetic construct
  source 1..75: mol_type = other DNA
cgccatccacagtttttcgccaaaggggaagaggaacaaacgattaatcgcggtttacatcagcgcggcgttaat

SEQ ID NO: 811100 - DNA, 75 bp, synthetic construct
  source 1..75: mol_type = other DNA
cattgcgatgatttagtgactgaatttttgacccgcatgtcaccgttagcgccgcgcattgggcaatactggctg

SEQ ID NO: 811101 - DNA, 75 bp, synthetic construct
  source 1..75: mol_type = other DNA
aatttctcagcaaagagccgcataccgcgataaaaccagtcatgctttatttgcgactggcaggtatgagtggtt

SEQ ID NO: 811102 - DNA, 75 bp, synthetic construct
  source 1..75: mol_type = other DNA
ataattagaacaaatgttattgcttttttcttctcgtgggtctatttatttgtattgggtttatggaagaaggct

SEQ ID NO: 811103 - DNA, 75 bp, synthetic construct
  source 1..75: mol_type = other DNA
atgccacgtatacaaacttttgtcagcaatcaggttcgtgaagaaattgagaatctggtaactgaaaggaggcag

SEQ ID NO: 811104 - DNA, 75 bp, synthetic construct
  source 1..75: mol_type = other DNA
tgacctggttaagattggtggtaacggataacgctgccctggcggcactggaaaaatataacttcccgccattac

SEQ ID NO: 811105 - DNA, 75 bp, synthetic construct
  source 1..75: mol_type = other DNA
tcacccgcttccagcaaatagcccaacagcaggcaacaaaacaaatattgtttaccgacctgccgccgatggaaa

SEQ ID NO: 811106 - DNA, 75 bp, synthetic construct
  source 1..75: mol_type = other DNA
atgctgagctttcctcgcgacattaccgcctacgctgggctggatatcattagagaaaccttcacccgcgaatca

SEQ ID NO: 811107 - DNA, 75 bp, synthetic construct
  source 1..75: mol_type = other DNA
cctggtcgcgggcgttaacgtcccggtgcaggttggcggcggtgtgcgtagtgaagaagacgtagcgacgttact

SEQ ID NO: 811108 - DNA, 75 bp, synthetic construct
  source 1..75: mol_type = other DNA
gattacggtaacgacccgctgccgcgcttacaggattacgccgcgcagggtgccgaagtgctgcacctggtggat

SEQ ID NO: 811109 - DNA, 75 bp, synthetic construct
  source 1..75: mol_type = other DNA
ctgggagtaccttctgaagcgaccgcaaataatggtcaacagcagcaggtacaggagcagcgtcgtcgcattaat

SEQ ID NO: 811110 - DNA, 75 bp, synthetic construct
  source 1..75: mol_type = other DNA
tgatagcagtggctcgctgacacttgatttcggcccacgccaattcaccgttggttttgacgaaaccttaaaacc

SEQ ID NO: 811111 - DNA, 75 bp, synthetic construct
  source 1..75: mol_type = other DNA
taccaccttgctgacaatgaacgcagcgcccatgaattgacacgctggagcggacggctttgccaggccggacgc

SEQ ID NO: 811112 - DNA, 75 bp, synthetic construct
  source 1..75: mol_type = other DNA
attacagaattaatcagttatactgacatatccagattcagtgaaatcgcaaaatatcaggcatcacagcaaaca

SEQ ID NO: 811113 - DNA, 75 bp, synthetic construct
  source 1..75: mol_type = other DNA
cttttgctgagttacaaaggcgaattctggataatcaacagacagggagtgcgcaatctgatgcggcattgctct

SEQ ID NO: 811114 - DNA, 75 bp, synthetic construct
  source 1..75: mol_type = other DNA
aaaaatgtaatacccgtatttgatttacctgtgcttcccattcctgccgtcacggatatcacaccaggaattaca

SEQ ID NO: 811115 - DNA, 75 bp, synthetic construct
  source 1..75: mol_type = other DNA
gagttagtcactgacgtcattcccagggttaatgctaaagcggcaggaattttatctgaatgtcgtactcagtca

SEQ ID NO: 811116 - DNA, 75 bp, synthetic construct
  source 1..75: mol_type = other DNA
tctttttatatgaagaagtgtgtgccagatatccgcaagtggcgtttcagtcctccggcggcattggcgatatta

SEQ ID NO: 811117 - DNA, 75 bp, synthetic construct
  source 1..75: mol_type = other DNA
ctcaccgaagattcgtctcacgttgtgcgatgtttctgcgccagcagttgaagccagccgtgcaacacttgcggc

SEQ ID NO: 811118 - DNA, 75 bp, synthetic construct
  source 1..75: mol_type = other DNA
aactccgcacacgaaaggtaaagtgctggatgtcggctgtggcgcgggcgtgctttctgttgcctttgcgcgcca

SEQ ID NO: 811119 - DNA, 75 bp, synthetic construct
  source 1..75: mol_type = other DNA
tgcgcgccgaagtggcggaggtggccaatgccatgtgcgacctgcgtacaaccatgactgagatggagcagcggt

SEQ ID NO: 811120 - DNA, 75 bp, synthetic construct
  source 1..75: mol_type = other DNA
tcgccgtttcattatctccccacttccgcgtgaacaggctgaaaacactccagatggcgtagtggatctgaatta

SEQ ID NO: 811121 - DNA, 75 bp, synthetic construct
  source 1..75: mol_type = other DNA
gtctggaaaaacagccggtatttgatgccgataaattctggggcgaatacagcgtcgatggcctgacggtcaaaa

SEQ ID NO: 811122 - DNA, 75 bp, synthetic construct
  source 1..75: mol_type = other DNA
tcttaatagcggcggcgagttgcggattgtagcgaatgcgttcctgccttatccggatctgctggatgaaacatt

SEQ ID NO: 811123 - DNA, 75 bp, synthetic construct
  source 1..75: mol_type = other DNA
tctaaaggtgttatgactgatcgtgcagcgcgccaggctggtcttggcggcgaaattatctgctacgtagcctaa

SEQ ID NO: 811124 - DNA, 75 bp, synthetic construct
  source 1..75: mol_type = other DNA
tcaggccgcgaacaaagctgcggtcaccatgccttcctccaagctgaaagtggcaatcgccaacgtgctgaagga

SEQ ID NO: 811125 - DNA, 75 bp, synthetic construct
  source 1..75: mol_type = other DNA
tgcgcgccgacgtggcggaggtggccaatgccatgtgcgacctgcgtacaaccatgaatgagatggagcagcggt

SEQ ID NO: 811126 - DNA, 75 bp, synthetic construct
  source 1..75: mol_type = other DNA
ttatccaacgccaaaccttgcggcgcgtaagctgttaagtccagaagtggcgaacgataaaacgctctacccgga

SEQ ID NO: 811127 - DNA, 75 bp, synthetic construct
  source 1..75: mol_type = other DNA
ggaacgtctggtgcgtcagacgctgtttcgtgcaaaccgcctcctgatggaggcatataccgaaattctggaact

SEQ ID NO: 811128 - DNA, 75 bp, synthetic construct
  source 1..75: mol_type = other DNA
tgaacgcctgacacgccagacgctgtatcgcgccaatcgcctgttcatggaggcatataccgaaattctggaact

SEQ ID NO: 811129 - DNA, 75 bp, synthetic construct
  source 1..75: mol_type = other DNA
ttaaaccagcgagaaacgattgaggaaatcgcccgggggtataaccaaccagatgttttagctgcgctggcaaca

SEQ ID NO: 811130 - DNA, 75 bp, synthetic construct
  source 1..75: mol_type = other DNA
acgctgccattgggcgcacatgccatacttaataacacccaggaaggcactcagttgacgattagcggtcatcct

SEQ ID NO: 811131 - DNA, 75 bp, synthetic construct
  source 1..75: mol_type = other DNA
gattttaccgccattcagtgcggtcttctggcgcaaggcaatgtcatcacctttagcggccccatgctggtagca

SEQ ID NO: 811132 - DNA, 75 bp, synthetic construct
  source 1..75: mol_type = other DNA
cgccgcacagcgcggcgttcagcgccttaccgatgcggggcatcaggtcaataacgtcggggttattgcccgtcg

SEQ ID NO: 811133 - DNA, 75 bp, synthetic construct
  source 1..75: mol_type = other DNA
cgggtaatggggctggcgaataaaggctggataaagggcgaaccacaggatggaggctggatcggctggatgatc

SEQ ID NO: 811134 - DNA, 75 bp, synthetic construct
  source 1..75: mol_type = other DNA
tgactcggtaaatatggttctcccgccagtcacaaaagaaagccccccttctgaagttaaaactgcagttgtaag

SEQ ID NO: 811135 - DNA, 75 bp, synthetic construct
  source 1..75: mol_type = other DNA
tggaaaaagccagttgggaagtttgttcagtaccacttacgccagaacagcaaattttatggtatctcggtttcg

SEQ ID NO: 811136 - DNA, 75 bp, synthetic construct
  source 1..75: mol_type = other DNA
ggaagcgcggttcacgcggcttcgcttaatcgcccagtaaaattaatgatatccctggagatgattggctattac

SEQ ID NO: 811137 - DNA, 75 bp, synthetic construct
  source 1..75: mol_type = other DNA
agcgaaacagggaaaagcgcagggatttacgccagataccattgatgtactggcgcaacgaccagaatgtgacgt

SEQ ID NO: 811138 - DNA, 75 bp, synthetic construct
  source 1..75: mol_type = other DNA
attgctgtgatgggaggacatattttgggcgcgaaagtgagcacagaaaatgtccatcgctggtcgcagtttgct

SEQ ID NO: 811139 - DNA, 75 bp, synthetic construct
  source 1..75: mol_type = other DNA
gcaaaaggggatgataagtttatcaccaccgactatttgcaacagtgccgccaacaccatgtgtgaccttcgggc

SEQ ID NO: 811140 - DNA, 75 bp, synthetic construct
  source 1..75: mol_type = other DNA
cactgggcgttgcgatcaaccttaatgcgggcgcggctgtcatttattcagcacgtaccctggatgcagtaagcc

SEQ ID NO: 811141 - DNA, 75 bp, synthetic construct
  source 1..75: mol_type = other DNA
gcctgagagtcaagactacccttactctgcgatgtcctggctttatcccgatcgaggtgactttattgctgtggt

SEQ ID NO: 811142 - DNA, 75 bp, synthetic construct
  source 1..75: mol_type = other DNA
gcaaaagaaaactgggcatttacctcgctggggattttaggcaatgacgacaccgcgcgtaaactaaccccgctc

SEQ ID NO: 811143 - DNA, 75 bp, synthetic construct
  source 1..75: mol_type = other DNA
tgcccaaaccaaaccagagcgatgaaaaaactcaggcaactgacgcggttaatctcttcaaacagttgaaaaaag

SEQ ID NO: 811144 - DNA, 75 bp, synthetic construct
  source 1..75: mol_type = other DNA
gcccggatattgccaatgctatggctctacgctatgcagatcaaaacgttccggcgatgacctggttaagactgg

SEQ ID NO: 811145 - DNA, 75 bp, synthetic construct
  source 1..75: mol_type = other DNA
aagcagaatcactaccgaactggcatcaacgtctatgtcatcatctttcactcgcttcagaagatgagtggcaac

SEQ ID NO: 811146 - DNA, 75 bp, synthetic construct
  source 1..75: mol_type = other DNA
tcaggcatcacagcaaaccttatttaccgacctgccactaattgaaaaagaaagctgggagacatctttcattcc

SEQ ID NO: 811147 - DNA, 75 bp, synthetic construct
  source 1..75: mol_type = other DNA
ggcaagaaaaagcacctggaatacttaagcaaagcctgtcaaaaacatcccgctgcggctattgccgcttatgca

SEQ ID NO: 811148 - DNA, 75 bp, synthetic construct
  source 1..75: mol_type = other DNA
ctggcctggggaatcccagcataaacgggcggtgtccgggctggatgtattagctgatattggcagcgatgttgc

SEQ ID NO: 811149 - DNA, 75 bp, synthetic construct
  source 1..75: mol_type = other DNA
aatcgcggactgacaatggctgaactggaagaccgcctggctccagatttagggcttgatatcaacggctcgctg

SEQ ID NO: 811150 - DNA, 75 bp, synthetic construct
  source 1..75: mol_type = other DNA
cccatcaccaaagccactcctgaagttgaaacttcccctgagagtaaaaaccaacgcccgtggctggctgatgat

SEQ ID NO: 811151 - DNA, 75 bp, synthetic construct
  source 1..75: mol_type = other DNA
aacctttttcattaatttatggtgaaacggggtatggcgaccagctaccggttgaaagcgtaaaaatcacctcgc

SEQ ID NO: 811152 - DNA, 75 bp, synthetic construct
  source 1..75: mol_type = other DNA
atgcagaatgagacactttatctatcaggacgaaaatcacataaattctgggcggtggagcagcaaggcaacgag

SEQ ID NO: 811153 - DNA, 75 bp, synthetic construct
  source 1..75: mol_type = other DNA
gttgatgtgtcacttaacccgacgactgttatggggggtatataacgatgaaaacacccttatgacctgtttccg

SEQ ID NO: 811154 - DNA, 75 bp, synthetic construct
  source 1..75: mol_type = other DNA
ttaaaccagcgagaaacgattgaagaaatcgcccggagatacaaccaacctgatgttttagctgcgctggcaaca

SEQ ID NO: 811155 - DNA, 75 bp, synthetic construct
  source 1..75: mol_type = other DNA
gattcagcggtgatttctcgtttttttgcatccctgaaagccgaaattcaggcttaccagcggaaaaaaagatgt

SEQ ID NO: 811156 - DNA, 75 bp, synthetic construct
  source 1..75: mol_type = other DNA
tctgtcattattggtccctggatttgcccctatatttccagacacctgttatcacttaacccattactggcttgc

SEQ ID NO: 811157 - DNA, 75 bp, synthetic construct
  source 1..75: mol_type = other DNA
tatcggcattggtgctcatgcccattctgtcattattggtccctggatttgcccctatatttccagacacctgtt

SEQ ID NO: 811158 - DNA, 75 bp, synthetic construct
  source 1..75: mol_type = other DNA
atgaccatacgcattaccacaccgagtacatccagcggtgaaggcatccctaatgctcaatttacttatattaat

SEQ ID NO: 811159 - DNA, 75 bp, synthetic construct
  source 1..75: mol_type = other DNA
taccgtcaggtggaacagcagtatcatcagttaatctggcttcaaaaggtcgggtaaccgcgctgacagacaata

SEQ ID NO: 811160 - DNA, 75 bp, synthetic construct
  source 1..75: mol_type = other DNA
ggcaacggcggcaggaaattccgcgaaggcggcaaagacgtctgagacaaacgccaagtcttctgaaacggcagc

SEQ ID NO: 811161 - DNA, 75 bp, synthetic construct
  source 1..75: mol_type = other DNA
ggcgacagaggctgctggtagtgcgaaggcagcagctcagagcaaaagtacggcggaatctgcagcaacgcgcgc

SEQ ID NO: 811162 - DNA, 75 bp, synthetic construct
  source 1..75: mol_type = other DNA
tccagcggaatccgcggcaacgcgcgccgagacagcagcaaaacgggcagaggatattgcatccgccgtggcgct

SEQ ID NO: 811163 - DNA, 75 bp, synthetic construct
  source 1..75: mol_type = other DNA
ttcggctgaatccgcggcaacgcgcgccgagacagcagcaaaacgggcagaggatattgcatccgccgtggcgct

SEQ ID NO: 811164 - DNA, 75 bp, synthetic construct
  source 1..75: mol_type = other DNA
ttctgcagaatccgcggcaacgcgcgccgagacagcagcaaaacgggcagaggatattgcatccgccgtggcgct

SEQ ID NO: 811165 - DNA, 75 bp, synthetic construct
  source 1..75: mol_type = other DNA
ggaagttattggcacccgcggcgcaatgaccatacgcattaccacaccgagtacatccagcggtgaaggcatccc

SEQ ID NO: 811166 - DNA, 75 bp, synthetic construct
  source 1..75: mol_type = other DNA
ctttgaagtggcgattgttctgctgattagcgttgctttctcaatggcgcgccacaccggcacgaacctggtgaa

SEQ ID NO: 811167 - DNA, 75 bp, synthetic construct
  source 1..75: mol_type = other DNA
tgcagccgaatccgcggcaacgcgcgccgagacagcagcaaaacgggcagaggatattgcatccgccgtggcgct

SEQ ID NO: 811168 - DNA, 75 bp, synthetic construct
  source 1..75: mol_type = other DNA
atgagcaacctacgaaaatatcgagagtcactgaatatctctcaaacgaaacttgctaaagcagttggatgcaca

SEQ ID NO: 811169 - DNA, 75 bp, synthetic construct
  source 1..75: mol_type = other DNA
ggacaaattcgccagttggtatcccggttgtacgatagacgctcagagtagaggagcgttatccgcgatggcagc

SEQ ID NO: 811170 - DNA, 75 bp, synthetic construct
  source 1..75: mol_type = other DNA
atccgtaataatcagatgatgatcccaaactacggagaaatgcgccggtatggtgagccggtttcaacagcgttt

SEQ ID NO: 811171 - DNA, 75 bp, synthetic construct
  source 1..75: mol_type = other DNA
tgtggcacagcgtcttgattctgaggcagaatcacattccggctttatttcaggttgcccccgcgactggggaaa

SEQ ID NO: 811172 - DNA, 75 bp, synthetic construct
  source 1..75: mol_type = other DNA
tactcttgagacgcaagtccaaagcgtctcttcgtgcatatcatatgcaacattaaacatgggtacaataatggc

SEQ ID NO: 811173 - DNA, 75 bp, synthetic construct
  source 1..75: mol_type = other DNA
gtcgccatcagacgcatcaaatgcatgtgaaagtgctgggaaaaataaaaaaggtaataacataaagataagata

SEQ ID NO: 811174 - DNA, 75 bp, synthetic construct
  source 1..75: mol_type = other DNA
tttcgcgttatgccctgacttttcaggaaaatgccctttcagcaaactgtcagtgccggatgctcacccgtgtcc

SEQ ID NO: 811175 - DNA, 75 bp, synthetic construct
  source 1..75: mol_type = other DNA
ggctggtaccggaaaccaaacacgtttcgctggaacatattgaacgtaatctgatgaaaggtcgtaaactgcgcg

SEQ ID NO: 811176 - DNA, 75 bp, synthetic construct
  source 1..75: mol_type = other DNA
cagggggctatcggacattgggaatctggtcgtcgcttcccagaccttaaaacatgccgtgctcttgttgcgtgc

SEQ ID NO: 811177 - DNA, 75 bp, synthetic construct
  source 1..75: mol_type = other DNA
cgtctgggcgcggctcgcgggattgccgcttcattgacctttgtctgcctggcatttctgataggaccgagcatt

SEQ ID NO: 811178 - DNA, 75 bp, synthetic construct
  source 1..75: mol_type = other DNA
aacggaagaactgatgaacctgcagaaatcaggagatgccctgaatgatatcggattatcagtttcagaatcgaa

SEQ ID NO: 811179 - DNA, 75 bp, synthetic construct
  source 1..75: mol_type = other DNA
ccatccccgaaccggtacgctttccacagcttcccaggtaagaaaacttcgccgtgttctagaaaaaaacaagtt

SEQ ID NO: 811180 - DNA, 75 bp, synthetic construct
  source 1..75: mol_type = other DNA
gggataatcattccgattcacctgctcctctgggggggggggggggcgcaagactggcatgcggaataattaaat

SEQ ID NO: 811181 - DNA, 75 bp, synthetic construct
  source 1..75: mol_type = other DNA
gtctgcttcaaaagatgaggcgaccagacaagcgtcagcagcgaatggcagtgccacgacggcaacgacgaaggc

SEQ ID NO: 811182 - DNA, 75 bp, synthetic construct
  source 1..75: mol_type = other DNA
gccttgctgattgcaatttcggtacaaagcgtgggggtttttgcgttaattcaggcgggcctactgacttacgaa

SEQ ID NO: 811183 - DNA, 75 bp, synthetic construct
  source 1..75: mol_type = other DNA
cgcaccaatcccgtggccatcggataccgttccgtctggttatgccctgatgcaggggcagacttttgacaaatc

SEQ ID NO: 811184 - DNA, 75 bp, synthetic construct
  source 1..75: mol_type = other DNA
gtgctttatggcagcgcacttcggcagggtttacaaattttgcctgggtcaatacatctggtgatacttacgata

SEQ ID NO: 811185 - DNA, 75 bp, synthetic construct
  source 1..75: mol_type = other DNA
tgtggttcagcttagtagtgcaaccaacagcacgtctgaaacgcaggctgcaacgccgaaagcagtaaaggcagc

SEQ ID NO: 811186 - DNA, 75 bp, synthetic construct
  source 1..75: mol_type = other DNA
gcatcgacaaaggccagtgaagcagcgaaaagtgctgctgctgcagagtcatcaaaaagcgcggcagctaccagt

SEQ ID NO: 811187 - DNA, 75 bp, synthetic construct
  source 1..75: mol_type = other DNA
gcatcagcaaaggccactgaagcatcaaaaagtgctgccgctgcagagtcctcaaaaagcgcggcggctaccagt

SEQ ID NO: 811188 - DNA, 75 bp, synthetic construct
  source 1..75: mol_type = other DNA
tccgaccattgccgtaccggtggtattgctcgggacctttgccgtccttgccgcctttggcttctcgataaacac

SEQ ID NO: 811189 - DNA, 75 bp, synthetic construct
  source 1..75: mol_type = other DNA
ttgtgggggcaaataatatgcacgatctggtcaaagaggcagagcggagcggcgctaaattgatacttctggggg

SEQ ID NO: 811190 - DNA, 75 bp, synthetic construct
  source 1..75: mol_type = other DNA
cttccatgtggataaaaagcagattcaacaaggtgagaaactgcgatttacccgctcgatcccggccgataagct

SEQ ID NO: 811191 - DNA, 75 bp, synthetic construct
  source 1..75: mol_type = other DNA
cgggtgagggattgatcggcagttggatcgcgcttttcacttatatggtgatgagtgcggtgatgcgttctccac

SEQ ID NO: 811192 - DNA, 75 bp, synthetic construct
  source 1..75: mol_type = other DNA
gtgaaaaaaacacagcaaaaagaaatcaaaaatgtgacaaatatcacgggaatgcgacaaattgagttatggcag

SEQ ID NO: 811193 - DNA, 75 bp, synthetic construct
  source 1..75: mol_type = other DNA
gagcgttgtaatctgacgctggtgggtttttgtaagccgggtcgggcaacggtttatacccatccgcagcgtttg

SEQ ID NO: 811194 - DNA, 75 bp, synthetic construct
  source 1..75: mol_type = other DNA
gaaaagggatagttcagctcagtagcgccactaacagcccgtctgaaacgctggctgcgacaccaaaagcggtta

SEQ ID NO: 811195 - DNA, 75 bp, synthetic construct
  source 1..75: mol_type = other DNA
gggaaaaaccggggaaacgctcgccgatacagatgccgtcgcctggaacctggacagtggcgcttattgtgcaca

SEQ ID NO: 811196 - DNA, 75 bp, synthetic construct
  source 1..75: mol_type = other DNA
agggctcctggtcttacggtaataataaaatcatcacggatacgggctgcggaaatattcatctcgccggcgctg

SEQ ID NO: 811197 - DNA, 75 bp, synthetic construct
  source 1..75: mol_type = other DNA
atggacgttgagtacggccagtacggtgtcatcctgctggttgacggttttccgccttcacatgccgggaccatc

SEQ ID NO: 811198 - DNA, 75 bp, synthetic construct
  source 1..75: mol_type = other DNA
gtctgcttcaaaagatgaggcgaccagacaagcgtcagcagcgaatggcagtgccacgactgcatcgacgaaggc

SEQ ID NO: 811199 - DNA, 75 bp, synthetic construct
  source 1..75: mol_type = other DNA
gtctgcttcaaaagatgaggcgaccagacaagcgtcagcagcgaatggcagtgccacgacagcagcgacgaaggc

SEQ ID NO: 811200 - DNA, 75 bp, synthetic construct
  source 1..75: mol_type = other DNA
ttcatttaaccatggcactaaaaccacgaatagcgccggggatcattcacacaatattcctgttggcaacactgg

SEQ ID NO: 811201 - DNA, 75 bp, synthetic construct
  source 1..75: mol_type = other DNA
agcagccacttcagcatccaccgcgaccacgaaagcgtcagaagctgccacctcagcccgggatgcgtcggcttc

SEQ ID NO: 811202 - DNA, 75 bp, synthetic construct
  source 1..75: mol_type = other DNA
tagcattttatgatggcggtgggttcacttatgtccagaattcacagtatcaagtaagcccggagacttcttcct

SEQ ID NO: 811203 - DNA, 75 bp, synthetic construct
  source 1..75: mol_type = other DNA
attaacgtgaaataccgttatgagtttaacagtcttggtacgcacaatagcttaaggccgtttataattagtaac

SEQ ID NO: 811204 - DNA, 75 bp, synthetic construct
  source 1..75: mol_type = other DNA
gttcggcggcgtcatcagcatcatcggcgtcagcttcaaaagatgaggcggcaaggctggcgtcagaggcgcagg

SEQ ID NO: 811205 - DNA, 75 bp, synthetic construct
  source 1..75: mol_type = other DNA
ttgatggcgctgctttccctgtttttgcgtttatcgaagttggcctgtcaatatccgcacctggtgctgatctcg

SEQ ID NO: 811206 - DNA, 75 bp, synthetic construct
  source 1..75: mol_type = other DNA
gaatgccgaatcaggcgcttataaggtcacccgctctggcgacagctatattctggttaacttctataccggagt

SEQ ID NO: 811207 - DNA, 75 bp, synthetic construct
  source 1..75: mol_type = other DNA
cagcagtagggtctgttttactgctgctgtttttagtcatgaaggcgcgtatgcacgctttcctggctttgatgg

SEQ ID NO: 811208 - DNA, 75 bp, synthetic construct
  source 1..75: mol_type = other DNA
gtgaccgcgccgctggagcaggtgcagatagaccatacggtcatcgacctgatcgtggtcgatgaccgcgaccgg

SEQ ID NO: 811209 - DNA, 75 bp, synthetic construct
  source 1..75: mol_type = other DNA
tgcatccggtgtagcgcctgtgctgacgcctgccctgcggatcttttgccgcaacagttgtactggttcagcaaa

SEQ ID NO: 811210 - DNA, 75 bp, synthetic construct
  source 1..75: mol_type = other DNA
gatggcgcaacgcctgaaagaagaatatccggatacatgggtacatacccatctctgtgaaaacaaagatgaaat

SEQ ID NO: 811211 - DNA, 75 bp, synthetic construct
  source 1..75: mol_type = other DNA
caatttgccgttaatcaccatcccgcatccgttcaaatacggctttagttttagcttccatcagttcctggtggt

SEQ ID NO: 811212 - DNA, 75 bp, synthetic construct
  source 1..75: mol_type = other DNA
tttagggcttggcgtctcctacgatcccgaaatttttaaaatattgccagcctctatttatgtattagttgaaaa

SEQ ID NO: 811213 - DNA, 75 bp, synthetic construct
  source 1..75: mol_type = other DNA
ggaagtgcgttaccggcttcgggttattgatcacccggacctccaggtggttggtgaaggcggtcataccatgcg

SEQ ID NO: 811214 - DNA, 75 bp, synthetic construct
  source 1..75: mol_type = other DNA
tctgggcgactggtataccgatgaacagaaatacccgaacgggctgatgccggttattaaacatgtgaaatctct

SEQ ID NO: 811215 - DNA, 75 bp, synthetic construct
  source 1..75: mol_type = other DNA
gcgctggtctaaaaaaagactctttaaaaaatgcactgtatcgctcatgccctaaatatgaacgcatcatagccg

SEQ ID NO: 811216 - DNA, 75 bp, synthetic construct
  source 1..75: mol_type = other DNA
gatcctgattggcctgtgtgcggcaattccgggaatgattattgccgggccgctgtggggtaatttcatcagccg

SEQ ID NO: 811217 - DNA, 75 bp, synthetic construct
  source 1..75: mol_type = other DNA
ccgcgaccggcaacctattggccgcccgtacctgaccctcgccatcgacgtgttcacccgctgcgtgctcggcat

SEQ ID NO: 811218 - DNA, 75 bp, synthetic construct
  source 1..75: mol_type = other DNA
tggcatgagttactttttccctcctgaggtgatgggggcgcatattggccatcgccgctgccatgcaactttccg

SEQ ID NO: 811219 - DNA, 75 bp, synthetic construct
  source 1..75: mol_type = other DNA
gggttatttccgatgatcggcggcttcttcactaccattccctcagcagttctgggtggggcaatgacgctgatg

SEQ ID NO: 811220 - DNA, 75 bp, synthetic construct
  source 1..75: mol_type = other DNA
ctggcagttgacagcaacacacatgaaatcatctgtgcaaacctgtcgctgaacaatgtgacggactcagaagcc

SEQ ID NO: 811221 - DNA, 75 bp, synthetic construct
  source 1..75: mol_type = other DNA
aactaacgcccagtttacctatattaatcacggaacagattattcacctggctggcgaagggactataactccag

SEQ ID NO: 811222 - DNA, 75 bp, synthetic construct
  source 1..75: mol_type = other DNA
gaaatatactgctcaggacgctacgacaacacaaaaaggaattgtccagctcagtagtgcaaccaacagcgcatc

SEQ ID NO: 811223 - DNA, 75 bp, synthetic construct
  source 1..75: mol_type = other DNA
catgtcgtcgctgcttggcgtttccttcgttggcgcatttctggttgtcggttcttcttttatcctgccttatct

SEQ ID NO: 811224 - DNA, 75 bp, synthetic construct
  source 1..75: mol_type = other DNA
ttatgcctgggcatggtggatttcagcagtatgcgcaatttgccgttaatcaccatcccgcatccgttcaaatac

SEQ ID NO: 811225 - DNA, 75 bp, synthetic construct
  source 1..75: mol_type = other DNA
gcgcttcatttattctcccttatttacgcagagtgattacgcccactgtcagcggcatcgtcgtgttgatgattg

SEQ ID NO: 811226 - DNA, 75 bp, synthetic construct
  source 1..75: mol_type = other DNA
ttgcccacgctgctcaaccccttgcgccgcaagatagaacaagtcagcgccgatggtgcctatgacaccaaagcc

SEQ ID NO: 811227 - DNA, 75 bp, synthetic construct
  source 1..75: mol_type = other DNA
gctatgtgtcggctatatcgcatccttatgcctgggaatggtagatttcagcagtatgcgcaatctgccgttaat

SEQ ID NO: 811228 - DNA, 75 bp, synthetic construct
  source 1..75: mol_type = other DNA
aaaacgccgtgaaacacttattgtcgccacttctttaggtttagggcttggcgtctcctacgatcccgaaatttt

SEQ ID NO: 811229 - DNA, 75 bp, synthetic construct
  source 1..75: mol_type = other DNA
ccatcatgggagaggattatattatttgtcaaatctataaagaatctagatttaagcaatttgcaggtaagaata

SEQ ID NO: 811230 - DNA, 75 bp, synthetic construct
  source 1..75: mol_type = other DNA
gcatagacacacttagcagacgaacgaagaacatcgcctactacgcagaaaaacactccgcatccaccgcaaccg

SEQ ID NO: 811231 - DNA, 75 bp, synthetic construct
  source 1..75: mol_type = other DNA
tgtctggcttccacaagaagggcaccaattacttccccactcctccagagattggccgcttgatgtcactcattg

SEQ ID NO: 811232 - DNA, 75 bp, synthetic construct
  source 1..75: mol_type = other DNA
tcgaagacacagggctcaacagttggttgggagaaggcggacgtcagctttccggcggcgaactgcgtcgtctgg

SEQ ID NO: 811233 - DNA, 75 bp, synthetic construct
  source 1..75: mol_type = other DNA
gtgcaaaagaagttgtctttgccagtattgataccgccacctgtgtgaattgttcacgtattttttcactatgtc

SEQ ID NO: 811234 - DNA, 75 bp, synthetic construct
  source 1..75: mol_type = other DNA
acgtgaatggcacatgtacgatccggaaacaggtaagctcgcaacgaaggccgggacactctggggtctgctgaa

SEQ ID NO: 811235 - DNA, 75 bp, synthetic construct
  source 1..75: mol_type = other DNA
gatccggcagagcgtgaaaaggcacagcagaaatatgatgcattgcttgaaaaagatattgccagtgataaggag

SEQ ID NO: 811236 - DNA, 75 bp, synthetic construct
  source 1..75: mol_type = other DNA
aactgctaacccgcgcatgggacccgcaacggggtgagattttgcttaacggcagcccgatcgctgacctgaatg

SEQ ID NO: 811237 - DNA, 75 bp, synthetic construct
  source 1..75: mol_type = other DNA
ctccttgtcgccatcaatcgcatcaggtgcatgtgaagaggctgggaaaaataaaaacggtaataacataaaggt

SEQ ID NO: 811238 - DNA, 75 bp, synthetic construct
  source 1..75: mol_type = other DNA
caatttctccttgtcgccatcagtcgcatcagatgcgtgtaaacaggcttatgatgcgaataatggtagaaacaa

SEQ ID NO: 811239 - DNA, 75 bp, synthetic construct
  source 1..75: mol_type = other DNA
aagcgactctgcgccagaccatcagcgttgtgccacagcgtgtacatctgtttagcgccacgctgcgagataatc

SEQ ID NO: 811240 - DNA, 75 bp, synthetic construct
  source 1..75: mol_type = other DNA
ccaaccgaaggcttagatgccacgactgaaagtcagatcctcgaattactggctgaaatgatgcgtgagaaaacg

SEQ ID NO: 811241 - DNA, 75 bp, synthetic construct
  source 1..75: mol_type = other DNA
attattgagcaaggtactcacgcagaactgcttgccagacaggggcgttattaccagtttaagcagggtttgtaa

SEQ ID NO: 811242 - DNA, 75 bp, synthetic construct
  source 1..75: mol_type = other DNA
aggagataaagatgacaaaggcttacaattattgtttggcgatacactctttaaaaaaattcctgcaggggatga

SEQ ID NO: 811243 - DNA, 75 bp, synthetic construct
  source 1..75: mol_type = other DNA
aagcatcccagcgcagtaccaacattggtttttgtggaatccacttgtgcatgctgttgagttaattagatgtgg

SEQ ID NO: 811244 - DNA, 75 bp, synthetic construct
  source 1..75: mol_type = other DNA
cgttgttcggcgctgcgcgtgctgtgcctgcaagatgagattgccgaccacacgttgaaaatgctgcgcggcgca

SEQ ID NO: 811245 - DNA, 75 bp, synthetic construct
  source 1..75: mol_type = other DNA
ttcggcgctgcgtgtgctgtgcctgcaagatgaaattgccgaccacacgctgaaaatgctgcgcggtgcaatggc

SEQ ID NO: 811246 - DNA, 75 bp, synthetic construct
  source 1..75: mol_type = other DNA
attcgacagatatatgatacaaacaatgcaaaccatgatgaatggtaatgagggcgatcttgaatcgttagcgac

SEQ ID NO: 811247 - DNA, 75 bp, synthetic construct
  source 1..75: mol_type = other DNA
agagcgaatgatacagggaatattataataggagacaggcagttttctgttcgttatcagagcgctatggacgct

SEQ ID NO: 811248 - DNA, 75 bp, synthetic construct
  source 1..75: mol_type = other DNA
atgccatttacattttatttgtcgtccgagaatcaattgtcaatacaaaatcttgaagctttgcaaaacgcagcc

SEQ ID NO: 811249 - DNA, 75 bp, synthetic construct
  source 1..75: mol_type = other DNA
ataagaccatccgtgaggaactcttcccggatgttgttgctgcgtttaagcgcatccttgcagaaaaattgtctg

SEQ ID NO: 811250 - DNA, 75 bp, synthetic construct
  source 1..75: mol_type = other DNA
attctgtcagatcgctttgatgcccgtctgtctgagaccgaaatgtccaggctggtggaacgtcgcgatgacgtc

SEQ ID NO: 811251 - DNA, 75 bp, synthetic construct
  source 1..75: mol_type = other DNA
aaaacggaagaagaagaagcgaaaggcgaagcgcgtctttacttcgctggttcacgtaaccagaaaggtggcgta

SEQ ID NO: 811252 - DNA, 75 bp, synthetic construct
  source 1..75: mol_type = other DNA
cgccctattccgctcatcgctgaaaccggcggcatgaacgcgatgattgtcgattcttcagcactgaccgaacag

SEQ ID NO: 811253 - DNA, 75 bp, synthetic construct
  source 1..75: mol_type = other DNA
cgtagcaaaggccgtccggtgttccaggcggtgcgggaaaacagtgaagatgcccgtgaatggcaaagcggcacc

SEQ ID NO: 811254 - DNA, 75 bp, synthetic construct
  source 1..75: mol_type = other DNA
aggcagcaggcagagaaaaagaatgaagacgcgacagttcagcctgataaaaaagaagagaaaaaagacgataca

SEQ ID NO: 811255 - DNA, 75 bp, synthetic construct
  source 1..75: mol_type = other DNA
aaatcattaaataatgaaatcctaattaacaaattccttttctatactcttcaatcaagaaacaggaatttattg

SEQ ID NO: 811256 - DNA, 75 bp, synthetic construct
  source 1..75: mol_type = other DNA
tttggaaaatatctgaaacctatcttgctattattacaatcgcattaagtacgtattatttacccagactttctt

SEQ ID NO: 811257 - DNA, 75 bp, synthetic construct
  source 1..75: mol_type = other DNA
ggtgctctgctagcaatatcagtacaaaatgctttaataggaggggtgatgataatctatgcatcatcacaaccg

SEQ ID NO: 811258 - DNA, 75 bp, synthetic construct
  source 1..75: mol_type = other DNA
cactacagtactgaacataactccattgccgagacgtttaatctgtctgtgtggccgttgattgccgttttgctg

SEQ ID NO: 811259 - DNA, 75 bp, synthetic construct
  source 1..75: mol_type = other DNA
atatatactttttacggattatctaccgaaacaacaaagtcatttgtttctcaggaaacggcgaagaagcttaaa

SEQ ID NO: 811260 - DNA, 75 bp, synthetic construct
  source 1..75: mol_type = other DNA
ttttaaagaggttgagtggaagactttgggggaagtcaccgagataaacacagggcaaaaaccatctgagatact

SEQ ID NO: 811261 - DNA, 75 bp, synthetic construct
  source 1..75: mol_type = other DNA
tggcagagctggctgacagagctccagctgtaacttcaatgtcatcactgggagaagttggtgatactgacttat

SEQ ID NO: 811262 - DNA, 75 bp, synthetic construct
  source 1..75: mol_type = other DNA
tacatgaccgacacacccaaaagcaccgacaagagttacacgttcaccatcagtaatggcagtggcacgtgtggc

SEQ ID NO: 811263 - DNA, 75 bp, synthetic construct
  source 1..75: mol_type = other DNA
gtgaccaacccgttcagcttcacaggctccagcgtcatcggcaatgcgtttgccatattcaacgttacgctgtgt

SEQ ID NO: 811264 - DNA, 75 bp, synthetic construct
  source 1..75: mol_type = other DNA
tacttacgcatattgtttgaattattttatttatttggttttttctgttgttgttgtaaaaagggctaagtatga

SEQ ID NO: 811265 - DNA, 75 bp, synthetic construct
  source 1..75: mol_type = other DNA
acgtaaccacaggacagaagatcgccgctagtgctttggctgttgctcagaacatgggaagcattgctaacatca

SEQ ID NO: 811266 - DNA, 75 bp, synthetic construct
  source 1..75: mol_type = other DNA
accgatttatatcaggcagtactggctgcataccggacaaacttgcaaaacactacctatacaccaacagctctc

SEQ ID NO: 811267 - DNA, 75 bp, synthetic construct
  source 1..75: mol_type = other DNA
ttttggtcgactggtcaatgctgttagcggcttatctgatgccgcaaaggcttttctggaagcagctgcaccacc

SEQ ID NO: 811268 - DNA, 75 bp, synthetic construct
  source 1..75: mol_type = other DNA
aaagttaccctaccagagataacccatggtaaaaataaaatcccattcaaaactgtacgagattatatccaggac

SEQ ID NO: 811269 - DNA, 75 bp, synthetic construct
  source 1..75: mol_type = other DNA
aggttgccgacgtgatccatacatgtgcccggcgggggtatggactgacgggatcggtaatacacacggggtaac

SEQ ID NO: 811270 - DNA, 75 bp, synthetic construct
  source 1..75: mol_type = other DNA
gtaacggcgtccccctgcccgggttaaagattcgccgtgaaaaagaacgccagctttgcctgacggggctggtca

SEQ ID NO: 811271 - DNA, 75 bp, synthetic construct
  source 1..75: mol_type = other DNA
aacccgccgcttattcgattatatggcttcacataaagagccgtttccgctcaaactcgaaaccttcaaaatgat

SEQ ID NO: 811272 - DNA, 75 bp, synthetic construct
  source 1..75: mol_type = other DNA
gtccccctgcccgggttaaagattcgccgtgaaaaagaacgccagctttgcctgacggggcttgtcaatgaataa

SEQ ID NO: 811273 - DNA, 75 bp, synthetic construct
  source 1..75: mol_type = other DNA
ttgaagatttcagagggatctatgactacacgctgggaaagtttggtgaggagcaggcggatcgctataccgact

SEQ ID NO: 811274 - DNA, 75 bp, synthetic construct
  source 1..75: mol_type = other DNA
atcttattgcaacagaaataagtggttctggcaccaccagtaatcaagtcaaccctctgataaaaatgaaaaata

SEQ ID NO: 811275 - DNA, 75 bp, synthetic construct
  source 1..75: mol_type = other DNA
atgagcgagttaagttatctggaaaaattgctggatggggttgaggttaagtggttgccattgggggaactaggt

SEQ ID NO: 811276 - DNA, 75 bp, synthetic construct
  source 1..75: mol_type = other DNA
aaatagcactattattgggaaatactttgcctatttcacgcaaacggattcttttgcaaatgagaaaaggaaata

SEQ ID NO: 811277 - DNA, 75 bp, synthetic construct
  source 1..75: mol_type = other DNA
tgagcttaccgctgagcttaccatgcgtaaaaaacagtacaactactatcgcgaccagttgttgagttttaaaga

SEQ ID NO: 811278 - DNA, 75 bp, synthetic construct
  source 1..75: mol_type = other DNA
cgacacattgacaagctccatcaccgaaggcttaccccgtgaaatagaactacgccagaagcagtacgagtacta

SEQ ID NO: 811279 - DNA, 75 bp, synthetic construct
  source 1..75: mol_type = other DNA
ttcggggcatcagggacaggtattcagcgtcgggcgcgatattgtcggcatactgagtttcgtcgcaggttttct

SEQ ID NO: 811280 - DNA, 75 bp, synthetic construct
  source 1..75: mol_type = other DNA
gaagcattgacagagtacctggacacccagggctggatcactctgggcgcgtggtatcagacctttgcgaccgcc

SEQ ID NO: 811281 - DNA, 75 bp, synthetic construct
  source 1..75: mol_type = other DNA
tggcagaactgctaggcgcaagcccggcgcaggtatgcatcgcggcggaaatcgccatggagcacaacctcggtc

SEQ ID NO: 811282 - DNA, 75 bp, synthetic construct
  source 1..75: mol_type = other DNA
tcgcgtagtgttatctaatccgccagcattaccgccgcgtacacatcgtttgctgttggtggagctggaaggaga

SEQ ID NO: 811283 - DNA, 75 bp, synthetic construct
  source 1..75: mol_type = other DNA
gggctgggcgtggatgatgcgaaacatgggtttaccgtggatgaactggcactggtgatggcggcgtttgatacg

SEQ ID NO: 811284 - DNA, 75 bp, synthetic construct
  source 1..75: mol_type = other DNA
ccaaatcgccgggcgtatcttcagctataaccaatcgtttcgtgatattggcaacgttaccggaccattgatggg

SEQ ID NO: 811285 - DNA, 75 bp, synthetic construct
  source 1..75: mol_type = other DNA
tataaccctgctcttgcgacgaagcaacccaaaagaaaaattacccgtcaacgcctcagcctggaagaatggcaa

SEQ ID NO: 811286 - DNA, 75 bp, synthetic construct
  source 1..75: mol_type = other DNA
ccctgcgtctcaatgcgatcaactggagtttgcgcgatgtagtagcccgctgtcgtgactatgtagtcagcccat

SEQ ID NO: 811287 - DNA, 75 bp, synthetic construct
  source 1..75: mol_type = other DNA
tggatgttctgataccaggaaggcttcagacaaaaagccgggtgcagccgctgtactctggatcaagcgtggtga

SEQ ID NO: 811288 - DNA, 75 bp, synthetic construct
  source 1..75: mol_type = other DNA
tggatgttctgataccaggaaggcttcagacaaaaagccgggtgtagccgctgttctctgggtcaagcgtggtga

SEQ ID NO: 811289 - DNA, 75 bp, synthetic construct
  source 1..75: mol_type = other DNA
tggatgttctgataccaggaaggcttcagacaaaaagccgggtgaagccgctgttctctggttcaagcgtggtga

SEQ ID NO: 811290 - DNA, 75 bp, synthetic construct
  source 1..75: mol_type = other DNA
tgctgcggtcaatatcgatacgctacgagcattacacctgaaacacaattgcactattccatttgaaaatctcga

SEQ ID NO: 811291 - DNA, 75 bp, synthetic construct
  source 1..75: mol_type = other DNA
tcgcccaaagtcaaacaaccaacctggccgttgttgcccctggtatcgcggaagcactgctggcgaccgcaattg

SEQ ID NO: 811292 - DNA, 75 bp, synthetic construct
  source 1..75: mol_type = other DNA
tggatgttctgataccaggaaggcttcagacaaaaagccgggtggagccgctgtcctctggctcaagcgtggtga

SEQ ID NO: 811293 - DNA, 75 bp, synthetic construct
  source 1..75: mol_type = other DNA
ccataaactggaaacgaaacctgatcgttgcctggctaggttgttttcttaccggtgccgccttcagtctggtga

SEQ ID NO: 811294 - DNA, 75 bp, synthetic construct
  source 1..75: mol_type = other DNA
gtgagcgaaattaaagacgttattgttcaggggttgtggaaaaacaactctgcgctggtccagctgctcggcctt

SEQ ID NO: 811295 - DNA, 75 bp, synthetic construct
  source 1..75: mol_type = other DNA
tttccactgccggcagcaactccatttttggtcgactggtcaatgctgttagcggcttatctgatgccgcaaagg

SEQ ID NO: 811296 - DNA, 75 bp, synthetic construct
  source 1..75: mol_type = other DNA
catggtcacaaccgaaaccatctgggcgggttataccaccgtcagggtgctttctactgccggcagcaactccgt

SEQ ID NO: 811297 - DNA, 75 bp, synthetic construct
  source 1..75: mol_type = other DNA
cttcgctgcaaaaaaaggtccggcgctttcggcgctggacggattttcgattggcatgggtgcaacctgcgcaat

SEQ ID NO: 811298 - DNA, 75 bp, synthetic construct
  source 1..75: mol_type = other DNA
gttcgtgctgggttcactacgcgaaattatcggcaatggcacgttgtttgacggtgcagatgcgctgttaggtag

SEQ ID NO: 811299 - DNA, 75 bp, synthetic construct
  source 1..75: mol_type = other DNA
ttcagggattatggaaaaacaactccgcgttggtccagttgcttggcctctgcccgctactggcggtcacgtcta

SEQ ID NO: 811300 - DNA, 75 bp, synthetic construct
  source 1..75: mol_type = other DNA
ggtgcactactccctgccgtacaaacactcctggtttataactcaagcaaccaaatcgccgggcgtattttcagc

SEQ ID NO: 811301 - DNA, 75 bp, synthetic construct
  source 1..75: mol_type = other DNA
ccaaatcgccggtcgcattttcagttataaccagtcgtttcgtgatattggcaacgttacggggccattgatggg

SEQ ID NO: 811302 - DNA, 75 bp, synthetic construct
  source 1..75: mol_type = other DNA
tccgaaactggtacttagcctgtttgtcacaacattaattatccagattgctactggatctatcgcgccaatcct

SEQ ID NO: 811303 - DNA, 75 bp, synthetic construct
  source 1..75: mol_type = other DNA
gtctggtggcagcgattccggcggtcgttatctataacgtattcgcgcgccagattggcggctttaaagcgatgc

SEQ ID NO: 811304 - DNA, 75 bp, synthetic construct
  source 1..75: mol_type = other DNA
gaaaacaggcgtcaggaacaactgaacagggctgtcaggctaggggggtcaatcgcactgatgaaccgttatttc

SEQ ID NO: 811305 - DNA, 75 bp, synthetic construct
  source 1..75: mol_type = other DNA
gacgcgcttgatatgagtttacttccgcgccaaataacgaaagaaaaattactcgctgctgcgaaggatggaaag

SEQ ID NO: 811306 - DNA, 75 bp, synthetic construct
  source 1..75: mol_type = other DNA
cgctgacagacaatacgcagggggcaacaggtcttgagttatacgaggtgtataacaacggatatccaacagcgt

SEQ ID NO: 811307 - DNA, 75 bp, synthetic construct
  source 1..75: mol_type = other DNA
ctcgcacgttgatggtcgcaggtttaatacaagcacttttaaagacacctatcagtatggttctacagctgtcgg

SEQ ID NO: 811308 - DNA, 75 bp, synthetic construct
  source 1..75: mol_type = other DNA
aagttacgcaaactggaatttctcgcagcagacgccttgcgcgaaggtgctgacacactgattacagccggagcg

SEQ ID NO: 811309 - DNA, 75 bp, synthetic construct
  source 1..75: mol_type = other DNA
ggacttgcaaaaataagaaaacttgtcgattacaatattatcccaatgatggatctattgatttgggcaaaattt

SEQ ID NO: 811310 - DNA, 75 bp, synthetic construct
  source 1..75: mol_type = other DNA
ttgcctttagagaagcgattttcgacagtgtaaattttggttgggaagatgataatcaaaatttaaggtctatcc

SEQ ID NO: 811311 - DNA, 75 bp, synthetic construct
  source 1..75: mol_type = other DNA
tttaaccccagtgtttttaaagatacttatcaatatggttatacaagctcaggtcaaaatacctggggtgtacaa

SEQ ID NO: 811312 - DNA, 75 bp, synthetic construct
  source 1..75: mol_type = other DNA
atcccaatgcccaactggaagagctggcgacgcgagtcgaagcacaaggttttcgcccgtatgtcattccggttg

SEQ ID NO: 811313 - DNA, 75 bp, synthetic construct
  source 1..75: mol_type = other DNA
cgcaccaatcccgtggccatcagataccgttccgtctggttatgccctgatgcaggggcaggcttttgacaaatc

SEQ ID NO: 811314 - DNA, 75 bp, synthetic construct
  source 1..75: mol_type = other DNA
ccagtttacgacgggtttagctgtcgttattaccacgacgtataacgaaacgcgtattcagccaaacaccaaatg

SEQ ID NO: 811315 - DNA, 75 bp, synthetic construct
  source 1..75: mol_type = other DNA
gcgcctgcgctgttcgcctatcatccccacgtttagctccgggaacgctcatgcaagaaagtatacaactggtta

SEQ ID NO: 811316 - DNA, 75 bp, synthetic construct
  source 1..75: mol_type = other DNA
ggcggggctgattgacggtatcagtcagaaacgcttcaaagatgaagggccgattctgtttattcataccggcgg

SEQ ID NO: 811317 - DNA, 75 bp, synthetic construct
  source 1..75: mol_type = other DNA
tcccacggctggagtttatcggcgcaccaacgccgctcgaatatctgccgcgtctttctgattatcttgggcggg

SEQ ID NO: 811318 - DNA, 75 bp, synthetic construct
  source 1..75: mol_type = other DNA
atttccgagatgatatatcagataattactgattcatcatcaaaaccactacaggttgtctggaacccggtattt

SEQ ID NO: 811319 - DNA, 75 bp, synthetic construct
  source 1..75: mol_type = other DNA
tcatccagtgataaccagcgcgaagtgaaaaacctgcagaccattgcaaccaaaatgaagcagtacaagttccag

SEQ ID NO: 811320 - DNA, 75 bp, synthetic construct
  source 1..75: mol_type = other DNA
catgctgactctggcaatttgcgcttttatcgtcattacgttgacgatttgggtttcatttcgggtatcggtgct

SEQ ID NO: 811321 - DNA, 75 bp, synthetic construct
  source 1..75: mol_type = other DNA
tttccacgaggccattaaaggcattattctcaatctgttaagccgtattggtgatgctgccaacttactgattta

SEQ ID NO: 811322 - DNA, 75 bp, synthetic construct
  source 1..75: mol_type = other DNA
tgtttctgtactggcactcattggcggtgataaacgtctggttgccgcacatattcaatcctgcaaagaagcaat

SEQ ID NO: 811323 - DNA, 75 bp, synthetic construct
  source 1..75: mol_type = other DNA
tctattgctgagacttttaatttgtctgtgtggccgttggttgccgttttgctggtgataacgctctgggtggtg

SEQ ID NO: 811324 - DNA, 75 bp, synthetic construct
  source 1..75: mol_type = other DNA
gcgtagttcatccatgttcaccaaaattaacagtaccgagacgaataaagttgatccgtctacggtatgcagcaa

SEQ ID NO: 811325 - DNA, 75 bp, synthetic construct
  source 1..75: mol_type = other DNA
attgcgccggaaggtgactggacgctgtgcctgaacgtgacgcccaccagtattgagtgtcaggttgctaatgct

SEQ ID NO: 811326 - DNA, 75 bp, synthetic construct
  source 1..75: mol_type = other DNA
cactcggtatttctgtcaccactgtcagtcgggctcttggaggcttttcagatgtggctgcttctacccgtgagc

SEQ ID NO: 811327 - DNA, 75 bp, synthetic construct
  source 1..75: mol_type = other DNA
gagggcttctttcagggaaagaagctgtatctctggttgtatatgatggtttgcctcaggacagcattattgagc

SEQ ID NO: 811328 - DNA, 75 bp, synthetic construct
  source 1..75: mol_type = other DNA
ggacatatcatccatatcacctctacagtgctgaatatctttgccgtactgacggctttctttggtatttatctc

SEQ ID NO: 811329 - DNA, 75 bp, synthetic construct
  source 1..75: mol_type = other DNA
ttatttaaaaacactatctgaaagtgaatcctgtaatgactacaccgatattatcagtcattacctggggaagaa

SEQ ID NO: 811330 - DNA, 75 bp, synthetic construct
  source 1..75: mol_type = other DNA
tttcgacagcgcctcgtacctgaaaaccttcggtttaaccgatgccgatctttcacaatctctactttataaagt

SEQ ID NO: 811331 - DNA, 75 bp, synthetic construct
  source 1..75: mol_type = other DNA
ttagccgttgttattaccacaacgtataacgaaacgcgtattcagccaaataccaaatgtcctgaaaagagctaa

SEQ ID NO: 811332 - DNA, 75 bp, synthetic construct
  source 1..75: mol_type = other DNA
aatgccagcctgcgcgcctcgctggacagggcgaacaacgtcgccagcgggcagcagacgaccatcaccatgctg

SEQ ID NO: 811333 - DNA, 75 bp, synthetic construct
  source 1..75: mol_type = other DNA
ctgaatcctgataaaccggtggttggcggtacagttacggcaatctggacggcaaaagatgctaatgacaaccct

SEQ ID NO: 811334 - DNA, 75 bp, synthetic construct
  source 1..75: mol_type = other DNA
cttttatcgatcatgatttatcccgtagtcatacccgcattggtgttggtgcggaatactggcgtgattatttga

SEQ ID NO: 811335 - DNA, 75 bp, synthetic construct
  source 1..75: mol_type = other DNA
gacgtgaaatacattaactggggcgttttcctggtgttagggatcttcgtggggtcatttattgcagccaaagcg

SEQ ID NO: 811336 - DNA, 75 bp, synthetic construct
  source 1..75: mol_type = other DNA
ccgggttgctcgccgtggtgctgtggctacggcacgataacgcgagtttatcccgttcctttgagaaagcgaacc

SEQ ID NO: 811337 - DNA, 75 bp, synthetic construct
  source 1..75: mol_type = other DNA
agtgttgccggtcagcttgccagacgtaatgaatctgcgcaggtggcactgcgtgaacagctcgcaaaggccagc

SEQ ID NO: 811338 - DNA, 75 bp, synthetic construct
  source 1..75: mol_type = other DNA
cgcctggtgtcacagtggcactgcgatgtggttatcacggaccgtgccgggcgcatcattgcagcggtcgagctg

SEQ ID NO: 811339 - DNA, 75 bp, synthetic construct
  source 1..75: mol_type = other DNA
ggtgcaaacaatggcaaaaagcgccgcccgccaggtgacgaatcagattgtgcgcgggatgttggggagtttgct

SEQ ID NO: 811340 - DNA, 75 bp, synthetic construct
  source 1..75: mol_type = other DNA
gtgtatggcaagtacgaggatgacgtggaccgggaatccgcctatgagatgttgcaaaaaggctttcaggccagt

SEQ ID NO: 811341 - DNA, 75 bp, synthetic construct
  source 1..75: mol_type = other DNA
aacaaccacgatttcgttattcagttctggcccgctgcgtggcgtggacaaatatctctgttcaggttctttttc

SEQ ID NO: 811342 - DNA, 75 bp, synthetic construct
  source 1..75: mol_type = other DNA
gtaagttggcagcatcacccgttacttatccggattatcctcagaagtgtaaatcagcattctcctttgctgatg

SEQ ID NO: 811343 - DNA, 75 bp, synthetic construct
  source 1..75: mol_type = other DNA
gtggtatctgtgtccgcaggtacgggttacatcgtccagctgaacgggaatatccggccacgatcacgccagtgg

SEQ ID NO: 811344 - DNA, 75 bp, synthetic construct
  source 1..75: mol_type = other DNA
tcgtgttgttatcgctggcggtggcggggctgtttctggcgaagcatgaaaacgccagcctgcgcgcctcactgg

SEQ ID NO: 811345 - DNA, 75 bp, synthetic construct
  source 1..75: mol_type = other DNA
ttgtcattgttgtattttggaatttggttgaaatcaaataatcttacggaagttaatttagatgtagagggaagt

SEQ ID NO: 811346 - DNA, 75 bp, synthetic construct
  source 1..75: mol_type = other DNA
caccggccaacacctgtattttttggtgcatcacacctttatctaaaacaggaaagcgcgctaccttgcacccca

SEQ ID NO: 811347 - DNA, 75 bp, synthetic construct
  source 1..75: mol_type = other DNA
atgggcaacgcaatgcactctcttaagacacttctacagttaccttgcggatggagatgcagtcgacaaattatt

SEQ ID NO: 811348 - DNA, 75 bp, synthetic construct
  source 1..75: mol_type = other DNA
tataaggaaggcaccaaagtgtatacctctacccaggtgggtaaagagtgccagtttacgacaggtttagccgtt

SEQ ID NO: 811349 - DNA, 75 bp, synthetic construct
  source 1..75: mol_type = other DNA
caggggcagacttttgacaaatctgcctacccgaaacttgcagccgcttatccgtcaggcgtgatccctgatatg

SEQ ID NO: 811350 - DNA, 75 bp, synthetic construct
  source 1..75: mol_type = other DNA
attaagggcaaacctgccagtggtcgggccgtattgtctcaggaacaggacggcattaaatcgcatacccacagc

SEQ ID NO: 811351 - DNA, 75 bp, synthetic construct
  source 1..75: mol_type = other DNA
ttgtgttgttatcactggcggtggccggtctgtttctggcgaagcatgaaaacgccagcctgcgcgcctcgctgg

SEQ ID NO: 811352 - DNA, 75 bp, synthetic construct
  source 1..75: mol_type = other DNA
acagcagacgaccatcaccatgctgaaaaatcagcttcatgttgcccttaccagggcagacaaaaacgagctggc

SEQ ID NO: 811353 - DNA, 75 bp, synthetic construct
  source 1..75: mol_type = other DNA
atgtcaaggctgatgattgtgctggtcgtgttgttatcgctggcggtgaccggtctgtttctggcgaagcataaa

SEQ ID NO: 811354 - DNA, 75 bp, synthetic construct
  source 1..75: mol_type = other DNA
aaggtaggaaagaaacaaaaatattcgttaggaactatcttcgtaaatgaagattatctattaactgctttttca

SEQ ID NO: 811355 - DNA, 75 bp, synthetic construct
  source 1..75: mol_type = other DNA
aacaactattagcagcagtacgtatcacattgcagatgctacaagatagtgacctatacaagatggagaatggtt

SEQ ID NO: 811356 - DNA, 75 bp, synthetic construct
  source 1..75: mol_type = other DNA
tcgtgttgttatcgctggcggtggcggggctgtttctggtgaaacacaaaaacgccagcctgcgcgcctcgctgg

SEQ ID NO: 811357 - DNA, 75 bp, synthetic construct
  source 1..75: mol_type = other DNA
ccggcacgaatggaagccattaagggatatttccccggcgacctcgttccgtatggtgcttatttcgccttaaaa

SEQ ID NO: 811358 - DNA, 75 bp, synthetic construct
  source 1..75: mol_type = other DNA
cgctttagtatgttggcggatgccgcaccgaaggtaggtaacggtctggcgttcaacgttgtcgcgaaaggcgat

SEQ ID NO: 811359 - DNA, 75 bp, synthetic construct
  source 1..75: mol_type = other DNA
taaagacgatacaaccggcatggagattatcggcgacaacaatagtattaccctggcgacctatgatcttaatat

SEQ ID NO: 811360 - DNA, 75 bp, synthetic construct
  source 1..75: mol_type = other DNA
aacttgtcaacattaatagtggtgagttaaaaaatgaaagtacagggagtatagaaaataaagtcacggtaagtg

SEQ ID NO: 811361 - DNA, 75 bp, synthetic construct
  source 1..75: mol_type = other DNA
aacggctgataccgacgtgaagcagcagtacctggagttccgcagcgaaggggcgaagactttcgaaccgagcga

SEQ ID NO: 811362 - DNA, 75 bp, synthetic construct
  source 1..75: mol_type = other DNA
ctggatgtcagcggcggcggtcacggtattgatatcaccggcgacagcgcgacggtggataacaagggcaccatg

SEQ ID NO: 811363 - DNA, 75 bp, synthetic construct
  source 1..75: mol_type = other DNA
tttatttgatggcagcgcagagaaaacgtcaggtctggttgtgattggcgatggcaataccgttaatatgaatgg

SEQ ID NO: 811364 - DNA, 75 bp, synthetic construct
  source 1..75: mol_type = other DNA
acacccccgtcccgccagatgatggcggcgatgataccccggacgacggtggcgatgacacgccagtcaaacacg

SEQ ID NO: 811365 - DNA, 75 bp, synthetic construct
  source 1..75: mol_type = other DNA
tcgtcgggctgaagctggattatgcaggaaaagacggctggagtgcgaacgccacgctggaaggcgggccgaacc

SEQ ID NO: 811366 - DNA, 75 bp, synthetic construct
  source 1..75: mol_type = other DNA
cgatataacccttaataacgacggtaaaaccaccgcaattggcgaaggctcagtggtcggtatcctgaccggcga

SEQ ID NO: 811367 - DNA, 75 bp, synthetic construct
  source 1..75: mol_type = other DNA
agggactgatgattttgatggtccaagaaaaaatgcaaccgccatcaataatgaaagcggcacaatcaccgttta

SEQ ID NO: 811368 - DNA, 75 bp, synthetic construct
  source 1..75: mol_type = other DNA
atggcagcgccggtaagctcagggtcaacaatgccagcatgaacggcgtggggatcaacaccgggtttaccgctg

SEQ ID NO: 811369 - DNA, 75 bp, synthetic construct
  source 1..75: mol_type = other DNA
ccgatacgggcatgatcggtatgcaactggatgccaacgccacggcggatgcggtgatcgagaacaacggcacca

SEQ ID NO: 811370 - DNA, 75 bp, synthetic construct
  source 1..75: mol_type = other DNA
taacggtgatgacgccacggcgaacaacagcggcaaaaccaccgttgacggtaaagactccaccggcacagaaat

SEQ ID NO: 811371 - DNA, 75 bp, synthetic construct
  source 1..75: mol_type = other DNA
aacgaataacggtaatgttttacttgagcaatatgattactcatccgcaattgatgtatcgccggaatccggtaa

SEQ ID NO: 811372 - DNA, 75 bp, synthetic construct
  source 1..75: mol_type = other DNA
gagctctggaatatggggtttaccaatatatcgggtacgggttccgttgcaacgaataacggtaatgttttactt

SEQ ID NO: 811373 - DNA, 75 bp, synthetic construct
  source 1..75: mol_type = other DNA
cggcgatatcattacggtcgagggggaaacgcttaacctgtcttcatatggcggtactactgatatcacggcaac

SEQ ID NO: 811374 - DNA, 75 bp, synthetic construct
  source 1..75: mol_type = other DNA
acctgagcatgaacagcggcagcgaaacggcggtggacagcatcgtcgggctgaagctggactacgcagggaaag

SEQ ID NO: 811375 - DNA, 75 bp, synthetic construct
  source 1..75: mol_type = other DNA
gttccgcagcgaaggggcgaaaacctttgaaccgcgcgaagggctgaaaatcacgccatatgcgggtgtgaaact

SEQ ID NO: 811376 - DNA, 75 bp, synthetic construct
  source 1..75: mol_type = other DNA
tgaaaacgataccaccaccttacgcaacgatatcggcagcagcaatgcaaaaaattatggtgtcggcatggcggt

SEQ ID NO: 811377 - DNA, 75 bp, synthetic construct
  source 1..75: mol_type = other DNA
cacacggtattgacgttacggggaatggcaccattgtcagtaacaaaggcaatattaccgtggtggatgataaat

SEQ ID NO: 811378 - DNA, 75 bp, synthetic construct
  source 1..75: mol_type = other DNA
gaaaattatgatcattactatgcacaaacaccacagattataaaggcagaaagtagctctgaggttataaataac

SEQ ID NO: 811379 - DNA, 75 bp, synthetic construct
  source 1..75: mol_type = other DNA
caatctgaatggcgggattgcatttgttggtgaaataaatgcgctgaccgatggttcagccattgctaacaaacg

SEQ ID NO: 811380 - DNA, 75 bp, synthetic construct
  source 1..75: mol_type = other DNA
taaagggaatatgaccgtcgatggtgaaaactcggcggcgaccaaaattatcggtgatgacgcgcttattaagca

SEQ ID NO: 811381 - DNA, 75 bp, synthetic construct
  source 1..75: mol_type = other DNA
gcgaaaatgcgacgggcgtaaatttatctggcaacggcaacaatcttgaaatttccggtgatatgtccgttgatg

SEQ ID NO: 811382 - DNA, 75 bp, synthetic construct
  source 1..75: mol_type = other DNA
tgccggtaacgaaggcagtgtttcactttcaggcaagatgtctgttaacgacgccactacgggtctggaagtaaa

SEQ ID NO: 811383 - DNA, 75 bp, synthetic construct
  source 1..75: mol_type = other DNA
cggtcaattgtgggcgggttcatttaataactggggcacggttaacagtgacgctaatattatggccgctggcaa

SEQ ID NO: 811384 - DNA, 75 bp, synthetic construct
  source 1..75: mol_type = other DNA
aagatggtgatcaacgcgctcaacgccaatgtgaaagtctttatggccgatttcgaagattcactggcaccagac

SEQ ID NO: 811385 - DNA, 75 bp, synthetic construct
  source 1..75: mol_type = other DNA
cttcatcaatgagggtaacaaggcccctactattggagtgtttaattaccgagctgtcctgaacttcgccatgct

SEQ ID NO: 811386 - DNA, 75 bp, synthetic construct
  source 1..75: mol_type = other DNA
atgaatgcaaaagaagaaggtattatcagagcactgaaagaaatttcaaagatggaaagcgaagtggcgaaaaaa

SEQ ID NO: 811387 - DNA, 75 bp, synthetic construct
  source 1..75: mol_type = other DNA
ttctgattcgcgggacatgtttccagcgacagcagaagcgatcaggcaaattcgccctaaggctttcatcgtcga

SEQ ID NO: 811388 - DNA, 75 bp, synthetic construct
  source 1..75: mol_type = other DNA
ggcgatgctggcgtccggcagcccgcaagtggacactgaacagttagccagcgacatgctgagtttttccagaac

SEQ ID NO: 811389 - DNA, 75 bp, synthetic construct
  source 1..75: mol_type = other DNA
atgaaaatgcctcacagccgtgtaattggtggaggactttttgaactgagagtcggggataaaaatatcgcaagg

SEQ ID NO: 811390 - DNA, 75 bp, synthetic construct
  source 1..75: mol_type = other DNA
gcgaccaacagcacgtctgaaacgctcgccgcaacaccaaaagccgttaagacggtaatggatgaaacgaacaag

SEQ ID NO: 811391 - DNA, 75 bp, synthetic construct
  source 1..75: mol_type = other DNA
agctaacgatggatatgacacaaaggatgaatgggagttggccacaattttcaaaaaaacatatacgcaaggcag

SEQ ID NO: 811392 - DNA, 75 bp, synthetic construct
  source 1..75: mol_type = other DNA
ggcgtgctgcaacgcaacgccgatggtgagctggaagttaccaccaccgggcatcagggttcacatatttttagt

SEQ ID NO: 811393 - DNA, 75 bp, synthetic construct
  source 1..75: mol_type = other DNA
gactatgagattaaatttaaaaaagaaatgtttgaaatagaatctaaaagtatagaggttattaaaaatttacct

SEQ ID NO: 811394 - DNA, 75 bp, synthetic construct
  source 1..75: mol_type = other DNA
aattttgattccagatatgtgaaagatgttcgacttggttcacagcaatattatggagtgaacaactggcaaaca

SEQ ID NO: 811395 - DNA, 75 bp, synthetic construct
  source 1..75: mol_type = other DNA
aaggcggtaatggatgaaacgaacaagaaagcgcccttaaacagtcctgcactgaccggaacgccaacaacgcca

SEQ ID NO: 811396 - DNA, 75 bp, synthetic construct
  source 1..75: mol_type = other DNA
tgaggcagttaggtaacgctgtgccggttcatttggcgtattgcgttgccagcagtgtagcggaaaagctgctga

SEQ ID NO: 811397 - DNA, 75 bp, synthetic construct
  source 1..75: mol_type = other DNA
tattacatctccgtttcatttattccccgacagcagaaagcagttgtgagggagggggtttctgtgcctcttgtt

SEQ ID NO: 811398 - DNA, 75 bp, synthetic construct
  source 1..75: mol_type = other DNA
tatatcattacagcacgggttatcaggtcagacggccagggagagactccatttgcgctgagtccgccagtccgc

SEQ ID NO: 811399 - DNA, 75 bp, synthetic construct
  source 1..75: mol_type = other DNA
cctatgatccgtcgctgatgaattttgcaattagtgaccgcatcgcaagaagcactgagcaatgggatcattgta

SEQ ID NO: 811400 - DNA, 75 bp, synthetic construct
  source 1..75: mol_type = other DNA
gagtgagaaaccgtcggtggtgagggttcggtttggtgacggttatgaacagcgccgaccgacgggacttaatgc

SEQ ID NO: 811401 - DNA, 75 bp, synthetic construct
  source 1..75: mol_type = other DNA
ctgcggacttacaagatcgccgggtagagataaccggacccgttgagcgcaagatggtgattaacgcgctaaacg

SEQ ID NO: 811402 - DNA, 75 bp, synthetic construct
  source 1..75: mol_type = other DNA
aagacagccgtgttttttatttcacagtttataacgatacagacaacgaatatatcatcacagcacgggttatca

SEQ ID NO: 811403 - DNA, 75 bp, synthetic construct
  source 1..75: mol_type = other DNA
ctgggttgggagtggcaaggggtgatgtttgccgtcctgacgctgctcgccgcctggctgtggtggaaatggttg

SEQ ID NO: 811404 - DNA, 75 bp, synthetic construct
  source 1..75: mol_type = other DNA
agaatgcgacagaaacagtgattgcaacggatatcactgtggaacaaccatccccccaacccgaacagaacgata

SEQ ID NO: 811405 - DNA, 75 bp, synthetic construct
  source 1..75: mol_type = other DNA
cttaagaacaggcgagtggtatttaacattaaaggaaatgactatcggttaattgttgctattgcataccagcgc

SEQ ID NO: 811406 - DNA, 75 bp, synthetic construct
  source 1..75: mol_type = other DNA
agtggtggcgcattatagggagttattccggcctgacaagaggaaatttaaaataattttccgaccgcgcatttt

SEQ ID NO: 811407 - DNA, 75 bp, synthetic construct
  source 1..75: mol_type = other DNA
aaccatttccccctcttcacaacaagagcaaaaaagtgatgaagagacaaaaaaaaacgcgatgaagttaataaa

SEQ ID NO: 811408 - DNA, 75 bp, synthetic construct
  source 1..75: mol_type = other DNA
agatggccgatttaaattcttcaacaatcattcagtcctcttcacaatcggagcaaaaaagtgatgaggagacaa

SEQ ID NO: 811409 - DNA, 75 bp, synthetic construct
  source 1..75: mol_type = other DNA
tgatggtggcaacacaccggacgatggcggcaatacccctgacgatggtgggaatactcctgacgatggcggcaa

SEQ ID NO: 811410 - DNA, 75 bp, synthetic construct
  source 1..75: mol_type = other DNA
cactttatgcagaatatccaacagcaaaatttaaatgagatggataaattgttgatttggaatgcattgaggaaa

SEQ ID NO: 811411 - DNA, 75 bp, synthetic construct
  source 1..75: mol_type = other DNA
caaggtactttgggacggatcgtagcgggagccatggttctggtgggtattgtgggcggtatcgctcgccaaagc

SEQ ID NO: 811412 - DNA, 75 bp, synthetic construct
  source 1..75: mol_type = other DNA
ggtgattgaaattaacggcagcaggatcgtccttaataacgacggtgacatttctgctacgggaaaagattctgt

SEQ ID NO: 811413 - DNA, 75 bp, synthetic construct
  source 1..75: mol_type = other DNA
tctgacaatcctccagtaccgcctgatgacgataatggcggcaacacaccggatgatggtggcaatacccctgac

SEQ ID NO: 811414 - DNA, 75 bp, synthetic construct
  source 1..75: mol_type = other DNA
cgatggcggcaacacaccggatgatggtggcaatacccctgacgatggtgggaatactcctgacgatggcggcaa

SEQ ID NO: 811415 - DNA, 75 bp, synthetic construct
  source 1..75: mol_type = other DNA
gcaaactacggcaatgaaacgctaaatagtaatgtgaccgccaaagcgtggctttataaccaggataaggccaat

SEQ ID NO: 811416 - DNA, 75 bp, synthetic construct
  source 1..75: mol_type = other DNA
tgtcaataacgaaggtgacaacgccatcagtaacggtggcaccggcacgcaggttaacggtgatgaagccaccgt

SEQ ID NO: 811417 - DNA, 75 bp, synthetic construct
  source 1..75: mol_type = other DNA
aaaaaatactggcggatggttcagatattgcatctctgcgtaaaggatttagtgatacctccataatcagcgttg

SEQ ID NO: 811418 - DNA, 75 bp, synthetic construct
  source 1..75: mol_type = other DNA
cctgtacaactccccgaccgtagtggaatccatcatgtctgctactctggaacatgcagagaaggtcatcccggc

SEQ ID NO: 811419 - DNA, 75 bp, synthetic construct
  source 1..75: mol_type = other DNA
ttcccggcggatacatatcaaatgggcatgggcgtatctgcaaaaacattgcactgacgaagaacgtcactgtcc

SEQ ID NO: 811420 - DNA, 75 bp, synthetic construct
  source 1..75: mol_type = other DNA
cccggttctccgtccaaggccacaaatcgaggatttttctggttagtgccctgcatgcttctatggttcggagag

SEQ ID NO: 811421 - DNA, 75 bp, synthetic construct
  source 1..75: mol_type = other DNA
ttgcatggggcaggaacctatggtgtttccgcgtcaaaaggaacggcgaccaatgcgggcgagataaatgtcgac

SEQ ID NO: 811422 - DNA, 75 bp, synthetic construct
  source 1..75: mol_type = other DNA
atcgacttcccggtggtcgcctgaagtcttaccgtcgtgttgtttcacattttaccagttgttccaggtggtttg

SEQ ID NO: 811423 - DNA, 75 bp, synthetic construct
  source 1..75: mol_type = other DNA
cgatcataaaacactcatcaacacccacaagaaagagctgattgcagaagctgccgttagttttattcatgatgg

SEQ ID NO: 811424 - DNA, 75 bp, synthetic construct
  source 1..75: mol_type = other DNA
gcagcttatgggaatgcgatacaaaggctgggagtcaggctatgaggatgcatttgtctatgacctggacgagta

SEQ ID NO: 811425 - DNA, 75 bp, synthetic construct
  source 1..75: mol_type = other DNA
gctatcgttgagaacgtccagatcaatgtcaaagcgtttggtatcgccagtgattacccgccggaaattgtaact

SEQ ID NO: 811426 - DNA, 75 bp, synthetic construct
  source 1..75: mol_type = other DNA
cgtgaagtcagaagacttctcaatcaggtaatgcgtggccatgatgctgatggcattgcttttccggtcagtcat

SEQ ID NO: 811427 - DNA, 75 bp, synthetic construct
  source 1..75: mol_type = other DNA
accgccttcccagtggtcatctgaagtcttatcgacgtgttggttcacactttaccagttgttccagatggtttg

SEQ ID NO: 811428 - DNA, 75 bp, synthetic construct
  source 1..75: mol_type = other DNA
gacgatggcggcaatacccctgacgatggtgggaatactcctgacgatggcggcaacacaccggatgatggtggc

SEQ ID NO: 811429 - DNA, 75 bp, synthetic construct
  source 1..75: mol_type = other DNA
aatctggatgcctatcactggaaagaagacggcgtcagcgataaaggcgtgatgctcaatttcaagaaaacgttc

SEQ ID NO: 811430 - DNA, 75 bp, synthetic construct
  source 1..75: mol_type = other DNA
gcgtgttgagcaaccgcttcagtatgctggccgaggcggcaccgaagatgggcaacggcctggcgttcaatgtgg

SEQ ID NO: 811431 - DNA, 75 bp, synthetic construct
  source 1..75: mol_type = other DNA
ggatctgctgacagcactgacaggcagcggcgaaacggatatgcgaactgcttcaagtggcgggtttgtgacgac

SEQ ID NO: 811432 - DNA, 75 bp, synthetic construct
  source 1..75: mol_type = other DNA
gaccttgcagccggcaaggcacccgtcagtcacactcacccgtggagtcagataacgggagtgcctgctgcctcg

SEQ ID NO: 811433 - DNA, 75 bp, synthetic construct
  source 1..75: mol_type = other DNA
cccgtcagtcacactcacccgtggagtcagataacgggagtgcctgctgcctcgctgacggcaaaaggcaccgta

SEQ ID NO: 811434 - DNA, 75 bp, synthetic construct
  source 1..75: mol_type = other DNA
ttggttgataaagatcaaactgcagataatgcggcagactatttcttcgagtcatctgtcggggtgaatgtcacg

SEQ ID NO: 811435 - DNA, 75 bp, synthetic construct
  source 1..75: mol_type = other DNA
gtgagattaatctcaacggagcggaaattgatagcaccgactctcattatggtgctcctgcagagaatctggaac

SEQ ID NO: 811436 - DNA, 75 bp, synthetic construct
  source 1..75: mol_type = other DNA
gtaatggagcaacatagcgttgttaatatggctgcactcacggggtcaacggatcagcgcgtgtttaataacagc

SEQ ID NO: 811437 - DNA, 75 bp, synthetic construct
  source 1..75: mol_type = other DNA
caggtaaagacggctggagcgctagcgctacgctggaaggcgggccgaacttgagctacgcgaagagccagcgca

SEQ ID NO: 811438 - DNA, 75 bp, synthetic construct
  source 1..75: mol_type = other DNA
ttattattaccgacgatgctgtgtcagaggtggataaactggcattgcagaagacacgggtgaaattaattacgg

SEQ ID NO: 811439 - DNA, 75 bp, synthetic construct
  source 1..75: mol_type = other DNA
gtgcagtacatcgaagcatggatctccggcaacggctgcgtgccgatttatggcctgatggaagatgcagcgacg

SEQ ID NO: 811440 - DNA, 75 bp, synthetic construct
  source 1..75: mol_type = other DNA
aataacgaaggcgacagttccatcagcaacggcggcaccggtacgcagattaacggagatgacgccacggcgaac

SEQ ID NO: 811441 - DNA, 75 bp, synthetic construct
  source 1..75: mol_type = other DNA
tgggtgacattatttcgaataatttcagtaccgggattcgcgtcgctggagatgacggtcagatttctctggctg

SEQ ID NO: 811442 - DNA, 75 bp, synthetic construct
  source 1..75: mol_type = other DNA
ctttaacctgagcatgaacagcggcagcgaaacggcggtggacagcatcgttgggctgaagctggactacgcagg

SEQ ID NO: 811443 - DNA, 75 bp, synthetic construct
  source 1..75: mol_type = other DNA
aatcgttggtaataatgcgacggttatacaggaaggggatttatacgttagcaatgctgcacggggtattgatgt

SEQ ID NO: 811444 - DNA, 75 bp, synthetic construct
  source 1..75: mol_type = other DNA
accacggtattccgcgaagcgcgtgtgctcagcaaccgctttagcatgctggcagatgccgcaccgaaagtgggt

SEQ ID NO: 811445 - DNA, 75 bp, synthetic construct
  source 1..75: mol_type = other DNA
cggacgcagactcgatcggtgtactgatcaatggcgacaacgcgacacttgccaatactggtgatgtggatgtca

SEQ ID NO: 811446 - DNA, 75 bp, synthetic construct
  source 1..75: mol_type = other DNA
aataacgccatgacgctggcgacgaatgagcttaatgtgaccggcaatatgtctaccggagtaaatatttcgggt

SEQ ID NO: 811447 - DNA, 75 bp, synthetic construct
  source 1..75: mol_type = other DNA
gtggttaccggacaatccggtggcggaaaaatgtgtttcggtgaaagaactaatcgacaaaattattcagaaata

SEQ ID NO: 811448 - DNA, 75 bp, synthetic construct
  source 1..75: mol_type = other DNA
taatctcgatagcagtcgctcgatagcttacggcgacgtcaacaaaaccgctgatgctaatgtgaaacagcagta

SEQ ID NO: 811449 - DNA, 75 bp, synthetic construct
  source 1..75: mol_type = other DNA
cgttattgcagatagtgagttaacctcacgcaaatacatggagtttgatggtagccaggagaatatttctgggct

SEQ ID NO: 811450 - DNA, 75 bp, synthetic construct
  source 1..75: mol_type = other DNA
cgtcacgatgaccaaaaacgcctatacggatgttgtgacggattcttcagttaataatgtcgctcaggtactgga

SEQ ID NO: 811451 - DNA, 75 bp, synthetic construct
  source 1..75: mol_type = other DNA
cgcattgccgcgcgaatgcgcgcgaacagcaaagaagccaacagcagtaaatcgctggcgatcatggacgttaac

SEQ ID NO: 811452 - DNA, 75 bp, synthetic construct
  source 1..75: mol_type = other DNA
ggagaaggagaagtacgatggttaagcaggcgaaagaaaattgtgacatacatccctgagcggctgcataaaacg

SEQ ID NO: 811453 - DNA, 75 bp, synthetic construct
  source 1..75: mol_type = other DNA
gtgaacaacgacggcgacagcacgatccttgatggcggcaccggaacccgcattacgggtgatgatgcgacggcc

SEQ ID NO: 811454 - DNA, 75 bp, synthetic construct
  source 1..75: mol_type = other DNA
ctgggttgggagtggcaaggggtaatgtttgccatcctgacgctgctcgccgcctggctgtggtggaaatggttg

SEQ ID NO: 811455 - DNA, 75 bp, synthetic construct
  source 1..75: mol_type = other DNA
cgtaagcgtccggaaaatgtcattgttcacaccgaccgtggaggccagtactgttcagctgattatcaggccctg

SEQ ID NO: 811456 - DNA, 75 bp, synthetic construct
  source 1..75: mol_type = other DNA
taacaccgcggtagaaaattggagtgaatggaaatggttagaaatcgggcatggcgtcgtcatcatatatctcgg

SEQ ID NO: 811457 - DNA, 75 bp, synthetic construct
  source 1..75: mol_type = other DNA
atgatggagttaatggtcgttcatccacatattttctggctaagtctcggcggtttgctgctggcagccgagatg

SEQ ID NO: 811458 - DNA, 75 bp, synthetic construct
  source 1..75: mol_type = other DNA
agcgaggatctcggcgctggtacgcatgttgaggtgattgcgatagaaggaataacgctgattatccgtgcggtc

SEQ ID NO: 811459 - DNA, 75 bp, synthetic construct
  source 1..75: mol_type = other DNA
tcgcggcgggtgcgcgaacaaaagcacagcgacagtcatttaaaccagcgcgggcagcagctgattggccgacgt

SEQ ID NO: 811460 - DNA, 75 bp, synthetic construct
  source 1..75: mol_type = other DNA
ttacatctcttgctgttggggactcctcccttgccgatggtgaaaaaactattgcgttaggaaatacggctaaag

SEQ ID NO: 811461 - DNA, 75 bp, synthetic construct
  source 1..75: mol_type = other DNA
gtggcaacgcttagagctgatagcgatcctgtctggcctgtacgcaaggcacttccggcgaataagacacagcac

SEQ ID NO: 811462 - DNA, 75 bp, synthetic construct
  source 1..75: mol_type = other DNA
gcgctaggtgagtacccgacggtcaagcttgccgaggctcgagaaaaatgcgagcaagcgcgaaagcaggttgcg

SEQ ID NO: 811463 - DNA, 75 bp, synthetic construct
  source 1..75: mol_type = other DNA
ggaatccggcaacaggcagttacaccgttgccagcgaaacggcgaagagccgtggtaaaaaaagcgggcgcagta

SEQ ID NO: 811464 - DNA, 75 bp, synthetic construct
  source 1..75: mol_type = other DNA
tggaacggcaccgcgttcagcgctgcacacggcaccgacgtcaccagcaaaatcaccaatgtcaccgctggtgag

SEQ ID NO: 811465 - DNA, 75 bp, synthetic construct
  source 1..75: mol_type = other DNA
tcatcaatgtaaaagatggcgatatttcggctaccagtaaagacgccattaacggctctcagctgaaaaccacca

SEQ ID NO: 811466 - DNA, 75 bp, synthetic construct
  source 1..75: mol_type = other DNA
ggcggcaagcctgcgccgtcagggactgagggcaaaggcctcccggaagttcagcccggtcagctaccgcgcaca

SEQ ID NO: 811467 - DNA, 75 bp, synthetic construct
  source 1..75: mol_type = other DNA
cgcctgacggatgaactgcgtgctcagggttacccctttaacgtaaaaaccgtggcggcaagcctgcgccgtcag

SEQ ID NO: 811468 - DNA, 75 bp, synthetic construct
  source 1..75: mol_type = other DNA
attatatcgaatgtgattacattcgttggcggcggcacagttggtgtggcggtctcaatcgggaacaatttgaaa

SEQ ID NO: 811469 - DNA, 75 bp, synthetic construct
  source 1..75: mol_type = other DNA
aaaatgaaaatcaggaaaaattattacagggccggttattgccacccctccggttcagcgccttgagccgggtgc

SEQ ID NO: 811470 - DNA, 75 bp, synthetic construct
  source 1..75: mol_type = other DNA
gcttcgccgaaaccctgatagaaaccaacgatcccgcactacgactggcgctctgcggacggcttcacgcggctc

SEQ ID NO: 811471 - DNA, 75 bp, synthetic construct
  source 1..75: mol_type = other DNA
gccacgttatcttcttgaaatgtctatagcattggattgcgaccctaattggctgttgtatggctcacaaaacga

SEQ ID NO: 811472 - DNA, 75 bp, synthetic construct
  source 1..75: mol_type = other DNA
gtacggtttctgcaaccagcaccgatgtagtaaacggctctcaattgtacgacctgcagcaggatgctctgttgt

SEQ ID NO: 811473 - DNA, 75 bp, synthetic construct
  source 1..75: mol_type = other DNA
aacgcatctggctgacgtgctggtgagcaagcagttccacgaagcaaacaatatgactgatgcgctggcggcgct

SEQ ID NO: 811474 - DNA, 75 bp, synthetic construct
  source 1..75: mol_type = other DNA
aaagacgactacaatccggaaaccgagcagtacaccctgaccatcagccagcgcacgccagccacgccggatcag

SEQ ID NO: 811475 - DNA, 75 bp, synthetic construct
  source 1..75: mol_type = other DNA
gcatacgcaggactctctctcgacggcggtgacattttcgaatcgactccattgaccaattactggcttgctatt

SEQ ID NO: 811476 - DNA, 75 bp, synthetic construct
  source 1..75: mol_type = other DNA
gcgtccaacaccgcgctggaagggctttaccagtcaggcgatgcgctctgcactcagtgtgaggctgaaggtttc

SEQ ID NO: 811477 - DNA, 75 bp, synthetic construct
  source 1..75: mol_type = other DNA
gatggcagtggttaccagttcctggtggaaatgctcaccgatctgaaccgccgtaatccgcaggtggcttcacgt

SEQ ID NO: 811478 - DNA, 75 bp, synthetic construct
  source 1..75: mol_type = other DNA
agcactcacccgtacactggcgactgaactggcggatgaattgttggctatctataacgccaatcaccagagtga

SEQ ID NO: 811479 - DNA, 75 bp, synthetic construct
  source 1..75: mol_type = other DNA
cagtagcggacaatcttggtgggggggctaccgtcaatgcgcaaggcgtcgttacttccccaaattacaggctga

SEQ ID NO: 811480 - DNA, 75 bp, synthetic construct
  source 1..75: mol_type = other DNA
accaacactaacagtatcaataccctgacggattccgttggcgaccttaaagacgatgccctgctgtggaatggc

SEQ ID NO: 811481 - DNA, 75 bp, synthetic construct
  source 1..75: mol_type = other DNA
cagcatcagtattgagggcagggatatcactactgtgctggataaccgcctgatggggcttacgctgacggataa

SEQ ID NO: 811482 - DNA, 75 bp, synthetic construct
  source 1..75: mol_type = other DNA
tgagaagcggaacctataataacgtgggtgatgctctgtcaggaatcgacaataataccctacaatggaataaaa

SEQ ID NO: 811483 - DNA, 75 bp, synthetic construct
  source 1..75: mol_type = other DNA
taacacgttgcactgggacagcaaaagtaataaatacagtgccagccatactgtctttaatgcaaatggctcagt

SEQ ID NO: 811484 - DNA, 75 bp, synthetic construct
  source 1..75: mol_type = other DNA
ggtaagaattacaccaatgttggcgcagctcttaccgctctggacaatgacgccctgttgtgggatgcaaccgct

SEQ ID NO: 811485 - DNA, 75 bp, synthetic construct
  source 1..75: mol_type = other DNA
attatatcgaatgtgattacattcgatggcggcggcacagttggtgtggcggtctcattcgggaacaatttgaaa

SEQ ID NO: 811486 - DNA, 75 bp, synthetic construct
  source 1..75: mol_type = other DNA
cacgcttaaccctgaaggttttagcgtcgttgaggttcccgatataacagccaaccgccgcgctgatgattcagg

SEQ ID NO: 811487 - DNA, 75 bp, synthetic construct
  source 1..75: mol_type = other DNA
gaagcatgggaacgctacagtgttctggtcagccgtgtggatacagcaaagcccgaatggccacaaaagcctgaa

SEQ ID NO: 811488 - DNA, 75 bp, synthetic construct
  source 1..75: mol_type = other DNA
atagttgaagttcctgatattacggcaaatcgtcgcgcagacaataacggaaaatggatgtttctggatggtaaa

SEQ ID NO: 811489 - DNA, 75 bp, synthetic construct
  source 1..75: mol_type = other DNA
aaaaccattgccgccagcctgcgtcgtcaggggctgcgggcgaaagccagccggaagttcagcccggtcagctac

SEQ ID NO: 811490 - DNA, 75 bp, synthetic construct
  source 1..75: mol_type = other DNA
cataaggcattctttgaggcaaagcagcgatacggtgctccccgccttgctgacgaaatgccggagttcaatatt

SEQ ID NO: 811491 - DNA, 75 bp, synthetic construct
  source 1..75: mol_type = other DNA
tgaaagggatccgcaattttgagaataaagttgcggtaactgtagcattacgggacaaaaaacgctttgacggtg

SEQ ID NO: 811492 - DNA, 75 bp, synthetic construct
  source 1..75: mol_type = other DNA
atgcagcatttaaaaaatattacggcgggtaatccaaaaacggttgaacaatatcaattgacaaagggttttgat

SEQ ID NO: 811493 - DNA, 75 bp, synthetic construct
  source 1..75: mol_type = other DNA
agctatcagaccagatggattaagtgtggttgaagtggcggatattactgctaaccgacgggcggacatttcagg

SEQ ID NO: 811494 - DNA, 75 bp, synthetic construct
  source 1..75: mol_type = other DNA
gttgtcgaggttcctgatattaccgccaaccgacgtgctgatgactcagggaaatggatgtttaaggatggtgcc

SEQ ID NO: 811495 - DNA, 75 bp, synthetic construct
  source 1..75: mol_type = other DNA
aaactttcagccagacaccataaagattgtttacgatgaaaataatattattgtcgccatcaccaaagatgcctc

SEQ ID NO: 811496 - DNA, 75 bp, synthetic construct
  source 1..75: mol_type = other DNA
aacagaggaggagcgcacacggctggaggcttgggaacgctacagcgttttggtcagtcgtgtggatcctgcaaa

SEQ ID NO: 811497 - DNA, 75 bp, synthetic construct
  source 1..75: mol_type = other DNA
gtgattaaacgcatttatacggcagaggaattacaacagcaggcagaaattcggaaagccagacttcttgcagat

SEQ ID NO: 811498 - DNA, 75 bp, synthetic construct
  source 1..75: mol_type = other DNA
tcattcgctgaaagtggaatgtatccatggagaacacttcatcagccgggaaataatgcgggcaacggtgtttaa

SEQ ID NO: 811499 - DNA, 75 bp, synthetic construct
  source 1..75: mol_type = other DNA
caacggtgtttaattatatcgaatgtgattacaatcggtggcggcggcacagttggtgtggcggcctcagtccgg

SEQ ID NO: 811500 - DNA, 75 bp, synthetic construct
  source 1..75: mol_type = other DNA
tgaagcgacataatctgcgtggaagtatgagcgcaaaaggttgctgctacgataatgcctgcgtggaaagcttct

SEQ ID NO: 811501 - DNA, 75 bp, synthetic construct
  source 1..75: mol_type = other DNA
aaagcgtcattgttcatacggaccgtggtggtcaatactgttcaggggattatcaggcgctgctgaagcgacaca

SEQ ID NO: 811502 - DNA, 75 bp, synthetic construct
  source 1..75: mol_type = other DNA
attatatcgaatgtgattacattcgatggcggcggcacagttggtgtggcggtctcaatctggaacaatttgaaa

SEQ ID NO: 811503 - DNA, 75 bp, synthetic construct
  source 1..75: mol_type = other DNA
gggactgagggcaaaggcctcccggaagttcagcccggtcagctaccgcgcaaacggcctgcctgtgtcagaaaa

SEQ ID NO: 811504 - DNA, 75 bp, synthetic construct
  source 1..75: mol_type = other DNA
ctgcgtgctcagggttacccctttaacgcaaaaaccgcggaggcaaacctgcgccgtcaggtgctgagggaaaaa

SEQ ID NO: 811505 - DNA, 75 bp, synthetic construct
  source 1..75: mol_type = other DNA
gtcaatactgttcaggggattatcaggcgctgctgaagcgacacaacctgcgtggcagtatgagtgcgaaaggct

SEQ ID NO: 811506 - DNA, 75 bp, synthetic construct
  source 1..75: mol_type = other DNA
gtgctcagggtacccctttacgtaaaaaccgtggcggcaagcctgcgccgtcagggactgagggcaaaggcctcc

SEQ ID NO: 811507 - DNA, 75 bp, synthetic construct
  source 1..75: mol_type = other DNA
cgtaagaggccccggaacgttatcgttcacacggaccgtggaggccagtactgttcagcagattatcaggcgcaa

SEQ ID NO: 811508 - DNA, 75 bp, synthetic construct
  source 1..75: mol_type = other DNA
tactgtcagcccggataacggttttacaaccagtattgaactcgaagtgaagattgatgatcttgaaatggaata

SEQ ID NO: 811509 - DNA, 75 bp, synthetic construct
  source 1..75: mol_type = other DNA
gccgctgtccataaggcattctttgaggcaaagcagcgatacggtgctccctgccttgctgacgaactgccggag

SEQ ID NO: 811510 - DNA, 75 bp, synthetic construct
  source 1..75: mol_type = other DNA
tatcgttcacacggaccgtggaggccagtactgttcagcagattatcaggcgcaactgaagcggcataatctgcg

SEQ ID NO: 811511 - DNA, 75 bp, synthetic construct
  source 1..75: mol_type = other DNA
ccggtgggcttacttttgaaaacgactcaatccttgcctggattcgaaatactgactgggcgaagattggattta

SEQ ID NO: 811512 - DNA, 75 bp, synthetic construct
  source 1..75: mol_type = other DNA
ctcagtagtgccaccaacagcacgtctgaaacgctcgccgcaacaccaaaagcggtaaaggccgcgtatgatctt

SEQ ID NO: 811513 - DNA, 75 bp, synthetic construct
  source 1..75: mol_type = other DNA
ggaagcgttatcaacatatggcggggtggttaacggtgatgtgattatcaagggcattctctcgttaattgggaa

SEQ ID NO: 811514 - DNA, 75 bp, synthetic construct
  source 1..75: mol_type = other DNA
cgtccctttacgcttaatctcagaactggccgcataactatggggcatggtctggatgttacaggagatataaca

SEQ ID NO: 811515 - DNA, 75 bp, synthetic construct
  source 1..75: mol_type = other DNA
caataggattgtatacgaataagggtacgttgtttgctgtatactcacaagaacaagcaataataaataaagcat

SEQ ID NO: 811516 - DNA, 75 bp, synthetic construct
  source 1..75: mol_type = other DNA
gcgccactaacagcgtgtctgaaacgcaggctgcaacgccgaaagcagtaaaggccgcgtatgatcttgctaacg

SEQ ID NO: 811517 - DNA, 75 bp, synthetic construct
  source 1..75: mol_type = other DNA
ttgaaaacgactcaatccttgcctggattcggaatactgactgggcaaagattggttttaaaaatgatgccgaca

SEQ ID NO: 811518 - DNA, 75 bp, synthetic construct
  source 1..75: mol_type = other DNA
tgccagcgccgccgcgctcggtgtgcctttaaaaattacccatatggcagtcggcgatggcggcggaatattgcc

SEQ ID NO: 811519 - DNA, 75 bp, synthetic construct
  source 1..75: mol_type = other DNA
acggcggaagatttaaatctacaggaattcattaataaagcaaataatgccgttcagcgttcaggcgatatcttg

SEQ ID NO: 811520 - DNA, 75 bp, synthetic construct
  source 1..75: mol_type = other DNA
ccgggaaattggtgtgtttgatgagcacggcgatttgatcgcggtgggcaatactgctgaaagttacaagccagc

SEQ ID NO: 811521 - DNA, 75 bp, synthetic construct
  source 1..75: mol_type = other DNA
ggcgggatattcttgcgaaatcgaccgttgccgctgttatcgaatacctcggtttacaggaaacggtaaacaagg

SEQ ID NO: 811522 - DNA, 75 bp, synthetic construct
  source 1..75: mol_type = other DNA
taattaacagcagtacaggcatgtggattcatatgcgtgaccagaacgttattatgggacgtaatgcggtatcca

SEQ ID NO: 811523 - DNA, 75 bp, synthetic construct
  source 1..75: mol_type = other DNA
ccgcccttgtagactcgtcgcctgacgcactgaatacgctgaacgagctggcggcggcgctgggcaatgacccga

SEQ ID NO: 811524 - DNA, 75 bp, synthetic construct
  source 1..75: mol_type = other DNA
gcagaacatgaacagtcacgacgtcaccctgacgcctcgctgaccgcaaaaggttttactcagttaagcagtgcg

SEQ ID NO: 811525 - DNA, 75 bp, synthetic construct
  source 1..75: mol_type = other DNA
attaataactcaaggacagccaatggtaccgatggtcaggcgtacatggataataacgggaactggctttgcggc

SEQ ID NO: 811526 - DNA, 75 bp, synthetic construct
  source 1..75: mol_type = other DNA
ccactacgcccctttacgcttaatctcagaactggtcgcataactatggggcatggtctggatgttacaggagat

SEQ ID NO: 811527 - DNA, 75 bp, synthetic construct
  source 1..75: mol_type = other DNA
ggggattgccgaagttccggtgattcgcaaagtgcgtgtggcgctattttccacgggtgatgagttacagttacc

SEQ ID NO: 811528 - DNA, 75 bp, synthetic construct
  source 1..75: mol_type = other DNA
tcaggcaagtggtgggattatcaacgcttttcagctccctggcggtaacgaaacccgcccacgaaatgttgcatt

SEQ ID NO: 811529 - DNA, 75 bp, synthetic construct
  source 1..75: mol_type = other DNA
tcctttagcctcggcaactgctttatcgtgctggaacgcgatcgcggcaatgttgacgtgggcgaatgggtggaa

SEQ ID NO: 811530 - DNA, 75 bp, synthetic construct
  source 1..75: mol_type = other DNA
ccatatggttgtagccaacgatgggtatgattcaaaagaggaatgggaactggcggcaatcttcagaaaagcata

SEQ ID NO: 811531 - DNA, 75 bp, synthetic construct
  source 1..75: mol_type = other DNA
gatgtcgccagcctggcaactctgacaaaagtcgggcgggatattcttgcgaaatcgaccgttgccgctgttatc

SEQ ID NO: 811532 - DNA, 75 bp, synthetic construct
  source 1..75: mol_type = other DNA
cgatgaggccggatggcatttctatagccagcgaaatacagataactcggtaatatttgctgttaacggtcagat

SEQ ID NO: 811533 - DNA, 75 bp, synthetic construct
  source 1..75: mol_type = other DNA
tgaccggaacgccaacaacgccaactgcgcgacagggaacgaataatacccaaatcgcaagcacggctttcgtta

SEQ ID NO: 811534 - DNA, 75 bp, synthetic construct
  source 1..75: mol_type = other DNA
attccgctttcaggatggagtggctattgcttttaaaaatattcaggctggggatggtaaaaaattcacgctatc

SEQ ID NO: 811535 - DNA, 75 bp, synthetic construct
  source 1..75: mol_type = other DNA
gtctgaaacgcaggctgcaacgccgaaagcggttaaggccgcatatgacctggctaacggaaaatataccgctca

SEQ ID NO: 811536 - DNA, 75 bp, synthetic construct
  source 1..75: mol_type = other DNA
taaagcaagcacacaggcggttattcaatatcttggtctgagcgatgcaagtggatacgttggacgctggctgaa

SEQ ID NO: 811537 - DNA, 75 bp, synthetic construct
  source 1..75: mol_type = other DNA
aagctactggtgaagacagtattgcgctgggatataacagtgatgcagccggtaaagactccatcgcgatgggct

SEQ ID NO: 811538 - DNA, 75 bp, synthetic construct
  source 1..75: mol_type = other DNA
agctgacggcgcaaatgctatcgcgctgggaaatgggagtattaccggtggggcaaatgccattgctcttggaca

SEQ ID NO: 811539 - DNA, 75 bp, synthetic construct
  source 1..75: mol_type = other DNA
gcctatgcttcggtttcacttgacggtggtaaaagcgcagaagaaattgcaggcgaaacgccactgagtgataac

SEQ ID NO: 811540 - DNA, 75 bp, synthetic construct
  source 1..75: mol_type = other DNA
aaaaggcatatagtgcggcacatggtacagatactaccagtaccatcaccaacgttaaagacggcgctatttctg

SEQ ID NO: 811541 - DNA, 75 bp, synthetic construct
  source 1..75: mol_type = other DNA
ggtgaggtgtcggtaaaaatgggaaaactgttgtttctcaaagcggggcagggggggacggccagcggtaaaaaa

SEQ ID NO: 811542 - DNA, 75 bp, synthetic construct
  source 1..75: mol_type = other DNA
ttgcattcgggagactggcaaaggcgtcaggaactaactccattgccgcaggtagagagagtactgctagtggtg

SEQ ID NO: 811543 - DNA, 75 bp, synthetic construct
  source 1..75: mol_type = other DNA
gttttgtgccaatgtttggcatgtatgggctggcggaagcggttaacttgctgtgtgagaaagaagggattgccg

SEQ ID NO: 811544 - DNA, 75 bp, synthetic construct
  source 1..75: mol_type = other DNA
cagtaaaatcactaatgttgctaaaggtacggtttctgcaaccagcaccgatgtagtaaacggctctcaattgta

SEQ ID NO: 811545 - DNA, 75 bp, synthetic construct
  source 1..75: mol_type = other DNA
cttttgccatcgaactgtatgataacgaaggcaaagtaatcccattgcagaaaggcggtcatccggtcaattcgg

SEQ ID NO: 811546 - DNA, 75 bp, synthetic construct
  source 1..75: mol_type = other DNA
caatggggttaggaagccttgccgataaagtcaatactatcgcgttaggaaatggcagccaggctctggcagata

SEQ ID NO: 811547 - DNA, 75 bp, synthetic construct
  source 1..75: mol_type = other DNA
cacggtgcaaaggccaccaacaaaatcattaatgttgctaaaggtacggtttctgcaaccagcaccgatgtagta

SEQ ID NO: 811548 - DNA, 75 bp, synthetic construct
  source 1..75: mol_type = other DNA
aagcaggtttcaccgaacctgacctttatctacgatcctgaaatcacccctgatgacctgctgctggaagtggcg

SEQ ID NO: 811549 - DNA, 75 bp, synthetic construct
  source 1..75: mol_type = other DNA
aaagcctcggggaacagatccgcagcattcggtagcggcgcagagtcaaaagcagagtattcccttgcattgggt

SEQ ID NO: 811550 - DNA, 75 bp, synthetic construct
  source 1..75: mol_type = other DNA
gaattaattgatacaactcaggcaaggccaattcagtattgcattaatggaacgtggtataacgcggggagtatt

SEQ ID NO: 811551 - DNA, 75 bp, synthetic construct
  source 1..75: mol_type = other DNA
ctgacaggtcaggttatgtcgttacgggttcagttaacggaaaccgtgatgaattaattgatacaactcaggcaa

SEQ ID NO: 811552 - DNA, 75 bp, synthetic construct
  source 1..75: mol_type = other DNA
tttctctcgatcatatcgtttttggctatgaaaaacctggtgaggtatttagtggcgaagtattgactgagtgtc

SEQ ID NO: 811553 - DNA, 75 bp, synthetic construct
  source 1..75: mol_type = other DNA
ctggttctgcggcctgccgggtaatccggtttcagcaacgctgacattctaccaactggtacagccgttactggc

SEQ ID NO: 811554 - DNA, 75 bp, synthetic construct
  source 1..75: mol_type = other DNA
aaaaaaattagcgcaggcagccgcgccagatggtaagcctgtccgcctgactcatatggccgtgggcgacggtgg

SEQ ID NO: 811555 - DNA, 75 bp, synthetic construct
  source 1..75: mol_type = other DNA
aaggccgcgtatgacctggctaacggaaaatataccgctcaggacgccacgacggcacgaaaaggccttgtccag

SEQ ID NO: 811556 - DNA, 75 bp, synthetic construct
  source 1..75: mol_type = other DNA
caatttattttccaaaaaaatgactttgtgcataagtttgttttttgttttttgtttttggggggccgatagttg

SEQ ID NO: 811557 - DNA, 75 bp, synthetic construct
  source 1..75: mol_type = other DNA
caatttgttttccaaaaaaagtgactttgtgcataactttgttttttgttcttggggggccgatagttgctcaca

SEQ ID NO: 811558 - DNA, 75 bp, synthetic construct
  source 1..75: mol_type = other DNA
aacggttctcagttaaaaaccactaacgacaacgtggcaaccaacaccactaatatcagcaacctgaccggcgat

SEQ ID NO: 811559 - DNA, 75 bp, synthetic construct
  source 1..75: mol_type = other DNA
gaaacttcccgctttaaccatggcgtttctctcgatcatatcgtttttggctatgaaaaacctggtgaggtattc

SEQ ID NO: 811560 - DNA, 75 bp, synthetic construct
  source 1..75: mol_type = other DNA
atatatcggcagcttgaagatgccctcgataagattggctcgacggagacagggcgtgtcctcctgcatgccatt

SEQ ID NO: 811561 - DNA, 75 bp, synthetic construct
  source 1..75: mol_type = other DNA
aagttagtgaaaacacaaaacagcgcaatttattttccaaaaaaatgactttgtgcataagtttgtttttgtttt

SEQ ID NO: 811562 - DNA, 75 bp, synthetic construct
  source 1..75: mol_type = other DNA
atattagcatatatggccacgcacattggtcaagcgataattgaaaaatatatttctagaaaaaagggaataagt

SEQ ID NO: 811563 - DNA, 75 bp, synthetic construct
  source 1..75: mol_type = other DNA
gcccgctgatgaaacgactgacggcggtacgtgcgccagttatcacaccagagccggaagccatcagcgaaccgt

SEQ ID NO: 811564 - DNA, 75 bp, synthetic construct
  source 1..75: mol_type = other DNA
ggattgccatgccggaagaggagcgcaaaaacgtcgacctgccgtcgctgcccggcgatgacagcctgccgtcac

SEQ ID NO: 811565 - DNA, 75 bp, synthetic construct
  source 1..75: mol_type = other DNA
ttcagcatcccggcttcgcggtgaaacgcctcaacgtggcggtggtactcaatcaaaacgctccggcgctgaaaa

SEQ ID NO: 811566 - DNA, 75 bp, synthetic construct
  source 1..75: mol_type = other DNA
gcgcgttgtctggtacgcgaacagccgattttattgctcgatgaaccgttctctgcgctcgatccggcgttacgt

SEQ ID NO: 811567 - DNA, 75 bp, synthetic construct
  source 1..75: mol_type = other DNA
cgctcgatccggcactacgccaggagatgctgatgctggtgagcacgagctgccagcagcaaaaaatgacgctat

SEQ ID NO: 811568 - DNA, 75 bp, synthetic construct
  source 1..75: mol_type = other DNA
agcgcgcgggtgcatctggcgctcaacgaagaaagctcgtttgtggtcagcgatgagccgcaaaacagcgcctcg

SEQ ID NO: 811569 - DNA, 75 bp, synthetic construct
  source 1..75: mol_type = other DNA
acggttggggcacttactttgaagatcccaacggcgaagacggcgacgatgaagattttgtcgatgaagacgatg

SEQ ID NO: 811570 - DNA, 75 bp, synthetic construct
  source 1..75: mol_type = other DNA
gaataaacaaactgcgcctgccggaatattcgaacgtcatcttgataaaggaacgcgcccgggggtttacccacg

SEQ ID NO: 811571 - DNA, 75 bp, synthetic construct
  source 1..75: mol_type = other DNA
tttcggcccggtgcatgtggaacaaccatttaccagcgccgctaactttttcccgcccatcttgtttgctcaggg

SEQ ID NO: 811572 - DNA, 75 bp, synthetic construct
  source 1..75: mol_type = other DNA
cgatgggcgtgcccggttcgctcagcaaccgtccgcccgttgcgcctaatcaggttaccaacggtgcgacgcctg

SEQ ID NO: 811573 - DNA, 75 bp, synthetic construct
  source 1..75: mol_type = other DNA
acgcctcaacgtggcggtggtgctcaatcaaaacgccccggcgctgaaaaactggaagccggagcagaccacgca

SEQ ID NO: 811574 - DNA, 75 bp, synthetic construct
  source 1..75: mol_type = other DNA
cctgattggctgcggcctgctggcgctgttgttgctgttctttgtggtgcgcccggtaatgaaacgcctgacggc

SEQ ID NO: 811575 - DNA, 75 bp, synthetic construct
  source 1..75: mol_type = other DNA
aagctaaccgcggcacagctggagaaaatgcacgctatcgcccgtcagatgggaattgatcatttaatggcgcgg

SEQ ID NO: 811576 - DNA, 75 bp, synthetic construct
  source 1..75: mol_type = other DNA
ggcgacctcggcgtagaaattggcgatcctgaactggtcggcattcagaaagcgttgattcgtcgcgcgcgtcag

SEQ ID NO: 811577 - DNA, 75 bp, synthetic construct
  source 1..75: mol_type = other DNA
acgcaagtgatgcaggataaaaatgccctgaacttactggcgggtacaacacttacggaaaatctgctaccggga

SEQ ID NO: 811578 - DNA, 75 bp, synthetic construct
  source 1..75: mol_type = other DNA
ctggctcgacgggccacgcttgaagagcaactggatgcacagcgtcagtatgtcaaagctgagcaacaaacggtc

SEQ ID NO: 811579 - DNA, 75 bp, synthetic construct
  source 1..75: mol_type = other DNA
gccttgccgggcaaaacggctgtggtaaatcgacgttgattaaaattatgtccggtgtttatcgcccggatgagg

SEQ ID NO: 811580 - DNA, 75 bp, synthetic construct
  source 1..75: mol_type = other DNA
ggtgacctcggcgttgaaattggcgatccggaactggtcggcattcagaaggcgttgatccgtcgtgcgcgccag

SEQ ID NO: 811581 - DNA, 75 bp, synthetic construct
  source 1..75: mol_type = other DNA
ctgaaaggtgttaccgctatcatcaccatgaccgagtcaggtcgtaccgcgctgatgacttcccgtatcagctcc

SEQ ID NO: 811582 - DNA, 75 bp, synthetic construct
  source 1..75: mol_type = other DNA
ctgctaaaagacaaagagcaaatgctgaatgccgttcgtcgggtgctaccacgtaaccgtgggctggcaggtcag

SEQ ID NO: 811583 - DNA, 75 bp, synthetic construct
  source 1..75: mol_type = other DNA
atctctctcgcctcgctggtgggcctgctgaccattgccgtctatcttgttctggtgccgctgatggtctttttc

SEQ ID NO: 811584 - DNA, 75 bp, synthetic construct
  source 1..75: mol_type = other DNA
ctgttcacgctacccggcgacctcagccaacatgtgcatctcaagccgacggactaccgggcgagtttccggagt

SEQ ID NO: 811585 - DNA, 75 bp, synthetic construct
  source 1..75: mol_type = other DNA
aggcgatgagtgtttatcagcaggcgcgcgccagcgttgccagctatcagacacaagtgatgcaggataaaaatg

SEQ ID NO: 811586 - DNA, 75 bp, synthetic construct
  source 1..75: mol_type = other DNA
ccggatatccaggaagcggaacataatttgaagagcgccaatgcagatattggcgcggcgcgggctaactttttc

SEQ ID NO: 811587 - DNA, 75 bp, synthetic construct
  source 1..75: mol_type = other DNA
tgctgaccgtggcgcttacaccggcgtaacagctaaatggctgcacaccaaagacccaaaaccggcgaaacaaaa

SEQ ID NO: 811588 - DNA, 75 bp, synthetic construct
  source 1..75: mol_type = other DNA
tttcagggggaagaagataagaagtttgccttcttttccatcggtgttcagggggcggatatgaagacgctggca

SEQ ID NO: 811589 - DNA, 75 bp, synthetic construct
  source 1..75: mol_type = other DNA
ttaacggtttattatctgctgcgcaaaacgtatgaaatcaaacctgacgaacagttcctgttccatgcggctgct

SEQ ID NO: 811590 - DNA, 75 bp, synthetic construct
  source 1..75: mol_type = other DNA
gcggtaagaaagtgcgcgtggtgtacgattccgtgggcagagacacctgggaacggtcgctggattgcctgcaac

SEQ ID NO: 811591 - DNA, 75 bp, synthetic construct
  source 1..75: mol_type = other DNA
atggcaacacgaattgaatttcacaagcacggtggcccggaagtacttcaagccgtagagttcactcctgccgat

SEQ ID NO: 811592 - DNA, 75 bp, synthetic construct
  source 1..75: mol_type = other DNA
ttaacggtttattatctgctgcgtaaaacctatgaaatcaaacctgacgagcaattcctgtttcatgccgcggcg

SEQ ID NO: 811593 - DNA, 75 bp, synthetic construct
  source 1..75: mol_type = other DNA
ccggcggagaatgaaatccaggtcgaaaataaagccatcggcatcaattttatcgacacgtatatccgcagcggc

SEQ ID NO: 811594 - DNA, 75 bp, synthetic construct
  source 1..75: mol_type = other DNA
aggccagtaatgaactgttctctttgattgccagcggtgtgattaaggtcgatgtcgccgagcagcagaaatatc

SEQ ID NO: 811595 - DNA, 75 bp, synthetic construct
  source 1..75: mol_type = other DNA
gcttgagcgggataacattgttaatggccgcgatgttagctcgctaatcggcctcaacgtcattgaccgggcaac

SEQ ID NO: 811596 - DNA, 75 bp, synthetic construct
  source 1..75: mol_type = other DNA
ctatgacatggctaacgtaaatgacatgctcgatttaatctgcgctacagataagcgaattaacagggagttaat

SEQ ID NO: 811597 - DNA, 75 bp, synthetic construct
  source 1..75: mol_type = other DNA
gcggataaagttcgtgagattgccgcaaaactggggcgtcatgtggctattctgggtgacctccaggggcccaaa

SEQ ID NO: 811598 - DNA, 75 bp, synthetic construct
  source 1..75: mol_type = other DNA
cgggctggggcttaatccaggattgaagctgaacgcggcacagcaggagaaaatgcacgcgattgcccgtcagat

SEQ ID NO: 811599 - DNA, 75 bp, synthetic construct
  source 1..75: mol_type = other DNA
ttattgctcgatgaaccgttctctgcgctcgatccggcgttacgtcaagagatgttgacgctggtgagcacgagc

SEQ ID NO: 811600 - DNA, 75 bp, synthetic construct
  source 1..75: mol_type = other DNA
aagggcaaccaggtacgtattggcgtaaatgccccgaaggaagtttctgttcaccgtgaagagatataccagcgt

SEQ ID NO: 811601 - DNA, 75 bp, synthetic construct
  source 1..75: mol_type = other DNA
ggtggtgtgggcctgatagcctgtcagtgggcgaaagccttaggggcgaaacttattggtaccgtgagcaccgcg

SEQ ID NO: 811602 - DNA, 75 bp, synthetic construct
  source 1..75: mol_type = other DNA
aatacaccggtaaagtggttggtctggatatgggcacaggtagcgcgttctcactgcttccggcgcaaaacgcca

SEQ ID NO: 811603 - DNA, 75 bp, synthetic construct
  source 1..75: mol_type = other DNA
cctggctggcgctggaacgtacccgtattgtcagcccaatgaccggctatgtctcccgccgagccgttcagcctg

SEQ ID NO: 811604 - DNA, 75 bp, synthetic construct
  source 1..75: mol_type = other DNA
gatggctaaaaaaacagtaattcgccgactgttcaaatatcttcctgtttctattgaaatgcagaaggctgttgt

SEQ ID NO: 811605 - DNA, 75 bp, synthetic construct
  source 1..75: mol_type = other DNA
gacggttattgatggaaaagacgtattgtatccgaacgggccaacgttcgatccttccggtaagttaatctgggc

SEQ ID NO: 811606 - DNA, 75 bp, synthetic construct
  source 1..75: mol_type = other DNA
tcttaaaagtgatgatgatgtgtacaaaatgttggttgccgaaaagcagagcattcttgatgacctgaaaaaaag

SEQ ID NO: 811607 - DNA, 75 bp, synthetic construct
  source 1..75: mol_type = other DNA
cctggctggcactggagcgtactcgtattgtcagcccgatgaccggttatgtctctcgccgtgctgtacagcctg

SEQ ID NO: 811608 - DNA, 75 bp, synthetic construct
  source 1..75: mol_type = other DNA
tattgaaaacgctgccgatggcgtcattgccattgaccgccagggtgatgtaaccaccatgaacccggcagcaga

SEQ ID NO: 811609 - DNA, 75 bp, synthetic construct
  source 1..75: mol_type = other DNA
aagaacagcgtctatctatggatatcctgatgataaaaataaaaatatagtctctgttctgggtgagtggacggt

SEQ ID NO: 811610 - DNA, 75 bp, synthetic construct
  source 1..75: mol_type = other DNA
gaaacgcaaaacagttttctgaaaggagggaccccaaaatcgcaggacttttcactcacgctcgaatattatgga

SEQ ID NO: 811611 - DNA, 75 bp, synthetic construct
  source 1..75: mol_type = other DNA
taccagacctttattgctcactccattgatacacctgaaaaattcgaagccaaacgcgcggaacttgccgaggcg

SEQ ID NO: 811612 - DNA, 75 bp, synthetic construct
  source 1..75: mol_type = other DNA
caaactggaagcgagcaatgatatctaccagacctttattgctcactccattgatacacctgaaaaattcgaagc

SEQ ID NO: 811613 - DNA, 75 bp, synthetic construct
  source 1..75: mol_type = other DNA
gtgatactggttgtctggagattcagggggccagtctacattgtcccaacgcttactattggttatatcgtagaa

SEQ ID NO: 811614 - DNA, 75 bp, synthetic construct
  source 1..75: mol_type = other DNA
cgacgtggaaaaagccgtggatgaactcttacggtcacagtctgaccaccagtaccagtatttccgcgccggaac

SEQ ID NO: 811615 - DNA, 75 bp, synthetic construct
  source 1..75: mol_type = other DNA
gctaggtattgcgctcggcctgcataaagcctactgggatattgattacaacagcggcgaacgctatcgcttcgg

SEQ ID NO: 811616 - DNA, 75 bp, synthetic construct
  source 1..75: mol_type = other DNA
ccgatgtggtattgcgcggcggcgcgcggaccgataaagactatttgaaattgctcgatactcgcccggctattg

SEQ ID NO: 811617 - DNA, 75 bp, synthetic construct
  source 1..75: mol_type = other DNA
tgcggcgttagtgatcatgccaccgatgggtgcgctgatttttctggcggtgggcaggcatccagttgcaggttt

SEQ ID NO: 811618 - DNA, 75 bp, synthetic construct
  source 1..75: mol_type = other DNA
ggtggtatggctgctgatgttgctggcgtggtatcttgtcggtctgccgataggtccgggtatttacccacgttt

SEQ ID NO: 811619 - DNA, 75 bp, synthetic construct
  source 1..75: mol_type = other DNA
ttgctcgatactcgcccggctataggcacggtgctgaatcagggtgactacgaaaatttcaaaaagtccttaacc

SEQ ID NO: 811620 - DNA, 75 bp, synthetic construct
  source 1..75: mol_type = other DNA
ccaacaattttcgggaaatctcggaaacgtcaaccaactctccggtaactccggatagttggataagctgtagtg

SEQ ID NO: 811621 - DNA, 75 bp, synthetic construct
  source 1..75: mol_type = other DNA
atgaccactattaccaaagatcgactgctgacaatccagcattggcgcgaaacatacggaccgggtagcaacgtt

SEQ ID NO: 811622 - DNA, 75 bp, synthetic construct
  source 1..75: mol_type = other DNA
tattatatcaagggattaatatacaatggatatcctattggggctgcaggtataaaaaatatatataaagaaaaa

SEQ ID NO: 811623 - DNA, 75 bp, synthetic construct
  source 1..75: mol_type = other DNA
ggataagctgtagtgagcgaatgcctgaaaagggccagaacgtgcttatttcggtgaatttcgatagctctctgg

SEQ ID NO: 811624 - DNA, 75 bp, synthetic construct
  source 1..75: mol_type = other DNA
agcgccggtaactccggatggttggataagctgtagtgatcgaatgccggataccaaaacagccgttcttgttgc

SEQ ID NO: 811625 - DNA, 75 bp, synthetic construct
  source 1..75: mol_type = other DNA
aagccgggcaatggtgttgagcaggtaacacactggatgccgctaccagaaccgccacaggagtcgaacagtgaa

SEQ ID NO: 811626 - DNA, 75 bp, synthetic construct
  source 1..75: mol_type = other DNA
tcgaattgttcattaaaaacccgcttgaaaacggtcttactcgtggggaacaaatggaactggcacgtattgctc

SEQ ID NO: 811627 - DNA, 75 bp, synthetic construct
  source 1..75: mol_type = other DNA
atctggttcgcaaggttatcccttcagtgcccgacgaagttcttgaaaaactgactgttccgcaacttcagcaga

SEQ ID NO: 811628 - DNA, 75 bp, synthetic construct
  source 1..75: mol_type = other DNA
atgacaaaattactcgatctcgactcaatcctacctcctaaaaaaagtgtcaaattttgcggccaggaatatcct

SEQ ID NO: 811629 - DNA, 75 bp, synthetic construct
  source 1..75: mol_type = other DNA
atcgccgccgttttagcgacccggaagcgattgccttgctggttattttagttgccggatttggcattatctttt

SEQ ID NO: 811630 - DNA, 75 bp, synthetic construct
  source 1..75: mol_type = other DNA
ggtacactggtcggcggtcatgacgataacgattcttcgcttgatatctcgtacatgagtaacggaaataatatt

SEQ ID NO: 811631 - DNA, 75 bp, synthetic construct
  source 1..75: mol_type = other DNA
cttagtcgagaactttcatccaggggccattgatcatatgggcttcacctgggagcatattcaagaaatcaatcc

SEQ ID NO: 811632 - DNA, 75 bp, synthetic construct
  source 1..75: mol_type = other DNA
aaaagctgatccgcgaagctgatatcttagtcgagaactttcatccaggggccattgatcatatgggcttcacct

SEQ ID NO: 811633 - DNA, 75 bp, synthetic construct
  source 1..75: mol_type = other DNA
aaagcgagcccgtgggatgataaaccggcacgcatcgaatttcatagtctctgtgatgagaaagaattacgcgat

SEQ ID NO: 811634 - DNA, 75 bp, synthetic construct
  source 1..75: mol_type = other DNA
tgccaaaacagcaattggtcttggcctgccgtttagtttgttaatgcagtacgtcattgtagattcaatctgtca

SEQ ID NO: 811635 - DNA, 75 bp, synthetic construct
  source 1..75: mol_type = other DNA
tcgaattgttcattaaaaacccgcttgaaaacgggcttactcgtggtgaacaaatggaactggcacgtattgctc

SEQ ID NO: 811636 - DNA, 75 bp, synthetic construct
  source 1..75: mol_type = other DNA
gtcagatgttgaccgatgccggggttatttgggcaagcagtagcaccaacaccggattactggcacgtgaattta

SEQ ID NO: 811637 - DNA, 75 bp, synthetic construct
  source 1..75: mol_type = other DNA
catctgcccggatccgtaccagtaaagccgccaatgataccggcaccatccgctacaaatactatcagtgcaata

SEQ ID NO: 811638 - DNA, 75 bp, synthetic construct
  source 1..75: mol_type = other DNA
tgcggcgatgcatgaatcgttactggccttactctgtgacaccaaaccgtggccccaactgaccggcaaagcaac

SEQ ID NO: 811639 - DNA, 75 bp, synthetic construct
  source 1..75: mol_type = other DNA
caccgtcacagactttcataacaacccgttaaaagatatgaaagtgaattttgtggcaccaactgactcgcaact

SEQ ID NO: 811640 - DNA, 75 bp, synthetic construct
  source 1..75: mol_type = other DNA
gataacttcctgcgtcatcttggtatttatggctaccgtgcaggctttatccgtcgttacgtcaactggcagcca

SEQ ID NO: 811641 - DNA, 75 bp, synthetic construct
  source 1..75: mol_type = other DNA
ctggcggtgccaatccacaatgcggaagaagcgtttaacccgaatgcggtgaaagtggttctcgacgctgaaggg

SEQ ID NO: 811642 - DNA, 75 bp, synthetic construct
  source 1..75: mol_type = other DNA
ggtgatcgttaatgtgcagggtgatgaaccgatgatccctgcgacaatcattcgtcaggttgctgataacctcgc

SEQ ID NO: 811643 - DNA, 75 bp, synthetic construct
  source 1..75: mol_type = other DNA
gaaagtggttctcgatgctgaaggttatgcactgtacttttcgcgtgccaccattccgtgggatcgtgaccgttt

SEQ ID NO: 811644 - DNA, 75 bp, synthetic construct
  source 1..75: mol_type = other DNA
aagccgcggggggggaagtatgcatgacgcgagccgatcatcagtcaggcactgagcgtctggcggaagttgtcg

SEQ ID NO: 811645 - DNA, 75 bp, synthetic construct
  source 1..75: mol_type = other DNA
aggaagcgtttaacccgaatgcggtgaaagtggttctcgacgctgaagggtatgcactgtacttctctcgcgcca

SEQ ID NO: 811646 - DNA, 75 bp, synthetic construct
  source 1..75: mol_type = other DNA
gatgaatgggaagacgatataggactggtacataatcaacgcatcgttcagtcaggtcaaagctggcagcaaggc

SEQ ID NO: 811647 - DNA, 75 bp, synthetic construct
  source 1..75: mol_type = other DNA
atccgccacggtattggttatgtttcggaagatcgcatgtcgcgcggtttggtgatggcgcaatctattgaagac

SEQ ID NO: 811648 - DNA, 75 bp, synthetic construct
  source 1..75: mol_type = other DNA
ttgttggcctgcttggtgcggggcgcacggaattatgtctgagtctgtttggtatgacccgaccggatgctggcg

SEQ ID NO: 811649 - DNA, 75 bp, synthetic construct
  source 1..75: mol_type = other DNA
gctctggaagggattagtgggtattctgctggcccattgcctgttatttgtaatcggcgtaggacgtaaatcgct

SEQ ID NO: 811650 - DNA, 75 bp, synthetic construct
  source 1..75: mol_type = other DNA
tcatatgatgctgtggttatttcgctgcctggaagtgctctgctatggcctggtggtcaatcacttcagccttgg

SEQ ID NO: 811651 - DNA, 75 bp, synthetic construct
  source 1..75: mol_type = other DNA
ttatgccagtgttgctttcggtgtgaagaatagtcatttgtcatgtaatccgatgcgcgaaagcaatttgccctt

SEQ ID NO: 811652 - DNA, 75 bp, synthetic construct
  source 1..75: mol_type = other DNA
tatcggtcagccggtcactatcaccacggatatttacggcgatgatgtgaaatacaccggtaaagtggttggtct

SEQ ID NO: 811653 - DNA, 75 bp, synthetic construct
  source 1..75: mol_type = other DNA
aatctctctgggtgtggatgaagatttcagcctgaaaaattcgcaattcgacttcctgcatccgtggtatgacac

SEQ ID NO: 811654 - DNA, 75 bp, synthetic construct
  source 1..75: mol_type = other DNA
taacggtgagagtgcggtaaaagaatccattgtcgttaatatcgtccctgttgtctcatcccgcgaccattcatc

SEQ ID NO: 811655 - DNA, 75 bp, synthetic construct
  source 1..75: mol_type = other DNA
atacgattagtgccacgctgccaaatggtttctcacaacggataattgcgaaattcgttagcgattcgagtacgc

SEQ ID NO: 811656 - DNA, 75 bp, synthetic construct
  source 1..75: mol_type = other DNA
caaacccgcagtgaaggtgttcaggatatcacgctgtctgactggacagataacggggatggtagctacacacag

SEQ ID NO: 811657 - DNA, 75 bp, synthetic construct
  source 1..75: mol_type = other DNA
ttgacgtgaatgtggcaaatggcaaactcgagttaacatcatcgaagccagaaaccacggtccataacagtgaag

SEQ ID NO: 811658 - DNA, 75 bp, synthetic construct
  source 1..75: mol_type = other DNA
gaacgttggagcgttttccagtaattcgcaatttacacaaggtgcttactggacaaatgaatctgatgattacaa

SEQ ID NO: 811659 - DNA, 75 bp, synthetic construct
  source 1..75: mol_type = other DNA
tgcgccagggtgaggaactggatgttccggcaacaacctcgcagaaaagccatgagcaacaaaatgccataccgc

SEQ ID NO: 811660 - DNA, 75 bp, synthetic construct
  source 1..75: mol_type = other DNA
aataatgacgtttacgccgataaaaagacatttaataccctcacgatcaacgtcactgatgagagtgataatccc

SEQ ID NO: 811661 - DNA, 75 bp, synthetic construct
  source 1..75: mol_type = other DNA
ggatatgggcacaggtagcgcgttctcactgcttccggcgcaaaatgcgaccggtaactggatcaaagtcgttca

SEQ ID NO: 811662 - DNA, 75 bp, synthetic construct
  source 1..75: mol_type = other DNA
acgtctggcgaaaacaaacgcacgcagggatcgctgtatggtgaatgggggaacgttggagcgttttccagtaat

SEQ ID NO: 811663 - DNA, 75 bp, synthetic construct
  source 1..75: mol_type = other DNA
ttcaggctccgacattaagccagaaagattctctgttatccgttaatccgctaaccgtggctgcagataaaaaat

SEQ ID NO: 811664 - DNA, 75 bp, synthetic construct
  source 1..75: mol_type = other DNA
cgagttggcactctgctttcacaagatatgaatagtgagcaggccagcggcatggcgcgtggttgggcgtcttca

SEQ ID NO: 811665 - DNA, 75 bp, synthetic construct
  source 1..75: mol_type = other DNA
atggctacttggcaacaaggaatcaactcaggcggttttcttgctggtatcggtggtgtcaactcaaacgctccg

SEQ ID NO: 811666 - DNA, 75 bp, synthetic construct
  source 1..75: mol_type = other DNA
aatgacatcggcaatacgcttcagcttatcaggcagaacaatgatattgagcgttcaggcgataacaatgttggg

SEQ ID NO: 811667 - DNA, 75 bp, synthetic construct
  source 1..75: mol_type = other DNA
atcagaggaggctatacaacgctgcacagcgaatcatgggcaaaatgcaaaatcaggggattgcagcagcccgag

SEQ ID NO: 811668 - DNA, 75 bp, synthetic construct
  source 1..75: mol_type = other DNA
aggaagatttaattctcttttaatggataataatatcttcacaaatcttgatttcgctaatttgaatatcgacct

SEQ ID NO: 811669 - DNA, 75 bp, synthetic construct
  source 1..75: mol_type = other DNA
tgggcaggcatccagttgcaggtttactggctgccattgcaggcgtaggttgcggctttacggctaatttactga

SEQ ID NO: 811670 - DNA, 75 bp, synthetic construct
  source 1..75: mol_type = other DNA
accgtccattatgggcggcagccgcaggctatgactttaattatatggattgcatgtcttatgccgcaaatgcat

SEQ ID NO: 811671 - DNA, 75 bp, synthetic construct
  source 1..75: mol_type = other DNA
cgagcaccggggcgcgcctgacaggctgaccctccgggggcgcagcgcggattttcgcgggacgctgaactccag

SEQ ID NO: 811672 - DNA, 75 bp, synthetic construct
  source 1..75: mol_type = other DNA
ctcgttcggcgctgagcatggcgttcagtggtcaggtgatacaaaattaaacgaggaatttataaaacgctgggg

SEQ ID NO: 811673 - DNA, 75 bp, synthetic construct
  source 1..75: mol_type = other DNA
cggctttgttgtattggggacatcaaccagccggatgagtaaatcagaattcagtgaactaatcgagctgatcta

SEQ ID NO: 811674 - DNA, 75 bp, synthetic construct
  source 1..75: mol_type = other DNA
actggcattacaggctcttcaggttctcctgctcttggtgcagatattcgtagccgtgcatctggtggtgatcag

SEQ ID NO: 811675 - DNA, 75 bp, synthetic construct
  source 1..75: mol_type = other DNA
tcttaaattcctacctcccggcccagcaacggataaagacgttgagatcgttcgacagggtgcgccaactgacat

SEQ ID NO: 811676 - DNA, 75 bp, synthetic construct
  source 1..75: mol_type = other DNA
ccaaggaactgactcgcgtcggtgttgaccctaacagcgttgctcagatgtatcagcagaacccttcaggatttg

SEQ ID NO: 811677 - DNA, 75 bp, synthetic construct
  source 1..75: mol_type = other DNA
atgatgagcgttcttcagaaaaatatgcggcgggcgggcgggcgtagccgttttaatttaactgattatgactat

SEQ ID NO: 811678 - DNA, 75 bp, synthetic construct
  source 1..75: mol_type = other DNA
acgttggcagttgttgcagcaaatgacagtggcgatggcggttctcataacacctcaaccaccacgtccactacg

SEQ ID NO: 811679 - DNA, 75 bp, synthetic construct
  source 1..75: mol_type = other DNA
agaaactattgagtccgagttgcatagcaaactaccaaaaagcatcgataaaatccatgaagatatcaaaaaaca

SEQ ID NO: 811680 - DNA, 75 bp, synthetic construct
  source 1..75: mol_type = other DNA
gcaaaataacacttactttgatgaaatcgccttgattataaaagaaaactgtttgtattcagacacaaagaactt

SEQ ID NO: 811681 - DNA, 75 bp, synthetic construct
  source 1..75: mol_type = other DNA
cggcgctggaagcctgccagaagcatatcgggaaacgttttgaagacggcctggaatttaccccggcaatacgtg

SEQ ID NO: 811682 - DNA, 75 bp, synthetic construct
  source 1..75: mol_type = other DNA
aagtagcacctggtacgtcttctcgcccgattctgtcggcaaaagaagcgcagaatttcgatgctcaacactatt

SEQ ID NO: 811683 - DNA, 75 bp, synthetic construct
  source 1..75: mol_type = other DNA
cgctggaagcctgccagaagcatatcgggaaacgttttgaagacgggctggaatttaccccggcaatacgtgttg

SEQ ID NO: 811684 - DNA, 75 bp, synthetic construct
  source 1..75: mol_type = other DNA
cagagtatcgtcactttatacctgtattaacgcgcgccaaagaggcctgtgagaacagtggtcacacaattgatg

SEQ ID NO: 811685 - DNA, 75 bp, synthetic construct
  source 1..75: mol_type = other DNA
taccaacaacatagcgccacagattgccagtagcaccaccaccatcttccagtgttttttatcaaagcgtttagt

SEQ ID NO: 811686 - DNA, 75 bp, synthetic construct
  source 1..75: mol_type = other DNA
cgggcgggcgtagccgttttaatttaactgattatgactatttatttggtcaggcaagctggctgacagaccgtt

SEQ ID NO: 811687 - DNA, 75 bp, synthetic construct
  source 1..75: mol_type = other DNA
acaaactattcctctaatgtaaaaaacgaaagagaaactcacatatctggcacatataaaggaatagacttctta

SEQ ID NO: 811688 - DNA, 75 bp, synthetic construct
  source 1..75: mol_type = other DNA
aactaatgccatcaggcggaaataccactatcggaagagcgtctgggcaaaataacacttactttgatgaaatcg

SEQ ID NO: 811689 - DNA, 75 bp, synthetic construct
  source 1..75: mol_type = other DNA
tttttctccgaaacgagttaaaggaacacaacaagcaacttgttgaggcagcacagcaagctggtgttgaaacaa

SEQ ID NO: 811690 - DNA, 75 bp, synthetic construct
  source 1..75: mol_type = other DNA
ctcgttcggtgctgaacatgatgttcaatggtcgggtgatacgaaattaaacgaggaatttataaaacgctgggg

SEQ ID NO: 811691 - DNA, 75 bp, synthetic construct
  source 1..75: mol_type = other DNA
gcgcaggccatgcgcgccgctcaggcaaagtgggataagctgcaacggggcgttgcggagttctccatcagtctg

SEQ ID NO: 811692 - DNA, 75 bp, synthetic construct
  source 1..75: mol_type = other DNA
tagccgcgcgtcataagctgaagatggcactgggtaaagacctgtcggataagcccgtggagcatatagaccaga

SEQ ID NO: 811693 - DNA, 75 bp, synthetic construct
  source 1..75: mol_type = other DNA
atactcaatattattaatcgcaatgcaataaaacatcggatgagttgcgaaggcagtctgtctgatatgctcact

SEQ ID NO: 811694 - DNA, 75 bp, synthetic construct
  source 1..75: mol_type = other DNA
acattcagcaatataccgacaattacaaccagcaatataacgttaatgttggtaaatctcagcggcagcaatctc

SEQ ID NO: 811695 - DNA, 75 bp, synthetic construct
  source 1..75: mol_type = other DNA
ttggtctatgtggcggcagcggccggcactcgcgccgcgatcaacatgaccggcggtgacgcggccctgaacctg

SEQ ID NO: 811696 - DNA, 75 bp, synthetic construct
  source 1..75: mol_type = other DNA
gcgaaacatcgcgcacaaaaagcagtggatgagctggtggattgtgtggcggagctggaaaccaaagttggaaag

SEQ ID NO: 811697 - DNA, 75 bp, synthetic construct
  source 1..75: mol_type = other DNA
acctgatccgcaccattccgctcgattttgttaaggatctcgagacgattgaatacattggtgataataaatttg

SEQ ID NO: 811698 - DNA, 75 bp, synthetic construct
  source 1..75: mol_type = other DNA
gtgataatcttcggcggatcctgaaagattacggcaatgaggctgtacatgtcctgtacggaacaggcgtagatg

SEQ ID NO: 811699 - DNA, 75 bp, synthetic construct
  source 1..75: mol_type = other DNA
ggttacgatgaaaaaacgctgcccgccaacgcaccacgtaacgcgcattataaatgcctatattctgggcgaagg

SEQ ID NO: 811700 - DNA, 75 bp, synthetic construct
  source 1..75: mol_type = other DNA
gccaactaactgtggctttgaagggctggcttactcctctcaggaccataccttctggttttttaaagagaaaaa

SEQ ID NO: 811701 - DNA, 75 bp, synthetic construct
  source 1..75: mol_type = other DNA
gcacttttaaagagatgaggaaagacaatacagtaggcatcacagttcaaacttgttcagatatttttgacagca

SEQ ID NO: 811702 - DNA, 75 bp, synthetic construct
  source 1..75: mol_type = other DNA
taatatctcttcgctgacctggtcggcacaaagcaatactctttttagcactatcaacaaacctgccgccattgt

SEQ ID NO: 811703 - DNA, 75 bp, synthetic construct
  source 1..75: mol_type = other DNA
gcatgggattcattgatgaagagcagcgcaattctatcggcaccttagcggctggcgcacgccttgcgtcatcgt

SEQ ID NO: 811704 - DNA, 75 bp, synthetic construct
  source 1..75: mol_type = other DNA
gcgaaccaaatcgtttttatcgctttacccctcatcatcgcattaacaggctggcatgtttcacctttttgttat

SEQ ID NO: 811705 - DNA, 75 bp, synthetic construct
  source 1..75: mol_type = other DNA
tttgtcattagcgatgagcgcgattacgccatttatgtgatttcactgaccccaaactcggaagtaaaaatcctc

SEQ ID NO: 811706 - DNA, 75 bp, synthetic construct
  source 1..75: mol_type = other DNA
aatctgctttccgcatcgtgctgggtgcctggcatacagaaggatcgatggtgaaagtcacggcagatgacgttg

SEQ ID NO: 811707 - DNA, 75 bp, synthetic construct
  source 1..75: mol_type = other DNA
aatgtgctgatgcatatacaggggtattttagtaattacttaagtacacgccagcgtaaagagttgagcgaggtt

SEQ ID NO: 811708 - DNA, 75 bp, synthetic construct
  source 1..75: mol_type = other DNA
ccgatatcatgacgtctgctgtcgtaataagttcgtggtacacagatgaatataaaaaattatttgcgttacctg

SEQ ID NO: 811709 - DNA, 75 bp, synthetic construct
  source 1..75: mol_type = other DNA
ctgtattgtctgtggacagaaagaatgaacccgaacagatgattgaaaatgccagaatgacgttatccctcatgg

SEQ ID NO: 811710 - DNA, 75 bp, synthetic construct
  source 1..75: mol_type = other DNA
ttctcctgagtctgttgccgaaatgcatgttaatgatccacagggattccagcggcttgctgggagtatggcact

SEQ ID NO: 811711 - DNA, 75 bp, synthetic construct
  source 1..75: mol_type = other DNA
cttcgtcgcagacattgccgcaatctgagcaggtatcacagccagcagccagcagtaacttttcttcactatggg

SEQ ID NO: 811712 - DNA, 75 bp, synthetic construct
  source 1..75: mol_type = other DNA
gattgctgaccgtggagcctacaccggcgtaacggcaaagtggttacacaccaaagacccgaagccgcaaaagca

SEQ ID NO: 811713 - DNA, 75 bp, synthetic construct
  source 1..75: mol_type = other DNA
cagaggaacttcttcttcgtcgcagacattgccgcaatctgagcaggtatcacagccagcagccagcagtaactt

SEQ ID NO: 811714 - DNA, 75 bp, synthetic construct
  source 1..75: mol_type = other DNA
gtaaaggcatggggtatgtcgatgacgcccagcgggatgattttggcaatctggcgcttaaagcacaggtagctt

SEQ ID NO: 811715 - DNA, 75 bp, synthetic construct
  source 1..75: mol_type = other DNA
gtcgggatattgagcgtggcaagttggcagaaacaatccgcagcaatcaggctggcgaagcacttcaggcgagag

SEQ ID NO: 811716 - DNA, 75 bp, synthetic construct
  source 1..75: mol_type = other DNA
atgcagcaggtgaaagcgtggcttgaacaggccgtaaagggctgcaatatccgtctgaccgatgaaccggtgctg

SEQ ID NO: 811717 - DNA, 75 bp, synthetic construct
  source 1..75: mol_type = other DNA
atgactcagaccgctgctattcccgactaccttaaacccacaatggagcgtcttgagacggccagagaagcgcat

SEQ ID NO: 811718 - DNA, 75 bp, synthetic construct
  source 1..75: mol_type = other DNA
acgaaggcgagagcgccatcaccaacggtggcaccggcaccgcagattaacggtgatgacgccacggcaaacaac

SEQ ID NO: 811719 - DNA, 75 bp, synthetic construct
  source 1..75: mol_type = other DNA
gaaggcctggtacacgtttccgaaatggattggaccaacaaaacatccacccgtccaaagttgttaacgttggcg

SEQ ID NO: 811720 - DNA, 75 bp, synthetic construct
  source 1..75: mol_type = other DNA
ggaagctggagcgcacaacgtgttagtaaccagtgcagttaataacaatggagttacagaactttttgccttgct

SEQ ID NO: 811721 - DNA, 75 bp, synthetic construct
  source 1..75: mol_type = other DNA
tccgtgatagcgccatcaacgaaggttttaacacggcgaaaccgtgggccgatgcggtgatctctaatcgtccgt

SEQ ID NO: 811722 - DNA, 75 bp, synthetic construct
  source 1..75: mol_type = other DNA
tcgtgcagaacgcgggggtattcaataatagtggcagtgtaacagggcggatgatgtcggctggcggggtcttta

SEQ ID NO: 811723 - DNA, 75 bp, synthetic construct
  source 1..75: mol_type = other DNA
aattggcagtggcgctacgctaacaatgcaggatattgacagttttgaacatcatgggacaagaaccccagaact

SEQ ID NO: 811724 - DNA, 75 bp, synthetic construct
  source 1..75: mol_type = other DNA
tggcaataccgttaatatgaatggtggacttgaactgattggagagaaaaacgcgcttgcagatgggtcgcaggt

SEQ ID NO: 811725 - DNA, 75 bp, synthetic construct
  source 1..75: mol_type = other DNA
atgactagtctaaaaactagtattaagactatcacttatttaagtgatactggttgtctggagattcaggggggc

SEQ ID NO: 811726 - DNA, 75 bp, synthetic construct
  source 1..75: mol_type = other DNA
agttcgctgaatctggatgcgtacaactggaaagaggatggcatcagcgataaaggcgtgatgctgaacttcaag

SEQ ID NO: 811727 - DNA, 75 bp, synthetic construct
  source 1..75: mol_type = other DNA
ataatcaaactgacggggcgattatgagaggtgctgcgctgacaggtactgcagtggcaaataacgaaggaacct

SEQ ID NO: 811728 - DNA, 75 bp, synthetic construct
  source 1..75: mol_type = other DNA
ctccctgggtctgaaacagtgcaaagctaacccgtggcagcagttcgcggaaccacaacaagggcgaccgtgttg

SEQ ID NO: 811729 - DNA, 75 bp, synthetic construct
  source 1..75: mol_type = other DNA
taaccgcgcaagatatggcgggtgttaatgcggcaatccttgagcagcttaattccgacgtccaactgatcaatc

SEQ ID NO: 811730 - DNA, 75 bp, synthetic construct
  source 1..75: mol_type = other DNA
gaggctgccgcgcagtgttccgggattctggctggctgtacgccggaagaggagaaaggcctgcaggattatggg

SEQ ID NO: 811731 - DNA, 75 bp, synthetic construct
  source 1..75: mol_type = other DNA
gcgcaggggtaaagctaccgccaacgctgcatttggcaatgccgccagcgtgctggtaggcgattttatttatac

SEQ ID NO: 811732 - DNA, 75 bp, synthetic construct
  source 1..75: mol_type = other DNA
aaatcgttaccacgttaggcccggcaacagatcgcgataataaccttgaaaaagttatcgcggcgggtgccaacg

SEQ ID NO: 811733 - DNA, 75 bp, synthetic construct
  source 1..75: mol_type = other DNA
ggaggagaaaggcctgcaggattatgggcgctatctcggcactgctttccagttgatcgacgatttactcgatta

SEQ ID NO: 811734 - DNA, 75 bp, synthetic construct
  source 1..75: mol_type = other DNA
caccattgccgccctgatcgagtttatccacacagcgactctgctacacgacgacgttgtggatgaatcagatat

SEQ ID NO: 811735 - DNA, 75 bp, synthetic construct
  source 1..75: mol_type = other DNA
gatgcctggtgagtatcagggaacggtgtatgtccctgccgctccgggtggaattactctgtacggtacaggtga

SEQ ID NO: 811736 - DNA, 75 bp, synthetic construct
  source 1..75: mol_type = other DNA
tggaccagaagcgtaacaacgttgttgtttctcgccgtgctgttattgagtctgaaaacagtgcagaacgcgatc

SEQ ID NO: 811737 - DNA, 75 bp, synthetic construct
  source 1..75: mol_type = other DNA
tgaaacaactgggcgaagatccgtgggtagctatcgctaaacgttatccggaaggtactaaactgactggtcgcg

SEQ ID NO: 811738 - DNA, 75 bp, synthetic construct
  source 1..75: mol_type = other DNA
ggagtgcagaaaaattgtttctacccttaatcggcttggcgctcattgtggacttgacgatgtattccccccaga

SEQ ID NO: 811739 - DNA, 75 bp, synthetic construct
  source 1..75: mol_type = other DNA
atgaacaaaatttcaacatatcgaaaacagcttgggctgtctcaaagacaacttgctgttcagttagggtggata

SEQ ID NO: 811740 - DNA, 75 bp, synthetic construct
  source 1..75: mol_type = other DNA
atgagaaccttgaaagtatcattgatagctgcgaaagcgaaaaacggcgtgattggttgcggtccagacataccc

SEQ ID NO: 811741 - DNA, 75 bp, synthetic construct
  source 1..75: mol_type = other DNA
gtcattgcggcagggcagacttattttgctatccagacccgacggcaggagcttgctgacgatgaagcatttaag

SEQ ID NO: 811742 - DNA, 75 bp, synthetic construct
  source 1..75: mol_type = other DNA
gaccatcggcaacattgagcgttatatcaatgataaagcgttcgaaatgggctggcgtccggatatgtccggcgt

SEQ ID NO: 811743 - DNA, 75 bp, synthetic construct
  source 1..75: mol_type = other DNA
attcgattggcattcagatcgacggcgacaaggcggtcgtgaacaacgacggtgacaatgccatcagcaacggcg

SEQ ID NO: 811744 - DNA, 75 bp, synthetic construct
  source 1..75: mol_type = other DNA
taattgcctgacgggcaatgactataatgatactgactcctatacctcgatattatacacgggtggcgatgtcat

SEQ ID NO: 811745 - DNA, 75 bp, synthetic construct
  source 1..75: mol_type = other DNA
tgggcattgagttccaactcaataccgaagtgggtcgtgacgtacaactggacgatctactgaacgattacgatg

SEQ ID NO: 811746 - DNA, 75 bp, synthetic construct
  source 1..75: mol_type = other DNA
tccgatctggtcgttaccgccatcgccgaaggtcgcaaagcggcagacggcattatgaactggctggaagtttaa

SEQ ID NO: 811747 - DNA, 75 bp, synthetic construct
  source 1..75: mol_type = other DNA
ttcgcaaggccgcatcatcgccccggaaggcagcgacaacgctttccagaccagcaacccgaaaatctttgctgg

SEQ ID NO: 811748 - DNA, 75 bp, synthetic construct
  source 1..75: mol_type = other DNA
caccggcgacagtgcgacggtggacaacaaaggtggaatgactgtcaccgatccggattcgattggcattcagat

SEQ ID NO: 811749 - DNA, 75 bp, synthetic construct
  source 1..75: mol_type = other DNA
aagccatcgtcaacaatgacggcgacaacgccatcagcaacggcggcaccggcacgcagattaatggcgatgaag

SEQ ID NO: 811750 - DNA, 75 bp, synthetic construct
  source 1..75: mol_type = other DNA
acaacgccatcagcaacggcggtaccggcacacaaatcaacggtgacgacgcgaccgcgaacaacagcggcaaaa

SEQ ID NO: 811751 - DNA, 75 bp, synthetic construct
  source 1..75: mol_type = other DNA
caggacggcgagctggatgtgagcggcggcggtcacggtattgatatcaccggcgacagcgcaacggtggacaac

SEQ ID NO: 811752 - DNA, 75 bp, synthetic construct
  source 1..75: mol_type = other DNA
aatgctcccctgtagtcgaacagaacctgatgccatggcttgccacaggtgctgctactgcgttaatcacagcct

SEQ ID NO: 811753 - DNA, 75 bp, synthetic construct
  source 1..75: mol_type = other DNA
tatatcagtcagggacgttctacaataccggtcatatgttaatttctggtgctaactatagcggtaacgcaatta

SEQ ID NO: 811754 - DNA, 75 bp, synthetic construct
  source 1..75: mol_type = other DNA
agtaccagctaaaagcccatcgcgtagcgtggattcttgcgcatggtgctattccccacggtatgcagatcgatc

SEQ ID NO: 811755 - DNA, 75 bp, synthetic construct
  source 1..75: mol_type = other DNA
tgccatgctgctcggggcagagttacaaattaccgggatgtttggtaatacatttctccacagctttgagagcgt

SEQ ID NO: 811756 - DNA, 75 bp, synthetic construct
  source 1..75: mol_type = other DNA
acgttgacattacctgttgtaccggtggctaaatctaaccaggcgcaaggaatgatagatgttctggggctgcgt

SEQ ID NO: 811757 - DNA, 75 bp, synthetic construct
  source 1..75: mol_type = other DNA
gggatgtcgatcagcgcacgcgaaggtgcatcgctggaaaaactgatgcagattgccggaacgactttgcgttta

SEQ ID NO: 811758 - DNA, 75 bp, synthetic construct
  source 1..75: mol_type = other DNA
accatttcgttgaaaccaccaaaatggttgtattaggttcaggggctcaacgagaacttgaagatgttcatctct

SEQ ID NO: 811759 - DNA, 75 bp, synthetic construct
  source 1..75: mol_type = other DNA
gaagatcctggatcatatgggttcaacagaactggcggctaatctctttcgagctacccaaacagaagaaaactc

SEQ ID NO: 811760 - DNA, 75 bp, synthetic construct
  source 1..75: mol_type = other DNA
agcttcgttaggcttgagcctgttcacgttgacattaccgactgtaccagtggcgaaatctaaccaggcgcaagg

SEQ ID NO: 811761 - DNA, 75 bp, synthetic construct
  source 1..75: mol_type = other DNA
gcgcccctactgacggttgggaagaggccaagcggcgcgtccatcaaggcgaggaacgtaaggagtttatgttct

SEQ ID NO: 811762 - DNA, 75 bp, synthetic construct
  source 1..75: mol_type = other DNA
atattgacggtgagttttactacccggtgtttcagtttactgatgaggaagggatctcggacaaaggcgtgctcc

SEQ ID NO: 811763 - DNA, 75 bp, synthetic construct
  source 1..75: mol_type = other DNA
ccttttccttcagagactggaaaatgacggcggggtttacacctcagctaaagctgcagaaatggtgggcaagag

SEQ ID NO: 811764 - DNA, 75 bp, synthetic construct
  source 1..75: mol_type = other DNA
atccctggtacaactatcgcgtcggcacgctggttcacgcttcgaaagagctgaatgtctataacgcgttgccga

SEQ ID NO: 811765 - DNA, 75 bp, synthetic construct
  source 1..75: mol_type = other DNA
gcccaggacgtcatcggtcaggtacatccgcaaaccgcgcctgcccgcgcggtgctggagaaagaaggttttcgc

SEQ ID NO: 811766 - DNA, 75 bp, synthetic construct
  source 1..75: mol_type = other DNA
atccctggtataactatcgcgtcggcacgctggttcacgcctcaaaagagctaaatgtctataacgcgttaccga

SEQ ID NO: 811767 - DNA, 75 bp, synthetic construct
  source 1..75: mol_type = other DNA
attatggttattatcccgacaattttctgcataaccaacctgaaatagacgttattcgtcctgagttttcaacag

SEQ ID NO: 811768 - DNA, 75 bp, synthetic construct
  source 1..75: mol_type = other DNA
atggctatgccttatctggaaggtgtcgcagaaaaatcggctgaccaatggttaatacaattgaccaatcaaatt

SEQ ID NO: 811769 - DNA, 75 bp, synthetic construct
  source 1..75: mol_type = other DNA
acggttatcaaccggtcagtattgctcaaattcgtgaagcacatcgaggaggaaaaccgctaccggaaaaagctg

SEQ ID NO: 811770 - DNA, 75 bp, synthetic construct
  source 1..75: mol_type = other DNA
aagtttaaagaatatgcactctctgggcgagaattaacttcatcaatgatctctaacagggagatacagctcgct

SEQ ID NO: 811771 - DNA, 75 bp, synthetic construct
  source 1..75: mol_type = other DNA
atcactactgtgctggataacagcctgatgagtctgacgctgacggacaatcggggctttgaagcagaccagctt

SEQ ID NO: 811772 - DNA, 75 bp, synthetic construct
  source 1..75: mol_type = other DNA
gtgaggtgctggcagagcatcctggattgattagtgtcctccggcaacggtatgaaggacgggggatgactaagc

SEQ ID NO: 811773 - DNA, 75 bp, synthetic construct
  source 1..75: mol_type = other DNA
tgattaacggcaagcaaaagagctggctggcacattgtaccgattcagaggcattaataatcgacagggttattg

SEQ ID NO: 811774 - DNA, 75 bp, synthetic construct
  source 1..75: mol_type = other DNA
ggtcgtatattggggggggtaagacggggaatatgtttaacctgatgttgacctctaaaaagctgacaaaaacgg

SEQ ID NO: 811775 - DNA, 75 bp, synthetic construct
  source 1..75: mol_type = other DNA
atgatttacccaacgaatacaggaaaaagcggagaacaccttcgtctcactacgctggaaagtgtctggattcag

SEQ ID NO: 811776 - DNA, 75 bp, synthetic construct
  source 1..75: mol_type = other DNA
caggatattaatttccttgcatcaccgaacccaggttatcagtccggtctggcaatgctatcgtttgtggtattt

SEQ ID NO: 811777 - DNA, 75 bp, synthetic construct
  source 1..75: mol_type = other DNA
ttgttatttcaatcggttattcgctggcaatatttttatggggcgtcagcacaaactggcagcaggtattaagta

SEQ ID NO: 811778 - DNA, 75 bp, synthetic construct
  source 1..75: mol_type = other DNA
ggctgaattgctaaatgatgcacacccagagtggtgttttagcacatgcgaaaaacggattgctaattggttagc

SEQ ID NO: 811779 - DNA, 75 bp, synthetic construct
  source 1..75: mol_type = other DNA
tgtgggtacagagggacagcagcgggacggcaaacagcgaaatcattaaccgttccggtaatattgaaaccacac

SEQ ID NO: 811780 - DNA, 75 bp, synthetic construct
  source 1..75: mol_type = other DNA
tcgccactgaccggtcagaccggtatcagtgatgactggccactgccttccggcaacaatggatacctggttccg

SEQ ID NO: 811781 - DNA, 75 bp, synthetic construct
  source 1..75: mol_type = other DNA
taaagccagccataccggaatcagttcatcgggtggctcagggatgtcagccagccagatggtggcctcaaatgc

SEQ ID NO: 811782 - DNA, 75 bp, synthetic construct
  source 1..75: mol_type = other DNA
gaaggaacgactcaggccgcagtggcagatggcacaatcaccatccgggacagggacaatcagaagcagaatctg

SEQ ID NO: 811783 - DNA, 75 bp, synthetic construct
  source 1..75: mol_type = other DNA
ggaaaactgcgcatgtgggggcgctggtcgtatattggcggcggtaagacgggaaatatgtttaaccggttactg

SEQ ID NO: 811784 - DNA, 75 bp, synthetic construct
  source 1..75: mol_type = other DNA
gccacgcagcagtgtccacggtgacggcgggcgataacctcctccttgttgccggtcgtgatgttgccagtcagg

SEQ ID NO: 811785 - DNA, 75 bp, synthetic construct
  source 1..75: mol_type = other DNA
ggcagcgttatcagcgggaacaacgtgcagcttgcgggtggcaatatcaccaacagcggcggcagcatcaacgca

SEQ ID NO: 811786 - DNA, 75 bp, synthetic construct
  source 1..75: mol_type = other DNA
aacctgacgctgactgcgcaggcgctggcgaacaccggcagcggcctggtacaggctgtcaccctgctgctggat

SEQ ID NO: 811787 - DNA, 75 bp, synthetic construct
  source 1..75: mol_type = other DNA
taatgatatcaacattgccgcaaacctgataagcgggagcaaaagtcagtccggtttctggcacactgatgacaa

SEQ ID NO: 811788 - DNA, 75 bp, synthetic construct
  source 1..75: mol_type = other DNA
gctggccggcggtcttaccggaaacagcaccgcatcagcagcagtgggagcacagagcgggaagaatgctgttga

SEQ ID NO: 811789 - DNA, 75 bp, synthetic construct
  source 1..75: mol_type = other DNA
gaatcaggggaaacccgtaaccgtctcctcagccatcagaccacccggaccatcacggaagacagcgtcacccgg

SEQ ID NO: 811790 - DNA, 75 bp, synthetic construct
  source 1..75: mol_type = other DNA
tcaacggtaactaaaaacatcgttgtggttaattcaggtaagaaaggggcctggaatcaagcaatgaataagccg

SEQ ID NO: 811791 - DNA, 75 bp, synthetic construct
  source 1..75: mol_type = other DNA
ccggaactggcgcatctgctgaaatcaacagaaaaagacccggcagtaaacgccattgctcacgccattctgggc

SEQ ID NO: 811792 - DNA, 75 bp, synthetic construct
  source 1..75: mol_type = other DNA
gcacaggccatgcgcgccgctcaggcgaagtgggataaactgcaacggggtgtagcggagttctccatcagtctg

SEQ ID NO: 811793 - DNA, 75 bp, synthetic construct
  source 1..75: mol_type = other DNA
tcgcggtaatgccattgctctcattaccgcaggtcttatgtctctggcctttatgggctttagtggtttggtgaa

SEQ ID NO: 811794 - DNA, 75 bp, synthetic construct
  source 1..75: mol_type = other DNA
gttgtttttgatgcagttccaagtttagattcagaggctggatatcgccatcaggaagagttgaggaaaaaaagt

SEQ ID NO: 811795 - DNA, 75 bp, synthetic construct
  source 1..75: mol_type = other DNA
ttattggtcatttctctttttttagcgatgaaatggcagataacctcatcgattttgcaggaaaatggaggccag

SEQ ID NO: 811796 - DNA, 75 bp, synthetic construct
  source 1..75: mol_type = other DNA
gtggaacgcaactggcaggctctggcgctggcgcgtgaatccgtagaagaagttccgttgcaaccggtaaatccg

SEQ ID NO: 811797 - DNA, 75 bp, synthetic construct
  source 1..75: mol_type = other DNA
gtcacctttaatggtcagcagatgaccatggaaaacttatctgagatccggcagggacggcaggagtgggagcgc

SEQ ID NO: 811798 - DNA, 75 bp, synthetic construct
  source 1..75: mol_type = other DNA
cagcaaagcctttaagcataaatttggttatgcgccatcagccgtgctgaagaatacggaccagcatccaatgga

SEQ ID NO: 811799 - DNA, 75 bp, synthetic construct
  source 1..75: mol_type = other DNA
ctgaatttttaaatccgggcagttatagtgatagagggtgggatgttagatattatttcagcaataaggaattat

SEQ ID NO: 811800 - DNA, 75 bp, synthetic construct
  source 1..75: mol_type = other DNA
aggatatggccgacaggatgacctccgatgaactggagcatctgattaccctgcaaatgatgggtaatgatgaga

SEQ ID NO: 811801 - DNA, 75 bp, synthetic construct
  source 1..75: mol_type = other DNA
cggttatcgcttccacggcgacggcagataaaaacagcctcgataccgggacgctcggcttcagcgatattcaca

SEQ ID NO: 811802 - DNA, 75 bp, synthetic construct
  source 1..75: mol_type = other DNA
cggcatggagtcagcggtccactatgtgatttagcatggattgatgttgctcccccaagtatgagcattcttaaa

SEQ ID NO: 811803 - DNA, 75 bp, synthetic construct
  source 1..75: mol_type = other DNA
ataccctgacagcgctgtatagtgggataccacagattgtgtttggcgaaggtgcagatcgctctgttaatgcag

SEQ ID NO: 811804 - DNA, 75 bp, synthetic construct
  source 1..75: mol_type = other DNA
accggttatctcaatgagatatattccttataacggaggtgctgtaaaggaaacatggtgggacagggattctga

SEQ ID NO: 811805 - DNA, 75 bp, synthetic construct
  source 1..75: mol_type = other DNA
gaaaaccgtaaccgcagcgatgctcgcagggcttggtgatgccctccccgtttcggcgctgccgccagacggcac

SEQ ID NO: 811806 - DNA, 75 bp, synthetic construct
  source 1..75: mol_type = other DNA
gggccaaaacgcccacaggatcgcgttgcactgcccgatgtaccaaaagcatttgccgccagtaacgaactggaa

SEQ ID NO: 811807 - DNA, 75 bp, synthetic construct
  source 1..75: mol_type = other DNA
atatgcacttagccaggttacccgtacgctgggtgaaatgatgcgctttaccgcctgccccattacgcggacctg

SEQ ID NO: 811808 - DNA, 75 bp, synthetic construct
  source 1..75: mol_type = other DNA
ttacaaagacagcctttgacgaacttaaccgaatcaaaaacattacaggtctgccacactcagcagtgatgaatc

SEQ ID NO: 811809 - DNA, 75 bp, synthetic construct
  source 1..75: mol_type = other DNA
acaggatttaaaagcgagattgataatcaggactggattattgcgaaagccgagcacaccattgataacagcggc

SEQ ID NO: 811810 - DNA, 75 bp, synthetic construct
  source 1..75: mol_type = other DNA
gcaaaatggctgaactgctgaatgatgcacacccgaaatggagtttaagaacctgtgaaagacgcattgagcatt

SEQ ID NO: 811811 - DNA, 75 bp, synthetic construct
  source 1..75: mol_type = other DNA
cggaaggtcgggcggatctctacacggaaatgcctgtgaaggtcagcggctttaaacagccgattgatgatgcgg

SEQ ID NO: 811812 - DNA, 75 bp, synthetic construct
  source 1..75: mol_type = other DNA
ttgcaattgctaaagaggttactgagtcggatttacttaaatatccagtctctaaaggtcgtaaacacatccgaa

SEQ ID NO: 811813 - DNA, 75 bp, synthetic construct
  source 1..75: mol_type = other DNA
gcaagatcagatatgttcaaatccttttttaattagctgcctgaccggtgatttaaccttgttacgaattatttt

SEQ ID NO: 811814 - DNA, 75 bp, synthetic construct
  source 1..75: mol_type = other DNA
aattacgctggcaagtttatatcagcaatatgcatgtgtgcaggcgttaattgatgccggtgcagatattaacaa

SEQ ID NO: 811815 - DNA, 75 bp, synthetic construct
  source 1..75: mol_type = other DNA
gaaggcacttaacagctttaagattgatattgcccgactattgagcatcaaaattaacaagctatctcaagaggt

SEQ ID NO: 811816 - DNA, 75 bp, synthetic construct
  source 1..75: mol_type = other DNA
tttcagaagaagcctttaacgagcttaacagaattaaacaaacgaccagcttaccccacaaaacaatcatgcagc

SEQ ID NO: 811817 - DNA, 75 bp, synthetic construct
  source 1..75: mol_type = other DNA
tttgaaggcacttaacagctttaaaattgatattgcccgtctaatgagtattaagattcacaagttagcgatgga

SEQ ID NO: 811818 - DNA, 75 bp, synthetic construct
  source 1..75: mol_type = other DNA
gtgattttctggggaaccggcaagagagcgtagtgacagacgaaaacggcgaagcgaccttcttttgcaaaaaca

SEQ ID NO: 811819 - DNA, 75 bp, synthetic construct
  source 1..75: mol_type = other DNA
tgccgagctgatggaggagcgcaacaaacgaatgcgcgtcagtgccgattacgttcttatgcgcctggtggagat

SEQ ID NO: 811820 - DNA, 75 bp, synthetic construct
  source 1..75: mol_type = other DNA
agaacgcctggatgttaatgtgaatgtgacaattgctgatcgcatagcagcagccaggaagcgactcaaagaacg

SEQ ID NO: 811821 - DNA, 75 bp, synthetic construct
  source 1..75: mol_type = other DNA
aattccacatattccagaatggcggcaaccattaattgctttgttattacccgaaaaaccagaaattgcacatga

SEQ ID NO: 811822 - DNA, 75 bp, synthetic construct
  source 1..75: mol_type = other DNA
acagattgatattgaaggtaatgactccaacttattgatagtgttttatgttcagataatgcccgatgactttgt

SEQ ID NO: 811823 - DNA, 75 bp, synthetic construct
  source 1..75: mol_type = other DNA
tatttgcagcaatattccagctttgaattacgcctacgtaaacatttatcactggcggaagagtctctctggtaa

SEQ ID NO: 811824 - DNA, 75 bp, synthetic construct
  source 1..75: mol_type = other DNA
agcacgtaagctggaacagcaacaggctaatgcggagccagaagaacagattgatccgcgcaaagccgccgtcga

SEQ ID NO: 811825 - DNA, 75 bp, synthetic construct
  source 1..75: mol_type = other DNA
gctattgcccgtgccaaagcgcgcaagctggaacagcaacaacaggctaatgcggaaccagaagaacaggttgat

SEQ ID NO: 811826 - DNA, 75 bp, synthetic construct
  source 1..75: mol_type = other DNA
ggagcgcgaaaaagccgcgcgtcttgaacgacataagagcgcggcggtacaacctgcagccaaagacaaagacgc

SEQ ID NO: 811827 - DNA, 75 bp, synthetic construct
  source 1..75: mol_type = other DNA
gtaagcacgtagacgtcaacgcgttcaaagagcgcctggaggtttccggcaccgtcaccatcgccgaccgcatgg

SEQ ID NO: 811828 - DNA, 75 bp, synthetic construct
  source 1..75: mol_type = other DNA
caaagaacgcctggatgttaatgtgaatgtgacaattgctgatcgcatagcggcagccaggaagcgactcaaaga

SEQ ID NO: 811829 - DNA, 75 bp, synthetic construct
  source 1..75: mol_type = other DNA
agcacgcaagctggaacaacaacctgctaacgaattgccgcaggaacaggttgacccgcgcaaagccgccgtcga

SEQ ID NO: 811830 - DNA, 75 bp, synthetic construct
  source 1..75: mol_type = other DNA
gcgaataatgtcattattattctgccgtctggcattgcacctagctacttggagcaatattccagatttgaatta

SEQ ID NO: 811831 - DNA, 75 bp, synthetic construct
  source 1..75: mol_type = other DNA
caccctgctgggcgaagaaaacttccagaaagggatgcagctttatttcgagcgtcatgatggtagtgcagcgac

SEQ ID NO: 811832 - DNA, 75 bp, synthetic construct
  source 1..75: mol_type = other DNA
gcggtgaaaatgttcccggctatcgagcgatttttgcgccaggagatgcgcgaacccgcctccctggaactggtg

SEQ ID NO: 811833 - DNA, 75 bp, synthetic construct
  source 1..75: mol_type = other DNA
tgaccagcctggaacatcagcaatctgcccgcgcgttaaagcaaaactacgccgcctatatggagatcaaaccgc

SEQ ID NO: 811834 - DNA, 75 bp, synthetic construct
  source 1..75: mol_type = other DNA
ctttctttgctgccttgcgtgaacgcgcaggtccggtaacctgggtgatgatgatcgcctgcgtggtggtgttta

SEQ ID NO: 811835 - DNA, 75 bp, synthetic construct
  source 1..75: mol_type = other DNA
agcggaatgtaattcacgatttattacaggtgtccgtttaggaggactgtcatctgttcaaacatggaatgggcc

SEQ ID NO: 811836 - DNA, 75 bp, synthetic construct
  source 1..75: mol_type = other DNA
atgctcgacagcagggatattaccggcaatatcagcgaccgtctgatgagcatgaccctgacggataaccggggc

SEQ ID NO: 811837 - DNA, 75 bp, synthetic construct
  source 1..75: mol_type = other DNA
atttttaatggagggaaggagcgatttgattcaacatattcagcgttacaaggcttggaaggcgaagacgataat

SEQ ID NO: 811838 - DNA, 75 bp, synthetic construct
  source 1..75: mol_type = other DNA
aaaagatgattgaagagagcaaaggcttcgcgaagcaggtgatgtggtttacctcgctggtatctcgtggtgaaa

SEQ ID NO: 811839 - DNA, 75 bp, synthetic construct
  source 1..75: mol_type = other DNA
cattaattgctatgttattacccgaaaaaccagaaattgcacatgaaattgcccagcgtctactggggaaaaaaa

SEQ ID NO: 811840 - DNA, 75 bp, synthetic construct
  source 1..75: mol_type = other DNA
agcaatagctgaggaatggtcatctgaaaatattaaagtaaactgtattaaccctgaacgaactgcaactccaat

SEQ ID NO: 811841 - DNA, 75 bp, synthetic construct
  source 1..75: mol_type = other DNA
taatcccttcatcagatactttagtcgaagtttttgatgatgaatgtatttccaatatacccaatagagctttca

SEQ ID NO: 811842 - DNA, 75 bp, synthetic construct
  source 1..75: mol_type = other DNA
tggattagaggggtatagtcatgaatgtaatattcttattcatgacgcagtacggccattgataaatgaacatat

SEQ ID NO: 811843 - DNA, 75 bp, synthetic construct
  source 1..75: mol_type = other DNA
ttgatccgcgcaaagccgccgtcgaagccgctattgcccgcgctcaagccaaaaaagccgaacagcagaaggttg

SEQ ID NO: 811844 - DNA, 75 bp, synthetic construct
  source 1..75: mol_type = other DNA
ttaatgcgatccgatcgccgggatcggtgcttaaaccgtttgtctatggtctggcgctggatgagggattgatcc

SEQ ID NO: 811845 - DNA, 75 bp, synthetic construct
  source 1..75: mol_type = other DNA
gcaagctgggcttattttgggaaatcgcctgcaaatttaagctattccgaggcagcaatgctggcggtattaccg

SEQ ID NO: 811846 - DNA, 75 bp, synthetic construct
  source 1..75: mol_type = other DNA
ttggcggcaaaattcgtcagctctggcgcgcgtttcaactggagtggcatctgtctaaacgtgaaattctgactt

SEQ ID NO: 811847 - DNA, 75 bp, synthetic construct
  source 1..75: mol_type = other DNA
taccttgaagcactgatcaattacgaagatcgctggttctggaagcatccaggcgtaaacccgttctcggtggcg

SEQ ID NO: 811848 - DNA, 75 bp, synthetic construct
  source 1..75: mol_type = other DNA
ctcggtaaaagcaaaagcgacaaaatcactactacgttggatgccggtcttcaacgacgtctggaagaactggcg

SEQ ID NO: 811849 - DNA, 75 bp, synthetic construct
  source 1..75: mol_type = other DNA
aatgcgatccgatcgccaggatcggtgctcaaaccgtttgtttatggtctggcgctggatgaaggcttgatccac

SEQ ID NO: 811850 - DNA, 75 bp, synthetic construct
  source 1..75: mol_type = other DNA
aaagcggagaacaccttcgtctcaccacgctggaaagtgtctggattcagggaaaactgcgcatgtgggggcgct

SEQ ID NO: 811851 - DNA, 75 bp, synthetic construct
  source 1..75: mol_type = other DNA
cagaaagagaacatggcgctggtgttaattacccatgatctggctctggtggcggaagctgcgcataaaatcatt

SEQ ID NO: 811852 - DNA, 75 bp, synthetic construct
  source 1..75: mol_type = other DNA
tatcggtgcatttcggcgacgaaagcgcaccgttccgcgccgtagaccgcatcagctacagcgtaaaacagggcg

SEQ ID NO: 811853 - DNA, 75 bp, synthetic construct
  source 1..75: mol_type = other DNA
gttaacgctcgctatgtcattgggatctggactggcagaccggacggcacgcccgttgttggtcagtttggcttt

SEQ ID NO: 811854 - DNA, 75 bp, synthetic construct
  source 1..75: mol_type = other DNA
atttccggcggcagcacgctcaccatgcaggtggcgcgcctgcttgatcctcaccccaaaacgtttggcggcaaa

SEQ ID NO: 811855 - DNA, 75 bp, synthetic construct
  source 1..75: mol_type = other DNA
ccttttatcatcattctggcagcatgggcagcagataaactctggcctctgccattgcaagaagtgaatcctgca

SEQ ID NO: 811856 - DNA, 75 bp, synthetic construct
  source 1..75: mol_type = other DNA
gcccgttgttggtcagtttggctttgccagtgccgtaccgctgttgaatcaggttaataatatcttactgtcgcg

SEQ ID NO: 811857 - DNA, 75 bp, synthetic construct
  source 1..75: mol_type = other DNA
atcccgcaggttaccatcacccgcagcgacggcgaccgtcatcattttgcgattgctgaccgtggagcctacacc

SEQ ID NO: 811858 - DNA, 75 bp, synthetic construct
  source 1..75: mol_type = other DNA
ttcagatcatgatggagcattataaataccgacgaatttccctgtatcaactgcccgatcttaaaaaggtagcag

SEQ ID NO: 811859 - DNA, 75 bp, synthetic construct
  source 1..75: mol_type = other DNA
atgcgtaatcccacgctgttacaatgttttcactggtattacccggaaggcggtaagctctggcctgaactggcc

SEQ ID NO: 811860 - DNA, 75 bp, synthetic construct
  source 1..75: mol_type = other DNA
tcgcaaagcgcaataaacttacggccagcgtagcggattcactgaaaaaaataccggtaccgcatatcgaccagt

SEQ ID NO: 811861 - DNA, 75 bp, synthetic construct
  source 1..75: mol_type = other DNA
aagaagcaggggctgaccttattgttgttggtggtgccttatttaacaaacagcctcgtgaaagttatcaggcat

SEQ ID NO: 811862 - DNA, 75 bp, synthetic construct
  source 1..75: mol_type = other DNA
taatattgcctttggcccaaatcaaatagcagcaatgaaaaaagccagttcgatgatctttgacgtacacatgat

SEQ ID NO: 811863 - DNA, 75 bp, synthetic construct
  source 1..75: mol_type = other DNA
acatgcgaaaagcgaattgctaattggttggctgttgctgagtatgctctatacattcccatgcgagaatcattt

SEQ ID NO: 811864 - DNA, 75 bp, synthetic construct
  source 1..75: mol_type = other DNA
cacgttaccttgaagcgctgatcaattatgaagatcgctggttctggaagcatccgggggtgaatccattctcgg

SEQ ID NO: 811865 - DNA, 75 bp, synthetic construct
  source 1..75: mol_type = other DNA
ctttgatagcggttttcatggcccgatcagcatgagcgaggcgctggtgcgctcgctgaacttacctgctgtgca

SEQ ID NO: 811866 - DNA, 75 bp, synthetic construct
  source 1..75: mol_type = other DNA
cctaacagcgatgcaggaggcttatgcgcaggaatataccaaatgccctgagaatcagacgcaggcggcgattaa

SEQ ID NO: 811867 - DNA, 75 bp, synthetic construct
  source 1..75: mol_type = other DNA
acgaggattcgatagaaacaatcctcaaaaaaatcaaatggcctgacaaggtgaagaacctcgagcttatcggta

SEQ ID NO: 811868 - DNA, 75 bp, synthetic construct
  source 1..75: mol_type = other DNA
ggcaccgtcaccattgccgaccgcatggcgaaggcccgccgtcgcgtgaaagagcaggctggtggtgaagaatga

SEQ ID NO: 811869 - DNA, 75 bp, synthetic construct
  source 1..75: mol_type = other DNA
cgtgcaccaacacctctaacccaagtgtgctgatggccgcaggcttgctggcgaaaaaagccgtaactctgggcc

SEQ ID NO: 811870 - DNA, 75 bp, synthetic construct
  source 1..75: mol_type = other DNA
gttggggttggagtgcaactgaaattaaaggcgttgacgttaatggcacttcaacaagtgaggtttatcgatatg

SEQ ID NO: 811871 - DNA, 75 bp, synthetic construct
  source 1..75: mol_type = other DNA
tcgtcagaacagtgtcaccaacagtggcacgctcaccgggatagccgcgctgacgcttgccgcccgtatggatat

SEQ ID NO: 811872 - DNA, 75 bp, synthetic construct
  source 1..75: mol_type = other DNA
cacgattcgccagaacggtgtcaccaacagtggcacgctcaccgggatcgccgcgctgacgcttgccgcccgtat

SEQ ID NO: 811873 - DNA, 75 bp, synthetic construct
  source 1..75: mol_type = other DNA
acgaaaaatttgagcagaagaaaagcgggctgacggttgccctttccggcacggtgggcagtgccatcaataatg

SEQ ID NO: 811874 - DNA, 75 bp, synthetic construct
  source 1..75: mol_type = other DNA
gtgaaggtatcactgccacggaccttgttctcaccgttacacaaatgctgcgtaaacacggtgtggtcggtaaat

SEQ ID NO: 811875 - DNA, 75 bp, synthetic construct
  source 1..75: mol_type = other DNA
gtcttttgttaagactgaaatacccaaccccgccgattatacctaagccaaaaccgatgatgacgggactggcgc

SEQ ID NO: 811876 - DNA, 75 bp, synthetic construct
  source 1..75: mol_type = other DNA
atttgggacatttggtgatttatctcctgtttattgcgctgccagtgattggtttggtgatgatgtataaccggg

SEQ ID NO: 811877 - DNA, 75 bp, synthetic construct
  source 1..75: mol_type = other DNA
ccgggatcgcctacgtgccgctgatgtgggtgatcaacgagatcaatcgcggggagctggagatcctgctgccac

SEQ ID NO: 811878 - DNA, 75 bp, synthetic construct
  source 1..75: mol_type = other DNA
aaatggcgaagtatggtaccggcagtgaaattcagcggggtatccaggccgcgacagcggcgcttcaggggctgg

SEQ ID NO: 811879 - DNA, 75 bp, synthetic construct
  source 1..75: mol_type = other DNA
tcgccgccgttggtggttgcctatgcgctagcgggaaatatgaatatcaacctggcttcagagcctatcggtcac

SEQ ID NO: 811880 - DNA, 75 bp, synthetic construct
  source 1..75: mol_type = other DNA
ggcatggcgtggcgctgcgtgctggtgaggatgcgtttgctgatgaagtcacaaaggctattgatgacattcttt

SEQ ID NO: 811881 - DNA, 75 bp, synthetic construct
  source 1..75: mol_type = other DNA
tgcggttaagcaatcttatatagaccgtattgaccgaatggaagccgaatatcagaaagctggtaccagcggttc

SEQ ID NO: 811882 - DNA, 75 bp, synthetic construct
  source 1..75: mol_type = other DNA
tgaaaatgtgattaaaaatgggaaatcaactcccagcagaaatggtacaacagtacactttgagcctgagaataa

SEQ ID NO: 811883 - DNA, 75 bp, synthetic construct
  source 1..75: mol_type = other DNA
cggtggcgtgggtgtcagtatcggtgccggtggtaatggtgccggtatcagcgtctttgccagcgttaatgcggc

SEQ ID NO: 811884 - DNA, 75 bp, synthetic construct
  source 1..75: mol_type = other DNA
gcgctttaaggaaacgaagaaatccggtctgacgggtaccggcggtattggtttcaccattggcagcagtaagac

SEQ ID NO: 811885 - DNA, 75 bp, synthetic construct
  source 1..75: mol_type = other DNA
acagtggcagtaccctgatggcgcagaataatctcaccatctacagcgctgacagtctgggtaaccttgagtccg

SEQ ID NO: 811886 - DNA, 75 bp, synthetic construct
  source 1..75: mol_type = other DNA
gtcaagaggcagcggcaattggttattccaatgcaataaaaaatggattacaggcatatgatgcaaaagccggtg

SEQ ID NO: 811887 - DNA, 75 bp, synthetic construct
  source 1..75: mol_type = other DNA
ctgaaagttattgcgtcgaaagaagggtacgaagatggcccttataactcgaaatacagccagcaatacgctgat

SEQ ID NO: 811888 - DNA, 75 bp, synthetic construct
  source 1..75: mol_type = other DNA
aaacactgcctccctcagcaatccgggaaaaatcaccgctgacacgctgaacgtcagggcgaccacgctggatgg

SEQ ID NO: 811889 - DNA, 75 bp, synthetic construct
  source 1..75: mol_type = other DNA
aagggcgatatccgtgtgaatgccggtcatgacatcgtactgggtactgccacggaaagtgattatcactacagt

SEQ ID NO: 811890 - DNA, 75 bp, synthetic construct
  source 1..75: mol_type = other DNA
agggggtgagcggtgaagccctgctgaatgaaagcggtaccgggataaccggccctgtatggaatgacgcgctgc

SEQ ID NO: 811891 - DNA, 75 bp, synthetic construct
  source 1..75: mol_type = other DNA
cagtaatacatccacaacctcaaatgcaggacggatcacaaatacccttgcggcacctgaaattaacacgccggc

SEQ ID NO: 811892 - DNA, 75 bp, synthetic construct
  source 1..75: mol_type = other DNA
cgggttcacaactgaataatcagtccttctttggctatacacaggatgaatacaatgtgtatcgctattacggca

SEQ ID NO: 811893 - DNA, 75 bp, synthetic construct
  source 1..75: mol_type = other DNA
ctgtccagggtaaccatgtcacgattcgccagaacggtgtcaccaacagtggcacgctcaccggggtcgccacac

SEQ ID NO: 811894 - DNA, 75 bp, synthetic construct
  source 1..75: mol_type = other DNA
cgtgccgctgatgtgggtgatcaacgagatcaatcgtggggagctggagatcctgctgccgcgttaccagtcaga

SEQ ID NO: 811895 - DNA, 75 bp, synthetic construct
  source 1..75: mol_type = other DNA
attatttagacttaatgttttggctattccaccaaaaacatttttgtcaacagatggaaaagagataaaaggtca

SEQ ID NO: 811896 - DNA, 75 bp, synthetic construct
  source 1..75: mol_type = other DNA
taacgccttcaagcatctgacggaagaaatgcgccgcacgctacaggatatttcaagactgtcagatcgaaattc

SEQ ID NO: 811897 - DNA, 75 bp, synthetic construct
  source 1..75: mol_type = other DNA
caagcatctgacggaagaaatgcgccgtaaattgctggatatttcccgcacatcggaaaaatcttcccgctttgg

SEQ ID NO: 811898 - DNA, 75 bp, synthetic construct
  source 1..75: mol_type = other DNA
ctgtaaaagatggaatgaaaaagtcagccgacgcaacttatttaatggatttcaggtctggtgcaaaaataaaca

SEQ ID NO: 811899 - DNA, 75 bp, synthetic construct
  source 1..75: mol_type = other DNA
tttgtaacattaacagacatatttattgatggtgtaaaggttaatcgtgatgttgacgaagtgttaaaaccattt

SEQ ID NO: 811900 - DNA, 75 bp, synthetic construct
  source 1..75: mol_type = other DNA
cattaaaaaataaaatcaaattaatatacagaccatcagctattgggatgcctgatagtattaatgaaaaactgc

SEQ ID NO: 811901 - DNA, 75 bp, synthetic construct
  source 1..75: mol_type = other DNA
cgcttctgttatctacgtaccagcaccgttctgcaaagactccattctggaagccatcgacgcaggcatcaaact

SEQ ID NO: 811902 - DNA, 75 bp, synthetic construct
  source 1..75: mol_type = other DNA
tgaaatcccctacccgcgtggtccaaatcctttccatcatcggtttgctggcgttgacagccctgctcgtcacga

SEQ ID NO: 811903 - DNA, 75 bp, synthetic construct
  source 1..75: mol_type = other DNA
atggccgaacatcgtggtggttcaggaaatttcgccgaagaccgtgagaaggcatccgacgcaggccgtaaaggc

SEQ ID NO: 811904 - DNA, 75 bp, synthetic construct
  source 1..75: mol_type = other DNA
agcatggttgtactttaaggccgcgggagtagaaggaggtataatgggaataggaatttctctatttcgatattt

SEQ ID NO: 811905 - DNA, 75 bp, synthetic construct
  source 1..75: mol_type = other DNA
ttatggtttcggtcagtcaacctgcgtcggtatcggcggcgacccgatccctggctctaactttatcgacatcct

SEQ ID NO: 811906 - DNA, 75 bp, synthetic construct
  source 1..75: mol_type = other DNA
ctgccggtgttcaacaccgtgcgtgaagctgttgctgccactggcgctaccgcttctgttatctacgtaccagca

SEQ ID NO: 811907 - DNA, 75 bp, synthetic construct
  source 1..75: mol_type = other DNA
cccttctttccgccctgatgacggtagccctgttttattcggcagcgccccgtgcagacattcttgatggcggcg

SEQ ID NO: 811908 - DNA, 75 bp, synthetic construct
  source 1..75: mol_type = other DNA
ctaggttcactaattggagtggtgtatgaaaaagtcaaaggatatgcaatagataaatggatattacttttgttt

SEQ ID NO: 811909 - DNA, 75 bp, synthetic construct
  source 1..75: mol_type = other DNA
ttgatagagatcacaccattgaactaaaaggcgttgctattctccttgtcatgcttgggcatgtaaatgtaatcc

SEQ ID NO: 811910 - DNA, 75 bp, synthetic construct
  source 1..75: mol_type = other DNA
tcaattctcgtactaatggtacttcgtcttgtgctaaggctgaaatacccaaccccgccaattgtgcctaaacct

SEQ ID NO: 811911 - DNA, 75 bp, synthetic construct
  source 1..75: mol_type = other DNA
ttatgcgctgtataccgaaaaagataagctgccgctgaaggtgcaggtggtgatcaactcactgacggattattt

SEQ ID NO: 811912 - DNA, 75 bp, synthetic construct
  source 1..75: mol_type = other DNA
cgcagtacgcgcagcattggcctgaccgaggcgggaagaatttactatcaaggctgccgtcgaatgctccatgaa

SEQ ID NO: 811913 - DNA, 75 bp, synthetic construct
  source 1..75: mol_type = other DNA
tcatccgtaatctcggtgaatctgaatacatacgaatccgcatatgggaagtggagcctgctgtattgggtagcc

SEQ ID NO: 811914 - DNA, 75 bp, synthetic construct
  source 1..75: mol_type = other DNA
cacatgttgaatataagcaaggaccatcagaaaaaggtgctgattttgtcataattaaacgagatgaggcattag

SEQ ID NO: 811915 - DNA, 75 bp, synthetic construct
  source 1..75: mol_type = other DNA
ctcacacccaccagcaacagaacccaccacaggaaaagacggtggtcagcattgccgttgatccggagtctccgg

SEQ ID NO: 811916 - DNA, 75 bp, synthetic construct
  source 1..75: mol_type = other DNA
ctgccagtggccacacggcgattatcatcacagcgaaaccgttattcacagttacggtgctggcgcaatggtgtt

SEQ ID NO: 811917 - DNA, 75 bp, synthetic construct
  source 1..75: mol_type = other DNA
cctccgcagccgatgcggcaaccattaaagattcgctgcattacggtgtcgtggattacctgatcaaacccttcc

SEQ ID NO: 811918 - DNA, 75 bp, synthetic construct
  source 1..75: mol_type = other DNA
agtccatgtgatttgatgaatgtcagagaattcagagggatgattaattcgcttttccaacccggtgactatcat

SEQ ID NO: 811919 - DNA, 75 bp, synthetic construct
  source 1..75: mol_type = other DNA
cagataagctcgccggaccagacctgggcagtggatactgccgatgcgcgtacagataacgggcaactggttttt

SEQ ID NO: 811920 - DNA, 75 bp, synthetic construct
  source 1..75: mol_type = other DNA
atcggtaacgcgcctgttcgagctgtttcgcgatatcagtctcgagtttgatcacctggcgaatatcacccctat

SEQ ID NO: 811921 - DNA, 75 bp, synthetic construct
  source 1..75: mol_type = other DNA
atcgcgtgaccgttaacgccggcgataacctgacggtagagggttcggatgtggtggctgagccgggatgtgtca

SEQ ID NO: 811922 - DNA, 75 bp, synthetic construct
  source 1..75: mol_type = other DNA
cacggacccggacagtccgtatctgattacggtgaacccgaaactggatggtctcggaaaggtggacagcagtct

SEQ ID NO: 811923 - DNA, 75 bp, synthetic construct
  source 1..75: mol_type = other DNA
tatctgtctccggaagatatcaccctgcataacggcagcgttatcagcgggaacaacgtgcagcttgcgggtggc

SEQ ID NO: 811924 - DNA, 75 bp, synthetic construct
  source 1..75: mol_type = other DNA
gttggcaattatgtggtcaagcctgctgcaaatacaatcggtaaatggataaccggtggctggaatcctaaattc

SEQ ID NO: 811925 - DNA, 75 bp, synthetic construct
  source 1..75: mol_type = other DNA
agagagcatggcgctgatgttctctcctgtagtgataatccttccggtgaagcctgtaagcgggggcaggctgaa

SEQ ID NO: 811926 - DNA, 75 bp, synthetic construct
  source 1..75: mol_type = other DNA
gcgaaactgcgtgaaacgccggaatacaaaaaagagcaggaaaagttcggtactggtagtgatatccagcgtggc

SEQ ID NO: 811927 - DNA, 75 bp, synthetic construct
  source 1..75: mol_type = other DNA
atatcggcggccaggtggcggatattgcccggacgcagggagagctgaatgcgctgaaagtcgcgcaggataaat

SEQ ID NO: 811928 - DNA, 75 bp, synthetic construct
  source 1..75: mol_type = other DNA
ttacatcgctgcctcccgggataagatgaagagccgctttgactccgttactgaacaaaccggaatgtttgccgg

SEQ ID NO: 811929 - DNA, 75 bp, synthetic construct
  source 1..75: mol_type = other DNA
atgctgaagtttatccagaacaaccgtgaaatcacggcactgctggcggtggtgttgctgtttgtattacccggt

SEQ ID NO: 811930 - DNA, 75 bp, synthetic construct
  source 1..75: mol_type = other DNA
cgcgggtctggttctgctggcggtgctggtgtttgaggacgcctgcgttgtgcgctggaacgtaatctgcggcgg

SEQ ID NO: 811931 - DNA, 75 bp, synthetic construct
  source 1..75: mol_type = other DNA
gtgcgctggaacgtaatctgcggcggcaaaaatatgcccgctttatgacgccaccgccatccgttaaacccgctt

SEQ ID NO: 811932 - DNA, 75 bp, synthetic construct
  source 1..75: mol_type = other DNA
tcatgcgggactcgatgccggcaccctgaataacagtggtgctgttcagggggcttccctgacgctcggcagtac

SEQ ID NO: 811933 - DNA, 75 bp, synthetic construct
  source 1..75: mol_type = other DNA
cgccgcaaacacacaaaaaacaacgggcaggaacagcagcagtggcggtggcgtgggtgtcagtatcggtgcagg

SEQ ID NO: 811934 - DNA, 75 bp, synthetic construct
  source 1..75: mol_type = other DNA
gaacacaggctgccagagacatccttaccctgaacgccagtgaaaagctcacccacagcgggaaaagcagtgccc

SEQ ID NO: 811935 - DNA, 75 bp, synthetic construct
  source 1..75: mol_type = other DNA
ctcaacctgcgataccaggaacatccattccaaaatcttttgaattacatgttaacggacaaaccgtttgggtaa

SEQ ID NO: 811936 - DNA, 75 bp, synthetic construct
  source 1..75: mol_type = other DNA
cacaacagaaagcgctcggactgacctttggtgtgtcgctgaccgccgggcaggttgcacaactgaccagaagca

SEQ ID NO: 811937 - DNA, 75 bp, synthetic construct
  source 1..75: mol_type = other DNA
cgcaaccggtgacccgaatgcgacgggagtcagcctgtcgctcaccacccagaaatcgaaatcacaacaacattc

SEQ ID NO: 811938 - DNA, 75 bp, synthetic construct
  source 1..75: mol_type = other DNA
gcaatcagagctggcagacggggacagagaatgaatatctggtataccgctacgacccgaaaacgttttacggta

SEQ ID NO: 811939 - DNA, 75 bp, synthetic construct
  source 1..75: mol_type = other DNA
gccggtatcaatggttcagagggcagggagaaaggcaacggtaccacctggaccgaaaccacggtggatgcgggt

SEQ ID NO: 811940 - DNA, 75 bp, synthetic construct
  source 1..75: mol_type = other DNA
gcgcagagcaccgacagaaattacacattgatgtggccacagatcctctgacggctctgtccggggaagataaat

SEQ ID NO: 811941 - DNA, 75 bp, synthetic construct
  source 1..75: mol_type = other DNA
tgctgcggacctgacgctggatataccggacatccgcaacagcgggcttatcaccggtgataatggtttaacgtt

SEQ ID NO: 811942 - DNA, 75 bp, synthetic construct
  source 1..75: mol_type = other DNA
gcgatggtgaactatgccatggtgcagtttggggtcgatagggcgacggcacaggcatacgttgaaacttatgat

SEQ ID NO: 811943 - DNA, 75 bp, synthetic construct
  source 1..75: mol_type = other DNA
gaaatatgatgcattgcttgaaaaagatatcagcagtgataaggcagtaatcactgcgtgcagtaacggacaggc

SEQ ID NO: 811944 - DNA, 75 bp, synthetic construct
  source 1..75: mol_type = other DNA
tgccatcaccaacggcggtgtgatgcagggtgatgccatggtgctcggtgccggagaggcattcaccaacaatgg

SEQ ID NO: 811945 - DNA, 75 bp, synthetic construct
  source 1..75: mol_type = other DNA
ggaccacgcagggacagaatatcaccgtgcaggcggacaactgggcgaacagtggttccgtgctggcaaccggta

SEQ ID NO: 811946 - DNA, 75 bp, synthetic construct
  source 1..75: mol_type = other DNA
tgaacatgaacgcgatacaggccggagaacgtcgtcgctatggcgggtccgggtggtatgaaactcatgccgtgg

SEQ ID NO: 811947 - DNA, 75 bp, synthetic construct
  source 1..75: mol_type = other DNA
tgaaccagacgggctcacgttatatcaacggcacaggttctgacctggcgcagatgaaatacctgatggacagcg

SEQ ID NO: 811948 - DNA, 75 bp, synthetic construct
  source 1..75: mol_type = other DNA
cggggcgatccaggcggctgacagcctgactgcacgtctgacgggtgagcttgtcagcacagcaggtagcaaagt

SEQ ID NO: 811949 - DNA, 75 bp, synthetic construct
  source 1..75: mol_type = other DNA
cagcgttgccgggaaaacactcaccgtcagttccggcagcctgaacaacggcgggacactggttgccgggcgcga

SEQ ID NO: 811950 - DNA, 75 bp, synthetic construct
  source 1..75: mol_type = other DNA
gcaggtttaaaatctcttactgtttatgaggagagcactggaaaaacattatattggaatcctggaatgaaatca

SEQ ID NO: 811951 - DNA, 75 bp, synthetic construct
  source 1..75: mol_type = other DNA
gatgtcggcaacaacctgaccatttcgagccttcaggacagtgaccgttacgacagcagacagaacagcgtggcc

SEQ ID NO: 811952 - DNA, 75 bp, synthetic construct
  source 1..75: mol_type = other DNA
ttcagggtgcggacctgctggtgaattaccacacattcagcaacagcggtaccctgctgggaacctccgggcttg

SEQ ID NO: 811953 - DNA, 75 bp, synthetic construct
  source 1..75: mol_type = other DNA
cgttgataccggcgcgctcggtggaatgtacgccaggcgtattcatctgacctccactgaaagtggtgtcggggt

SEQ ID NO: 811954 - DNA, 75 bp, synthetic construct
  source 1..75: mol_type = other DNA
ggttttcaatggtatggattgagccaacctggtagtgaaaatcagtcatgggattataaaggtagcgcatcttca

SEQ ID NO: 811955 - DNA, 75 bp, synthetic construct
  source 1..75: mol_type = other DNA
gatatcacggccagtgggaaactgaccagtacaggttcgctggtgagcgatgatgcactggtgctgaaggcgcag

SEQ ID NO: 811956 - DNA, 75 bp, synthetic construct
  source 1..75: mol_type = other DNA
tggcgctgacagctgaacagattgctcagcttgacggcagcatactgtggtgggagtcagccaccatcaacggac

SEQ ID NO: 811957 - DNA, 75 bp, synthetic construct
  source 1..75: mol_type = other DNA
acagtgcgctgatttatgcggggaataacctgaagctgtttacagaccgtctgcacaaccagcatggtgatatcc

SEQ ID NO: 811958 - DNA, 75 bp, synthetic construct
  source 1..75: mol_type = other DNA
tcgttggactatagatattcgtaataaccaaaagcttactgaactggggaataaatattcacgtgtggagattaa

SEQ ID NO: 811959 - DNA, 75 bp, synthetic construct
  source 1..75: mol_type = other DNA
atctgacaatcaccgcaggcagtattaccagttccggacactggcagggcaaacgggtgctgatcaccgcagaca

SEQ ID NO: 811960 - DNA, 75 bp, synthetic construct
  source 1..75: mol_type = other DNA
cctgttgcagggcgccggtgcactggcgcttgctggagacaccctctcacagggtagtaacgggcgctggctgac

SEQ ID NO: 811961 - DNA, 75 bp, synthetic construct
  source 1..75: mol_type = other DNA
atatcaccatgaatacggcgcatctgctgaattcatgggatgccatttcggccagccatgaggtcattccgggca

SEQ ID NO: 811962 - DNA, 75 bp, synthetic construct
  source 1..75: mol_type = other DNA
tcagcggcggtgatatgcttgctgatatggtctcgctcagcggcgcgggccagctggttgcactcggtaacctga

SEQ ID NO: 811963 - DNA, 75 bp, synthetic construct
  source 1..75: mol_type = other DNA
ctgacgggtgagctcgtcagcgccgcgggcagcaaagtcacctcaaacggtgaaatggcgctcagtgcactgaat

SEQ ID NO: 811964 - DNA, 75 bp, synthetic construct
  source 1..75: mol_type = other DNA
tgccggtgacagcgtgttactgtccgccggtaatgacctgaacatgaacgcgatacaggccggagaacgtcgtcg

SEQ ID NO: 811965 - DNA, 75 bp, synthetic construct
  source 1..75: mol_type = other DNA
gcagaggcgtctgcagacagtggggcttatcagtgacataggcagtcaggtggcggatattgcgcgtacacaggg

SEQ ID NO: 811966 - DNA, 75 bp, synthetic construct
  source 1..75: mol_type = other DNA
gggcttggcgtcaagggcagttcactgctgcaacatggtacagggcggctgtacagtgcaggcaacctgctgctt

SEQ ID NO: 811967 - DNA, 75 bp, synthetic construct
  source 1..75: mol_type = other DNA
agtgactatcactatctggaaacgaagaaaaaaagcggaggttttctcagtaagaaaaccacccgcaccatcagt

SEQ ID NO: 811968 - DNA, 75 bp, synthetic construct
  source 1..75: mol_type = other DNA
agccggagtgatatcaccatcagtggttttaccggcacggcaggcagtctgacaatgaatgtggccggtaccctg

SEQ ID NO: 811969 - DNA, 75 bp, synthetic construct
  source 1..75: mol_type = other DNA
gtggcgatgtgagtctgaacagccggagtgatatcaccatcagtggttttaccggcacggcaggcagtctgacaa

SEQ ID NO: 811970 - DNA, 75 bp, synthetic construct
  source 1..75: mol_type = other DNA
tgacaaggagaaagagcagaggcgtctgcagacagtggggcttatcagtgacattggcagtcaggtggcggatat

SEQ ID NO: 811971 - DNA, 75 bp, synthetic construct
  source 1..75: mol_type = other DNA
gtgaatttcagttctgaactgcttaacaaaggtaacaaaactcccgcattcagcatcagtattgagggcagggat

SEQ ID NO: 811972 - DNA, 75 bp, synthetic construct
  source 1..75: mol_type = other DNA
cggccggaactctcaggcttaaaggtaaactgacgccggcgttattacagacacttatccgcgaaataaaaggga

SEQ ID NO: 811973 - DNA, 75 bp, synthetic construct
  source 1..75: mol_type = other DNA
cagtctgtgttgtgagctggttctgccggccggaactctcaggcttaaaggtaaactgacgccggcgttattaca

SEQ ID NO: 811974 - DNA, 75 bp, synthetic construct
  source 1..75: mol_type = other DNA
acaccgcccgacagtctgtgttgtgagctggttctgccggccggaactctcaggcttaaaggtaaactgacgccg

SEQ ID NO: 811975 - DNA, 75 bp, synthetic construct
  source 1..75: mol_type = other DNA
tattttcagggatacggcacattgctattaatattttgacgaatgataaggtattcaaggcagggttaagacgta

SEQ ID NO: 811976 - DNA, 75 bp, synthetic construct
  source 1..75: mol_type = other DNA
ggaactctcaggctgaaaggtgaactgacaccggcgttattacagacacttgtccgtgaaatgaaagggagcagc

SEQ ID NO: 811977 - DNA, 75 bp, synthetic construct
  source 1..75: mol_type = other DNA
ccaacctaggcagcgaccttctgatgcagcaactgactgataagccggagacaactgaatctgagttgcatgggc

SEQ ID NO: 811978 - DNA, 75 bp, synthetic construct
  source 1..75: mol_type = other DNA
caaagccttgaaaaccgcgttgtcgggcaaagcccggcgctctgcgccatcgcacagcggctgcgggcggctaaa

SEQ ID NO: 811979 - DNA, 75 bp, synthetic construct
  source 1..75: mol_type = other DNA
caccatcaacctctccgaatatcaggagccgcataccgtctcccagcttaaggggtctcctccgggctacgttgg

SEQ ID NO: 811980 - DNA, 75 bp, synthetic construct
  source 1..75: mol_type = other DNA
tggcggcatctctggcgtaacggcggcctgcagccgaccggcgaacatgaaacatcgctacttcccgtgacgtta

SEQ ID NO: 811981 - DNA, 75 bp, synthetic construct
  source 1..75: mol_type = other DNA
ttatccgtccactgctgcgcgaccacttccagcctgcactgcttgcccgtttccggaccgtgatttaccgtccgc

SEQ ID NO: 811982 - DNA, 75 bp, synthetic construct
  source 1..75: mol_type = other DNA
cttaccgtgctgggcaggcgttatgactgggatatggacgcgatatggcagtcgctgctcggctggctggataac

SEQ ID NO: 811983 - DNA, 75 bp, synthetic construct
  source 1..75: mol_type = other DNA
ggcacatcgctattaatattttaacgaatgataaggtattcaaggcagggttaagacgtaagatgcgaaaagcag

SEQ ID NO: 811984 - DNA, 75 bp, synthetic construct
  source 1..75: mol_type = other DNA
gaaattatgcgtggcagtctcctttcggtcgataatagcagaacgcagaacagcagaacagcagaacaaaagaaa

SEQ ID NO: 811985 - DNA, 75 bp, synthetic construct
  source 1..75: mol_type = other DNA
cactaatccgatggactacctgaacccagcccatccgctgctgttgatctccttcggtcgatccggcaacagccc

SEQ ID NO: 811986 - DNA, 75 bp, synthetic construct
  source 1..75: mol_type = other DNA
ccggagccggaacctcggcatttatcggtgacatcatcgcgccgtggctcgccagccataccggtaaaaacttca

SEQ ID NO: 811987 - DNA, 75 bp, synthetic construct
  source 1..75: mol_type = other DNA
ttagctaatcaatcatttagtcagccatctcaacagattgcttttcaacactattgtcaaagtctggagctgaac

SEQ ID NO: 811988 - DNA, 75 bp, synthetic construct
  source 1..75: mol_type = other DNA
acaaaggcaacaaaactcccgcattcagcatcagtattgaaggcaaggatatcaccactgtgctggataaccgcc

SEQ ID NO: 811989 - DNA, 75 bp, synthetic construct
  source 1..75: mol_type = other DNA
ttaagacgtaagatgcgaaaagcagccatggacagaaactacctggcgtcagtccttgcgaggagcgggctttcg

SEQ ID NO: 811990 - DNA, 75 bp, synthetic construct
  source 1..75: mol_type = other DNA
cacatggagaataagttgcactggcgtctggatgtggtaatgaatgaagacggctgcaaaataagaagaggaaac

SEQ ID NO: 811991 - DNA, 75 bp, synthetic construct
  source 1..75: mol_type = other DNA
ttaagacgtaagatgcgaaaagcagccatggacagaaactatctggcgtcagtccttgcggggtgcgggctttcg

SEQ ID NO: 811992 - DNA, 75 bp, synthetic construct
  source 1..75: mol_type = other DNA
ctgctgatttaaccgcagagaagttcgccacagcaatccgaaaccacgggcacgtggagaataagctgcactggc

SEQ ID NO: 811993 - DNA, 75 bp, synthetic construct
  source 1..75: mol_type = other DNA
ctgccgcaaccggtacatggactgaagaagagatccgccatcagcctcgcgcatggatccgttcactcaccaaca

SEQ ID NO: 811994 - DNA, 75 bp, synthetic construct
  source 1..75: mol_type = other DNA
ctggtcgataacgaaacgctggtggtggtatttgtctcaagccacccttacacccgtcagtatgatcttgatctg

SEQ ID NO: 811995 - DNA, 75 bp, synthetic construct
  source 1..75: mol_type = other DNA
atacgccggataccccatcagccagcggcaccgttaaccgtgtggtgcaaggtgtcattattcatccgtggcagg

SEQ ID NO: 811996 - DNA, 75 bp, synthetic construct
  source 1..75: mol_type = other DNA
tattcctgagaaaaggcgggaaacgctccctggggtgaccacatgtacagaatgccagtccatccttgaacgacg

SEQ ID NO: 811997 - DNA, 75 bp, synthetic construct
  source 1..75: mol_type = other DNA
gccgcgccaacaccggctacatcttccaacaattcaacctggtgaatcgcctgagcgtactggagaacgtgctga

SEQ ID NO: 811998 - DNA, 75 bp, synthetic construct
  source 1..75: mol_type = other DNA
aactgagcaaaaccttcaaccagcatcaggcgctgcacgcggttgatctgaatatccatcatggtgaaatggtgg

SEQ ID NO: 811999 - DNA, 75 bp, synthetic construct
  source 1..75: mol_type = other DNA
ctgccggtagccatatcgagctgctgggccgcacagtccagcgcgaaggccgcctggcccgcgatatccgcaaaa

SEQ ID NO: 812000 - DNA, 75 bp, synthetic construct
  source 1..75: mol_type = other DNA
gggggtgacggccagtggtaaaaaaatcccgcaggtcaccataacccgcagcgacggcgaccgccatcattttgc

SEQ ID NO: 812001 - DNA, 75 bp, synthetic construct
  source 1..75: mol_type = other DNA
acggcagcagccaacagtttgataacgaacgctttgatcatctctatcgcagcatcaaccgcgtcgaagagaacg

SEQ ID NO: 812002 - DNA, 75 bp, synthetic construct
  source 1..75: mol_type = other DNA
cagtttgataacgaacgttttgaccatctctaccgcagcattaaccgcgtcgaagagaacgcgaaagctgcctga

SEQ ID NO: 812003 - DNA, 75 bp, synthetic construct
  source 1..75: mol_type = other DNA
atcacgccgatacttcatgcaatttgtgcagtagccgtgcaggggctggtcgggtgcattaccggtgactgggtt

SEQ ID NO: 812004 - DNA, 75 bp, synthetic construct
  source 1..75: mol_type = other DNA
atggatataacgcctttccttcatgcgttttgtgctgtggctgcgcaggtactgattggcctttttaccggaaac

SEQ ID NO: 812005 - DNA, 75 bp, synthetic construct
  source 1..75: mol_type = other DNA
tgggcttacggggcgatagccggttgtacattcttcattgcgcgggaacacacccaggcagaatatcgctggatt

SEQ ID NO: 812006 - DNA, 75 bp, synthetic construct
  source 1..75: mol_type = other DNA
gcgctactgcgaacgcatcgtcgccctgcgccaggggcacgttttctacgacggcagcagccaacagtttgataa

SEQ ID NO: 812007 - DNA, 75 bp, synthetic construct
  source 1..75: mol_type = other DNA
acccgcgagcagaaacagcgcgcgttacaggcgctgacccgcgttggcatggtgcattttgcccatcagcgcgtt

SEQ ID NO: 812008 - DNA, 75 bp, synthetic construct
  source 1..75: mol_type = other DNA
tgggtttacggtgcgatagtcggttgtacgttcttcgttgtgagtgccccctggcagaagaacgctggcttgaaa

SEQ ID NO: 812009 - DNA, 75 bp, synthetic construct
  source 1..75: mol_type = other DNA
cgacgttaaaaaatggcgatagcaaaacggttattgttgatgagatcactcgtaatgcacagtttccacttaagg

SEQ ID NO: 812010 - DNA, 75 bp, synthetic construct
  source 1..75: mol_type = other DNA
tgacacagtctgccatgcgcaccattgtggagatgaagcttgcacaggtctgtgaacgcctgcactgccattatg

SEQ ID NO: 812011 - DNA, 75 bp, synthetic construct
  source 1..75: mol_type = other DNA
cagcgatatttcccgccagagtgagacacagcatctgcagcaggcactgcacgacattcagcagaatcagcccct

SEQ ID NO: 812012 - DNA, 75 bp, synthetic construct
  source 1..75: mol_type = other DNA
cgcaccctcgacctcggtctgctgcaggccggtgccggtgtgaaaggtgaatttgaacagcgcctgaaaaacgtg

SEQ ID NO: 812013 - DNA, 75 bp, synthetic construct
  source 1..75: mol_type = other DNA
accggacaccggtgcgcgcaatatcgacaacctgctcaaccagcaaattttgccggtactgagtcagcaactgct

SEQ ID NO: 812014 - DNA, 75 bp, synthetic construct
  source 1..75: mol_type = other DNA
ggtggatattctttctcgccgccgaaaaaataacccgattctggtcggtgagccgggtgtcggtaaaacggcact

SEQ ID NO: 812015 - DNA, 75 bp, synthetic construct
  source 1..75: mol_type = other DNA
aggcgtttaatgaacggtgcctagaagcactgattgaacaaagccggttaagacccacaccgacaccttccctgc

SEQ ID NO: 812016 - DNA, 75 bp, synthetic construct
  source 1..75: mol_type = other DNA
cgaacagcttgatgagttgattctcgcccgccagcgtttcgcccacggagtacagacgttatttttcgaccatcc

SEQ ID NO: 812017 - DNA, 75 bp, synthetic construct
  source 1..75: mol_type = other DNA
gagcgtggtgagcgatgaaaacggcgaggcgacgttcttttgcaatggcggcagcgtcagcgtgtgggtgattga

SEQ ID NO: 812018 - DNA, 75 bp, synthetic construct
  source 1..75: mol_type = other DNA
cgcagattttcactgggacgctggtggaagccgatccttttcacgccgtaaccctcgttgccaaccacgacaccc

SEQ ID NO: 812019 - DNA, 75 bp, synthetic construct
  source 1..75: mol_type = other DNA
tcagtgaagacactgaacgttcacgccgtaaaggacaggttccgggctgtcatatccatgtggatcagatatctc

SEQ ID NO: 812020 - DNA, 75 bp, synthetic construct
  source 1..75: mol_type = other DNA
aaggctggaacgatcaggttgatgatgaactcggtaatttcgattatctgatgggcgagaatatcgattttcgca

SEQ ID NO: 812021 - DNA, 75 bp, synthetic construct
  source 1..75: mol_type = other DNA
tggcgaaaaaaccattcatctgggagagaattacggcaataaaacctggcgtgattttcttgggaaccggcaaga

SEQ ID NO: 812022 - DNA, 75 bp, synthetic construct
  source 1..75: mol_type = other DNA
aaactttcagccagacacaataaagattgtttacgatgaaaataatattattgtcgccatcaccaaagatgcatc

SEQ ID NO: 812023 - DNA, 75 bp, synthetic construct
  source 1..75: mol_type = other DNA
aacgcgctgtcaggctgaatatggcaacggatgaggaacgcacacgactggaagcatgggaacgctacagtgttc

SEQ ID NO: 812024 - DNA, 75 bp, synthetic construct
  source 1..75: mol_type = other DNA
aacagatgaggagcatagccgactggaagcatgggaacgctacagtgttctggtcagccgtgtggatcctgcaaa

SEQ ID NO: 812025 - DNA, 75 bp, synthetic construct
  source 1..75: mol_type = other DNA
taaatggatgtttaaggatggtgccgtgattaagcggatttatacggcagacgaacagcagaaactagcggaatt

SEQ ID NO: 812026 - DNA, 75 bp, synthetic construct
  source 1..75: mol_type = other DNA
aaactttcagccagacacaataaagattgtttacgatgcaaataatattattgtcgccatcaccaaagatgcctc

SEQ ID NO: 812027 - DNA, 75 bp, synthetic construct
  source 1..75: mol_type = other DNA
aggaagtcaacagacagacagagcaacgcaaggccacgctgctcagtgaagcagatgccatcatccggcttctgg

SEQ ID NO: 812028 - DNA, 75 bp, synthetic construct
  source 1..75: mol_type = other DNA
cgggcaatccgaaaaccgcggaacaatatcagataacaagaaaatataatgttacctggcttttttcggaagacg

SEQ ID NO: 812029 - DNA, 75 bp, synthetic construct
  source 1..75: mol_type = other DNA
gaatcatgggaacgctacagcgttatggtcagccgtgtggatactgcaaagccagaatggccacagaaaccagaa

SEQ ID NO: 812030 - DNA, 75 bp, synthetic construct
  source 1..75: mol_type = other DNA
ccaaccgacgtgctgatgactcagggaaatggatgtttaaggatggtgccgtgattaagcggatttatacggcag

SEQ ID NO: 812031 - DNA, 75 bp, synthetic construct
  source 1..75: mol_type = other DNA
gtgattaagcggatttatacggcagacgaacagctgcaactggcggaattacagaagtcagctttgctttccgaa

SEQ ID NO: 812032 - DNA, 75 bp, synthetic construct
  source 1..75: mol_type = other DNA
taaatggatgtttaaggacggtgccgtgattaagcggatttatacggcagacgaacagcagcaactggcggagtc

SEQ ID NO: 812033 - DNA, 75 bp, synthetic construct
  source 1..75: mol_type = other DNA
gtcgttgaggttcccgatataacagccaatcgccgcgctgatgattcaggaaagtggatgtttaaggacggagct

SEQ ID NO: 812034 - DNA, 75 bp, synthetic construct
  source 1..75: mol_type = other DNA
actggtgatcgccggaggaatagtctttggcccgctcttagggacgtttctttcattaattgccgccacgctggc

SEQ ID NO: 812035 - DNA, 75 bp, synthetic construct
  source 1..75: mol_type = other DNA
gatgaaaataatattattgtcgccatcaccagagatgcctccacgcttaatcccgaaggttttagcgtcgtcgag

SEQ ID NO: 812036 - DNA, 75 bp, synthetic construct
  source 1..75: mol_type = other DNA
acaatatcagctaacaaagaattttgatgttatctggttatggtccgaagacggaaaaaactggtatgaggaagt

SEQ ID NO: 812037 - DNA, 75 bp, synthetic construct
  source 1..75: mol_type = other DNA
gcagccgactggaagcatgggaacgctacagtgttctggtcagtcgtgtggatcctgcaaatcctgaatggccgg

SEQ ID NO: 812038 - DNA, 75 bp, synthetic construct
  source 1..75: mol_type = other DNA
gagtcatgggaacgctacagcgttctggtcagccgtgtggatcctgtaaatcctgaatggccggaaatgccgcaa

SEQ ID NO: 812039 - DNA, 75 bp, synthetic construct
  source 1..75: mol_type = other DNA
atggcttacgatgaaaacaatattatcgttgccatcacccgggatgcctcaatgcttaatccggcgggattaagt

SEQ ID NO: 812040 - DNA, 75 bp, synthetic construct
  source 1..75: mol_type = other DNA
gaatcatgggaacgctacagcgttctggtcagtcgtgtggatcctgcaaatcctgaatggccggaaatgccgcaa

SEQ ID NO: 812041 - DNA, 75 bp, synthetic construct
  source 1..75: mol_type = other DNA
tggagcgtgcggtcaggctgaatatggcaacagatgaggagcgcagccgactggaggcatgggaacgctacagcg

SEQ ID NO: 812042 - DNA, 75 bp, synthetic construct
  source 1..75: mol_type = other DNA
ttttgataaaaatcattaggggattcatcagcgctgagcgtaaatttcttttggcctgtcttatttttgcgctgg

SEQ ID NO: 812043 - DNA, 75 bp, synthetic construct
  source 1..75: mol_type = other DNA
tcgccaaacgctacgcccgctttaaacacgtggatctgactgcttctgacagccaaccgcttactcaccctaaaa

SEQ ID NO: 812044 - DNA, 75 bp, synthetic construct
  source 1..75: mol_type = other DNA
gatgactcaggtaaatggatgtttaaggatggtgccgtgattaagcggatttatacggcagacgaacagcatcaa

SEQ ID NO: 812045 - DNA, 75 bp, synthetic construct
  source 1..75: mol_type = other DNA
gttatctggttatggtccgaagagggaaaaaactggtatgaggaagtaagtaattttcaggaagacacgataaag

SEQ ID NO: 812046 - DNA, 75 bp, synthetic construct
  source 1..75: mol_type = other DNA
ctggaggcatgggaacgctacagcgttctggtcagtcgtgtggatcctgcaaatcctgaatggccggaactacca

SEQ ID NO: 812047 - DNA, 75 bp, synthetic construct
  source 1..75: mol_type = other DNA
gaattttcagccagacaccataaaaattgcttacgatgagaacaacatcatcgttgctgtcagtaaagacgtttc

SEQ ID NO: 812048 - DNA, 75 bp, synthetic construct
  source 1..75: mol_type = other DNA
cagacaaacattatgcaggaaagcactggacaggaaaacaccgaacctggttagctaatcaatcatttagtcagc

SEQ ID NO: 812049 - DNA, 75 bp, synthetic construct
  source 1..75: mol_type = other DNA
gaagatcgcatacttcaactcgaccaggaaatatcccgcctgttacctgagtggtctctgtgcaatctggtctgc

SEQ ID NO: 812050 - DNA, 75 bp, synthetic construct
  source 1..75: mol_type = other DNA
acttacccctgcctggatccctgacctgactcatgaagctatgcgggatctaatcagagcccgtgcagcagctaa

SEQ ID NO: 812051 - DNA, 75 bp, synthetic construct
  source 1..75: mol_type = other DNA
ttctttcctgctatgaggctggcccctgtggttttgggctatatcatcaactcacgatatttataattaaatgcg

SEQ ID NO: 812052 - DNA, 75 bp, synthetic construct
  source 1..75: mol_type = other DNA
aacgatgcagtcacattttgtacaggctttttttacccgttctgtgcggattgaggtgtactggcaatagcggac

SEQ ID NO: 812053 - DNA, 75 bp, synthetic construct
  source 1..75: mol_type = other DNA
ccgggacccgcgatactacgctctatcgggcgggacggtgccggtgcttcaacgatgcagtcacattttgtacag

SEQ ID NO: 812054 - DNA, 75 bp, synthetic construct
  source 1..75: mol_type = other DNA
tctttctttgattaccaaacaagcgcactggaacatgcgcggcgctaacttcattgccgtacatgaaatgctgga

SEQ ID NO: 812055 - DNA, 75 bp, synthetic construct
  source 1..75: mol_type = other DNA
agcggcttcacgacgtccttagagcttgaggtcaggctttctgatgtggagtatgaaacagaagatgatgagtga

SEQ ID NO: 812056 - DNA, 75 bp, synthetic construct
  source 1..75: mol_type = other DNA
ccggtgaggctgacaacgtttttgccctgaccacggtatatgccacgaaagcacaggccatgcgtgctgctcagg

SEQ ID NO: 812057 - DNA, 75 bp, synthetic construct
  source 1..75: mol_type = other DNA
ctgtggttttgggctgtatcatcaactcacagcgatgaatataaaatgccaggttattgccccttcccggatacc

SEQ ID NO: 812058 - DNA, 75 bp, synthetic construct
  source 1..75: mol_type = other DNA
ttttccaatcccaaacagctcatggcttttctgggactggtgccgaatattccagtggaaacagtattcgtccca

SEQ ID NO: 812059 - DNA, 75 bp, synthetic construct
  source 1..75: mol_type = other DNA
tgatactgcagatatcctgaccgccgcctcccgcgacctggataaattcctgtggtttatcgaatctaacatcga

SEQ ID NO: 812060 - DNA, 75 bp, synthetic construct
  source 1..75: mol_type = other DNA
cagggaccttacggaaacattctttcctgctatgaaggtggtccctgtgggtttgggctatatcatcaactcaca

SEQ ID NO: 812061 - DNA, 75 bp, synthetic construct
  source 1..75: mol_type = other DNA
aacgcgctgtcaggctgaatatggcgacggatgaggagcgcgcacgactggagtcatgggaacgctacagcgttc

SEQ ID NO: 812062 - DNA, 75 bp, synthetic construct
  source 1..75: mol_type = other DNA
gagtcatgggaacgctacagtgttctggtcagccgtgtggatacggcaaatcccgaatggccacaaaagcctgaa

SEQ ID NO: 812063 - DNA, 75 bp, synthetic construct
  source 1..75: mol_type = other DNA
aatattgaccaggccgctgccgcatcaggccgcgtaccgggcgactctgaagtgaaacagacccgcgaaggtcag

SEQ ID NO: 812064 - DNA, 75 bp, synthetic construct
  source 1..75: mol_type = other DNA
acaaaaagccgctttgctttccgaagcggagtctgtgattcaaccgctggaacgtgctgtcaggctgaatatggc

SEQ ID NO: 812065 - DNA, 75 bp, synthetic construct
  source 1..75: mol_type = other DNA
gaagcatgggaacgctacagtgttatggtcagccgtgtggatacggcaaagccagaatggccacaaaagcctgag

SEQ ID NO: 812066 - DNA, 75 bp, synthetic construct
  source 1..75: mol_type = other DNA
gagtcatgggaacgctacagcgttctggtcagccgtgtggatacaacaaagccagaatggccacaaaagcctgag

SEQ ID NO: 812067 - DNA, 75 bp, synthetic construct
  source 1..75: mol_type = other DNA
agcgtcatccggacctggtgattagcagccagggcagcaatcagctgcgtgcggtaatgagcgatgcgcgtctga

SEQ ID NO: 812068 - DNA, 75 bp, synthetic construct
  source 1..75: mol_type = other DNA
cgtgagttgactggatttatatgggatattgcacttgctgcccaatcatcattcagtcagcagaagcaaaattaa

SEQ ID NO: 812069 - DNA, 75 bp, synthetic construct
  source 1..75: mol_type = other DNA
gggaaaaaatcacaagtagccattacggcggtggctcgtgagttgactggatttatgtgggatattgcatttgct

SEQ ID NO: 812070 - DNA, 75 bp, synthetic construct
  source 1..75: mol_type = other DNA
gtgaagcgcgtgaatatgcggtgcagcagaacatcaatatcctgcgtaaccgtgttaaccaacttggtgtggctg

SEQ ID NO: 812071 - DNA, 75 bp, synthetic construct
  source 1..75: mol_type = other DNA
gtgaaacaggaagaggtgattaacatcgctaatatccagtctcgtctgggcaatagcttccgtatcaccggcatc

SEQ ID NO: 812072 - DNA, 75 bp, synthetic construct
  source 1..75: mol_type = other DNA
ggcatcccatataccacagttcgtaaagaaaataactacggcctgagcatcaccttccgcgatgccaacacccgt

SEQ ID NO: 812073 - DNA, 66 bp, synthetic construct
  source 1..66: mol_type = other DNA
atgtcgtcgcgtgtcagaactgagattaaattgctggcgctgctggcctacgtgccaatccggtac

SEQ ID NO: 812074 - DNA, 75 bp, synthetic construct
  source 1..75: mol_type = other DNA
ttcccagccggacactggcgaacaggcgctggaaatctgtgacgccctggcgcgctctggcgcagtagacgttat

SEQ ID NO: 812075 - DNA, 75 bp, synthetic construct
  source 1..75: mol_type = other DNA
gagttgctgctgagcaacccgaactcaacgccggatttctctgtagatgacagcgaaggcgtagcagaaactaac

SEQ ID NO: 812076 - DNA, 75 bp, synthetic construct
  source 1..75: mol_type = other DNA
cttatgaaatcgacgacggtgagttgcacggcgaatcgccaggcactcgaacgttaactattccctgtaaatctg

SEQ ID NO: 812077 - DNA, 75 bp, synthetic construct
  source 1..75: mol_type = other DNA
atgccaacgaaagctgaattacaggtgcgcgtagatgagcttgaaaaagagaacgcgagcctcaaaaaaatgctg

SEQ ID NO: 812078 - DNA, 75 bp, synthetic construct
  source 1..75: mol_type = other DNA
gctgattacagaagttgcaccgcagcgggcaaaagaggctcgtcctttccgcctcgccgttattcagctaggcac

SEQ ID NO: 812079 - DNA, 75 bp, synthetic construct
  source 1..75: mol_type = other DNA
atccaccctgattaatgactataagctgatcgactatctgaatacgatactgatcccggacacatcgacacctgc

SEQ ID NO: 812080 - DNA, 75 bp, synthetic construct
  source 1..75: mol_type = other DNA
aactggtctggttgatggtatagagcaggtgaacggtctggataaacaggctatagcagcactccaggacgcgat

SEQ ID NO: 812081 - DNA, 75 bp, synthetic construct
  source 1..75: mol_type = other DNA
gcgaaagagtttggtctgaatcctgacgaaatttcgcaaatgtctatgcccgtactggtgcgagaaagactcaca

SEQ ID NO: 812082 - DNA, 75 bp, synthetic construct
  source 1..75: mol_type = other DNA
cgcgttctggcgcagtagacgttatcgtcgttgactccgtggcggcactgacgccgaaagcggaaatcgaaggcg

SEQ ID NO: 812083 - DNA, 75 bp, synthetic construct
  source 1..75: mol_type = other DNA
atgacaccgtatatccaggcgctgatcgctatgaccggcgacaaactccagcaacggatgcagaaggagccggga

SEQ ID NO: 812084 - DNA, 75 bp, synthetic construct
  source 1..75: mol_type = other DNA
ctaacgtaggatgccatacaccacgtaaaagccgtgggcgcgtgatgttcgatgcaggggtggctatagagacaa

SEQ ID NO: 812085 - DNA, 75 bp, synthetic construct
  source 1..75: mol_type = other DNA
atgagagtcctttgtctggtcttactgttttttgcttgggtttgcgtggcggcagacgactacagcttccgcacg

SEQ ID NO: 812086 - DNA, 75 bp, synthetic construct
  source 1..75: mol_type = other DNA
aacgcaggaggattttagagctcacgaacgaaggcagacaggaagcaaagctgaaaggcatcaaatttgggcgaa

SEQ ID NO: 812087 - DNA, 75 bp, synthetic construct
  source 1..75: mol_type = other DNA
ggggcagttaagtataacttcgttaagcttgctaatactcataaaatttattatgcgcaagcaaaagaatgtatt

SEQ ID NO: 812088 - DNA, 75 bp, synthetic construct
  source 1..75: mol_type = other DNA
actgtctgtttcggcgacttctccatcattagaccaccaacatatgtagccgtaaatccgctgattttaaaaaaa

SEQ ID NO: 812089 - DNA, 75 bp, synthetic construct
  source 1..75: mol_type = other DNA
attcagtgccgggatagcaggagccatcgatccggaagacattggcggccagacggttgatcttaacaacctgac

SEQ ID NO: 812090 - DNA, 75 bp, synthetic construct
  source 1..75: mol_type = other DNA
ctatcaggttaataccgcgtcacatattcatgcggctgaatttgttgccagaacctataccgattcatatcagtt

SEQ ID NO: 812091 - DNA, 75 bp, synthetic construct
  source 1..75: mol_type = other DNA
tgctggccgccacaccgaaagctgtcaaggctgcatatgacctggctaacgggaagtatacagcccaggatgcaa

SEQ ID NO: 812092 - DNA, 75 bp, synthetic construct
  source 1..75: mol_type = other DNA
tggctaacgaactggccaaaaatctcaaaactcctgaagatctcagtcagttcgatcgcctgctcaagaaaatca

SEQ ID NO: 812093 - DNA, 75 bp, synthetic construct
  source 1..75: mol_type = other DNA
acagattccgcctggttttccggagccaaagcggagaattaccagtccctcgccgccagcgataatgacgccatc

SEQ ID NO: 812094 - DNA, 75 bp, synthetic construct
  source 1..75: mol_type = other DNA
aaaggccagccgccgattaaggtagtccatgatgccaccgccgcaggctggaatatcctcaaccagcagccagcc

SEQ ID NO: 812095 - DNA, 75 bp, synthetic construct
  source 1..75: mol_type = other DNA
actatatcgtaaaaaagataattatcgtacttttgaaatagaaaagaagaatggtaaaaaaagagtcattaatgc

SEQ ID NO: 812096 - DNA, 75 bp, synthetic construct
  source 1..75: mol_type = other DNA
tacagaaaaaggatatcaggcaaaggataataaccacgcaattcaaattttccgaaatcatatttatggaaggct

SEQ ID NO: 812097 - DNA, 75 bp, synthetic construct
  source 1..75: mol_type = other DNA
tgcataacttcgcattagccaataaaaaaagccctgacttcatatctgaacttcctcaaattgaacctaaaccat

SEQ ID NO: 812098 - DNA, 75 bp, synthetic construct
  source 1..75: mol_type = other DNA
accatcggcctgctgattttctgggtcctgctggtgatggcgattatgagctgggtaagccagggtcgtagcccg

SEQ ID NO: 812099 - DNA, 75 bp, synthetic construct
  source 1..75: mol_type = other DNA
aaagggattaataaaattgcccgcattactgcggtgggcggtattgcagtaatgtgtctgaatttagtattgctg

SEQ ID NO: 812100 - DNA, 75 bp, synthetic construct
  source 1..75: mol_type = other DNA
atttcaatcggttattcgctggcaatatttttatggggcgtcagcacaaactggcagcaggtattaagtaatggt

SEQ ID NO: 812101 - DNA, 75 bp, synthetic construct
  source 1..75: mol_type = other DNA
ttctcgctgttagcgatggcgatttaccagaactattgcagccgtatggcgaacaagcctgagctggcactggac

SEQ ID NO: 812102 - DNA, 75 bp, synthetic construct
  source 1..75: mol_type = other DNA
gcgagtgggccgatttgcagtttctgctatgggatgcccaacgccgcgccggtatcactgacgagcaaatcacta

SEQ ID NO: 812103 - DNA, 75 bp, synthetic construct
  source 1..75: mol_type = other DNA
tcttcttctcgctgttagcgatggcgatttaccagaactattgcagcagagtggcaaaaaatccgcagtgggtgg

SEQ ID NO: 812104 - DNA, 75 bp, synthetic construct
  source 1..75: mol_type = other DNA
tggatgcagtgcggttggttactgtcttcatcctgctggtttcgtttggtggcggtaccgcatcggcgttcttta

SEQ ID NO: 812105 - DNA, 75 bp, synthetic construct
  source 1..75: mol_type = other DNA
ctggctataaataaggttcgccaatggcctgagccgaaagacggggaacctcgattgcatatcaaagaacagtca

SEQ ID NO: 812106 - DNA, 75 bp, synthetic construct
  source 1..75: mol_type = other DNA
attgcccgcgagctggtacgccgtgagcatgcagcgtggtcacaggctactttcggcgatgtcggtccagttggt

SEQ ID NO: 812107 - DNA, 75 bp, synthetic construct
  source 1..75: mol_type = other DNA
tgatctggattgtcgccggatggtttgatttgtttgggatgtcaatggcgaacggagcacacatcgccgggttag

SEQ ID NO: 812108 - DNA, 75 bp, synthetic construct
  source 1..75: mol_type = other DNA
gttattaaatggtgggcatttcgcgcaggatattaatttccttgcatcaccgaacccaggttatcagtccggtct

SEQ ID NO: 812109 - DNA, 75 bp, synthetic construct
  source 1..75: mol_type = other DNA
tgctgttagtaagcattactattttgttattaaatggtgggcatttcgcgcaggatattaatttccttgcatcac

SEQ ID NO: 812110 - DNA, 75 bp, synthetic construct
  source 1..75: mol_type = other DNA
atgtgctgatgaagagtctggggatgtcgctgggtaacgcgttgcatttatcacctgaaacgtcgttgtcgctgg

SEQ ID NO: 812111 - DNA, 75 bp, synthetic construct
  source 1..75: mol_type = other DNA
ccgaaagatggtgagccgcgattgcacatcaaagagcagctagcgtcggtagtgctggatgaaatagagtgcgat

SEQ ID NO: 812112 - DNA, 75 bp, synthetic construct
  source 1..75: mol_type = other DNA
ctcccgggggcagatcaaagaactgcgtattctggactggagccgggttgaacctctggtggcggatgacggcga

SEQ ID NO: 812113 - DNA, 75 bp, synthetic construct
  source 1..75: mol_type = other DNA
attacaccggaccggaactgcgggatcacggaggcggtgacggtgcctgccagggaagtgatccacgaccggttt

SEQ ID NO: 812114 - DNA, 75 bp, synthetic construct
  source 1..75: mol_type = other DNA
aaaaagatccacaacggcggcaaattgaaaaattaattgccactttacatgccagtctgcaacaacgctggagcg

SEQ ID NO: 812115 - DNA, 75 bp, synthetic construct
  source 1..75: mol_type = other DNA
cgaagaattctccacggtgctggcggatttacagcgcacatttgaggggaagatggccgcgcaggcacaagcgtt

SEQ ID NO: 812116 - DNA, 75 bp, synthetic construct
  source 1..75: mol_type = other DNA
gacggtaataaggccataagcgaaacaaagcgtgatgcggtgaaggcgatgttcagggggatactgcgaaaatga

SEQ ID NO: 812117 - DNA, 75 bp, synthetic construct
  source 1..75: mol_type = other DNA
gtgggtacggatgaaaacgtgctggtacttaatcgcacttatgccaaccggagcaacgctgaacgggcagcgaaa

SEQ ID NO: 812118 - DNA, 75 bp, synthetic construct
  source 1..75: mol_type = other DNA
ctgtcgtcgtcctaatgcacagcagaatcgcatccagttttttgaactgtggctgaattccaaattgcgtcacgg

SEQ ID NO: 812119 - DNA, 75 bp, synthetic construct
  source 1..75: mol_type = other DNA
atcctttttaacctgctctggtggtggtatctcggcggcgcggtggaaaaacgtctcggtagcggtaagctaatt

SEQ ID NO: 812120 - DNA, 75 bp, synthetic construct
  source 1..75: mol_type = other DNA
gtcgcggatatcgtccagctgaacgggaatatccggccacgatcacgccagtggtggcagttattcaggatggtg

SEQ ID NO: 812121 - DNA, 75 bp, synthetic construct
  source 1..75: mol_type = other DNA
atcgctattaaagcaacaaggaaactcggttggcgaagtcgctgaagcggcgcacgaaaaacgcgaaagcgtttc

SEQ ID NO: 812122 - DNA, 75 bp, synthetic construct
  source 1..75: mol_type = other DNA
gcgttatttataatggcgaaatttataatcaggaactcactgaagttgctgaattaataacttcaccagaagcaa

SEQ ID NO: 812123 - DNA, 75 bp, synthetic construct
  source 1..75: mol_type = other DNA
cagcaaagcctttaaacataaatttggttatgcgccgtcagccgtgctgaagaatacggaccagcacccaacgga

SEQ ID NO: 812124 - DNA, 75 bp, synthetic construct
  source 1..75: mol_type = other DNA
tgactccgcctggcgttatgtcacgatccttgatctgccattctccctggtttttgatactttactgctgccgat

SEQ ID NO: 812125 - DNA, 75 bp, synthetic construct
  source 1..75: mol_type = other DNA
tggtgaccttgttgagtggctgcggcagtattattagtcgcactataccggggcaggggcatggcaaccaatatt

SEQ ID NO: 812126 - DNA, 75 bp, synthetic construct
  source 1..75: mol_type = other DNA
cccgcgaacctgcgaagaaagaaagcactacggtgaagcgtaagcgcagaactaagaagcagaagaaagagccag

SEQ ID NO: 812127 - DNA, 75 bp, synthetic construct
  source 1..75: mol_type = other DNA
aacagatcttttattgactgcatttcatctatcgtgcataataaactgcccagtgtatcagaaattctcttgaag

SEQ ID NO: 812128 - DNA, 75 bp, synthetic construct
  source 1..75: mol_type = other DNA
cgccaacagaaataaatatatcaaagttaactgttggttggccgccagaaataaaaaaagcaataaaagaaaagt

SEQ ID NO: 812129 - DNA, 75 bp, synthetic construct
  source 1..75: mol_type = other DNA
gacggtagtagagaaagttgtgggcacgagcctgatgtttatgggagtagaaaaatttggcaccagcatctctca

SEQ ID NO: 812130 - DNA, 75 bp, synthetic construct
  source 1..75: mol_type = other DNA
taaaattatcgatttatataattatggcattttctttaatggaaaaagaatagatgaaaaatttagtatatcgaa

SEQ ID NO: 812131 - DNA, 75 bp, synthetic construct
  source 1..75: mol_type = other DNA
aataccattataggttctgattatggggttaatgtttttattggtaataaattagataatcactttgtcacaggg

SEQ ID NO: 812132 - DNA, 75 bp, synthetic construct
  source 1..75: mol_type = other DNA
tataacgatcagacaaggccttgattcattaacagaagccattgatgaaatgaatattgatgggattatggctat

SEQ ID NO: 812133 - DNA, 75 bp, synthetic construct
  source 1..75: mol_type = other DNA
acgcgcaaacgctgcaaaatcgttgccgggcagacagtgagttttgcaggtcacagcgtacaggttgttgcctga

SEQ ID NO: 812134 - DNA, 75 bp, synthetic construct
  source 1..75: mol_type = other DNA
cgacattttctttaggtaaacatccgcacgttgagctgtgcgacttgctgaaactggaaggctggagcgaaagcg

SEQ ID NO: 812135 - DNA, 75 bp, synthetic construct
  source 1..75: mol_type = other DNA
ctaataatattaatgttttttttgcagcaaaagtcttcttggatgttagtagttttgcacaatatattcaactgg

SEQ ID NO: 812136 - DNA, 75 bp, synthetic construct
  source 1..75: mol_type = other DNA
gggagataaaaaggcagaagcaaatttggtcgtgtcgggggtgaagcatgccgctaataaaaagaaaaataaaga

SEQ ID NO: 812137 - DNA, 75 bp, synthetic construct
  source 1..75: mol_type = other DNA
aatatggtcgaagatatcagggagaaggtgtcatctgagctggaaagatttttccaaaaaaatgatgaggaataa

SEQ ID NO: 812138 - DNA, 75 bp, synthetic construct
  source 1..75: mol_type = other DNA
atggatataacagcttttcttcacgcactttgcgctgttgtcgcacaggctctggttggtctttttaccggaaac

SEQ ID NO: 812139 - DNA, 75 bp, synthetic construct
  source 1..75: mol_type = other DNA
tcacgtatctgggaatccaaaatttgaatatgccaatatggttgaagatatcagggagaaggtgtctgttgagat

SEQ ID NO: 812140 - DNA, 75 bp, synthetic construct
  source 1..75: mol_type = other DNA
atggatatcacgccgatacttcatgcaatttgtgccgtagcggtacaggtactggctggtctttttaccggaaac

SEQ ID NO: 812141 - DNA, 75 bp, synthetic construct
  source 1..75: mol_type = other DNA
atggatataacaccttttcttcatgcgctttgtgctgtggctgcgcaggtactgattggcctttttaccggaaac

SEQ ID NO: 812142 - DNA, 75 bp, synthetic construct
  source 1..75: mol_type = other DNA
tacccaggcagaatatcgctggattgaaatgttcgggcatggcaagcgtatgaatatgccgtggtggggtggttt

SEQ ID NO: 812143 - DNA, 75 bp, synthetic construct
  source 1..75: mol_type = other DNA
gaagtgaaaatattctctaatgtaaaaggaaataaatgtactctaaaatttatatggtcctatggttctttcgaa

SEQ ID NO: 812144 - DNA, 75 bp, synthetic construct
  source 1..75: mol_type = other DNA
ttagttaagctgatgaaaaaaaatataaatagcttaagtaacgagcaaaaaggagctatggcctatgagattgaa

SEQ ID NO: 812145 - DNA, 75 bp, synthetic construct
  source 1..75: mol_type = other DNA
gagttatatatccttgctgatactaaagaaaaatataatacgttacaagagaaccttgatttaatcagctcatta

SEQ ID NO: 812146 - DNA, 75 bp, synthetic construct
  source 1..75: mol_type = other DNA
ggggcggctacgttcagcatcaccctggcgcgtgggcgcgcggatttgtacccggaacagccagccagtgtttat

SEQ ID NO: 812147 - DNA, 75 bp, synthetic construct
  source 1..75: mol_type = other DNA
gggcaaaagcgccactggtaaacctctgccagtgatcactatcacacgcaaggatggcgacagtcaccgatttac

SEQ ID NO: 812148 - DNA, 75 bp, synthetic construct
  source 1..75: mol_type = other DNA
gaaggggcaagggaaaaagatgtcagtttttcagcaacagcttcaatgcttcttgaactggggcttcgtgtacat

SEQ ID NO: 812149 - DNA, 75 bp, synthetic construct
  source 1..75: mol_type = other DNA
tacagatcctaacttcggatatgctgatttttcatctctggaacaatcattagaatttattgagcgttctgttat

SEQ ID NO: 812150 - DNA, 75 bp, synthetic construct
  source 1..75: mol_type = other DNA
gtccggtgattcgcaacagcggcgcggggctgaatgtacgtgccgataaagccgaagccaataaatgcgatctgt

SEQ ID NO: 812151 - DNA, 75 bp, synthetic construct
  source 1..75: mol_type = other DNA
acgccgccgtacggcgctgatgtctaaaaatcttacagaactgttctggcatcaaaggaattcccggaaatattc

SEQ ID NO: 812152 - DNA, 75 bp, synthetic construct
  source 1..75: mol_type = other DNA
cagccgcaaaagcgttaactacgctgatgcacgcgctgattgatattgaatacacggcagagcttgcgcagagca

SEQ ID NO: 812153 - DNA, 75 bp, synthetic construct
  source 1..75: mol_type = other DNA
acatccaaacgcaattgattcataaaagggagaaaagacatacaaacaacataaaaaaaacagaggagcttattc

SEQ ID NO: 812154 - DNA, 75 bp, synthetic construct
  source 1..75: mol_type = other DNA
atgccagaaaaattgaggcaacatatcgggctataaagaataataaaaatgcagcgcagactcttgcaaaacagt

SEQ ID NO: 812155 - DNA, 75 bp, synthetic construct
  source 1..75: mol_type = other DNA
ttctgctgctgtatgtcatcaatatgggtgtcgcagaagtattacaggcgaccggaaatatgctgctgccggggc

SEQ ID NO: 812156 - DNA, 75 bp, synthetic construct
  source 1..75: mol_type = other DNA
atgtataagcgcccaatgaaaatattcgaaaaaggaaaaataatgattggctatattcaagaaacacaattattt

SEQ ID NO: 812157 - DNA, 75 bp, synthetic construct
  source 1..75: mol_type = other DNA
cgatgatgggaacgacactgcggcggatggggtacttcctcactgagatggtcttgaacggtctggatttcggcg

SEQ ID NO: 812158 - DNA, 75 bp, synthetic construct
  source 1..75: mol_type = other DNA
aaaccgttattgagttttctggacaagggctcatagataagtgcttccctcgctatacagagcgtttccacgtcg

SEQ ID NO: 812159 - DNA, 75 bp, synthetic construct
  source 1..75: mol_type = other DNA
atagaaaacactttaaaagattcttcatgccattatgtcttaaatggctatacagaatttgttaactgtttgata

SEQ ID NO: 812160 - DNA, 75 bp, synthetic construct
  source 1..75: mol_type = other DNA
tcttcaataagtttttgttgtcttttgatccctcaacacagcaatggagttacgctggcgaatctccctggtacg

SEQ ID NO: 812161 - DNA, 75 bp, synthetic construct
  source 1..75: mol_type = other DNA
taaaaatagacaagaaagactgttgattatatcaacaaatctttctgaggatgatttattaaaggctaaattaat

SEQ ID NO: 812162 - DNA, 75 bp, synthetic construct
  source 1..75: mol_type = other DNA
aacgataatgagcgaaaatatggtttttatgatgcaaatggtggtgttgttgagttttcagatacagaaaagttt

SEQ ID NO: 812163 - DNA, 75 bp, synthetic construct
  source 1..75: mol_type = other DNA
agaaaatagtacatcaaacagttgagcaagttatagatttaataatctccccaaaagctacaggtaatccagttt

SEQ ID NO: 812164 - DNA, 75 bp, synthetic construct
  source 1..75: mol_type = other DNA
cacatctgccaggaactggaagtcggttattattcattatataggtttgttaatatctaaacctttgcagatgcc

SEQ ID NO: 812165 - DNA, 75 bp, synthetic construct
  source 1..75: mol_type = other DNA
ctgggagtaaagttttctaatacgggtaatgctttgtctgatgatgtaattatatctggcattaaagaaatacaa

SEQ ID NO: 812166 - DNA, 75 bp, synthetic construct
  source 1..75: mol_type = other DNA
gggttaatgtttttattggtaataatttagataatcactttgtcacagggcgctcaggtgcaactatataccccg

SEQ ID NO: 812167 - DNA, 75 bp, synthetic construct
  source 1..75: mol_type = other DNA
ttgaatatagaaacccaaaatagaaatgatgtcataaaaccagttcgccaaagaagaaacgaaagacaggactcc

SEQ ID NO: 812168 - DNA, 75 bp, synthetic construct
  source 1..75: mol_type = other DNA
ctatcatttaaaaaagcttccaccacataattctcctgtcttcgatcagattgttttattggatggtgaaaaatt

SEQ ID NO: 812169 - DNA, 75 bp, synthetic construct
  source 1..75: mol_type = other DNA
cagataataatattaattcttttgattttcatcgaggagataaaaaggcagaagcaaagttggtggtatcggggg

SEQ ID NO: 812170 - DNA, 75 bp, synthetic construct
  source 1..75: mol_type = other DNA
tttcatttctgaaagaaattttacattatgacaataaaaaaattgagaagttcaaagaagttattcataaaaaca

SEQ ID NO: 812171 - DNA, 75 bp, synthetic construct
  source 1..75: mol_type = other DNA
aaaatattttaatgacattgtaccaatgattctcgcactcgacatcaggaacacatatcgcccggataatgagat

SEQ ID NO: 812172 - DNA, 75 bp, synthetic construct
  source 1..75: mol_type = other DNA
acaaaacacatcaaataataaaacaaaaatattttaatgacattgtaccaatgattctcgcactcgacatcagga

SEQ ID NO: 812173 - DNA, 75 bp, synthetic construct
  source 1..75: mol_type = other DNA
acattaaagtgtttgacaatgcaagtaaaaaaataagtgttagccagccaataaaaaaagacttcattcctaaaa

SEQ ID NO: 812174 - DNA, 75 bp, synthetic construct
  source 1..75: mol_type = other DNA
gaacaggcgcggattaaagccgaagaagaagctaaggcagcagctgaagctctcgcaaagcaaattgagtctgac

SEQ ID NO: 812175 - DNA, 75 bp, synthetic construct
  source 1..75: mol_type = other DNA
aacatggatacggaagtgctgaacaaccgcactactgatgtgaaagtggaccataccgaaaccatcggtaacaac

SEQ ID NO: 812176 - DNA, 75 bp, synthetic construct
  source 1..75: mol_type = other DNA
acaggtctatatccatgcacagaagaacatggatacggaagtgctgaacaaccgcactactgatgtgaaagtgga

SEQ ID NO: 812177 - DNA, 75 bp, synthetic construct
  source 1..75: mol_type = other DNA
gtgacctgccggggacgaagacgcagatgacgatacggtcgaagacctataaaggaagcggctttaatgaactgc

SEQ ID NO: 812178 - DNA, 75 bp, synthetic construct
  source 1..75: mol_type = other DNA
gaaggtgagtggcgcgctggggataaaggtggacggggaaatcgtgctggagagcagcagccggataagcctgaa

SEQ ID NO: 812179 - DNA, 75 bp, synthetic construct
  source 1..75: mol_type = other DNA
tgccgggggacatgatcagaccgtcactgtaactcacgatcaaaatgtaagcgtaggaaatgatcaatctctgac

SEQ ID NO: 812180 - DNA, 75 bp, synthetic construct
  source 1..75: mol_type = other DNA
cggtgcgggctgcggcagaacttccgcatcttccagcagcaggatatccggacgatatcggccacgttactgaac

SEQ ID NO: 812181 - DNA, 75 bp, synthetic construct
  source 1..75: mol_type = other DNA
atgggatatttaaataacgtcaccggttaccgcgatgatttactggctaaccgtgcgattgttaaacacggtaat

SEQ ID NO: 812182 - DNA, 75 bp, synthetic construct
  source 1..75: mol_type = other DNA
gcgccgctatgttccggtagaaggccatgcaccgtggctggtttctggcaatgccagcgaactggaacgcattca

SEQ ID NO: 812183 - DNA, 75 bp, synthetic construct
  source 1..75: mol_type = other DNA
cactgccgaagccgaaggaaaaacatttgccttaagcgaaggaggttatctttattgcccaccaggctccttaat

SEQ ID NO: 812184 - DNA, 75 bp, synthetic construct
  source 1..75: mol_type = other DNA
tgacacctgttctgggatcagtggataaggatacgcgtgaactcaacctgttacttgtccagagtgccgatgaac

SEQ ID NO: 812185 - DNA, 75 bp, synthetic construct
  source 1..75: mol_type = other DNA
taactggatcccggtgaaaaaaggcgattacatctttatgggcgcttattccttacaggctggttatggcgtagg

SEQ ID NO: 812186 - DNA, 75 bp, synthetic construct
  source 1..75: mol_type = other DNA
gcaccaggtgccagccacggttatatcgaaacacacgttcaggaacacggtgcctatattctttccggtcagggg

SEQ ID NO: 812187 - DNA, 75 bp, synthetic construct
  source 1..75: mol_type = other DNA
caagcgtgctagaggttctgacagatgatgaaggtgatgataaaggcgaatgtgagaagaaccgtgactctgatg

SEQ ID NO: 812188 - DNA, 75 bp, synthetic construct
  source 1..75: mol_type = other DNA
cgggcttgcttatgcgcccatcggcatcatgccactattaatttcacctttgataggacgttatggcaacaaaat

SEQ ID NO: 812189 - DNA, 75 bp, synthetic construct
  source 1..75: mol_type = other DNA
cttatgccgcagttactccaggaaacgatggggtataatgcgatatgggccggacttgcttatgcgcccatcggc

SEQ ID NO: 812190 - DNA, 75 bp, synthetic construct
  source 1..75: mol_type = other DNA
tggccgttacgctaatatccgcctttaccttatcgggtaaggcaaagccggaaaagattaacgataacgctatga

SEQ ID NO: 812191 - DNA, 75 bp, synthetic construct
  source 1..75: mol_type = other DNA
gaggacaaccgttcgccggggggcctgccggggacgaagacgcagatgacgatacggtcgaagacctataaagga

SEQ ID NO: 812192 - DNA, 75 bp, synthetic construct
  source 1..75: mol_type = other DNA
atggcggtgcgggctgcggcagaacttccgtatcttccagcagcaggatatccggacgatatcggccacgttact

SEQ ID NO: 812193 - DNA, 75 bp, synthetic construct
  source 1..75: mol_type = other DNA
ttttgaagagcgggatgaactattaatggactatggtgagttacgcggtggaagtgctgctgatgtcgaatccta

SEQ ID NO: 812194 - DNA, 75 bp, synthetic construct
  source 1..75: mol_type = other DNA
gcggacagcccggagcagaagctgacgctgtgcgacgatgtggcggggctgtcacaggcgggagagcttccgttt

SEQ ID NO: 812195 - DNA, 75 bp, synthetic construct
  source 1..75: mol_type = other DNA
gttccactgggaccgttatcacgggatgacggaggcgagttcatgctgggtgcgtgtatcgcaggcgtgggcggg

SEQ ID NO: 812196 - DNA, 75 bp, synthetic construct
  source 1..75: mol_type = other DNA
ggtgacgaatgaccggacggtgagcgtgagtaatgatgacggcctgtacgtcagaaatgaccgtaaagtgacggt

SEQ ID NO: 812197 - DNA, 75 bp, synthetic construct
  source 1..75: mol_type = other DNA
acgcggtttacgctgacgaggcatccgcagaagatgctgaaccgtgaatggcaggtggtacagagcatactgtca

SEQ ID NO: 812198 - DNA, 75 bp, synthetic construct
  source 1..75: mol_type = other DNA
ccgggaacgccggtgccgacactacgaccggcggttttgaaagcgctggcagattatgacaatggcggacctgga

SEQ ID NO: 812199 - DNA, 75 bp, synthetic construct
  source 1..75: mol_type = other DNA
cgcgcttttatgagagccacccggcacgggagttctgcgtccagtacggtgaaagcgacctggcgtttctgaccc

SEQ ID NO: 812200 - DNA, 75 bp, synthetic construct
  source 1..75: mol_type = other DNA
gccagcgaactggaacgcattcactatgaaggtatggatgatgtgatcctgctggattttctgcccaaagagtta

SEQ ID NO: 812201 - DNA, 75 bp, synthetic construct
  source 1..75: mol_type = other DNA
acctgagcaatgtggttccggcgatggaaatcatgctcgatgactttggctttggcctgtctaaacgccgcgtga

SEQ ID NO: 812202 - DNA, 75 bp, synthetic construct
  source 1..75: mol_type = other DNA
aatatcgaaacgttccttgctgcggtgcgccgttatctggagaaatccaacgccaatcagggccgagtcactatt

SEQ ID NO: 812203 - DNA, 75 bp, synthetic construct
  source 1..75: mol_type = other DNA
aagtacaatatcgaaacgttccttgctgcagtacgccgttatctggaaaaatccaacgctaaccaggggcgcgtc

SEQ ID NO: 812204 - DNA, 75 bp, synthetic construct
  source 1..75: mol_type = other DNA
tgcgggtatcgcaggcgtgggcggggccggggttcggtaatctggcgataccgcgggtgggtcaggaggtgatag

SEQ ID NO: 812205 - DNA, 75 bp, synthetic construct
  source 1..75: mol_type = other DNA
acaaccgttcaccgggggatttaccgggcacgaagacgcagatgacgatacggtcgaagacctataaaggaagcg

SEQ ID NO: 812206 - DNA, 75 bp, synthetic construct
  source 1..75: mol_type = other DNA
cgcaggcgctgcacggcagtcacggtgaaggaacgacgctgagtaaccagtttgaggtgataccggcagacagga

SEQ ID NO: 812207 - DNA, 75 bp, synthetic construct
  source 1..75: mol_type = other DNA
cggggttcggtaacctggcgataccgcgggtgggccaggaggtgattgttgacttcctgaacggggacccggacc

SEQ ID NO: 812208 - DNA, 75 bp, synthetic construct
  source 1..75: mol_type = other DNA
gcggaaaggtgacaatttccgggacagagtttgattttactgctggtggcccggtgcatatcaacggtaaagacg

SEQ ID NO: 812209 - DNA, 75 bp, synthetic construct
  source 1..75: mol_type = other DNA
atgtcatcgaaaaaccggacccgcagaaccacaatccgcaatatccgtttccccaatcacatgattgaacagatc

SEQ ID NO: 812210 - DNA, 75 bp, synthetic construct
  source 1..75: mol_type = other DNA
gaagtccataacccgctgtctaccactgaagcccagtttgaaggtcaggaaattgtgccaattaccctgacgaag

SEQ ID NO: 812211 - DNA, 75 bp, synthetic construct
  source 1..75: mol_type = other DNA
agtgtgcaagcagtgaccagtcagcccgatgtggaccaggttgttctggatgaagcgattaaaaaccgttccggg

SEQ ID NO: 812212 - DNA, 75 bp, synthetic construct
  source 1..75: mol_type = other DNA
cggtttgaagacgccaccagtaatgagcaggtgtatatccatgcccagaagaacatggatacggaggtgctcaac

SEQ ID NO: 812213 - DNA, 75 bp, synthetic construct
  source 1..75: mol_type = other DNA
acaggtctatattcacgcgcagaagaacatggatacggaagtgctgaatgaccggacgacggacgtgaagcatga

SEQ ID NO: 812214 - DNA, 75 bp, synthetic construct
  source 1..75: mol_type = other DNA
gcgaactcactgacgggggaaatgacagttgcgtcagcgggtgttgcggttccactagcggcggaacagtctgcg

SEQ ID NO: 812215 - DNA, 75 bp, synthetic construct
  source 1..75: mol_type = other DNA
gagggtgtcgcaggcgtgggcggggccgggatttggtaacctggcgataccgcgcatcggccaggaagtgattgt

SEQ ID NO: 812216 - DNA, 75 bp, synthetic construct
  source 1..75: mol_type = other DNA
ttcactgggacaggtataacccggcaacggaggcgagttcgtgctgggttagggtatcgcaggcgtgggcggggc

SEQ ID NO: 812217 - DNA, 75 bp, synthetic construct
  source 1..75: mol_type = other DNA
ttaaaacccgtaagtggacagatgacgccggtgtagaacgttacacgacggaaattatcgtcagccagggcggca

SEQ ID NO: 812218 - DNA, 75 bp, synthetic construct
  source 1..75: mol_type = other DNA
taccagatggagagcctgcgcagtgatgcggaaaaggccacagggcagagtaattcaccgaagctgtggccggga

SEQ ID NO: 812219 - DNA, 75 bp, synthetic construct
  source 1..75: mol_type = other DNA
ctgaatggcgggggcagtccggggacgccgataaatacactacaaccggcagttatggacgctctggctgacgag

SEQ ID NO: 812220 - DNA, 75 bp, synthetic construct
  source 1..75: mol_type = other DNA
gtgtggatattgtcggaccgaaaataaatctgaatggcgggggcagtccggggacgccgataaatacactacaac

SEQ ID NO: 812221 - DNA, 75 bp, synthetic construct
  source 1..75: mol_type = other DNA
gaaacgaccgtaaagtgacggtggaagggaagcaggagcataagacgacgggaaaccatatcagcctggtggagg

SEQ ID NO: 812222 - DNA, 75 bp, synthetic construct
  source 1..75: mol_type = other DNA
gtgacagaggtgcagctcggtgagaacaacgactggcagatgcgttattccctgagcatcagcccgccgctgtgg

SEQ ID NO: 812223 - DNA, 75 bp, synthetic construct
  source 1..75: mol_type = other DNA
cgccggggtggccggggtactacagccatgacggggagagcctgaacgggcagggaacgcagtacgagatatttg

SEQ ID NO: 812224 - DNA, 75 bp, synthetic construct
  source 1..75: mol_type = other DNA
gcgtggatatagtggggccgaagataaacctgaatggtgggggaggtccggggacgccagtatcgacgctgcaac

SEQ ID NO: 812225 - DNA, 75 bp, synthetic construct
  source 1..75: mol_type = other DNA
cgctgaaccgggaatggcaggttgtgggaagcacactgcggggagaacagccgcaggcgctgcacgggagtcacg

SEQ ID NO: 812226 - DNA, 75 bp, synthetic construct
  source 1..75: mol_type = other DNA
gtcggagggcatctgctcatggctaaagggcagagcacgcaggagcagtccatcctggccgctctcggtgtggcc

SEQ ID NO: 812227 - DNA, 75 bp, synthetic construct
  source 1..75: mol_type = other DNA
cagcccaaatcacttcatccttatgcaccgggttgtgttgtaccggaacgcacaggcgcacacaaataccgatat

SEQ ID NO: 812228 - DNA, 75 bp, synthetic construct
  source 1..75: mol_type = other DNA
ggggcttggccttgctcaacagcgccacggagccagcattatgaaagatggcatgatggcggcagggattatcac

SEQ ID NO: 812229 - DNA, 75 bp, synthetic construct
  source 1..75: mol_type = other DNA
tgaaggactgtcaccgcgtgatggtggtgatgagttcagtcaggcatggaaacaggaagtaaaaatcagcgaggg

SEQ ID NO: 812230 - DNA, 75 bp, synthetic construct
  source 1..75: mol_type = other DNA
gttatcacgtcaggcgagtggctggacggcgtgaagggtaaacaggcattagccgcactggaacgctacaaaggg

SEQ ID NO: 812231 - DNA, 75 bp, synthetic construct
  source 1..75: mol_type = other DNA
aacgagggatccctttttggcaagcggaaaacggggtctggctgacatcaacggttgcggttgagtttcttgagt

SEQ ID NO: 812232 - DNA, 75 bp, synthetic construct
  source 1..75: mol_type = other DNA
gtggaagttgaggtgatcgttaacggtcgcgtgatcagcaaacgcacccagcgggtcaataagctgtttagccgg

SEQ ID NO: 812233 - DNA, 75 bp, synthetic construct
  source 1..75: mol_type = other DNA
tatcgattttcgctacagtggcaataaaacctgcgaagtggcactggaactcaaccaggcgcgcggtgccgtctg

SEQ ID NO: 812234 - DNA, 75 bp, synthetic construct
  source 1..75: mol_type = other DNA
gaaagatggcatgatggcggcgggcgtcgtcactactgctgaatggctcgacagcatgaagggtaagcaggctct

SEQ ID NO: 812235 - DNA, 75 bp, synthetic construct
  source 1..75: mol_type = other DNA
gatgatggctttctggggcgctcccctgtcacgatttgccgtgaggcacttgggcttggccttgctcaacagcgc

SEQ ID NO: 812236 - DNA, 75 bp, synthetic construct
  source 1..75: mol_type = other DNA
ggcattggtcagttaggcaaagacacacctatcaactggaccaccaaagtagagcgtaagaaagcaggcccgacc

SEQ ID NO: 812237 - DNA, 75 bp, synthetic construct
  source 1..75: mol_type = other DNA
catcatatttcatatcatatttcaaaaacttttttggcgtgacaccaaaacaattacagacactgttaaaaacat

SEQ ID NO: 812238 - DNA, 75 bp, synthetic construct
  source 1..75: mol_type = other DNA
gcaatgcgattaccgacacgccgttgttacgccgtgctaaacagcaggtgaaataccagctcgactggcagttgt

SEQ ID NO: 812239 - DNA, 75 bp, synthetic construct
  source 1..75: mol_type = other DNA
cgatggttgcggataccttaggccaacttccggcgctgaacgcacgacttaacgaagctgtcagtcgtgagcgtc

SEQ ID NO: 812240 - DNA, 75 bp, synthetic construct
  source 1..75: mol_type = other DNA
agtgaagccgtcagtcgtgagcgtcagacaggaatgcagatggtacagtctgtactggaacgcatcggggaggtg

SEQ ID NO: 812241 - DNA, 75 bp, synthetic construct
  source 1..75: mol_type = other DNA
aattgttatgaaagtcacgaaacattagctaagatttttaagtcttcagcatcaacaattaaacgtaagataaac

SEQ ID NO: 812242 - DNA, 75 bp, synthetic construct
  source 1..75: mol_type = other DNA
tagctaatgataatgaggaggatgtgttaaagaattttgcctctcttattatcaagcagaagaatactagaacag

SEQ ID NO: 812243 - DNA, 75 bp, synthetic construct
  source 1..75: mol_type = other DNA
tggtcgtggctgtcgatggatggttgtatgaccaaatcaccgctggcaggctcaaaaaaacaggcaagaacccaa

SEQ ID NO: 812244 - DNA, 75 bp, synthetic construct
  source 1..75: mol_type = other DNA
ttttggcgcgagctacgccgtccagcactggctaaatgtggcgcagcagcagaaaaccgtggcgattaccctgcg

SEQ ID NO: 812245 - DNA, 75 bp, synthetic construct
  source 1..75: mol_type = other DNA
aatagcgataagaaaaaaattagaagcagaaggggttatcttcagagaactaattcttgaaataaggatgaaaaa

SEQ ID NO: 812246 - DNA, 75 bp, synthetic construct
  source 1..75: mol_type = other DNA
gaagacattgcccgtatgttcaacgtgtcgccgatttttcttcaggaatacagcaacagcacctacagcaatttc

SEQ ID NO: 812247 - DNA, 75 bp, synthetic construct
  source 1..75: mol_type = other DNA
ctacgacgcgattattcaggttggcgggtcgaactacgtcgatctttacggtttaacgcattttgagtatccact

SEQ ID NO: 812248 - DNA, 75 bp, synthetic construct
  source 1..75: mol_type = other DNA
ggccattccaggaacctcagttcaaccagctggcaaactatgtgtttggccactgcgatgccctgattttacgtg

SEQ ID NO: 812249 - DNA, 75 bp, synthetic construct
  source 1..75: mol_type = other DNA
ctttgatgcgagctacgccgttcaacactggctgaacgtggcgcagcagcagaaaactgtcgcgataacgctgcg

SEQ ID NO: 812250 - DNA, 75 bp, synthetic construct
  source 1..75: mol_type = other DNA
gcgggcggaccgatggcaatgctggggtgatattcgacactggcctggagaacgatggtcagatcagcgccaaaa

SEQ ID NO: 812251 - DNA, 75 bp, synthetic construct
  source 1..75: mol_type = other DNA
tattttaaaacattgcaaaatttaactatccaatataggaatataatcttttgggataatagaaatgatatttac

SEQ ID NO: 812252 - DNA, 75 bp, synthetic construct
  source 1..75: mol_type = other DNA
atgagcatttttcgaataatatgtgctttttagtgacgtctccatttatggagaagcattttaaagagcagcttg

SEQ ID NO: 812253 - DNA, 75 bp, synthetic construct
  source 1..75: mol_type = other DNA
tgcagtcgcggtttcgcttggcttgttcatagctatcgctactattatttataatgtaaatacagcgagaaaagt

SEQ ID NO: 812254 - DNA, 75 bp, synthetic construct
  source 1..75: mol_type = other DNA
tcttcaatatggccagagagggcgctggcagtaaaaatagtatccagaacgcgcagccggggagtgaatcgtatc

SEQ ID NO: 812255 - DNA, 75 bp, synthetic construct
  source 1..75: mol_type = other DNA
tctttaatatggccagagagagcgctggcagtaaaattagtttccaggacgcgcagtcaggtagcgaatcatatc

SEQ ID NO: 812256 - DNA, 75 bp, synthetic construct
  source 1..75: mol_type = other DNA
aataaaacatctcatattaatgcaactgacttagtatctcttagaaacttttttagtaaatctgagaagtatcgc

SEQ ID NO: 812257 - DNA, 75 bp, synthetic construct
  source 1..75: mol_type = other DNA
agagggtatttttgacctcgttggcaataacacgccaatcttctttatccaggatgcgcataaattccccgattt

SEQ ID NO: 812258 - DNA, 75 bp, synthetic construct
  source 1..75: mol_type = other DNA
ctgaagcatggcgtgatgattatgaagcagggaaaacaccggtcgaagcatattgtgatgagtggggcgatgaat

SEQ ID NO: 812259 - DNA, 75 bp, synthetic construct
  source 1..75: mol_type = other DNA
gttagaggtgataccggcggaccggacgtggcgtccacggctgcaaagcaaaccgaaggtggacgggccacagag

SEQ ID NO: 812260 - DNA, 75 bp, synthetic construct
  source 1..75: mol_type = other DNA
tagctttgaacctgtcacaatgtttagcttatttaaatcaataaagaaaaatgtcatgcaatttttctgtatcag

SEQ ID NO: 812261 - DNA, 75 bp, synthetic construct
  source 1..75: mol_type = other DNA
ctgggcgattgatatacagcaactcagagcatgtcagcacagcctggagtttcatcgtgaaaaagaatgggctga

SEQ ID NO: 812262 - DNA, 75 bp, synthetic construct
  source 1..75: mol_type = other DNA
ataattatactaaagataacatctggttatttaatagtgccggtctatttacagggaatgtgaaatatctgttta

SEQ ID NO: 812263 - DNA, 75 bp, synthetic construct
  source 1..75: mol_type = other DNA
tgttcaatatggccagagaagccgctgataacagccctgtcattcaggcagggcagcagatcgcggaaatggtgc

SEQ ID NO: 812264 - DNA, 75 bp, synthetic construct
  source 1..75: mol_type = other DNA
attagattcaaagaatatctatcttgagaaacaggcttttcacgatctgataatatctctaagagaaaaaagtga

SEQ ID NO: 812265 - DNA, 75 bp, synthetic construct
  source 1..75: mol_type = other DNA
ctacgtcaggtaatcgaggcgcgaggggggatttccgaagctgccaggaaatctggccttgcccgtcagagtatt

SEQ ID NO: 812266 - DNA, 75 bp, synthetic construct
  source 1..75: mol_type = other DNA
atcgccagcacgactggatgagtctgaaagcgacggtaatctctacgttaacggtctgccaggcatgtcacagtc

SEQ ID NO: 812267 - DNA, 75 bp, synthetic construct
  source 1..75: mol_type = other DNA
ttaccatacatataacatccaaatgtgaacttacatcaaggtatctcagtattaatattggtgacagaataaccc

SEQ ID NO: 812268 - DNA, 75 bp, synthetic construct
  source 1..75: mol_type = other DNA
agattgcattaataacccgaagaagaagcatcgccttcttcgaaatagggtggagcatgagcaactttcattgtt

SEQ ID NO: 812269 - DNA, 75 bp, synthetic construct
  source 1..75: mol_type = other DNA
atgccgcttatgcctcttgattataacacactccctgacgaagcggagattaataaggtgcctcttcgccggcgt

SEQ ID NO: 812270 - DNA, 75 bp, synthetic construct
  source 1..75: mol_type = other DNA
cgccatgaaccagctgttctgcctgttggtggagggactggcgggtgaaattcatgatttcctcggcgcactgta

SEQ ID NO: 812271 - DNA, 75 bp, synthetic construct
  source 1..75: mol_type = other DNA
gccagtggtgcggcgggaatgctgattgcttatgccgagtgtctgcttgaagcagatatcaatccttcctggcac

SEQ ID NO: 812272 - DNA, 75 bp, synthetic construct
  source 1..75: mol_type = other DNA
cgcgtatttaaggatacgggccgccatctggggcgctgggaagtgttcagtgattttctgtcgcttgccgccagc

SEQ ID NO: 812273 - DNA, 75 bp, synthetic construct
  source 1..75: mol_type = other DNA
gagaattacttgaattctatcatgctgcatatatcaaactgggacggaaaatccgtaaatactcaaaatatgagg

SEQ ID NO: 812274 - DNA, 75 bp, synthetic construct
  source 1..75: mol_type = other DNA
cactagaattatcacgcagtttgatgcgttcacaaatcgaggttctgcgggaggcagctgaagacctttgcacaa

SEQ ID NO: 812275 - DNA, 75 bp, synthetic construct
  source 1..75: mol_type = other DNA
tactggatgactgacgcgggatataacccgtcagaacagctgtatgccacctgcacagatatcgatccgatggtg

SEQ ID NO: 812276 - DNA, 75 bp, synthetic construct
  source 1..75: mol_type = other DNA
tctgcggcttaaacgcctggggctgtcaaaaacgttccgtcgtctggttgtcacactaaacccacgttatggcgt

SEQ ID NO: 812277 - DNA, 75 bp, synthetic construct
  source 1..75: mol_type = other DNA
tctgcggcttaaacgcctggggctgtcaaaaacgttccgtcgtctggttctcacactgaaccaacgttatggcgt

SEQ ID NO: 812278 - DNA, 75 bp, synthetic construct
  source 1..75: mol_type = other DNA
tctgcggcttaaacgcctggggctgtcaaaaacgttccgtcgtctggttctcacactaaaccgacgttatggcgt

SEQ ID NO: 812279 - DNA, 75 bp, synthetic construct
  source 1..75: mol_type = other DNA
gtctggttctcacactaagccgacgttatggcgtcagtctcattcatctggatgccagcgctgaatgcctgccgg

SEQ ID NO: 812280 - DNA, 75 bp, synthetic construct
  source 1..75: mol_type = other DNA
gtctggttttcacactaatcccacgttatggcgtcagtctcattcatctggatgccagcgctgaatgcctgccgg

SEQ ID NO: 812281 - DNA, 75 bp, synthetic construct
  source 1..75: mol_type = other DNA
tctgcggcttaaacgcctggggctgtcaaaaacgttccgtcgtctggttgtcacactcaaccaacgttatggcgt

SEQ ID NO: 812282 - DNA, 75 bp, synthetic construct
  source 1..75: mol_type = other DNA
gtcgttgacgtcgatggtgtgaatctcgctgaactgattaaccatgtcgctgaaaacggttattcactccgcgtg

SEQ ID NO: 812283 - DNA, 75 bp, synthetic construct
  source 1..75: mol_type = other DNA
cctctatcttacagtcttgtgcttaatattcttctactacatgctgctgccaccaggagacaccagtaaaatctt

SEQ ID NO: 812284 - DNA, 75 bp, synthetic construct
  source 1..75: mol_type = other DNA
gaccgtcgcctgtgcgctggcgctgtggtttgccggaatgaatgcctttgatgccatcggtcatagcttcgcgac

SEQ ID NO: 812285 - DNA, 75 bp, synthetic construct
  source 1..75: mol_type = other DNA
tctgcggcttaaacgcctggggctgtcaaaaacgttccgtcgtctggttttcacacttaacccacgttatggcgt

SEQ ID NO: 812286 - DNA, 75 bp, synthetic construct
  source 1..75: mol_type = other DNA
tctgcggcttaaacgcctggggctgtcaaaaacgttccgtcgtctggttatcacactgaacccacgttatggcgt

SEQ ID NO: 812287 - DNA, 75 bp, synthetic construct
  source 1..75: mol_type = other DNA
tctgcggcttaaacgcctggggctgtcaaaaacgttccgtcgtctggttatcacactcaaccgacgttatggcgt

SEQ ID NO: 812288 - DNA, 75 bp, synthetic construct
  source 1..75: mol_type = other DNA
gtctggttgtcacactaaaccaacgttatggcgtcagtctcattcatctggatgccagcgctgaatgcctgccgg

SEQ ID NO: 812289 - DNA, 75 bp, synthetic construct
  source 1..75: mol_type = other DNA
gttccgtcgtctggtcgtcacactcatccggcgttatggtgtcagtcccattcatctggatgccagtgccggata

SEQ ID NO: 812290 - DNA, 75 bp, synthetic construct
  source 1..75: mol_type = other DNA
ctgccctgtattgaacaggcccgggaggatgtccgtaccctgcgccagctacagcttctgcaccagaaccgatga

SEQ ID NO: 812291 - DNA, 75 bp, synthetic construct
  source 1..75: mol_type = other DNA
aatggggcagatggggcaggggatgccatgtatgaattggggaaatattatttaatcaacaatgatgatcctgaa

SEQ ID NO: 812292 - DNA, 75 bp, synthetic construct
  source 1..75: mol_type = other DNA
tgacgtcgatggtgttaatctcactgaactgattaacaaagtctctgaaaacggttattcactccgggtggtcga

SEQ ID NO: 812293 - DNA, 75 bp, synthetic construct
  source 1..75: mol_type = other DNA
tgacgtcgatggtgttaatctcattgaactgattaacaaagtccctgaaaacggttattcactccgggtggtcga

SEQ ID NO: 812294 - DNA, 75 bp, synthetic construct
  source 1..75: mol_type = other DNA
gtactgatgcgtggtcgtatccggttctgcggcttaaacgcctgggcctgtccggaacgttccgtcgtctggttg

SEQ ID NO: 812295 - DNA, 75 bp, synthetic construct
  source 1..75: mol_type = other DNA
cgttatggcgtcagtctcattcatctggatgccagcgctgaatgtctgccggaccagcccactttcgactggtaa

SEQ ID NO: 812296 - DNA, 75 bp, synthetic construct
  source 1..75: mol_type = other DNA
ttcccgttattcctctcacgagtgactggtttgacgtgcaagcccacgtattatcctcgctgcacaacagctctg

SEQ ID NO: 812297 - DNA, 75 bp, synthetic construct
  source 1..75: mol_type = other DNA
ggaataaaagtgatgtgggtcgatgcgacaagcattgaacaaattgccaatgcgttacgtcaactggccccctgg

SEQ ID NO: 812298 - DNA, 75 bp, synthetic construct
  source 1..75: mol_type = other DNA
acggcttctcttacaaaaaaccggctggaacgcctcataaattcagcgaagagaggcaggcgcaattcattgaat

SEQ ID NO: 812299 - DNA, 75 bp, synthetic construct
  source 1..75: mol_type = other DNA
acgtatcggcggcggtacagacgaaattatgatttacgtagcaggtcggcagatcctgaaagactatcagaacaa

SEQ ID NO: 812300 - DNA, 75 bp, synthetic construct
  source 1..75: mol_type = other DNA
actcctcgaagaatgcggtggaaaaccactttgatacctcctacgagctggaagccctgcttgagcagcgcgtga

SEQ ID NO: 812301 - DNA, 75 bp, synthetic construct
  source 1..75: mol_type = other DNA
tctctggtggcgtggactcttctgttactgcgatgcttctgcaccgtgctatcggtaaaaacctgacctgcgtat

SEQ ID NO: 812302 - DNA, 75 bp, synthetic construct
  source 1..75: mol_type = other DNA
tattgcagatgcggtgaaaggtgatatcgccattctggcggatagcggaatacgtaacgggcttgatgtcgtgcg

SEQ ID NO: 812303 - DNA, 75 bp, synthetic construct
  source 1..75: mol_type = other DNA
agactgatatcaccgatgggataaggctgtctgattggtattataaatataagaagtgtagtggcacagtaaatt

SEQ ID NO: 812304 - DNA, 75 bp, synthetic construct
  source 1..75: mol_type = other DNA
caatgagcgaacgcgtcacgcggatggtacaacgcgatcgcaatcacccatgcgtgattatctggtctctgggta

SEQ ID NO: 812305 - DNA, 75 bp, synthetic construct
  source 1..75: mol_type = other DNA
caagacgttaatccgttatcacgagggttatgatcacagctattattttgtctccagttttattggcgagcatat

SEQ ID NO: 812306 - DNA, 75 bp, synthetic construct
  source 1..75: mol_type = other DNA
actggaattgaagctgcgacaagctggattgagtaccgattttttacgcggcgattatgctgacaagttgttgga

SEQ ID NO: 812307 - DNA, 75 bp, synthetic construct
  source 1..75: mol_type = other DNA
aaggcaacagatattaccggggggataagacagtctgattggtattataaatataagaagttatcagagagagta

SEQ ID NO: 812308 - DNA, 75 bp, synthetic construct
  source 1..75: mol_type = other DNA
gggtaacagtcttggcggcttcgctaaatactggcaggcgtttcgtcagtacccccgtttacagggcggcttcgt

SEQ ID NO: 812309 - DNA, 75 bp, synthetic construct
  source 1..75: mol_type = other DNA
ggcgctttgcctggtttccggcaccagaagcggtaccggaaagctggctggagtgcgatcttcctgacgccgata

SEQ ID NO: 812310 - DNA, 75 bp, synthetic construct
  source 1..75: mol_type = other DNA
gcgtatcagtgccatcaaactggcagatgcacggttacgacgcgcccatctacaccaatgtgacctatcccattg

SEQ ID NO: 812311 - DNA, 75 bp, synthetic construct
  source 1..75: mol_type = other DNA
atggcagcatcagggaaaaaccttatttattagccggaaaacctaccggattgatggacacggcgagatggtcgt

SEQ ID NO: 812312 - DNA, 75 bp, synthetic construct
  source 1..75: mol_type = other DNA
tcagccgcgccgtgctggaagctgaagtccacatgagtggcgagttacacaatgatctacgggtaacggtttctt

SEQ ID NO: 812313 - DNA, 75 bp, synthetic construct
  source 1..75: mol_type = other DNA
acccgtggtcggcttacggcggtgattttggcgatacgccgaacgatcgccagttctgtatgaacggtctggtct

SEQ ID NO: 812314 - DNA, 75 bp, synthetic construct
  source 1..75: mol_type = other DNA
gtggaacagcccgtgatacctgtccgtaatatctattacatgcttacctatgcatggggttatttacaggaaatt

SEQ ID NO: 812315 - DNA, 75 bp, synthetic construct
  source 1..75: mol_type = other DNA
gcagaaaatgattaaaggcattattatgctaagttcgccagcggatgagtcattttttgcccaactcgataaata

SEQ ID NO: 812316 - DNA, 75 bp, synthetic construct
  source 1..75: mol_type = other DNA
cgggtaaatggttataagcaaagcctggctacgcataatattgcagtgcgtgatgaatggattgttgacggcggt

SEQ ID NO: 812317 - DNA, 75 bp, synthetic construct
  source 1..75: mol_type = other DNA
agaggaaggtttcgacgtgatattgcagacgtcgcacaatccggcagaagacttacaaaaatgtgaaagcaaaat

SEQ ID NO: 812318 - DNA, 75 bp, synthetic construct
  source 1..75: mol_type = other DNA
tgaatctgccgcgtctgcaaccggtaaagcgcacgttatcaaatctcaccacaacgttggcggcctgccgaaaga

SEQ ID NO: 812319 - DNA, 75 bp, synthetic construct
  source 1..75: mol_type = other DNA
agaagcacaaattcgtgacttcaatccaagcggcattattctttccggcggcccggaaagtaccaccgaagaaaa

SEQ ID NO: 812320 - DNA, 75 bp, synthetic construct
  source 1..75: mol_type = other DNA
accgttgcctgaggcagtgtttgctactgacagcctgaaattaatgagcatttatcgtgcggcagcagagaaaaa

SEQ ID NO: 812321 - DNA, 75 bp, synthetic construct
  source 1..75: mol_type = other DNA
accgcgacagagtcttatcaaaacgctgcgttttctaatggcttcgtcaacggctatctgacgatggatacgctg

SEQ ID NO: 812322 - DNA, 75 bp, synthetic construct
  source 1..75: mol_type = other DNA
gtctggcgtggttaatgccaacagtggtgatggtggttctggccattatctgggatcgcgcggcaggtcgtcagg

SEQ ID NO: 812323 - DNA, 75 bp, synthetic construct
  source 1..75: mol_type = other DNA
gcatgcttacgttcagcatacctttggcggcggcggtagcttcctgctggcggcgttaatcttcatcgcctgcct

SEQ ID NO: 812324 - DNA, 75 bp, synthetic construct
  source 1..75: mol_type = other DNA
aaaactacggcgggtaatccgtttttctctgaagttttgcatgccatcaccgccaaagctgaagaagaaggtttc

SEQ ID NO: 812325 - DNA, 75 bp, synthetic construct
  source 1..75: mol_type = other DNA
accgcgactgaggcttatcaaaacgctgcgttttctaacggctttgttaatggctatctgacgatggatacgctg

SEQ ID NO: 812326 - DNA, 75 bp, synthetic construct
  source 1..75: mol_type = other DNA
aatccgcgaacggcgcggcaattctgcatgcttacgttcagcacacttttggcggcggcggtagtttcttactgg

SEQ ID NO: 812327 - DNA, 75 bp, synthetic construct
  source 1..75: mol_type = other DNA
gaatatatggagcttaaccggttatggctgcatgactgtatgccgagaaactccgaatcaagggcaatcagttac

SEQ ID NO: 812328 - DNA, 75 bp, synthetic construct
  source 1..75: mol_type = other DNA
gcgatgaacgcgattaagcgcggaggtcaacgaggcgagtatttgcgggctaataaggaacgggcagtggtacac

SEQ ID NO: 812329 - DNA, 75 bp, synthetic construct
  source 1..75: mol_type = other DNA
gtgccgacattgtaacaagctactggcacgagccagcttcagttatctggaagttaaatgtccgcgctgtaaaac

SEQ ID NO: 812330 - DNA, 75 bp, synthetic construct
  source 1..75: mol_type = other DNA
cgcgcatttgccgatatcgtcaaaattggtcgtacccacttgcaggacgccacgccgctgacactgggccaggag

SEQ ID NO: 812331 - DNA, 75 bp, synthetic construct
  source 1..75: mol_type = other DNA
acaaacactgcgcggtgggtatcgaaccgaatcgtgaacgaattcatcagttgctcaacgaatcattgatgttgg

SEQ ID NO: 812332 - DNA, 75 bp, synthetic construct
  source 1..75: mol_type = other DNA
tgaacttgatggcgagtggtatcacgagatttgcaggaatgccattaaacgaggcggacagcgaggtgaacatct

SEQ ID NO: 812333 - DNA, 75 bp, synthetic construct
  source 1..75: mol_type = other DNA
atgctcccgaacagcagacaaccgactctccaccaccgtttactgcccttaccgacatacgttcgttgcagtacc

SEQ ID NO: 812334 - DNA, 75 bp, synthetic construct
  source 1..75: mol_type = other DNA
tcgtctggttgtcacccttagccggggttatggcgtccgtctcattcatctggttgccagcgccgaatttctgcc

SEQ ID NO: 812335 - DNA, 75 bp, synthetic construct
  source 1..75: mol_type = other DNA
tcgtctggttgtcacccttagccggtgttatggcgtccgtctcattcatctggttgccagcgccgtatttctgcc

SEQ ID NO: 812336 - DNA, 75 bp, synthetic construct
  source 1..75: mol_type = other DNA
gaacatggggcgcattgtcgttgacgtcgatggtgttaatctcgctaaactgattaacgtggcctgcgacaatgg

SEQ ID NO: 812337 - DNA, 75 bp, synthetic construct
  source 1..75: mol_type = other DNA
cagtctcattcatctggatgccagcgctgaatgcctgccgggtttacccactttcaacgtaagcgtgcagcaaga

SEQ ID NO: 812338 - DNA, 75 bp, synthetic construct
  source 1..75: mol_type = other DNA
gaacatggggcgcattgtcgttgacgtcgatggtattgagctcgctgaactgattaacatggtctgcgataacgg

SEQ ID NO: 812339 - DNA, 75 bp, synthetic construct
  source 1..75: mol_type = other DNA
aaaaaagcgcataaagaagggctgaccttaaaagcggcggcccttgcgctggggtatcttagcgaagccgagttt

SEQ ID NO: 812340 - DNA, 75 bp, synthetic construct
  source 1..75: mol_type = other DNA
gcgcatggtgtgacacctgacacgcttaaacaagcgaattatataaaaaccaaagggattgttgatgatcacgaa

SEQ ID NO: 812341 - DNA, 75 bp, synthetic construct
  source 1..75: mol_type = other DNA
gctatgatgaggtggaagttcgagggcaattggctgacagattgccgccattcgctattccggaatccttggtgg

SEQ ID NO: 812342 - DNA, 75 bp, synthetic construct
  source 1..75: mol_type = other DNA
acgaattgaaaccggagagatcgagcagcgcctgctggagtgctccggcattatcgaggcggtagtggttcctta

SEQ ID NO: 812343 - DNA, 75 bp, synthetic construct
  source 1..75: mol_type = other DNA
ggcgcaactgctgctctcacctcgggcgatcgatagattagcgcggggcaaccgggtggatcgcggtgtaccgtc

SEQ ID NO: 812344 - DNA, 75 bp, synthetic construct
  source 1..75: mol_type = other DNA
cgacacgcgactgcgcgtgcccagtgccgataactaccaactgcggctggccgctgagggggagggggcaggaaa

SEQ ID NO: 812345 - DNA, 75 bp, synthetic construct
  source 1..75: mol_type = other DNA
tggacatcgccagcagtgttgtcgaacaactgcctggttttcatactgattcggtacctttcctttatcaggatt

SEQ ID NO: 812346 - DNA, 75 bp, synthetic construct
  source 1..75: mol_type = other DNA
atgattgaacagatcaacatcgcccttgagcataaagggtccggtaacttttcagcgtgggttattgaagcctgc

SEQ ID NO: 812347 - DNA, 75 bp, synthetic construct
  source 1..75: mol_type = other DNA
tccaaaccagatgattgaacaaattaacatcgctcttgatctgaaaggttcaggaaacttttcagcgtgggttat

SEQ ID NO: 812348 - DNA, 75 bp, synthetic construct
  source 1..75: mol_type = other DNA
actaagcgtgcagcggcgaaagttaacgaagatttaggtctgctttcagaagagaaagcgagagccattcgccag

SEQ ID NO: 812349 - DNA, 75 bp, synthetic construct
  source 1..75: mol_type = other DNA
gcagttaccgctaacaccaagtcaacaggggtttttattccattccttaaaggataagaaaaggagtaactacca

SEQ ID NO: 812350 - DNA, 75 bp, synthetic construct
  source 1..75: mol_type = other DNA
gaacaacaacccgcaacatccgtttccccaatcacatgattgaacagatcaatatcgcccttgaacataaaggtt

SEQ ID NO: 812351 - DNA, 75 bp, synthetic construct
  source 1..75: mol_type = other DNA
tgaagcctgcaggagaaggctggcaacagatgcaacgcatctgcgtacggccagcatgacaaataacgagaaatg

SEQ ID NO: 812352 - DNA, 75 bp, synthetic construct
  source 1..75: mol_type = other DNA
tcgtctggttgtcacccttagccggagttatggcgtccgtctcattcatctggttgccagcgccggatttctgcc

SEQ ID NO: 812353 - DNA, 75 bp, synthetic construct
  source 1..75: mol_type = other DNA
cgttccgccgtctggttgtcacacttacccgacgttatggcgtcagtctcattcatctggatgccagcgctgaat

SEQ ID NO: 812354 - DNA, 75 bp, synthetic construct
  source 1..75: mol_type = other DNA
aagcctggcaccattgagcgggcaagaagaaagtcatggatgcagggaaaagaataccgccattacgctgtagaa

SEQ ID NO: 812355 - DNA, 75 bp, synthetic construct
  source 1..75: mol_type = other DNA
cggttattcactccgcgtggtcgataaatccaaccaacagtcaaccagtacaccaccaccgtttacggcccttgc

SEQ ID NO: 812356 - DNA, 75 bp, synthetic construct
  source 1..75: mol_type = other DNA
gaatctgaccggacctcagcagactgcacgccaccgtttgctgcccttaccggcatacgctgcagtaccgcgcat

SEQ ID NO: 812357 - DNA, 75 bp, synthetic construct
  source 1..75: mol_type = other DNA
tccgaccaacagtcaacctgcacaccaccaccgtttacaatccttgccggcatacgctgcagtaccgcacatatc

SEQ ID NO: 812358 - DNA, 75 bp, synthetic construct
  source 1..75: mol_type = other DNA
tgattaacgtggtctgcgataatggctactcccttcgtgttgttgatgaatctgaccgggcctcaacagactgca

SEQ ID NO: 812359 - DNA, 75 bp, synthetic construct
  source 1..75: mol_type = other DNA
caaccctttcctgcatacgatgcagtaccgcacatatcacggaaacggacaacgcctggttgtactcgctgtcac

SEQ ID NO: 812360 - DNA, 75 bp, synthetic construct
  source 1..75: mol_type = other DNA
caaccctttccagcatacgttgcagtaccgcacatatcacggaaacggacaacgcctggttgtactcgctgtcac

SEQ ID NO: 812361 - DNA, 75 bp, synthetic construct
  source 1..75: mol_type = other DNA
tgacgtcgatggtgttaatctcagtgaactgattaacaaagtcgctgaaaacggttattcactccgggtggttga

SEQ ID NO: 812362 - DNA, 75 bp, synthetic construct
  source 1..75: mol_type = other DNA
caacccttgccggcatacgctgcagtaccgcacatatcacggaaacggacaacgcctggttgtactcgctgtcac

SEQ ID NO: 812363 - DNA, 75 bp, synthetic construct
  source 1..75: mol_type = other DNA
caacccttgcccgcatacggtgcagtaccgcacatatcacggaaacggacaacgcctggttgtactcgctgtcac

SEQ ID NO: 812364 - DNA, 75 bp, synthetic construct
  source 1..75: mol_type = other DNA
caacccttcccggcatacggtgcagtaccgcacatatcacggaaacggacaacgcctggttgtactcgctgtcac

SEQ ID NO: 812365 - DNA, 75 bp, synthetic construct
  source 1..75: mol_type = other DNA
tgacgttggtgaatcagaatggattcatttcacaggtagcggctatctgttacgtaccggtgcgtggtcataccc

SEQ ID NO: 812366 - DNA, 75 bp, synthetic construct
  source 1..75: mol_type = other DNA
tgattaaccatgtcgctgaaaacggttattcactccgcgtggtggaggaatccgaccaacagtcaacctgcacac

SEQ ID NO: 812367 - DNA, 75 bp, synthetic construct
  source 1..75: mol_type = other DNA
atgaaactgaccctgacgctggaagctgactgcattaacgtgcaggcactgaacatggggcgcattgtcgttgac

SEQ ID NO: 812368 - DNA, 75 bp, synthetic construct
  source 1..75: mol_type = other DNA
cgaatctgctgcttctgcaaccggtaaagcacacgtcataaaatctcaccacaacgtgggtgggctgccgaaaga

SEQ ID NO: 812369 - DNA, 75 bp, synthetic construct
  source 1..75: mol_type = other DNA
tcgtctggttgtcacacttagccggcgttatggcgtccgtctcattcatctggttgccagcgccgcatttctgcc

SEQ ID NO: 812370 - DNA, 75 bp, synthetic construct
  source 1..75: mol_type = other DNA
cttcggtgaatcagaatggattcattttaccggtaccggttatctgttacgtaccgatacgtggtcatacccggt

SEQ ID NO: 812371 - DNA, 75 bp, synthetic construct
  source 1..75: mol_type = other DNA
cggcttaaacgcctggggctgtcaaaaacgttccgtcgtctggttgtcacactcatccaacgttatggcgtcagt

SEQ ID NO: 812372 - DNA, 75 bp, synthetic construct
  source 1..75: mol_type = other DNA
ttcacaggtagcggatatctgttacgtaccgatgcgtggacatacccggttttgcggcttaagcgcctgggcctg

SEQ ID NO: 812373 - DNA, 75 bp, synthetic construct
  source 1..75: mol_type = other DNA
ccactcccttcgtgttgttgatgcatctgaccgggcctcaacagactgcatgccaccatttgctgtcctgaccgg

SEQ ID NO: 812374 - DNA, 75 bp, synthetic construct
  source 1..75: mol_type = other DNA
ccgacagcattaacgtgcaggcgctgaacatggggcgcattgtcgttgacgttgatggtgtcactctcgctgaac

SEQ ID NO: 812375 - DNA, 75 bp, synthetic construct
  source 1..75: mol_type = other DNA
tgtagcccgtatccgcgagcaggtaggcgacgataaagtgatcctcggcctctctggtggcgtggattcctccgt

SEQ ID NO: 812376 - DNA, 75 bp, synthetic construct
  source 1..75: mol_type = other DNA
tggggctgtcaaaaacgttccgtcgtctggtcgtcacactcatccggcgttatggcgtcagtctcattcatctgg

SEQ ID NO: 812377 - DNA, 75 bp, synthetic construct
  source 1..75: mol_type = other DNA
cggtatggcgtcagtctcattcatctggatgccagcgctgaatgtctgccggacctgcccactttcgactggtaa

SEQ ID NO: 812378 - DNA, 75 bp, synthetic construct
  source 1..75: mol_type = other DNA
ttatttttctgattataaatagaatattttatgagataaaatcatcaaaggataaaatagaaaaaagaaaaacat

SEQ ID NO: 812379 - DNA, 75 bp, synthetic construct
  source 1..75: mol_type = other DNA
aagatggtgagtgctctgattgatgaaaagcagaaccagaaaaatcagattgctgcgcagattagtgaaaaaaat

SEQ ID NO: 812380 - DNA, 75 bp, synthetic construct
  source 1..75: mol_type = other DNA
ccgtcgccgccaggttgtgaatatgatttccactgagcagcagcgtaaatctgccgccagtaactattccactga

SEQ ID NO: 812381 - DNA, 75 bp, synthetic construct
  source 1..75: mol_type = other DNA
atagggcagcttattggcagaaccgctgcgtcggtacgcacaaaagcgcgcgagctgaaaatctgtatgtatctg

SEQ ID NO: 812382 - DNA, 75 bp, synthetic construct
  source 1..75: mol_type = other DNA
caggaagttcgctcccccaaaaatcctcccaataatctgtacattggtgaagacaggcaacctgcatcagcacct

SEQ ID NO: 812383 - DNA, 75 bp, synthetic construct
  source 1..75: mol_type = other DNA
atacaattttgtatcatgacaatgccccggcttcagttcggtacaggccatcgcgtagaggtgagttaaattctc

SEQ ID NO: 812384 - DNA, 75 bp, synthetic construct
  source 1..75: mol_type = other DNA
aggcggttttattctcggcaatctcgatacccacgatcgcatcatgcgcctgctggcaagctacagccaatgtac

SEQ ID NO: 812385 - DNA, 75 bp, synthetic construct
  source 1..75: mol_type = other DNA
gtggatgcgtcgtggcgctgcccttcgctgcgacgctgtctggtcgcctcatcttttgaagcagacgccgatgat

SEQ ID NO: 812386 - DNA, 75 bp, synthetic construct
  source 1..75: mol_type = other DNA
ccgaaggagagctcaaaggaggaaaagtcagtggtggaactgtccggtctgaggggcgtctttccacgggtgagt

SEQ ID NO: 812387 - DNA, 75 bp, synthetic construct
  source 1..75: mol_type = other DNA
ataaaggcttcgtcctgcttgaaattctggcagggcttattgtcattggtattgccacgccaatgatttattcag

SEQ ID NO: 812388 - DNA, 75 bp, synthetic construct
  source 1..75: mol_type = other DNA
gcgttcgtttctgatgatttcgctgcctcttttgaggccgccgcatcccgggctgaggtggcagcttctgacgcc

SEQ ID NO: 812389 - DNA, 75 bp, synthetic construct
  source 1..75: mol_type = other DNA
gtggcttcgccagccttcgttgtggctgttgaagcggatgatgcggcgctttctgccgattttccggcggcggtg

SEQ ID NO: 812390 - DNA, 75 bp, synthetic construct
  source 1..75: mol_type = other DNA
gctgttgaagcagacgatgcggcgctttctgccgattttccggcggcggtggcactggctgaggcctgcccggca

SEQ ID NO: 812391 - DNA, 75 bp, synthetic construct
  source 1..75: mol_type = other DNA
cgaaaagtatcgggtcgatatagttttaatcccctcccccggcgagccaaagcaggaattgcgtcaattatggtg

SEQ ID NO: 812392 - DNA, 75 bp, synthetic construct
  source 1..75: mol_type = other DNA
gtattgagttccgctacgagaaaatcacctggacttacaaagacggcaacatcattcattccgactcgtggaatg

SEQ ID NO: 812393 - DNA, 75 bp, synthetic construct
  source 1..75: mol_type = other DNA
accggtacccgtactcacaagccctttacgtttaccaaagaaatcgatgcgtccagcccgtatctctacaaggcc

SEQ ID NO: 812394 - DNA, 75 bp, synthetic construct
  source 1..75: mol_type = other DNA
aaacctttttacgcgcccgcaccgggatataagagtaaccccatgctggatgagctcgccgaactgtatcggact

SEQ ID NO: 812395 - DNA, 75 bp, synthetic construct
  source 1..75: mol_type = other DNA
ataaatatgtttccttgacagagttaagttctgaaataaaattcaataacgatactttttctcgttggttcgtct

SEQ ID NO: 812396 - DNA, 75 bp, synthetic construct
  source 1..75: mol_type = other DNA
ggatcgaactgcgctacgaaaaaatcacctggacctacaaagacggcaacatcattcattccgattcatggaacg

SEQ ID NO: 812397 - DNA, 75 bp, synthetic construct
  source 1..75: mol_type = other DNA
tatgagaagcataaccaccttgagcaggtggagctgcgctacgagaaaatcacctggacttacaaggacggcaac

SEQ ID NO: 812398 - DNA, 75 bp, synthetic construct
  source 1..75: mol_type = other DNA
attgattcgtctgagtattgcgattgtttttatgtggattgggttattaaagtttgtcccttacgaggcagacag

SEQ ID NO: 812399 - DNA, 75 bp, synthetic construct
  source 1..75: mol_type = other DNA
gaagttcatttttttggtaacgttacatccgtaacctgcgatgttgctgtaaataatggcggtagtatgacggat

SEQ ID NO: 812400 - DNA, 75 bp, synthetic construct
  source 1..75: mol_type = other DNA
ggtgtgttatcaaaaatgaaaggatataaacctaaggatgccatatacattccttctggtgggctatacctcttt

SEQ ID NO: 812401 - DNA, 75 bp, synthetic construct
  source 1..75: mol_type = other DNA
acagcagcggggcaactggctcaacatgaagacacttctacggtgcaacttagcggcgatctgtttagcgggcgc

SEQ ID NO: 812402 - DNA, 75 bp, synthetic construct
  source 1..75: mol_type = other DNA
cagcgtggcgtggcagaaagggagtgatgattttgcccagacggcagggtttttgtcgatgacagtgaaatggta

SEQ ID NO: 812403 - DNA, 75 bp, synthetic construct
  source 1..75: mol_type = other DNA
ggctggcgcagtcatgataatggccgattctgcgcgggaaatccttaaacaacgaagtcatggagcgtgttcaaa

SEQ ID NO: 812404 - DNA, 75 bp, synthetic construct
  source 1..75: mol_type = other DNA
cccgcagaaccgtgagcttcatcgtatcgcggatgccctgcaggcggtgcagaaacgtaacttctggcaactgca

SEQ ID NO: 812405 - DNA, 75 bp, synthetic construct
  source 1..75: mol_type = other DNA
ggcggacgatgcggcagccgtttttgaggattctgcgctggtttccgacgctttcgcgttcgtctcggatgtctt

SEQ ID NO: 812406 - DNA, 75 bp, synthetic construct
  source 1..75: mol_type = other DNA
tgccgtctcagaagacttagcgttcgtctcggacgtttttgccgccttcgcggaatttgctgccgccgttgccga

SEQ ID NO: 812407 - DNA, 75 bp, synthetic construct
  source 1..75: mol_type = other DNA
ttctgacgctttcgtcgtcgcagtggatgcagaagtggctgctgatttttgtgacgctgcagcattcgtttctga

SEQ ID NO: 812408 - DNA, 75 bp, synthetic construct
  source 1..75: mol_type = other DNA
ggtttccgacgctttcgcattcgtttcggatgtcttcgctgcggaagcagacctcgctgctgcgctggcctgtac

SEQ ID NO: 812409 - DNA, 75 bp, synthetic construct
  source 1..75: mol_type = other DNA
ccttatttatccggtgctggtcgcctggtattgaaagatactctgatgctggcaggtgctgtcatgataatggca

SEQ ID NO: 812410 - DNA, 75 bp, synthetic construct
  source 1..75: mol_type = other DNA
tctgatgattttgccgcctcttttgaagctgacgcatcccgggctgaggtggcagcttctgacgctttcgtggtc

SEQ ID NO: 812411 - DNA, 75 bp, synthetic construct
  source 1..75: mol_type = other DNA
tttctgccgattttccggcggcggtggcactgactgctgcctcctctgccttaatggacgcctcacgggccgatg

SEQ ID NO: 812412 - DNA, 75 bp, synthetic construct
  source 1..75: mol_type = other DNA
cgcctcttttgaagccgccgcatcccgggctgaggtggcagcttctgacgctttcgtggtcgcggtggatgcaga

SEQ ID NO: 812413 - DNA, 75 bp, synthetic construct
  source 1..75: mol_type = other DNA
aatgacgtcggtcttactgcctgggactgtgtgataatcaaccaaatcattggttttattggctttcaggcgcgg

SEQ ID NO: 812414 - DNA, 75 bp, synthetic construct
  source 1..75: mol_type = other DNA
agaatttgctgccgccgttgccgaggaagctgcgctgctggcgctcgaggctgcgttcgtttctgatgattttgc

SEQ ID NO: 812415 - DNA, 75 bp, synthetic construct
  source 1..75: mol_type = other DNA
agcagacgcagatgatgccgatgacgccgccgaactggcggacgatgcggcagccgtttttgaggattctgcgct

SEQ ID NO: 812416 - DNA, 75 bp, synthetic construct
  source 1..75: mol_type = other DNA
tcagatgtcttcgcagcagaagcagacctcgctgctgcgctggcctgtacagaggcttcaaaagcattcgttgtg

SEQ ID NO: 812417 - DNA, 75 bp, synthetic construct
  source 1..75: mol_type = other DNA
gccgccgaactggcggacgatgcagctgccatttttgaggattctgcactggtttccgaggctttcgcgttcgtt

SEQ ID NO: 812418 - DNA, 75 bp, synthetic construct
  source 1..75: mol_type = other DNA
ggcactggctgaggcctgcccggcacttgttgacgcggcactggcagatgacgcagccgctgtttttgagcctgc

SEQ ID NO: 812419 - DNA, 75 bp, synthetic construct
  source 1..75: mol_type = other DNA
ggcactggctgaggcctgcccggcatttgttgacgcggcgctggcagatgaggcagccgctgtttttgagtctgc

SEQ ID NO: 812420 - DNA, 75 bp, synthetic construct
  source 1..75: mol_type = other DNA
cgggccgaggtcgcagcttctgatgccttcgtggtcgcggtggatgcagatgtggctgctgattgtagtgacgct

SEQ ID NO: 812421 - DNA, 75 bp, synthetic construct
  source 1..75: mol_type = other DNA
tgctgcctcctctgccttaatggacgcctcacgggccgatgatgcagctgctgtctcagagtctgccgcagctga

SEQ ID NO: 812422 - DNA, 75 bp, synthetic construct
  source 1..75: mol_type = other DNA
gaggactctgcagcggcagcactttttgatgcctcagcggcctttgctgatgccgttcctgcgccggaagacgct

SEQ ID NO: 812423 - DNA, 75 bp, synthetic construct
  source 1..75: mol_type = other DNA
ctgcccgttttgccgctgtctcggcgcgcgttgccgcggattccgccgtacttttgctctgtgctgccgccgtcg

SEQ ID NO: 812424 - DNA, 75 bp, synthetic construct
  source 1..75: mol_type = other DNA
gtgctgttagtcgcactgctgagctgtactatcccctttttcgtcgtgctcgcatcctcaagcgccacggcggat

SEQ ID NO: 812425 - DNA, 75 bp, synthetic construct
  source 1..75: mol_type = other DNA
gccgcatctctggctgaagtggcggcttctgacgctttcgtcgtcgcagtggatgcagaagtggctgctgatttt

SEQ ID NO: 812426 - DNA, 75 bp, synthetic construct
  source 1..75: mol_type = other DNA
gctttttgaggactctgcagcggcagcactttttgatgcttcagtagcctttgttgatgccgttcctgcgctgga

SEQ ID NO: 812427 - DNA, 75 bp, synthetic construct
  source 1..75: mol_type = other DNA
ttttgatgactctgcagcagcagcactttttgctgcttcacgggcctttgtcgatgccgttcctgcgctggaaga

SEQ ID NO: 812428 - DNA, 75 bp, synthetic construct
  source 1..75: mol_type = other DNA
ctggcagacgacgcagccgctgtttttgagcctgccgcagctgaggcactctgtcccgctgccgtttcagaagac

SEQ ID NO: 812429 - DNA, 75 bp, synthetic construct
  source 1..75: mol_type = other DNA
cgtcgtggcgttcggcgataactttaatgatatcagtatgctggaagccgctggtacaggcgtggcgatgggcaa

SEQ ID NO: 812430 - DNA, 75 bp, synthetic construct
  source 1..75: mol_type = other DNA
agcaaaggtaaacgtttgacgaaatgggttgaggcgcaaggttggtcgatggaaaacgtcgtggcattcggcgat

SEQ ID NO: 812431 - DNA, 75 bp, synthetic construct
  source 1..75: mol_type = other DNA
attgcagcattttggtaagcatgtcgaacatgaactgggactggagtgtgaatggtcctggcacgatcaggttga

SEQ ID NO: 812432 - DNA, 75 bp, synthetic construct
  source 1..75: mol_type = other DNA
tgagaaacttgagaacattgagcgtgagcgtcagcgtctgaagtcagcctgggtgacgccatcagcagaagtcgc

SEQ ID NO: 812433 - DNA, 75 bp, synthetic construct
  source 1..75: mol_type = other DNA
atgttttatccggatccttttgacgtcatcatcattggtgggggtcatgcaggcaccgaggccgcgatggccgcg

SEQ ID NO: 812434 - DNA, 75 bp, synthetic construct
  source 1..75: mol_type = other DNA
atgaccacacgcgtgattgctctcgacttagacggcaccttattgaccccgaaaaagaccctgcttccttcatcg

SEQ ID NO: 812435 - DNA, 75 bp, synthetic construct
  source 1..75: mol_type = other DNA
cgaaccagagaaagcagacaacaagacgattaaagactcagagtcaaaatcggttgaagacgaagatattattcg

SEQ ID NO: 812436 - DNA, 75 bp, synthetic construct
  source 1..75: mol_type = other DNA
cgaaccagagaaagcagacaataagacgatgaaagactgagagtcaaaatcggttgaagacgaagatattattcg

SEQ ID NO: 812437 - DNA, 75 bp, synthetic construct
  source 1..75: mol_type = other DNA
aaaagatacgttacctaaacttataaaaaaaagatataactataataaatataaaaacattttggtggaagataa

SEQ ID NO: 812438 - DNA, 75 bp, synthetic construct
  source 1..75: mol_type = other DNA
attcaggctgcaccgggggtgcgggtaaacaacaaaaatgaactggttattcccttcagtaaccgtaacggcgcg

SEQ ID NO: 812439 - DNA, 75 bp, synthetic construct
  source 1..75: mol_type = other DNA
atgaacgaagttgtaaattcaggcgtaatgaacgttgcgtctttggttgtatcggtggtaattctcgctattggg

SEQ ID NO: 812440 - DNA, 75 bp, synthetic construct
  source 1..75: mol_type = other DNA
cgaaccagagaaagcagacaacaagacgatcaaagacttagagtcaaaatcggttgaagacgaagatattattcg

SEQ ID NO: 812441 - DNA, 75 bp, synthetic construct
  source 1..75: mol_type = other DNA
ttgactgaaatcggtcgtgaactgggcctggtggatgacgaacgttgggcgcgctttaacgagaaacttgagaat

SEQ ID NO: 812442 - DNA, 75 bp, synthetic construct
  source 1..75: mol_type = other DNA
ctttgtggttacgtctccattatttatgttgccaacccgaaaagaagcatcactgcggataatgtttattggtaa

SEQ ID NO: 812443 - DNA, 75 bp, synthetic construct
  source 1..75: mol_type = other DNA
ttgtgcgcccgtttgaacgagcctgtattgtcgcagaccgaaattcggctgagtttgaccggatatgcgaatatt

SEQ ID NO: 812444 - DNA, 75 bp, synthetic construct
  source 1..75: mol_type = other DNA
tgattttatagataccgggcataggcgggaaaaccagaatgacaaattcagaatggccagactggtagaaaaagg

SEQ ID NO: 812445 - DNA, 75 bp, synthetic construct
  source 1..75: mol_type = other DNA
aatagtaagctacaaggtaagcacaacgatggtttatgggtaactgacttagccgagtcttgtgaggcaatactt

SEQ ID NO: 812446 - DNA, 75 bp, synthetic construct
  source 1..75: mol_type = other DNA
agattctttccaccaatggacgcatgcctgaggttcttctcgtgcgtgatatgaagctttttgctggtaacgcca

SEQ ID NO: 812447 - DNA, 75 bp, synthetic construct
  source 1..75: mol_type = other DNA
gtgatgcatatcatcggtgacgttgcaggtcgtgactgcgtactagtcgatgatatgatcgacactggcggtacg

SEQ ID NO: 812448 - DNA, 75 bp, synthetic construct
  source 1..75: mol_type = other DNA
agctccatcccggcattgctgaagaaactggaagagcacggcatgacccaactgggcgaaaatcatgacattacg

SEQ ID NO: 812449 - DNA, 75 bp, synthetic construct
  source 1..75: mol_type = other DNA
agaaggtattttgctgacgcttctcgaagatggcccgaaagccctgaaagagccagaaaactacgatgtgcgcgc

SEQ ID NO: 812450 - DNA, 75 bp, synthetic construct
  source 1..75: mol_type = other DNA
aaacccggcttatgaaacgctgatgaacgccgtgaaactggttcgcgaacagaaagtgactttcctgctggcggt

SEQ ID NO: 812451 - DNA, 75 bp, synthetic construct
  source 1..75: mol_type = other DNA
aggaattataaatatcgagtttttcgacaaaagacttttattgttctattttccactccgatttcaatatcattt

SEQ ID NO: 812452 - DNA, 75 bp, synthetic construct
  source 1..75: mol_type = other DNA
tatctggactacattacccagcgtcatgacggacatgacgcagtgatggcgtttctcgatatttttaaccatcgc

SEQ ID NO: 812453 - DNA, 75 bp, synthetic construct
  source 1..75: mol_type = other DNA
atttagcatcctattacaaatcatgcgacgttttttgtttgccatctattcatgaatctgaagcatttggtgtag

SEQ ID NO: 812454 - DNA, 75 bp, synthetic construct
  source 1..75: mol_type = other DNA
taattatgagcatattgagtttagctttaattcatttagtaaggattactttcgtgaacaaaatagtgatatata

SEQ ID NO: 812455 - DNA, 75 bp, synthetic construct
  source 1..75: mol_type = other DNA
gctgaatcatctcgacagcaaaagccctgacagcgaactgacccgtacagaactcttcgccctgcgcagacaaat

SEQ ID NO: 812456 - DNA, 75 bp, synthetic construct
  source 1..75: mol_type = other DNA
tccgcgtgaaatcgagttgcgccagaaacaatacgagtactatcgtgatttactgttcagtttcccgaaacctga

SEQ ID NO: 812457 - DNA, 75 bp, synthetic construct
  source 1..75: mol_type = other DNA
aacaccgtcgtgttgaactgatcaccaccgatggttttcttcatcccaacaaagtgcttaaagaacgtggtctga

SEQ ID NO: 812458 - DNA, 75 bp, synthetic construct
  source 1..75: mol_type = other DNA
aaacgtggcagtcatcgtaaaggcgagtggcttcgcttatctttacttaataaacttcctgctgtcgttccagct

SEQ ID NO: 812459 - DNA, 75 bp, synthetic construct
  source 1..75: mol_type = other DNA
agatcgttgtgagtaaacattcccgtaatggaagcgttaacgaagcgaagctctcacataatcagcttcgttctc

SEQ ID NO: 812460 - DNA, 75 bp, synthetic construct
  source 1..75: mol_type = other DNA
taaacttcctttggtattaccagagattaataaaagtgcatgggtagagcttggtcgcctttcacaagatttaaa

SEQ ID NO: 812461 - DNA, 75 bp, synthetic construct
  source 1..75: mol_type = other DNA
gaaatattccctattatggtgcgtcaggcattgttgattacgtaaaagattatatttttgatgatgacctgttat

SEQ ID NO: 812462 - DNA, 75 bp, synthetic construct
  source 1..75: mol_type = other DNA
gaaatcgagttgcgccagaaacaatacgagtactaccgtgatttactgttcagtttcccgaaaccagaaaccgcc

SEQ ID NO: 812463 - DNA, 75 bp, synthetic construct
  source 1..75: mol_type = other DNA
aattcctgtcccttctatggcggtacaggaacgtatagtatccattctcgataaatttgataccctcactaactc

SEQ ID NO: 812464 - DNA, 75 bp, synthetic construct
  source 1..75: mol_type = other DNA
tctctcgttagaagaagttgccgagatctatttacctttgtcacgtttgctgaacttctatataagctcgaatct

SEQ ID NO: 812465 - DNA, 75 bp, synthetic construct
  source 1..75: mol_type = other DNA
attaaatgtcttacagagcggtatggattacccacacgatccgcatcatgtttttgtttctgattttgtcgattt

SEQ ID NO: 812466 - DNA, 75 bp, synthetic construct
  source 1..75: mol_type = other DNA
ccgaaggtctcccgcgtgaaatcgagttacgccagaaacaatacgagtactatcgtgatttactgttcagtttcc

SEQ ID NO: 812467 - DNA, 75 bp, synthetic construct
  source 1..75: mol_type = other DNA
atgcctggagtgaatcaccgagaaatatgattgccatcgctaaagggatttctatgcacgcacactaccacgcca

SEQ ID NO: 812468 - DNA, 75 bp, synthetic construct
  source 1..75: mol_type = other DNA
tacaaccgctgagctccgggaaggacatgaggctgtcacgatggcgacagcgcaggactggcaacactttgagga

SEQ ID NO: 812469 - DNA, 75 bp, synthetic construct
  source 1..75: mol_type = other DNA
cataatcattccagaaagagtttttaaaaatggagaagaaaccgaaaaattatataattttgtaaaggagcaaat

SEQ ID NO: 812470 - DNA, 75 bp, synthetic construct
  source 1..75: mol_type = other DNA
tctcgccccaaaagaccctgattatgtagaaagagcaaaatttctttccattattacatttacactaatagctat

SEQ ID NO: 812471 - DNA, 75 bp, synthetic construct
  source 1..75: mol_type = other DNA
ttatccctgccggtgctaacgttgttgctcgtcgctgctcatggcctcattctttctgtatagagcttaaaaaga

SEQ ID NO: 812472 - DNA, 75 bp, synthetic construct
  source 1..75: mol_type = other DNA
tggcgattatttatcaggaactgcatctcgtgccggaaatgaccgtcgcggaaaacatctatctcggccagctgc

SEQ ID NO: 812473 - DNA, 75 bp, synthetic construct
  source 1..75: mol_type = other DNA
ccatcgacaatatatccggtaacgtacgccgagcctttatcgggctgtacgaagagaagcagctctctgataacc

SEQ ID NO: 812474 - DNA, 75 bp, synthetic construct
  source 1..75: mol_type = other DNA
cgccaggcgcgtgtggatgccatcatgccgacgtttattgagacggtgcgctactggcagaaacagagcggagta

SEQ ID NO: 812475 - DNA, 75 bp, synthetic construct
  source 1..75: mol_type = other DNA
atttcctgatgcgctggtggtgagtgtcggaggcgcggagccgagcggtaatccggcggggcgtcagtggttttc

SEQ ID NO: 812476 - DNA, 75 bp, synthetic construct
  source 1..75: mol_type = other DNA
caggtcgtgactgcgtactggtcgatgatatgatcgacactggcggtacgctgtgtaaagctgctgaagcgctga

SEQ ID NO: 812477 - DNA, 75 bp, synthetic construct
  source 1..75: mol_type = other DNA
ggctgaacaactacgcccgcgtggtggagaaaggccagtacgacagtctggaaattccggcacaggtcgctgcgt

SEQ ID NO: 812478 - DNA, 75 bp, synthetic construct
  source 1..75: mol_type = other DNA
gggtgtgaagctcatctgtttagatttacccgttaaagacctttcaagctcagagggtaagttggttctacagct

SEQ ID NO: 812479 - DNA, 75 bp, synthetic construct
  source 1..75: mol_type = other DNA
agcataaggcaaagggattatcacaaagtcaggttgcaaagcttctgaatctctctgtgagaacggttagccgtc

SEQ ID NO: 812480 - DNA, 75 bp, synthetic construct
  source 1..75: mol_type = other DNA
gtctggctgacatcaacggttgctgttgagtttcttgagtggtcgttcatgtcggctgggcgacaaaaacaataa

SEQ ID NO: 812481 - DNA, 75 bp, synthetic construct
  source 1..75: mol_type = other DNA
caactggcactgggagtgtttgaaccgttactggtggtgagtatggctggtgtcgtgctgttcatcgtactggct

SEQ ID NO: 812482 - DNA, 75 bp, synthetic construct
  source 1..75: mol_type = other DNA
gacgatatcaaccaggctaatgaacgctggaaaaaagataccgaacaactgcggcgcaatggggtgattaagtaa

SEQ ID NO: 812483 - DNA, 75 bp, synthetic construct
  source 1..75: mol_type = other DNA
taaaaaaatcagcccccttctgcgcaagggcgaaaatgaaattaaccgatgggctgaccgtcattctgttgagcg

SEQ ID NO: 812484 - DNA, 75 bp, synthetic construct
  source 1..75: mol_type = other DNA
agtagtgccgaaaattatcgaacagtttgatcatctcggacacgcgctgcccgcctccacccgaatgctcatcgc

SEQ ID NO: 812485 - DNA, 75 bp, synthetic construct
  source 1..75: mol_type = other DNA
ctggtactgctgttagtggcagcgggcgtggtcactgttttgctgacggcggtggtgccgaaaattatcgaacag

SEQ ID NO: 812486 - DNA, 75 bp, synthetic construct
  source 1..75: mol_type = other DNA
tagctaccgcggccgagttggttagggaaggggtcagcctgcatcaggcactggagcagacttcgctgtttccgc

SEQ ID NO: 812487 - DNA, 75 bp, synthetic construct
  source 1..75: mol_type = other DNA
acgtcgtattcagggcatggaaaaatggctggcgaatcctgagctgttggaagccgatgcggatgcggaatatgc

SEQ ID NO: 812488 - DNA, 75 bp, synthetic construct
  source 1..75: mol_type = other DNA
aagccgcctatgtcaaagcaggcttcctggctgctgtcgcgaaaggtgaagccaaatccccactgctgactccgg

SEQ ID NO: 812489 - DNA, 75 bp, synthetic construct
  source 1..75: mol_type = other DNA
agccgtaaattgcaggatgactgggtaacgctcgaaaaagggcaatatccgttaacgatgaaagtttcagaaata

SEQ ID NO: 812490 - DNA, 75 bp, synthetic construct
  source 1..75: mol_type = other DNA
gcggttaaatatgacaaagaggtttatcaaccggcgattgcggcatgtcataaacagagtgaagagtgttatgaa

SEQ ID NO: 812491 - DNA, 75 bp, synthetic construct
  source 1..75: mol_type = other DNA
tgaagattgacgatatcaatcagacgagcgatcgctggaaaaaagataccgaagaattacggcgtaatggggtga

SEQ ID NO: 812492 - DNA, 75 bp, synthetic construct
  source 1..75: mol_type = other DNA
catgtgttaagtaaaaccatgggggccgttgagatgggctggatccagaccggcctcgaataccaggcgttccat

SEQ ID NO: 812493 - DNA, 75 bp, synthetic construct
  source 1..75: mol_type = other DNA
tggcgcaacagatggccatgcaaataacttctccgtatttattcaggctggcggcagttatcggctcacaccatt

SEQ ID NO: 812494 - DNA, 75 bp, synthetic construct
  source 1..75: mol_type = other DNA
atggatgaagaatatcgtaaagacctgcaactgtggtttggtcttacgcatgcgccgttctgcgtgatgccgcga

SEQ ID NO: 812495 - DNA, 75 bp, synthetic construct
  source 1..75: mol_type = other DNA
ctgcgctgggataaaaccttgctgcgtcttcccgtgacggggcgtgttgcgcgcggactgaatacggcgcgcttt

SEQ ID NO: 812496 - DNA, 75 bp, synthetic construct
  source 1..75: mol_type = other DNA
tttcaggcgccagcaaaggtgctgaaattaccggaagtgcaaattcatgatatcgttagtcactttgcgagaatg

SEQ ID NO: 812497 - DNA, 75 bp, synthetic construct
  source 1..75: mol_type = other DNA
attttcaggcggcagcaaaggtgctgaaattcccggaagtgcaaattcaggaaatcataagtaactgtgcgagaa

SEQ ID NO: 812498 - DNA, 75 bp, synthetic construct
  source 1..75: mol_type = other DNA
attttcaggcgccagcaaaggtgctgaaattcccggaagtgcaaattcaggaaatcatgagtaactgtgcgagag

SEQ ID NO: 812499 - DNA, 75 bp, synthetic construct
  source 1..75: mol_type = other DNA
atcattaaagcggggaatgtgcgcgcgttagcggtcgaacgttttgacaggcgttggaatgctgagcgaacggtt

SEQ ID NO: 812500 - DNA, 75 bp, synthetic construct
  source 1..75: mol_type = other DNA
gacaaccgtttgatttattgtcagaaatagggcgagatagcgttggtgccgtaacgttattacccgaaaatgaaa

SEQ ID NO: 812501 - DNA, 75 bp, synthetic construct
  source 1..75: mol_type = other DNA
tgaaattccggacagccgtacgcgtaaccgttccggtcacagacggatggccagatgccattgcctgtactcagt

SEQ ID NO: 812502 - DNA, 75 bp, synthetic construct
  source 1..75: mol_type = other DNA
cggcgaacagagcggcgaactggaaaccatgcttgagcaagccgcagttaaccaggaacgagaatttgataccca

SEQ ID NO: 812503 - DNA, 75 bp, synthetic construct
  source 1..75: mol_type = other DNA
ctggttctgctggtggtggcaacgggcgtggtcactattttgctgacggcagtggtgccgaaaattatcgaacag

SEQ ID NO: 812504 - DNA, 75 bp, synthetic construct
  source 1..75: mol_type = other DNA
attcgccatgcaatggaaattggcgaactattcctggtctatcaaccgattgttgatattaacacccgcaccatt

SEQ ID NO: 812505 - DNA, 75 bp, synthetic construct
  source 1..75: mol_type = other DNA
gctgagagcgatcgcggcttctcgctggcgcagaaaatggtcggtcgtgcctgtggcgtgaaaggcattcgtccg

SEQ ID NO: 812506 - DNA, 75 bp, synthetic construct
  source 1..75: mol_type = other DNA
acctgttactagtatagtggctgacacctttattgaggtaatcgatgaaaagacaaagcccgcaggtgctaccaa

SEQ ID NO: 812507 - DNA, 75 bp, synthetic construct
  source 1..75: mol_type = other DNA
tcacaccggtcaaccagaaactggtcgttacggccatcacgaaagacggcccacgctatgccggatacggcaatg

SEQ ID NO: 812508 - DNA, 75 bp, synthetic construct
  source 1..75: mol_type = other DNA
aacacgctgtttattcagaaatgcgaaaacaattttatatggcgttttatcgccctgagtacggcacaaccgcgc

SEQ ID NO: 812509 - DNA, 75 bp, synthetic construct
  source 1..75: mol_type = other DNA
atgatacataaaacaaaggcgacctggggcggtcgccaatgggaaaacactaaacataagcccgaacatcatagc

SEQ ID NO: 812510 - DNA, 75 bp, synthetic construct
  source 1..75: mol_type = other DNA
tatcacagtaagccagaaatgcagaatatttcgctgcaaaatgccgttggccaagctgtctggaaagcaaaaaat

SEQ ID NO: 812511 - DNA, 75 bp, synthetic construct
  source 1..75: mol_type = other DNA
gacacgtcaattacacctcatgtaatgtatttatgtgtaattacacattacacacaatcagagcaaaaagtaaag

SEQ ID NO: 812512 - DNA, 75 bp, synthetic construct
  source 1..75: mol_type = other DNA
caaaaaacaaatgcagtatgcaggaaaaaaaataagtgttcaacacttgacgtgtttaacacctaggcttaaatt

SEQ ID NO: 812513 - DNA, 75 bp, synthetic construct
  source 1..75: mol_type = other DNA
aggtaattaaagatgctgagagtatagaaaatggtattatttactcagactttattccacgaaatgattatctta

SEQ ID NO: 812514 - DNA, 75 bp, synthetic construct
  source 1..75: mol_type = other DNA
gagagtgacagtatgtcgacatctggtggtggagtttccatcccaaatggttcaacagtttttgttgatcccgat

SEQ ID NO: 812515 - DNA, 75 bp, synthetic construct
  source 1..75: mol_type = other DNA
tgcaccgtgattgcatggctgacggtaaaaacactgtacacgtagccgccgatacgctggttgatgcctgcaaga

SEQ ID NO: 812516 - DNA, 75 bp, synthetic construct
  source 1..75: mol_type = other DNA
cgctgatgtcgccgctttcgcacagcatgtcgattgaagagggccaacggctgacgggttctacccggaatggct

SEQ ID NO: 812517 - DNA, 75 bp, synthetic construct
  source 1..75: mol_type = other DNA
cagggcgcgaatctgtctgactcatactcgtacgctatctttctgcgctgtcttttccgggccggtgatggtgta

SEQ ID NO: 812518 - DNA, 75 bp, synthetic construct
  source 1..75: mol_type = other DNA
ttgttagctcttctaattatccccattctggttagtggttatattatgataaccgctaaccagtatcattatttc

SEQ ID NO: 812519 - DNA, 75 bp, synthetic construct
  source 1..75: mol_type = other DNA
gggcatcaccctgcgcgatctggtacacgccattccgctgtatgcgatcaaacaaggtctgctgaccgttgagaa

SEQ ID NO: 812520 - DNA, 75 bp, synthetic construct
  source 1..75: mol_type = other DNA
cgctgccagatttcatcatgaaccgtggtggtgtgtctttacgtcctggtgacggcgtaatccactcctggctga

SEQ ID NO: 812521 - DNA, 75 bp, synthetic construct
  source 1..75: mol_type = other DNA
cacgcgatcccgctgtatgcaatcaaacaaggtctgctgaccgttgagaagaaaggtaagaaaaacatcttctct

SEQ ID NO: 812522 - DNA, 75 bp, synthetic construct
  source 1..75: mol_type = other DNA
gccaatcgaagtcgacgtctctaacctgaacatgggcgacgtaattgacgtttacccgtacaaaggtgaagtacg

SEQ ID NO: 812523 - DNA, 75 bp, synthetic construct
  source 1..75: mol_type = other DNA
aaagacctggcgtgcctgggcttctcggctgacctggtgatgcagtctttctgccataccgcggcgtatccgaag

SEQ ID NO: 812524 - DNA, 75 bp, synthetic construct
  source 1..75: mol_type = other DNA
ataaaactgccgttgatacttaccgttacctgaacttcaaccagctttctcagtacactgaaaaagccgatggtg

SEQ ID NO: 812525 - DNA, 75 bp, synthetic construct
  source 1..75: mol_type = other DNA
gcgaccttcgaactgaaaaccgacgtgctgattgatgaagtgcgtgctggcggccgtattccgctgattatcggg

SEQ ID NO: 812526 - DNA, 75 bp, synthetic construct
  source 1..75: mol_type = other DNA
caactggctggcgtgcctgctacgaagtggataaatatccgcaagagcaagagatgaatgctctccgacagctac

SEQ ID NO: 812527 - DNA, 75 bp, synthetic construct
  source 1..75: mol_type = other DNA
aacaacgtaagtcaataatattacattattatgctgattcaggggagtcactcatatttaatattggggtttccc

SEQ ID NO: 812528 - DNA, 75 bp, synthetic construct
  source 1..75: mol_type = other DNA
gccaaatccccactgttgaccccggaaaaagctattgagttgctgggtaccatgcagggtggttacaacattcat

SEQ ID NO: 812529 - DNA, 75 bp, synthetic construct
  source 1..75: mol_type = other DNA
ccaaactggcaccgatcgctgccaaagcactttctcacacgctgctgatgttcgataacttctatgacgtagaag

SEQ ID NO: 812530 - DNA, 75 bp, synthetic construct
  source 1..75: mol_type = other DNA
cttcccgaaccgtctgggtactggcgcgaacgtcttcctggcttctgcggaactggctgctgttgcggcgctgat

SEQ ID NO: 812531 - DNA, 75 bp, synthetic construct
  source 1..75: mol_type = other DNA
ggaatggagaaccattcaacagagttatcgaagcagagaacatcaacgactgctataaccactggatgatatggg

SEQ ID NO: 812532 - DNA, 75 bp, synthetic construct
  source 1..75: mol_type = other DNA
taaatacattcattgctctgtgtgtcaccattgtaaatgagggtgcatcaagtcctgataaatatgcttcgcagt

SEQ ID NO: 812533 - DNA, 75 bp, synthetic construct
  source 1..75: mol_type = other DNA
gaagtggaaaaagcgcatccggatgtcttcaacattctgttgcaggtactggatgatgggcgtctgactgacggg

SEQ ID NO: 812534 - DNA, 75 bp, synthetic construct
  source 1..75: mol_type = other DNA
atgcacttccgagtcactggtgaatggaatggagagccattcgacagggttatcgaagcagaggacatcaacgac

SEQ ID NO: 812535 - DNA, 75 bp, synthetic construct
  source 1..75: mol_type = other DNA
atgcacttccgagttacaggtgaatggaatggagagccattcaacagggttatcgaagcagaggacatcaacgac

SEQ ID NO: 812536 - DNA, 75 bp, synthetic construct
  source 1..75: mol_type = other DNA
tgaccggcagtgatgcctttaaacaaaaagccatgcagctgattgtcgaatatgacatcaaggttcgcatgaaac

SEQ ID NO: 812537 - DNA, 75 bp, synthetic construct
  source 1..75: mol_type = other DNA
gtcagctgcctgataaagccatcgacctgatcgatgaagcagcatccagcattcgtatgcagattgactcaaaac

SEQ ID NO: 812538 - DNA, 75 bp, synthetic construct
  source 1..75: mol_type = other DNA
gacgaggcgatgatccgtattgacatgtccgagtttatggaaaaacactcggtgtctcgtctggttggtgctcct

SEQ ID NO: 812539 - DNA, 75 bp, synthetic construct
  source 1..75: mol_type = other DNA
ttggacgggtattcctgtttctcgcatgatggaaagtgagcgcgaaaaactgctgcgtatggagcaagaactgca

SEQ ID NO: 812540 - DNA, 75 bp, synthetic construct
  source 1..75: mol_type = other DNA
aacgtctggaagagcgtggttatgaaatccacatttctgacgaggcgctgaaactgctgagcgagaacggttacg

SEQ ID NO: 812541 - DNA, 75 bp, synthetic construct
  source 1..75: mol_type = other DNA
tttatcgacgaattacataccatggtcggtgcgggtaaagccgatggcgcaatggatgccggcaacatgctgaaa

SEQ ID NO: 812542 - DNA, 75 bp, synthetic construct
  source 1..75: mol_type = other DNA
tgctgcgtatggagcaagaactgcaccatcgcgttattggtcagaacgaagcggttgatgcggtatctaacgcta

SEQ ID NO: 812543 - DNA, 75 bp, synthetic construct
  source 1..75: mol_type = other DNA
atgcacctgctccctgaactcgccagccaccatgcggtttcgattcccgagttgctcatcagccgggatgaaagg

SEQ ID NO: 812544 - DNA, 75 bp, synthetic construct
  source 1..75: mol_type = other DNA
ggaatgaagaaccattcaacagagttatcgaagccgagaacatcagcgactgctatgaccactggatgctgtggg

SEQ ID NO: 812545 - DNA, 75 bp, synthetic construct
  source 1..75: mol_type = other DNA
cgttcacagaccttcaccgcttatgaacgcttgtcgacggccctgacggttgctcaggtttgcggcgtccagcgg

SEQ ID NO: 812546 - DNA, 75 bp, synthetic construct
  source 1..75: mol_type = other DNA
gccaactggccgaaacactctctctccaccctatttcactttcccttctcgaaaggttgttaaacagtacacggg

SEQ ID NO: 812547 - DNA, 75 bp, synthetic construct
  source 1..75: mol_type = other DNA
tctcggacgtttttgccgccttcgcggaatttgctgccgccgttgccgaggaagcggaactactggcgctcgagg

SEQ ID NO: 812548 - DNA, 75 bp, synthetic construct
  source 1..75: mol_type = other DNA
tggggcttctggtgctggggcaacggctacttaaaaatcctgctatgcgcctgcgctgggatcaaaccgtgctgc

SEQ ID NO: 812549 - DNA, 75 bp, synthetic construct
  source 1..75: mol_type = other DNA
gcaaatcgctatgtcgaacaacaactactgctggcggcagatcgcgtccgcgaaggaagcagtctgcgcgctgcg

SEQ ID NO: 812550 - DNA, 75 bp, synthetic construct
  source 1..75: mol_type = other DNA
ccagcagtgttccgctgctggaaggcattcagaccgctgccgccgtgtcggcaaatcgctatgtcgagcaacaac

SEQ ID NO: 812551 - DNA, 75 bp, synthetic construct
  source 1..75: mol_type = other DNA
ttgatacccaggtggggctggcgttggggctgtttgagccggcgctggtggtgatgatggcgggcgtggtgctgt

SEQ ID NO: 812552 - DNA, 75 bp, synthetic construct
  source 1..75: mol_type = other DNA
acgcacatcgtcgcgtggcggcggcagatctggcgctgttcactcgccaactggcaacgctggtgcaggcagcaa

SEQ ID NO: 812553 - DNA, 75 bp, synthetic construct
  source 1..75: mol_type = other DNA
accatgcttgaacaggccgcagtcaaccaggaacgggaatttgatacccaggtggggctggcgttagggctgttt

SEQ ID NO: 812554 - DNA, 75 bp, synthetic construct
  source 1..75: mol_type = other DNA
gatgctgcgctggaacgtcgtttccagaaagtgtttgttgccgagccttctgttgaagataccattgcgattctg

SEQ ID NO: 812555 - DNA, 75 bp, synthetic construct
  source 1..75: mol_type = other DNA
caggcagaacaggagaatgacatgaatatactaaaaaaacttatgcagcgtctgtgtggttgcggaaagcatgat

SEQ ID NO: 812556 - DNA, 75 bp, synthetic construct
  source 1..75: mol_type = other DNA
gtgtgtggtaagaccgctgcaaatcctgcgtgctgacgggacgtgggggtacggtctgctttacctccggcattt

SEQ ID NO: 812557 - DNA, 75 bp, synthetic construct
  source 1..75: mol_type = other DNA
tgatgaccgtgaaaacggggagttacttacagcacaactgcgactgggaccagcagacattctggagtcagatga

SEQ ID NO: 812558 - DNA, 75 bp, synthetic construct
  source 1..75: mol_type = other DNA
tggcgaaagaacttgggttgaatgttccggacgcagaaatcattaaagcgggaaatgtgcgcgcgttagcggtcg

SEQ ID NO: 812559 - DNA, 75 bp, synthetic construct
  source 1..75: mol_type = other DNA
ggaaaagcttactgaagtcagacttgaagaagtattaacggcttataaagcagatatcccgctaggcatgattag

SEQ ID NO: 812560 - DNA, 75 bp, synthetic construct
  source 1..75: mol_type = other DNA
gaatggtattatcccggagcaggccagggtaatcacgcaggtggtgatactggatgcggataaaaagcagataca

SEQ ID NO: 812561 - DNA, 75 bp, synthetic construct
  source 1..75: mol_type = other DNA
tttcaggcgccagcaaaggtgctgaaattaccggaagtgcagattcatgacatcgttagtcactatgcgagaatg

SEQ ID NO: 812562 - DNA, 75 bp, synthetic construct
  source 1..75: mol_type = other DNA
tttcaggcgccagcaaaggtgctgaaattaccggaagtgcacattcatgagatcgttagtcactatgcgagaatg

SEQ ID NO: 812563 - DNA, 75 bp, synthetic construct
  source 1..75: mol_type = other DNA
tttcaggcgccagcaaaggtgctgaaattaccggaagtgcatattcatgatatcgttagtcactgtgcgagaatg

SEQ ID NO: 812564 - DNA, 75 bp, synthetic construct
  source 1..75: mol_type = other DNA
agcgtctgtgtggttgcggaaagcatgatggccgtgaacacgtgcagtcgcctacagcacagctgcgactgggac

SEQ ID NO: 812565 - DNA, 75 bp, synthetic construct
  source 1..75: mol_type = other DNA
agcgtctgtgcggttgcggaaagcatgatgaccgtgaaaacggggagttacttacagcacaactgcgactgggac

SEQ ID NO: 812566 - DNA, 75 bp, synthetic construct
  source 1..75: mol_type = other DNA
cttacagcacaactgcgactggggccggcagacattctggagtcagatgagaatggtattatcccggagcaggcc

SEQ ID NO: 812567 - DNA, 75 bp, synthetic construct
  source 1..75: mol_type = other DNA
cgcaacggacggtcatgcaaaaaacttctccgtatttattcaggctggcggcagttatcgactcacgccatttta

SEQ ID NO: 812568 - DNA, 75 bp, synthetic construct
  source 1..75: mol_type = other DNA
tgagcacgacaatcatgaccgccaacgactggattcttccttggtttatactggtgcgcataatgtatattatgt

SEQ ID NO: 812569 - DNA, 75 bp, synthetic construct
  source 1..75: mol_type = other DNA
gcgacagcaaaggtgctgagattcccggaagtgcagatgcatgaaatcctaagtgactttgccagaatgattccg

SEQ ID NO: 812570 - DNA, 75 bp, synthetic construct
  source 1..75: mol_type = other DNA
ttccagtggttgattggcgcaacggatggccatgcaaaaaacttctccgtatttattcaggctggcggcagttat

SEQ ID NO: 812571 - DNA, 75 bp, synthetic construct
  source 1..75: mol_type = other DNA
gcctttttgttcagatccagtattcacacgagagtgactggtctgaaatattgcgcctgactgatatcgtgctgg

SEQ ID NO: 812572 - DNA, 75 bp, synthetic construct
  source 1..75: mol_type = other DNA
tgatgactgtgaacacgggcagtcgcttacagcacaactgcgtctggggccggcagacatcctggagtcagatga

SEQ ID NO: 812573 - DNA, 75 bp, synthetic construct
  source 1..75: mol_type = other DNA
agggtgattacgcaggtggtgatactggatgcagataaaaagcagatacagtgtgtggtaagaccgctgcaaatc

SEQ ID NO: 812574 - DNA, 75 bp, synthetic construct
  source 1..75: mol_type = other DNA
gtacgattatctgcgcgatgaattaccgactctcattcaatcgcaatttaacgtcagcgatcgctgcgctattag

SEQ ID NO: 812575 - DNA, 75 bp, synthetic construct
  source 1..75: mol_type = other DNA
gataaaaagcagatacagtgcgtggtaagaccgctgcaaatcctgcgtgctgacgggacgtgggaaaatgttggc

SEQ ID NO: 812576 - DNA, 75 bp, synthetic construct
  source 1..75: mol_type = other DNA
tgggcagtgatacaggcagaacaggagaatgacatgaatatattaaaaaaacttatgcagcgtctgtgtggttgc

SEQ ID NO: 812577 - DNA, 75 bp, synthetic construct
  source 1..75: mol_type = other DNA
tcgccaccaaagcaggtgcccagcgcatggcggcagaactggggattgtactggtaatgccagacaccagcccgc

SEQ ID NO: 812578 - DNA, 75 bp, synthetic construct
  source 1..75: mol_type = other DNA
ggcttaacctgtaatgatgaaaacttcgccaccaaagcaggtgcccagcgcatggcggcagaactggggattgta

SEQ ID NO: 812579 - DNA, 75 bp, synthetic construct
  source 1..75: mol_type = other DNA
ctgcgtattcagccgggatatgatcacagttactacttcatcgcctcttttatagaggatcacctgcgcttccat

SEQ ID NO: 812580 - DNA, 75 bp, synthetic construct
  source 1..75: mol_type = other DNA
ctacccagacggccgctattttaagtggtttgaccgctgagcaatccactattgagcgcgcgctggccatgaact

SEQ ID NO: 812581 - DNA, 75 bp, synthetic construct
  source 1..75: mol_type = other DNA
gttttttattactggaatgtgaagaactgcgtacagcgcgacgacggggtgaatgccatgaatcagacagcattt

SEQ ID NO: 812582 - DNA, 75 bp, synthetic construct
  source 1..75: mol_type = other DNA
ccgctgattttggtacggagccaacgtatccggagtcgtttgatgtctgggcaaaggtggctcagccaggcgctg

SEQ ID NO: 812583 - DNA, 75 bp, synthetic construct
  source 1..75: mol_type = other DNA
gctgatccgccgtctggcacgcgagtttggcgttaacctggcgaaagtgaagggcactggccgtaaaggtcgtat

SEQ ID NO: 812584 - DNA, 75 bp, synthetic construct
  source 1..75: mol_type = other DNA
aacagtcgctgatcaccgtagaaggcgacaaggcttctatggaagttccggctccgtttgctggcaccgtgaaag

SEQ ID NO: 812585 - DNA, 75 bp, synthetic construct
  source 1..75: mol_type = other DNA
aggaaatctttcacgaactgcaacaacacatctgcgcactagataccaaactcaaccggctggacttttcatttg

SEQ ID NO: 812586 - DNA, 75 bp, synthetic construct
  source 1..75: mol_type = other DNA
catcagccagtggaagattccccacgtaaacagacgcagcggcattgtcatcctgacgccggagagctggcgtca

SEQ ID NO: 812587 - DNA, 75 bp, synthetic construct
  source 1..75: mol_type = other DNA
atgccaatgacaaattttttccgcgccgcagtagagggcgcaacctgtgacggccgagtactggaacgtcagcac

SEQ ID NO: 812588 - DNA, 75 bp, synthetic construct
  source 1..75: mol_type = other DNA
tgtttcagaagaaaaagataattaccttgtagtggatggttttcatcgtcagttgctgggtagaggaagtagcgt

SEQ ID NO: 812589 - DNA, 75 bp, synthetic construct
  source 1..75: mol_type = other DNA
catttcggtcaataaaccgaacgccggaaaacagcaaggacaactgctggaaaaagcgcgcaatgaaatgggtga

SEQ ID NO: 812590 - DNA, 75 bp, synthetic construct
  source 1..75: mol_type = other DNA
atgctcgacagctacgcggagcaggcagataacatgccgttattgcatcgggcgctggtgctggcatgggcgcag

SEQ ID NO: 812591 - DNA, 75 bp, synthetic construct
  source 1..75: mol_type = other DNA
ctgacgcaggccaggacggacaaactggttcgtgccctgcagaaacagggggtggaggttaccgtgaaacgggag

SEQ ID NO: 812592 - DNA, 75 bp, synthetic construct
  source 1..75: mol_type = other DNA
atgttccggatatcggcagcgacgaagtcgaagtgaccgaaatcctggtgaaagtgggcgacaaagttgaagctg

SEQ ID NO: 812593 - DNA, 75 bp, synthetic construct
  source 1..75: mol_type = other DNA
acggcattaccgcccctatcgatgtacatctgatggtgaaaccggttgatcgcattgtgccggatttcgctgccg

SEQ ID NO: 812594 - DNA, 75 bp, synthetic construct
  source 1..75: mol_type = other DNA
atgaaacagtatttgattgccccctcgattctgtcggctgattttgcccgcctgggtgaagataccgcaaaagcc

SEQ ID NO: 812595 - DNA, 75 bp, synthetic construct
  source 1..75: mol_type = other DNA
gggatgaaacagaatctttctaatctcgttcctgataaatataaaggcgctggcaccggaacaactacacctgat

SEQ ID NO: 812596 - DNA, 75 bp, synthetic construct
  source 1..75: mol_type = other DNA
gaagaagaaaagctgtttgttaagcgcctgaagttaatcaaagcggatatccacgcccagctgaaggcctgtgat

SEQ ID NO: 812597 - DNA, 75 bp, synthetic construct
  source 1..75: mol_type = other DNA
gcatgagtcgcgagatcgccgaacgtgtcgcctttctacggcatgagtgctcgtatcaatgtcagccagcaaaaa

SEQ ID NO: 812598 - DNA, 75 bp, synthetic construct
  source 1..75: mol_type = other DNA
acggcatggcccgcgagatcgccgaaagagttagttatctgcgcaatgaatgcccgtacccgtgccagcccgcga

SEQ ID NO: 812599 - DNA, 75 bp, synthetic construct
  source 1..75: mol_type = other DNA
tgacatggcagcttacaggcggtgatacccttcaggccagtaatcccacgccttattttattaccttcagtactg

SEQ ID NO: 812600 - DNA, 75 bp, synthetic construct
  source 1..75: mol_type = other DNA
gtgaaatcgaagaagtggaactgggccgcatccagaaaatctctggtgcgaacctgagccgtaactgggtgatga

SEQ ID NO: 812601 - DNA, 75 bp, synthetic construct
  source 1..75: mol_type = other DNA
gacaaagttgaagccgaacagtcgctgatcaccgtagaaggcgataaagcgtctatggaagttccggctccgttt

SEQ ID NO: 812602 - DNA, 75 bp, synthetic construct
  source 1..75: mol_type = other DNA
agcagcacgtaaagagaaagcagaattaaagctccttgatgtgtcaagctctatcagtgcaatgcaccgcctctc

SEQ ID NO: 812603 - DNA, 75 bp, synthetic construct
  source 1..75: mol_type = other DNA
acatccagattaagcgattatgtggattttacagcgagagcaagtcgggatagcttcttgaaatcattaacatta

SEQ ID NO: 812604 - DNA, 75 bp, synthetic construct
  source 1..75: mol_type = other DNA
ttgctgcccatcgcgatagcggggacatcacaactgagcaaactcagggacgcccagtgttgcggcgggacatcc

SEQ ID NO: 812605 - DNA, 75 bp, synthetic construct
  source 1..75: mol_type = other DNA
gaaagggacaggcctcacgtattgctgcaaccattcgacataaccgggccagggggaaacatctgataaactcaa

SEQ ID NO: 812606 - DNA, 75 bp, synthetic construct
  source 1..75: mol_type = other DNA
cggaccactgacgcatactgtgagttatgattatgtcgatgcgcgcaatgcgattactgacacgccgttgttacg

SEQ ID NO: 812607 - DNA, 75 bp, synthetic construct
  source 1..75: mol_type = other DNA
gatggatatgatcaacgtaataccggcatctatctgaccgggctgcaacaagtcggcgattttacttttgaaggc

SEQ ID NO: 812608 - DNA, 75 bp, synthetic construct
  source 1..75: mol_type = other DNA
gatggcgtccgcctgaatttggcgggggtgagtggttctgctgatcttagtcagttccctattgcgcttgtccag

SEQ ID NO: 812609 - DNA, 75 bp, synthetic construct
  source 1..75: mol_type = other DNA
gtgccactacagtgggtgaaagcagatgaagtggtggctaacgattataatcccaatgtcatggcaccgggtgag

SEQ ID NO: 812610 - DNA, 75 bp, synthetic construct
  source 1..75: mol_type = other DNA
tggatgtactaagcaacatgattcgtcagtacttcagtcgggaacagcccgaagaagagtccatacgagccctta

SEQ ID NO: 812611 - DNA, 75 bp, synthetic construct
  source 1..75: mol_type = other DNA
ggaaatccgaatctggaccctgagaaaagcaaacagtgggaaggcgcgtttgaaggcttaaccgctggggtgaac

SEQ ID NO: 812612 - DNA, 75 bp, synthetic construct
  source 1..75: mol_type = other DNA
cttcaatgtctgaaattgtcagggacctctcacgtctgggctggacagatgatcgaattggaacagaggctgggc

SEQ ID NO: 812613 - DNA, 75 bp, synthetic construct
  source 1..75: mol_type = other DNA
cttcaatgtctgaaattgtcagggacctttcacgtctgggctggacagatgaccgaattggaacagaggctgggc

SEQ ID NO: 812614 - DNA, 75 bp, synthetic construct
  source 1..75: mol_type = other DNA
cttcaatgtctgaaattgtcagggacctatcacggctgggctggacagatgaacgaattggaacagaggctgggc

SEQ ID NO: 812615 - DNA, 75 bp, synthetic construct
  source 1..75: mol_type = other DNA
tataacggcgaactgattaaatcacaactcattaccagctacagccatagcaaagattacaactacgatccgcat

SEQ ID NO: 812616 - DNA, 75 bp, synthetic construct
  source 1..75: mol_type = other DNA
gaccttagccagttccctattgcgcttgtccagcgtgttgaatatatccgtgggccgcgctccgctgtttatggt

SEQ ID NO: 812617 - DNA, 75 bp, synthetic construct
  source 1..75: mol_type = other DNA
cttcaatgtctgaaattgtcagggacctgtcacgcctgggctggacagatgagcgaattggaacagaggctgggc

SEQ ID NO: 812618 - DNA, 75 bp, synthetic construct
  source 1..75: mol_type = other DNA
tgtcagatatcgttcgtgacctgtcccgtctgggatggtcggatgaaagaattggtacagagctgggtatggacc

SEQ ID NO: 812619 - DNA, 75 bp, synthetic construct
  source 1..75: mol_type = other DNA
ttcacgctgattacacgctggtggtggatacggcattaaccggacggcggctgggcgcgcagcatatgctggtgg

SEQ ID NO: 812620 - DNA, 75 bp, synthetic construct
  source 1..75: mol_type = other DNA
ttcatgccgattacacgctggtcgtggacaccgcgttaaccggacggcggctgggtgcacagcatatgctggtgg

SEQ ID NO: 812621 - DNA, 75 bp, synthetic construct
  source 1..75: mol_type = other DNA
acgtggttatctatgaaggcgagctggagtccctgcgccgctttaaggatgacgttaacgaagtccgtaacggta

SEQ ID NO: 812622 - DNA, 75 bp, synthetic construct
  source 1..75: mol_type = other DNA
cattatctggtggtggatggttttcaccgacagttattgagcagggaggcggatacaggaaaacgtctgaaggga

SEQ ID NO: 812623 - DNA, 75 bp, synthetic construct
  source 1..75: mol_type = other DNA
ctgcggctgaaacagattagtgggctgacggagttgtttctggaggaggatttcagtccggcatggacagttaat

SEQ ID NO: 812624 - DNA, 75 bp, synthetic construct
  source 1..75: mol_type = other DNA
caactgaccgacgcgctggcacaggtcaccgatcccatcgacattgtgttttgttgtctcggcaccacgcggcgg

SEQ ID NO: 812625 - DNA, 75 bp, synthetic construct
  source 1..75: mol_type = other DNA
ctggacaccccggggcacgccgcgtttacttcaatgcgtgcacgtggtgcgcaggcaacggacatcgtagtcctg

SEQ ID NO: 812626 - DNA, 75 bp, synthetic construct
  source 1..75: mol_type = other DNA
aagagatgggccacaaagttattctgcgtcgtgaaaacgagctggaagaagcggtaatgagcgaccgtgacacgg

SEQ ID NO: 812627 - DNA, 75 bp, synthetic construct
  source 1..75: mol_type = other DNA
gaagaagagaccatacgagcccttaatcatctgcgcagggtgttgcatgaggtcagcccttttgcacaggagcct

SEQ ID NO: 812628 - DNA, 75 bp, synthetic construct
  source 1..75: mol_type = other DNA
gtatgttgtctccggaactgaaacagcagattatcggtctggcggaagttcgtgacgtgttcaaatcgccgaaat

SEQ ID NO: 812629 - DNA, 75 bp, synthetic construct
  source 1..75: mol_type = other DNA
ggttgtcgctgcagatgacggcgtaatgccgcagaccattgaagcaatccagcacgcgaaagcggcgggtgtgcc

SEQ ID NO: 812630 - DNA, 75 bp, synthetic construct
  source 1..75: mol_type = other DNA
aactacaacgacgtccgcactggcgatgtgatcgaagtattcgaaatcatcgagatccagcgtaccatcgcttaa

SEQ ID NO: 812631 - DNA, 75 bp, synthetic construct
  source 1..75: mol_type = other DNA
cttattatttatgccaatggcatctttattatgatttatctgttatgcatgctggcaggctgtaaattattgcaa

SEQ ID NO: 812632 - DNA, 75 bp, synthetic construct
  source 1..75: mol_type = other DNA
ttgagcgagtcacaggctggttatttttatcagttattcccgttggcttgcccgctgcgctgcaaattgccgccg

SEQ ID NO: 812633 - DNA, 75 bp, synthetic construct
  source 1..75: mol_type = other DNA
ttgtcgctatctggtgggcgggcgatatcaaacctgcgagtatccccttccccgcgccaggaaatatcgaactta

SEQ ID NO: 812634 - DNA, 75 bp, synthetic construct
  source 1..75: mol_type = other DNA
tcttctggttgcattattctgctggatatgatggaagcggataaaaaactcatccattactggcaggatacgtta

SEQ ID NO: 812635 - DNA, 75 bp, synthetic construct
  source 1..75: mol_type = other DNA
tggcctcatatcaacggtgttttttacgccctggaggatcaagaacgtgtcataaatgggttgcaaggcgtctta

SEQ ID NO: 812636 - DNA, 75 bp, synthetic construct
  source 1..75: mol_type = other DNA
ggtgtacggttgtcgtcttacacttcgacgcctacggtgaaaaaatggcggcggcagcatcgcttccggaaattg

SEQ ID NO: 812637 - DNA, 75 bp, synthetic construct
  source 1..75: mol_type = other DNA
gaacaaagacgcgatcatcaaagcggtttatcagggcgctggcgtggcagcaaaaaacctgatcccaccaactat

SEQ ID NO: 812638 - DNA, 75 bp, synthetic construct
  source 1..75: mol_type = other DNA
atgggctggactggcgataacggggatccggataacttcttcgccaccctgttcagctgcgccgcctctgaacaa

SEQ ID NO: 812639 - DNA, 75 bp, synthetic construct
  source 1..75: mol_type = other DNA
ctggcaactgttgttggcagaactcggtacgctggcgctggtgtggtatatcggtactcgcggtgccagttccag

SEQ ID NO: 812640 - DNA, 75 bp, synthetic construct
  source 1..75: mol_type = other DNA
gcgctacaaattgccgccgggttcggccaggcaatgtttggctggcatagctggcaactgttgttggcagaactc

SEQ ID NO: 812641 - DNA, 75 bp, synthetic construct
  source 1..75: mol_type = other DNA
atgctttagagatcaatctggacgctcttattatttatgccaatggcatctttattatgatttatctgttatgca

SEQ ID NO: 812642 - DNA, 75 bp, synthetic construct
  source 1..75: mol_type = other DNA
gtgaatccgatttggcgctgatgaccaacgcaggtactgaaattggcgtggcgtccaccaaagcattcaccactc

SEQ ID NO: 812643 - DNA, 75 bp, synthetic construct
  source 1..75: mol_type = other DNA
atactggcagaagatggggatctacggtcctgatgacttcgttaaattcttcggcaagaccaggctggaaacggt

SEQ ID NO: 812644 - DNA, 75 bp, synthetic construct
  source 1..75: mol_type = other DNA
aacgcgatcccgcactcaaattaccgtgcagtcgtgtttaccaaagaacaatacgcccgcattccgctacgtgat

SEQ ID NO: 812645 - DNA, 75 bp, synthetic construct
  source 1..75: mol_type = other DNA
cgcacgatcgctacgatgagctggttgccaaatacaacgatgtgttcaatagcaatatcccgtatgaacactctg

SEQ ID NO: 812646 - DNA, 75 bp, synthetic construct
  source 1..75: mol_type = other DNA
cgttctgctggaatcacgattgataaccttgaggccaagtgcgcggcgctggctgtggagaatgcggggatgaaa

SEQ ID NO: 812647 - DNA, 75 bp, synthetic construct
  source 1..75: mol_type = other DNA
gaaagcggttaaaccgccgaaagagctaccggatgaaccaacagatgcacagatagcgaaatacaacgagcaaat

SEQ ID NO: 812648 - DNA, 75 bp, synthetic construct
  source 1..75: mol_type = other DNA
ctccaaccgtgcaagcgttcgcgttcactactactgcggcaagggttctttcgatgaataccgactgaagacgct

SEQ ID NO: 812649 - DNA, 75 bp, synthetic construct
  source 1..75: mol_type = other DNA
tggcgtaccatgtcgcgctgatcaaaggcaccgatgttgaccagccgcgtaacctggcgaaatcggttacggttg

SEQ ID NO: 812650 - DNA, 75 bp, synthetic construct
  source 1..75: mol_type = other DNA
tctcgccggacgtattaaccacggtcaggttgatctaagcgagctgggcccgaatgccgatgaactgctgtcgaa

SEQ ID NO: 812651 - DNA, 75 bp, synthetic construct
  source 1..75: mol_type = other DNA
tgacaggaaagctggttacgcatgattccagcgccagttatgactccaccagctatcaggacatcctgcgttatc

SEQ ID NO: 812652 - DNA, 75 bp, synthetic construct
  source 1..75: mol_type = other DNA
caaccgtaaattatgacgggaaaaaattcacttacccgctcgctgatgagtggtcgggattctcaacagtattag

SEQ ID NO: 812653 - DNA, 75 bp, synthetic construct
  source 1..75: mol_type = other DNA
tggataagcacatcatttgccatataggggcaattcctcttgataaatgtgatacaaggcagtggatcgcatgtt

SEQ ID NO: 812654 - DNA, 75 bp, synthetic construct
  source 1..75: mol_type = other DNA
tttctgtccacgctgaataaaatggcagaaaagaaaaaaaataccgggaaagagatgtttgtgggggttacccgg

SEQ ID NO: 812655 - DNA, 75 bp, synthetic construct
  source 1..75: mol_type = other DNA
gtattcagtgatccaaaaacacgtaagccgtgggctaattcagctgcaattcgtaagaaagcctggatcccgacc

SEQ ID NO: 812656 - DNA, 75 bp, synthetic construct
  source 1..75: mol_type = other DNA
gaaatgctgttcagacattacggatcttaccttgcagaatacgatggaaaaacggcaatttctgcaaccccgtaa

SEQ ID NO: 812657 - DNA, 75 bp, synthetic construct
  source 1..75: mol_type = other DNA
tcttgaattggcggatacggtgagtgaattacgccccgtgaaacatgcgtttgatgccggtgttaaggcgcaaat

SEQ ID NO: 812658 - DNA, 75 bp, synthetic construct
  source 1..75: mol_type = other DNA
ggataccctgctggcggcacgttctggtagcccgctggtgattggcttgggtatgggtgaaaactttatcgcttc

SEQ ID NO: 812659 - DNA, 75 bp, synthetic construct
  source 1..75: mol_type = other DNA
caccggtattgctcatactcgctgggcgacccacggtgaaccttcagaagtgaatgcgcatccgcatgtttctga

SEQ ID NO: 812660 - DNA, 75 bp, synthetic construct
  source 1..75: mol_type = other DNA
tgtggtacttcttataactccggtatggtttcccgctactggtttgaatcgctggcaggtattccgtgcgacgtc

SEQ ID NO: 812661 - DNA, 75 bp, synthetic construct
  source 1..75: mol_type = other DNA
cagaactgacgccagcggtccttaaaaactggatagccagccggaaaacaaaactgaaaacgaccaggaataacc

SEQ ID NO: 812662 - DNA, 75 bp, synthetic construct
  source 1..75: mol_type = other DNA
atctggacgtactggatcctgtgcagttggtgcgtatcgaagcggtacaccgggggttcctttaccagcatcttt

SEQ ID NO: 812663 - DNA, 75 bp, synthetic construct
  source 1..75: mol_type = other DNA
caggcgtttaaccctcactcgcagagacattcatagccaattacgcagcgtggggagcgatattgatgatgggac

SEQ ID NO: 812664 - DNA, 75 bp, synthetic construct
  source 1..75: mol_type = other DNA
ctcgatgaactgacgtatatggtggcgtatgactatttgccactggaagaagtggtgcaggcgttaaatgaacgt

SEQ ID NO: 812665 - DNA, 75 bp, synthetic construct
  source 1..75: mol_type = other DNA
gcccacgtccagagcgccagtgttgttggtgtaatcaaaggtaccaaaacaaaagcaggtactcgaaaagttgaa

SEQ ID NO: 812666 - DNA, 75 bp, synthetic construct
  source 1..75: mol_type = other DNA
gtaatgctgccactggcaaaacggtaaaaatgtacctggacgaatatcttgaaatctgcgaaacgaggaaactat

SEQ ID NO: 812667 - DNA, 75 bp, synthetic construct
  source 1..75: mol_type = other DNA
agcgtgctggtcgccaccgcctatatggaagaggccgaacgcttcgactggctggtagcgatgaatgccggagaa

SEQ ID NO: 812668 - DNA, 75 bp, synthetic construct
  source 1..75: mol_type = other DNA
ctggatattatttggatcttttgcgcgacgctggcagcaagcttgttgctttctgtactggtacaacgaatcgat

SEQ ID NO: 812669 - DNA, 75 bp, synthetic construct
  source 1..75: mol_type = other DNA
ggagatgtttgtaggggttacacgggtactaaatgatgatgagtcgaaggtattcttcgagaaagtcaaagctca

SEQ ID NO: 812670 - DNA, 75 bp, synthetic construct
  source 1..75: mol_type = other DNA
ttaatccaccggaacagggaagggcattatatgatgctgttacttctggtgtgaaggaattatacgaggaagctg

SEQ ID NO: 812671 - DNA, 75 bp, synthetic construct
  source 1..75: mol_type = other DNA
tgcaatataaaccggcagagagcgcagccaaagtacagtgcccagttttggttgttattgccggccaggatagcg

SEQ ID NO: 812672 - DNA, 75 bp, synthetic construct
  source 1..75: mol_type = other DNA
tgagcaggatcaacgagtgaaatgtattgtcagccagctggcttttgctgacggtgatgttctggttaccggtgg

SEQ ID NO: 812673 - DNA, 75 bp, synthetic construct
  source 1..75: mol_type = other DNA
ttactgactctggtaaaaaatactctggatacgcacactattcgcgggcttgggctgatatcccgtcattcttta

SEQ ID NO: 812674 - DNA, 75 bp, synthetic construct
  source 1..75: mol_type = other DNA
aacgttcctggctcttcgctggtacgtgaatccgatttggcgctgatgaccaatgcgggtacggaaattggcgtg

SEQ ID NO: 812675 - DNA, 75 bp, synthetic construct
  source 1..75: mol_type = other DNA
gcatgggcgaaaactttattgcttctgaccagttggcgctgttgccagtgacccgtcgctttatcttccttgaag

SEQ ID NO: 812676 - DNA, 75 bp, synthetic construct
  source 1..75: mol_type = other DNA
ccttaccgggcgcatcagtcacggtcaggttgatttaagcgagctgggaccgaacgccgacgaactgctgtcgaa

SEQ ID NO: 812677 - DNA, 75 bp, synthetic construct
  source 1..75: mol_type = other DNA
aaactgggctacagtctgaaggattgtattgcgtttggtgatgggatgaacgacgccgaaatgctgtcgatggcg

SEQ ID NO: 812678 - DNA, 75 bp, synthetic construct
  source 1..75: mol_type = other DNA
gaggggggcatgtcttcagtgcagctgcgcaggaccaacgcgtaaaatgtattgtcagccagctggcttttgctg

SEQ ID NO: 812679 - DNA, 75 bp, synthetic construct
  source 1..75: mol_type = other DNA
ctggggcgatcgcgtcaatgtcagtttctctaccttaacctgcctggaagtgatggcgggcggcgtttcaaaagg

SEQ ID NO: 812680 - DNA, 75 bp, synthetic construct
  source 1..75: mol_type = other DNA
ttctgggcagaattatcctggcatttacgccagcgcacgacgggtaagactaaagccttatataacaaagtctga

SEQ ID NO: 812681 - DNA, 75 bp, synthetic construct
  source 1..75: mol_type = other DNA
acacagacatggtgctctatacacatggtgatgtaatacgaaaaagtgaatccatcaaccgtccggcttttattc

SEQ ID NO: 812682 - DNA, 75 bp, synthetic construct
  source 1..75: mol_type = other DNA
ccatattgcatgatgccacttggtacatcactgaacaccccgaagcccggaactcttggtggtggtcttaacgaa

SEQ ID NO: 812683 - DNA, 75 bp, synthetic construct
  source 1..75: mol_type = other DNA
cacaaggcaagttcgcgttgtttctcaactcgggcgatatttttcatcaggatgccgcaaattttgtccgtaagt

SEQ ID NO: 812684 - DNA, 75 bp, synthetic construct
  source 1..75: mol_type = other DNA
tttttcccggtatccggtttgaaaaaatggcgttatgacctggaatataaagtttcttctgattacgcgctggca

SEQ ID NO: 812685 - DNA, 75 bp, synthetic construct
  source 1..75: mol_type = other DNA
gccaaaatgtataaggccggttatgcatttaaaaaactcaatggcctggtgtctgaattttccatgggcggaatt

SEQ ID NO: 812686 - DNA, 75 bp, synthetic construct
  source 1..75: mol_type = other DNA
gccaccgggtggcactccccggccctgtttgtcatgccgggcggggttatcggtgatggtgatgtggtgtttcag

SEQ ID NO: 812687 - DNA, 75 bp, synthetic construct
  source 1..75: mol_type = other DNA
acatccattgcaactttattcgctgggaacgccgaacggtcagaaagtaacgattatgcttgaggagctgctggc

SEQ ID NO: 812688 - DNA, 75 bp, synthetic construct
  source 1..75: mol_type = other DNA
atatggcgatttggccgtggtttggcaacgtggtgttaggtggtgtgtatgatgccgctgagtttcttgatgcgg

SEQ ID NO: 812689 - DNA, 75 bp, synthetic construct
  source 1..75: mol_type = other DNA
atgcttcattacatcaaataatagagcaggggatttcatctattgcgcaggcttatgctgaaggtgctactgaaa

SEQ ID NO: 812690 - DNA, 75 bp, synthetic construct
  source 1..75: mol_type = other DNA
cactggccggggaaatggcgataactgccgggattctgccgtggaaacagggcgaagcactggaggcagtgaaag

SEQ ID NO: 812691 - DNA, 75 bp, synthetic construct
  source 1..75: mol_type = other DNA
gcaactggaacgccaccagcaccgggcttgaagggctggcaaccatgcggaacgataccgcgctgatactggatg

SEQ ID NO: 812692 - DNA, 75 bp, synthetic construct
  source 1..75: mol_type = other DNA
atgaattttgaaggaaaaatcgcactggtaaccggtgcaagccgtgggattggtcgcgcaattgcggaaacgctc

SEQ ID NO: 812693 - DNA, 75 bp, synthetic construct
  source 1..75: mol_type = other DNA
cccccgcacgttgcaggtatgcacctgacaacaccacgggggccattcttgcatctagaccattcaagaatagcc

SEQ ID NO: 812694 - DNA, 75 bp, synthetic construct
  source 1..75: mol_type = other DNA
cggttgtttcgccttcgcaggcaaatgttgataccgccgcgaccccggcaccaacggcaacaacaacgccagatg

SEQ ID NO: 812695 - DNA, 75 bp, synthetic construct
  source 1..75: mol_type = other DNA
ctggcagaagaacgtattctcgacgtgctgatcccaccagctaaaaacaactggggacagaccgaacagcagcag

SEQ ID NO: 812696 - DNA, 75 bp, synthetic construct
  source 1..75: mol_type = other DNA
aaatagcaacttcgtatatatttgtccgaaagtagttaaaataaccacaattgacggactgagtgtagaagatcg

SEQ ID NO: 812697 - DNA, 75 bp, synthetic construct
  source 1..75: mol_type = other DNA
tacattgcatgattggttagaggtcctggagcctcttagcactaagactccagcaatagcagaccgattgctaat

SEQ ID NO: 812698 - DNA, 75 bp, synthetic construct
  source 1..75: mol_type = other DNA
taacgcaaagcaggcccatgtctgggcgtataagagaaagctcattgaaactcgcccgctgtcggatatcacggg

SEQ ID NO: 812699 - DNA, 75 bp, synthetic construct
  source 1..75: mol_type = other DNA
tctactctcttcgcgtactgtttttggcaacgtggcgctgccgcttgagctggataacacgccgaaagacgagat

SEQ ID NO: 812700 - DNA, 75 bp, synthetic construct
  source 1..75: mol_type = other DNA
atgacgctcgcagaactgggcatggccttctggcatgatttagcggctccggtcattgctggcattcttgccagc

SEQ ID NO: 812701 - DNA, 75 bp, synthetic construct
  source 1..75: mol_type = other DNA
gtactgcgaccagtgaaagcggcgctcaggcgatcagcgattatttaggtgataacggtaaaggtctgatgttga

SEQ ID NO: 812702 - DNA, 75 bp, synthetic construct
  source 1..75: mol_type = other DNA
atgtctgaaatgaccccacgcgaaatcgtcagcgaactggataagcacatcattggtcaggataacgccaagcgt

SEQ ID NO: 812703 - DNA, 75 bp, synthetic construct
  source 1..75: mol_type = other DNA
atcgcggaagcggcatggcaggtaaacgaatccaccgaaaacatcggtgctcgtcgtttacacaccgttctggag

SEQ ID NO: 812704 - DNA, 75 bp, synthetic construct
  source 1..75: mol_type = other DNA
gcccgactggtggcatttctccggctaactaccgtgattacctggcgctgaaaagcgtactgtgcatcggtggtt

SEQ ID NO: 812705 - DNA, 75 bp, synthetic construct
  source 1..75: mol_type = other DNA
gctgggcgttactggtgcagagtacgacgcctggctgattcgtattggcgatggcgatcaattctccagcggctt

SEQ ID NO: 812706 - DNA, 75 bp, synthetic construct
  source 1..75: mol_type = other DNA
ttaatacaattaaaaaatctacaacaatgctttcacggagggtttttgaattaggtgcttcaggatgttctataa

SEQ ID NO: 812707 - DNA, 75 bp, synthetic construct
  source 1..75: mol_type = other DNA
gtgctggcaaccggcagcgccgaagagctgcggcagcaaacgcaaagcgccacgctggaagaagcatttataaat

SEQ ID NO: 812708 - DNA, 75 bp, synthetic construct
  source 1..75: mol_type = other DNA
aacggtgatcctgatgctgataatgggctatggcatcagtatggatgtggaaaacctgcgctttgcggtgcttga

SEQ ID NO: 812709 - DNA, 75 bp, synthetic construct
  source 1..75: mol_type = other DNA
cacaacaccaatattcggttaatccttcagaaagtgaatcagcatcttccagcgatcattactactttgctattt

SEQ ID NO: 812710 - DNA, 75 bp, synthetic construct
  source 1..75: mol_type = other DNA
tcagttgcgaatggtcaatccgcgcaagaatggtgtttggaattgcaaaaagacataaataaaagatctatcttg

SEQ ID NO: 812711 - DNA, 75 bp, synthetic construct
  source 1..75: mol_type = other DNA
aataactgtagttacccaaatgatttacatgtatattgtcgaccatcaattcctttaaatttagttgcacaggca

SEQ ID NO: 812712 - DNA, 75 bp, synthetic construct
  source 1..75: mol_type = other DNA
ccagatattacacatgccaaatttttggaccggtttgtcagaatatttacgtctgcgcacaaccgctaaaacaaa

SEQ ID NO: 812713 - DNA, 75 bp, synthetic construct
  source 1..75: mol_type = other DNA
attccggggcaagcccctggaacaacattcgctgggtcagcgcgcctccgctttaatgctgtttgttctgaatca

SEQ ID NO: 812714 - DNA, 75 bp, synthetic construct
  source 1..75: mol_type = other DNA
aactgtgggtggaagagtatcaggaaattgaagccgtgctgaccggcatcagccaggccgattcgcctctgaaga

SEQ ID NO: 812715 - DNA, 75 bp, synthetic construct
  source 1..75: mol_type = other DNA
gggggcattatcatcattccaaaaatgagaaatttattatcatccgaggaagtgcttgtttcaaatttgaaaata

SEQ ID NO: 812716 - DNA, 75 bp, synthetic construct
  source 1..75: mol_type = other DNA
atgggtaatcagccatctgaaaataatgctgtgtggcgacacaaggtgatgtatcgcctctggaatagttactgg

SEQ ID NO: 812717 - DNA, 75 bp, synthetic construct
  source 1..75: mol_type = other DNA
attgttgaaacaattcctggttggacacatgacattacaaatattggaactgatgaattaatagtcatgctctgg

SEQ ID NO: 812718 - DNA, 75 bp, synthetic construct
  source 1..75: mol_type = other DNA
agcaaggcgcaggaagagatactatacgcactccgcagccatggattgatcatttttgacaggttctggcaaaag

SEQ ID NO: 812719 - DNA, 75 bp, synthetic construct
  source 1..75: mol_type = other DNA
gcgcattgtcgaaagcgttttaccgtcgctgccaaaacgtccgcaggtgatcctctccgccaacgacgatatggc

SEQ ID NO: 812720 - DNA, 75 bp, synthetic construct
  source 1..75: mol_type = other DNA
tcctggtgactggctttgatgcggttcctgaagctctggctcgcgtgcgtgacggctggctggcggtgactgcgg

SEQ ID NO: 812721 - DNA, 75 bp, synthetic construct
  source 1..75: mol_type = other DNA
atcagcgccgacggcggcagctacacctttccgggaagctggcaactggcgtgggtgaatcaggaaacgccggcg

SEQ ID NO: 812722 - DNA, 75 bp, synthetic construct
  source 1..75: mol_type = other DNA
gatgccgcagagtttcttgatgcgggcagctataagcacgtacaacgctgggcgaaagaagtggctgaacgtccg

SEQ ID NO: 812723 - DNA, 75 bp, synthetic construct
  source 1..75: mol_type = other DNA
gcgggatgcagcgtaaaggcggtaatttgaatttaagcggtcaggcaccgtataaactgaaaattggtgcaccag

SEQ ID NO: 812724 - DNA, 75 bp, synthetic construct
  source 1..75: mol_type = other DNA
accgccgaaatgtatgcggacggtggtgctgaaaaggtagttggtgaagcattaactggcctgcgtgataaggcc

SEQ ID NO: 812725 - DNA, 75 bp, synthetic construct
  source 1..75: mol_type = other DNA
ttgacaccaacgacgaggtcttcaacgccgggcgcaccgcgcaagcggcgacgatcctcttctccattacccaaa

SEQ ID NO: 812726 - DNA, 75 bp, synthetic construct
  source 1..75: mol_type = other DNA
gaagatcatgctgtccgtatagaagtgggctacgggctggaaggggtggttaccgatctgcaagcagcgaagatt

SEQ ID NO: 812727 - DNA, 75 bp, synthetic construct
  source 1..75: mol_type = other DNA
ctttatggtgccttcctgggcttgcccagcaaattgctgtgccggagctgcgccaacaggtgaccgatattactg

SEQ ID NO: 812728 - DNA, 75 bp, synthetic construct
  source 1..75: mol_type = other DNA
ctggggatgattttcctcggcgagcgattccgccggatgcaatggctggcggtgattctggcgatatgtggcgtg

SEQ ID NO: 812729 - DNA, 75 bp, synthetic construct
  source 1..75: mol_type = other DNA
ccagctgtggacttttggttcgctacctattatcgcgctggggctggcatttagttttgccttctacggtctggt

SEQ ID NO: 812730 - DNA, 75 bp, synthetic construct
  source 1..75: mol_type = other DNA
cgttaggctttttccagtacattggcccgacgctgatgttcctgctggctgtgacgttttatggtgaaaaaccgg

SEQ ID NO: 812731 - DNA, 75 bp, synthetic construct
  source 1..75: mol_type = other DNA
catcggaggtgtggtgaacattattacaatgagtaatgatgagaaagctcagatcaacgcaggaatgggtacaaa

SEQ ID NO: 812732 - DNA, 75 bp, synthetic construct
  source 1..75: mol_type = other DNA
tggggggactgagcgtgtgggatatcggactttcatatccggtcacctctcacctgacagttcgtggtaaaatag

SEQ ID NO: 812733 - DNA, 75 bp, synthetic construct
  source 1..75: mol_type = other DNA
caaatccggtgacagcgcaaaaccagccagcctgtctgcaccggtcggggtggtgaatgacgaaggtgttacccg

SEQ ID NO: 812734 - DNA, 75 bp, synthetic construct
  source 1..75: mol_type = other DNA
gagataaagatgcagtccgacaagcagtcgaggtattcaagaaagcaggccttaatgttattgccgtaagagatg

SEQ ID NO: 812735 - DNA, 75 bp, synthetic construct
  source 1..75: mol_type = other DNA
aatgcatgtactttgataaaaatagatactcaaactttggctccgtaattaaaagtctagagataaatggatttc

SEQ ID NO: 812736 - DNA, 75 bp, synthetic construct
  source 1..75: mol_type = other DNA
ttttggtgtggcttcttatcttgcaaagaatttttgcggtttcttctatctaaatcgggaaagtttttctgaact

SEQ ID NO: 812737 - DNA, 75 bp, synthetic construct
  source 1..75: mol_type = other DNA
cctcgcgtgtgaactgttccctgagtggcagagccatttcagtgacgttctgacccgggaggtgcgtcatgtctg

SEQ ID NO: 812738 - DNA, 75 bp, synthetic construct
  source 1..75: mol_type = other DNA
ctaaaggtggcgaaggaaaatcaacccagtctgctaatcttgccggttttctggcggatgctggtctccgtactc

SEQ ID NO: 812739 - DNA, 75 bp, synthetic construct
  source 1..75: mol_type = other DNA
gttagctgccaccgattatgctgtcgggataatcaaacctattttgccggatacgcgtgaatttttacggggaac

SEQ ID NO: 812740 - DNA, 75 bp, synthetic construct
  source 1..75: mol_type = other DNA
aggagcactgacgcatactgttagttacgattatatggatgccagaaatgccttaactgacaaaccattggaacg

SEQ ID NO: 812741 - DNA, 75 bp, synthetic construct
  source 1..75: mol_type = other DNA
aacccgtcagagcaccatcgctgattactttctttcacagccactctgcctgtatgtgcccgtttcgatggcggt

SEQ ID NO: 812742 - DNA, 75 bp, synthetic construct
  source 1..75: mol_type = other DNA
ttatcgccgcactggttcatgatccgcgtctgcgttctgcgctggcagattctcaccagcgaccaaccatctatg

SEQ ID NO: 812743 - DNA, 75 bp, synthetic construct
  source 1..75: mol_type = other DNA
aggtgctgggcagggaagcaggtacgggaaaacgtttgaagggctggctgctggtggcctgtattaatcctgaga

SEQ ID NO: 812744 - DNA, 75 bp, synthetic construct
  source 1..75: mol_type = other DNA
ccaccgcaaccgacgcatttatgcgcgatattaaaccgtttatggtggcggatgcgctggccgatttcagccgtg

SEQ ID NO: 812745 - DNA, 75 bp, synthetic construct
  source 1..75: mol_type = other DNA
atggcgatatcgactttgtcatgctggcgaaaaaaccgaccatcgacgcctggtggaagctactttcccgcgagg

SEQ ID NO: 812746 - DNA, 75 bp, synthetic construct
  source 1..75: mol_type = other DNA
gatgcgctggccgatttcagccgtgacgagcatttgatgtcgctgaaatatgtggccggacggtctggccgggtg

SEQ ID NO: 812747 - DNA, 75 bp, synthetic construct
  source 1..75: mol_type = other DNA
cgggccagggggaaacaccagataacgtcaatgtctgaaattgtcagggacctttcccgcctgggctggaccgat

SEQ ID NO: 812748 - DNA, 75 bp, synthetic construct
  source 1..75: mol_type = other DNA
cgcgccagggggaaacaccagataacgtcaatgtctgaaattgtcagggacctttcccgactgggctggacagat

SEQ ID NO: 812749 - DNA, 75 bp, synthetic construct
  source 1..75: mol_type = other DNA
gtgatgactgaagagttactgccagcaccgatacctgccagtaaagcggagctgcgcgaggtggttctgccgttg

SEQ ID NO: 812750 - DNA, 75 bp, synthetic construct
  source 1..75: mol_type = other DNA
tgtgtgctgtgggtgaaagcggatgaagtggtggccaacgattacaatcccaatgtcatggcgccgggtgagaag

SEQ ID NO: 812751 - DNA, 75 bp, synthetic construct
  source 1..75: mol_type = other DNA
aggatgaagtgctgaggctgaaacagattagcgggctgacagagttgtttcaggaagaggatttcagctcggctt

SEQ ID NO: 812752 - DNA, 75 bp, synthetic construct
  source 1..75: mol_type = other DNA
tgcgcagggtgcttcatgaggtcagtccttttgcacaggagcctgtggactgtgtgctgtgggtgaaagcggatg

SEQ ID NO: 812753 - DNA, 75 bp, synthetic construct
  source 1..75: mol_type = other DNA
cgacacggtgctggtgaagtggcgctacagcgcgtttcatcgttctccgctggagcaaatgctcaaagagagtgg

SEQ ID NO: 812754 - DNA, 75 bp, synthetic construct
  source 1..75: mol_type = other DNA
aggatgaagtgctgagactgaaacagattagcggactgacggaattgtttcaggaagacgacttcagtccggcat

SEQ ID NO: 812755 - DNA, 75 bp, synthetic construct
  source 1..75: mol_type = other DNA
caggcctcacgtattgctgcgaccatccgacataaccgggccaggggcaaacatcagataacctcaatgtctgat

SEQ ID NO: 812756 - DNA, 75 bp, synthetic construct
  source 1..75: mol_type = other DNA
cagcctggcctgtgaactctttcctgagtggaaaccggcgtttgacgggctgctggaaaacggaggaactcgtca

SEQ ID NO: 812757 - DNA, 75 bp, synthetic construct
  source 1..75: mol_type = other DNA
caccagcgacgattaaaagtttgcagaagaaatcgctcaccgccgagaaggatttatttatcacggatggcgatg

SEQ ID NO: 812758 - DNA, 75 bp, synthetic construct
  source 1..75: mol_type = other DNA
catattcagcacagcagcgaacgaggaaggattcgagccggacgtaatagaggcggcacttgcccacgtcgacac

SEQ ID NO: 812759 - DNA, 75 bp, synthetic construct
  source 1..75: mol_type = other DNA
gttttggatcgcttgaagatgtttccctggctgatgccagaaaacgccgtagcgagtacaggacgttaatcagtg

SEQ ID NO: 812760 - DNA, 75 bp, synthetic construct
  source 1..75: mol_type = other DNA
attattagaaacgacgacattacatatcaactccgaaatatagatacagatgaagaagtaatcgtcacgcttcag

SEQ ID NO: 812761 - DNA, 75 bp, synthetic construct
  source 1..75: mol_type = other DNA
ggactgtaccaccagaacgacataagactggggagataacaggcgaaccgctaaagcggcccattattgaaccgg

SEQ ID NO: 812762 - DNA, 75 bp, synthetic construct
  source 1..75: mol_type = other DNA
ctgatgatgattccgtcgatgttaagcgcccttagcgtagtgcgggaaaaagagttggggtcgattatcaacctt

SEQ ID NO: 812763 - DNA, 75 bp, synthetic construct
  source 1..75: mol_type = other DNA
cgcagagatgtgcgcctgatgtttcacccttaacgatggcgtacatcgtcggccatgagtcctcaaatgggccgt

SEQ ID NO: 812764 - DNA, 75 bp, synthetic construct
  source 1..75: mol_type = other DNA
ttatctaaagaagaaaccgcgtcagaaagcgattcagagacttctgcgaaggttgaagaagaacaaccgaaggca

SEQ ID NO: 812765 - DNA, 75 bp, synthetic construct
  source 1..75: mol_type = other DNA
acccgtcgcttaaacaagagcaacgcaactggaataaaactgttcgtgatacaatgatcaatatcgggcagattc

SEQ ID NO: 812766 - DNA, 75 bp, synthetic construct
  source 1..75: mol_type = other DNA
caccatgaaaatgctcaccgggctgctgcctgccagcgaaggtgaagcgtggttgtttgggcaaccagtcgatcc

SEQ ID NO: 812767 - DNA, 75 bp, synthetic construct
  source 1..75: mol_type = other DNA
actgttatagtacggccctgaaatccaacccgcccggccagatagcattaagacacgcgctgtcctgctacaaca

SEQ ID NO: 812768 - DNA, 75 bp, synthetic construct
  source 1..75: mol_type = other DNA
gaagctgaggccgtcagcgttgcgaaagttctgctgaaggataataaaagttttgatatgggccttgcacaaatt

SEQ ID NO: 812769 - DNA, 75 bp, synthetic construct
  source 1..75: mol_type = other DNA
tcgcggcggtgcttggagacgtggctcgcgcccgcaacctcacccagcttgcccgcgatgtgggaatgagccgcc

SEQ ID NO: 812770 - DNA, 75 bp, synthetic construct
  source 1..75: mol_type = other DNA
tcatgaacagttaaaaaccgcgatgcttcacgccccggacgggcgtcttcgcctccggaatgttctgcaacatcc

SEQ ID NO: 812771 - DNA, 75 bp, synthetic construct
  source 1..75: mol_type = other DNA
cgtcggatgcgtgcgggcgatatcacggtggcgattgagatccctcccaatttcgggcgcgatatcgcgcgtggt

SEQ ID NO: 812772 - DNA, 75 bp, synthetic construct
  source 1..75: mol_type = other DNA
gtggctgctgttgttaaagatgttgagccaatgcaggaaaaggcggtatccaggttgtctgatcctgaactaagg

SEQ ID NO: 812773 - DNA, 75 bp, synthetic construct
  source 1..75: mol_type = other DNA
cttaataaagaagcgccgttcggactgtatgagcttctcatgcagacgatccccgacccagttcaggctatttct

SEQ ID NO: 812774 - DNA, 75 bp, synthetic construct
  source 1..75: mol_type = other DNA
ttatggtcagttaaaaatggcaatgatgcacgctccggacgggcgcatcagactacgtaaccagcttcagcatcc

SEQ ID NO: 812775 - DNA, 75 bp, synthetic construct
  source 1..75: mol_type = other DNA
ttactgaaaaccgctgttcccaaactggaaatatttaaaaatggccatgctcagggacaaccggtgcatcgtctg

SEQ ID NO: 812776 - DNA, 75 bp, synthetic construct
  source 1..75: mol_type = other DNA
gggcagtactttaattccggtgtcgtttatttagatttaaaaaaatgggctaacgcaaaactaacagaaaaagcg

SEQ ID NO: 812777 - DNA, 75 bp, synthetic construct
  source 1..75: mol_type = other DNA
attgcatttagagtttaatggagcggtggctgcagtagtcagggatgtagacccaatgcaggaaaaggcggtagt

SEQ ID NO: 812778 - DNA, 75 bp, synthetic construct
  source 1..75: mol_type = other DNA
tttgtaaaggcgatattagccaactattgcatctggatttaaacggagcggttgctgctgttgttaaagatgttg

SEQ ID NO: 812779 - DNA, 75 bp, synthetic construct
  source 1..75: mol_type = other DNA
ttagtgcaacatcactatatctcaggaattatagcaggagtctgttatctttgccgaaaatattaccgtaaataa

SEQ ID NO: 812780 - DNA, 75 bp, synthetic construct
  source 1..75: mol_type = other DNA
acaatacaatttatacaattaaaagtgaattaaaagacaaaacacatcaaaactataaaaagctgattacagaaa

SEQ ID NO: 812781 - DNA, 75 bp, synthetic construct
  source 1..75: mol_type = other DNA
gcaaagcttgcagagcaaaaccaattaagaatcacgttatatagaattaacactgataagctccagtgcttgcct

SEQ ID NO: 812782 - DNA, 75 bp, synthetic construct
  source 1..75: mol_type = other DNA
atgaaacaaatgtcactaattgagatggatggttttctgaaaggtaaatgcatcccacgagatctaaaggttaac

SEQ ID NO: 812783 - DNA, 75 bp, synthetic construct
  source 1..75: mol_type = other DNA
caagtagggggactagccggatattccgatgtagcaagtgcattacagcgatcaaccagtccaaccagtggccta

SEQ ID NO: 812784 - DNA, 75 bp, synthetic construct
  source 1..75: mol_type = other DNA
tatgccagaaaacgtaggtgctacaggtggttttggtaatatcttcgtttcgtggaaacaatctaccgaacgtga

SEQ ID NO: 812785 - DNA, 75 bp, synthetic construct
  source 1..75: mol_type = other DNA
acaaactggacaatggcagggcaagtacctgtaggtcaaactaactaccaactatatagtttagatccaaatcaa

SEQ ID NO: 812786 - DNA, 75 bp, synthetic construct
  source 1..75: mol_type = other DNA
ctatcgcaaaacaggtacaaccaactggacagcagcagggtctacagtaccgacacagttagagtttgatttata

SEQ ID NO: 812787 - DNA, 75 bp, synthetic construct
  source 1..75: mol_type = other DNA
atggtctaggactagaacccgcgttaatcaatcaacaaacttttacggaagttagtcaatggtgtttccaacagg

SEQ ID NO: 812788 - DNA, 75 bp, synthetic construct
  source 1..75: mol_type = other DNA
aagtattacaacttccggtaatgctgattactataacgtaattgatgcacaatatacgaacatcgatacactcta

SEQ ID NO: 812789 - DNA, 75 bp, synthetic construct
  source 1..75: mol_type = other DNA
cctgttatctatggcggtgagttgccacataaaaacggggtatcaggtggttcatacgtactgacaggttcaatt

SEQ ID NO: 812790 - DNA, 75 bp, synthetic construct
  source 1..75: mol_type = other DNA
gtcggtacggtactggctttcgcacgttcgctcggtgaatttggcgccaccatcacctttgtttcgaacattcct

SEQ ID NO: 812791 - DNA, 75 bp, synthetic construct
  source 1..75: mol_type = other DNA
gtgatgtcgtttccgttgatggtgcgggcaattcgtctggcgctggaaggggttgatgtcaaactggaacaggcc

SEQ ID NO: 812792 - DNA, 75 bp, synthetic construct
  source 1..75: mol_type = other DNA
acattgccaccgatcaagagaacgtaggctatgtaacgctaacctgcgtggaagcccctgaccagatgtatgacg

SEQ ID NO: 812793 - DNA, 75 bp, synthetic construct
  source 1..75: mol_type = other DNA
tcagatatcaccgttgatgaagctgttcggcaagacgggcaggtaatcgcacttagtcgtgattacagttggtca

SEQ ID NO: 812794 - DNA, 75 bp, synthetic construct
  source 1..75: mol_type = other DNA
acggcagcctattgtgatgctttcgagtactacgcgaatggtgcgatcagttaccaatcaagctataaagaaaac

SEQ ID NO: 812795 - DNA, 75 bp, synthetic construct
  source 1..75: mol_type = other DNA
taagatggttatcagtaataaccttattcagatctacgataacaataataaattacgtgtaagaatggggttgtg

SEQ ID NO: 812796 - DNA, 75 bp, synthetic construct
  source 1..75: mol_type = other DNA
tcagatttcgaaagatgagtatcttgatctgctctttgaagatttggccttaccgaatctgaaacaaaaccaaca

SEQ ID NO: 812797 - DNA, 75 bp, synthetic construct
  source 1..75: mol_type = other DNA
cattgtggcgggaatatgaacacctacaatccaccttcgaaaactttgctatgcaacatattcgcgatcaggacg

SEQ ID NO: 812798 - DNA, 75 bp, synthetic construct
  source 1..75: mol_type = other DNA
gtcgatgaacatgagtttttctactcgcaggaaactggcggcaccattgtttccagcgccctgaaactgatggat

SEQ ID NO: 812799 - DNA, 75 bp, synthetic construct
  source 1..75: mol_type = other DNA
aacattatttttcctccaatggtcggcttgcaggcaggcgaacacgtctggactgcggcattcggcttcctcatt

SEQ ID NO: 812800 - DNA, 75 bp, synthetic construct
  source 1..75: mol_type = other DNA
tgaactacaggtactaccgccaacgaacctacaggcagtacgtaaggggaatactacttctggttcaatcgtgga

SEQ ID NO: 812801 - DNA, 75 bp, synthetic construct
  source 1..75: mol_type = other DNA
gaatcgccagcgttttttacgccgttataaagcgcaaatcaaacagtcgatctccgaggccatcaataagcgttc

SEQ ID NO: 812802 - DNA, 75 bp, synthetic construct
  source 1..75: mol_type = other DNA
aggaacggctgcgcaaagagattgccgaattacgcgccaaaattgaacgcgttccgttcatcgacaccttcgatt

SEQ ID NO: 812803 - DNA, 75 bp, synthetic construct
  source 1..75: mol_type = other DNA
atttacttcttcctggatgaatttgtctttcagatttcgaaagatgagtatcttgatttgctctttgaagatttg

SEQ ID NO: 812804 - DNA, 75 bp, synthetic construct
  source 1..75: mol_type = other DNA
tggtacagtagcaggctttaaattaatcgccgacggagttactaatacatcggcggtgtactttgctgcgaacaa

SEQ ID NO: 812805 - DNA, 75 bp, synthetic construct
  source 1..75: mol_type = other DNA
cgaattgcgtgcaaagattgaacgggtcccctttatcgacaccttcgatttacgctacaagaattacgaaaaacg

SEQ ID NO: 812806 - DNA, 75 bp, synthetic construct
  source 1..75: mol_type = other DNA
gcaatctactttcgaaaactttgcgatgcagcatatacgcgatcaggatgatatttatcccgtgttccgcgagct

SEQ ID NO: 812807 - DNA, 75 bp, synthetic construct
  source 1..75: mol_type = other DNA
cgacgcacagccatgacggcgggcaagcggcgggaacttcatgcactggaagagaatttggccatcatcagcaac

SEQ ID NO: 812808 - DNA, 75 bp, synthetic construct
  source 1..75: mol_type = other DNA
catcacctttgtgtcgaacattcctggtgaaacgcgaaccattccttctgccatgtataccctgatccagacccc

SEQ ID NO: 812809 - DNA, 75 bp, synthetic construct
  source 1..75: mol_type = other DNA
gacataaaaaatatcgcgacacaccaacaatgggttaaaagtaaatttgccgcagtaggttattcatctgcacat

SEQ ID NO: 812810 - DNA, 75 bp, synthetic construct
  source 1..75: mol_type = other DNA
atgaccacatcgcattatgcaatcacccaggaaaaagtatttcgcttgctcgaacgtctggaggcgctcgccacg

SEQ ID NO: 812811 - DNA, 75 bp, synthetic construct
  source 1..75: mol_type = other DNA
gtaaaggtgttcgtcttgccggtctatatggcgtgaaacgaaccctcgatttaccacacgccgaaccgcttccgc

SEQ ID NO: 812812 - DNA, 75 bp, synthetic construct
  source 1..75: mol_type = other DNA
ttgtcaccagggcactgagtgacgccaccggggctggctggaaagtgtattccccgcgcaccctgccggtaatgc

SEQ ID NO: 812813 - DNA, 75 bp, synthetic construct
  source 1..75: mol_type = other DNA
acatttatcttcattggctatgcaagtcgtaatacaaggtgggacaaaactgagacacataaggcctcgcaatga

SEQ ID NO: 812814 - DNA, 75 bp, synthetic construct
  source 1..75: mol_type = other DNA
aaagtggcgcatatcgcggcttcctggacggcagacctgccggctggtacagggattaccgcagcgcagacgatt

SEQ ID NO: 812815 - DNA, 75 bp, synthetic construct
  source 1..75: mol_type = other DNA
gtgatcgccgttgaacgcaacgcggcagagcaagttttggcagcgttacattcccatccactggggaaagacgcg

SEQ ID NO: 812816 - DNA, 75 bp, synthetic construct
  source 1..75: mol_type = other DNA
ctgtatgacggaaatgattaccggaaggtgagagaaatttatatttatcctgatgcctccggggattcccgaaaa

SEQ ID NO: 812817 - DNA, 75 bp, synthetic construct
  source 1..75: mol_type = other DNA
atgccggaggttatttcatcgttaagcaattccctattgtcaaaccgaccggaagagtcacatcacttcggattt

SEQ ID NO: 812818 - DNA, 75 bp, synthetic construct
  source 1..75: mol_type = other DNA
ctcggcgaccacggagcaactattcttaatctgcgcgagcaactggggctggatggcgaactggtcagcgactgc

SEQ ID NO: 812819 - DNA, 75 bp, synthetic construct
  source 1..75: mol_type = other DNA
ttaatctgcgcgaacaactggggctggatggcgaactggtcagcgactgtgcggtactgacgccgctgattcaga

SEQ ID NO: 812820 - DNA, 75 bp, synthetic construct
  source 1..75: mol_type = other DNA
actgttcatcaacactgcgggcatgggggctatcccggcgaatattcactggggcgcacaaactctgaccgcagg

SEQ ID NO: 812821 - DNA, 75 bp, synthetic construct
  source 1..75: mol_type = other DNA
acaagcctgcatcactgcgacaggcgaaacgtctgcgcaaggccgggtataaagtcaggcgcggtaagcgctggc

SEQ ID NO: 812822 - DNA, 75 bp, synthetic construct
  source 1..75: mol_type = other DNA
acctgatggaagcctataagcaccttaaaccgattgcgctggcgggcgatgcgcgcaagtttaaggcgacaatca

SEQ ID NO: 812823 - DNA, 75 bp, synthetic construct
  source 1..75: mol_type = other DNA
gctgctacctttgccggtgcgccttcgctgacggtcgatgcagtcattgtcccttgcggcaatattgcggatatc

SEQ ID NO: 812824 - DNA, 75 bp, synthetic construct
  source 1..75: mol_type = other DNA
cgttgttgaccagctggcacatattgatctcactctggcccaggcggtggcgaaaaatctcggtatcgaactgac

SEQ ID NO: 812825 - DNA, 75 bp, synthetic construct
  source 1..75: mol_type = other DNA
ctcacggctatttccagccgtataaaaacttgagcgacatcaccaaagccgattttctgtctgatcagaacaaaa

SEQ ID NO: 812826 - DNA, 75 bp, synthetic construct
  source 1..75: mol_type = other DNA
atgtcgcaacataacgaaaagaacccacatcagcaccagtcaccactacacgattccagcgaagcgaaaccgggg

SEQ ID NO: 812827 - DNA, 75 bp, synthetic construct
  source 1..75: mol_type = other DNA
acctgatggaagcctacaaacaccttaaaccgattgcgctggcaggagacgcacgcaagtttaaggcgacaatca

SEQ ID NO: 812828 - DNA, 75 bp, synthetic construct
  source 1..75: mol_type = other DNA
gccgcaggagacaccggactttaaaaggacagacgttacggtcacgacccaaaattccgccaaatggaccagtga

SEQ ID NO: 812829 - DNA, 75 bp, synthetic construct
  source 1..75: mol_type = other DNA
caaagggaagatgctgcgcaacctgccaaagctgctgcatatccgtgaaatgccagaaattcaggctgtgcggat

SEQ ID NO: 812830 - DNA, 75 bp, synthetic construct
  source 1..75: mol_type = other DNA
ccgagaaaacggcagcgtctgatctggcgtctggccaaatatggcgtgattgctgcggcaaaacggcatgtgcgc

SEQ ID NO: 812831 - DNA, 75 bp, synthetic construct
  source 1..75: mol_type = other DNA
caggagacaccggactttaaaaggacagacgttacggtcacgacccaaaattccgccaaatggtccagtgaatag

SEQ ID NO: 812832 - DNA, 75 bp, synthetic construct
  source 1..75: mol_type = other DNA
aacagccagcgtgaaaagcgaggtgccggttttgaactgcgaacggatgagcatggggctgtacgtgcggcaaaa

SEQ ID NO: 812833 - DNA, 75 bp, synthetic construct
  source 1..75: mol_type = other DNA
tcccgcggttcacgcaaaagttgctttacgctgacgtttgaggggatcccctacagcgaaaccgtctgctggcgt

SEQ ID NO: 812834 - DNA, 75 bp, synthetic construct
  source 1..75: mol_type = other DNA
atggactgcggtttgtcgccgccaacgtgaatgagcgtggcggcgaaattgatctgataatgcgtgaaggccaga

SEQ ID NO: 812835 - DNA, 75 bp, synthetic construct
  source 1..75: mol_type = other DNA
cttttttgaaaaggttacggccttaattggcgaaaatggtgctggtaagtcctcgattttacaatccgtatttat

SEQ ID NO: 812836 - DNA, 75 bp, synthetic construct
  source 1..75: mol_type = other DNA
cgctggtgcaagccaatccggggattcatttcgatgtggatctggaagctcaagaagtgaaagcgggtgataaaa

SEQ ID NO: 812837 - DNA, 75 bp, synthetic construct
  source 1..75: mol_type = other DNA
tttgatgtatataattacacttgcattaatatttgttttttatcttttatccaaggataaaacacattccggtat

SEQ ID NO: 812838 - DNA, 75 bp, synthetic construct
  source 1..75: mol_type = other DNA
ggttgcggagtgcgtgattaataaattatgtccgtcgcattccgttgttttattttcctatccagatgaggatga

SEQ ID NO: 812839 - DNA, 75 bp, synthetic construct
  source 1..75: mol_type = other DNA
gattaatcatacaggtgttcattttgcggttgttccggcactgacaggtaagccgctgacaattaaccggattaa

SEQ ID NO: 812840 - DNA, 75 bp, synthetic construct
  source 1..75: mol_type = other DNA
gctgatatcctgagactgagaaagagcggaatgccggtggtgacaacgtccgtggaagcgagcgataacctgacg

SEQ ID NO: 812841 - DNA, 75 bp, synthetic construct
  source 1..75: mol_type = other DNA
gcaaacttatcaggtgctacctgcaccgggaacgcccccggtagcaccactgccatcgggggagccaacgcttta

SEQ ID NO: 812842 - DNA, 75 bp, synthetic construct
  source 1..75: mol_type = other DNA
gacctggcgggcgttcgcgcgccagtgcagacttatcaggtgctgcctgctccgggcgcggccccggctgaaccg

SEQ ID NO: 812843 - DNA, 75 bp, synthetic construct
  source 1..75: mol_type = other DNA
gtgattgcgccaagtttcgctgacatcttctatggcaacagctttaacaaccaactgctgccggtgaaattaagc

SEQ ID NO: 812844 - DNA, 75 bp, synthetic construct
  source 1..75: mol_type = other DNA
aacaaagatgcgaatagtaataaatttaatgagtctggttataaaaccacgctcttccatacctttaaagtcaat

SEQ ID NO: 812845 - DNA, 75 bp, synthetic construct
  source 1..75: mol_type = other DNA
tttactccttcggtaacgatatatatagctacgaaacaggcgcccactctgatttcgaatctattcgtgcggttg

SEQ ID NO: 812846 - DNA, 75 bp, synthetic construct
  source 1..75: mol_type = other DNA
cttgttatatattttaacattagctttaatttttgttttttatttaatatcaaaggataaagaaaacacatctca

SEQ ID NO: 812847 - DNA, 75 bp, synthetic construct
  source 1..75: mol_type = other DNA
tggggaatgaatcaggccacggcgctaatcacgacgcgctgtatcgctggatcaaatctgtcgatccttcccgcc

SEQ ID NO: 812848 - DNA, 75 bp, synthetic construct
  source 1..75: mol_type = other DNA
aacagtggacacgcgagctggagatggtggtcgaaaacggctgctataccctgaaagacaccttcgatgacacca

SEQ ID NO: 812849 - DNA, 75 bp, synthetic construct
  source 1..75: mol_type = other DNA
cgtattccgtagctatatcgacgatgaatatatgggccacaaatggcaatgcgttgaatttgctcgccgttttct

SEQ ID NO: 812850 - DNA, 75 bp, synthetic construct
  source 1..75: mol_type = other DNA
gacggaagcaaaacaccagcagcagtttttccagttccgtttatccgggcgaaccatcgaagtgaccagcgaata

SEQ ID NO: 812851 - DNA, 75 bp, synthetic construct
  source 1..75: mol_type = other DNA
tatttttgatggcgttaactcggcgtttcatttgtggtgcaacggacgctgggtcggttacgggcaggacagccg

SEQ ID NO: 812852 - DNA, 75 bp, synthetic construct
  source 1..75: mol_type = other DNA
tgatcctttgcgaatatgcccacgcaatgggtaacagtcttggcggtttcgctaaatactggcaggcgtttcgtc

SEQ ID NO: 812853 - DNA, 75 bp, synthetic construct
  source 1..75: mol_type = other DNA
attcattccccgttgccgcaagggcaacagtggacgcgcgagctggagatggtggtcgaaaacggctgctatacc

SEQ ID NO: 812854 - DNA, 75 bp, synthetic construct
  source 1..75: mol_type = other DNA
ctgccgatcctctggtcgctgttcccgcaccatcgttacctgctggataccgatttcactgttaatgatgaattg

SEQ ID NO: 812855 - DNA, 75 bp, synthetic construct
  source 1..75: mol_type = other DNA
gcccggtccggcgtggtcagccagcgatccggcgattgccggtgcggcaccgtcattaacccgtgttcatcagcg

SEQ ID NO: 812856 - DNA, 75 bp, synthetic construct
  source 1..75: mol_type = other DNA
cgcaccatcgttacctgctggataccgatttctccgtgaatgatgaactggtgaaaaccggttacgcagtgaaac

SEQ ID NO: 812857 - DNA, 75 bp, synthetic construct
  source 1..75: mol_type = other DNA
cacgctaccgacaaggtgctgaaagatgacaatctgctagcgctgttcgacattccgaaaatcctctggccgcgt

SEQ ID NO: 812858 - DNA, 75 bp, synthetic construct
  source 1..75: mol_type = other DNA
tgaactgggctgggatgctgccgggcaactgattgatggggaagggcgactggttaactgcgtgtggaaaacctg

SEQ ID NO: 812859 - DNA, 75 bp, synthetic construct
  source 1..75: mol_type = other DNA
gcagacttatcaggtgctgcctgctccgggcgcggccccggctgaaccgctgccgccggggagccaacgctttaa

SEQ ID NO: 812860 - DNA, 75 bp, synthetic construct
  source 1..75: mol_type = other DNA
aacaacaacctgtaccagagcctgttgatatagcgacggaaacgctgacgtacattaatccgtctcacgggcgtt

SEQ ID NO: 812861 - DNA, 75 bp, synthetic construct
  source 1..75: mol_type = other DNA
aactcggtcatcgatgctctgcttgaggtttctcagcgaatcgacagcaacgtaaacatgaatgccgatctcgcc

SEQ ID NO: 812862 - DNA, 75 bp, synthetic construct
  source 1..75: mol_type = other DNA
acgcattgttgaggcagtactgggtctggatggtgctttagcacaacagttcaatagcagcctgcaggttgcctg

SEQ ID NO: 812863 - DNA, 75 bp, synthetic construct
  source 1..75: mol_type = other DNA
tcgtatggcgtcagggagtgccagtgtggggattacgtcccaggaaaacactgatattagtgcgctgaagcgctt

SEQ ID NO: 812864 - DNA, 75 bp, synthetic construct
  source 1..75: mol_type = other DNA
gggtgtttattaccgccgataaacagccgtttgccagcgataagatgttgtcgatgaaggaagcgatagctcaac

SEQ ID NO: 812865 - DNA, 75 bp, synthetic construct
  source 1..75: mol_type = other DNA
caagaggtgaaagcgggagagaaaacttatcgctttaccatcgatgccttccgccgccactgcatgatgaatggt

SEQ ID NO: 812866 - DNA, 75 bp, synthetic construct
  source 1..75: mol_type = other DNA
cacatggccagccagcgccactggctggcggtcattacggcttactggtgctgcgtgtaccgtgaggcagaaagc

SEQ ID NO: 812867 - DNA, 75 bp, synthetic construct
  source 1..75: mol_type = other DNA
caatctggtcggtaaacttgataaagccccgatggctgatttcagtagtgccactattactaccggtagcctgcc

SEQ ID NO: 812868 - DNA, 75 bp, synthetic construct
  source 1..75: mol_type = other DNA
tggtcatcctgtctgttgccgcaattgtctggccagcgggttctatcagcacggcgactgaggcttatcaaaacg

SEQ ID NO: 812869 - DNA, 75 bp, synthetic construct
  source 1..75: mol_type = other DNA
cgatcgcattctggtgcatggcgacacggcaacctcttttgccgctaccctcgcagcttactatcatcgcattgc

SEQ ID NO: 812870 - DNA, 75 bp, synthetic construct
  source 1..75: mol_type = other DNA
gactctttatttattgcaaaagatatcatagataatgaccctaatataaagaacgctttacataataaatttaat

SEQ ID NO: 812871 - DNA, 75 bp, synthetic construct
  source 1..75: mol_type = other DNA
gtagtccccgccagttaaccaccaaacagaccggcgatgcgtgggaagtacaagcgcgtcgctggctggaaggca

SEQ ID NO: 812872 - DNA, 75 bp, synthetic construct
  source 1..75: mol_type = other DNA
gatgtcgtgctaaaaaacctagatggctcatttatccagataacgggtaagaacatcattctgggctgtgaaggt

SEQ ID NO: 812873 - DNA, 75 bp, synthetic construct
  source 1..75: mol_type = other DNA
acggctgaatggctggctttcggcggcactgaaaacagcgcgtattctgaccgtctgcgtggcggtaatgctgct

SEQ ID NO: 812874 - DNA, 75 bp, synthetic construct
  source 1..75: mol_type = other DNA
cagctttcttcctgccctctggcatggtttgaacagcggtatacgcgcctgtttgatgcgccgctctttaaacct

SEQ ID NO: 812875 - DNA, 75 bp, synthetic construct
  source 1..75: mol_type = other DNA
attcactgatttatgcggtagagtcccacacccctgtttttagaaagaaagctggtgaactggaaacacttttag

SEQ ID NO: 812876 - DNA, 75 bp, synthetic construct
  source 1..75: mol_type = other DNA
cctttgcgctggtgtggcactggctggcaagcgcctattttatcgtgctgtttttcttttcgttgttcgatccgg

SEQ ID NO: 812877 - DNA, 75 bp, synthetic construct
  source 1..75: mol_type = other DNA
tcgcaaacgctggtgaaagatattattaccggagtatttattcagtttgaaaacggcatgaacactggagatttg

SEQ ID NO: 812878 - DNA, 75 bp, synthetic construct
  source 1..75: mol_type = other DNA
acagtggacggtacgctttgccctcgacagccaggtgaaaaaacatttcgacctggcgggcgttcgcgcgccggt

SEQ ID NO: 812879 - DNA, 75 bp, synthetic construct
  source 1..75: mol_type = other DNA
ataatttcgatttcctagcgcgtagttttgccagaatgcacgcagaaggtcgcccggtcgatattctggccgtta

SEQ ID NO: 812880 - DNA, 75 bp, synthetic construct
  source 1..75: mol_type = other DNA
ctactttgaattgctggcaccaggtgaagaagcattaagcattgacgaatacgcggagtgtttgggatttaaagg

SEQ ID NO: 812881 - DNA, 75 bp, synthetic construct
  source 1..75: mol_type = other DNA
gactataaccaccgcgaggcccagaacatactgatgtccgtaccggcggatatgacccgtggagaaggttacgac

SEQ ID NO: 812882 - DNA, 75 bp, synthetic construct
  source 1..75: mol_type = other DNA
cctttaaaccgactggcgaccagcaaaaagacgctataacccatatcgaagttatgcaggaacgagcagtaaaag

SEQ ID NO: 812883 - DNA, 75 bp, synthetic construct
  source 1..75: mol_type = other DNA
attcactgattgatgcggtagagtcccacacccctgttttcagaaagaaagctgatgaactggaagcgcttttag

SEQ ID NO: 812884 - DNA, 75 bp, synthetic construct
  source 1..75: mol_type = other DNA
ttgcaggaaatcacaacagaacttaattcactgattgatgcggtagagtcccacacccctgttttcagaaagaaa

SEQ ID NO: 812885 - DNA, 75 bp, synthetic construct
  source 1..75: mol_type = other DNA
atgaagcgtgcggtatgggtatccgcgaagataacacgctgatcactaaagacacttcgcgttttgttccgcatt

SEQ ID NO: 812886 - DNA, 75 bp, synthetic construct
  source 1..75: mol_type = other DNA
gggcagagcaatttcgccaacggcagggggagctttggtttgtagaagaggagataaatgacagtgacatttata

SEQ ID NO: 812887 - DNA, 75 bp, synthetic construct
  source 1..75: mol_type = other DNA
tgttgcccgtacggttctgcgtgccgtccgtgacacggtggtctctgttgcccgcgctgtatggaactggatttt

SEQ ID NO: 812888 - DNA, 75 bp, synthetic construct
  source 1..75: mol_type = other DNA
acaacgcacaaaaaatcttgcaccgttgccttacgcccaccagcaacaaaaaccaccacaggaaaagacggtggt

SEQ ID NO: 812889 - DNA, 75 bp, synthetic construct
  source 1..75: mol_type = other DNA
tatgagtcggcatatttccagtggctatggctggaggatgcgcggcgcagcggcgttattccacgtgacgccgat

SEQ ID NO: 812890 - DNA, 75 bp, synthetic construct
  source 1..75: mol_type = other DNA
cggcgttattccgcgcgatgccgatcagtacaatgccattcaggagcgcctgatttcacgctttagcgagcttta

SEQ ID NO: 812891 - DNA, 75 bp, synthetic construct
  source 1..75: mol_type = other DNA
taccgctactttgtatcgttatgcttccggcatggctattgctggctggcaaaccgatgatgattgtgaatcgcc

SEQ ID NO: 812892 - DNA, 75 bp, synthetic construct
  source 1..75: mol_type = other DNA
tcgcagcagggatggtcgccgtatggtgcttaccacggttgcacgcgatgatgcatcaaatgaaaaatccggtgc

SEQ ID NO: 812893 - DNA, 75 bp, synthetic construct
  source 1..75: mol_type = other DNA
cgctgcccattgcgcattacggacagatgcagatggcagacattatcagcggtgcgattgtagcggcgattgcca

SEQ ID NO: 812894 - DNA, 75 bp, synthetic construct
  source 1..75: mol_type = other DNA
gcgtctgtgttgcctctgttgcccgtacggttctgcgcgctgttcgtgacacggtggtctctgttgcccgtgcgg

SEQ ID NO: 812895 - DNA, 75 bp, synthetic construct
  source 1..75: mol_type = other DNA
gaccgcgccctgtctgtggatgagtatttctggcgacacatcctgcagtgcggacatcagcaggtgctgtttgtg

SEQ ID NO: 812896 - DNA, 75 bp, synthetic construct
  source 1..75: mol_type = other DNA
ttcccggcagtgtttgtcggcgtggcattagggttgatgctgcatgagcacgttcccgccgttccagcggcaata

SEQ ID NO: 812897 - DNA, 75 bp, synthetic construct
  source 1..75: mol_type = other DNA
caatccccggcgtccccagttgcccctgaagcatcaaccgtcagcaccgtccctgcatcatcaccggctgaacct

SEQ ID NO: 812898 - DNA, 75 bp, synthetic construct
  source 1..75: mol_type = other DNA
ttgcccgtacggttctgcgtgccgtccgtgacacggtggtctctgttgcccgcgctgtatggaactggattttct

SEQ ID NO: 812899 - DNA, 75 bp, synthetic construct
  source 1..75: mol_type = other DNA
gatgcagagtatgaagccctgtaccgtgacattctgcccgaactggacctggtactgtggctgattaaagccgat

SEQ ID NO: 812900 - DNA, 75 bp, synthetic construct
  source 1..75: mol_type = other DNA
cgtacggttctgcgtgccgtccgtgacacggtggtctctgttgcccgtgcggtatggaactggattttcttctga

SEQ ID NO: 812901 - DNA, 75 bp, synthetic construct
  source 1..75: mol_type = other DNA
agagtatgaggccctgtaccgtgacattctgcctgaactggacctggtactgtggctgattaaagccgatgaccg

SEQ ID NO: 812902 - DNA, 75 bp, synthetic construct
  source 1..75: mol_type = other DNA
ttccggctgttccggcccgtacatccggttgttgccgtatcggcccgcaccggctgggaactggatacgctggtc

SEQ ID NO: 812903 - DNA, 75 bp, synthetic construct
  source 1..75: mol_type = other DNA
gctgtttgtggtgacgcaggccgacaaaacggagccctgccatgaatgggatatggccggcattcagccttctcc

SEQ ID NO: 812904 - DNA, 75 bp, synthetic construct
  source 1..75: mol_type = other DNA
acagcggagagcgtctgtgttgcctctgttgtccgtacggccctgcgcgctgttcgtgacacggtggtctctgtt

SEQ ID NO: 812905 - DNA, 75 bp, synthetic construct
  source 1..75: mol_type = other DNA
ggcaaaacggcagatgcagcaccaggtgaagaaccaccaggaaaacttcgcccgggagagagcgtgactgccgta

SEQ ID NO: 812906 - DNA, 75 bp, synthetic construct
  source 1..75: mol_type = other DNA
cagaatattcgcgaaaaaacggaggcgctattccgtctgttccggcccgtacatccggttgttgccgtatcggcc

SEQ ID NO: 812907 - DNA, 75 bp, synthetic construct
  source 1..75: mol_type = other DNA
cccgtaaggttctgcgcgctgttcgtgacaccgtggtctctgttgcccgcgcggtatggaactggattttcttct

SEQ ID NO: 812908 - DNA, 75 bp, synthetic construct
  source 1..75: mol_type = other DNA
tcggcctgcaccggctgggaactggatacgctggtcagtgcgctcatgacagcgcttcccgaccatgccgccagt

SEQ ID NO: 812909 - DNA, 75 bp, synthetic construct
  source 1..75: mol_type = other DNA
ggtactgtggctgattaaagccgatgaccgtgccctgtctgtggatgagtatttctggcgacacatactgcaccg

SEQ ID NO: 812910 - DNA, 75 bp, synthetic construct
  source 1..75: mol_type = other DNA
aaatcaggctttcagcaccagcgattactttttgctggcggtaattaaacttgccgccctggtcgttgctgccgc

SEQ ID NO: 812911 - DNA, 75 bp, synthetic construct
  source 1..75: mol_type = other DNA
gccagtggtgcagacatggatgctgcggtgcgggaggctcttcttcgtgatttcaatactccccctttaagaaag

SEQ ID NO: 812912 - DNA, 75 bp, synthetic construct
  source 1..75: mol_type = other DNA
acggttaaaagtgccggagaggacggcaataaacgttattttattgcgtctgcaccggataaagaccaggaatgg

SEQ ID NO: 812913 - DNA, 75 bp, synthetic construct
  source 1..75: mol_type = other DNA
ccgggaagaattactggttctctgaagatgccgccgtcaacactgcggtcagaaaaagaggcgtcttgtctgcag

SEQ ID NO: 812914 - DNA, 75 bp, synthetic construct
  source 1..75: mol_type = other DNA
ggcaactacggtgggacgtgtttgcgcggtgatgaatcactggttattaaaaaagagagtgatattgaaccgtta

SEQ ID NO: 812915 - DNA, 75 bp, synthetic construct
  source 1..75: mol_type = other DNA
gaatatatgggccacaaatggcaatgcgttgaatttgctcgccgttttctctttctgaactacggtgtggtcttc

SEQ ID NO: 812916 - DNA, 75 bp, synthetic construct
  source 1..75: mol_type = other DNA
aaaaacagatcctcaggcggcagaaaaattaaacaaattaattgaggggtacacatatggtgaagagcgaaaatt

SEQ ID NO: 812917 - DNA, 75 bp, synthetic construct
  source 1..75: mol_type = other DNA
acttgccgggcgcaccgatgaagagaaacaggcagacgctgatcggataaacctggcccttggcaacatcacgga

SEQ ID NO: 812918 - DNA, 75 bp, synthetic construct
  source 1..75: mol_type = other DNA
gcaccattggcatttacagcaataaagacgagatcaaacagtcaatggacgctgcaagcgcgcgcattgcagcag

SEQ ID NO: 812919 - DNA, 75 bp, synthetic construct
  source 1..75: mol_type = other DNA
ctggttgccaaatacaacgatgtgttcaatagcaatatcccgtatgaacactctggcgatccgcttgggttgaag

SEQ ID NO: 812920 - DNA, 75 bp, synthetic construct
  source 1..75: mol_type = other DNA
agctgaaaaagtttgccgcccgtatctcatcgcagcttttcatgatgtatgaggaactctgcgatgcatgggtgg

SEQ ID NO: 812921 - DNA, 75 bp, synthetic construct
  source 1..75: mol_type = other DNA
gacatttctgcgccggttgtggccgcgcattgagcgggttaatcagcgtaacgaaatgaatagggaggcgtcgct

SEQ ID NO: 812922 - DNA, 75 bp, synthetic construct
  source 1..75: mol_type = other DNA
gtgagctgcgcaagctgcctagcggggtaagtattgctgatgagtttgacgagcgtgtcgaagcaacacgcgccg

SEQ ID NO: 812923 - DNA, 75 bp, synthetic construct
  source 1..75: mol_type = other DNA
ttgcgcttttacaggtgcattaacactctattactattttatcggcttctttgggatacttgccgcgatagctat

SEQ ID NO: 812924 - DNA, 75 bp, synthetic construct
  source 1..75: mol_type = other DNA
ggataccctgctggcggcacgttctggtagtccgctggtgattggtctgggtatgggcgaaaactttatcgcttc

SEQ ID NO: 812925 - DNA, 75 bp, synthetic construct
  source 1..75: mol_type = other DNA
tgtggaagaggtgattgcaccgattttctacaccgttccgctgcagctactggcttaccacgtcgcgctgatcaa

SEQ ID NO: 812926 - DNA, 75 bp, synthetic construct
  source 1..75: mol_type = other DNA
aactacgactacgtgctgattgattgcccgcctagccttggcagaaagctggtggcggcattggtgatgtctacc

SEQ ID NO: 812927 - DNA, 75 bp, synthetic construct
  source 1..75: mol_type = other DNA
tccggcgtggctattgctggcaggtaaaccaatgatgattgtgaatcgcccgaagcaacagcccccccacgataa

SEQ ID NO: 812928 - DNA, 75 bp, synthetic construct
  source 1..75: mol_type = other DNA
acatccggttgttgccgtatcggcccgcaccggctgggaactggatacgctggtcagtgcgctaatgacagcact

SEQ ID NO: 812929 - DNA, 75 bp, synthetic construct
  source 1..75: mol_type = other DNA
gtgaagcgttaaaagcacgtggctataccttcgtttctgcaaccgacaccgaagtgattgcacatttggtgaact

SEQ ID NO: 812930 - DNA, 75 bp, synthetic construct
  source 1..75: mol_type = other DNA
ctgttatgcagaaaatcagtggtggcgtctccatcgccgggattaacgacatcatttcctgtgacgatttctacc

SEQ ID NO: 812931 - DNA, 75 bp, synthetic construct
  source 1..75: mol_type = other DNA
gcgatgtaatcgcgtcatacggagatacgctatcccctgaagcaattcaggagaaaatagcggatgcgatcgcca

SEQ ID NO: 812932 - DNA, 75 bp, synthetic construct
  source 1..75: mol_type = other DNA
tggtctgttcgtcgggcaccgatacggtgtcgtccagcgcaaggataaagaaacaggcgagatccgctacgagtg

SEQ ID NO: 812933 - DNA, 75 bp, synthetic construct
  source 1..75: mol_type = other DNA
gtcaccaatgccattttcggtaccaatgagttccgggcgtcagattatgagatcaccacagcacagtttggcacc

SEQ ID NO: 812934 - DNA, 75 bp, synthetic construct
  source 1..75: mol_type = other DNA
gcaatggccaaagcagctgataacgcagactggaaggcacgttgggggagtgtccataacgctgaccgtatgttg

SEQ ID NO: 812935 - DNA, 75 bp, synthetic construct
  source 1..75: mol_type = other DNA
gtgtccacctgcaaaataagtgggtgcttaagttacaggatcctggattcgggaccagacggtactcagacgacg

SEQ ID NO: 812936 - DNA, 75 bp, synthetic construct
  source 1..75: mol_type = other DNA
gctaacggtgttcgtcgataacgcgccagcaattaaggtctataaaaaatttggctttgagattgaagggactgg

SEQ ID NO: 812937 - DNA, 75 bp, synthetic construct
  source 1..75: mol_type = other DNA
cctgccatgaatgggatatggccggtattcagccttctcccgcacaggcacagaatattcgcgaaaaaacggagg

SEQ ID NO: 812938 - DNA, 75 bp, synthetic construct
  source 1..75: mol_type = other DNA
gggaggtcaccccggtcagtgatgttcacgctggcacccgggaagtgcggcgcttccgtctgagtggccacggtc

SEQ ID NO: 812939 - DNA, 75 bp, synthetic construct
  source 1..75: mol_type = other DNA
ttgcctctgttgtccgtacggccctgcgcgctgttcgtgacaccgtggtctctgttgcccgcgcggtatggaact

SEQ ID NO: 812940 - DNA, 75 bp, synthetic construct
  source 1..75: mol_type = other DNA
cgcaccggctgggaactggatacgctggtcagtgcgctcatgacagcacttcccgaccatgccgccagccccctg

SEQ ID NO: 812941 - DNA, 75 bp, synthetic construct
  source 1..75: mol_type = other DNA
acggctttgaaattgaagggactggtaagaagtacgcattgcgtaatggtgaatatgatcctacccacgtaatat

SEQ ID NO: 812942 - DNA, 75 bp, synthetic construct
  source 1..75: mol_type = other DNA
acatatgccagcaggcggcacctggtggtttaacgttgatcgccatgaagatgctatcagtctggtgaatcaaac

SEQ ID NO: 812943 - DNA, 75 bp, synthetic construct
  source 1..75: mol_type = other DNA
gtttacctctttctcagggagtttagtctccaggatttccggggcggttcaaagtttactcctgagcaagtcgcc

SEQ ID NO: 812944 - DNA, 75 bp, synthetic construct
  source 1..75: mol_type = other DNA
cgacaattacggcgaagacagttacaacgaagctttatcgctgaagcgggcaaatgtcgtcgccgatgcgtgggc

SEQ ID NO: 812945 - DNA, 75 bp, synthetic construct
  source 1..75: mol_type = other DNA
cgcactggctgggagctggatacgctggtcagtgcgctcatgacagcgcttcccgaccatgccgccagtcccctg

SEQ ID NO: 812946 - DNA, 75 bp, synthetic construct
  source 1..75: mol_type = other DNA
gaacaatggggcatgccgctgcctttaacgcaaagttctaaaccggtcatcaatgccgagcacgatggtcgccac

SEQ ID NO: 812947 - DNA, 75 bp, synthetic construct
  source 1..75: mol_type = other DNA
aaagttgcggtcattagcatgggcaacgatcctgaaaaagacttcaaattagatgattctcaaggcccagaagaa

SEQ ID NO: 812948 - DNA, 75 bp, synthetic construct
  source 1..75: mol_type = other DNA
gtgacattctgcccgaactggacctggtgctgtggctgattaaagccgatgaccgtgccctgtctgtggatgagt

SEQ ID NO: 812949 - DNA, 75 bp, synthetic construct
  source 1..75: mol_type = other DNA
gggcatcaccctgcgcgatttggtacacgctattccgctgtatgcgatcaaacaaggtctgctgaccgttgagaa

SEQ ID NO: 812950 - DNA, 75 bp, synthetic construct
  source 1..75: mol_type = other DNA
cgctgccggacttcattatgaaccgtggcggtgtgtcgctgcgtccgggtgacggcgtaatccactcctggctga

SEQ ID NO: 812951 - DNA, 75 bp, synthetic construct
  source 1..75: mol_type = other DNA
tccttaaaaccgaagcgaaaagtcgcgccaaaatgacgggagaggtggtttctgaagcccgcgataacttgaata

SEQ ID NO: 812952 - DNA, 75 bp, synthetic construct
  source 1..75: mol_type = other DNA
atgcctacgatacgccggatatgatccgcatcattaaagaacgcttctggctgtatgacgggaatgattaccgga

SEQ ID NO: 812953 - DNA, 75 bp, synthetic construct
  source 1..75: mol_type = other DNA
acgcgacgatgcccgaaaaatcatctccgaaggtggtgacccgggcgaaaagaagcgaaaggaaaaactcactca

SEQ ID NO: 812954 - DNA, 75 bp, synthetic construct
  source 1..75: mol_type = other DNA
cggcacggcttgttaaggttagccgtcccacaatttacaagatgattaacagtgggaagttaagttacacctctg

SEQ ID NO: 812955 - DNA, 75 bp, synthetic construct
  source 1..75: mol_type = other DNA
ccgtgaacagtttaccggtgcggtggaccggatatttgacacggcggagagcgtctgtgttgcctctgtttgccc

SEQ ID NO: 812956 - DNA, 75 bp, synthetic construct
  source 1..75: mol_type = other DNA
tatgccttacaacatggtgaagatttgcaggggatgtttaagaatgaaaaatatgaatatatgtcctgctttgtt

SEQ ID NO: 812957 - DNA, 75 bp, synthetic construct
  source 1..75: mol_type = other DNA
tcacgccggcacccgggaagtgcagcgcttccgtctgagtggtcacggttacagcatggttatcactgacctgcc

SEQ ID NO: 812958 - DNA, 75 bp, synthetic construct
  source 1..75: mol_type = other DNA
gactgagtacaggcaatggcatccggccatccgtctacggctgtccggaatttcagccgaatatcattcatccct

SEQ ID NO: 812959 - DNA, 75 bp, synthetic construct
  source 1..75: mol_type = other DNA
cctggtgtacccgtctgctttaccgtcccggagaagctcagtctgtgcagactgagtacaggcaatggcatctgg

SEQ ID NO: 812960 - DNA, 75 bp, synthetic construct
  source 1..75: mol_type = other DNA
gccacgaacccgtgattggcattatgggtaaaagcggggccggtaaatcctcactctgtaatgcgctgtttcagg

SEQ ID NO: 812961 - DNA, 75 bp, synthetic construct
  source 1..75: mol_type = other DNA
atgataaagcaactggtagcacctctggttttctcttctctgatactggcaggttgccaggctccacaaggcaag

SEQ ID NO: 812962 - DNA, 75 bp, synthetic construct
  source 1..75: mol_type = other DNA
gggaaaaagcggggccggtaaatcctcactctgtaatgcactgtttcagggggaggtcaccccggtcagtgatgt

SEQ ID NO: 812963 - DNA, 75 bp, synthetic construct
  source 1..75: mol_type = other DNA
catgaatgggatatggcaggtattcagccttctcccgcacaggcacagaatattcgcgaaaaaacggaggcggta

SEQ ID NO: 812964 - DNA, 75 bp, synthetic construct
  source 1..75: mol_type = other DNA
atggttatcactgacctgtccggggtgggcgagagccgggacagggatgcagagtatgaagccctgtaccgtgac

SEQ ID NO: 812965 - DNA, 75 bp, synthetic construct
  source 1..75: mol_type = other DNA
gggaggtcacaccggtcagtgatgttcacgccggcacccgggaagtgaagcgtttccgtctgagtggacacggtc

SEQ ID NO: 812966 - DNA, 75 bp, synthetic construct
  source 1..75: mol_type = other DNA
cgtcgcaaccggacacagaccacgttcaggcagatgagtcagaacttcaggccacaacagatactgcagaaccgg

SEQ ID NO: 812967 - DNA, 75 bp, synthetic construct
  source 1..75: mol_type = other DNA
cgcaacggcgcgggtaaatcgacattaatcaaactgttagccggtgaacttgcgccagtcagcggtgaaattggt

SEQ ID NO: 812968 - DNA, 75 bp, synthetic construct
  source 1..75: mol_type = other DNA
gcgtctgtattgcctctgttgcacgcacggttctgcgtgccgtccgtgactcggtggtctctgttgcccgcgcgg

SEQ ID NO: 812969 - DNA, 75 bp, synthetic construct
  source 1..75: mol_type = other DNA
gggaggtcaccccggtcagcgatgttcacgccggtacccgggaaatgcagcgcttccgtctgagtggccatggtc

SEQ ID NO: 812970 - DNA, 75 bp, synthetic construct
  source 1..75: mol_type = other DNA
tcaccggcgggaaggatgcccgcatcctgaaagattccgagaaaaccggtaactggtttgcgctgggtacaccgc

SEQ ID NO: 812971 - DNA, 75 bp, synthetic construct
  source 1..75: mol_type = other DNA
tccctgccttactcactttcccgtcacatcctggaacatctgcgcaaactcaccagtcacgaacccgtgattggc

SEQ ID NO: 812972 - DNA, 75 bp, synthetic construct
  source 1..75: mol_type = other DNA
catggtctttttgttcgttcagcccgatgccagcgctgctgacataagtgcgcagcaaataggtggggtgattat

SEQ ID NO: 812973 - DNA, 75 bp, synthetic construct
  source 1..75: mol_type = other DNA
tcacgccggcacccgggaagtgcggcgcttccgtctgagtggccacggtcacagcatggttatcactgacctgcc

SEQ ID NO: 812974 - DNA, 75 bp, synthetic construct
  source 1..75: mol_type = other DNA
atgacagcacttcccgaccatgccgccagtcccctgatgacccgcctgcaggacgagctgcgcacggagtctgtc

SEQ ID NO: 812975 - DNA, 75 bp, synthetic construct
  source 1..75: mol_type = other DNA
atgtttaaacgtttaatgatggtcgctttgctggtgattgcgccgctgagcgcggcaatcgcggcagatcagacc

SEQ ID NO: 812976 - DNA, 75 bp, synthetic construct
  source 1..75: mol_type = other DNA
aatccgtataagctgatggacgaggcggcgcagaaaacgttcgatcgcctgaagaatgagcaaccgcaaattcgg

SEQ ID NO: 812977 - DNA, 75 bp, synthetic construct
  source 1..75: mol_type = other DNA
ttgttgatcaggaactgctgccatacgtacaggtgaaatacgccggtgcgctggtgctgggccagtattacaaga

SEQ ID NO: 812978 - DNA, 75 bp, synthetic construct
  source 1..75: mol_type = other DNA
tggcgttctcttctctgctgctgacaggttgccagtcaccacaagggaaatttactcccgagcaaatcgccgcaa

SEQ ID NO: 812979 - DNA, 75 bp, synthetic construct
  source 1..75: mol_type = other DNA
taggaaaaaaatatcccatagccagtaacaagaccgcccagggccgcgccgagaaccgccgcgtcgcagtggtga

SEQ ID NO: 812980 - DNA, 75 bp, synthetic construct
  source 1..75: mol_type = other DNA
cattcagccttctcccgcacaggcacagaacattcgtgagaaaacagatgcggtattccggctgttccggcccgt

SEQ ID NO: 812981 - DNA, 75 bp, synthetic construct
  source 1..75: mol_type = other DNA
agcgtctgtgttgcctctgttgtccgtacggccctgcgcgctgttcgtgacaccgtggtctctgttgcccgcgcg

SEQ ID NO: 812982 - DNA, 75 bp, synthetic construct
  source 1..75: mol_type = other DNA
acccgcctgcaggacgagctgtgcacggaatctgtccgggggcaggcccgtgaacagtttaccggtgcggtggac

SEQ ID NO: 812983 - DNA, 75 bp, synthetic construct
  source 1..75: mol_type = other DNA
tcactctgtaatgcgctatttcagggggaggtcaccccggtcagtgatgttcacgccggcacccgggaagtgcag

SEQ ID NO: 812984 - DNA, 75 bp, synthetic construct
  source 1..75: mol_type = other DNA
gcgtctgtgttgcctctgttgtccgtacggccctgcgcgctgttcgtgactcggtggtctctgttgcccgcgctg

SEQ ID NO: 812985 - DNA, 75 bp, synthetic construct
  source 1..75: mol_type = other DNA
gccctgtctgtggatgagtatttctggcgacacatcctgcaccggggacatcagcaggtgctgtttgtggtgacg

SEQ ID NO: 812986 - DNA, 75 bp, synthetic construct
  source 1..75: mol_type = other DNA
gtcacgagcccgtgattggcattatgggtaaaagcggggccggtaaatcttcactctgtaatgccctgtttcagg

SEQ ID NO: 812987 - DNA, 75 bp, synthetic construct
  source 1..75: mol_type = other DNA
gaaacggctgatgtatttcgtgtccgtgtgcgtgaggcatttcgccgtcgtgttgcggagactgaacagcatggc

SEQ ID NO: 812988 - DNA, 75 bp, synthetic construct
  source 1..75: mol_type = other DNA
acttccggagcttcacgaagcgatgggcggtcaggggcgtctgtttgcccaggtaatggctaccactgccgaagg

SEQ ID NO: 812989 - DNA, 75 bp, synthetic construct
  source 1..75: mol_type = other DNA
acataaagaaattacgaaaaaaaattggccttacccagacagagtgcggtgagatttttggcgtaggcttaagta

SEQ ID NO: 812990 - DNA, 75 bp, synthetic construct
  source 1..75: mol_type = other DNA
cagagcagcgattacaggcgattgttgacgggaatttcgatgaaacgcaggtgagcagtgcggcgatgaaagcct

SEQ ID NO: 812991 - DNA, 75 bp, synthetic construct
  source 1..75: mol_type = other DNA
atgtgtacaacatgcggttgcggtgaaggcaacctgtatatcgagggtgatgaacataaccctcattccgcgttt

SEQ ID NO: 812992 - DNA, 75 bp, synthetic construct
  source 1..75: mol_type = other DNA
aaattcgtaattttttaaccggacaagcgttgacatcagttcttgatctgtttttttctgtaatatttttttgtg

SEQ ID NO: 812993 - DNA, 75 bp, synthetic construct
  source 1..75: mol_type = other DNA
ttatataccagagaccggacagattttaattgatgggcatgatttatcacttgcagatccagaatggttacgacg

SEQ ID NO: 812994 - DNA, 75 bp, synthetic construct
  source 1..75: mol_type = other DNA
aacacattatcgcgttattgacctcgttaactcagatccaacaactggccgatcgctaccttatctggcaggtga

SEQ ID NO: 812995 - DNA, 75 bp, synthetic construct
  source 1..75: mol_type = other DNA
aaaacacaccagaaaacatcaaacgtctgcggaaaaaaattggtctgacgcagaaagaatgtgccgaaatattca

SEQ ID NO: 812996 - DNA, 75 bp, synthetic construct
  source 1..75: mol_type = other DNA
gatttttgtttatccctccagtctactggctcatctatctgggcgcccggttgacttacaatggactgacaggag

SEQ ID NO: 812997 - DNA, 75 bp, synthetic construct
  source 1..75: mol_type = other DNA
tggcggaaacttcgatgaaacccaggtgagcagtgcggcgatgaaagcctggctggccttctgggccagcagtat

SEQ ID NO: 812998 - DNA, 75 bp, synthetic construct
  source 1..75: mol_type = other DNA
ggttggcgttttgggccagcagtatgcatcagccgatgctttaccgtttgcagcaggtgagcagccgccgcttgt

SEQ ID NO: 812999 - DNA, 75 bp, synthetic construct
  source 1..75: mol_type = other DNA
gcgcacgacttggaagtgacatcatcgcggtaaacgcggttctgatgactctactcacctttaccgcctatgcgc

SEQ ID NO: 813000 - DNA, 75 bp, synthetic construct
  source 1..75: mol_type = other DNA
agcttcgatctcggtgaaaaacacaaagtggcggtgctttccgttaccgaaggtgaagacaaaccgctgaaatat

SEQ ID NO: 813001 - DNA, 75 bp, synthetic construct
  source 1..75: mol_type = other DNA
cgagcagctgtttgccgacattgtgaaccgcgacctgccgctgtcgcataaacaggtcattaagtgcctgaagag

SEQ ID NO: 813002 - DNA, 75 bp, synthetic construct
  source 1..75: mol_type = other DNA
catgtcgattatgattgcttttttggttgccaggaatatagcaatcagttacgagcaagacgatttactctgtgg

SEQ ID NO: 813003 - DNA, 75 bp, synthetic construct
  source 1..75: mol_type = other DNA
cgccaaacaggcggggcgtaatgcggttggggtgatcctgaccggtatgggcaacgacggcgcggcgggaatgtt

SEQ ID NO: 813004 - DNA, 75 bp, synthetic construct
  source 1..75: mol_type = other DNA
ttaaaccgattgcgctggcgggagacgcgcgcaagtttaaagcaacaatcaaggtcgctgaccagggtgaagaag

SEQ ID NO: 813005 - DNA, 75 bp, synthetic construct
  source 1..75: mol_type = other DNA
cggccgaagccgccgcgcgcaacgctgcgccggtgccggttaaagcggtaaagacgccacctccggtgcattatc

SEQ ID NO: 813006 - DNA, 75 bp, synthetic construct
  source 1..75: mol_type = other DNA
aacctggtttccagccctggttccggtaaaaccaccctgctgacggaaaccttaatgcgcctgaaagacagcgtt

SEQ ID NO: 813007 - DNA, 75 bp, synthetic construct
  source 1..75: mol_type = other DNA
atgtgtgttgcttgtggttgtagtttagataacctgtacatcgagggggatgaacataaccctcattccgcgttt

SEQ ID NO: 813008 - DNA, 75 bp, synthetic construct
  source 1..75: mol_type = other DNA
tgatgctgctcaacaaagttgacctgtttggggtgcggacaaaatcttggactactttaggagtagttcatgtat

SEQ ID NO: 813009 - DNA, 75 bp, synthetic construct
  source 1..75: mol_type = other DNA
atgatagatgggcaagcattcctgacgaccaaatatctcggcgcgcaggggttgtttgttgctgttatcgttgca

SEQ ID NO: 813010 - DNA, 75 bp, synthetic construct
  source 1..75: mol_type = other DNA
tacctggacttctattaatgatgcattcgccaactgcggcggttcaggtatgacgttggggttattgttggctat

SEQ ID NO: 813011 - DNA, 75 bp, synthetic construct
  source 1..75: mol_type = other DNA
cattcgcgctaccggcacaccagcgattcaggtgaacaccggtaaaggctgccatcttgacgcacagatgattgc

SEQ ID NO: 813012 - DNA, 75 bp, synthetic construct
  source 1..75: mol_type = other DNA
acccagcgctgtatctggacggtgagtttgccgcgccagaaacgaatcactatccggccctgtcgctggacaagc

SEQ ID NO: 813013 - DNA, 75 bp, synthetic construct
  source 1..75: mol_type = other DNA
atcaagaccagattacaaaggtccggtattcgtagatttatctcgccttgaggagatttacatgtgggaagcaaa

SEQ ID NO: 813014 - DNA, 75 bp, synthetic construct
  source 1..75: mol_type = other DNA
ttgctgcgagttacataattgtcgatgccctactccgtagtgcagcagtttggatctttggcttgcccttctcgg

SEQ ID NO: 813015 - DNA, 75 bp, synthetic construct
  source 1..75: mol_type = other DNA
tggatctttggcttgtccttctccattggtggcacttacgtcgctggcgaggccagtacatggggcgtttaccta

SEQ ID NO: 813016 - DNA, 75 bp, synthetic construct
  source 1..75: mol_type = other DNA
atgaagaatattcgatacattgacaaaacggatgttgaaaacctgattaaaagtaaaacatctgatgatgttatt

SEQ ID NO: 813017 - DNA, 75 bp, synthetic construct
  source 1..75: mol_type = other DNA
cagcgtcgtgatgatttttataaatttagccagagaagtcgttataccatagtaaacgttgacgtttatgaacac

SEQ ID NO: 813018 - DNA, 75 bp, synthetic construct
  source 1..75: mol_type = other DNA
aggagatttacatgtgggaagcaaggctacttacgcatctttttattcgcaagatgactagcaacattacaaaac

SEQ ID NO: 813019 - DNA, 75 bp, synthetic construct
  source 1..75: mol_type = other DNA
ctggcacaatatcaactgggccaagtgccgtcgcgaggtcagaaggctgcaggcgcgtatcgtgaaggcaataca

SEQ ID NO: 813020 - DNA, 75 bp, synthetic construct
  source 1..75: mol_type = other DNA
gatcaacataatccgttatgcggacgattttgtgatcacggggataagccacgacacgctgtcagaaaaggttct

SEQ ID NO: 813021 - DNA, 75 bp, synthetic construct
  source 1..75: mol_type = other DNA
acctggagaaggccaggatgcagttgcgtgttttgttatcaggaccggttcctgcgatcactccgatgtcgcatg

SEQ ID NO: 813022 - DNA, 75 bp, synthetic construct
  source 1..75: mol_type = other DNA
ggtttgggtatattcattaatgaaaccaccggcgaatttccgcaaaaagaacaggaactgtttgaagggattgtg

SEQ ID NO: 813023 - DNA, 75 bp, synthetic construct
  source 1..75: mol_type = other DNA
cggtctttttcctgctggcggcatttcaacaagatgtcgggatctggccgccgctgggtgcaatgctcggtcttg

SEQ ID NO: 813024 - DNA, 75 bp, synthetic construct
  source 1..75: mol_type = other DNA
aaacatggtcaaaacccggcagcaagatgaaggctatatacacgctgaaaagaaggggttacaaacctcttccgc

SEQ ID NO: 813025 - DNA, 75 bp, synthetic construct
  source 1..75: mol_type = other DNA
atattaatatttataatttgtcagatgatacggctatttcttacgatgtaattccatttattaaacctctcgata

SEQ ID NO: 813026 - DNA, 75 bp, synthetic construct
  source 1..75: mol_type = other DNA
gaaaaacgggcaaacattccggcagatcgccatgaactggcacgccgatcacaaacgctggtctgcgcattatgc

SEQ ID NO: 813027 - DNA, 75 bp, synthetic construct
  source 1..75: mol_type = other DNA
ccaaaaaggatgtctgcggacatggcttccgggcgatggcctgtagtgcgctcagtgagtcagggttgtggagca

SEQ ID NO: 813028 - DNA, 75 bp, synthetic construct
  source 1..75: mol_type = other DNA
gtaacgatatcattcgagaaggcatgaaaccgagcaatgttcttggaactgctggagatattggcggttctatag

SEQ ID NO: 813029 - DNA, 75 bp, synthetic construct
  source 1..75: mol_type = other DNA
agatcaccgcccggctgaaaaactacgtcaccgatatcatgcactacgcgatgaaaaagcagttgctcaaagcga

SEQ ID NO: 813030 - DNA, 75 bp, synthetic construct
  source 1..75: mol_type = other DNA
atcgccatcaactggcatggcgagcataaacgctggtctgagcattacgcgaaaaccgttatgcgcaggctggaa

SEQ ID NO: 813031 - DNA, 75 bp, synthetic construct
  source 1..75: mol_type = other DNA
ctgagtgagtcggggctatggagcaaagaagccattgaaaagcagatgagccatcaggaaagaaacagcgtccgc

SEQ ID NO: 813032 - DNA, 75 bp, synthetic construct
  source 1..75: mol_type = other DNA
cgtgtatatgagtcatgcggagtaagagatctcgttatgggattcagggttaaggctgacggcatgacatgctca

SEQ ID NO: 813033 - DNA, 75 bp, synthetic construct
  source 1..75: mol_type = other DNA
gaaaccatttatctcgccggtcaggtcggttttgacccgcataccatgcaagtggtctcaacagatttcgatgaa

SEQ ID NO: 813034 - DNA, 75 bp, synthetic construct
  source 1..75: mol_type = other DNA
ttcccaatcacaaggcagcaaagctaagtgaattggatatgatgattgttaactcagtaccgccaggtggcaact

SEQ ID NO: 813035 - DNA, 75 bp, synthetic construct
  source 1..75: mol_type = other DNA
cggtgcggcggcgctctcttacgccactgtctatccgttagtgatgttcctgcgcattatcacaccccaattact

SEQ ID NO: 813036 - DNA, 75 bp, synthetic construct
  source 1..75: mol_type = other DNA
atctggtggggcagcctgcggatttacataatgcgcaactggtgattggtcaggaggtcgatacctcgctgtcta

SEQ ID NO: 813037 - DNA, 75 bp, synthetic construct
  source 1..75: mol_type = other DNA
ggctatcaggaagcaccgagcgtcagcgaagtcgccgtctggtttatttatctcatcccggcgctggtggcattt

SEQ ID NO: 813038 - DNA, 75 bp, synthetic construct
  source 1..75: mol_type = other DNA
cgtcggccattttgtttcacaggctgggatgacattaagtagcgacatgctgcatgttatccaggaatttggtct

SEQ ID NO: 813039 - DNA, 75 bp, synthetic construct
  source 1..75: mol_type = other DNA
cgcgtctggtttggtgataagatcgaagtgaatctcggggcaggcgaagcgggctccgtgagaggtagcctgagt

SEQ ID NO: 813040 - DNA, 75 bp, synthetic construct
  source 1..75: mol_type = other DNA
gctgatcgtgatggaaaatgtggaagagggcggattctttggtcggatgtgggatttcgtgatgatgaaattcca

SEQ ID NO: 813041 - DNA, 75 bp, synthetic construct
  source 1..75: mol_type = other DNA
gcacgatttagccattaaagatgtgcctattctcaatggcgacaaaatcatttgctcgcgactgaaacgagaaga

SEQ ID NO: 813042 - DNA, 75 bp, synthetic construct
  source 1..75: mol_type = other DNA
tcggcaagctgtactggtttatgccgccaagcgccaacctcgcgctgcgggagctggggatcgtgctgttcctct

SEQ ID NO: 813043 - DNA, 75 bp, synthetic construct
  source 1..75: mol_type = other DNA
cctcgttgcgtgtctccggattacgccttaatttgtttgccgttttggttgtcatcatcggtggcctggtcaccg

SEQ ID NO: 813044 - DNA, 75 bp, synthetic construct
  source 1..75: mol_type = other DNA
ggggtttttattatatgttatattattttttgctaaatatatattggctaaatttaaaaattccatttcagaaat

SEQ ID NO: 813045 - DNA, 75 bp, synthetic construct
  source 1..75: mol_type = other DNA
gctataccacaaaacgcgaatttttcgatccattgcgttttgttcgtggcggcaatcttatcgatcttgactggt

SEQ ID NO: 813046 - DNA, 75 bp, synthetic construct
  source 1..75: mol_type = other DNA
tgattcgcgcctccagtgctattccaggtttttatcgcaccggggtttcacttgatgggattaactattttgatg

SEQ ID NO: 813047 - DNA, 75 bp, synthetic construct
  source 1..75: mol_type = other DNA
agcagcaatctgaatgttgatggcatgaagacaggaaccacggcaggcgcgggatataatctggttgcttcggct

SEQ ID NO: 813048 - DNA, 75 bp, synthetic construct
  source 1..75: mol_type = other DNA
agatgccgttaagtggctgcatgacgtacttaacgaaaaattgccgctgggaacggacgcgtatggcgctgaacc

SEQ ID NO: 813049 - DNA, 75 bp, synthetic construct
  source 1..75: mol_type = other DNA
accttcttggtttttggttgctatgggaatgaataatattaaaggcaatctcgcaagtagtgaacattatgatcg

SEQ ID NO: 813050 - DNA, 75 bp, synthetic construct
  source 1..75: mol_type = other DNA
aatgtgcttggtaagcgtattcgtgatctgcactttaaagaacgctatgacgttgttatctcgcgcctgaatcgc

SEQ ID NO: 813051 - DNA, 75 bp, synthetic construct
  source 1..75: mol_type = other DNA
tcatcattagtgtttactatggtggggagactttgggaacaaaaaaatccattattattaattaatgcagcaaaa

SEQ ID NO: 813052 - DNA, 75 bp, synthetic construct
  source 1..75: mol_type = other DNA
tttatctactccaaaattacaccgcacaacgaatggcagttaattaaaaacaataataccgcggcggcactggcg

SEQ ID NO: 813053 - DNA, 75 bp, synthetic construct
  source 1..75: mol_type = other DNA
caatgcggtgagtattccagattattttgcctggggcggaatcgcactggtaattcagttactcgtttttgctgg

SEQ ID NO: 813054 - DNA, 75 bp, synthetic construct
  source 1..75: mol_type = other DNA
caatgcggcgcaaaaccgagcctccaccaccatggatgtgcaaagtgctgcagacgacaccggtttaccgatgct

SEQ ID NO: 813055 - DNA, 75 bp, synthetic construct
  source 1..75: mol_type = other DNA
ttggcgtggctatggtgattatttttctgtttatctactccaaaattacaccgcacaacgaatggcaattaatca

SEQ ID NO: 813056 - DNA, 75 bp, synthetic construct
  source 1..75: mol_type = other DNA
cctttagtgcctatttttttattggcgtggcgatggtgattattttcctgtttatctactccaaaattacaccgc

SEQ ID NO: 813057 - DNA, 75 bp, synthetic construct
  source 1..75: mol_type = other DNA
cagctccagactgcatagctcgaaatcgttataatgatactgacgttactgaggttctgaagccattattttatg

SEQ ID NO: 813058 - DNA, 75 bp, synthetic construct
  source 1..75: mol_type = other DNA
tgtggggattatgcgggtaattaacagcattaacaccattgaatcgttatttactggcgataagcgccgtaaata

SEQ ID NO: 813059 - DNA, 75 bp, synthetic construct
  source 1..75: mol_type = other DNA
tggtcaatggcgaggggttaagctggattggttatggtgccctgatcaccgcagttccgctgatgactgtcggca

SEQ ID NO: 813060 - DNA, 75 bp, synthetic construct
  source 1..75: mol_type = other DNA
cgttaagctgccgctgcgtggcccagttgaaaacaccgcgcgtgatattttgggtggcctgcgttcagcttgtac

SEQ ID NO: 813061 - DNA, 75 bp, synthetic construct
  source 1..75: mol_type = other DNA
cataaacactattctgtcgaagagtggcaagcgtttatcaacaattcttccgctgatgtgctgaaacatgtgatg

SEQ ID NO: 813062 - DNA, 75 bp, synthetic construct
  source 1..75: mol_type = other DNA
gcggttctatgacagtgcgggacgccggattattaaaagaaccgtgcacaacgccatgaaagccgccgtagaacg

SEQ ID NO: 813063 - DNA, 75 bp, synthetic construct
  source 1..75: mol_type = other DNA
tggtttttatcgcaccggagtttcacttgatggaattaactattttgatggtggcgtcagcgatgcgatcccggt

SEQ ID NO: 813064 - DNA, 75 bp, synthetic construct
  source 1..75: mol_type = other DNA
atgacgcgccaacctttgtgcaaagcgcgctggatgccggtgccagcgggtatttaaccaaacgctgtgggccgg

SEQ ID NO: 813065 - DNA, 75 bp, synthetic construct
  source 1..75: mol_type = other DNA
cagtgcgcgacatctggttacagacggtagaagcattacgcgatacatctcacacacggaactacgccatcggtg

SEQ ID NO: 813066 - DNA, 75 bp, synthetic construct
  source 1..75: mol_type = other DNA
atgcccaaattggggatgcagtcgatccggcgcagacaactgatcgacgccacgctggaagcaataaatgaagtg

SEQ ID NO: 813067 - DNA, 75 bp, synthetic construct
  source 1..75: mol_type = other DNA
atcgtttcgtcatcgctttcggctggtcgcgacagtttccagcaaggtttgtgtgaagtgcttagcctgctacaa

SEQ ID NO: 813068 - DNA, 75 bp, synthetic construct
  source 1..75: mol_type = other DNA
cgataataacttcccgttttcctccagccgctggcctaatatggcggatgacaacgagtttattctacttaatgt

SEQ ID NO: 813069 - DNA, 75 bp, synthetic construct
  source 1..75: mol_type = other DNA
ggcctacaataaaagaataacagatatctttatgacaaagcataaaagcggtgtagtaaaatattgtggtaaaga

SEQ ID NO: 813070 - DNA, 75 bp, synthetic construct
  source 1..75: mol_type = other DNA
gttggggtgatcctgaccggtatgggcaacgacggtgcggcgggaatgttggcgatgcgtcaggcgggggcatgg

SEQ ID NO: 813071 - DNA, 75 bp, synthetic construct
  source 1..75: mol_type = other DNA
gcctggtttcacccgctcttttgccgacagacttaataagctttgccagatcggggttaaagaagccgaagacgg

SEQ ID NO: 813072 - DNA, 75 bp, synthetic construct
  source 1..75: mol_type = other DNA
gtgtggtgttcggtatgccgcgcgaggccatcaatctggggggcgtctgcgaagtggtcgatcttagccaggtaa

SEQ ID NO: 813073 - DNA, 75 bp, synthetic construct
  source 1..75: mol_type = other DNA
ctgtccatcaattatcatgctctctgtttttatattaataataatatgcattgaactctggatgctcctctctgt

SEQ ID NO: 813074 - DNA, 75 bp, synthetic construct
  source 1..75: mol_type = other DNA
gggaactcaatggagaaagctgtatttcactggaggaagaaccgccccccaaacagcagatagtctgcagccggt

SEQ ID NO: 813075 - DNA, 75 bp, synthetic construct
  source 1..75: mol_type = other DNA
acccttgcgcaaaacgaagcaagttgcgtggtgttcggcatgcgcgcgaggccatcaatatgggtggtgtctgcg

SEQ ID NO: 813076 - DNA, 75 bp, synthetic construct
  source 1..75: mol_type = other DNA
tcatcacagcgttgaagattttaacgctacgctgccgaaatctcgtctgccgcaaaacatcaccttaaccgaagt

SEQ ID NO: 813077 - DNA, 75 bp, synthetic construct
  source 1..75: mol_type = other DNA
tctatttaatgttacagctgaagatatgcttgatccatgttctaaccttaaggtgttcgaaaaaataatctcgga

SEQ ID NO: 813078 - DNA, 75 bp, synthetic construct
  source 1..75: mol_type = other DNA
atgactggaagcaaacgttgcgcacacatggtttgcgggcaacgccatccacccttgctacactgcagtgccttg

SEQ ID NO: 813079 - DNA, 75 bp, synthetic construct
  source 1..75: mol_type = other DNA
cagttggagaaaaaaaaagtggagatgctatctgcataagatggggcaacctccacggaacaagagcagagcaaa

SEQ ID NO: 813080 - DNA, 75 bp, synthetic construct
  source 1..75: mol_type = other DNA
gctataccacaaaacgcgaatttttcgatccagtgcgttttgtgcgtggcggaaatcttatcgatctggactggc

SEQ ID NO: 813081 - DNA, 75 bp, synthetic construct
  source 1..75: mol_type = other DNA
ggaaatcttatcgatctcgactggctggtggaggccaccgcaagccagatgccgttgcaaatggataccgccgcg

SEQ ID NO: 813082 - DNA, 75 bp, synthetic construct
  source 1..75: mol_type = other DNA
attccgccagcgccagtcgccaacgatacgctggttaccgaggtgatagacgccccgcaggcgaatgacccgaca

SEQ ID NO: 813083 - DNA, 75 bp, synthetic construct
  source 1..75: mol_type = other DNA
accctgccgcaccattggcaaaattaagtgaactgccaatgatgaccgcccgccgtctcagttctggcagcaaac

SEQ ID NO: 813084 - DNA, 75 bp, synthetic construct
  source 1..75: mol_type = other DNA
gtcgcgacactttccagcaaggtttgtgtgaagtgcttagcctgttacaagcgggataccagcgcgtgttgatgg

SEQ ID NO: 813085 - DNA, 75 bp, synthetic construct
  source 1..75: mol_type = other DNA
gaatttggtctgaaagagaaaggctacaccagtctggtggttgttccggtgggtcatcacagcgttgaagatttt

SEQ ID NO: 813086 - DNA, 75 bp, synthetic construct
  source 1..75: mol_type = other DNA
tggtgcagagcgcattttatggaggttattttttaattgcaataccagcatcccttgtgattaaaaagaccagtt

SEQ ID NO: 813087 - DNA, 75 bp, synthetic construct
  source 1..75: mol_type = other DNA
ggcggtcaggggcgtctgtttgcccaggtaatggctaccactgctgaagggatggtgaatgacgcacgtaaattg

SEQ ID NO: 813088 - DNA, 75 bp, synthetic construct
  source 1..75: mol_type = other DNA
ttgcgctggtgattgaagctggcgatgagtggcaatgtgaaacacagccagccattgcgggcaatgaaacaacac

SEQ ID NO: 813089 - DNA, 75 bp, synthetic construct
  source 1..75: mol_type = other DNA
gcgcaggcgctgtgtaaagagatcgatgcaacctgtactttctctaaccaggcattcgacagcctgatcccaagc

SEQ ID NO: 813090 - DNA, 75 bp, synthetic construct
  source 1..75: mol_type = other DNA
ccacgtctgtcgtggtgctatgtacggcaccggatgaagcgacagcccaggatttagccgccaaagtgctggcgg

SEQ ID NO: 813091 - DNA, 75 bp, synthetic construct
  source 1..75: mol_type = other DNA
cttacctgatggctgcatttaactatggtctgaaagctgataacgatccgatgaacacaagtgtagggattactt

SEQ ID NO: 813092 - DNA, 75 bp, synthetic construct
  source 1..75: mol_type = other DNA
tacagcgtcaatttcctgcctaaagtaaaaatcgatgtggcgattgccgatgatcaactcgatgaggtgatcgat

SEQ ID NO: 813093 - DNA, 75 bp, synthetic construct
  source 1..75: mol_type = other DNA
agcagaaccgcatcatcaaaatcttctcggtggtatccgtggtattcctgccgccgacgctcgttgcttccagct

SEQ ID NO: 813094 - DNA, 75 bp, synthetic construct
  source 1..75: mol_type = other DNA
cctttatcgacctgaaaaatggtcgtattgatggggtatttggtgacacagcggtggttaatgaatggctgaaaa

SEQ ID NO: 813095 - DNA, 75 bp, synthetic construct
  source 1..75: mol_type = other DNA
ggaacagttcgccggggccaccaacgttgggccgctgatgcagcatctgattcgcttctgtgtttatgctggtgg

SEQ ID NO: 813096 - DNA, 75 bp, synthetic construct
  source 1..75: mol_type = other DNA
cttacctgatggctgcatttaactatggactgaaagcagataacgatccgatgaacacaagtgtagggattactt

SEQ ID NO: 813097 - DNA, 75 bp, synthetic construct
  source 1..75: mol_type = other DNA
tcataaacagcggggacggcgacgccggagatctccttgatgatgcaatgccgactgccgcacgtcgattctacc

SEQ ID NO: 813098 - DNA, 75 bp, synthetic construct
  source 1..75: mol_type = other DNA
acctcggcggctggcgcaccgtcttttgggttgcttcggtgttaatggcactgatggcgctggcattatggcgtg

SEQ ID NO: 813099 - DNA, 75 bp, synthetic construct
  source 1..75: mol_type = other DNA
gtaatcgcctgaccgcaggttacatgaccagctactttattggcggtgccgccggttcgctaatttcagcctcag

SEQ ID NO: 813100 - DNA, 75 bp, synthetic construct
  source 1..75: mol_type = other DNA
gcgaccgtatccagaatcacgctttgaatgacgtcagctcgaaacactatgatcgttatgattacttgcctgaaa

SEQ ID NO: 813101 - DNA, 75 bp, synthetic construct
  source 1..75: mol_type = other DNA
aaccattcaagctggaagacgttcgtgaagcgttatcttccattggtattcagggcctgaccgtcactgaagtga

SEQ ID NO: 813102 - DNA, 75 bp, synthetic construct
  source 1..75: mol_type = other DNA
aacaagacgtttgctactttttataaggtcattaataaagaaaaatatctggaaagtattcaggtacattttctg

SEQ ID NO: 813103 - DNA, 75 bp, synthetic construct
  source 1..75: mol_type = other DNA
ctgctggaatgcctgaagtctcatcatccatatcaaaccccggaacttctggttttacctgttacacacggagac

SEQ ID NO: 813104 - DNA, 75 bp, synthetic construct
  source 1..75: mol_type = other DNA
atggacgagagtattttaactaacgcaacattattaaagtactggaagttagttcggggcacgactaaaccacgc

SEQ ID NO: 813105 - DNA, 75 bp, synthetic construct
  source 1..75: mol_type = other DNA
gtattttgtggggtacgatgctggcagtgatgcgcttgtccagctttgcgccgattgcctggtttgccaaagcct

SEQ ID NO: 813106 - DNA, 75 bp, synthetic construct
  source 1..75: mol_type = other DNA
atgtcacctcgtcagataaggggttattattgcgaaatcatcgcttcacggaaagacgtcagaatgaaagctaca

SEQ ID NO: 813107 - DNA, 75 bp, synthetic construct
  source 1..75: mol_type = other DNA
atgactataaaaatggcgttttgtctcacgaagatttcctgagcataattcgtttaattgaatcttatgttttcc

SEQ ID NO: 813108 - DNA, 75 bp, synthetic construct
  source 1..75: mol_type = other DNA
ggcgggcaggggcgtctgttcgcacaggtaatggcgacaaccgccgaagggatggtgaatgacgcgcgtaaactg

SEQ ID NO: 813109 - DNA, 75 bp, synthetic construct
  source 1..75: mol_type = other DNA
gaacaacgacgggaacgccagaaacaagggatagagaaagcaaggaaagacggcaaatataaaggtcgtaaacct

SEQ ID NO: 813110 - DNA, 75 bp, synthetic construct
  source 1..75: mol_type = other DNA
cggacgacgacgagcgactgcgcgtacaatctgaactcggccagagcttggcaacccgcccggaactggaagaca

SEQ ID NO: 813111 - DNA, 75 bp, synthetic construct
  source 1..75: mol_type = other DNA
ccagcgccgaacaggccgcagccttactgaaagcgatgagccatcccaaacgcctgttgatcctgtgtatgcttt

SEQ ID NO: 813112 - DNA, 75 bp, synthetic construct
  source 1..75: mol_type = other DNA
cctaaacggttgctgattctgtgcatgcttagcggttcccccggcaccagcgcgggagagctgacgcgcattacc

SEQ ID NO: 813113 - DNA, 75 bp, synthetic construct
  source 1..75: mol_type = other DNA
cggaactgaagtggactttcggctacccgggcgcaattatctttatgatcctcgcgggcctggcgccgtatctgt

SEQ ID NO: 813114 - DNA, 75 bp, synthetic construct
  source 1..75: mol_type = other DNA
agaggcgcgtcaccgagggcaaaccagtaccgcctgtgcgccgggcgattgcagcaccggctgccgagcatggcc

SEQ ID NO: 813115 - DNA, 75 bp, synthetic construct
  source 1..75: mol_type = other DNA
tgttaacgctcaggtgaaacacgatactccaataatcaggactgtatcagatcctaacgttacgcgcgtgcgcct

SEQ ID NO: 813116 - DNA, 75 bp, synthetic construct
  source 1..75: mol_type = other DNA
cagcgctaacgtaaccgaactacagcagaccatcgcgacgcttgaaagctcaacaagccaatcaatcgaaaaact

SEQ ID NO: 813117 - DNA, 75 bp, synthetic construct
  source 1..75: mol_type = other DNA
gaaaacttcgaggaaattacagacgccgtgctgaatgaagttatggaaggcgagcaattccagaacatgatcaag

SEQ ID NO: 813118 - DNA, 75 bp, synthetic construct
  source 1..75: mol_type = other DNA
gacagcaaacgcacaggccgccctggttgggtagttatgtgggatggctggttcagacttcaggatatggttgag

SEQ ID NO: 813119 - DNA, 75 bp, synthetic construct
  source 1..75: mol_type = other DNA
gcatccggttgcccatacgggtgtacgcaaaatggtggataaaaacgcattaagtctgtggatgcgagaacgtag

SEQ ID NO: 813120 - DNA, 75 bp, synthetic construct
  source 1..75: mol_type = other DNA
atacactaacaccagcacaggcgcagaaagaagggcgggtcttgcgcttgttacgagaagctcaggatcatgggc

SEQ ID NO: 813121 - DNA, 75 bp, synthetic construct
  source 1..75: mol_type = other DNA
ctgatgcgagcgtttctcgtctcgatcaagctatcgctgacgaatcaagcgcccgcgctcaggcaatatcaggaa

SEQ ID NO: 813122 - DNA, 75 bp, synthetic construct
  source 1..75: mol_type = other DNA
atccgcatatacaatactgatggtgcggtggttaaaagctacgaaacaacgaaatacagttatgatttttatggt

SEQ ID NO: 813123 - DNA, 75 bp, synthetic construct
  source 1..75: mol_type = other DNA
aagaaacatctgtcattatggcgatcgacgttaaaccgtcctcatcctcaacatggtcgtctattaaggccgtgc

SEQ ID NO: 813124 - DNA, 75 bp, synthetic construct
  source 1..75: mol_type = other DNA
cgtaacgggaccgttttcgctgtatccactgaagcagcaaaacccgttttatgccggatcaccagcgtagccgaa

SEQ ID NO: 813125 - DNA, 75 bp, synthetic construct
  source 1..75: mol_type = other DNA
ggccagatctcagcgtctttcgattctgtaaactcaaacattacagaatggtcgcaggcaatggctacggctgac

SEQ ID NO: 813126 - DNA, 75 bp, synthetic construct
  source 1..75: mol_type = other DNA
aaacggcacatatacgacacctttctatgttacaaatggtgcaatgtatgtgcgcgaagcgtttattaaaaacgc

SEQ ID NO: 813127 - DNA, 75 bp, synthetic construct
  source 1..75: mol_type = other DNA
ctgtctgaaactggcgaaactggggcgatggcatgacagcaaacgcaccggtcgccccggttgggtagtcatgtg

SEQ ID NO: 813128 - DNA, 75 bp, synthetic construct
  source 1..75: mol_type = other DNA
tggaaaggctgcatggaaagcagggagctatcttactcctttgacaaggttaatggagtctccgtccaagacggt

SEQ ID NO: 813129 - DNA, 75 bp, synthetic construct
  source 1..75: mol_type = other DNA
gaggcaggcgatctgctggacatgtgggaaaggcgcgtcaccgagggtaagccagtgccgccggtacgccgggct

SEQ ID NO: 813130 - DNA, 75 bp, synthetic construct
  source 1..75: mol_type = other DNA
attgcagcaccggctgccgagcacggtccgacgccgatccagctgctgctggcgaagtacaaccgaaacaagtcg

SEQ ID NO: 813131 - DNA, 75 bp, synthetic construct
  source 1..75: mol_type = other DNA
gtattgatgctcagggcggtagcggtattcagactgtgaccgacttacaccagttattgaaaatgcatgcgccgc

SEQ ID NO: 813132 - DNA, 75 bp, synthetic construct
  source 1..75: mol_type = other DNA
atcaccgtcacggcagtggtgattggtattttgtggggcaccatgctggcggtgatgcgcttgtccagctttgcg

SEQ ID NO: 813133 - DNA, 75 bp, synthetic construct
  source 1..75: mol_type = other DNA
ttggcactggcacacagtctaggtatgccagtcgtggattcgtaggatctctattcggaccgtcatttggtcttg

SEQ ID NO: 813134 - DNA, 75 bp, synthetic construct
  source 1..75: mol_type = other DNA
aactcaataacggattcactccggcgggtaatgtcctggctgcacctaccggatttgatgtgcctttgcctgaag

SEQ ID NO: 813135 - DNA, 75 bp, synthetic construct
  source 1..75: mol_type = other DNA
tgatcgtgttgtatccggcagcgctctcttcaggaacgatgctctggcggaaaatatctcccgctggcttactat

SEQ ID NO: 813136 - DNA, 75 bp, synthetic construct
  source 1..75: mol_type = other DNA
atgcagacccgggataacctcgagcgcatggtggttatcaaggcgtttatcgcggtgcgggtgctgggcctgcgg

SEQ ID NO: 813137 - DNA, 75 bp, synthetic construct
  source 1..75: mol_type = other DNA
ttcccggccagcatggcgaactttcgcacccaggaagacctgaacgaattccgccgtcagtggctgctggcgttt

SEQ ID NO: 813138 - DNA, 75 bp, synthetic construct
  source 1..75: mol_type = other DNA
gtgaccgccggagtgctcaacggtgatgctggcgatcgggtactgcataacgtgcgtacgctgctgccgggtaat

SEQ ID NO: 813139 - DNA, 75 bp, synthetic construct
  source 1..75: mol_type = other DNA
actacagcggtagaggcgggaatggagcgcgtcaccgatgcgttcggcaagctcacgctgatgggccacttcgac

SEQ ID NO: 813140 - DNA, 75 bp, synthetic construct
  source 1..75: mol_type = other DNA
ctgctggtggcggttcagttagcaccggtggaaaaggtatcgcttccagtgtcgttttatcccatgcgatagcta

SEQ ID NO: 813141 - DNA, 75 bp, synthetic construct
  source 1..75: mol_type = other DNA
aatcgagctcaaccctgcccgtctgttaaaaccggcgatgtttggtgcttccatggctaaaccgcgtgagcgctg

SEQ ID NO: 813142 - DNA, 75 bp, synthetic construct
  source 1..75: mol_type = other DNA
gcaggggctaggctccgtgagagtgtgcgatttatcgcgttcatatttgtttgcacacctgagcaaagtccgaca

SEQ ID NO: 813143 - DNA, 75 bp, synthetic construct
  source 1..75: mol_type = other DNA
gaggcgtatgtcatcaaggatgccgtcgataaattacagagggcaatggccgaagaaggtttttccccgcgatag

SEQ ID NO: 813144 - DNA, 75 bp, synthetic construct
  source 1..75: mol_type = other DNA
gcggcgggtaatgacgttcgcggcctgtatgagcatgaccacagcatgttactggggcgcacccgttccggcacg

SEQ ID NO: 813145 - DNA, 75 bp, synthetic construct
  source 1..75: mol_type = other DNA
cccaccgttcgttgtttgcactgcaccctgaattacgcccggcaggaaataatcgtcatcgctgggctgacctgg

SEQ ID NO: 813146 - DNA, 75 bp, synthetic construct
  source 1..75: mol_type = other DNA
gccgaccattgcgctgactaacagcatcgcttttgccaacgtgccggatgtggagcgtgatttcccgcgcattcg

SEQ ID NO: 813147 - DNA, 75 bp, synthetic construct
  source 1..75: mol_type = other DNA
caaccaatattccgctgctgatcaccgccgcaagttcggcagtgctgggcgtttttgcgttgttcttgccagata

SEQ ID NO: 813148 - DNA, 75 bp, synthetic construct
  source 1..75: mol_type = other DNA
tgccaatgtgccagatgttgagcgtgattttccgcgcatccgcgtgatgggtaccatcggctggattgcttctgg

SEQ ID NO: 813149 - DNA, 75 bp, synthetic construct
  source 1..75: mol_type = other DNA
cgggcagcaagcggaaaaattacggaatctgtttctgaaatggggggattttattgagcatgagatcattgagtc

SEQ ID NO: 813150 - DNA, 75 bp, synthetic construct
  source 1..75: mol_type = other DNA
caagctgaaaaattaaaaaatttatttatagaatgggggatgcgtattttcatgaaaggagatcactcaataact

SEQ ID NO: 813151 - DNA, 75 bp, synthetic construct
  source 1..75: mol_type = other DNA
ttctctgaaatcttctttatgctggcattgccgtttttcactaaacgctttggtatcaaaaaggtattattgctt

SEQ ID NO: 813152 - DNA, 75 bp, synthetic construct
  source 1..75: mol_type = other DNA
gtgtttattcactttgtcagcaggcaggggcgaaatcttctggtgaatataaaagacatcagtttcgtcgttcag

SEQ ID NO: 813153 - DNA, 75 bp, synthetic construct
  source 1..75: mol_type = other DNA
gcagcgcactcttactaccgccagcagcctcgacgatatgctaatgcgctttcaccgctgggctcgcgatctcgg

SEQ ID NO: 813154 - DNA, 75 bp, synthetic construct
  source 1..75: mol_type = other DNA
ttctacctcgacatcatcaaagaccgtcagtacaccgccaaagcggatagcgtggcgcgtcgtagctgccagact

SEQ ID NO: 813155 - DNA, 75 bp, synthetic construct
  source 1..75: mol_type = other DNA
gtatcggcgttaccgattacaccattctcggcacggtgaaaggtgcagagcttgagctgctgcgctttactcatc

SEQ ID NO: 813156 - DNA, 75 bp, synthetic construct
  source 1..75: mol_type = other DNA
ccaaaattattatgttttaggtatggtgatttaccgccatacctcttttgtatttatctcgcaatgatgttgttt

SEQ ID NO: 813157 - DNA, 75 bp, synthetic construct
  source 1..75: mol_type = other DNA
aactatagtaagaggagtagtaaaatttgaagagacaattactgatgtggttttatggatctcaactactacaaa

SEQ ID NO: 813158 - DNA, 75 bp, synthetic construct
  source 1..75: mol_type = other DNA
gccttgcagcacataagccattgtcggtaccgacaacgctgaaggcagggccgttgttgagttctgaaaaactga

SEQ ID NO: 813159 - DNA, 75 bp, synthetic construct
  source 1..75: mol_type = other DNA
gcttgctgaaaatcagctcgatctgaatcccggagagaaaacgattgatgcgcagataatggatctcgcggatga

SEQ ID NO: 813160 - DNA, 75 bp, synthetic construct
  source 1..75: mol_type = other DNA
ttatcgcttttgtggaagatccagacggttacaaaattgaattgattgaagagaaagacgccggtcgcggtctgg

SEQ ID NO: 813161 - DNA, 75 bp, synthetic construct
  source 1..75: mol_type = other DNA
gcgttggcgatctgcaacgctccatcgatttttataccaaagtgctgggcatgaaactgctgcgtaccagcgaaa

SEQ ID NO: 813162 - DNA, 75 bp, synthetic construct
  source 1..75: mol_type = other DNA
tttgccggtcacgctgctgatatgtatctggaaggttctgaccagcaccgtggctggttcatgtcttctttgatg

SEQ ID NO: 813163 - DNA, 75 bp, synthetic construct
  source 1..75: mol_type = other DNA
gatggaagaagtggctaaacgcgttgaagttgacggcatccaggcgtggtgggatcttgatgcgaaagagatcct

SEQ ID NO: 813164 - DNA, 75 bp, synthetic construct
  source 1..75: mol_type = other DNA
acgcacagtcttgaggttgctcagatcgcccgaagtatcgcgtcagacctcaaactggttaacccggtggtggtt

SEQ ID NO: 813165 - DNA, 75 bp, synthetic construct
  source 1..75: mol_type = other DNA
tttgctggtgccatactgatgtatttcgctgcacaacagacaacgtttgccgggttcttcccgttactgctggcc

SEQ ID NO: 813166 - DNA, 75 bp, synthetic construct
  source 1..75: mol_type = other DNA
acttgcaggatatagcaccaaatatatttttgaattagcgagacagggatataaggaagcagaatttttgacaga

SEQ ID NO: 813167 - DNA, 75 bp, synthetic construct
  source 1..75: mol_type = other DNA
ctggcagcaaacatcgccaatgccgatacccccggttatcaggcgcgcgatatcgattttgccagtgaacttaaa

SEQ ID NO: 813168 - DNA, 75 bp, synthetic construct
  source 1..75: mol_type = other DNA
caggcgctgacgcctcctaccgcagaactgcaataccgtattccggaccagccttcgctggacggtaataccgtc

SEQ ID NO: 813169 - DNA, 75 bp, synthetic construct
  source 1..75: mol_type = other DNA
tcctgctgattattatgaagagcttttcaggttaaggggcttagaatacccgccggaaaatccccgcttccggcc

SEQ ID NO: 813170 - DNA, 75 bp, synthetic construct
  source 1..75: mol_type = other DNA
cagcctatgtgtacgcattgtgctgcgttgctgcactggctggattgatgtttggctattcgacggcagtgataa

SEQ ID NO: 813171 - DNA, 75 bp, synthetic construct
  source 1..75: mol_type = other DNA
atttttgaattagcgagacagggatataaggaagcagaatttttgacagagcgttctgccagtactattgctgaa

SEQ ID NO: 813172 - DNA, 75 bp, synthetic construct
  source 1..75: mol_type = other DNA
tcactggcagtcgatgaaactgattattctgccgcaggcgttccgcgcgatggtgccgctgctgctcactcaggg

SEQ ID NO: 813173 - DNA, 75 bp, synthetic construct
  source 1..75: mol_type = other DNA
cctcaaccattggtgagcgtgatggtacgcaggtcgagatgatcctgtttgccggatttgtttattttgttatta

SEQ ID NO: 813174 - DNA, 75 bp, synthetic construct
  source 1..75: mol_type = other DNA
gaaactgattattctgccgcaggcgttccgcgcgatggtgccgctgctgctcactcagggcatcgtactgtttca

SEQ ID NO: 813175 - DNA, 75 bp, synthetic construct
  source 1..75: mol_type = other DNA
caaccagtgtggttgcactgacgatgacctcaacgcaacacattccggcgcaggcgctgacgcctcctaccgcag

SEQ ID NO: 813176 - DNA, 75 bp, synthetic construct
  source 1..75: mol_type = other DNA
gcggtttcatctggtcgggccatcatgggggcagcaaaaataaacttgcaggatatagcaccaaatatatttttg

SEQ ID NO: 813177 - DNA, 75 bp, synthetic construct
  source 1..75: mol_type = other DNA
tacctgatcgtgccgggttttctgcaaaacgtgctgggattatcaccaaaaacagatatccgcttaatttctgca

SEQ ID NO: 813178 - DNA, 75 bp, synthetic construct
  source 1..75: mol_type = other DNA
cacgcaggcacagcgcatggcacaggctgccgccagtctgagcactgacaaaatgcaaatcccgatcaccaccga

SEQ ID NO: 813179 - DNA, 75 bp, synthetic construct
  source 1..75: mol_type = other DNA
aaaagcaaaagacaaagagggatgcagacattgtcttgctgaaattatgcaacaaaatattgcggtgatgctgcc

SEQ ID NO: 813180 - DNA, 75 bp, synthetic construct
  source 1..75: mol_type = other DNA
ttatcatcgctcaaatatgcccatcctgtgtgagatgattgagcaactgtgggtcaggatgggacctggtttaca

SEQ ID NO: 813181 - DNA, 75 bp, synthetic construct
  source 1..75: mol_type = other DNA
gctatcatgaactactcgccgcgttaaaagtaaaagacaaagagggatgcagacattgtcttgctgaaattatgc

SEQ ID NO: 813182 - DNA, 75 bp, synthetic construct
  source 1..75: mol_type = other DNA
gcgttctattacatctttgccaatggttatctgaccgaagttggcatgaaaaacgccaccggctggatgacgctc

SEQ ID NO: 813183 - DNA, 75 bp, synthetic construct
  source 1..75: mol_type = other DNA
tatgtcggtcttgatgccatggcctcagatctgatccgcacttatatcccggcgcaatatcacaacgatcctcgc

SEQ ID NO: 813184 - DNA, 75 bp, synthetic construct
  source 1..75: mol_type = other DNA
gtgcgtgaagcattattacgtctggtttcggtgaatgcgctttctgtcgcacctgcgcaagcatttacagttccg

SEQ ID NO: 813185 - DNA, 75 bp, synthetic construct
  source 1..75: mol_type = other DNA
gcaacgaaggttatgcggtggaggtaccggagttgtacgcggccattgatgaatccgcagtaacgatcggcaagg

SEQ ID NO: 813186 - DNA, 75 bp, synthetic construct
  source 1..75: mol_type = other DNA
ggcgcagtatcacaacgacccgcgacttaccgtgctggttggtgctgaccttgtggctgccgaagagctgcgcct

SEQ ID NO: 813187 - DNA, 75 bp, synthetic construct
  source 1..75: mol_type = other DNA
agagacgcaaacgcaatccacggtgccggataaaaacgaccgcgccactggcgatggtccatcccaggtgaatta

SEQ ID NO: 813188 - DNA, 75 bp, synthetic construct
  source 1..75: mol_type = other DNA
ggatcagcacccggaagtgaaaactgtctcctatgacagttatcaaaatgcctttatcgatctgaaaaatggccg

SEQ ID NO: 813189 - DNA, 75 bp, synthetic construct
  source 1..75: mol_type = other DNA
tactggcatcctgtgcgttcggcgcttctgccgcagagaaaatcaattttggcgtatcagcgacctatccgccgt

SEQ ID NO: 813190 - DNA, 75 bp, synthetic construct
  source 1..75: mol_type = other DNA
ggagaaactgaataacgcactggcagccgttaaagccgacggtacgtatcagaaaatcagtgatcaatggttccc

SEQ ID NO: 813191 - DNA, 75 bp, synthetic construct
  source 1..75: mol_type = other DNA
catgccccggctggaatgatcttgccggtgacctccggcgattatgcaatcccggtgaccaacggtagtggtgcc

SEQ ID NO: 813192 - DNA, 75 bp, synthetic construct
  source 1..75: mol_type = other DNA
tgtgctgcggttcccgcatgttctggttcgataagcaggataagcgcgccgtattcagcgacatccgcgctgagg

SEQ ID NO: 813193 - DNA, 75 bp, synthetic construct
  source 1..75: mol_type = other DNA
aaaatactcgtcagcatttaatgacgggcgtttcacacatgattcccttcgtggtatcgggcggtattttgctgg

SEQ ID NO: 813194 - DNA, 75 bp, synthetic construct
  source 1..75: mol_type = other DNA
tgaccaacagcctgacccagtggcttcaggggatgcagcagggcagcattgttatgctggcggtgatcatgggtc

SEQ ID NO: 813195 - DNA, 75 bp, synthetic construct
  source 1..75: mol_type = other DNA
cgtcgccggcatctaccgtgagaaggcatccggcgcacgcgccgaccggcctgagctgctgcgcatgatcggcga

SEQ ID NO: 813196 - DNA, 75 bp, synthetic construct
  source 1..75: mol_type = other DNA
caacgtcttcttggacataaatctgattcaatggcggcgcattatagggacagtcgcgggcgggagtgggacaaa

SEQ ID NO: 813197 - DNA, 75 bp, synthetic construct
  source 1..75: mol_type = other DNA
acgttaagccaatcatcggccagcgcactggaaagaacgacaaaacccactggatttctttcgtcaaagacggtg

SEQ ID NO: 813198 - DNA, 75 bp, synthetic construct
  source 1..75: mol_type = other DNA
gcgcgaaaccggtaaagcggcgctggtgatggggtgcgttggggttactgaaggggcgattcctttcgccgctgc

SEQ ID NO: 813199 - DNA, 75 bp, synthetic construct
  source 1..75: mol_type = other DNA
ctgcgctggccccgtgcgctatcggtgcctgggttggtaacagctttggtgcgggcttctttggtgcgctgatcg

SEQ ID NO: 813200 - DNA, 75 bp, synthetic construct
  source 1..75: mol_type = other DNA
acatgtgctgtggcagtcgcatgttctggtttgataagaatgacgaacgggcgatatttagcgatatcagaaaag

SEQ ID NO: 813201 - DNA, 75 bp, synthetic construct
  source 1..75: mol_type = other DNA
tcgcggcttttacttcatctgtcatctgcccgttgatgaaatctttcatcgaacgtttttcccagtacgggaaca

SEQ ID NO: 813202 - DNA, 75 bp, synthetic construct
  source 1..75: mol_type = other DNA
cattgctgccgtgggtatttgtatcccgccgctggggatggggctggcgacgctgattggtcgtaaaaatttctc

SEQ ID NO: 813203 - DNA, 75 bp, synthetic construct
  source 1..75: mol_type = other DNA
cattgctgccgtggggatttgtgttccaccgctggggatggggctggcgacgctgattggtcgtaaaaatttctc

SEQ ID NO: 813204 - DNA, 75 bp, synthetic construct
  source 1..75: mol_type = other DNA
cttcaatgaccggttatcaagaaatcctgactgatccttcctattctcgtcaaatcgttactcttacttatcccc

SEQ ID NO: 813205 - DNA, 75 bp, synthetic construct
  source 1..75: mol_type = other DNA
tatcggcagcctggttttgggctggatctccgaccatatcgggcggcaaaaaatcttcaccttcagctttatgct

SEQ ID NO: 813206 - DNA, 75 bp, synthetic construct
  source 1..75: mol_type = other DNA
ctgctggcatcggcagctctgcccgcgttgttgattacgttattacgctggggaacgccagaatcgccacgctgg

SEQ ID NO: 813207 - DNA, 75 bp, synthetic construct
  source 1..75: mol_type = other DNA
gatgaacaggctgccgccgcgctgctgttggcgcagagaaaaaacggtacgccgatgtctttaaccgcgttgagc

SEQ ID NO: 813208 - DNA, 75 bp, synthetic construct
  source 1..75: mol_type = other DNA
aacgtcagttggcgacaatatctggattattcccggattatgtgtctctcatgacgataaccacaatgtgatgcg

SEQ ID NO: 813209 - DNA, 75 bp, synthetic construct
  source 1..75: mol_type = other DNA
aaaaaagtaagtgattggttttccaatagagataaactaaacactaattataatatatttagtggaggagaattt

SEQ ID NO: 813210 - DNA, 75 bp, synthetic construct
  source 1..75: mol_type = other DNA
ctttgattcccgctatgtgagagatgtcagacttggcacacgagttgttcagaccatgaagaaaggcgtgatgta

SEQ ID NO: 813211 - DNA, 75 bp, synthetic construct
  source 1..75: mol_type = other DNA
acctgccgctgattgccagcaacttccgtaataccgaagacctctcttcttacctgaagcgccataacatcgtgg

SEQ ID NO: 813212 - DNA, 75 bp, synthetic construct
  source 1..75: mol_type = other DNA
tcgaaaccgacatcccggtatttggtatctgcctcggtcatcagctgctggcgctggcaagtggggcgaagacca

SEQ ID NO: 813213 - DNA, 75 bp, synthetic construct
  source 1..75: mol_type = other DNA
ggcgttagaaaaagctcgcgcgttcccaggtctgaatggcatggatctggcaaaagaagtgaccaccgcagaagc

SEQ ID NO: 813214 - DNA, 75 bp, synthetic construct
  source 1..75: mol_type = other DNA
cgccgatgaagaatcttctcaggtacatgcccaaggtctggtgattcgcgacctgccgctgattgccagcaactt

SEQ ID NO: 813215 - DNA, 75 bp, synthetic construct
  source 1..75: mol_type = other DNA
catgcgcaaggtctggtgattcgcgatctgccgctgattgccagcaacttccgtaataccgaagacctctcttct

SEQ ID NO: 813216 - DNA, 75 bp, synthetic construct
  source 1..75: mol_type = other DNA
gctgacgcgtttactgcgtgagaaaggcgcacagaatggctgcattatcgcaggcgataacccggatgcggcgct

SEQ ID NO: 813217 - DNA, 75 bp, synthetic construct
  source 1..75: mol_type = other DNA
aaaacgtggcgttctgatttacgaagcggattcaaagaggcttttcgcgtactgtggccacacggcgttctcata

SEQ ID NO: 813218 - DNA, 75 bp, synthetic construct
  source 1..75: mol_type = other DNA
cagcgcattgacctcgcgatgtatccggcagtaaaaaactggtatgagcgaatccgttcgcgtcctgctaccggg

SEQ ID NO: 813219 - DNA, 75 bp, synthetic construct
  source 1..75: mol_type = other DNA
aggttgaaactcagcgtctgtatcatgtattgaataagcgcctggaaaactcgccctggctgggcggtgaaaact

SEQ ID NO: 813220 - DNA, 75 bp, synthetic construct
  source 1..75: mol_type = other DNA
tgaacgcgccgccacattacagtggttattctggcaggttggcggactgggtccgatgctcggacaaaaccatca

SEQ ID NO: 813221 - DNA, 75 bp, synthetic construct
  source 1..75: mol_type = other DNA
gtgtaggtacgctggacgttatcggtaatgcttacgaatatctgattaaaaactttgccgccagcggtgggcaga

SEQ ID NO: 813222 - DNA, 75 bp, synthetic construct
  source 1..75: mol_type = other DNA
tggcctgaaccttacattaagatcaacggtaattgctctataattggtacagtaattttctcaggaaaaccaaga

SEQ ID NO: 813223 - DNA, 75 bp, synthetic construct
  source 1..75: mol_type = other DNA
aacatatccctgccctgtaccctgtggcgaaatgacttatatattgagggtgattggtgattcaatgattgatga

SEQ ID NO: 813224 - DNA, 75 bp, synthetic construct
  source 1..75: mol_type = other DNA
aaagaagaaaccgaacattttaataacgcttttaatttttattcctctcgaaacaggacgaaaaaaaataacaga

SEQ ID NO: 813225 - DNA, 75 bp, synthetic construct
  source 1..75: mol_type = other DNA
ctgaaaatgaataaggacggtactatcattctcaatggtaaaagtatccagattgaaggaaaagataaaataaat

SEQ ID NO: 813226 - DNA, 75 bp, synthetic construct
  source 1..75: mol_type = other DNA
cggctgaccttatggaaagacgcgcacgtggcgcgaataacatgcctacggtcaccaataccctgcttcccatca

SEQ ID NO: 813227 - DNA, 75 bp, synthetic construct
  source 1..75: mol_type = other DNA
cggcagtcaagaactggcatgagcggatccgttcacgccctgccaccgggctggcactgctaaaagcacaacacg

SEQ ID NO: 813228 - DNA, 75 bp, synthetic construct
  source 1..75: mol_type = other DNA
tgaacgcgccgccacattacagtggttattctggcaggtaggcggactggggccgatgcttgggcagaatcatca

SEQ ID NO: 813229 - DNA, 75 bp, synthetic construct
  source 1..75: mol_type = other DNA
cggatccgttcgcgccctgccaccgggcaggcactgctaaaagcacaactcggtgatgagcgttcggatagttaa

SEQ ID NO: 813230 - DNA, 75 bp, synthetic construct
  source 1..75: mol_type = other DNA
tggggccatgatgaggccgagcacgacaagtttggtcgcttccgtcgcggcgtgccaccgaaaaccaaaggggat

SEQ ID NO: 813231 - DNA, 75 bp, synthetic construct
  source 1..75: mol_type = other DNA
gccattgcgccagacgatatcgccattacgctgcatcataagttatgtcatgccgcgcgccagctactggagcag

SEQ ID NO: 813232 - DNA, 75 bp, synthetic construct
  source 1..75: mol_type = other DNA
tccttacaatgctgttcctcaagtacatttcagatgtctggcaggatcactatgacgaatataaagagcaatatg

SEQ ID NO: 813233 - DNA, 75 bp, synthetic construct
  source 1..75: mol_type = other DNA
ataaatttggtcgtttccgtcgcggtgtaccgccgaagactaaaggcgattacgcctttatctcgcatatgatcg

SEQ ID NO: 813234 - DNA, 75 bp, synthetic construct
  source 1..75: mol_type = other DNA
gcataacatggtgcgtgccgtcgccgatccgtggccgggtgccttcagctatgttggtaatcaaaaatttaccgt

SEQ ID NO: 813235 - DNA, 75 bp, synthetic construct
  source 1..75: mol_type = other DNA
atgtcgtattaccgctggtggcaattgccacacctattgaatacacccgtaatcctctgcgtgtatttgaattag

SEQ ID NO: 813236 - DNA, 75 bp, synthetic construct
  source 1..75: mol_type = other DNA
tatcgtggtcgcgcgccgctgaactgggtgctggtcaacggtgaaacggaaactggcgttacattgcaccgaatg

SEQ ID NO: 813237 - DNA, 75 bp, synthetic construct
  source 1..75: mol_type = other DNA
ggtctaccagagaaattgttctacggtacggggattccggctgcgattctgattttcaaaaagcagaaagtggat

SEQ ID NO: 813238 - DNA, 75 bp, synthetic construct
  source 1..75: mol_type = other DNA
acggctgataattagccctgacctgatagcagattttcgtgcattaccatttgcagacgcatcgtttccggttgt

SEQ ID NO: 813239 - DNA, 75 bp, synthetic construct
  source 1..75: mol_type = other DNA
aagacaaatatcggcactctggcaaaaatgaagctaacaccaacttcttttcgaataattatttatcttttttca

SEQ ID NO: 813240 - DNA, 75 bp, synthetic construct
  source 1..75: mol_type = other DNA
gccgtgaattcaaggcaggtaaaaaccagaaccaactcagcgaagaaaacattaagaaaatcgtcaagacctacc

SEQ ID NO: 813241 - DNA, 75 bp, synthetic construct
  source 1..75: mol_type = other DNA
gtgatgcgccggagctgattgaagccatgatggcgaatgagcgcttcgtgttgccgaaaagcgccagtttttacg

SEQ ID NO: 813242 - DNA, 75 bp, synthetic construct
  source 1..75: mol_type = other DNA
gtgtaggtacgctggacgttatcggtaatgcctacgaatatctgatcaaaaactttgccgccagcggtgggcaga

SEQ ID NO: 813243 - DNA, 75 bp, synthetic construct
  source 1..75: mol_type = other DNA
gtgttcccttcacccagaaagcagcagatcctttccgatatggtgttgacaagttttctgcgtaaaaagaaagcc

SEQ ID NO: 813244 - DNA, 75 bp, synthetic construct
  source 1..75: mol_type = other DNA
aaattttgccagtgacacaataaaaatggtttacaccggagacgggcgcgtggtgtgggtcggtaaggatgtgac

SEQ ID NO: 813245 - DNA, 75 bp, synthetic construct
  source 1..75: mol_type = other DNA
aaaaaagcgcgtaagttgaaaatgaaaagagcacaaagaatgcttgagaaaatggaatgtgaccgggtctcgcca

SEQ ID NO: 813246 - DNA, 75 bp, synthetic construct
  source 1..75: mol_type = other DNA
gcttaatctggtgttctgtgcgctcatcgtgtgggcgcacgggaatttgtcgaaaatcctttcgttactgaggca

SEQ ID NO: 813247 - DNA, 75 bp, synthetic construct
  source 1..75: mol_type = other DNA
tgaacagatgagagggttacatgagaaccttgtattcccttcccccagaaaacaaaccgttctctctgatatggt

SEQ ID NO: 813248 - DNA, 75 bp, synthetic construct
  source 1..75: mol_type = other DNA
gtttggcattcgaatcgatcatgatttggcatccatctccgatcacagtttggcatcacaatcgatcacgatttg

SEQ ID NO: 813249 - DNA, 75 bp, synthetic construct
  source 1..75: mol_type = other DNA
aagacactgctgttgagaaagattgaaaatgtgaaagagcggctacagaacgccaaaacagctcaagcgatgatc

SEQ ID NO: 813250 - DNA, 75 bp, synthetic construct
  source 1..75: mol_type = other DNA
ctgctagcgaagccttgggcacattagagtgggcaatcggcagacatcgccagcaggaggctacgcttgaggaag

SEQ ID NO: 813251 - DNA, 75 bp, synthetic construct
  source 1..75: mol_type = other DNA
gatttcgagttacagtgtggctggatgccaaagtttgttttacgagaaatgaaaactcttctggcgatccaccgg

SEQ ID NO: 813252 - DNA, 75 bp, synthetic construct
  source 1..75: mol_type = other DNA
gtacgcgactgcctgaaagtggtcaaagagtatgacgtaccgctgtttatcggttttaaccgccgctttgaccca

SEQ ID NO: 813253 - DNA, 75 bp, synthetic construct
  source 1..75: mol_type = other DNA
tgcgtttgctgaagacgaatgccagccgtccacaatggactcctgtcacccgacttgaaggttcgggtggacagc

SEQ ID NO: 813254 - DNA, 75 bp, synthetic construct
  source 1..75: mol_type = other DNA
gagcagttaggtaagcgcagagcacttcttgaatatgatctcgtgcagcatcagttcgacaaacaaaaagcgata

SEQ ID NO: 813255 - DNA, 75 bp, synthetic construct
  source 1..75: mol_type = other DNA
atatacgctgaaaagattcatactcaaacaatggagtattggttgagccgagcaggaaaagaaacagagatttaa

SEQ ID NO: 813256 - DNA, 75 bp, synthetic construct
  source 1..75: mol_type = other DNA
caatgagctcatgcagcaactggctgaggaaaagagcaggacgacggagaagacgccgtccccgcatgagagtgg

SEQ ID NO: 813257 - DNA, 75 bp, synthetic construct
  source 1..75: mol_type = other DNA
gtcagtgacggatgtagcgagaaaactgaacacccgctactggacgcttgcccgtgttgccatgaccgcgctgaa

SEQ ID NO: 813258 - DNA, 75 bp, synthetic construct
  source 1..75: mol_type = other DNA
aagtagtggctcatccgggtatggatacgaagttattaatgcgctctctgaaaaaaatgttgagaggacgacgtt

SEQ ID NO: 813259 - DNA, 75 bp, synthetic construct
  source 1..75: mol_type = other DNA
cagttgtcattccctgacctgtccctgaaatgggacactattctgtttgatgaggcacaggatgccaatcctgtg

SEQ ID NO: 813260 - DNA, 75 bp, synthetic construct
  source 1..75: mol_type = other DNA
agtctgccattatccactggcaggggcagaaactggttgtgaacgcctttgccggcaccggaaagaccagtaccc

SEQ ID NO: 813261 - DNA, 75 bp, synthetic construct
  source 1..75: mol_type = other DNA
ttgttttcgtggtgcggataatgcgctcagttctctccgtcttgagcaggttgaacgattgtggctgacgaccag

SEQ ID NO: 813262 - DNA, 75 bp, synthetic construct
  source 1..75: mol_type = other DNA
caatatagtgcatcaaccgcccgctgcggcattgttgccagaacggctggaaaaagtttgccagtggttaaacag

SEQ ID NO: 813263 - DNA, 75 bp, synthetic construct
  source 1..75: mol_type = other DNA
gtgcgaatactacaacgctggtggcgagaaaaatgctggaaacagggcggtcgccacgcactgaagacgagcata

SEQ ID NO: 813264 - DNA, 75 bp, synthetic construct
  source 1..75: mol_type = other DNA
gagcagagagaaaagtatgaggacccggccagaataggggcatttctggaaaccctgatcactgaaacttgccgg

SEQ ID NO: 813265 - DNA, 75 bp, synthetic construct
  source 1..75: mol_type = other DNA
ctgggctgaaattgattttcataagcgggtatggactatacctgcagaaagaatgaaagctaggctacagcatcg

SEQ ID NO: 813266 - DNA, 75 bp, synthetic construct
  source 1..75: mol_type = other DNA
atggcagtattgacggatacgaaagcaagacatatcaaacctgatgacaaaccattgccccatgggggaattacc

SEQ ID NO: 813267 - DNA, 75 bp, synthetic construct
  source 1..75: mol_type = other DNA
cctgggcgtctctgataatacggctcgagctgatttacggacaattgttaaagaagggtttgcgcaagagaagaa

SEQ ID NO: 813268 - DNA, 75 bp, synthetic construct
  source 1..75: mol_type = other DNA
aagccctgtatcgatgccgaagacgagtgctttaacaccgaatggtctaccgaatttaccctgcttaaagcctag

SEQ ID NO: 813269 - DNA, 75 bp, synthetic construct
  source 1..75: mol_type = other DNA
tgcgctggcaatggctgtcgccatcatcgttccgattgtgctcacctcgtttatctaccagcgcaaacaccgcct

SEQ ID NO: 813270 - DNA, 75 bp, synthetic construct
  source 1..75: mol_type = other DNA
tttgaacgtgcgcacgagctgggcatggtgacagtgctgtgggcctatttgcgtaactccgcctttaagaaagat

SEQ ID NO: 813271 - DNA, 75 bp, synthetic construct
  source 1..75: mol_type = other DNA
agcatttcccgtttcatttgccattcaggggcggttcctcgccccgcaaaccacactttcccttttcccgactgg

SEQ ID NO: 813272 - DNA, 75 bp, synthetic construct
  source 1..75: mol_type = other DNA
tggtgggcgcggcaatatcgcaacggtaagtcactgtattacccgcctgcgctttgtcctcaaccaaccgggcaa

SEQ ID NO: 813273 - DNA, 75 bp, synthetic construct
  source 1..75: mol_type = other DNA
cttgctattgatttgcagatgattcaaagcatgggtggcacgccagtgtggccgctgattgcgctgtcgaatatc

SEQ ID NO: 813274 - DNA, 75 bp, synthetic construct
  source 1..75: mol_type = other DNA
catggcgaacggcatcggtgttggcggtctgccgggcattctctctattcagccgagctactggcaggtgtttgc

SEQ ID NO: 813275 - DNA, 75 bp, synthetic construct
  source 1..75: mol_type = other DNA
cccgcaaagtggcttatttgccgcagcagcttcctccggcagaagggatgaccgtgcgtgaactggtggcgattg

SEQ ID NO: 813276 - DNA, 75 bp, synthetic construct
  source 1..75: mol_type = other DNA
cgattttctttgtgcgtatatatggtgccattggaattgcctactcgacgtttatttcaggcgtattaatcatgg

SEQ ID NO: 813277 - DNA, 75 bp, synthetic construct
  source 1..75: mol_type = other DNA
tggcccatcaacacgccatcacccttgtcgccggaacatcgctgaccgcgcgctaccagcaagcctttcaggcga

SEQ ID NO: 813278 - DNA, 75 bp, synthetic construct
  source 1..75: mol_type = other DNA
gtcaggtcagtgtagggcgctggaatgaccatctgggcgcgactgagtcgtattataacaaggggaaagcattac

SEQ ID NO: 813279 - DNA, 75 bp, synthetic construct
  source 1..75: mol_type = other DNA
gggagcagatgactacattatatactgaccgctatcacccaagcgaaacgtactatcgtgacacgttagtaattg

SEQ ID NO: 813280 - DNA, 75 bp, synthetic construct
  source 1..75: mol_type = other DNA
gtcgctatccgtggcacggcgcgttggggcgatttggcgtggcagatcgcgaaaaggtcgaagaagccatcgctc

SEQ ID NO: 813281 - DNA, 75 bp, synthetic construct
  source 1..75: mol_type = other DNA
tgcaactggcgagcgtcggtaatacaccgttaatgaaattcctccatccggagatcgtcaccgtagatcccggtt

SEQ ID NO: 813282 - DNA, 75 bp, synthetic construct
  source 1..75: mol_type = other DNA
gaaaatattttagactggaaagataatatatggcacattgagcatgaaggtttccccccacgcaaccctattaat

SEQ ID NO: 813283 - DNA, 75 bp, synthetic construct
  source 1..75: mol_type = other DNA
cgctctgacgaatcagcgaaggcactggaatctggtcgctgcgatacgctggcctcggatcaatcacaactgtat

SEQ ID NO: 813284 - DNA, 75 bp, synthetic construct
  source 1..75: mol_type = other DNA
cccgctgaaaattaaacgtgggcaaaataatctctggaataacggcggtattcatcgtacgcgccgcccgtgcgt

SEQ ID NO: 813285 - DNA, 75 bp, synthetic construct
  source 1..75: mol_type = other DNA
atgtttttcatcttagagaaagcactggctttatacattatttttttgataaggaagttgagcgtcttccatggg

SEQ ID NO: 813286 - DNA, 75 bp, synthetic construct
  source 1..75: mol_type = other DNA
catatcacccgacggttgaagactacattacccgtgaatgcttacatgaaactcaccaacacctaaatggcagta

SEQ ID NO: 813287 - DNA, 75 bp, synthetic construct
  source 1..75: mol_type = other DNA
gcgtgttctttttaataaatggcttttatatatatccgccatttaatagtgcaattttagcaccgatgttagctt

SEQ ID NO: 813288 - DNA, 75 bp, synthetic construct
  source 1..75: mol_type = other DNA
gtagacgtctttttaacgccggaaaacgaggtggtgatcaacgagatcaacacgctgccgggcttcactaacatc

SEQ ID NO: 813289 - DNA, 75 bp, synthetic construct
  source 1..75: mol_type = other DNA
ttgatttttccggaaagcttttatctgaaaaaattttccatccaaatgaaatgatgaatgttctcaaaaaaatgg

SEQ ID NO: 813290 - DNA, 75 bp, synthetic construct
  source 1..75: mol_type = other DNA
gacggatgctgaaccggcattatccgacacccggggccctgttgtactggtatgtggagacatgccggaagcgtt

SEQ ID NO: 813291 - DNA, 75 bp, synthetic construct
  source 1..75: mol_type = other DNA
ctctcccgtaatacgacctggacttcatctcgcgacgcaggaatgggaatggcatttactggcgtcacttattac

SEQ ID NO: 813292 - DNA, 75 bp, synthetic construct
  source 1..75: mol_type = other DNA
atgaaagagttgcagcgacaatatcaactcacttcgatttatgtcacccacgaccaggctgaagcgctggcgatg

SEQ ID NO: 813293 - DNA, 75 bp, synthetic construct
  source 1..75: mol_type = other DNA
agcatcagcttatcgacgcgcaaaacggtcagccgttgccgacggtggatgtcattttcccgattgtccacggta

SEQ ID NO: 813294 - DNA, 75 bp, synthetic construct
  source 1..75: mol_type = other DNA
cctgcgcactggggctggccacaccgatgtcgataatggtgggggtaggcaaaggagcccaggccggggtgttaa

SEQ ID NO: 813295 - DNA, 75 bp, synthetic construct
  source 1..75: mol_type = other DNA
acccttgttgcaatggggaccggcgtagcctgggtttacagcgtcattgcaaccgtcttcccgtcctggtttcct

SEQ ID NO: 813296 - DNA, 75 bp, synthetic construct
  source 1..75: mol_type = other DNA
caggaccatcaactttatttctgctccgccagctgtgagagtaaatttaaagcccatcccgatcgttatcttacc

SEQ ID NO: 813297 - DNA, 75 bp, synthetic construct
  source 1..75: mol_type = other DNA
atggatcttgtagatagtgtcgaagcaggcaagctgacgatcagagaattgattgatgccctggtgaaagataaa

SEQ ID NO: 813298 - DNA, 75 bp, synthetic construct
  source 1..75: mol_type = other DNA
accatcaccacgatcatcacgaagttagccctgatcagttaaaacagcctcaccaccaggcggaaaaagagaatt

SEQ ID NO: 813299 - DNA, 75 bp, synthetic construct
  source 1..75: mol_type = other DNA
cagacaggtagtcttatcatccgagcagagaaagtcggtgatgaaacgatgctctcacgaattgttcagatggtc

SEQ ID NO: 813300 - DNA, 75 bp, synthetic construct
  source 1..75: mol_type = other DNA
ggcggtagcaggatgcttgtttgtcattcccacggcggcagaaattccgattgtgcaaacgatgatgctggcagg

SEQ ID NO: 813301 - DNA, 75 bp, synthetic construct
  source 1..75: mol_type = other DNA
gcagaaggtcacggacttatctactttaaacgccgtttccatccggtgatgctggaaatggaagctgcgatttaa

SEQ ID NO: 813302 - DNA, 75 bp, synthetic construct
  source 1..75: mol_type = other DNA
ttgattgatatccttgccacaatggcacggcaggattacgaaacacgccgtaaacgccaacagcaaggcattgag

SEQ ID NO: 813303 - DNA, 75 bp, synthetic construct
  source 1..75: mol_type = other DNA
ctccaggattcccggggcggttcagtagcctgggtttacagcgtcattgcaaccgtcttcccctcctggtttcct

SEQ ID NO: 813304 - DNA, 75 bp, synthetic construct
  source 1..75: mol_type = other DNA
cgcttttctggagtacgatcccggtttacatccttgcagtactggtgttgggtgccgctcgcgtctggttattcc

SEQ ID NO: 813305 - DNA, 75 bp, synthetic construct
  source 1..75: mol_type = other DNA
gttgattcaggtgctgatcccgcgtgactggttgttgcgtacgcttgggcaatcgcgctttcgcggcacgctgct

SEQ ID NO: 813306 - DNA, 75 bp, synthetic construct
  source 1..75: mol_type = other DNA
aaagtcgttaagaatttaagcagccgctttgaagcggaacagtatgacccacagcgggtacgcgcagcggcttac

SEQ ID NO: 813307 - DNA, 75 bp, synthetic construct
  source 1..75: mol_type = other DNA
gtgctggatgcagaaatcgcccgtattgaaaaaatgggcgtgaccattaagtgcaacaacgaagtcggtaaaaca

SEQ ID NO: 813308 - DNA, 75 bp, synthetic construct
  source 1..75: mol_type = other DNA
ctgccggattgcaggccagtgtgacactgacaaaccagggttatgacgtcacgatttatgagaaagaagcgcacc

SEQ ID NO: 813309 - DNA, 75 bp, synthetic construct
  source 1..75: mol_type = other DNA
ggcgattggcggcgctatcggttatatcggcggcggttggctgtttgatctgggtaagtcggcacaacaaccaga

SEQ ID NO: 813310 - DNA, 75 bp, synthetic construct
  source 1..75: mol_type = other DNA
gtgctggatgcggaaatcgctcgcatcgaaaaaatgggtgtagccattaagtgcaactgtgaaattggcaaaacg

SEQ ID NO: 813311 - DNA, 75 bp, synthetic construct
  source 1..75: mol_type = other DNA
catgttcgtttaccaggtgaactaacgatagcggcggacaaaattattctcgctgtaggtcaacatgccgaactt

SEQ ID NO: 813312 - DNA, 75 bp, synthetic construct
  source 1..75: mol_type = other DNA
accgcttttgctacactggaaccccaacgtaatactatcgaaacgaaaaattaccagacccgtgacccgcaactg

SEQ ID NO: 813313 - DNA, 75 bp, synthetic construct
  source 1..75: mol_type = other DNA
tcactttgtgccgccaacggtaacggaagagggcatcgtctggccggaaggaccacgcccaccgtcgcgtgacta

SEQ ID NO: 813314 - DNA, 75 bp, synthetic construct
  source 1..75: mol_type = other DNA
gacgatcacagcaagctcttctttcctcaacctggctctcactttgtgctgccaacgataactgaagaggggatt

SEQ ID NO: 813315 - DNA, 75 bp, synthetic construct
  source 1..75: mol_type = other DNA
atgaataactccccccgctacccgcagcgcgttcgcaatgatctgcgcttccgtgaactgactgtgctacgcgtt

SEQ ID NO: 813316 - DNA, 75 bp, synthetic construct
  source 1..75: mol_type = other DNA
atgtcccgcgtatcgcaggcgaggaacctgggtaaatatttcctgctcatcaataatatgctggtcgtgctgggg

SEQ ID NO: 813317 - DNA, 75 bp, synthetic construct
  source 1..75: mol_type = other DNA
attggcatcatcacttttcttgcgctgggttggcaatttagccaaaaacgcgccgcgcgtcggttactggaacgc

SEQ ID NO: 813318 - DNA, 75 bp, synthetic construct
  source 1..75: mol_type = other DNA
gggtcgccagcggctgggcgatgcaggcgcaaccgggcgataaactcacagtagccggaccgcgtggttcgctgg

SEQ ID NO: 813319 - DNA, 75 bp, synthetic construct
  source 1..75: mol_type = other DNA
tcatgaaggcagcaggaatcagccgagcgacttactaccggataaaaaacgagctattgatcgtaaaatcagaat

SEQ ID NO: 813320 - DNA, 75 bp, synthetic construct
  source 1..75: mol_type = other DNA
gatatgatgtctaacgacagtcgtatctatttggtaggaaataaaagacaaggaggggttattcagaactttaat

SEQ ID NO: 813321 - DNA, 75 bp, synthetic construct
  source 1..75: mol_type = other DNA
aacaaaatgtaaacgcggttgaacgcgcttttgatattgtgatacaacccacgattcataccttttatacgactc

SEQ ID NO: 813322 - DNA, 75 bp, synthetic construct
  source 1..75: mol_type = other DNA
ggtcatctcggtgtgtaatctctccggtgaagtgtgtaaagagacgctgggaacacgtaaacggacgcatttagc

SEQ ID NO: 813323 - DNA, 75 bp, synthetic construct
  source 1..75: mol_type = other DNA
ttgtcaatcgagttagcgcacgactgtctctgcgcgatccgcaggatgaatcattgtgcatcttatgtgacgtgc

SEQ ID NO: 813324 - DNA, 75 bp, synthetic construct
  source 1..75: mol_type = other DNA
cgacgaacatgccgacatgctttacaaactggccggacagatggtgaaccatttgtgcagttatcagtcggagga

SEQ ID NO: 813325 - DNA, 75 bp, synthetic construct
  source 1..75: mol_type = other DNA
attttagctatcttgcaaacctgcccgatttagttgttttgatggatgaagcccaccgttactatgctagtgcgg

SEQ ID NO: 813326 - DNA, 75 bp, synthetic construct
  source 1..75: mol_type = other DNA
ctggcttcggcaatgatcttctttctgatcaaagaaacgttgccgccggagcgtcgccagccgttccacattcgt

SEQ ID NO: 813327 - DNA, 75 bp, synthetic construct
  source 1..75: mol_type = other DNA
cttatattctgggctttgcgttggggcagttaatctacgggccgatggcagacagcttcgggcgtaagccggtgg

SEQ ID NO: 813328 - DNA, 75 bp, synthetic construct
  source 1..75: mol_type = other DNA
ggtgcaaccgtcagctaatggtaatttaaaaatcctgaatattatgcaggataccgatctaaacggcagtcttga

SEQ ID NO: 813329 - DNA, 75 bp, synthetic construct
  source 1..75: mol_type = other DNA
gggttgcgtgtcgatggtgtcatccaatgcgatggcagtgattctggatgagtttccgcatatggcgggaacggc

SEQ ID NO: 813330 - DNA, 75 bp, synthetic construct
  source 1..75: mol_type = other DNA
attggcgcgttaaatatgtttcgggcaggattatggatccagtttatggtggcggcatggatggtcattagtgcg

SEQ ID NO: 813331 - DNA, 75 bp, synthetic construct
  source 1..75: mol_type = other DNA
gggctgcgtgtcgatggtgtcatccaatgcgatggcggtcattcttgatgagtttccccatatggcgggaacggc

SEQ ID NO: 813332 - DNA, 75 bp, synthetic construct
  source 1..75: mol_type = other DNA
aaccgggcgcagtcgtcattttttcgtgctggctcctaacctgaccatctatgaaaaactcaagatggatttttt

SEQ ID NO: 813333 - DNA, 75 bp, synthetic construct
  source 1..75: mol_type = other DNA
agcattgataggtaatttgataagtagaaatgctatcttggaagtgaaaaaaattgtatctcaatgtgtgtcatt

SEQ ID NO: 813334 - DNA, 75 bp, synthetic construct
  source 1..75: mol_type = other DNA
tgcttcgagggcgttctgaagaatggtgatgatcttaatacggagcctaaattctattccgacttagaaagcgta

SEQ ID NO: 813335 - DNA, 75 bp, synthetic construct
  source 1..75: mol_type = other DNA
acaggccgatctcaactgggaaaacccagcagtacgcacagaactgaaaaaagtctgtgagttctgggccgatcg

SEQ ID NO: 813336 - DNA, 75 bp, synthetic construct
  source 1..75: mol_type = other DNA
aatatatgacatgcatatatcaaccataatcctgaataataaaagagataatgcaattgctatatcttcaatcaa

SEQ ID NO: 813337 - DNA, 75 bp, synthetic construct
  source 1..75: mol_type = other DNA
ccattgaaagcatataactacatgatttataacaatatgtacaattctggactttcgattaatcctataggtaat

SEQ ID NO: 813338 - DNA, 75 bp, synthetic construct
  source 1..75: mol_type = other DNA
ggatttgagggctgccagcgaatcagaccttcagcccggcaccattgattacgaacgttaccgactgacgaaggc

SEQ ID NO: 813339 - DNA, 75 bp, synthetic construct
  source 1..75: mol_type = other DNA
aaagtcgtctccgaagaagcaaaacggttaaccagcagccagcaactcagtatgccagaagtcaaagcgaacgta

SEQ ID NO: 813340 - DNA, 75 bp, synthetic construct
  source 1..75: mol_type = other DNA
aatctcatcgtcttcagatcaactcgatttgacggaaatgattgaagagcaagttaaacagccaagtttcctttc

SEQ ID NO: 813341 - DNA, 75 bp, synthetic construct
  source 1..75: mol_type = other DNA
cgccgccagtattaatcactggcgatgactatcaggaagggcgaggtgtccgtctggactatgcgattgccgaaa

SEQ ID NO: 813342 - DNA, 75 bp, synthetic construct
  source 1..75: mol_type = other DNA
caccgattgggtacaatggaaccgtctggacgaagacgagcagtatcgtggtcgttatcaaatctctgttaagcc

SEQ ID NO: 813343 - DNA, 75 bp, synthetic construct
  source 1..75: mol_type = other DNA
aaccgggcgaagtcgtcacttcttcgtactagctccaaacttaaccatctatgaaaaactcaagatggatttttt

SEQ ID NO: 813344 - DNA, 75 bp, synthetic construct
  source 1..75: mol_type = other DNA
tgtgggcacaaatcaaacaaaatatgtggacaacgccaacgggttataccggacgcataactcagggattcgatg

SEQ ID NO: 813345 - DNA, 75 bp, synthetic construct
  source 1..75: mol_type = other DNA
tccacgcgccatctcatccattcatttaggaatgcagttaatgcgtgatgcccttagcgcaaacccggatttaga

SEQ ID NO: 813346 - DNA, 75 bp, synthetic construct
  source 1..75: mol_type = other DNA
cttcgcagctggcgtgtacatcattctgcagggtgtgcgcatggtgattgcggagattgtcccggcattcaaagg

SEQ ID NO: 813347 - DNA, 75 bp, synthetic construct
  source 1..75: mol_type = other DNA
cattttagaagatccagatattgaaagtggtgtgcagattaagcttcggggtaatgattttagtcagcttcggcg

SEQ ID NO: 813348 - DNA, 75 bp, synthetic construct
  source 1..75: mol_type = other DNA
atcatcagtttgctatttggttacagccacaggtcgagatgaccagcggtaaactggtcagtgcggaagtgttac

SEQ ID NO: 813349 - DNA, 75 bp, synthetic construct
  source 1..75: mol_type = other DNA
tctggtcgccctacgcggcggtgaaatgattgctcagggaacgcctgcggaaattatgcgcggcgaaaccctcga

SEQ ID NO: 813350 - DNA, 75 bp, synthetic construct
  source 1..75: mol_type = other DNA
gaaagctggagcagcaaagcgtttgcccgcaaagtggcttatttgccgcagcagcttcctccggcagaagggatg

SEQ ID NO: 813351 - DNA, 75 bp, synthetic construct
  source 1..75: mol_type = other DNA
gcgtctttgcttcaagtaaacgggagtgcaaatattgatggcctgtcaattactgtgcttgatgaagcagctgaa

SEQ ID NO: 813352 - DNA, 75 bp, synthetic construct
  source 1..75: mol_type = other DNA
gcaatgatttcagccagcttcgccgtgttgtcgcaaagacgtctattgtggccatcgagcaaaaaggcaaagaaa

SEQ ID NO: 813353 - DNA, 75 bp, synthetic construct
  source 1..75: mol_type = other DNA
ttgccggtcacgatttaatgagccagtttgccgggaataaagaagatattgttggcatcggcctgggatccatcc

SEQ ID NO: 813354 - DNA, 75 bp, synthetic construct
  source 1..75: mol_type = other DNA
agtatggctactgtgtgcatgattacaccatgagtccttgtgagaagttccgagattgcgtcaattgtaccgagc

SEQ ID NO: 813355 - DNA, 75 bp, synthetic construct
  source 1..75: mol_type = other DNA
gacgtgaagcagaatcgaacctacaaccacatgactgaatacgaactggttggcatggctgaacgccttgatccc

SEQ ID NO: 813356 - DNA, 75 bp, synthetic construct
  source 1..75: mol_type = other DNA
gattgagcggctggctaagtttgtagttgaaaaccagcttgtaccaaacgctatacaagattgggtcaatccaat

SEQ ID NO: 813357 - DNA, 75 bp, synthetic construct
  source 1..75: mol_type = other DNA
tgatgatcatcacctgtgaaaccctgcgtgatactgcgggcgtgctgaaagaggcgcaacgagaaattctgctgc

SEQ ID NO: 813358 - DNA, 75 bp, synthetic construct
  source 1..75: mol_type = other DNA
cccgctatcgcattcagccgggaacgctgattctggaagtgacagagagtcgacgtattgatgacccgcaagcgg

SEQ ID NO: 813359 - DNA, 75 bp, synthetic construct
  source 1..75: mol_type = other DNA
ggcggcaatctgggatttccggggggagacaatttgcgcgtaagtcgctcgttaacaatcaagcagatggcaatg

SEQ ID NO: 813360 - DNA, 75 bp, synthetic construct
  source 1..75: mol_type = other DNA
agcgcttgccgattgaacgtattcaactgcgtccgcactgtagtatcggcgtggcgatgtactatggcgatctca

SEQ ID NO: 813361 - DNA, 75 bp, synthetic construct
  source 1..75: mol_type = other DNA
acgcggcgcgaataacatgcctacggtgaccaataccctgctgcctattatgggcgacggcaaggggcagatgac

SEQ ID NO: 813362 - DNA, 75 bp, synthetic construct
  source 1..75: mol_type = other DNA
aacgatcagcggctggatgttacccacgatcgtcacaaggatgtagggaacgatcaaatcagtaagataatagga

SEQ ID NO: 813363 - DNA, 75 bp, synthetic construct
  source 1..75: mol_type = other DNA
tgtgcgcccgctatacacgtacgcggctggatattctcacccgccctaaaacagcggacgggcagccggatgatg

SEQ ID NO: 813364 - DNA, 75 bp, synthetic construct
  source 1..75: mol_type = other DNA
acccttatcttccgccattttgaaaggggatattccccaggcggaagcgattcttgccagcattaaaccggcggg

SEQ ID NO: 813365 - DNA, 75 bp, synthetic construct
  source 1..75: mol_type = other DNA
gtaaaagttttattccagagcgcccggtgccggtgacgttcacccgactgtttgagttaccggtacaaatctcgc

SEQ ID NO: 813366 - DNA, 75 bp, synthetic construct
  source 1..75: mol_type = other DNA
tgcccttgtcggtaaacctctctgcgctgcaactgatgcacccaaatatggtggcggatatgctggaactgttaa

SEQ ID NO: 813367 - DNA, 75 bp, synthetic construct
  source 1..75: mol_type = other DNA
tatttcggcggcatttaccgcccgtcataaagggaagaatcagattcagttctatgatccacaacagatggaaga

SEQ ID NO: 813368 - DNA, 75 bp, synthetic construct
  source 1..75: mol_type = other DNA
gaggcgcagcgggaaatcctgctactgacgctggtggagaaaatcaaatcggtgctgtcgccacgcatgatcctc

SEQ ID NO: 813369 - DNA, 75 bp, synthetic construct
  source 1..75: mol_type = other DNA
gtaaaagttttattccagagcgtccggtgccggtaatggttactcgcctgtttgagctaccggtgcaaatctcgc

SEQ ID NO: 813370 - DNA, 75 bp, synthetic construct
  source 1..75: mol_type = other DNA
gccgaaagatccggtggcgtactggccgattatgtcttctattccgcaaacattgctgtatgaaggttacggtat

SEQ ID NO: 813371 - DNA, 75 bp, synthetic construct
  source 1..75: mol_type = other DNA
cttggcaccgcaaaatattatcgcaccggagtcattaatcagtattaccgctatcgcattcagggggcgattaat

SEQ ID NO: 813372 - DNA, 75 bp, synthetic construct
  source 1..75: mol_type = other DNA
atgttaaagcgcgtgttcctcagcctgttagtcctgatcggcttgctgctgttgactgtgctcggcctcgatcgc

SEQ ID NO: 813373 - DNA, 75 bp, synthetic construct
  source 1..75: mol_type = other DNA
cagccgcgcattgtttctcgctttggcgatgaaggtgactaccgtgagcctgcggcaaaaatgctggcgatggta

SEQ ID NO: 813374 - DNA, 75 bp, synthetic construct
  source 1..75: mol_type = other DNA
taaaaggggatgataagtttatcaccaccgactatttgcaacagtgccctgtggagcacgatcaggatggcagag

SEQ ID NO: 813375 - DNA, 75 bp, synthetic construct
  source 1..75: mol_type = other DNA
ctggcgtcgatccggctgatattgttctcgactacgccggttttcgtaccctggattccatcgtgcgtacacgca

SEQ ID NO: 813376 - DNA, 75 bp, synthetic construct
  source 1..75: mol_type = other DNA
aaatattatcgtactggcgtaattaatcagtattatcgctaccgcattcaaggagcgattaatgcctataacagc

SEQ ID NO: 813377 - DNA, 75 bp, synthetic construct
  source 1..75: mol_type = other DNA
atggtgtttaaccatacctctacccaacatgcctggtttcgcgaggcgctgaacaaagaaagcccttaccgccag

SEQ ID NO: 813378 - DNA, 75 bp, synthetic construct
  source 1..75: mol_type = other DNA
ttattggcaatcctcgccagtaaatcccgtgacaacagtcgcacgcccatgcaatggagcaacggcgataatgcc

SEQ ID NO: 813379 - DNA, 75 bp, synthetic construct
  source 1..75: mol_type = other DNA
ttggcggcggcgatgtcgcgatggacgttgccagcacgctgaaagttctcggctgccaggcggtgacctgtgtgg

SEQ ID NO: 813380 - DNA, 75 bp, synthetic construct
  source 1..75: mol_type = other DNA
cccaggtcgataacggttacgacgtagcgaactatacggcgattgatcccacctacggcacgctggacgattttg

SEQ ID NO: 813381 - DNA, 75 bp, synthetic construct
  source 1..75: mol_type = other DNA
aaaacggcgttatctaccagatttatccaaagagttttcaggacaccacgggcagcggcaccggcgatctgcgag

SEQ ID NO: 813382 - DNA, 75 bp, synthetic construct
  source 1..75: mol_type = other DNA
cataactatgaagaagccgcctctcaaccgggagccatgacattgcgaccttttgaggctgtctggtggttgcag

SEQ ID NO: 813383 - DNA, 75 bp, synthetic construct
  source 1..75: mol_type = other DNA
gcctggaacaacagccaggatagcgacaaaaggtgacctgatgatagtgatgttccgacaggagagagcagagaa

SEQ ID NO: 813384 - DNA, 75 bp, synthetic construct
  source 1..75: mol_type = other DNA
tattcccggcagaacctacggcttgcatgacatcgcgatgtttaatctgctgaaagtgatggaaatctgcctgca

SEQ ID NO: 813385 - DNA, 75 bp, synthetic construct
  source 1..75: mol_type = other DNA
gactgggcacctgtaccgctgctctcgtcttttatcagcgattgtctggaaaaaggccgcgatattaccgatggc

SEQ ID NO: 813386 - DNA, 75 bp, synthetic construct
  source 1..75: mol_type = other DNA
ttgcgatgtttaacttgctgaaagtgatggaaatctgcctgcatgaaaatgaaggcaatgctgcgctgacttatg

SEQ ID NO: 813387 - DNA, 75 bp, synthetic construct
  source 1..75: mol_type = other DNA
atgtcgaaaaaatacatcatagggattgatggcggaagtcagagcacaaaagtggtgatgtacgatctggaaggt

SEQ ID NO: 813388 - DNA, 75 bp, synthetic construct
  source 1..75: mol_type = other DNA
ataatctatgagcttaggtgtaagtttgttcatggagatatttcatcgttatctgataatgatagctatcgaaag

SEQ ID NO: 813389 - DNA, 75 bp, synthetic construct
  source 1..75: mol_type = other DNA
cgctaattgatggtgtgatagccagaaattatcctcagtttggtgcagtggaacttaaaacagcagcaaaatata

SEQ ID NO: 813390 - DNA, 75 bp, synthetic construct
  source 1..75: mol_type = other DNA
gtgatgaagaactgattgccggtaaccgcaccgtaaaaccgcgcgccgggattatgtcgccggaaatggaccctt

SEQ ID NO: 813391 - DNA, 75 bp, synthetic construct
  source 1..75: mol_type = other DNA
ttacgggcatttacccagcttaagttacagcatattcagtttaacgtggtgaacgctgacacgttgcgggaagcc

SEQ ID NO: 813392 - DNA, 75 bp, synthetic construct
  source 1..75: mol_type = other DNA
tttgtgggatggattatgtccaacattgagggctggaactggaagtgataagggaagtcatcaggctgtacgtcc

SEQ ID NO: 813393 - DNA, 75 bp, synthetic construct
  source 1..75: mol_type = other DNA
gaatgccgacacgttacgtgaagcccaattgcgcccgcaggactatgcggggctggtggtacgcgttgccggata

SEQ ID NO: 813394 - DNA, 75 bp, synthetic construct
  source 1..75: mol_type = other DNA
cttaattaaccgcttcgagaaatacggtaacgatatcgacgaggtggataacatcagcgccgaactgttgcgcca

SEQ ID NO: 813395 - DNA, 75 bp, synthetic construct
  source 1..75: mol_type = other DNA
atggttgaaggcagcaatatttgcgatatcggccatcgtgactgggcaccagtgccgctgctctcttcgtttatc

SEQ ID NO: 813396 - DNA, 75 bp, synthetic construct
  source 1..75: mol_type = other DNA
agcgcctgcgtcttgatgctgtgaaagcaccaggcgtgcgtacgccaataagtctggcggttcgcagtggtgaaa

SEQ ID NO: 813397 - DNA, 75 bp, synthetic construct
  source 1..75: mol_type = other DNA
ttccggtgactttgacctttctgtcgcctccgtaattgcctgtgcgggtgtcaccacggcggtggttatcaacct

SEQ ID NO: 813398 - DNA, 75 bp, synthetic construct
  source 1..75: mol_type = other DNA
agcgattgcgtctggatgccgtgaaggcgcctggtgtgcgtacgccaataagcctgaccgttcgcagtggtgaaa

SEQ ID NO: 813399 - DNA, 75 bp, synthetic construct
  source 1..75: mol_type = other DNA
ggtatctctttcgttctcagcacgctgattgcacacgcaggctggttagcagggttgttattcggcgggctatat

SEQ ID NO: 813400 - DNA, 75 bp, synthetic construct
  source 1..75: mol_type = other DNA
tctaaccctgaaaagcgccgcgttgagttgatgacgcgcattggtggctttgagaaagtggcaacagaaagcggt

SEQ ID NO: 813401 - DNA, 75 bp, synthetic construct
  source 1..75: mol_type = other DNA
ccagacgcaaacatgtgctcggcggttgtgtaatcaacaacggttgggaagaaaacaatgccgatcaccacattc

SEQ ID NO: 813402 - DNA, 75 bp, synthetic construct
  source 1..75: mol_type = other DNA
gaaacggtacgaacctacctgaagcgaagcctgaaaaatttaaatctggatggatatgatgcactgcgctctgcc

SEQ ID NO: 813403 - DNA, 75 bp, synthetic construct
  source 1..75: mol_type = other DNA
tcaagctcgtcgttccttcatgctcgacctgctcgaaagcgtcaggcatgactatgtacacggtggatatacata

SEQ ID NO: 813404 - DNA, 75 bp, synthetic construct
  source 1..75: mol_type = other DNA
tgctctttgtgcggatgatttccgctatgcttcgccgttcgggcggtgatgcgggagctgttatgtttgaggcgt

SEQ ID NO: 813405 - DNA, 75 bp, synthetic construct
  source 1..75: mol_type = other DNA
tttgttgttgccgccggaaaaaaatggcgcaaccactgtggcttcaacgatgattattgcggcgcttgccggaat

SEQ ID NO: 813406 - DNA, 75 bp, synthetic construct
  source 1..75: mol_type = other DNA
gtgaaaaagaaataattgattcacagacctggagttctaatgatccagaactgtataagaatcaaataagattat

SEQ ID NO: 813407 - DNA, 75 bp, synthetic construct
  source 1..75: mol_type = other DNA
aagttgaactatacagaagcgtttgctggaagtggtgaatttgcaatagtttcactaatactcaatatttattcg

SEQ ID NO: 813408 - DNA, 75 bp, synthetic construct
  source 1..75: mol_type = other DNA
tggttgacgacacacttgccgatcaacatgccattggccagattgatggagtgaaaggttgttttcgtaattcag

SEQ ID NO: 813409 - DNA, 75 bp, synthetic construct
  source 1..75: mol_type = other DNA
ccgtaccagcgaaaccagatttttttgtcagcctcacgccgtcaggcctttcagtttaaaagcgtgattcagaag

SEQ ID NO: 813410 - DNA, 75 bp, synthetic construct
  source 1..75: mol_type = other DNA
ttgtgaccggtgcagataagcactggcgcaagacgctggcacgacacaaggcagagacattagttaaccgctggc

SEQ ID NO: 813411 - DNA, 75 bp, synthetic construct
  source 1..75: mol_type = other DNA
gtatcgaatcctgaaaagcgccgcgtagaacttatgacgcgtattggtggctttgagaaggtggcaacggaaagc

SEQ ID NO: 813412 - DNA, 75 bp, synthetic construct
  source 1..75: mol_type = other DNA
ctgttgttcctctgcggttggttccaggggatgggatggccgccgtgcggtcgtactatggtgcactggtggtcg

SEQ ID NO: 813413 - DNA, 75 bp, synthetic construct
  source 1..75: mol_type = other DNA
ggagatcgatccgacttatcgtcgattgcgctggcaaattttcctggggatattctttggctatgctgcttacta

SEQ ID NO: 813414 - DNA, 75 bp, synthetic construct
  source 1..75: mol_type = other DNA
ttatgggctttgtgccatgggcgacgtcgagcattgcggtgatgtttgtactgttgttcctctgcggttggttcc

SEQ ID NO: 813415 - DNA, 75 bp, synthetic construct
  source 1..75: mol_type = other DNA
ggggaaccgctacgggctatatcgtcaaatacgtctctaaaaatatcgacggttacgcgctggataatgagcgcg

SEQ ID NO: 813416 - DNA, 75 bp, synthetic construct
  source 1..75: mol_type = other DNA
acacgtcgcggcgctggcgctgcgagatatcgccagccgcgaattaatccacatttccgccgttatgcagctgta

SEQ ID NO: 813417 - DNA, 75 bp, synthetic construct
  source 1..75: mol_type = other DNA
ctgtaccagtttccgacaggcagagaacaccagaaaagacgccgttgctgaacaacaacgggcccgggaaatgat

SEQ ID NO: 813418 - DNA, 75 bp, synthetic construct
  source 1..75: mol_type = other DNA
agtcggctgctgatgagttcgaagcgctggcgaatcaaatagcgacggcagactgttcggacgcggaccagttgc

SEQ ID NO: 813419 - DNA, 75 bp, synthetic construct
  source 1..75: mol_type = other DNA
ggggcgaatatctgacggttatccgcggtgtatttatgcctctgattaatatcccgccggtaataaccaggttgc

SEQ ID NO: 813420 - DNA, 75 bp, synthetic construct
  source 1..75: mol_type = other DNA
attggcggttttgagcgaatagccaacgagcagggttttgtcggcagcttttttactattaccgccccgtcaaaa

SEQ ID NO: 813421 - DNA, 75 bp, synthetic construct
  source 1..75: mol_type = other DNA
caggtggggctggaaaattatgcccacagctacccggatgaactttctggcggcatgcgtcagcgcgttggacta

SEQ ID NO: 813422 - DNA, 75 bp, synthetic construct
  source 1..75: mol_type = other DNA
gagaagcaaaatattcgtattgaaattgatgctctgtcggcgcgtcttggctgcccggtgatcccgctggtttca

SEQ ID NO: 813423 - DNA, 75 bp, synthetic construct
  source 1..75: mol_type = other DNA
gcgccgcgcgcgtagccgggtagatgtcgaactgctggcaacgcgcaaatcggtaagcagttgctgtgcggccag

SEQ ID NO: 813424 - DNA, 75 bp, synthetic construct
  source 1..75: mol_type = other DNA
cgaggactccggctatatggcgcgtgcggcgtttgtgatggaccgtctgatgcaggcgctgggcttgccggggaa

SEQ ID NO: 813425 - DNA, 75 bp, synthetic construct
  source 1..75: mol_type = other DNA
ctggatgctgccctcgcccgtctgcgtaatgagatggacgatccggcgctgcacattgccgatgcgcgttaccag

SEQ ID NO: 813426 - DNA, 75 bp, synthetic construct
  source 1..75: mol_type = other DNA
actgacgggtctgatgctcaaatacaccattatgcgcggtgaagcgacgccgtttgtcatggagctaccggtcta

SEQ ID NO: 813427 - DNA, 75 bp, synthetic construct
  source 1..75: mol_type = other DNA
ggcgctgaacatgctcgacattgccgagaagcaaaatattcgcattgaaattgatgcgctgtcggcacgtcttgg

SEQ ID NO: 813428 - DNA, 75 bp, synthetic construct
  source 1..75: mol_type = other DNA
gaacgaggagattgcgctaacggtagggaagctgagagttgagcttgaagcagaaaaacagcgggcaaaggttct

SEQ ID NO: 813429 - DNA, 75 bp, synthetic construct
  source 1..75: mol_type = other DNA
gcgcgggaaatactgctcccggaacgtagcagcatgcttcatcgaacagattttcacgatgattaccaaacggta

SEQ ID NO: 813430 - DNA, 75 bp, synthetic construct
  source 1..75: mol_type = other DNA
gcgacgccatgcttcatggtgccgaacctgtaagccaaacttacaagtcacaacatacgcagtttgaacaagttg

SEQ ID NO: 813431 - DNA, 75 bp, synthetic construct
  source 1..75: mol_type = other DNA
aaggcttcgttctgcgtgctggtaaagtgatcatcatcgtcagcattttcctgagcgctttcaacagcttctcgc

SEQ ID NO: 813432 - DNA, 75 bp, synthetic construct
  source 1..75: mol_type = other DNA
tacgtgaggcggcagaacgtgcaactccagcaatggaacgcctgttaatgttgccagttgatgatgatctgataa

SEQ ID NO: 813433 - DNA, 75 bp, synthetic construct
  source 1..75: mol_type = other DNA
gcagccaatccagctaccgtcttggcgctgctgggcgagctggaaacagcaaaaaagcgcatagcagaactggaa

SEQ ID NO: 813434 - DNA, 75 bp, synthetic construct
  source 1..75: mol_type = other DNA
caacgactcggcgctggcgtccgtcagccgggtgatcaccccggtcttcaagcaatgcgtgcatgaagataactg

SEQ ID NO: 813435 - DNA, 75 bp, synthetic construct
  source 1..75: mol_type = other DNA
aaaattctggccggaccagaaaccgtgctggcgctactggatgaacgggaaagaaaccagcaatacatcaaatct

SEQ ID NO: 813436 - DNA, 75 bp, synthetic construct
  source 1..75: mol_type = other DNA
ggcaatggaacgcctgttaatgttgccagctgatgatgatttgttaagtgaacaagaacttaaagattacggtgt

SEQ ID NO: 813437 - DNA, 75 bp, synthetic construct
  source 1..75: mol_type = other DNA
agcaagattgactatcaggcactgcgtgaggcggcagagcgtgcaattccggcaatggaacgcctgttaatgttg

SEQ ID NO: 813438 - DNA, 75 bp, synthetic construct
  source 1..75: mol_type = other DNA
cgcctgattgaacccacccgcgggcaagtgctgattgatggtgtggatattgccaaaatatccgacgccgaactc

SEQ ID NO: 813439 - DNA, 75 bp, synthetic construct
  source 1..75: mol_type = other DNA
aagccttctcggcgctcgatccattaattcgcaccgagatgcaggatgagctggtaaaattacaggcgaaacatc

SEQ ID NO: 813440 - DNA, 75 bp, synthetic construct
  source 1..75: mol_type = other DNA
aactggtcgaggagtgcgaaattcctgctggcggttctctggtcgagtacgttgacgatatgcgcgagaagctgg

SEQ ID NO: 813441 - DNA, 75 bp, synthetic construct
  source 1..75: mol_type = other DNA
caaccctgaagtagtgcaggcgttgctggatgaacgggaaagaaaccagcaatacattaaacgccgcgaccagga

SEQ ID NO: 813442 - DNA, 75 bp, synthetic construct
  source 1..75: mol_type = other DNA
ctaaatatcgcttactcgttggcaacattgttctaccaggtcgccagctacagccagcatccaacttacagtctg

SEQ ID NO: 813443 - DNA, 75 bp, synthetic construct
  source 1..75: mol_type = other DNA
tgtttgacgtcggttccgtggcgctgtttgtacatggtattcagtggattggttacacactccacttcccagact

SEQ ID NO: 813444 - DNA, 75 bp, synthetic construct
  source 1..75: mol_type = other DNA
taatggcatacaaagtttctgaagtcatcgctgcaatccgcgccgctggcattcgcatcaaaggagaggagcatg

SEQ ID NO: 813445 - DNA, 75 bp, synthetic construct
  source 1..75: mol_type = other DNA
aaaactcaacgagcagcgtgaatattacgagggagtaatctcggatgggagtaagcgtattgcagaactggaaag

SEQ ID NO: 813446 - DNA, 75 bp, synthetic construct
  source 1..75: mol_type = other DNA
tgaacgttgcggagacattatcaaatggcctggctttgacgaccagaaaaatgcagagaacaacgcagaatttat

SEQ ID NO: 813447 - DNA, 75 bp, synthetic construct
  source 1..75: mol_type = other DNA
agcatataggagctgttatcccgcgaaagtcggtaggtcagggcgttagtggcggcgctctgattgacagaacgc

SEQ ID NO: 813448 - DNA, 75 bp, synthetic construct
  source 1..75: mol_type = other DNA
aaaaagaagcctacacgtacaatcatattgatgtgaaaatacagctaactaaagttgtaaaagctgttcaggatg

SEQ ID NO: 813449 - DNA, 75 bp, synthetic construct
  source 1..75: mol_type = other DNA
cttaaaccatgttcgaacagccatagcgagaggtgaggaagtacagccacggcatataggggctattatcccgcg

SEQ ID NO: 813450 - DNA, 75 bp, synthetic construct
  source 1..75: mol_type = other DNA
gaagcgggcgcggcctggaagcgatgaagtgggtcgttgtggttgcgttgctcctggtggcaattgtaggcaact

SEQ ID NO: 813451 - DNA, 75 bp, synthetic construct
  source 1..75: mol_type = other DNA
caaaattgactgcactttcctaaaggatttttcagagaaaggaggcaatctggctacctcgtttgtttgcaccga

SEQ ID NO: 813452 - DNA, 75 bp, synthetic construct
  source 1..75: mol_type = other DNA
tgctgtatgcctgccttgtgcccgtagccctgacagggtgtgatctggctgattatttcccgaatgtgccacagc

SEQ ID NO: 813453 - DNA, 75 bp, synthetic construct
  source 1..75: mol_type = other DNA
atgttggttgctcaggggaaaaagccgacagaggcataccgactggctggttatgaggggcaaggtgcgacagct

SEQ ID NO: 813454 - DNA, 75 bp, synthetic construct
  source 1..75: mol_type = other DNA
gcagagtgtcagtgttccccgctcattaccggaagcgcttcgcctggctgctgatttagccgagcagaaagagca

SEQ ID NO: 813455 - DNA, 75 bp, synthetic construct
  source 1..75: mol_type = other DNA
ggcacccccgcaacacctaaggagctgagcgatcatagttgtattctgctaggaacatcccgctcagcacccata

SEQ ID NO: 813456 - DNA, 75 bp, synthetic construct
  source 1..75: mol_type = other DNA
tgaccgcgccttagattggtattcagaagaagatcaagtaaaggtattagatactgtcacgtcaaataccaaagc

SEQ ID NO: 813457 - DNA, 75 bp, synthetic construct
  source 1..75: mol_type = other DNA
gaggtgaagacgggcacgacaaaccagacaaattacgcattcaatcagtcccgcttcaccgccaagggtgttcgc

SEQ ID NO: 813458 - DNA, 75 bp, synthetic construct
  source 1..75: mol_type = other DNA
tcgtatgcttagaaatgccagggtttttcgtgccatcagctacttccgcaatcagtaccagaaacgctataccgc

SEQ ID NO: 813459 - DNA, 75 bp, synthetic construct
  source 1..75: mol_type = other DNA
ccgatgccatgacaaatcttggcattatgtatgagtatggtgaaggggttaaaaaagactataaaaaagcagctg

SEQ ID NO: 813460 - DNA, 75 bp, synthetic construct
  source 1..75: mol_type = other DNA
ccccggctggagcgtctccgccgtctcgtccccaggacagtgcagcgcaggctccccacaccggagcatgtcagc

SEQ ID NO: 813461 - DNA, 75 bp, synthetic construct
  source 1..75: mol_type = other DNA
atgtccctgcagatgttacgggaacatatgacgctggaagggatggcaaaactctattgccgtggccttgatgac

SEQ ID NO: 813462 - DNA, 75 bp, synthetic construct
  source 1..75: mol_type = other DNA
aagtgatcctggctggcgaagtaacgactccggtaactgttcgtggtctgcgtgttactaaaggcgctcgtgctg

SEQ ID NO: 813463 - DNA, 75 bp, synthetic construct
  source 1..75: mol_type = other DNA
tgatggtaatgatccccgctctggatacatcagcgcatacaacgtctgctcttggacgaatgtttatcacccaga

SEQ ID NO: 813464 - DNA, 75 bp, synthetic construct
  source 1..75: mol_type = other DNA
gtgctaaagccattgatgccgctgttgatcacctcaatggtaaaccggtagaaaaaatgatcccggtacaacccg

SEQ ID NO: 813465 - DNA, 75 bp, synthetic construct
  source 1..75: mol_type = other DNA
tgcaacgcagggaggacgcagagcgggaactgaaagcacagtacaacagacaggccgcgtatgcccgccgctatg

SEQ ID NO: 813466 - DNA, 75 bp, synthetic construct
  source 1..75: mol_type = other DNA
atgagtaagaaaaaaggcgcgaccgaagccgccttcaccgaaagctataccgtgttctacagcggggaagcagag

SEQ ID NO: 813467 - DNA, 75 bp, synthetic construct
  source 1..75: mol_type = other DNA
cagcagcagactctttatgcaccgctgctacgccgactggccgcatcgtatgacgcagcttgccgcactcagcca

SEQ ID NO: 813468 - DNA, 75 bp, synthetic construct
  source 1..75: mol_type = other DNA
ggctgttctcccgtgaatggatagcgcttgatgcgattcacgccattcttgaacaacagcaggacagtttcccgt

SEQ ID NO: 813469 - DNA, 75 bp, synthetic construct
  source 1..75: mol_type = other DNA
gtcgtctgccgaaattcggcttcatttctcgtaaagcagcgattacagccgaaattcgtctgtctgacctggcta

SEQ ID NO: 813470 - DNA, 75 bp, synthetic construct
  source 1..75: mol_type = other DNA
atcgtattgttcagcgggccatgctgatggcgatggagccgatatgggagagtgattttcatacgctctcatatg

SEQ ID NO: 813471 - DNA, 75 bp, synthetic construct
  source 1..75: mol_type = other DNA
atgagcaaatcattacaaaaacccaccattctgaatgttgaaactgtagccctttcccgactgtttaccgtcgag

SEQ ID NO: 813472 - DNA, 75 bp, synthetic construct
  source 1..75: mol_type = other DNA
aacggcggcgctgtggccagcattgcgctggccacctccgaaacctggcgggacaaacagacaggggagatgcgg

SEQ ID NO: 813473 - DNA, 75 bp, synthetic construct
  source 1..75: mol_type = other DNA
taccccggatgaatacaccaacctgtacatgtgtgagttcgtcaaagaaggcgaatccgttttctcacttaatca

SEQ ID NO: 813474 - DNA, 75 bp, synthetic construct
  source 1..75: mol_type = other DNA
cgacctggtattttgcacaggaagcactgctgatggcgctgcgtgacgatgtggcgcaaccttaccagcgtaacc

SEQ ID NO: 813475 - DNA, 75 bp, synthetic construct
  source 1..75: mol_type = other DNA
gcggcctttaacgccgtgcgtaaggtgaaaacaccgggctgtcaacgacggatgaaaagtgatccacttatatct

SEQ ID NO: 813476 - DNA, 75 bp, synthetic construct
  source 1..75: mol_type = other DNA
tcagggtacagggtatggagtttgaacagcaggcggccctgattgaggaatacacccaaaaatataacgtgaaac

SEQ ID NO: 813477 - DNA, 75 bp, synthetic construct
  source 1..75: mol_type = other DNA
gggagaacaggccgtttccggtaaaaagccccgtaaacgcagactgaaaaatcacttcaccgaagaacagattgt

SEQ ID NO: 813478 - DNA, 75 bp, synthetic construct
  source 1..75: mol_type = other DNA
agggtacacacctgcggaaatctcgcaactgatggggatcagccagaacacgatttactcatggaaaaaacgcga

SEQ ID NO: 813479 - DNA, 75 bp, synthetic construct
  source 1..75: mol_type = other DNA
tggataaatcctcctgggcctacttcttctatgagtatgcgggcattccgggcaccctgctgtgcggctggatgt

SEQ ID NO: 813480 - DNA, 75 bp, synthetic construct
  source 1..75: mol_type = other DNA
acgtgctgccgaacaaactgctgtggtacatcgccatcgccaacgtgttcgtttatctgctgcgttacggcatcc

SEQ ID NO: 813481 - DNA, 75 bp, synthetic construct
  source 1..75: mol_type = other DNA
gcggctggatgtcggataaagtcttccgtggtaaccgtggcgcaaccggcgtcttctttatgactctggtgacca

SEQ ID NO: 813482 - DNA, 75 bp, synthetic construct
  source 1..75: mol_type = other DNA
tggatctcgcccagtcgtttatgaccgtgcgtaaagtcaccgcaggcggcgttattacctaccagtccgatcggg

SEQ ID NO: 813483 - DNA, 75 bp, synthetic construct
  source 1..75: mol_type = other DNA
cgcactcagggaaaaaatcctgccgtcactggcctggcatcagcgcgaatggtacgacaaccgccatcaccgcaa

SEQ ID NO: 813484 - DNA, 75 bp, synthetic construct
  source 1..75: mol_type = other DNA
ctgctggggatggcctggttcaatgactggcacgcggcgctctatatgcccgctttctgcgccattctggtggca

SEQ ID NO: 813485 - DNA, 75 bp, synthetic construct
  source 1..75: mol_type = other DNA
tcagggttcagggtatggagtttgaacaacaagctgccctgattgaggagtacacgaagaaatataacgtgaaac

SEQ ID NO: 813486 - DNA, 75 bp, synthetic construct
  source 1..75: mol_type = other DNA
tttaactacacccagcgttacccgcgcagctttgcgcagtggaagccggaatgtattggtgttgatagcggatgt

SEQ ID NO: 813487 - DNA, 75 bp, synthetic construct
  source 1..75: mol_type = other DNA
tattctgacacaatattgttgtcaacaaatatggcaccaacatcatcagaaaatgttggaccaactatgtacgca

SEQ ID NO: 813488 - DNA, 75 bp, synthetic construct
  source 1..75: mol_type = other DNA
tagcacaatttcgccgtgttaactgccgttattgctggggcgagaatcatctctaccagtggcgcgatatagcag

SEQ ID NO: 813489 - DNA, 75 bp, synthetic construct
  source 1..75: mol_type = other DNA
tgcgtacccgaaaatggaccgaccagaccggcctggaacgatacacgactgaagtggtggtgcataccggcggca

SEQ ID NO: 813490 - DNA, 75 bp, synthetic construct
  source 1..75: mol_type = other DNA
tgcgtacccgaaaatggaccgatcagaccggccaggagcgctacacgactgaagtggtggtgcatgccggcggca

SEQ ID NO: 813491 - DNA, 75 bp, synthetic construct
  source 1..75: mol_type = other DNA
gcagctttgcgcagtggaagccggaatgtattggtgttgatagcggctgtaccaaagcgcagatgatcaactcct

SEQ ID NO: 813492 - DNA, 75 bp, synthetic construct
  source 1..75: mol_type = other DNA
cgtattgcgatggcgctggagtcgctaaaactgtgcggcgtagtcgtaattggttttgccattggccttagcgga

SEQ ID NO: 813493 - DNA, 75 bp, synthetic construct
  source 1..75: mol_type = other DNA
ttttatgggtatcagtctggcgtttctcgataacctcgccagtaacctgttggcgattctgcattattctgccgt

SEQ ID NO: 813494 - DNA, 75 bp, synthetic construct
  source 1..75: mol_type = other DNA
tcctggaaaacgcttaacagcggcctgatgtgcccggacaagatctggaggcagattgtcacgttgcaggatgct

SEQ ID NO: 813495 - DNA, 75 bp, synthetic construct
  source 1..75: mol_type = other DNA
cggaacggaaaatctcagaaaaaaaagccagtatccgatgcgtgcctgaatgagggcgacacagaggaattttcg

SEQ ID NO: 813496 - DNA, 75 bp, synthetic construct
  source 1..75: mol_type = other DNA
gaaacactgcatgggtagcagcctctcgtttgtacaggaatgataaggtttttcgtgctatcagctacttccgca

SEQ ID NO: 813497 - DNA, 75 bp, synthetic construct
  source 1..75: mol_type = other DNA
accgaagacgagttcctcaatctctacatgtgtgagtttgtccgcgaaggggaatcggcatttaacctgaatatc

SEQ ID NO: 813498 - DNA, 75 bp, synthetic construct
  source 1..75: mol_type = other DNA
gcttccggtgctgaacgcacgacttagcgaagccgtcagtcgtgagcgtcagacaggaatgcagatggtgcaatc

SEQ ID NO: 813499 - DNA, 75 bp, synthetic construct
  source 1..75: mol_type = other DNA
tggcgaaaaagccgctgtttatgattggtcacagcgtcggtcccttccaggatgagcaatttaaccaactggcga

SEQ ID NO: 813500 - DNA, 75 bp, synthetic construct
  source 1..75: mol_type = other DNA
cagggcgtggcatttcgctatcgcatcctcggcattggcccgtgggaacgacgcctgcgcacgctcatcgaacaa

SEQ ID NO: 813501 - DNA, 75 bp, synthetic construct
  source 1..75: mol_type = other DNA
caccgccagctatgccgttcaacactggctggacgttgccgcacaacagaaaacggtggcaattaccctgcgcga

SEQ ID NO: 813502 - DNA, 75 bp, synthetic construct
  source 1..75: mol_type = other DNA
gccatcaactatgaacataaatccgccgggattatgcagcagctggggctgccagagatggcgattgatatccgt

SEQ ID NO: 813503 - DNA, 75 bp, synthetic construct
  source 1..75: mol_type = other DNA
cgcgcctgcactcagccattatctcgatgaatttctccactccggcaattgccatcaactacgaacataaatccg

SEQ ID NO: 813504 - DNA, 75 bp, synthetic construct
  source 1..75: mol_type = other DNA
gtcaggttacgacgccattattcaggtcggcggatcgttttttgtcgatctctatggcgtgccgcagtttgaaca

SEQ ID NO: 813505 - DNA, 75 bp, synthetic construct
  source 1..75: mol_type = other DNA
ctgtttatgattggtcacagcgtcggcccgttccaggatgagcaatttaaccaactggcaaactacgtattcggg

SEQ ID NO: 813506 - DNA, 75 bp, synthetic construct
  source 1..75: mol_type = other DNA
caaaaatattaaagatactggatgaaaaaatctcacttaacaaccgaatcaacgctgaactggaagcgatggcga

SEQ ID NO: 813507 - DNA, 75 bp, synthetic construct
  source 1..75: mol_type = other DNA
agcgaagccgtcagtcgcgaacgtcagatgggaatgcggatggtgcaatctgtgcttgaacgcattggggaggcg

SEQ ID NO: 813508 - DNA, 75 bp, synthetic construct
  source 1..75: mol_type = other DNA
aggatgagcaatttaaccaactggcgaactacgtttttggtcactgcgacgcgctgatcctgcgcgaatcggtca

SEQ ID NO: 813509 - DNA, 75 bp, synthetic construct
  source 1..75: mol_type = other DNA
cgtcaccgacactggcaagctgcgtaatatcgccatcgcccagggattcactgacttcgtgcgcctgctgtcagg

SEQ ID NO: 813510 - DNA, 75 bp, synthetic construct
  source 1..75: mol_type = other DNA
atgaaattacttattctgggcaaccacacttgcggcaatcgtggcgacagcgccatcctgcgtggcttacttgat

SEQ ID NO: 813511 - DNA, 75 bp, synthetic construct
  source 1..75: mol_type = other DNA
gctgtttttagccatcatgattgtggcatgtctgtggattgtacaaccctttattctcggctttgcatgggccgg

SEQ ID NO: 813512 - DNA, 75 bp, synthetic construct
  source 1..75: mol_type = other DNA
acctggggcactgtgctgctggtgtggagcggcgtagttgggacgctggataatatcatccgtcctatgcttatt

SEQ ID NO: 813513 - DNA, 75 bp, synthetic construct
  source 1..75: mol_type = other DNA
acctggggcacggtattgctggtgtggagtggtgtggttggcacactggataacgtgattcgcccgatgttaatt

SEQ ID NO: 813514 - DNA, 75 bp, synthetic construct
  source 1..75: mol_type = other DNA
atgtacatgtcgaagaaaacggccggcggggggaatacggcgcgctacctgggtcgttatcttggcatcgggctt

SEQ ID NO: 813515 - DNA, 75 bp, synthetic construct
  source 1..75: mol_type = other DNA
tggatatccagcaggagattctggccagaaatattggtgacgggcatcgtgtcattcatggtgtggccggttccg

SEQ ID NO: 813516 - DNA, 75 bp, synthetic construct
  source 1..75: mol_type = other DNA
gcggcgcagctgcttcaattaatgggaaagactattacctcttctctggtgagtatggtcagaaaggattcccgg

SEQ ID NO: 813517 - DNA, 75 bp, synthetic construct
  source 1..75: mol_type = other DNA
gcgtgccgcagtttgaacacgcgctttgcactttcatggcgaaaaagccgctgtttatgattggtcacagcgtcg

SEQ ID NO: 813518 - DNA, 75 bp, synthetic construct
  source 1..75: mol_type = other DNA
cactgcgacgcgctgatcctgcgcgaatcggtcagccttgatctgatgaaacgcagcaatatcactaccgcaaaa

SEQ ID NO: 813519 - DNA, 75 bp, synthetic construct
  source 1..75: mol_type = other DNA
cgcgcctgcactccgccattatctcgatgaactttgccactccggcgattgccatcaactatgaacataaatccg

SEQ ID NO: 813520 - DNA, 75 bp, synthetic construct
  source 1..75: mol_type = other DNA
ctgacttgatggctgctacattaatttccagtggcataccagaacaaaaggtgaatgattttctgaataatgttg

SEQ ID NO: 813521 - DNA, 75 bp, synthetic construct
  source 1..75: mol_type = other DNA
gcttaagttccaaacattgatctggtacattgctaattgtgtggtgttagcattatccactattgcttttgggta

SEQ ID NO: 813522 - DNA, 75 bp, synthetic construct
  source 1..75: mol_type = other DNA
gcggatgaaaattttcatttaggtctgggattcaccgctggcgtaacggcacgcgataactggaattacatccct

SEQ ID NO: 813523 - DNA, 75 bp, synthetic construct
  source 1..75: mol_type = other DNA
ttaatcaaatgctaaataaatttgacatattgatcgtgatgtcaagtggtagtaaggagcatgtagggaagaatg

SEQ ID NO: 813524 - DNA, 75 bp, synthetic construct
  source 1..75: mol_type = other DNA
ttaataaattaactccagaaagtcgaaatactctggattctgcaattaattacgcaatatcaaggtcacatcatg

SEQ ID NO: 813525 - DNA, 75 bp, synthetic construct
  source 1..75: mol_type = other DNA
ttaccctgccgaaaatggcagtggccgcagtggcggagcgcgttcatagcgctaaaaccagccagcaacaggcga

SEQ ID NO: 813526 - DNA, 75 bp, synthetic construct
  source 1..75: mol_type = other DNA
gcgcgttgcagcagtttagcgacgatctccgccagcatctgacggcgcaaaattttatggaggtgaacgtacagg

SEQ ID NO: 813527 - DNA, 75 bp, synthetic construct
  source 1..75: mol_type = other DNA
catttatggggagaactaacttaattccgttcacaccgttgcattccaaaacactgagagatatcgtactcatta

SEQ ID NO: 813528 - DNA, 75 bp, synthetic construct
  source 1..75: mol_type = other DNA
tctcataataatgacatcaaactttgccagtgaaaatatcacaaacatatggaatgatggtgagacaaatagaga

SEQ ID NO: 813529 - DNA, 75 bp, synthetic construct
  source 1..75: mol_type = other DNA
attgcgcattatagccgcaacgacatggggagaatataaaaagtattttgaaaaggatggggcgttagcccggcg

SEQ ID NO: 813530 - DNA, 75 bp, synthetic construct
  source 1..75: mol_type = other DNA
agggaggaagcgatcactgcaactgtacatttatctgatcgttatctacatagccgtcgtcagccagataagtct

SEQ ID NO: 813531 - DNA, 75 bp, synthetic construct
  source 1..75: mol_type = other DNA
aacagtttattgaacaagccgaatgttatttcaggagctatatggacggattgcggaggaatgcaccagatgatt

SEQ ID NO: 813532 - DNA, 75 bp, synthetic construct
  source 1..75: mol_type = other DNA
tcatgcgggcttttttatccggggaattatatgagcgagaaaattgccgttgtctatatcggccccaaacccgtg

SEQ ID NO: 813533 - DNA, 75 bp, synthetic construct
  source 1..75: mol_type = other DNA
tgccgcaggcgaaacccgaacagcaggccagactggcaatttacgccagtgaagatttacatgccattgcgccga

SEQ ID NO: 813534 - DNA, 75 bp, synthetic construct
  source 1..75: mol_type = other DNA
cgcacccgcaggagaacgatccggcaacgatgcaggccttaatggcgctgttactgccgcaacctgccgcgccgc

SEQ ID NO: 813535 - DNA, 75 bp, synthetic construct
  source 1..75: mol_type = other DNA
acgcgccacaatacccgacgcaacagcaggagcccacgccgttgccgccgcagttgcaggcgctggtcggccagt

SEQ ID NO: 813536 - DNA, 75 bp, synthetic construct
  source 1..75: mol_type = other DNA
aagatagaatacaatgattctcttattgactggattacacatcattgtcaatgtgataagtctggagctagggat

SEQ ID NO: 813537 - DNA, 75 bp, synthetic construct
  source 1..75: mol_type = other DNA
gaagctattacaggaacataagtcaataaccgaaaagttttctgaactgtctttatttaaccctgacagggtcct

SEQ ID NO: 813538 - DNA, 75 bp, synthetic construct
  source 1..75: mol_type = other DNA
gggatcatcgaggattctgaaggtaagatggtgtctttccgggattgtctcatcataatgacatccaaccttgcc

SEQ ID NO: 813539 - DNA, 75 bp, synthetic construct
  source 1..75: mol_type = other DNA
tcggttttggccttggagggacacttacagaaagagtaagtcataatccgtacagtgtaattctgcttgatgaaa

SEQ ID NO: 813540 - DNA, 75 bp, synthetic construct
  source 1..75: mol_type = other DNA
tttaaagcttgaactaaagcggctgcgagaaaaagcgcaggggtcgcaaacaaagtttctgactatgccgatttt

SEQ ID NO: 813541 - DNA, 75 bp, synthetic construct
  source 1..75: mol_type = other DNA
attcttcgcgctacaaatgtgacgggaaataatgttgatattgatgatttagtcttcattccttctagtagagta

SEQ ID NO: 813542 - DNA, 75 bp, synthetic construct
  source 1..75: mol_type = other DNA
catcaacacggaactggaagcgatggcgaaaacactgtatgactactggtttgtacagtttgatttccctgatgc

SEQ ID NO: 813543 - DNA, 75 bp, synthetic construct
  source 1..75: mol_type = other DNA
gggcaaactgatgcagcaaatttacttaagcctgctcttgcccgtggggaattgcgtattatcgcagcaacgaca

SEQ ID NO: 813544 - DNA, 75 bp, synthetic construct
  source 1..75: mol_type = other DNA
gaaaatttcaccctgcttgcagaaacagggaaattggatcctgtttctggtagagagaaggaaatcagacaactt

SEQ ID NO: 813545 - DNA, 75 bp, synthetic construct
  source 1..75: mol_type = other DNA
tgatgtcgtttccgggtggactggtgttccactgggagtatgccttgatagtgaacaacaaaaaacatccgttct

SEQ ID NO: 813546 - DNA, 75 bp, synthetic construct
  source 1..75: mol_type = other DNA
aaggaagaagcaatagttgcagcggtacatttatcagaccgttatctgcatgggcgttaccagccagataaatct

SEQ ID NO: 813547 - DNA, 75 bp, synthetic construct
  source 1..75: mol_type = other DNA
accgggagttgggaaaagtagtattgtagaaggtttagcactgcaaattgcatccggccgtgtacctgacgcact

SEQ ID NO: 813548 - DNA, 75 bp, synthetic construct
  source 1..75: mol_type = other DNA
atgggtggtttgttggcgggcgccagtgtcaaaggggaatttgaaaatcgcttaaaatcgctgttaactgaactt

SEQ ID NO: 813549 - DNA, 75 bp, synthetic construct
  source 1..75: mol_type = other DNA
tgctgatgacagtggatgcgggcaacatgattgccgtggccgaagaggcccggcaaaaatggaagcaaagcccct

SEQ ID NO: 813550 - DNA, 75 bp, synthetic construct
  source 1..75: mol_type = other DNA
ctgacagcgattgagatgtacaaaccaactgtgcgcatcgtggaagttaatgtgccacgcgtcgctggcatttgc

SEQ ID NO: 813551 - DNA, 75 bp, synthetic construct
  source 1..75: mol_type = other DNA
tccagcaatggaacgcctgttaatgttgccagttgatgatgatttgttaagtgaacaggaacttaaagattacgg

SEQ ID NO: 813552 - DNA, 75 bp, synthetic construct
  source 1..75: mol_type = other DNA
ggagctgactggctgacagcgattgagatgtacaaaccaacagtgcgcatcgtggaagttaatgtgccacgcgcc

SEQ ID NO: 813553 - DNA, 75 bp, synthetic construct
  source 1..75: mol_type = other DNA
tgagtattacgaaggtgttatctcggatgggagtaagcgtattgctgaactggagaaaagcgaagagcaactcat

SEQ ID NO: 813554 - DNA, 75 bp, synthetic construct
  source 1..75: mol_type = other DNA
ttgccagctgatgatgatttgttaagtgaacaggaacttaaagattacggtgtggatattgatgcgctcaacgcc

SEQ ID NO: 813555 - DNA, 75 bp, synthetic construct
  source 1..75: mol_type = other DNA
taagcgccggaatatattcatattttttcccgccggcaccgaggaagacctcacggttttgctcggcaatctctt

SEQ ID NO: 813556 - DNA, 75 bp, synthetic construct
  source 1..75: mol_type = other DNA
ctgtgagttcaaactctacccaggcacgctgcacgcctttttgcattattcacggatgatgaaaaccgccgacga

SEQ ID NO: 813557 - DNA, 75 bp, synthetic construct
  source 1..75: mol_type = other DNA
gattatcaaatcaacatgtcccgcattggctttgccggtgattctgcaggcgcaatgctggcgcttgccagcgct

SEQ ID NO: 813558 - DNA, 75 bp, synthetic construct
  source 1..75: mol_type = other DNA
atgaaaccggaaaacaaattacccgttctggagctcatttctgctgaaatgaaggcagttgtaaacaccattcag

SEQ ID NO: 813559 - DNA, 75 bp, synthetic construct
  source 1..75: mol_type = other DNA
gatacccacgatcgcatcatgcgcctgttggcaagctacagccaatgtacggtgattggcattgattacactctt

SEQ ID NO: 813560 - DNA, 75 bp, synthetic construct
  source 1..75: mol_type = other DNA
cgggattccgtgactcgtcgtctgttgggtggtgtctgggatggcttaacgcaacaggatttgcagatgtatgaa

SEQ ID NO: 813561 - DNA, 75 bp, synthetic construct
  source 1..75: mol_type = other DNA
aacgatgtttgccgtattgcggaactaacaaaacaactggagttggcaaaatcaaaactcaacgagcagcgtgag

SEQ ID NO: 813562 - DNA, 75 bp, synthetic construct
  source 1..75: mol_type = other DNA
gccatgttgctgaactggaagaagcgctacgcgataagcaggcgttacttgaagcctcagaaaagcgcaacgcaa

SEQ ID NO: 813563 - DNA, 75 bp, synthetic construct
  source 1..75: mol_type = other DNA
ctggctgacagcgattgagatgtacaaaccaacagtgcgcatcgtggaagttaatgtgccacgcgccgcaggcat

SEQ ID NO: 813564 - DNA, 75 bp, synthetic construct
  source 1..75: mol_type = other DNA
tgcgggataaggcagagaacgcaactaaaggaggctacatcgtagggcatacatctgttaaccagcacggtaatt

SEQ ID NO: 813565 - DNA, 75 bp, synthetic construct
  source 1..75: mol_type = other DNA
ggaatacgtgaagctggagcgactgcagaacgcgctatcgggcaactctccggtaactccggatagttggataag

SEQ ID NO: 813566 - DNA, 75 bp, synthetic construct
  source 1..75: mol_type = other DNA
aatcgaaaacggccagcttgttgccgatacgctacgccacttagctgataacgaaatcgactctgattattttgc

SEQ ID NO: 813567 - DNA, 75 bp, synthetic construct
  source 1..75: mol_type = other DNA
ctggcgctgactggctgacagcgattgagatgtacaaaccaactgtgcgcatcgtggaagttaatgtgccacgcg

SEQ ID NO: 813568 - DNA, 75 bp, synthetic construct
  source 1..75: mol_type = other DNA
tgcgtgaggtggcggaacgtgcaactccagcaatggaacgcctgttaatgttgccagctgatgatgatttgttaa

SEQ ID NO: 813569 - DNA, 75 bp, synthetic construct
  source 1..75: mol_type = other DNA
cgattgagatgtacaaaccaactgtgcgcatcgtggaagttaatgtgccacgcgcccctggcattcgcatcaaag

SEQ ID NO: 813570 - DNA, 75 bp, synthetic construct
  source 1..75: mol_type = other DNA
tgttgagctggaatccgcagagaacaaccttattgatagtgagtgccatgttgctgaactggaagaagcgctacg

SEQ ID NO: 813571 - DNA, 75 bp, synthetic construct
  source 1..75: mol_type = other DNA
acaaaccaactgtgcgcatcgtggaagttaatgtgccacgcgccgctggaattcgcaccaaaggagatgcaggag

SEQ ID NO: 813572 - DNA, 75 bp, synthetic construct
  source 1..75: mol_type = other DNA
tgctggcaaattacacccaatgtacagtgattggtattgcttacactctttcgccggaagcacgttttccgcagg

SEQ ID NO: 813573 - DNA, 75 bp, synthetic construct
  source 1..75: mol_type = other DNA
atgcattctcccgcgagtattttgaaaaacatcagaaccgtgaaataccgctcgttcagccacaggcgggcggtg

SEQ ID NO: 813574 - DNA, 75 bp, synthetic construct
  source 1..75: mol_type = other DNA
ttgcaacctgctttgacaatgaaggtaaaaagaaatactcgcgacgcaaggatatagtgcatttactgacatacc

SEQ ID NO: 813575 - DNA, 75 bp, synthetic construct
  source 1..75: mol_type = other DNA
gtggagttgtcacatcccggtggtgttgattagtgggtttaccaatcctctaagtgagttctatacaccgtggcg

SEQ ID NO: 813576 - DNA, 75 bp, synthetic construct
  source 1..75: mol_type = other DNA
atacgatgccgtacttgtggatgaggggcatgattttgagagtcgctggctggctctgatagcccgcctgtttga

SEQ ID NO: 813577 - DNA, 75 bp, synthetic construct
  source 1..75: mol_type = other DNA
tgcaggacgttatgacacaacgcgggatgccttttgccacctgttttgacagggaaggcaagaagacatactcgc

SEQ ID NO: 813578 - DNA, 75 bp, synthetic construct
  source 1..75: mol_type = other DNA
tacactggaaaccgacggtcttctgaaatcagaaataaatccgctggtacaggttcgtcgttatgcctgtgatac

SEQ ID NO: 813579 - DNA, 75 bp, synthetic construct
  source 1..75: mol_type = other DNA
catccctgatttaaaaaaaataaacaagagatttttatggcattttttaaacagtgtagtatttcaagaatttat

SEQ ID NO: 813580 - DNA, 75 bp, synthetic construct
  source 1..75: mol_type = other DNA
gagtacattacagccgcagggctagaaaatagcagcgcgaaaatagttgagaaagactcaatcttaatagcaatg

SEQ ID NO: 813581 - DNA, 75 bp, synthetic construct
  source 1..75: mol_type = other DNA
tgatgactgccttgtctggtacgatattccggtgggacggaaaaaccggcatccggattttgtcattattgaccc

SEQ ID NO: 813582 - DNA, 75 bp, synthetic construct
  source 1..75: mol_type = other DNA
gcagtctacagcacaggcaaagcactggaataatggtccgggatgggctgaagtggtcagtcacttaaaggaact

SEQ ID NO: 813583 - DNA, 75 bp, synthetic construct
  source 1..75: mol_type = other DNA
ccagcggtttatcgtggctggcatgggcgaccagaatacccgtgattttaatcagtggatttacattaccaaaca

SEQ ID NO: 813584 - DNA, 75 bp, synthetic construct
  source 1..75: mol_type = other DNA
tacgacatgccagtttttttatcggtttagccagcggattgtcatggctggcatgggcaagcagaatacctgtgg

SEQ ID NO: 813585 - DNA, 75 bp, synthetic construct
  source 1..75: mol_type = other DNA
gaagctcggagaacagaccgcacgacagagacagattattgacctgatcgacaacgaagccggactcacagaaca

SEQ ID NO: 813586 - DNA, 75 bp, synthetic construct
  source 1..75: mol_type = other DNA
ccaaacggtaatggcatacaaagtttctgaggtcatcgctgcaatccgcgccgctggcattcgcattaaaggaga

SEQ ID NO: 813587 - DNA, 75 bp, synthetic construct
  source 1..75: mol_type = other DNA
aagcgcatgactggcgctgactggctgacagcaattgagatgtacaaaccaactgtgcgcatcgtggaagttaat

SEQ ID NO: 813588 - DNA, 75 bp, synthetic construct
  source 1..75: mol_type = other DNA
tgttctcctacgcccagccgttcaaaaagtacgatggagacaaggcagaacagttccagtttaacatcggtaaaa

SEQ ID NO: 813589 - DNA, 75 bp, synthetic construct
  source 1..75: mol_type = other DNA
cgggaacgattgctgagcaacgacagtattacacgcttgagcgccgattctggaatgcgggcgctccagaaatgg

SEQ ID NO: 813590 - DNA, 75 bp, synthetic construct
  source 1..75: mol_type = other DNA
aggatattgcgctaacggtagggaagctgcgcgttgagcttgaagcagaaaaacagcgggcaaaagttctattta

SEQ ID NO: 813591 - DNA, 75 bp, synthetic construct
  source 1..75: mol_type = other DNA
gacgttagcattgttgaccagtgccagaaaaccgctgatgtagttcgggcgctgctggatgagctggaagccaaa

SEQ ID NO: 813592 - DNA, 75 bp, synthetic construct
  source 1..75: mol_type = other DNA
tggtgtgcgtgtgggcgaatccctcgatcgcaccaccattgccgatatcgagaaaggtctggaagacttctacta

SEQ ID NO: 813593 - DNA, 75 bp, synthetic construct
  source 1..75: mol_type = other DNA
acaaaaacaggcgagctatgctataaaaaagacaggatattacaagcacttaaggaacttaagtacgatctggag

SEQ ID NO: 813594 - DNA, 75 bp, synthetic construct
  source 1..75: mol_type = other DNA
agagacagattattgacctgatcgacaacgaagccggactcacagaacaggaacgcaaacttctccacgtactgg

SEQ ID NO: 813595 - DNA, 75 bp, synthetic construct
  source 1..75: mol_type = other DNA
tgaaatgcgccagatggaaggtgcctggttaggcagcgatctggttgatcagggtaaagaacgtctgaatcgtct

SEQ ID NO: 813596 - DNA, 75 bp, synthetic construct
  source 1..75: mol_type = other DNA
cgtcgaaagatgctgttctgcgccgtgaaatgcgccagatggaaggggcatggctgggtagcgatctggtcgatc

SEQ ID NO: 813597 - DNA, 75 bp, synthetic construct
  source 1..75: mol_type = other DNA
gggcttctttgaaactgtcgataccgatacccaacgtgttccgggtagcccggaccaggtagatgtagtctacaa

SEQ ID NO: 813598 - DNA, 75 bp, synthetic construct
  source 1..75: mol_type = other DNA
cgaatgtttatcacccagaaaagtatgattctcgcccgtgatttgggctaccgcctcgaaggaactgattccgat

SEQ ID NO: 813599 - DNA, 75 bp, synthetic construct
  source 1..75: mol_type = other DNA
gaatgtgtttcttttttccatctgtcacaacttgttgcgccagaaatggaaaaaaatggcggtggcgttattctg

SEQ ID NO: 813600 - DNA, 75 bp, synthetic construct
  source 1..75: mol_type = other DNA
aatgcggcgttgttcttgtgttcacccgcagccggctggataagcggacaaattctcactgtctctggcggtggg

SEQ ID NO: 813601 - DNA, 75 bp, synthetic construct
  source 1..75: mol_type = other DNA
acctttcacgcgagcgctgccagttaatactgacccagcttgttatggcgggtctggccgattatcagttcggtt

SEQ ID NO: 813602 - DNA, 75 bp, synthetic construct
  source 1..75: mol_type = other DNA
gtagataaacgacttcttcaatgcggtaatgagatttatagtgcaattaaggacttacaaagcaaagcgcctgat

SEQ ID NO: 813603 - DNA, 75 bp, synthetic construct
  source 1..75: mol_type = other DNA
gtgttagctttttgtcgggcttcgttgaagtctaaaaaatatatcttcattttactggtgcttgtggcgattgtg

SEQ ID NO: 813604 - DNA, 75 bp, synthetic construct
  source 1..75: mol_type = other DNA
gttttctgctggaaaaaaactgacggtagataaacgatttctacaatgtagaaatgagatttatagcacaattaa

SEQ ID NO: 813605 - DNA, 75 bp, synthetic construct
  source 1..75: mol_type = other DNA
ccgcctgacggctaatcaggcatatcaccagatggcgaagctggggatcgtcgaacagcgcgaacgatacagccg

SEQ ID NO: 813606 - DNA, 75 bp, synthetic construct
  source 1..75: mol_type = other DNA
ccgcgcgagacgcagccacacttcttcgaatcccgattccctgagctgttaaagctgctcgataccgttcattga

SEQ ID NO: 813607 - DNA, 75 bp, synthetic construct
  source 1..75: mol_type = other DNA
gagcagatgtgcctggaatcctgggacgaagccttcagtaaaaccgaagagtaccgcggcggcaacgccaacatg

SEQ ID NO: 813608 - DNA, 75 bp, synthetic construct
  source 1..75: mol_type = other DNA
aaactgccagagtggtgtttaatgaattaagcgtcaccgaaccggcgaccgtcggggaaattgcgcagaatactt

SEQ ID NO: 813609 - DNA, 75 bp, synthetic construct
  source 1..75: mol_type = other DNA
ggtgagtgtgattcatgggggaaatgaacggggaacttatgtctgcaaggaactggtgtatgcctatgcaatgtg

SEQ ID NO: 813610 - DNA, 75 bp, synthetic construct
  source 1..75: mol_type = other DNA
cttggtgcctgtcagaaactccaggaggctgttggcttaccgaatctggcaccgcgctatgccattgatgctcct

SEQ ID NO: 813611 - DNA, 75 bp, synthetic construct
  source 1..75: mol_type = other DNA
tccggatgctaacccgcgtctgcgagcagccattgataaagcactgtctaacaacatgactcgtgacaccctgaa

SEQ ID NO: 813612 - DNA, 75 bp, synthetic construct
  source 1..75: mol_type = other DNA
acctttcacgcgaactctgccagtttatactgaccccgctggttatggcgggtctggcagactatcagttcggtt

SEQ ID NO: 813613 - DNA, 75 bp, synthetic construct
  source 1..75: mol_type = other DNA
attaagcgtcactgaaccggcgacagtcggggagattgcgcagaatacttatctttcacgtgaacgctgccagtt

SEQ ID NO: 813614 - DNA, 75 bp, synthetic construct
  source 1..75: mol_type = other DNA
ttaatactgactcagcttgttatggcgggtctggcagattatcagttcggttgttacagacgccttccgcagtga

SEQ ID NO: 813615 - DNA, 75 bp, synthetic construct
  source 1..75: mol_type = other DNA
atgctgaaacagcaggatatgaccgaaaccgccagagtggtgtttaatgaattaagcgtcaccgaaccggcgact

SEQ ID NO: 813616 - DNA, 75 bp, synthetic construct
  source 1..75: mol_type = other DNA
acctttcacgcgaacgctgccagttaatactgacccagcttgttatggcgggtctggcagactatcagtttggtt

SEQ ID NO: 813617 - DNA, 75 bp, synthetic construct
  source 1..75: mol_type = other DNA
atgctgaaacagcaggatatgacagaaaccgccagagtggtgtttaatgaattaagcgttaccgacccggcgaca

SEQ ID NO: 813618 - DNA, 75 bp, synthetic construct
  source 1..75: mol_type = other DNA
taaggagccacaagggttcgttgctgatgccactatcaatacacctaacggcgttctggtcgccagtggcaaaca

SEQ ID NO: 813619 - DNA, 75 bp, synthetic construct
  source 1..75: mol_type = other DNA
gtgggtaaacagttcgacgttacccgtgaacgtatccgtcagatcgaagcaaaggcgctgcgtaaactgcgtcac

SEQ ID NO: 813620 - DNA, 75 bp, synthetic construct
  source 1..75: mol_type = other DNA
tgaacagtgcaaaatgccgaagaaaaacttcattaccctgtttaccggcaacgaaaccagcgatacctggttcaa

SEQ ID NO: 813621 - DNA, 75 bp, synthetic construct
  source 1..75: mol_type = other DNA
atgctaaaacagcaggatatgaccgaaaccgccagagtggtgtttaatgaattaagtgtcaccgaaccggcgacc

SEQ ID NO: 813622 - DNA, 75 bp, synthetic construct
  source 1..75: mol_type = other DNA
atgctaaaacagcaggatatgaccgaaaccgccagagtggtatttaatgaattaagtgtcaccgaaccagcgacc

SEQ ID NO: 813623 - DNA, 75 bp, synthetic construct
  source 1..75: mol_type = other DNA
aaactggaaaaatggcaaacacatctgattaatccacatatcattctgtccaaagagccacaagggttcgttgct

SEQ ID NO: 813624 - DNA, 75 bp, synthetic construct
  source 1..75: mol_type = other DNA
ccagaaataatcattatcgcgttaacgaacacttcgatacccagtggaatccgctgccggattacaacaaagata

SEQ ID NO: 813625 - DNA, 75 bp, synthetic construct
  source 1..75: mol_type = other DNA
ttctgttgttgacgtgcgtccggaatttgccggtcacgcagcggacatgtatctggaaggttctgaccagcaccg

SEQ ID NO: 813626 - DNA, 75 bp, synthetic construct
  source 1..75: mol_type = other DNA
aaaccgttatcaccgatacgggtgcaaaaaaattagctcaggcagccgcgccagatggtaagcccgtccgcctga

SEQ ID NO: 813627 - DNA, 75 bp, synthetic construct
  source 1..75: mol_type = other DNA
cacggcgatttaatcgcggtgggcaatactgccgaaagttacaagccagccgttgccgaagggtccggtcgtgca

SEQ ID NO: 813628 - DNA, 75 bp, synthetic construct
  source 1..75: mol_type = other DNA
gaacaaactgggcgcggatattctgcgtctgtgggtggcatcaactgactacaccggtgaaatggccgtttctga

SEQ ID NO: 813629 - DNA, 75 bp, synthetic construct
  source 1..75: mol_type = other DNA
gtcctgactggtgtatctcccgtcagcgcacttggggcgtaccgatgtcactgttcgtgcataaagacacggaag

SEQ ID NO: 813630 - DNA, 75 bp, synthetic construct
  source 1..75: mol_type = other DNA
ttgcgctgctgcaggaaaaaggcgcgctgttgcacgttgagaaaatgcagcacagctatccgtgctgctggcgtc

SEQ ID NO: 813631 - DNA, 75 bp, synthetic construct
  source 1..75: mol_type = other DNA
cgactctgaaacgcctgctggcttacggttcgccgtggcgcaaaccgctgggcgtcgccgtggtgatgatgtggg

SEQ ID NO: 813632 - DNA, 75 bp, synthetic construct
  source 1..75: mol_type = other DNA
gtcagcaggcgcgatttggcgaacgtatgggggaggccagtcgttcacactatatggcgaggatgcaaaccctgc

SEQ ID NO: 813633 - DNA, 75 bp, synthetic construct
  source 1..75: mol_type = other DNA
gcctcgctgaccgcaaaaggctttgttcaactcagtagcgccactaacagcgtgtctgaaacgcaggctgcaacg

SEQ ID NO: 813634 - DNA, 75 bp, synthetic construct
  source 1..75: mol_type = other DNA
gggaactgtccggcaatgccgctactgcaacaaagctgaaaacagcacgaaaaattgctggagttggttttgatg

SEQ ID NO: 813635 - DNA, 75 bp, synthetic construct
  source 1..75: mol_type = other DNA
ctactggcagatgtatcaactgcaacttgcaggagaggaattggctgccagcgtacgcgaagaggaatcactgag

SEQ ID NO: 813636 - DNA, 75 bp, synthetic construct
  source 1..75: mol_type = other DNA
ccagtttgttaatgggctattacccaccgactgaaggtgaaatttgtcttgatggacgcccactaagttcactaa

SEQ ID NO: 813637 - DNA, 75 bp, synthetic construct
  source 1..75: mol_type = other DNA
aatcctcggcgatcacgttacgctggatgccggtaccggtgccgttcacaccgcgcctggccacggcccggacga

SEQ ID NO: 813638 - DNA, 75 bp, synthetic construct
  source 1..75: mol_type = other DNA
ttcgatatggtaaccagcacaccggaaaaaatatccgggcaggctgctgacaagatgcaggctggcgtgatcctg

SEQ ID NO: 813639 - DNA, 75 bp, synthetic construct
  source 1..75: mol_type = other DNA
ggcgggcgaatacctgcgtaaaggcgcgcaggtctacatcgagggccagctgcgcacccgcaactggcaggacga

SEQ ID NO: 813640 - DNA, 75 bp, synthetic construct
  source 1..75: mol_type = other DNA
aagaaaggccgtcaggatgccgccccgtctcagcaaccgcctcagccactcccggatgatttcccaccaatggat

SEQ ID NO: 813641 - DNA, 75 bp, synthetic construct
  source 1..75: mol_type = other DNA
gagggcgtggtggatgcctccaaacagggttatcaacacttctttgctctgctgggtgctgccagcgccgtcacg

SEQ ID NO: 813642 - DNA, 75 bp, synthetic construct
  source 1..75: mol_type = other DNA
atggctggatcgcgcgattcgcgtggcttccgtcattatccacgacgtcgccagaaataatcattatcgcgttaa

SEQ ID NO: 813643 - DNA, 75 bp, synthetic construct
  source 1..75: mol_type = other DNA
caacatcaaaaaattctggtcgctgacggcgaaaggctgcatgttcggcaagaacatcaccagtcctgcaaatcc

SEQ ID NO: 813644 - DNA, 75 bp, synthetic construct
  source 1..75: mol_type = other DNA
agaaaaaactattccaaatttagaacaaagaattatttttcaatacatctgaacgaattaaaagatgagttaatc

SEQ ID NO: 813645 - DNA, 75 bp, synthetic construct
  source 1..75: mol_type = other DNA
gaattatttcacaataccgcttaacgaattaaaagatgagttgattgcatatactatagaagatgacgaactggt

SEQ ID NO: 813646 - DNA, 75 bp, synthetic construct
  source 1..75: mol_type = other DNA
cgaatacagcttttcggtaacagccaaagggcttgagatggcactgtatagaacgcggcaaaaccgaaaaaatgt

SEQ ID NO: 813647 - DNA, 75 bp, synthetic construct
  source 1..75: mol_type = other DNA
tgctgttcggcaagctcgcggaggtggctggtgaatatctgcgtaagggtgcgcaggtctacatcgaggggcaac

SEQ ID NO: 813648 - DNA, 75 bp, synthetic construct
  source 1..75: mol_type = other DNA
tgctcagactcagccggaagaggggcaacagttcagcggtcagcctcagccgcaaccgccggagggtgacgatta

SEQ ID NO: 813649 - DNA, 75 bp, synthetic construct
  source 1..75: mol_type = other DNA
actgatggttccgtagcctatctgttcagcaaaaaaggcgtgatctccttcgagaaaggcgatgaagacaccatc

SEQ ID NO: 813650 - DNA, 75 bp, synthetic construct
  source 1..75: mol_type = other DNA
ccggatgtgaaaccggcaccggacgttaaaccggctcctgatgttcagccagccccagctgataagtcaaacgac

SEQ ID NO: 813651 - DNA, 75 bp, synthetic construct
  source 1..75: mol_type = other DNA
aagggtgtgatgctaacgcataacaatattctcgccagtgagcgggcttattgcgcgcggctaaatctgacctag

SEQ ID NO: 813652 - DNA, 75 bp, synthetic construct
  source 1..75: mol_type = other DNA
cattacataattataatcatttttgtgactttattgagtttaaacaccctaatatgatcatgaacacaagtcagt

SEQ ID NO: 813653 - DNA, 75 bp, synthetic construct
  source 1..75: mol_type = other DNA
gtcctgcaaatccgcgcgagacgcagccgcatttcttcgaatcccgattccctgagctgttaaagctgctcgata

SEQ ID NO: 813654 - DNA, 75 bp, synthetic construct
  source 1..75: mol_type = other DNA
agaaattatgcatggcagtctcctttcgttcaataataacagaacaaaagaaagagccagaaatgacggtcagat

SEQ ID NO: 813655 - DNA, 75 bp, synthetic construct
  source 1..75: mol_type = other DNA
ttttggtctggaccctgaggcggctcatgcggtgctcaccagcggtgcgccagtcacgctggtcccgatggatgt

SEQ ID NO: 813656 - DNA, 75 bp, synthetic construct
  source 1..75: mol_type = other DNA
caggttcgccgactggaggaacaaaatacgatattaaaaaaggctactgtagattcaattggtcaacgcaacagt

SEQ ID NO: 813657 - DNA, 75 bp, synthetic construct
  source 1..75: mol_type = other DNA
acagatgattagctatccggctgtcgatgccgcggtggcgaagtttgagcaggactggctgggggcgtttggcag

SEQ ID NO: 813658 - DNA, 75 bp, synthetic construct
  source 1..75: mol_type = other DNA
tactcatatcgacaagccagtgaatcgatgaatgtcggctctaccactcttgagagatgggtacgtcagctcaga

SEQ ID NO: 813659 - DNA, 75 bp, synthetic construct
  source 1..75: mol_type = other DNA
accggcccgtgtttacagggtggtgaacggtattgctgtactgccggtgaccggcacgctggtgcaccggctggg

SEQ ID NO: 813660 - DNA, 75 bp, synthetic construct
  source 1..75: mol_type = other DNA
gcaacgtatccgcgagctggaaaagcaagttcgccgtctggaggaacaaaatacgatattaaaaaggctactgta

SEQ ID NO: 813661 - DNA, 75 bp, synthetic construct
  source 1..75: mol_type = other DNA
caagttcgccgtctggaggaacaaaatacgatattaaaaaaggctaccgcgctcttaatgtctgtattgcgggac

SEQ ID NO: 813662 - DNA, 75 bp, synthetic construct
  source 1..75: mol_type = other DNA
acgcgcctgatggctcaagccgccccacgctgtcactgagtgcactgctgaagcagtatggtatccgcctgacag

SEQ ID NO: 813663 - DNA, 75 bp, synthetic construct
  source 1..75: mol_type = other DNA
gtattcgcgggcgtaatgacactggcatgaagggtgcggaaagtattgtggacctggttattggtgcaccagcgg

SEQ ID NO: 813664 - DNA, 75 bp, synthetic construct
  source 1..75: mol_type = other DNA
cgcgatggttataacgaaaccacgctagaggctttcggttgcacttcacgcgggcaggcataccgcgctggcaag

SEQ ID NO: 813665 - DNA, 75 bp, synthetic construct
  source 1..75: mol_type = other DNA
ttaacgcctcaataagcaatcttgaaagcaaaactgacgcgagcgtttcccgtcttgataaagcaatatcagatg

SEQ ID NO: 813666 - DNA, 75 bp, synthetic construct
  source 1..75: mol_type = other DNA
caaacgccagtgttagacgccttgatcaagctatcgctgacgaatcaagcgcgcgcgcccaggcaatatcaggca

SEQ ID NO: 813667 - DNA, 75 bp, synthetic construct
  source 1..75: mol_type = other DNA
ccgagcagaatgctacaacgccgtgattgtatcatggactgacccggaaaacggctgggagcaatcaaaagagta

SEQ ID NO: 813668 - DNA, 75 bp, synthetic construct
  source 1..75: mol_type = other DNA
atattcgcgttcgccgtgtaacggccgatagcacaagcgatctattgcagaatgatacgagatggagtagttaca

SEQ ID NO: 813669 - DNA, 75 bp, synthetic construct
  source 1..75: mol_type = other DNA
gcgcagaagctattagcaacgttaacgccagcgtcagtagtcttgaaagcaaaaccgacgcgagcgtttcccgtc

SEQ ID NO: 813670 - DNA, 75 bp, synthetic construct
  source 1..75: mol_type = other DNA
gcacgtgctcaggcgatatcaggtatcagcgcgacgcttggcggcgttaaaagtgaggttgataaaaacagcgac

SEQ ID NO: 813671 - DNA, 75 bp, synthetic construct
  source 1..75: mol_type = other DNA
cagcgcgaacgatacagccgtaccgcgattaacaacatcaaaaaattctggtcgctgacagcgaaaggctgcatg

SEQ ID NO: 813672 - DNA, 75 bp, synthetic construct
  source 1..75: mol_type = other DNA
ttgattcggaatacatcaccgcaggcgataccattagtttgcttgatagtgatggcaaatttaagaaacaccaga

SEQ ID NO: 813673 - DNA, 75 bp, synthetic construct
  source 1..75: mol_type = other DNA
tgtcaacgcaaaggtaactcacgacacgccaataataaggactgtttcagatccaaacgttacccgcgtaaggtt

SEQ ID NO: 813674 - DNA, 75 bp, synthetic construct
  source 1..75: mol_type = other DNA
ggtaacgttgatgcgtcatattcaattaagattgccactgataaaaacggtatgaaatacgctacaggaatgtcg

SEQ ID NO: 813675 - DNA, 75 bp, synthetic construct
  source 1..75: mol_type = other DNA
gcgcgatgtcactattgaagaattcaacgctgtagcgcatggactggatcccatcgtggccaaacgcgtgcgtca

SEQ ID NO: 813676 - DNA, 75 bp, synthetic construct
  source 1..75: mol_type = other DNA
agaaaaaaatatctttataatgatgactataaatactacacagaattggtaaatagatatgaattagatttgcag

SEQ ID NO: 813677 - DNA, 75 bp, synthetic construct
  source 1..75: mol_type = other DNA
gttcgtaaagctaaactgtactacctgcgtgagcgtactggtaaggctgctcgtatcaaagagcgtcttaactaa

SEQ ID NO: 813678 - DNA, 75 bp, synthetic construct
  source 1..75: mol_type = other DNA
caaagtgaaaatggattcaagcaacttggatttagcactacaaaaaatctgtctgcaggccttaaagatatcgta

SEQ ID NO: 813679 - DNA, 75 bp, synthetic construct
  source 1..75: mol_type = other DNA
acccagcctgcggcacgtcgcgtaatacgctagagatgatccgcaacagcggtactgaaccgaccgttattcttt

SEQ ID NO: 813680 - DNA, 75 bp, synthetic construct
  source 1..75: mol_type = other DNA
gaaactgcagcagattgaagaagaaaccggcctgaccatcgagcaggttaaagatatcaaccgtccgtatgtcca

SEQ ID NO: 813681 - DNA, 75 bp, synthetic construct
  source 1..75: mol_type = other DNA
aacggatggtacagtacacccgtaactgtttttacatcccactgacagcagccaccacagttgaagaacagcgcc

SEQ ID NO: 813682 - DNA, 75 bp, synthetic construct
  source 1..75: mol_type = other DNA
agacgccatcaggtggctgggggtggttctcgacggaaaattaccgcttggcgcagatgtgcatggtgttgaacc

SEQ ID NO: 813683 - DNA, 75 bp, synthetic construct
  source 1..75: mol_type = other DNA
caggttcgccgtctggaggaacaaaatacgatattaaaaaaggctaccgcgctcttgatgtccgactcgctgaac

SEQ ID NO: 813684 - DNA, 75 bp, synthetic construct
  source 1..75: mol_type = other DNA
tgaactggtcaagctcattgccgatatggggatttccgttcgtgcgctgttgcgtaaaaacgttgagccgtatga

SEQ ID NO: 813685 - DNA, 75 bp, synthetic construct
  source 1..75: mol_type = other DNA
gccgtacagcaagctgtcgctgaacaatatgaagccaaaacaggcattaaagagactttttacgtgtgtaaacca

SEQ ID NO: 813686 - DNA, 75 bp, synthetic construct
  source 1..75: mol_type = other DNA
cagcggcaatgtgccgcagggtgccgggttaagttcttccgcctcactggaagtcgcggtcggaaccgtattgca

SEQ ID NO: 813687 - DNA, 75 bp, synthetic construct
  source 1..75: mol_type = other DNA
acagatgattagctatccggcggttgatgccgctgtggcgaagtttgagcaggactggcagggagcgtttggcag

SEQ ID NO: 813688 - DNA, 75 bp, synthetic construct
  source 1..75: mol_type = other DNA
ccactatcagaaccgcctgatctatgagcgtgccatgctggacgaaagcggcggcgtggttacccggacacagga

SEQ ID NO: 813689 - DNA, 75 bp, synthetic construct
  source 1..75: mol_type = other DNA
gtgaccgattatcagatgtttcccggcgcaccaactatcgctaatgttcatcctgatgaagttgacaactggaag

SEQ ID NO: 813690 - DNA, 75 bp, synthetic construct
  source 1..75: mol_type = other DNA
atggccggattaactaaagagcaaagagcacagcgtgaagccgcgcaaaaaaatgcagtggtggagcagaatgtg

SEQ ID NO: 813691 - DNA, 75 bp, synthetic construct
  source 1..75: mol_type = other DNA
ccgctacgtggtcgatagcctgcgcgagcgtggggctatctttattgagcagattagcgaagtgccggacggcgc

SEQ ID NO: 813692 - DNA, 75 bp, synthetic construct
  source 1..75: mol_type = other DNA
tcagtaccaccattaacaatgcgctgtcaggtaagcagccactggatgagacgctgactcatttgagtgggaagg

SEQ ID NO: 813693 - DNA, 75 bp, synthetic construct
  source 1..75: mol_type = other DNA
ggcgcggtcggcacggcttcacgcgaagtataaagaacgtccggatgttcgctggcgtcgtatcaaaaaaatcga

SEQ ID NO: 813694 - DNA, 75 bp, synthetic construct
  source 1..75: mol_type = other DNA
cagcgagttgctcaccgcaaccaacgatcaggaaagcgtgtggatgcccggaagctacatcgtgtagtgacaggt

SEQ ID NO: 813695 - DNA, 75 bp, synthetic construct
  source 1..75: mol_type = other DNA
gtcgatgaagccgacactgtcgcgcgagctggcactggatgcgctgctgatggggtcgtttgcgggagagggcga

SEQ ID NO: 813696 - DNA, 75 bp, synthetic construct
  source 1..75: mol_type = other DNA
cattgaagtgttctacaaccgggcccggcgccacagtcacctcggcggcgtcagtccggaggccttcgaacaggc

SEQ ID NO: 813697 - DNA, 75 bp, synthetic construct
  source 1..75: mol_type = other DNA
caaaaatgccaagggagaggcaactcgttcgattgttcacaacaatccgggtacattcgatatgttccaggcaga

SEQ ID NO: 813698 - DNA, 75 bp, synthetic construct
  source 1..75: mol_type = other DNA
cattgccaaacaagatctggcaacgggaggcgtacaagttctgtcgtccacgttcctggatgaaacgccaagtct

SEQ ID NO: 813699 - DNA, 75 bp, synthetic construct
  source 1..75: mol_type = other DNA
acagcaacccggaagggggaatgtatctggttgaatcgccagacgatgtgtggaaactgacggtcaaaaacgaag

SEQ ID NO: 813700 - DNA, 75 bp, synthetic construct
  source 1..75: mol_type = other DNA
gctggcttgcgcaggtgactcgcgaagggcaaagccaacagtgggccgcagacgacagcgctaccgttgcacctg

SEQ ID NO: 813701 - DNA, 75 bp, synthetic construct
  source 1..75: mol_type = other DNA
gcttatcagcttcgtgattatcgcggtgcatatctgttttctaaactcattagtgaagcgttcctgccggggcat

SEQ ID NO: 813702 - DNA, 75 bp, synthetic construct
  source 1..75: mol_type = other DNA
tgaaggcggataacagcgcgtgggaagaaacaccagcaggtaaagccatcgcttatcagcttcgtgattatcgcg

SEQ ID NO: 813703 - DNA, 75 bp, synthetic construct
  source 1..75: mol_type = other DNA
tcaccgtttggttgctcggtacgtacatcagtgaaggtacggcatttccgcccggacctggtagtatcagcctac

SEQ ID NO: 813704 - DNA, 75 bp, synthetic construct
  source 1..75: mol_type = other DNA
atgcaacataattgtttaatcacgccagacacgcccctgccggatccggatgtggtccggcgttttgttctgcgg

SEQ ID NO: 813705 - DNA, 75 bp, synthetic construct
  source 1..75: mol_type = other DNA
agcctcactgtttgcgtcaaaaaattggattacaactctcgccaacacgacgctctctataacgcgtggcttaat

SEQ ID NO: 813706 - DNA, 75 bp, synthetic construct
  source 1..75: mol_type = other DNA
tgttacctggttttaaaccagaaaatcgtctttacgatgattctgttttttatgcagttgcccactctgaaaaaa

SEQ ID NO: 813707 - DNA, 75 bp, synthetic construct
  source 1..75: mol_type = other DNA
atgaaaaaaatggcaattgttgataaaaagggtctggagtacattcctaacattgaccgtatgatccgcgaaaaa

SEQ ID NO: 813708 - DNA, 75 bp, synthetic construct
  source 1..75: mol_type = other DNA
gctggaaggccgcgaagaaaacattgttttcgaagtgccgaaagagttgcgtgtggatattcgtgaagttgatta

SEQ ID NO: 813709 - DNA, 75 bp, synthetic construct
  source 1..75: mol_type = other DNA
tttaggtctgtttttacgagctgaagttcctgatgcgacaaaactgagttgcaaatggttctttgaaggtgatga

SEQ ID NO: 813710 - DNA, 75 bp, synthetic construct
  source 1..75: mol_type = other DNA
ggaaagactggccgcgatgatcccgcccggtcagccgatccttgtggggcatcacagcgaacgccgcgcccgtcg

SEQ ID NO: 813711 - DNA, 75 bp, synthetic construct
  source 1..75: mol_type = other DNA
tgttgcctgattttaaaccagaaaaccgtctttacgatgattctgttttttatgccgttgcccattctgaaaaaa

SEQ ID NO: 813712 - DNA, 75 bp, synthetic construct
  source 1..75: mol_type = other DNA
actttcgtacatttttgatgctttttctggtatcgttagttcttattagtgcaaaaataaagtcgaatggcctgt

SEQ ID NO: 813713 - DNA, 75 bp, synthetic construct
  source 1..75: mol_type = other DNA
ctcttatccttatctggaataaccgctgtcgttacaccttgctccgacaactgcgaaccccagggcaacgtattc

SEQ ID NO: 813714 - DNA, 75 bp, synthetic construct
  source 1..75: mol_type = other DNA
ggctttcggcattggggctgtatgcctgggcgcgggtcgatgaatcttccgataacaattcattgcttaatccgg

SEQ ID NO: 813715 - DNA, 75 bp, synthetic construct
  source 1..75: mol_type = other DNA
tttatttggtaaaaccaatcacggcaagctcagcggcgaaatactgtaccggttggtgggcaaggcaagaagctg

SEQ ID NO: 813716 - DNA, 75 bp, synthetic construct
  source 1..75: mol_type = other DNA
gtggcaaaaaaagtcggtttagtggataaacctaacttccgcaaacgtcaccagggattgatacctctcgttggg

SEQ ID NO: 813717 - DNA, 75 bp, synthetic construct
  source 1..75: mol_type = other DNA
ccacccagggcaaaacgcatccgattagcccggtgactgcattatggataatcgccattccgctaatggatatgg

SEQ ID NO: 813718 - DNA, 75 bp, synthetic construct
  source 1..75: mol_type = other DNA
cgccggagcagttccgcgtaccgatgatggtctggatgtcggataaatatctggaaaatccagccaacgcgcagg

SEQ ID NO: 813719 - DNA, 75 bp, synthetic construct
  source 1..75: mol_type = other DNA
cacagggcggtgttatatcgccgctattatcgaacatcatgctgaatgagttcgatcaatacctgcatgaacgct

SEQ ID NO: 813720 - DNA, 75 bp, synthetic construct
  source 1..75: mol_type = other DNA
gttatggcgagatgcgagtggtctcaacgatcccgcaggagaaagccagaaacttcgccgcatcgctgacagcac

SEQ ID NO: 813721 - DNA, 75 bp, synthetic construct
  source 1..75: mol_type = other DNA
tgtttatgagccgtcgtgaagctgcggcatccaggcgcaataaccgtgtattttttcgaagcggcaatgcatatg

SEQ ID NO: 813722 - DNA, 75 bp, synthetic construct
  source 1..75: mol_type = other DNA
aatccctatctgaggacggagaccagaaacacgtatacatcgcgctttacagaagtggcaatggcgttcgccagc

SEQ ID NO: 813723 - DNA, 75 bp, synthetic construct
  source 1..75: mol_type = other DNA
ctgcattttctcggcacttctgcggccaccgcgcaagcgtacacagggaatctgtattttgatgagtttttctgg

SEQ ID NO: 813724 - DNA, 75 bp, synthetic construct
  source 1..75: mol_type = other DNA
agcagcgatgttttgcgcttttctaccaccgaaaccacagaacctgatcgtacattgcagttatctgccgaacag

SEQ ID NO: 813725 - DNA, 75 bp, synthetic construct
  source 1..75: mol_type = other DNA
ttgataatcagcgaaatgcaacgcaaacttgccacatgggcaacagccgatccgtcccgacggattgaacggttg

SEQ ID NO: 813726 - DNA, 75 bp, synthetic construct
  source 1..75: mol_type = other DNA
ttatttctggtatcgttagttcttattagtgcaaaaataaagtcgaatggcctattaatgcctatattacttcac

SEQ ID NO: 813727 - DNA, 75 bp, synthetic construct
  source 1..75: mol_type = other DNA
ttggatgaaaatccagtagctgaaaaattccgctatttacatgccgaccttcctcttttatcaggacgcaatgac

SEQ ID NO: 813728 - DNA, 75 bp, synthetic construct
  source 1..75: mol_type = other DNA
tattaaatcgacagaagttgaactggttaaatcggattatcctgtccatcgagcctggccgaagatcggttggaa

SEQ ID NO: 813729 - DNA, 75 bp, synthetic construct
  source 1..75: mol_type = other DNA
actttcctacatttttgatgttatttctggtatcgttagttcttattagtgcaaaaataaagtcgaatggcctgt

SEQ ID NO: 813730 - DNA, 75 bp, synthetic construct
  source 1..75: mol_type = other DNA
actttcttacatttttgatgctgtttctggtatcgttagttcttattagtgcaaaaataaagtcgaatggcctgt

SEQ ID NO: 813731 - DNA, 75 bp, synthetic construct
  source 1..75: mol_type = other DNA
actttcatacatttttgatgttctttctggtatcgttagttcttattagtgcaaaaataaagtcgaatggcctgt

SEQ ID NO: 813732 - DNA, 75 bp, synthetic construct
  source 1..75: mol_type = other DNA
gtttcccgctggatacgtatccgcgcccggcagaaaaaagccagtatgaagggagccggtcgttatggtcggccc

SEQ ID NO: 813733 - DNA, 75 bp, synthetic construct
  source 1..75: mol_type = other DNA
agagcggaaaatgttgatcgtagtgactgatgggcagcctcaaagcgcccctgcatgtcgctctgtgatcgacct

SEQ ID NO: 813734 - DNA, 75 bp, synthetic construct
  source 1..75: mol_type = other DNA
atgccgcgtcacgcctcgacccggagacgtataaaaaagtccatgatgccggtttccgctgggcaccaaaacagg

SEQ ID NO: 813735 - DNA, 75 bp, synthetic construct
  source 1..75: mol_type = other DNA
agattctattaactggaaagttccgtatgttcatcgacagaagctggttaatgatggcattcgctactggaaaag

SEQ ID NO: 813736 - DNA, 75 bp, synthetic construct
  source 1..75: mol_type = other DNA
tatgccccccgtagttatccaagaacgatattcatttcctatagcgatgttctatttagcatatatgccgcagag

SEQ ID NO: 813737 - DNA, 75 bp, synthetic construct
  source 1..75: mol_type = other DNA
ccgtgcgcagtgtggcagagacagaagaccacggggcataccgctaccgccgcacaatggacaataatttccgcc

SEQ ID NO: 813738 - DNA, 75 bp, synthetic construct
  source 1..75: mol_type = other DNA
atcaccaacccgcaggtggtcgcagcctataaagtgacgctgctgtcggcgtttatggcatcgatttttaatggc

SEQ ID NO: 813739 - DNA, 75 bp, synthetic construct
  source 1..75: mol_type = other DNA
gattgcggtggcgatggcttttaccagtattccgtttgtggtgcgtaccgtgcagccggtgctggaagagttagg

SEQ ID NO: 813740 - DNA, 75 bp, synthetic construct
  source 1..75: mol_type = other DNA
gtgatcctcgcggcatcactgctgctgctgttctctattaacactctgcaaagtcgctttggtcggcgtgtggta

SEQ ID NO: 813741 - DNA, 75 bp, synthetic construct
  source 1..75: mol_type = other DNA
gacacatggatatcccgatgatattcctgatgagcaggataatgatctgggaagtcgtgatgttccgtcatggag

SEQ ID NO: 813742 - DNA, 75 bp, synthetic construct
  source 1..75: mol_type = other DNA
ggtgaatggctggcgaagtttgatatcaaagtcacctatacctggctggggattgcggtggcgatggcctttacc

SEQ ID NO: 813743 - DNA, 75 bp, synthetic construct
  source 1..75: mol_type = other DNA
gatttaccctttgcgctgccaacggcagtggccggtttaacgctggcctcgctcttttccgtgaacggtttttac

SEQ ID NO: 813744 - DNA, 75 bp, synthetic construct
  source 1..75: mol_type = other DNA
tctggaaccggaaacctgggccaggatgtgtgagcgggtgtcaggcgctgccagcggggcgctttatgccaatga

SEQ ID NO: 813745 - DNA, 75 bp, synthetic construct
  source 1..75: mol_type = other DNA
gctcctgccattcgcctgacgctccatcatgaaatcgctgatttctgcgcgacattggaggtgccaggcgaaccg

SEQ ID NO: 813746 - DNA, 75 bp, synthetic construct
  source 1..75: mol_type = other DNA
ggagtcgggagtggaatgggtccgtcagccacctgattatgctgttactgacccggactttttccctttttatca

SEQ ID NO: 813747 - DNA, 75 bp, synthetic construct
  source 1..75: mol_type = other DNA
acgctcggagcaacgcgctggcagagtttctgcaaagtggtgctgccggagctttcccctgcgctggtggcgggt

SEQ ID NO: 813748 - DNA, 75 bp, synthetic construct
  source 1..75: mol_type = other DNA
ggcctttaccagcattccgtttgtggtgcgtaccgtgcagccggtgctggaagagttaggcccggaatatgaaga

SEQ ID NO: 813749 - DNA, 75 bp, synthetic construct
  source 1..75: mol_type = other DNA
aacgtcgtttctctgtattattcattgactgggaagctcagtatcagtgcaccattgaacatgttcagaagatgc

SEQ ID NO: 813750 - DNA, 75 bp, synthetic construct
  source 1..75: mol_type = other DNA
gctgaccggtgtccgggcggatgaatccctcaaccgctttatgggactggtgtcccggcgaaaactgcgatatgc

SEQ ID NO: 813751 - DNA, 75 bp, synthetic construct
  source 1..75: mol_type = other DNA
ttgacggtcagcgcaaagactttatccgtctgggcgtgctgggcgactggtcgcacccgtacctgactatggact

SEQ ID NO: 813752 - DNA, 75 bp, synthetic construct
  source 1..75: mol_type = other DNA
ggtgccggaccctctcctttagccctaacaaaccccggcactatgaacgttacctgcagcgtatgaaggaaagga

SEQ ID NO: 813753 - DNA, 75 bp, synthetic construct
  source 1..75: mol_type = other DNA
gtatgactggaaggcccgcgatatctggatatataacgccagaacctgtgccatttacaatcctctgtatgacct

SEQ ID NO: 813754 - DNA, 75 bp, synthetic construct
  source 1..75: mol_type = other DNA
attcgctcggcgcagcgttagtgtttcatgaaatattttttcctgaatcatcaacggcaatggcgttaattctgg

SEQ ID NO: 813755 - DNA, 75 bp, synthetic construct
  source 1..75: mol_type = other DNA
cgcaagatgtctaaatccatcggcaacaccgtttcgccgcaggatgtgatgaacaaactgggcgcggatattctg

SEQ ID NO: 813756 - DNA, 75 bp, synthetic construct
  source 1..75: mol_type = other DNA
cagcaaatgtggcggtaacctcggcactgacggttccgtagcttatctgttcagcaaaaaaggcgtgatctcctt

SEQ ID NO: 813757 - DNA, 75 bp, synthetic construct
  source 1..75: mol_type = other DNA
gcccagtaccagtgcacaattgcgcacattcagaatatgcgcgagatgtaccaggatgtgacagacaccttttac

SEQ ID NO: 813758 - DNA, 75 bp, synthetic construct
  source 1..75: mol_type = other DNA
ttttctgggtggcgctgcctctgacgaccgttaatggagtgtctcaggtacagcctgagtgggtatgttgggagg

SEQ ID NO: 813759 - DNA, 75 bp, synthetic construct
  source 1..75: mol_type = other DNA
ccgtgatatctggatatataacgccagaacccatgccatctacaatcccctgtatgacctgatgtaccgtgccgg

SEQ ID NO: 813760 - DNA, 75 bp, synthetic construct
  source 1..75: mol_type = other DNA
taaaaacaggtgaaaatgttcttcgggctgctgtggaacggattaactgggtttttgatacttttgcggagattt

SEQ ID NO: 813761 - DNA, 75 bp, synthetic construct
  source 1..75: mol_type = other DNA
ggatatgctgggagtctggagtggaatgggtccgtcagccacctgattatgctgttactgacccgaactttttcc

SEQ ID NO: 813762 - DNA, 75 bp, synthetic construct
  source 1..75: mol_type = other DNA
ttgctgtctacctgcgctggtatcagacgcggggcttcccggatgacatcccggatgaacaggagaatgacctgg

SEQ ID NO: 813763 - DNA, 75 bp, synthetic construct
  source 1..75: mol_type = other DNA
tcgcgaaagcgtcaccgttcatcgtggcacagtccagggcggtggattgacgaaggtgggcagcgacaacttact

SEQ ID NO: 813764 - DNA, 75 bp, synthetic construct
  source 1..75: mol_type = other DNA
catccccctttaatgtctcctccggcgatgcccggcaacccacactggctgttcacagtcaggagttccatactg

SEQ ID NO: 813765 - DNA, 75 bp, synthetic construct
  source 1..75: mol_type = other DNA
tttgctgccgacgtcatgcatatctatggtaatggcggcaagcaagccgtacattttcattccctcattcattac

SEQ ID NO: 813766 - DNA, 75 bp, synthetic construct
  source 1..75: mol_type = other DNA
tcagtttatgatccacaacagcaggcgatggtgatcacttcgctgtttccttatgatccacaactctgctttgaa

SEQ ID NO: 813767 - DNA, 75 bp, synthetic construct
  source 1..75: mol_type = other DNA
gtagatattatagtgatggccgaaaaggggacgcctatttatttgatttgttagctggtttacctaatgatataa

SEQ ID NO: 813768 - DNA, 75 bp, synthetic construct
  source 1..75: mol_type = other DNA
agggcaaggtgccaatggtggtgatcagcaaggcaaagaccagaagcaagacgatgctggtggaaagtctgatcc

SEQ ID NO: 813769 - DNA, 75 bp, synthetic construct
  source 1..75: mol_type = other DNA
ggcgatggggcagagtaatgccctggcggtaatggccttcgccccacgagatagcctgttacacgcgcccgatat

SEQ ID NO: 813770 - DNA, 75 bp, synthetic construct
  source 1..75: mol_type = other DNA
cgtggtacagcactttgtagcattcggcggtgctgtgatgacatggggacaaatgaaccggcttgatgatccgca

SEQ ID NO: 813771 - DNA, 75 bp, synthetic construct
  source 1..75: mol_type = other DNA
cgatggatggtatgcgagaaacgtttgaactagatctgaccctctttaattatgcatataagtatcacccccatc

SEQ ID NO: 813772 - DNA, 75 bp, synthetic construct
  source 1..75: mol_type = other DNA
gacaagctggcggaggatggcgcgtacgcctggacgctgtggcgaccttacaaatgctgtccgcgccgtgggcaa

SEQ ID NO: 813773 - DNA, 75 bp, synthetic construct
  source 1..75: mol_type = other DNA
tttgctgcagacgtcacgcatatctatcgtaatggtggggagcaaatcgtacattttcattccctcatccattac

SEQ ID NO: 813774 - DNA, 75 bp, synthetic construct
  source 1..75: mol_type = other DNA
aggagataaaaacacgcactgaatcgcgtaattccgcctttattattcccggggcattcagaaaagatcgccccc

SEQ ID NO: 813775 - DNA, 75 bp, synthetic construct
  source 1..75: mol_type = other DNA
tcacgtcaggtactggcgttactgaaggagataaaaacacgcactgaatcgcgtcattccgcctttattattccc

SEQ ID NO: 813776 - DNA, 75 bp, synthetic construct
  source 1..75: mol_type = other DNA
actggtgtctcagcgcaaactgagatatgcagatgataaaccctggaccacagcgtcacctgaagggttttatta

SEQ ID NO: 813777 - DNA, 75 bp, synthetic construct
  source 1..75: mol_type = other DNA
cggcggtgcgccagaaggcgtgatttctgcctgtgccgttaaagcattaggcggggatatgcaggccgagctgat

SEQ ID NO: 813778 - DNA, 75 bp, synthetic construct
  source 1..75: mol_type = other DNA
aataaaattgctgtctacctgcgctggtatcagacgcggggcttcccggatgacatcccggatgaacaggagaat

SEQ ID NO: 813779 - DNA, 75 bp, synthetic construct
  source 1..75: mol_type = other DNA
cagccaccggaagaggccattacggatatgacgtattttcccttttaccggtatgccatgacgtttgaagaattt

SEQ ID NO: 813780 - DNA, 75 bp, synthetic construct
  source 1..75: mol_type = other DNA
aaatttggctttgtactaatgttctgcgcgcagcaaccgcccgcattgagtggatttttgaaacatttccgtcga

SEQ ID NO: 813781 - DNA, 75 bp, synthetic construct
  source 1..75: mol_type = other DNA
gtatgccatgacgtttgaagaatttgttccggcattttcttcctggtttgctggcaaccggtgtggagtggcagt

SEQ ID NO: 813782 - DNA, 75 bp, synthetic construct
  source 1..75: mol_type = other DNA
gtatatgaaaaaactggttgttaatcgactggcggcgggcgcgattgatttgtctttgcctctggcggataactt

SEQ ID NO: 813783 - DNA, 75 bp, synthetic construct
  source 1..75: mol_type = other DNA
gaacaggtgaggatgtgctgtctgctgccattcaccgaattgaatggttatttgaaacattcaattcggtctgct

SEQ ID NO: 813784 - DNA, 75 bp, synthetic construct
  source 1..75: mol_type = other DNA
gttggaggcgccaggcgaaccggaaacgccggaagcaatacagcaagagctgctgcaacgcattgacaaggtttt

SEQ ID NO: 813785 - DNA, 75 bp, synthetic construct
  source 1..75: mol_type = other DNA
atgaatattgcatctctacgtaaagccattgttttcgttggcgctgtagcggcactgtcactggttaatgcgcaa

SEQ ID NO: 813786 - DNA, 75 bp, synthetic construct
  source 1..75: mol_type = other DNA
aagtgcggtagtggtgcgtattgagtggatatttgaaaacttttcctctgtatgtttgtctttctcaggaggaaa

SEQ ID NO: 813787 - DNA, 75 bp, synthetic construct
  source 1..75: mol_type = other DNA
acggtcaatggtgtctcgcagtttcagccggagtggatatgctgggagccaggagtgacctgggttcgccagcca

SEQ ID NO: 813788 - DNA, 75 bp, synthetic construct
  source 1..75: mol_type = other DNA
gatgtagcccgcaggaagatgcgtcgtttctctgtactgttcattgactgggaagctcagtatcaatgcaccatt

SEQ ID NO: 813789 - DNA, 75 bp, synthetic construct
  source 1..75: mol_type = other DNA
tgttgccattctgaaccgcaaatcagcgacaggctgtgctttcggtgatttttatgttgctgcccgcgatacctc

SEQ ID NO: 813790 - DNA, 75 bp, synthetic construct
  source 1..75: mol_type = other DNA
ggttcttgccctcttctgggcaacatttacgatgcggatccggtatttaagaaagaccttgatgatgcgctaaag

SEQ ID NO: 813791 - DNA, 75 bp, synthetic construct
  source 1..75: mol_type = other DNA
gcgatgtaccggacgttacgccagtgcagcaggctccggcaatgccaacaacacctgcggacagctcaccggctg

SEQ ID NO: 813792 - DNA, 75 bp, synthetic construct
  source 1..75: mol_type = other DNA
attatggcgggtaaaggccaaagacccgtagaggatttaggatatgatgttgttaagatggctattatctgtaca

SEQ ID NO: 813793 - DNA, 75 bp, synthetic construct
  source 1..75: mol_type = other DNA
ctggtctggcaatggcaggttctgtatttgcgcttccggcttctgctgcggttgatgttccttcttttattactt

SEQ ID NO: 813794 - DNA, 75 bp, synthetic construct
  source 1..75: mol_type = other DNA
ctctggcagtgacggcaacgcctgcagacggtgcaccagctgatactatctggacctttaagggagacggaggta

SEQ ID NO: 813795 - DNA, 75 bp, synthetic construct
  source 1..75: mol_type = other DNA
ttaactgcaagaacaagatttcacccgaatttgtgccgttattggttgcagctgtcgacggaaagatccaagcgt

SEQ ID NO: 813796 - DNA, 75 bp, synthetic construct
  source 1..75: mol_type = other DNA
cggtggctgaactggaatctgaaattctgcaactgcgtaaggcgttaaatgaagctcgcctttgtgatgctgcca

SEQ ID NO: 813797 - DNA, 75 bp, synthetic construct
  source 1..75: mol_type = other DNA
gggctcggtactcctggttcccgcatggtggctgaactggaatctgaaattctgcaactgcgtaaggcgttaaat

SEQ ID NO: 813798 - DNA, 75 bp, synthetic construct
  source 1..75: mol_type = other DNA
gtacagggcagtttataagcgcagccatgcgtggcgagatcaaacgccgccagcgccgcaaggccaaagagcagg

SEQ ID NO: 813799 - DNA, 75 bp, synthetic construct
  source 1..75: mol_type = other DNA
aagtgtttttcgtcattacgctaccgatgatcatgcccgcgatcatttctggctggttactggcttttactttgt

SEQ ID NO: 813800 - DNA, 75 bp, synthetic construct
  source 1..75: mol_type = other DNA
atgaatttcgtccagacctaccagagctttttccacattcaggcttagcgcacacagaggatgacaagcccacag

SEQ ID NO: 813801 - DNA, 75 bp, synthetic construct
  source 1..75: mol_type = other DNA
aggataaaagtgcagaaggtataagtggcgcagttgcatatggcagtggtttagttggacgagcggcaatacaga

SEQ ID NO: 813802 - DNA, 75 bp, synthetic construct
  source 1..75: mol_type = other DNA
gcaggttatcgcagacagcgtaatcagtgccagaacggtgcgaccgggcggcaaaaaggccaacaggggcaggct

SEQ ID NO: 813803 - DNA, 75 bp, synthetic construct
  source 1..75: mol_type = other DNA
gtaactgcctttggtaagcaggccgacgcgctggcaaagcatcacaagggtgatctcctgagcgtggcgggtaac

SEQ ID NO: 813804 - DNA, 75 bp, synthetic construct
  source 1..75: mol_type = other DNA
gatggagttcccggacgatccggcttgtgattaccttgaccgtcaatacatgttaggcgacaacgtgatggttgc

SEQ ID NO: 813805 - DNA, 75 bp, synthetic construct
  source 1..75: mol_type = other DNA
ggcggctggtggctgacccgcagttaaagaccaccagcaaagggacacaaatggcgatggcgagtatggcggtcc

SEQ ID NO: 813806 - DNA, 75 bp, synthetic construct
  source 1..75: mol_type = other DNA
actgacgcactgaacagggcaaaacaacagacaagccagcacgatgacccgtacggggataacataccgttttaa

SEQ ID NO: 813807 - DNA, 75 bp, synthetic construct
  source 1..75: mol_type = other DNA
ggcggctggtggacgacccacaggtaaaacataccagcaagggaacacccatgacactggcatggatggcggtat

SEQ ID NO: 813808 - DNA, 75 bp, synthetic construct
  source 1..75: mol_type = other DNA
ggaacagacgcaagaccacaggcacacagggtaatcagccaccagcgggaggcgatgacccttacggtgatgata

SEQ ID NO: 813809 - DNA, 75 bp, synthetic construct
  source 1..75: mol_type = other DNA
gcaaaaaaggtcaacagggccaagccactgacgcactgaacagggcaaaacaacagacaagccagcacgatgacc

SEQ ID NO: 813810 - DNA, 75 bp, synthetic construct
  source 1..75: mol_type = other DNA
tgtttaataattggttgatgactataatctcctcagtgttaacattaatgtttgcttcactagttctaaaaattg

SEQ ID NO: 813811 - DNA, 75 bp, synthetic construct
  source 1..75: mol_type = other DNA
gtgctcaaggacaccgttggtgaggaagaagccgtcttgtttgcccgctcggcctccgttggtgcgcagaaattc

SEQ ID NO: 813812 - DNA, 75 bp, synthetic construct
  source 1..75: mol_type = other DNA
gaaagtaaatggtctgcaaggcggttcgcaggttgaaagtgagcagggggtggtggtgacgcctcaagggaatgc

SEQ ID NO: 813813 - DNA, 75 bp, synthetic construct
  source 1..75: mol_type = other DNA
gtcatcgcatttggcaagcaggccgacttcctggctaaacatcaaaaaggcgacgttgccagcgtatccggcacg

SEQ ID NO: 813814 - DNA, 75 bp, synthetic construct
  source 1..75: mol_type = other DNA
aatgaagctcgccttgagcgcgatatattaaaaaaagcaacagcgtattttgcacaggagtcgctgaaaaatacg

SEQ ID NO: 813815 - DNA, 75 bp, synthetic construct
  source 1..75: mol_type = other DNA
actggttacgtgacgcccacgcaatggaaaagcaagccgaatctatgcttgagtccatggccagtcgtatagata

SEQ ID NO: 813816 - DNA, 75 bp, synthetic construct
  source 1..75: mol_type = other DNA
aaccagattgttcaactggaaactattcttgaccgtaatgacatttcgcgttcagtcattaaagattccatgagt

SEQ ID NO: 813817 - DNA, 75 bp, synthetic construct
  source 1..75: mol_type = other DNA
gtgcaattctacttgcctgaaggtcgctggacgcacctgtggcataacgatgaaatagacggcagccgctggcat

SEQ ID NO: 813818 - DNA, 75 bp, synthetic construct
  source 1..75: mol_type = other DNA
actggcttcgtgacgcacacgcaatggagaaacaagcggaatcaatgctggagtctatggccagcaggatagaaa

SEQ ID NO: 813819 - DNA, 75 bp, synthetic construct
  source 1..75: mol_type = other DNA
aaaaatgcgggtgatacagcttcagtacccattattgaagcaattcttaatgaagaaaaacaaatggctgaatga

SEQ ID NO: 813820 - DNA, 75 bp, synthetic construct
  source 1..75: mol_type = other DNA
ttggtggaatttttccatctgatgaaattgtcaaaggttcgatcagtggctatgtgttcgaacaatttgaaattg

SEQ ID NO: 813821 - DNA, 75 bp, synthetic construct
  source 1..75: mol_type = other DNA
gctggattatctggaagcactggatctggtggatacgtccagtgcgccagatattgaatggcctacacctccggc

SEQ ID NO: 813822 - DNA, 75 bp, synthetic construct
  source 1..75: mol_type = other DNA
cctctgattcgggattttatatttcaccagatagccaaaccattcctgagaacgctgcgaaaataaactttacta

SEQ ID NO: 813823 - DNA, 75 bp, synthetic construct
  source 1..75: mol_type = other DNA
aggcatcccggcaacagagatgttcaaagttattccactgtcaccaggccatgcctacgggatgtttatggaacg

SEQ ID NO: 813824 - DNA, 75 bp, synthetic construct
  source 1..75: mol_type = other DNA
caaacgcccggacggctcgttatggcaatgggataaatggcagccaggtctggcgatttatgactttaccaaccc

SEQ ID NO: 813825 - DNA, 75 bp, synthetic construct
  source 1..75: mol_type = other DNA
gctggattatctggaagcactggagctggtggatacttccagtgcgccagatattgaatggcctacacctccggc

SEQ ID NO: 813826 - DNA, 75 bp, synthetic construct
  source 1..75: mol_type = other DNA
gctggattatctggaagcactggacctggtggatacctccagtgcgccagatattgaatggcctactcctccggc

SEQ ID NO: 813827 - DNA, 75 bp, synthetic construct
  source 1..75: mol_type = other DNA
ggcgcatcggcccagacgctggaaaacaccgtgacccaggttatcgagcaaaatatgacgggcctcgataatctg

SEQ ID NO: 813828 - DNA, 75 bp, synthetic construct
  source 1..75: mol_type = other DNA
cggttatgagtacgcctgtgaaatatgccgatctaatcatgctggcaaccgaacgccgtgatctcgggcttgatg

SEQ ID NO: 813829 - DNA, 75 bp, synthetic construct
  source 1..75: mol_type = other DNA
tgccgcgctgaaaactctcgataccattaaaggtgaagggtgggctgccattgttgccgacttgcgtggtgaagc

SEQ ID NO: 813830 - DNA, 75 bp, synthetic construct
  source 1..75: mol_type = other DNA
ggtgcggccttcggtaagattgtctcttcactggttgccgatatcatcatgccgccgctaggtttgttaattggt

SEQ ID NO: 813831 - DNA, 75 bp, synthetic construct
  source 1..75: mol_type = other DNA
ttcagtcattaaagattccatgagtaaaatggctgcgcttgggcagtcaatcggtggtatattcccttctgatga

SEQ ID NO: 813832 - DNA, 75 bp, synthetic construct
  source 1..75: mol_type = other DNA
acggtggctgaactggaatctgaaattctgcaactgcgtaaggcgttaaatgaagctcgccttgagcgagatata

SEQ ID NO: 813833 - DNA, 75 bp, synthetic construct
  source 1..75: mol_type = other DNA
ggttcccgcacggtggctgaactggaatctgaaattctgcaactgcgtaaggcgttaaatgaagctcgccttgag

SEQ ID NO: 813834 - DNA, 75 bp, synthetic construct
  source 1..75: mol_type = other DNA
tggcatcgcgacgattacgcgtggatctaacagtctgaaagccgcgcctgtcgagctgcgccagtggctggaaga

SEQ ID NO: 813835 - DNA, 75 bp, synthetic construct
  source 1..75: mol_type = other DNA
gactcgcgtgcgtatcgtcgaagagttgttgcgcggtgaaatgagccagcgcgagttaaaaaatgaactcggtgc

SEQ ID NO: 813836 - DNA, 75 bp, synthetic construct
  source 1..75: mol_type = other DNA
gagttagtcgaagccattgatgattacatacaagatgataagagtaaaaaaagcttattatcaatgatagaagat

SEQ ID NO: 813837 - DNA, 75 bp, synthetic construct
  source 1..75: mol_type = other DNA
cttcactggttgccgatatcatcatgccacctctgggcttattaattggcgggatcgattttaaacagtttgctg

SEQ ID NO: 813838 - DNA, 75 bp, synthetic construct
  source 1..75: mol_type = other DNA
aatttgcgatgcgcgggaatgtggtggatttagcggtaggtgtcattatcggtgcggccttcggtaaaattgtct

SEQ ID NO: 813839 - DNA, 75 bp, synthetic construct
  source 1..75: mol_type = other DNA
gccgtgaagtgaacgtaccggtagaatttatcggtttctctattccggatgagtttgtggttggctacggcatcg

SEQ ID NO: 813840 - DNA, 75 bp, synthetic construct
  source 1..75: mol_type = other DNA
cagagtatatggaaggctttactgatgctgctactggtgaagctaagcgcggctttatggcagtagttgcagaac

SEQ ID NO: 813841 - DNA, 75 bp, synthetic construct
  source 1..75: mol_type = other DNA
tgactataacgcctgctttaaaaccaatttcagcactgacagtaacggtttccagaactactaccgcgatttagc

SEQ ID NO: 813842 - DNA, 75 bp, synthetic construct
  source 1..75: mol_type = other DNA
aaagcgcggcgtggcgattcgtgaggctttcaaccagatacatcgttacagtaaagagagttttaacagcgaaaa

SEQ ID NO: 813843 - DNA, 75 bp, synthetic construct
  source 1..75: mol_type = other DNA
ccttccagtgacaacgtggaggcgctggagcagcagtattattcccagtgcctgcagacgctgattgagtccatt

SEQ ID NO: 813844 - DNA, 75 bp, synthetic construct
  source 1..75: mol_type = other DNA
gcccaactgcctgacggcgcatctgacggtaataaggcaatcagtgaaacagagcatggtgcggtgaaagcgatg

SEQ ID NO: 813845 - DNA, 75 bp, synthetic construct
  source 1..75: mol_type = other DNA
tttcagcacaactgcctgacggcgcatctgacggtaataaggcaatcagtgaaacagagcatgatgcagtgaaag

SEQ ID NO: 813846 - DNA, 75 bp, synthetic construct
  source 1..75: mol_type = other DNA
atgacacaacagacacacaccattgctgaatccaataactttatcgtccttgataaattcaccaaagttatggat

SEQ ID NO: 813847 - DNA, 75 bp, synthetic construct
  source 1..75: mol_type = other DNA
gtggtttttgaaatcgatttgctgaagtctcaggaaataaacctggattatatccttggactgattttcgaacac

SEQ ID NO: 813848 - DNA, 75 bp, synthetic construct
  source 1..75: mol_type = other DNA
cagcgatggcatcctggataaaacccgtaaaattcatatcgactatatctgcgactttatttttgatgacgggcg

SEQ ID NO: 813849 - DNA, 75 bp, synthetic construct
  source 1..75: mol_type = other DNA
agcagttagcagcgtggacgcggcgaaagcttattacacgacgtttaaaatgctacaggaagaagcagagaagaa

SEQ ID NO: 813850 - DNA, 75 bp, synthetic construct
  source 1..75: mol_type = other DNA
ttaccggtacgcctattttcccggaaaatgcactgggggcagaaaccaccgccagcgtcttcgggcgtgaattac

SEQ ID NO: 813851 - DNA, 75 bp, synthetic construct
  source 1..75: mol_type = other DNA
gaaccttcttaatcagggctatgagtttatatccgttaagtcaccgactgcgatgctggcgaatgtgcgggacca

SEQ ID NO: 813852 - DNA, 75 bp, synthetic construct
  source 1..75: mol_type = other DNA
taactttcgcggtcatgctgctggttacagggctgctatagaagcagcaccacaactggaggttaaccgtggcta

SEQ ID NO: 813853 - DNA, 75 bp, synthetic construct
  source 1..75: mol_type = other DNA
atggcaactttgacaaaaaaggaacaggcatggttgagcgaattacagaacgttcttgatcgctgcccatcaccg

SEQ ID NO: 813854 - DNA, 75 bp, synthetic construct
  source 1..75: mol_type = other DNA
ttcaaacgctattatcagtttggttttaccggcacccctattttcccggaaaacgctttaggctcagaaacgacc

SEQ ID NO: 813855 - DNA, 75 bp, synthetic construct
  source 1..75: mol_type = other DNA
acaggcgacagctatcagagcgaatcggacctggaacgtgaactgattcaggacctacaaaatcagggctatgaa

SEQ ID NO: 813856 - DNA, 75 bp, synthetic construct
  source 1..75: mol_type = other DNA
gcgataaaagcatttacctgtatgacctgcgccgcatggatgaaatcatggaggctcttgataatcgttcgtcaa

SEQ ID NO: 813857 - DNA, 75 bp, synthetic construct
  source 1..75: mol_type = other DNA
atgacaactttgacaaaaaaggaacaggcatggttgagcgaattacagaacgttcttgatcgctgcccgtcaccg

SEQ ID NO: 813858 - DNA, 75 bp, synthetic construct
  source 1..75: mol_type = other DNA
aggtatcccggcaacagatatgttcaaagttattccactggcaccgggccatgcctatgggatgtttatggaacg

SEQ ID NO: 813859 - DNA, 75 bp, synthetic construct
  source 1..75: mol_type = other DNA
aggtatcccggcaacagagatgttcaacgtgattccactgtcaccaggccatgcctacgggatgtttatggaacg

SEQ ID NO: 813860 - DNA, 75 bp, synthetic construct
  source 1..75: mol_type = other DNA
gaggctcttgataatcgttcgtcaatggattggtgtgttgctgttcatgatatgaatgcagggtttgatgaaaag

SEQ ID NO: 813861 - DNA, 75 bp, synthetic construct
  source 1..75: mol_type = other DNA
gcctctgtcggccgcaataactcgacattgaataaagagatcatcccggcgaactacgcttacagcactttccag

SEQ ID NO: 813862 - DNA, 75 bp, synthetic construct
  source 1..75: mol_type = other DNA
ttatgacgctactaaaaccttcggtaatatcgtcactttccgcgatctggaacgctcaaccatcgatgccataac

SEQ ID NO: 813863 - DNA, 75 bp, synthetic construct
  source 1..75: mol_type = other DNA
tacgatgtcaccattctggtcaatggcctgccgctggtacaaattgaattgaaaaaacgcggtgtagcgattcgt

SEQ ID NO: 813864 - DNA, 75 bp, synthetic construct
  source 1..75: mol_type = other DNA
acaatatcgactgcggatcgggaattatctttgacaacgatgaggataaaacggattcagcagcactgttgccct

SEQ ID NO: 813865 - DNA, 75 bp, synthetic construct
  source 1..75: mol_type = other DNA
gacgctactggtgatgcgaccgtaccagattgccgccaccgagcgcattctgtggaaaattaagagttcctttac

SEQ ID NO: 813866 - DNA, 75 bp, synthetic construct
  source 1..75: mol_type = other DNA
cagtattgaaagtgaaaaagagaagaaagacttcgtaaaactgtttggcgaatacctgcgtgccgagaacatcct

SEQ ID NO: 813867 - DNA, 75 bp, synthetic construct
  source 1..75: mol_type = other DNA
attgataaaagaagaaaacctcaatgaagaagcagcaaaacgctatattcgcacgtctttaaaacgcgaatacgc

SEQ ID NO: 813868 - DNA, 75 bp, synthetic construct
  source 1..75: mol_type = other DNA
gagcgatggcattctggataagacccgtaaaattcatatcgactatatctgcgattttatttttgatgacggacg

SEQ ID NO: 813869 - DNA, 75 bp, synthetic construct
  source 1..75: mol_type = other DNA
aactgacgagaaaaaactgagtgcggctgaaaatcagcaggcgtttcttcatcccatgcgtatacaggaaattac

SEQ ID NO: 813870 - DNA, 75 bp, synthetic construct
  source 1..75: mol_type = other DNA
gagagccgaatctacagagaaaatgctgaacgacgagttcaggaagctcgaagaatctgtaagcaaggctgtgac

SEQ ID NO: 813871 - DNA, 75 bp, synthetic construct
  source 1..75: mol_type = other DNA
catactctgcttaatgttctggtgaactacagcgtttttgacagcagtcagacgctactggtgatgcgaccgtac

SEQ ID NO: 813872 - DNA, 75 bp, synthetic construct
  source 1..75: mol_type = other DNA
aaaacagaccagtaagggcacaccgatgacgctggcacgtatggcggtatcgctgccatgcagtcaggcgcagga

SEQ ID NO: 813873 - DNA, 75 bp, synthetic construct
  source 1..75: mol_type = other DNA
aacgccttcttcctgactataaacgaatggaagaaaaaatagacgccgtaatccgtgagaaatacgggttacccc

SEQ ID NO: 813874 - DNA, 75 bp, synthetic construct
  source 1..75: mol_type = other DNA
ctttgccatgcagccaggcagatgacggaacggcgacgatgtggttatctgtgctggcgtttggcagacaagccg

SEQ ID NO: 813875 - DNA, 75 bp, synthetic construct
  source 1..75: mol_type = other DNA
ccctgccgtgcaatcaggcagatgacggacaggcgacgatgtggttatccgtcctggcgtttggcagacaggccg

SEQ ID NO: 813876 - DNA, 75 bp, synthetic construct
  source 1..75: mol_type = other DNA
ggagacctgaaaaaggcagtcgatcgcacttatgccgaaatgggtatagatggtgctggtgatgaaatatggcgc

SEQ ID NO: 813877 - DNA, 75 bp, synthetic construct
  source 1..75: mol_type = other DNA
aaaacagaccagtaagggcacaccgatgacgctggcgcgtatggcggtatcactgccatgcagtcaggcgcagga

SEQ ID NO: 813878 - DNA, 75 bp, synthetic construct
  source 1..75: mol_type = other DNA
catactctgcttaatgttctggtgaactacagcgtgttcgatattagccagacgctactggtgatgcgaccgtac

SEQ ID NO: 813879 - DNA, 75 bp, synthetic construct
  source 1..75: mol_type = other DNA
tatggaaaatcaacagctcctataaagcgaaaaactggtctaaccccgaaagcggtggctttatatggcacacta

SEQ ID NO: 813880 - DNA, 75 bp, synthetic construct
  source 1..75: mol_type = other DNA
acaggcgacagctaccagagcgaatcggacctggaacgtgaactgattcaggacctgcggaatcagggttatgaa

SEQ ID NO: 813881 - DNA, 75 bp, synthetic construct
  source 1..75: mol_type = other DNA
atcccatgcgtatacaggaaattacgcaatatattctgaataacttccgccagaagacccaccgtactttcccag

SEQ ID NO: 813882 - DNA, 75 bp, synthetic construct
  source 1..75: mol_type = other DNA
aatatcgtcactttccgcgatctggaacgctcaaccatcgatgccataacgttgtttggtgacaaaaacaccaaa

SEQ ID NO: 813883 - DNA, 75 bp, synthetic construct
  source 1..75: mol_type = other DNA
gcgactttatttttgacgacgggcgtcttgagaacatctatctgatcgataaaaagaatctcatgcgcaacaaag

SEQ ID NO: 813884 - DNA, 75 bp, synthetic construct
  source 1..75: mol_type = other DNA
ggacctgcgaaatcagggctatgaatttatatccgtaaaatctcagtcggcgatgctggccaatgttcgacaaca

SEQ ID NO: 813885 - DNA, 75 bp, synthetic construct
  source 1..75: mol_type = other DNA
aacgtgattccactgtcaccaggccatgcctacgggatgtttatggaacgttttaacgagttatcggggttacgc

SEQ ID NO: 813886 - DNA, 75 bp, synthetic construct
  source 1..75: mol_type = other DNA
cagcacaggaaggacgtgttaaagctggcagggaatacgggcatgatgttactggggatggtcattttcctgttt

SEQ ID NO: 813887 - DNA, 75 bp, synthetic construct
  source 1..75: mol_type = other DNA
gagagccgaatctacagagacaatgctgaacgacgagttcagcaagctcgaaaaatctgtaagcaaggctgtgac

SEQ ID NO: 813888 - DNA, 75 bp, synthetic construct
  source 1..75: mol_type = other DNA
actacagcgtgttcgatgttagccaaacgctactagtgatgcgaccgtaccagattgccgccactgagcgtatct

SEQ ID NO: 813889 - DNA, 75 bp, synthetic construct
  source 1..75: mol_type = other DNA
accatgaactgggcaaagtcggataacactctgattaaggacctgaaggactttaccgctactttcttccagaag

SEQ ID NO: 813890 - DNA, 75 bp, synthetic construct
  source 1..75: mol_type = other DNA
ttcgtgatttccaacgggactgatacccggtactttgccagtaccactaaacgggataaaaatagctttgatttc

SEQ ID NO: 813891 - DNA, 75 bp, synthetic construct
  source 1..75: mol_type = other DNA
gaaaaagcgcacccggatgtcctcaacctgttctaccaggcgttcgacaagggcgagatggcagacggcgaaggc

SEQ ID NO: 813892 - DNA, 75 bp, synthetic construct
  source 1..75: mol_type = other DNA
ccagttggtgaaggtcagcgaacccaacgctgccgaagccaccattattctgcgcggtctgtcggcggtctatga

SEQ ID NO: 813893 - DNA, 75 bp, synthetic construct
  source 1..75: mol_type = other DNA
ggcaccagcagcagacgctggtccgggagattattgcgctgcgccagcagttactgggcgtggcagaggacgatg

SEQ ID NO: 813894 - DNA, 75 bp, synthetic construct
  source 1..75: mol_type = other DNA
atcaaaaccgcaaaagacttcctgcagaaaatggcaagcgacattaacagtatgaacctcagctcctgtcaggtg

SEQ ID NO: 813895 - DNA, 75 bp, synthetic construct
  source 1..75: mol_type = other DNA
tcggacaagtgcctgaaggtggtggcagacactgaagtgacaattaaaaaggaaaatgccctcaagtcgcagatt

SEQ ID NO: 813896 - DNA, 75 bp, synthetic construct
  source 1..75: mol_type = other DNA
ctgctgttgcagaaaatggcggccaacacggcgattgcccgcatccgcctgtcggcggcagacggcgcgttcacg

SEQ ID NO: 813897 - DNA, 75 bp, synthetic construct
  source 1..75: mol_type = other DNA
attggcagtgaaagcaatatcttcgccgactgggccgcttcgcgtcaggggtgcactgtcggaggacagtcctcc

SEQ ID NO: 813898 - DNA, 75 bp, synthetic construct
  source 1..75: mol_type = other DNA
tgccgggtatgcttacggtggctccctgtacgcccgtactcaggtcaaaaatatccagctgatttccatgaccct

SEQ ID NO: 813899 - DNA, 75 bp, synthetic construct
  source 1..75: mol_type = other DNA
ttttgaccttgccctgcagacgacggtgccggaaatcaaaaccgcaaaagattatctgcagaagctggcaagcga

SEQ ID NO: 813900 - DNA, 75 bp, synthetic construct
  source 1..75: mol_type = other DNA
acttcctgcagaagatggccagcgacatcaacagcaccaacctcagttcatgccaggctgcgcaaggcatcgtcg

SEQ ID NO: 813901 - DNA, 75 bp, synthetic construct
  source 1..75: mol_type = other DNA
caggcggccgggtatttttccggtggctcagtttacctgcgaaacccggtcaaaaacgtccagctgatctcgatg

SEQ ID NO: 813902 - DNA, 75 bp, synthetic construct
  source 1..75: mol_type = other DNA
gtggctacgggaaattatgacgaagcggttatcgagcatattaacgacaacatgaatgatgccacccggcagatt

SEQ ID NO: 813903 - DNA, 75 bp, synthetic construct
  source 1..75: mol_type = other DNA
cgatggtggccacgggaaattatgacgaagcggttatcgagcatattaacgacaacatgaatgatgccacccgac

SEQ ID NO: 813904 - DNA, 75 bp, synthetic construct
  source 1..75: mol_type = other DNA
tcccgcgcgccgtgcgtgtagcaatgacggcgggcgcatctggattcctggcaggtcgtgcagtgtgggcatccg

SEQ ID NO: 813905 - DNA, 75 bp, synthetic construct
  source 1..75: mol_type = other DNA
taccgcgataacgccatcacctacaaagcgcagcgcgataaaaaagccagtgaactgaagctggcgaacgcaacc

SEQ ID NO: 813906 - DNA, 75 bp, synthetic construct
  source 1..75: mol_type = other DNA
gaccatatcaatatgccgtgggtgatcctctcatccggcgtcgacgaaaaactgttcccgcgtgccgtacgcgtg

SEQ ID NO: 813907 - DNA, 75 bp, synthetic construct
  source 1..75: mol_type = other DNA
ttcaacaaaacatcctgacgaagccctttactgtaaaatgttgcagatagctgagaagctacatgctgtagtcgt

SEQ ID NO: 813908 - DNA, 75 bp, synthetic construct
  source 1..75: mol_type = other DNA
acctgacgatagatggcgtaacaatcaatagggaaggtatcgctattgttgaaaagcatatctccagatttgatc

SEQ ID NO: 813909 - DNA, 75 bp, synthetic construct
  source 1..75: mol_type = other DNA
taatcaccatgaaaatttgtgtgtcctgtgtaaggattgtcatcgtaaacagccccttcacgaaggcatgtttgt

SEQ ID NO: 813910 - DNA, 75 bp, synthetic construct
  source 1..75: mol_type = other DNA
tcatttccagcaccaccgtccccgtctttaaatatcttattgatccgcagatgctcggtgtgtccagcagcgtgg

SEQ ID NO: 813911 - DNA, 75 bp, synthetic construct
  source 1..75: mol_type = other DNA
aagataaggaacgggtgctgaagaacatcaatatcatctgggactcgctgtccaaaaacaggatgcttgatggta

SEQ ID NO: 813912 - DNA, 75 bp, synthetic construct
  source 1..75: mol_type = other DNA
gtggcggcatcgacgcctatctcggctcgttcagttttattaatggcgatcagttgcagcgttttgttaagcaga

SEQ ID NO: 813913 - DNA, 75 bp, synthetic construct
  source 1..75: mol_type = other DNA
cctgaggcagcgaaagccatgactgtggcgatacgcacttttttacagcaaaacgccaatcgggaaggcgattgc

SEQ ID NO: 813914 - DNA, 75 bp, synthetic construct
  source 1..75: mol_type = other DNA
gtatttcttgcgcatcttatagagcagttaaaagcaatggcagcagaaaatgacagtgagcaggataaatattta

SEQ ID NO: 813915 - DNA, 75 bp, synthetic construct
  source 1..75: mol_type = other DNA
ccgactgggccgcgtcccgtcagggctgcacggttggggggcagtcatcgtctgttcgtgacaaggccagtgaca

SEQ ID NO: 813916 - DNA, 75 bp, synthetic construct
  source 1..75: mol_type = other DNA
ttaagcataaattatgcagaaatcgtaattgcattccagctttattgttgtggaactgcctgagcttcatgccat

SEQ ID NO: 813917 - DNA, 75 bp, synthetic construct
  source 1..75: mol_type = other DNA
aacttttagttacctgcaaatttcccccaaaacccgctccctcatcctctggactgaacgcggcgctgcccgtca

SEQ ID NO: 813918 - DNA, 75 bp, synthetic construct
  source 1..75: mol_type = other DNA
ggctgcacgtcacgctaaaatgcttgaaactaaccaagcgtgggatgtgttcgaacggctggaagactgctattt

SEQ ID NO: 813919 - DNA, 75 bp, synthetic construct
  source 1..75: mol_type = other DNA
tcacacacgagatgttgatatcaatgagccagacggaccaacgaatctttccgcatggttaaggcttaagaacaa

SEQ ID NO: 813920 - DNA, 75 bp, synthetic construct
  source 1..75: mol_type = other DNA
ggatacccagcgcacgcttaccgattctgtcgggggtatctaccagactgctgctgaattcgagcgctatgcact

SEQ ID NO: 813921 - DNA, 75 bp, synthetic construct
  source 1..75: mol_type = other DNA
caaagttgaaatgccgctttatggcaaaggtccgcaacaagagcttctcagtgcttcacaacgtctgaatgacca

SEQ ID NO: 813922 - DNA, 75 bp, synthetic construct
  source 1..75: mol_type = other DNA
cgagagatgttttaatcaatcacacacgagatgttgatattaatgatccagacggaccaacgaatctttccgcat

SEQ ID NO: 813923 - DNA, 75 bp, synthetic construct
  source 1..75: mol_type = other DNA
aactgaaaccgtcctgcaactggcagagctgctctacggcggtcgccagtacctgaccaccatcaatatgtccga

SEQ ID NO: 813924 - DNA, 75 bp, synthetic construct
  source 1..75: mol_type = other DNA
cgcacgcgccgacctgcgccgtccgggacgcccgctgggcgcgttcctgctggctggccccagcggcgtgggtaa

SEQ ID NO: 813925 - DNA, 75 bp, synthetic construct
  source 1..75: mol_type = other DNA
acacgggcagtcgcttacagtacaactgcgactggggccggcagacatcctggagtcagatgagaatggcattat

SEQ ID NO: 813926 - DNA, 75 bp, synthetic construct
  source 1..75: mol_type = other DNA
aaccgctcacaggcattgttccgtgagttgtatcccgcattaaaactgattcagtctggctattccggcatatgc

SEQ ID NO: 813927 - DNA, 75 bp, synthetic construct
  source 1..75: mol_type = other DNA
cgttaatcataaagatacgaactacgttcgacaaggtgacattttagtttcactggataaaactgatgccactat

SEQ ID NO: 813928 - DNA, 75 bp, synthetic construct
  source 1..75: mol_type = other DNA
atcaagtgaactcagaaacaacattgaattttgcgcacctattttatggacattactttcaaaagacgaccgacg

SEQ ID NO: 813929 - DNA, 75 bp, synthetic construct
  source 1..75: mol_type = other DNA
ggaacagtccttacagcaatgaatgcggcgtttaagcgaatggaaaagcgaaaggagctatcacctgttcagggg

SEQ ID NO: 813930 - DNA, 75 bp, synthetic construct
  source 1..75: mol_type = other DNA
ctgggccgcctcgcgccagggttgtacggtgggcggcaagatggacagcgtccaggataaggccagcgataaaga

SEQ ID NO: 813931 - DNA, 75 bp, synthetic construct
  source 1..75: mol_type = other DNA
gtcgacaatggatatgatcatggaaaacctcaatcaggcgagtgtccagattgccgcttttcagtcccgtgttca

SEQ ID NO: 813932 - DNA, 75 bp, synthetic construct
  source 1..75: mol_type = other DNA
cagcgtgcccattctgcgttacctggtggacccgcagatgctgaatatctccaccttctacccgtcactctctga

SEQ ID NO: 813933 - DNA, 75 bp, synthetic construct
  source 1..75: mol_type = other DNA
gcgcgtacctctgaccgcgatattctgcgggcaattatggaagggggaaccgccagaatttatcactgcaacgat

SEQ ID NO: 813934 - DNA, 75 bp, synthetic construct
  source 1..75: mol_type = other DNA
cggtgagagcaatatttttgctgactgggcggcttctcgccagggatgcacggtcggaggacagtccgcatctgt

SEQ ID NO: 813935 - DNA, 75 bp, synthetic construct
  source 1..75: mol_type = other DNA
tcagttttattaatggcgagcagttgcagcgttttgttaagcagattatgagcaacgctgccggttacttttttg

SEQ ID NO: 813936 - DNA, 75 bp, synthetic construct
  source 1..75: mol_type = other DNA
gttgcatggcttaaaagtggtggctgtggccgtggtcgctcaagcagtatggggcatggcgcgtaacctatgcac

SEQ ID NO: 813937 - DNA, 75 bp, synthetic construct
  source 1..75: mol_type = other DNA
tagtcggcttgctgctggccgcgctgtatcagcctgtatggactagcgccatctttcagccgcaagacttcggct

SEQ ID NO: 813938 - DNA, 75 bp, synthetic construct
  source 1..75: mol_type = other DNA
ccgtttttaccaagctctaccgaaaatagttgctgactacccatcttcccgttggttgtttctgacgttaacggt

SEQ ID NO: 813939 - DNA, 75 bp, synthetic construct
  source 1..75: mol_type = other DNA
ggcctggcagatgcgcgccaggcgctcaactcactgcgtatggaggttcagattaaggaaaatgcgcttatttct

SEQ ID NO: 813940 - DNA, 75 bp, synthetic construct
  source 1..75: mol_type = other DNA
aacagtacgctcagcagcaatgcagagttacgccagtttgccatgagcatcagcggttcggtgattttcggcagt

SEQ ID NO: 813941 - DNA, 75 bp, synthetic construct
  source 1..75: mol_type = other DNA
acacgctgaccagcatagaaaataaagccattacggacacaccattgacggagagagagaagcagttcatcaaca

SEQ ID NO: 813942 - DNA, 75 bp, synthetic construct
  source 1..75: mol_type = other DNA
ccggcgaacggtaaaagtattactcccgatgatgtgcgtccgatgattgagcagatggtgaaggaggctgtaagc

SEQ ID NO: 813943 - DNA, 75 bp, synthetic construct
  source 1..75: mol_type = other DNA
acgtgggggggctcgctgtggcactgcaacagtatgaccggtgataaacccggagaagctcattcatcagcctgg

SEQ ID NO: 813944 - DNA, 75 bp, synthetic construct
  source 1..75: mol_type = other DNA
tctaccgcggtgtgttcagagccggtgaaacctaccaccccggcgatacggtgacgtgggggggctcgctgtggc

SEQ ID NO: 813945 - DNA, 75 bp, synthetic construct
  source 1..75: mol_type = other DNA
cagatggtgaaggaggcggtaagccatattcctgttccgcgtgatggtcgtgactatgatcccgatgttctgcag

SEQ ID NO: 813946 - DNA, 75 bp, synthetic construct
  source 1..75: mol_type = other DNA
tgactatgatcccgatgttctgcagaaggctgttctggatgcggtgagagccctgccggctccgcaggacgggcg

SEQ ID NO: 813947 - DNA, 75 bp, synthetic construct
  source 1..75: mol_type = other DNA
aagccatatccctgctccgagtgacggtcgtgattacgatccggaagtactgaagcaggcggttctggaggcggt

SEQ ID NO: 813948 - DNA, 75 bp, synthetic construct
  source 1..75: mol_type = other DNA
aatattccggtaccggcggacggcaaaagtattacccccgatgatgtgcgtccgatgcttgagcagatggtgaaa

SEQ ID NO: 813949 - DNA, 75 bp, synthetic construct
  source 1..75: mol_type = other DNA
ccggcgaacggtaaaagtatcactcccgatgatgtgcgtccgatgcttgagcagatggtgaaggaggcggtaagc

SEQ ID NO: 813950 - DNA, 75 bp, synthetic construct
  source 1..75: mol_type = other DNA
tccgatgcttgagcagatggtgaaagaggccgtaagccatatccctgctccgcgtgatggtcgtgattacgatcc

SEQ ID NO: 813951 - DNA, 75 bp, synthetic construct
  source 1..75: mol_type = other DNA
ccggtgataaacccggagaagctcattcatcaggctggaccctggctgcaaaacgtgggcgggatgcaggaggtg

SEQ ID NO: 813952 - DNA, 75 bp, synthetic construct
  source 1..75: mol_type = other DNA
ccgatgatgtgcgtccgatgcttgagcagatggtgaaagaggccgtaagccatatccctgctccgcgtgacggtc

SEQ ID NO: 813953 - DNA, 75 bp, synthetic construct
  source 1..75: mol_type = other DNA
ggcagagcagtggccagtgtacggaaaaacatttccctgccggtgatgctctaccgcggtgtgttcagagccggt

SEQ ID NO: 813954 - DNA, 75 bp, synthetic construct
  source 1..75: mol_type = other DNA
ccgcgtgatggtcgtgactatgatccggatgtactgcagcaggcggtgaatgatgcggtcgggaaaataccggta

SEQ ID NO: 813955 - DNA, 75 bp, synthetic construct
  source 1..75: mol_type = other DNA
gacgtcaatatgaacacgcaccatgtggcgtttcaatataacgcttcgcggatgggactcatcaatcaccgacaa

SEQ ID NO: 813956 - DNA, 75 bp, synthetic construct
  source 1..75: mol_type = other DNA
tgttccgcgtgatggtcgtgactacgatccggatgttctgcagaaggcggttctggatgcggtgagtgccctgcc

SEQ ID NO: 813957 - DNA, 75 bp, synthetic construct
  source 1..75: mol_type = other DNA
taagccatatccctgttccgcgtgatggtcgtgactatgatccggatgttctgcagaaggcggtgaatgatgcgg

SEQ ID NO: 813958 - DNA, 75 bp, synthetic construct
  source 1..75: mol_type = other DNA
gggctcggtactcctggttcccgcacggtggctgaactggaatctgaaattctgcatgaaccgccccgggtttcc

SEQ ID NO: 813959 - DNA, 75 bp, synthetic construct
  source 1..75: mol_type = other DNA
gacctgcgtaaagagcgcagcgacgaaattccggaggcggcaaaagagatcatgcgtgagatggggattaacccg

SEQ ID NO: 813960 - DNA, 75 bp, synthetic construct
  source 1..75: mol_type = other DNA
atttgctacccatacggtgactatcaggatggtaatgtgatttatgtgaagaagcgtgtgaatgcgctgggtgcg

SEQ ID NO: 813961 - DNA, 75 bp, synthetic construct
  source 1..75: mol_type = other DNA
ggactctggcgggcgtatgaaaaaacgcacgggatgcggggatgggaatgcctggttgacggggtggcggatatt

SEQ ID NO: 813962 - DNA, 75 bp, synthetic construct
  source 1..75: mol_type = other DNA
cagtggccagcgtacggaaaaaacattttccctgccggtgatgctctaccgcggtgtgttcagagccggtgaaac

SEQ ID NO: 813963 - DNA, 75 bp, synthetic construct
  source 1..75: mol_type = other DNA
ttctggaggcggtgaatgcccttccggctccgcaggacgggcgtgatgccacggcactggaagtgctccccgcta

SEQ ID NO: 813964 - DNA, 75 bp, synthetic construct
  source 1..75: mol_type = other DNA
tttccccggggcacgtatgccacacaccagggcggactctggcgggcgtatgaaaaaacgcacgggatgcgggga

SEQ ID NO: 813965 - DNA, 75 bp, synthetic construct
  source 1..75: mol_type = other DNA
ttccccggggcacgtatgccacacacctgggtggactctggcgggcgtatgaaaaacgcacggatgcggggatgg

SEQ ID NO: 813966 - DNA, 75 bp, synthetic construct
  source 1..75: mol_type = other DNA
tccgtgcgctgggtgaagaattttccgcagtgctggcggatttacagcgcacatttgaggggaaaatagctgcgc

SEQ ID NO: 813967 - DNA, 75 bp, synthetic construct
  source 1..75: mol_type = other DNA
catatccctgttccgcgcgacggtcgtgactacgatccggatgttctgcagcaggcggtgaatgatgcggtgagt

SEQ ID NO: 813968 - DNA, 75 bp, synthetic construct
  source 1..75: mol_type = other DNA
tgattttcttctgggatccactaaatgccgtgccgcacgatcctgacgtgaaagccttgctgcgtctggcgacgg

SEQ ID NO: 813969 - DNA, 75 bp, synthetic construct
  source 1..75: mol_type = other DNA
aacattctgcgttactgccttgatgatattttcaaaggcttctttgattatgacgcgctgaatgcctattcaatg

SEQ ID NO: 813970 - DNA, 75 bp, synthetic construct
  source 1..75: mol_type = other DNA
gtgatggtgccgacgacgcagaaggttcatttgtgcgtattggtcgctttatcggtgtggttctgtttctcggcg

SEQ ID NO: 813971 - DNA, 75 bp, synthetic construct
  source 1..75: mol_type = other DNA
gcgctgatggacggcggcagactgaaaggtttcgatgttgacaaaggacggctcagtattgaggggcgcggactg

SEQ ID NO: 813972 - DNA, 75 bp, synthetic construct
  source 1..75: mol_type = other DNA
gggtgtaggagaaaaacattggggtgggctttccgaaaaagcgcgggtaaagggagactggctgacgccgctccc

SEQ ID NO: 813973 - DNA, 75 bp, synthetic construct
  source 1..75: mol_type = other DNA
atcaaggtttgcctccagcctaatgcgaagaatagagacaaaaggcccgactgacgattattctcttatagcggt

SEQ ID NO: 813974 - DNA, 75 bp, synthetic construct
  source 1..75: mol_type = other DNA
ggtacgccgatgatgcgggccatgatgatggagttcccggacgatccggcttgtgattaccttgaccgtcaataa

SEQ ID NO: 813975 - DNA, 75 bp, synthetic construct
  source 1..75: mol_type = other DNA
aaattcaagtgcagaaagttttatgtttatcattctcttgaagtaagtgatgttatggataaattagaacaattg

SEQ ID NO: 813976 - DNA, 75 bp, synthetic construct
  source 1..75: mol_type = other DNA
tctaacactcccaagttatgaacggataatgttatattgcaacattatcctaacagctctgttgtccgtaaaata

SEQ ID NO: 813977 - DNA, 75 bp, synthetic construct
  source 1..75: mol_type = other DNA
caaacgcccggacggttcgttatggcagtgggataaatggcagccaggtctggcgatttatgactttaccaatcc

SEQ ID NO: 813978 - DNA, 75 bp, synthetic construct
  source 1..75: mol_type = other DNA
ggatgaaagccttccagtggtgcgattttgagtgggacccgctgactttcccggacccggaagggatgatccgcc

SEQ ID NO: 813979 - DNA, 75 bp, synthetic construct
  source 1..75: mol_type = other DNA
tgtgaagtgcccgctgccgatggttccgttcttttcaccctgaaagcggcgcgtactggcaacacaattactgtg

SEQ ID NO: 813980 - DNA, 75 bp, synthetic construct
  source 1..75: mol_type = other DNA
cggcacactgtcactccgtgcagacgggcaactggtgaacagcggggtactggccgggcagggggatctgaatgt

SEQ ID NO: 813981 - DNA, 75 bp, synthetic construct
  source 1..75: mol_type = other DNA
catattcctgttccgcgcgacggtcgtgactatgatcccgatgtactgcagaaggcggtgaatgatgcggtcgca

SEQ ID NO: 813982 - DNA, 75 bp, synthetic construct
  source 1..75: mol_type = other DNA
aaagtctcaccccggatgatgtgcgtccgatgcttgaacagatggtgaaggaggcggtaagccatattcctgttc

SEQ ID NO: 813983 - DNA, 75 bp, synthetic construct
  source 1..75: mol_type = other DNA
gttcattcctggcaacggtattccggtcgatagcgtggttattgaccgcaaaatcaatccgctacagatcaaaca

SEQ ID NO: 813984 - DNA, 75 bp, synthetic construct
  source 1..75: mol_type = other DNA
cggatgttatgcagaaggcggtgaatgatgcggtcgcaaatattccgcagccagcggacggtaaaagtctcaccc

SEQ ID NO: 813985 - DNA, 75 bp, synthetic construct
  source 1..75: mol_type = other DNA
aacgtgattccactggcaccgggccatgcctacgggatgtttatggaacgttttaacgatttatcggagttacgc

SEQ ID NO: 813986 - DNA, 75 bp, synthetic construct
  source 1..75: mol_type = other DNA
gatgcggtgagtgccctgccggctccgcaggacgggcgtgatgccacggcactggaaatactccccgccattgac

SEQ ID NO: 813987 - DNA, 75 bp, synthetic construct
  source 1..75: mol_type = other DNA
atattgactcatcaatgattgccagtaaagaggtgagattggctgtccctgccaatacgacgaaaactcaatgga

SEQ ID NO: 813988 - DNA, 75 bp, synthetic construct
  source 1..75: mol_type = other DNA
ggtgaccatcatactgctgtcacgacctctcagcttactaaccgggagggaacggttcaggccggagaaagactg

SEQ ID NO: 813989 - DNA, 75 bp, synthetic construct
  source 1..75: mol_type = other DNA
ctaatcagcaaagcggagagcagggcgggattgttgccggcgatcgcttaacgcttgaggtgaatggtctggata

SEQ ID NO: 813990 - DNA, 75 bp, synthetic construct
  source 1..75: mol_type = other DNA
atgacaggcgataaaccgggggacgcaaattcgtctggctggaccctggccgcaaaacggggacgtgatgcagga

SEQ ID NO: 813991 - DNA, 75 bp, synthetic construct
  source 1..75: mol_type = other DNA
gaaggcggtgaatgatgccgtcgggaaaataccggtaccggcggacggcaaaagtattacccccgatgatgtgcg

SEQ ID NO: 813992 - DNA, 75 bp, synthetic construct
  source 1..75: mol_type = other DNA
ggatctggcggagcacagtaaagaaagcagtcgcgggctgttatcggggcattcatctgagcgtcatgatgaggt

SEQ ID NO: 813993 - DNA, 75 bp, synthetic construct
  source 1..75: mol_type = other DNA
ctctggtttccgatgacaaaaaggataccggaactattgagatcattgctccgctctctggcgagatcgtcaata

SEQ ID NO: 813994 - DNA, 75 bp, synthetic construct
  source 1..75: mol_type = other DNA
cagtggcagttatcgacaggaacggaaacgtcaccctcagtccggttgtatgtaaagtatgtgaatactggtgag

SEQ ID NO: 813995 - DNA, 75 bp, synthetic construct
  source 1..75: mol_type = other DNA
tacatctgcgcgcattcccgtttgtggcttagtgagcagctataacgctacagagctaccacccggtccggatcg

SEQ ID NO: 813996 - DNA, 75 bp, synthetic construct
  source 1..75: mol_type = other DNA
caggaccagtaggggcgacggtgggtcaaatcggcaaacttaaaggttgtagagtggttggggtggccggtggcg

SEQ ID NO: 813997 - DNA, 75 bp, synthetic construct
  source 1..75: mol_type = other DNA
catctgcaacagcgtaatggttatttatgggcgccaggcttaacgctgtggaagtcagcgatcctgaaacctttc

SEQ ID NO: 813998 - DNA, 75 bp, synthetic construct
  source 1..75: mol_type = other DNA
cgctggaagaactttttgccgcagcatacctgcgttactgtcgctatatcgacccgcaaacaggagcagtaagcg

SEQ ID NO: 813999 - DNA, 75 bp, synthetic construct
  source 1..75: mol_type = other DNA
cgtggtatggggtgtaaagggagaacagcaatggcgagccgaagcgcaacaaaaatcactgccgttatggcgaat

SEQ ID NO: 814000 - DNA, 75 bp, synthetic construct
  source 1..75: mol_type = other DNA
acgaagcgcaggccagcaccctgaaaagtaccgccgacaccctgaatatcattagcgccggggtacaggatatgc

SEQ ID NO: 814001 - DNA, 75 bp, synthetic construct
  source 1..75: mol_type = other DNA
tcgcttttcttctgattgccgcatgggaaacatccatgcgtctgtcatggtcgcttggccgggagaacgccagaa

SEQ ID NO: 814002 - DNA, 75 bp, synthetic construct
  source 1..75: mol_type = other DNA
cctggtgaaagacggcgcgactgatggtgttcagatcgacccgacgctgttttcacagtacggcattcgcagtgt

SEQ ID NO: 814003 - DNA, 75 bp, synthetic construct
  source 1..75: mol_type = other DNA
aacaactgacgaaggcgtgtccgaaaggtgttgatatctattatgaaaatgtgggcggtaaagtgtttgatgccg

SEQ ID NO: 814004 - DNA, 75 bp, synthetic construct
  source 1..75: mol_type = other DNA
tttagaaaatgccccgcagacatttatcggcctgctgaatggtaaaaacttcggcaaagtcgtgatccgtgttgc

SEQ ID NO: 814005 - DNA, 75 bp, synthetic construct
  source 1..75: mol_type = other DNA
acaaataaggtccgtatcgaaggtgaggttgataaggactggaattcagtagaaatagatgtaaaagttattaat

SEQ ID NO: 814006 - DNA, 75 bp, synthetic construct
  source 1..75: mol_type = other DNA
ttatctgcccgacgcggttcagccacactggaagaactttttgccgctgcatacctgcgttactgtcgctatatc

SEQ ID NO: 814007 - DNA, 75 bp, synthetic construct
  source 1..75: mol_type = other DNA
ctgttgaaagttgcagacttgcttcgatgctactttccttccactttctgaaattatggcctgctctggaattga

SEQ ID NO: 814008 - DNA, 75 bp, synthetic construct
  source 1..75: mol_type = other DNA
ctggaagtgggtgattacgttattgatatcacaggggatcaatacaacgtcatcagcaccagcgaactaaacgaa

SEQ ID NO: 814009 - DNA, 75 bp, synthetic construct
  source 1..75: mol_type = other DNA
caatagaacgcctgtgcgcttctgtttcaatcactccgcacgaaatggcccttgcactggctggccttaatccgt

SEQ ID NO: 814010 - DNA, 75 bp, synthetic construct
  source 1..75: mol_type = other DNA
taaaaaaggcagcatttgtgcactcattctggcgcaattcgtcttcgtattgctggtgtggggcgcgggaaaggc

SEQ ID NO: 814011 - DNA, 75 bp, synthetic construct
  source 1..75: mol_type = other DNA
gtttctactaaagggattcgtgaaggacatacagtcattatatttaaacaatctgatggttcgactaatcgttat

SEQ ID NO: 814012 - DNA, 75 bp, synthetic construct
  source 1..75: mol_type = other DNA
ttctctaccttaacctgcctggaagtcatggctggcggcgtttcaaaaggccatgccctggaagcggtagcgaag

SEQ ID NO: 814013 - DNA, 75 bp, synthetic construct
  source 1..75: mol_type = other DNA
gatattattcaatgcattcagcgcgcagatgaagtgcataccatgacgtcgctgtcggggtttgaagcattatta

SEQ ID NO: 814014 - DNA, 75 bp, synthetic construct
  source 1..75: mol_type = other DNA
ttccggcagaacagattgctgaacttgctgattatcaggcactggacgcagatattattcaatgcattcagcgcg

SEQ ID NO: 814015 - DNA, 75 bp, synthetic construct
  source 1..75: mol_type = other DNA
attagaaaaaagaatattgacagagctattaatatttaccgtaagttaatcatgttctgcaaagtaagactgggc

SEQ ID NO: 814016 - DNA, 75 bp, synthetic construct
  source 1..75: mol_type = other DNA
tacctttttttgccctttcagtggttctgttgactcttggcgctaccaggaagaaccaagccagcttcatcgttg

SEQ ID NO: 814017 - DNA, 75 bp, synthetic construct
  source 1..75: mol_type = other DNA
aaaccggctgagtttttcacgtcgctgtactgcggcgagcgcctgcgtggtatggggtgtaaagggagaacagca

SEQ ID NO: 814018 - DNA, 75 bp, synthetic construct
  source 1..75: mol_type = other DNA
tttaccgtgctgcaatggctgcaattacaacgtcgacatctgcaacagcgtaatggttatttatgggcgccaggc

SEQ ID NO: 814019 - DNA, 75 bp, synthetic construct
  source 1..75: mol_type = other DNA
gcagctgcgatgaaaacggtcagccgcgcgtgggtcagtgggtactggttcacgttggctttgccatgagcgtaa

SEQ ID NO: 814020 - DNA, 75 bp, synthetic construct
  source 1..75: mol_type = other DNA
gcttgagcgtctgaagaaattaatctggctggcggcgcaggatgtcagggggaggattactgggtgtgacgtcta

SEQ ID NO: 814021 - DNA, 75 bp, synthetic construct
  source 1..75: mol_type = other DNA
gtacaagaaaaattgccagtaagacactggaacgcttaaagaagttgatctggctggcagcacaggatgtgaaga

SEQ ID NO: 814022 - DNA, 75 bp, synthetic construct
  source 1..75: mol_type = other DNA
gctcgtctccggcatcgactggcagaaaatgtccggtcatgacctgacaaaatgggcatcatgcacgttactaat

SEQ ID NO: 814023 - DNA, 75 bp, synthetic construct
  source 1..75: mol_type = other DNA
cagaaggcgtgggtgctgtgggtatacagtgaaaatccgagttgggattatcaggtggtcattgcgaaatgggcg

SEQ ID NO: 814024 - DNA, 75 bp, synthetic construct
  source 1..75: mol_type = other DNA
cgctggataatccaccgatcccgggaaagcaatcgctggcgaaaggttcatcaattgccctggtcagtccggttg

SEQ ID NO: 814025 - DNA, 75 bp, synthetic construct
  source 1..75: mol_type = other DNA
cgccgatttgagtggggcaacaaaaggtcagcttgaagcctggcaggagaatgccatgtttgatacaggacgtta

SEQ ID NO: 814026 - DNA, 75 bp, synthetic construct
  source 1..75: mol_type = other DNA
aaaatatggatcttcccgctataccgccacgctatcgcagcagttatttcgcccatatttttggtggtggatatg

SEQ ID NO: 814027 - DNA, 75 bp, synthetic construct
  source 1..75: mol_type = other DNA
ccgtcgcaaatcaacgaacactgggcaacgcatccgcaggtattcgctcgctacgcccggcattatcagagcggg

SEQ ID NO: 814028 - DNA, 75 bp, synthetic construct
  source 1..75: mol_type = other DNA
taccagtggtttgttgagcagggcggattaacgcgtgaaaatgggctgcgttttcgcgaggcgatcctttccaga

SEQ ID NO: 814029 - DNA, 75 bp, synthetic construct
  source 1..75: mol_type = other DNA
aacgtgattccactggcaccgggccaggcctacgggatgtttatggaacgttttaacgagttatcggagttacgc

SEQ ID NO: 814030 - DNA, 75 bp, synthetic construct
  source 1..75: mol_type = other DNA
gattgatatggatagctattccatggcgctggcagcacacaacagcggcggcaaagtgttcgtacaggtacgcga

SEQ ID NO: 814031 - DNA, 75 bp, synthetic construct
  source 1..75: mol_type = other DNA
ctgctaacgtcctttgggcttgaactcccggctatgaccgtggatgaacaattgctaaggacactggcgggggtc

SEQ ID NO: 814032 - DNA, 75 bp, synthetic construct
  source 1..75: mol_type = other DNA
tgagatgtgcgatatttttaagcgcctcgatagagaatccttgatttgctccgtgaaaataagagcgcaacaaaa

SEQ ID NO: 814033 - DNA, 75 bp, synthetic construct
  source 1..75: mol_type = other DNA
tcgccctgacagcaggactgtttatctctgctcatgcttcagaaaatgtgaacacacctgaaaaccgccagttcc

SEQ ID NO: 814034 - DNA, 75 bp, synthetic construct
  source 1..75: mol_type = other DNA
ctggtccgtaaacagcaggctgctcagaaggataaaccacagcagggcgccgtgtactttgtgtccttctccatt

SEQ ID NO: 814035 - DNA, 75 bp, synthetic construct
  source 1..75: mol_type = other DNA
ctggtttttctgcgccattgccagccttattttgacgctcatcacgaggcgaattattcagcgggcaaatatcaa

SEQ ID NO: 814036 - DNA, 75 bp, synthetic construct
  source 1..75: mol_type = other DNA
ttgacgctgccgattgtgctgtcaaagctgcgaatgtcattctcgttcgcgtacatatggcttttggcattggcg

SEQ ID NO: 814037 - DNA, 75 bp, synthetic construct
  source 1..75: mol_type = other DNA
ttctgcccacgcttcggaaaacgtgaatacgccagaaaaccgccggttcctgaagcagcaggaaacactgagtca

SEQ ID NO: 814038 - DNA, 75 bp, synthetic construct
  source 1..75: mol_type = other DNA
ttcagataaccattttctggatgaactggttcgtaaacagcaggcttcgcaggacgggaaaccccggcagggtgc

SEQ ID NO: 814039 - DNA, 75 bp, synthetic construct
  source 1..75: mol_type = other DNA
tccggccacactgcggggcatggtgaacaatgacctgaagactaccgctgaagccgtgttgtccctggtaaaaga

SEQ ID NO: 814040 - DNA, 75 bp, synthetic construct
  source 1..75: mol_type = other DNA
tcagaaggataaaccacagcagggcgccgtgtactttgtgtccttctccattcccgaagaggggctgaaacggat

SEQ ID NO: 814041 - DNA, 75 bp, synthetic construct
  source 1..75: mol_type = other DNA
atgaataaccagtatttacagtttgttcgtgagcagctcattatcgccaccgccgatttgagtagagcaacaaaa

SEQ ID NO: 814042 - DNA, 75 bp, synthetic construct
  source 1..75: mol_type = other DNA
ccgtaaacagcaggctgctcagaaagacaaaccacagcagggggccgtgtattttgtgtcgttctccattcccga

SEQ ID NO: 814043 - DNA, 75 bp, synthetic construct
  source 1..75: mol_type = other DNA
gcctgtttgcaggagaattatatgaacaaaaaatatacattttattcgccctgactgcaggactgtttatttctg

SEQ ID NO: 814044 - DNA, 75 bp, synthetic construct
  source 1..75: mol_type = other DNA
cccgaagaggggctgaaacggatgctgggcgaaacccggcactacggtattccggccacgctgcggggcatggtg

SEQ ID NO: 814045 - DNA, 75 bp, synthetic construct
  source 1..75: mol_type = other DNA
atcattttcaaaatatgttaattttatcagctctttatttatacttttaactggcgcatatctggtttttttatg

SEQ ID NO: 814046 - DNA, 75 bp, synthetic construct
  source 1..75: mol_type = other DNA
gaacgtgaagcccgtaaggctccggtgattcaggctgcaataaaacttgcaggcgcggttcattacgctgacgta

SEQ ID NO: 814047 - DNA, 75 bp, synthetic construct
  source 1..75: mol_type = other DNA
cgtatggaacggtggcccgattgggcagctggattccggcgacacactgacaaaaggctattacgtctacgcgca

SEQ ID NO: 814048 - DNA, 75 bp, synthetic construct
  source 1..75: mol_type = other DNA
ggcaaccggcttctacggttccctgctgccaagcccggacgtacatggctataaatccagcgaaatgctttacaa

SEQ ID NO: 814049 - DNA, 75 bp, synthetic construct
  source 1..75: mol_type = other DNA
atgatgacatccagctggcaaaagctgctttatcggaattgccggacctcaccgctcaacggaaaacattgcgtg

SEQ ID NO: 814050 - DNA, 75 bp, synthetic construct
  source 1..75: mol_type = other DNA
cgataagggataaattgacgccatcattctcaagatacataagcatatgtagttccatttttatattaggtacag

SEQ ID NO: 814051 - DNA, 75 bp, synthetic construct
  source 1..75: mol_type = other DNA
gcgactttaagggtaataaccaactcaatatcagcagtagtggttacagcgataccaatcgcatcagctacagcg

SEQ ID NO: 814052 - DNA, 75 bp, synthetic construct
  source 1..75: mol_type = other DNA
atgagcagtgactttaagggtaataaccaactcaacgtcagtagcagtggctatagtgataacgctcgcctcagt

SEQ ID NO: 814053 - DNA, 75 bp, synthetic construct
  source 1..75: mol_type = other DNA
tgtcaccagcgctctttctccttatcatgaaaaccgtatcgcgctggatatcaacgatcttgagaacgatgttga

SEQ ID NO: 814054 - DNA, 75 bp, synthetic construct
  source 1..75: mol_type = other DNA
cagcattaaatggctcgaagaaagtaaacccgtaagttgtcttgcgcattatcaacaaagttcagaagcagaaaa

SEQ ID NO: 814055 - DNA, 75 bp, synthetic construct
  source 1..75: mol_type = other DNA
cagcagggaaatatcagcattaaatggctcgaacaaagtaaacccgtaagttgtcttgcgcattatcaacaaagc

SEQ ID NO: 814056 - DNA, 75 bp, synthetic construct
  source 1..75: mol_type = other DNA
aagagggcaaaccagtcagttgttttgctcattaccaacaaaacacgacatcagaaaaaatagcacaatctatta

SEQ ID NO: 814057 - DNA, 75 bp, synthetic construct
  source 1..75: mol_type = other DNA
gggatgaacgatagcactgtgcttggcggcgtgcgcgcgacggaaggtcagggctttaaagcggcagatatcatc

SEQ ID NO: 814058 - DNA, 75 bp, synthetic construct
  source 1..75: mol_type = other DNA
agcatgacaaatatgcattctcaggcctccgatgatgacgaactggcaacctttacttttgtgaacgggcagacg

SEQ ID NO: 814059 - DNA, 75 bp, synthetic construct
  source 1..75: mol_type = other DNA
ttgctggagcaacgacctgtactgacggaggaagagcatgcacgcactggtcagatggccgccagcctggcatca

SEQ ID NO: 814060 - DNA, 75 bp, synthetic construct
  source 1..75: mol_type = other DNA
gttgcgccacagaagaaacgaatgtctgccggcgtgccggtggtcagtcgtaccgcgccgtttgttctgaccggg

SEQ ID NO: 814061 - DNA, 75 bp, synthetic construct
  source 1..75: mol_type = other DNA
tatcttgactggctggcaagcgatcgcagcgatgcgagctgccccgttggttatgtgtttatctatttttacggt

SEQ ID NO: 814062 - DNA, 75 bp, synthetic construct
  source 1..75: mol_type = other DNA
ttcaggactggcgacagtggctgatttctgggccagactgggtatgcctgtaccggataagattaataagaaaga

SEQ ID NO: 814063 - DNA, 75 bp, synthetic construct
  source 1..75: mol_type = other DNA
aaacagcgttatactcaaaaatacggtgacggtattgtcgtcaaacccaataaaacacggttgtatttaagctat

SEQ ID NO: 814064 - DNA, 75 bp, synthetic construct
  source 1..75: mol_type = other DNA
aaaacagccctgagttacaggaattgatttgggagaagttggttgtatatgtcaatgattttaatttaagtaatc

SEQ ID NO: 814065 - DNA, 75 bp, synthetic construct
  source 1..75: mol_type = other DNA
agaaaaatttaataatgaattaaaacttaggtttagaatgatgcaaactatcttgaaatcggaggttaatatatc

SEQ ID NO: 814066 - DNA, 75 bp, synthetic construct
  source 1..75: mol_type = other DNA
agatttttttaaaattcccatatattaatgatgtaagaatgctggattggtgttttaataaaagaatgcaatatt

SEQ ID NO: 814067 - DNA, 75 bp, synthetic construct
  source 1..75: mol_type = other DNA
ttaaaaattagaacaagaatgatgaaaatcctccggaatggcaaaatcaatatatatgaatatatgaatatatga

SEQ ID NO: 814068 - DNA, 75 bp, synthetic construct
  source 1..75: mol_type = other DNA
tgtggattttagcaaacgctccaacgaagcgggtagaaatatgatggctcatattgagtcctcatcttatatcaa

SEQ ID NO: 814069 - DNA, 75 bp, synthetic construct
  source 1..75: mol_type = other DNA
gaagaaaaaacaaaagaaattgtaaataaacttccgggttatgtcgttaagatttttgaagaaaagatcgataat

SEQ ID NO: 814070 - DNA, 75 bp, synthetic construct
  source 1..75: mol_type = other DNA
atgacggggacgcaatttacccctgcggatttcaccggcggaataaaatctaaatgcgtcaagctacttatagat

SEQ ID NO: 814071 - DNA, 75 bp, synthetic construct
  source 1..75: mol_type = other DNA
ccaaaaacatgaccgaagatgcccgtaacggcaggcttgacccggtactgtgccgcgaccacgaaatcgacctga

SEQ ID NO: 814072 - DNA, 75 bp, synthetic construct
  source 1..75: mol_type = other DNA
agagaaaaggtaatgatcaaccttgctgctcttaccgttgatgcacttactgattgcaatgttgtattcaactag

SEQ ID NO: 814073 - DNA, 75 bp, synthetic construct
  source 1..75: mol_type = other DNA
ctggggtgaccgtgttaacgtgagtttctccaccttaacctgtctggaagtgatggcgggcggtgtttcaaaagg

SEQ ID NO: 814074 - DNA, 75 bp, synthetic construct
  source 1..75: mol_type = other DNA
tatcccggcggacgttccgccgaaggctatcccagcttctccccgatgctgatcgaatggctcaaggagtcatgg

SEQ ID NO: 814075 - DNA, 75 bp, synthetic construct
  source 1..75: mol_type = other DNA
acgccaggcgctgaccgtggagagttatcccggcggacgttccgccgaaggctatcccagcttctccccgatgct

SEQ ID NO: 814076 - DNA, 75 bp, synthetic construct
  source 1..75: mol_type = other DNA
tggtaaagcggcttaacccctttgcaaaacaggcgctggaaatggctgcctcggagtgtatgagccagcaggcca

SEQ ID NO: 814077 - DNA, 75 bp, synthetic construct
  source 1..75: mol_type = other DNA
tccgtggctggggacgctcggcatagcaggaaccggaatgacacccgcactgattgcgctggtgctctatgcctt

SEQ ID NO: 814078 - DNA, 75 bp, synthetic construct
  source 1..75: mol_type = other DNA
atctctcgctaatgaaagagtacgccaaccgtcaggatgtgttcgatgacgcactggcgcagcatctgacgctgc

SEQ ID NO: 814079 - DNA, 75 bp, synthetic construct
  source 1..75: mol_type = other DNA
ctgctgtactccggcacgcttaacgatctctcgctaatgaaagagtacgccaaccgtcaggatgtgttcgatgac

SEQ ID NO: 814080 - DNA, 75 bp, synthetic construct
  source 1..75: mol_type = other DNA
ctggtggtgactataacgcttccgatgtgcagtggctggttaatcaactgccaaaaggctatgaaattatttgcc

SEQ ID NO: 814081 - DNA, 75 bp, synthetic construct
  source 1..75: mol_type = other DNA
attgttctggcggtgctgatcgacgcgctgttcgatttgcttatcgcactgctgaaggtgaaacgtaatgattga

SEQ ID NO: 814082 - DNA, 75 bp, synthetic construct
  source 1..75: mol_type = other DNA
ctgcatgttcagttaccactggcgttaccggtatttctgcgcagcctgcgggtggtgatggtgcaaactgtaggt

SEQ ID NO: 814083 - DNA, 75 bp, synthetic construct
  source 1..75: mol_type = other DNA
aatgccgccggaaagctgacctttaacattgacgggctggcaagggcgattgctcccctgcgcgatgcctgccac

SEQ ID NO: 814084 - DNA, 75 bp, synthetic construct
  source 1..75: mol_type = other DNA
tcaccaaaaataaaaacaggaatgaaatatcaaatattttatggcttggcaaaatccttaaacgtcggaaaggct

SEQ ID NO: 814085 - DNA, 75 bp, synthetic construct
  source 1..75: mol_type = other DNA
cgacattaaactatgacaaattattatacaattcattcatagataatgatatattcaacgggtatgatggggttt

SEQ ID NO: 814086 - DNA, 75 bp, synthetic construct
  source 1..75: mol_type = other DNA
tgcctgtgccgtctatctctaaagagaaatacatcgaactcactggcttatctgaagataccgttgacgccatgc

SEQ ID NO: 814087 - DNA, 75 bp, synthetic construct
  source 1..75: mol_type = other DNA
ggtgacagtaaaccgctatgaacgcgataaaaaggcccgagataaagcggtcgaatatcatggatgccagtgcaa

SEQ ID NO: 814088 - DNA, 75 bp, synthetic construct
  source 1..75: mol_type = other DNA
tagccgccgccttcgttattggggtgatttatatcacagcttctttttatgtcgccgtttttattgctgaattaa

SEQ ID NO: 814089 - DNA, 75 bp, synthetic construct
  source 1..75: mol_type = other DNA
ttttctggcccatcggcaacgcaaagtcaggccggaggattccaggggccgaacggcagcgtaacgactgtagaa

SEQ ID NO: 814090 - DNA, 75 bp, synthetic construct
  source 1..75: mol_type = other DNA
ccgggctacgttggctacggtgaaggcggcgtactgaccgaagcgattcgccagaaaccctactcggtagtactg

SEQ ID NO: 814091 - DNA, 75 bp, synthetic construct
  source 1..75: mol_type = other DNA
gtcacccgcgcggaaaacggcgcgaggatgctggaatcggtcatcgacggcaatatgctgccgccgctctccctg

SEQ ID NO: 814092 - DNA, 75 bp, synthetic construct
  source 1..75: mol_type = other DNA
aggtgctggtgcagtacgatgaaacgctgacggcgctggatgaactggaagcggcctggcaccagcagcagacgc

SEQ ID NO: 814093 - DNA, 75 bp, synthetic construct
  source 1..75: mol_type = other DNA
tcgtcttcgcaaggataaaaaacgtgaaaaggtaatgatcaacattgcagccatgacagtggatgcgcttgccga

SEQ ID NO: 814094 - DNA, 75 bp, synthetic construct
  source 1..75: mol_type = other DNA
tcgccttcggaaagacaagaaaagagaaaaggtaatgatcaaccttgctgctcttaccgttgatgcacttactga

SEQ ID NO: 814095 - DNA, 75 bp, synthetic construct
  source 1..75: mol_type = other DNA
tggctgatggacgtcttattcgccatcgtctccgtaaagataaaaagcgagaaaaggtaatgatcaatatcgcag

SEQ ID NO: 814096 - DNA, 75 bp, synthetic construct
  source 1..75: mol_type = other DNA
atggcgtgtccgttcgtgttgatgagaatgggcgctacaacttaaacgatctccatgcagcagcagttgcaaacg

SEQ ID NO: 814097 - DNA, 75 bp, synthetic construct
  source 1..75: mol_type = other DNA
ggaaacaatctggtgaaggcgcttgctgatgtcaacgccaagattattggccgtttttcgccatttttaatgtcc

SEQ ID NO: 814098 - DNA, 75 bp, synthetic construct
  source 1..75: mol_type = other DNA
ggctctgacgctacattcgccggtagttaaggattttctggctgaagtggtgaacgatctgcgcaggcagttcaa

SEQ ID NO: 814099 - DNA, 75 bp, synthetic construct
  source 1..75: mol_type = other DNA
ttcagacgaatacccatactttttattttctgaaaaacggcgtcgtatatcgcagcgatgacggggtaataatga

SEQ ID NO: 814100 - DNA, 75 bp, synthetic construct
  source 1..75: mol_type = other DNA
ggggtattccgtaaacgtcctgccaaccttgaggaagaaatgttgatcgaggtatatcaaaatgaaaataagggt

SEQ ID NO: 814101 - DNA, 75 bp, synthetic construct
  source 1..75: mol_type = other DNA
ttatgggaatgatgaactggggagaattgcaggattattacgccatactctcgggcagctcaatgtgcaaaaaca

SEQ ID NO: 814102 - DNA, 75 bp, synthetic construct
  source 1..75: mol_type = other DNA
gataaaacggattcagcagcactgttgccctgtatcgaacaggccagagaggatatccgtaccctgcgccaactg

SEQ ID NO: 814103 - DNA, 75 bp, synthetic construct
  source 1..75: mol_type = other DNA
atgtctgccggaccagcccactttcgactggtaaccagaaacaacatgaaatcattaaccacggaaactgcactg

SEQ ID NO: 814104 - DNA, 75 bp, synthetic construct
  source 1..75: mol_type = other DNA
acagattcggcagcactgttgccctgtatcgaacaggccagggagggtatccgtaccctctgccaactgcagctt

SEQ ID NO: 814105 - DNA, 75 bp, synthetic construct
  source 1..75: mol_type = other DNA
aacgccttcttcctggctataaacggatggaagaaaaaatagacgccgtaatccgtgagaaatacgggttacccc

SEQ ID NO: 814106 - DNA, 75 bp, synthetic construct
  source 1..75: mol_type = other DNA
aggacaatgggatggcaatcggaatcccgtttcttatcgcaacctcaaagacattggcattgaggctgacaagtt

SEQ ID NO: 814107 - DNA, 75 bp, synthetic construct
  source 1..75: mol_type = other DNA
tgccagcgctgaatgcctgccgggtttacccaccttcaactggtaacctggacaaaagacacagtatggaatcat

SEQ ID NO: 814108 - DNA, 75 bp, synthetic construct
  source 1..75: mol_type = other DNA
atggacgtttacgaagatctatacctccagacaaacaccagtactttttattttcttaaaaacggcgtcgtgtat

SEQ ID NO: 814109 - DNA, 75 bp, synthetic construct
  source 1..75: mol_type = other DNA
gccgatcccgaaactgatgcgttggggcgcaagcgacgtgcacttcgtgcgtccggtgcacaccgtgaccctgct

SEQ ID NO: 814110 - DNA, 75 bp, synthetic construct
  source 1..75: mol_type = other DNA
atatagagtacttgctcaggatactactgctgcggggaaaaaattccaacgctggctttttcatcaggtccttcc

SEQ ID NO: 814111 - DNA, 75 bp, synthetic construct
  source 1..75: mol_type = other DNA
cggtcgcgttttgcattatttgcttcctgtttgtggttgtattttgtggcgcactggctgcggtgattagcctta

SEQ ID NO: 814112 - DNA, 75 bp, synthetic construct
  source 1..75: mol_type = other DNA
ggaagataacctgccgcgcctgcaaaccgtgctgttccagcaacagctgggtacgctgcgtgacaaaactgaccg

SEQ ID NO: 814113 - DNA, 75 bp, synthetic construct
  source 1..75: mol_type = other DNA
agggcgttatggggatgcactatgcgcgtcacgatggagaagcggaagatgtcgcggtggcgctgaatgagcagt

SEQ ID NO: 814114 - DNA, 75 bp, synthetic construct
  source 1..75: mol_type = other DNA
tgagaagaacctcaatcttgatctgcaaacgctgaccgaagaagcagtgcgtctgtatggcgataagctgactaa

SEQ ID NO: 814115 - DNA, 75 bp, synthetic construct
  source 1..75: mol_type = other DNA
gcctcaaacccaaatggtcgcggcttaacgtactggtttactaaacccgaacattacgaaagtcgttcgcgcatt

SEQ ID NO: 814116 - DNA, 75 bp, synthetic construct
  source 1..75: mol_type = other DNA
catggaagaatggctgtaacgatgtctgcaatccatgggaggatgtctacaatccatgggagcgtggatggaacg

SEQ ID NO: 814117 - DNA, 75 bp, synthetic construct
  source 1..75: mol_type = other DNA
acgttgttgataattacatcggatcattctacatttccttcgacagaatataagaaatcatttaacagcgattct

SEQ ID NO: 814118 - DNA, 75 bp, synthetic construct
  source 1..75: mol_type = other DNA
atgctcaaacctcactacggaaccatattagtttctcgcaaggacgttaaacccggcacagcaattctttacaac

SEQ ID NO: 814119 - DNA, 75 bp, synthetic construct
  source 1..75: mol_type = other DNA
ttcactgattgaaaaaattcgcattatttcagatgcaatcgaagtttacctgaaccacaaaggtcaaccgttaat

SEQ ID NO: 814120 - DNA, 75 bp, synthetic construct
  source 1..75: mol_type = other DNA
gattaagcgcgagatgttcgcgaaactgcgtaccagtcgctatatgaaagcgagcggcggcgacagcgcggcggt

SEQ ID NO: 814121 - DNA, 75 bp, synthetic construct
  source 1..75: mol_type = other DNA
atgaaatcattaaccacggaaaccgcgctggatatcctcattgcgtggctgcaggacaatatcgactgcgaatcg

SEQ ID NO: 814122 - DNA, 75 bp, synthetic construct
  source 1..75: mol_type = other DNA
atgcctgccgggtttacccactttcgactggtaaccaggaacaacatgaaatcattaaccacggaaaccgctctg

SEQ ID NO: 814123 - DNA, 75 bp, synthetic construct
  source 1..75: mol_type = other DNA
atgcctgccgggtttacccactttccactggtaaccagtaacaacatgaaatcattaaccacggaaactgctctg

SEQ ID NO: 814124 - DNA, 75 bp, synthetic construct
  source 1..75: mol_type = other DNA
atgcctgccgggtttacccactttcaactggtaaccagaaacaacatgaaatcattaaccacggaaacggctctg

SEQ ID NO: 814125 - DNA, 75 bp, synthetic construct
  source 1..75: mol_type = other DNA
ttgtcaataactataatttatcgacaacttttattgtcaagtcacttgttggattgttattaattaattctcttt

SEQ ID NO: 814126 - DNA, 75 bp, synthetic construct
  source 1..75: mol_type = other DNA
ataaaacggattcggcagcactgctgtcctgcattgaacaggcgagggaggatatccataccctacgccaactgc

SEQ ID NO: 814127 - DNA, 75 bp, synthetic construct
  source 1..75: mol_type = other DNA
tggattggtgtgttgctgttcatgatatgaatgcagggtttgatgaaaagattttgttcccctcgtcagttgaaa

SEQ ID NO: 814128 - DNA, 75 bp, synthetic construct
  source 1..75: mol_type = other DNA
gcaggacaatatcgactgcgaatcgggaattatctttgacaacgataaggataaaacggattcggcagcactgct

SEQ ID NO: 814129 - DNA, 75 bp, synthetic construct
  source 1..75: mol_type = other DNA
atgaaatcattaaccacagaaacggcgctggatattctgattgcgtggctgcaggataatatcgactgcgaatcg

SEQ ID NO: 814130 - DNA, 75 bp, synthetic construct
  source 1..75: mol_type = other DNA
tgcgccagtcgccatctgattatcgccgagattgttcacggcaaagtcggtagaccacagcgcatttaccacaat

SEQ ID NO: 814131 - DNA, 75 bp, synthetic construct
  source 1..75: mol_type = other DNA
cagcgctggatattctgattgcgtggctgcaggacaatatcgactgcgaatcgggaattatctttgacaacgatg

SEQ ID NO: 814132 - DNA, 75 bp, synthetic construct
  source 1..75: mol_type = other DNA
atgaaatcattaaccacggaaaccgcactggatattctgattgcgtggctgcaggacaatatcgactgtgaatcc

SEQ ID NO: 814133 - DNA, 75 bp, synthetic construct
  source 1..75: mol_type = other DNA
atgaaatcattaacgacagaaacagcgctggatatcctcattgcgtggctgcaggacaatatcgactgcgaatcg

SEQ ID NO: 814134 - DNA, 75 bp, synthetic construct
  source 1..75: mol_type = other DNA
gatgttttaagtttcattatattaagttttgggcttccgggcttgcttgtgtttgtcctgagtatatccttatta

SEQ ID NO: 814135 - DNA, 75 bp, synthetic construct
  source 1..75: mol_type = other DNA
ttatggtggcgtggtcaaacagaccgtagcggcacgcgtcaacgtgcgaacgggcgaggtagattcaatactcga

SEQ ID NO: 814136 - DNA, 75 bp, synthetic construct
  source 1..75: mol_type = other DNA
gagaagctgataaaagccagcatgaatgatgattcctcgtataaacatgtttcaacggtctaccatctgattttg

SEQ ID NO: 814137 - DNA, 75 bp, synthetic construct
  source 1..75: mol_type = other DNA
ctatggtggtgtcgtgaagcaaacaattgcagcgcgtgttaatgtgaaaacgggtgaaatagtttcgatactaaa

SEQ ID NO: 814138 - DNA, 75 bp, synthetic construct
  source 1..75: mol_type = other DNA
atgaaatcattaaccatggaaaccgcactggatattctgattgcgtggctgcaggacaatatcgactgcgaatcc

SEQ ID NO: 814139 - DNA, 75 bp, synthetic construct
  source 1..75: mol_type = other DNA
aatgcatgatgcaacagaagcatattgccaggacatccccgcaccactgaaacaccttcttcctgactataaacg

SEQ ID NO: 814140 - DNA, 75 bp, synthetic construct
  source 1..75: mol_type = other DNA
acaatatcgactgcgaatcgggaattatctttgacaacaatgaggataaaacggattcagcagcactgttgccct

SEQ ID NO: 814141 - DNA, 75 bp, synthetic construct
  source 1..75: mol_type = other DNA
gcgttttcccgtgcccgtcagcaggttgcctcgactgaaaacagcctgaacgaggcgcgtgggcgacttcagcgc

SEQ ID NO: 814142 - DNA, 75 bp, synthetic construct
  source 1..75: mol_type = other DNA
cgatcagcttaatgaacgtgcggaaaactttcttaacctggtcgataaagtagataatcaagttgagcaacatct

SEQ ID NO: 814143 - DNA, 75 bp, synthetic construct
  source 1..75: mol_type = other DNA
gcgaatgtactggcccggatgctgtcagggttgtactcccgtgtcaggaggagggtaaagaactctgaaaaatag

SEQ ID NO: 814144 - DNA, 75 bp, synthetic construct
  source 1..75: mol_type = other DNA
ttatgcctgcatgagtgagtatacatttaccaaagatgatgagttgaaactcggtgatgttcttggatggtgctt

SEQ ID NO: 814145 - DNA, 75 bp, synthetic construct
  source 1..75: mol_type = other DNA
agcattcctttctcggtcatgctggttgttccgcttggtgtcctgggggctgtctgtgctactttgttgcgcggc

SEQ ID NO: 814146 - DNA, 75 bp, synthetic construct
  source 1..75: mol_type = other DNA
cccccgtgcgctggctgttcgcgggcagtggaatgagccgactgttgcgccaggactaccggttatgcctccggt

SEQ ID NO: 814147 - DNA, 75 bp, synthetic construct
  source 1..75: mol_type = other DNA
ggtatgcaggctggggcttaaccgacgatcgccatccgcagtccgctttgttatctgcccgacgcggttctgcca

SEQ ID NO: 814148 - DNA, 75 bp, synthetic construct
  source 1..75: mol_type = other DNA
ctgctgatcggcatcatgggggggataatctggtttcagggcacgatcatcacctcgcgcctgagcgaaatggac

SEQ ID NO: 814149 - DNA, 75 bp, synthetic construct
  source 1..75: mol_type = other DNA
agccggttaatgcgctcgtgaagcagcatgaacgccaattccagctggaaaagcagcggacgcgctatcatggcc

SEQ ID NO: 814150 - DNA, 75 bp, synthetic construct
  source 1..75: mol_type = other DNA
tcgctgttgcgacacgtttcccgggtttacgtcgtgacctcccaatacggctttgaagccttgctggcaggaaaa

SEQ ID NO: 814151 - DNA, 75 bp, synthetic construct
  source 1..75: mol_type = other DNA
cgtggtatggggtgtaaagggagaacagcaatggcgagccgaagcgcagcgaaaatcactgccgttatggcgaat

SEQ ID NO: 814152 - DNA, 75 bp, synthetic construct
  source 1..75: mol_type = other DNA
gcaattacaacgtcgacatctgcaacagcgtaatggttatttatgggcgccaggcttaacgctgtggaagtcagc

SEQ ID NO: 814153 - DNA, 75 bp, synthetic construct
  source 1..75: mol_type = other DNA
gactgccatccttaagccgttcctgaaaaccgcaggcaaccgggtgcgttttgccgctaaatgcccgcaggccag

SEQ ID NO: 814154 - DNA, 75 bp, synthetic construct
  source 1..75: mol_type = other DNA
taacaacctcctcggtggttcagattatttcaccaaagagttgaaaatttacccaggagaaaacttcgatatcag

SEQ ID NO: 814155 - DNA, 75 bp, synthetic construct
  source 1..75: mol_type = other DNA
gccgcgctggttgtggcgacggccattatgttcctcggcggtatgctggcattgatgattaagttgctgccgtgg

SEQ ID NO: 814156 - DNA, 75 bp, synthetic construct
  source 1..75: mol_type = other DNA
gcctcgaccgtgaccagtacgcctgcctgtgggtggagcaccgcgacaagggacggcttgagctgaattttgtta

SEQ ID NO: 814157 - DNA, 75 bp, synthetic construct
  source 1..75: mol_type = other DNA
cgcggttgggacgtgaaagaaagtgctgtgatggctattaccgccaacgaactggataccgctcgccgtcgtact

SEQ ID NO: 814158 - DNA, 75 bp, synthetic construct
  source 1..75: mol_type = other DNA
catcgccatcaaaggcaccattaaacaggcggtgatgctcggactggcagcaaccatttcgcataccgcagtggt

SEQ ID NO: 814159 - DNA, 75 bp, synthetic construct
  source 1..75: mol_type = other DNA
gcctgcccttctatgccggttggggtttaaccgtcgatgaacatcgctgcccgcgtcgcgagcgaaaattaacgt

SEQ ID NO: 814160 - DNA, 75 bp, synthetic construct
  source 1..75: mol_type = other DNA
atgaaacgcagaagaagattgctatgcagggtgatattgagcagtttactaagatttctcagaaatacagcaaag

SEQ ID NO: 814161 - DNA, 75 bp, synthetic construct
  source 1..75: mol_type = other DNA
atatgcctgatatttgcaaaactcaagcattgcttgagcttgaaaagaaattttacccagctttaaaatcacagc

SEQ ID NO: 814162 - DNA, 75 bp, synthetic construct
  source 1..75: mol_type = other DNA
atgacaaacgatatttacattaacggtaaaaagattgatagctttggagactggtcaccacagactgaacatcca

SEQ ID NO: 814163 - DNA, 75 bp, synthetic construct
  source 1..75: mol_type = other DNA
ctggagaatacctggctttttgaacgtctggcagaacgcaaaacgcttattgaatcactctttggcgagcagctc

SEQ ID NO: 814164 - DNA, 75 bp, synthetic construct
  source 1..75: mol_type = other DNA
attatccagaaagagttcgccggttttgacgacaccaaagaacgtctcgatctgctggcgctcgataaaaaaggc

SEQ ID NO: 814165 - DNA, 75 bp, synthetic construct
  source 1..75: mol_type = other DNA
gttattcccacaccggaagccgaatcctacatgatcggtatggctcaaaaggaagcagaagaacaatcaaccagc

SEQ ID NO: 814166 - DNA, 75 bp, synthetic construct
  source 1..75: mol_type = other DNA
aggatgaattgtcacagaaaccatttgtttattaccaatatgcagacaatgatggttttggtacttttcctgaga

SEQ ID NO: 814167 - DNA, 75 bp, synthetic construct
  source 1..75: mol_type = other DNA
aagatggttaaagcttcaaggggtgctggtcaatttatttatatgactaataagagcgatgaagaactctgtgaa

SEQ ID NO: 814168 - DNA, 75 bp, synthetic construct
  source 1..75: mol_type = other DNA
gtatgtcggctccggcaggtgaaaagtcccccgctcaggggggtaaaacagatgaaccggtaacggcaaaaaagc

SEQ ID NO: 814169 - DNA, 75 bp, synthetic construct
  source 1..75: mol_type = other DNA
gaaagattgatagcttcggtgactggtcaccacagactgaacatccagctatcactattcagcgtaaagaacacg

SEQ ID NO: 814170 - DNA, 75 bp, synthetic construct
  source 1..75: mol_type = other DNA
atgcctgatatctgcaaaactgaagcattatttaatctcgagcgtgaatattacccactgctaaaagaacagcgt

SEQ ID NO: 814171 - DNA, 75 bp, synthetic construct
  source 1..75: mol_type = other DNA
aagagatgcctgatatttgcaagagtgaagcattatttaatcttgagcgggaatattacccactgctgaaagcac

SEQ ID NO: 814172 - DNA, 75 bp, synthetic construct
  source 1..75: mol_type = other DNA
attcgcaaaccgccgctcggaatcaggcaatcacaatgcgcgggcaagatatccaggcgaatttaggtcagcagc

SEQ ID NO: 814173 - DNA, 75 bp, synthetic construct
  source 1..75: mol_type = other DNA
cattcaggctctggctggctggatcgctgaacagattggcgctgacgttaaccacgcaactcgtgctgggctgct

SEQ ID NO: 814174 - DNA, 75 bp, synthetic construct
  source 1..75: mol_type = other DNA
ctactgacaaaggcgaatggctactgtatcgcgctcatgtgaagggcgaaagcaccgaggcacttgttccgaaca

SEQ ID NO: 814175 - DNA, 75 bp, synthetic construct
  source 1..75: mol_type = other DNA
ctcaaccgtctgaccatgctggagaaactgcgcgaactgttcctgcgagttgcggatatttcgctgttgcagtaa

SEQ ID NO: 814176 - DNA, 75 bp, synthetic construct
  source 1..75: mol_type = other DNA
gccttgccgggcggctatggcctgtactacgattataatgataccggacagctaacccggttgacgacaaccgat

SEQ ID NO: 814177 - DNA, 75 bp, synthetic construct
  source 1..75: mol_type = other DNA
aaaagcactgcgcagcctggcagagtcctttgctgcgaacttcactgcggagctggataacgctggcctcgcaca

SEQ ID NO: 814178 - DNA, 75 bp, synthetic construct
  source 1..75: mol_type = other DNA
gcgattgcccaggctttcgacgccgaaggcaaaccgagtaaagcagcagaaggctgggcgcgtggctgcgggatc

SEQ ID NO: 814179 - DNA, 75 bp, synthetic construct
  source 1..75: mol_type = other DNA
ggaagataatctgccgcgtctgcaaaccgtgctgttccagcaacagcttggcacactgcgtgacaaaactgaccg

SEQ ID NO: 814180 - DNA, 75 bp, synthetic construct
  source 1..75: mol_type = other DNA
tggtaacgagaaagtcgttcgtccacgtttggcggatgccgagttcttcttcaacactgaccgtaaaaaacgtct

SEQ ID NO: 814181 - DNA, 75 bp, synthetic construct
  source 1..75: mol_type = other DNA
accgtgctgttccagcaacagttggggacgctgcgcgacaaaactgaccgcatccaggcgctggctggctggatt

SEQ ID NO: 814182 - DNA, 75 bp, synthetic construct
  source 1..75: mol_type = other DNA
gctgaacagattggcgctgacgttaaccacgctacccgtgcgggtctgctgtctaagtgcgacctgatgaccaac

SEQ ID NO: 814183 - DNA, 75 bp, synthetic construct
  source 1..75: mol_type = other DNA
atcagccgcgctttgccggtgatgacctgccgtccaacccggtagcctgtgcgctggcgattgctgacaagatgg

SEQ ID NO: 814184 - DNA, 75 bp, synthetic construct
  source 1..75: mol_type = other DNA
cctgccgtctaacccggtagcctgtgcgctggcgattgctgaaaagatggatactctggcgggtatcttcggtat

SEQ ID NO: 814185 - DNA, 75 bp, synthetic construct
  source 1..75: mol_type = other DNA
ggcagcgtggaagaaatccagcgcccggacggcgtgcgggaactgatgcgccagaacagcgaaaagctaccggaa

SEQ ID NO: 814186 - DNA, 75 bp, synthetic construct
  source 1..75: mol_type = other DNA
gcgacattctgccgtatatggccttccgtccgattatcaggcacccacgtctgatggaaagtagcctgtttatgc

SEQ ID NO: 814187 - DNA, 75 bp, synthetic construct
  source 1..75: mol_type = other DNA
gccaacagggtgatttactggcgcggattatgccgggcggagccacctggcgctggagccatgacgccctgcacc

SEQ ID NO: 814188 - DNA, 75 bp, synthetic construct
  source 1..75: mol_type = other DNA
tgaagggtttatgacccgctggcgggatacggataaaacctgcgtggatatccgttacgacccgcaggggcgcgc

SEQ ID NO: 814189 - DNA, 75 bp, synthetic construct
  source 1..75: mol_type = other DNA
gaacccgcggcagttcggcgaatttgtcgatcacctggggatgaacagtctcgggcccgaaaaatactttgacct

SEQ ID NO: 814190 - DNA, 75 bp, synthetic construct
  source 1..75: mol_type = other DNA
aggcacgacttgatacctttaaatcccaagcatacctgacagcggttcaggccatgcgaggcatgggcgcacttt

SEQ ID NO: 814191 - DNA, 75 bp, synthetic construct
  source 1..75: mol_type = other DNA
atacgacagactcatcgcaaatgaaactaatgccttaaaacttgctgaattgcaggacaagagattgcagaatca

SEQ ID NO: 814192 - DNA, 75 bp, synthetic construct
  source 1..75: mol_type = other DNA
ataaccgggaaggtgaggttatccaggttgccctgccgggcggctatggcctgttctacgagtataatgataccg

SEQ ID NO: 814193 - DNA, 75 bp, synthetic construct
  source 1..75: mol_type = other DNA
acggctatacgctcacgcttgcctggcaacaggctcatctgatgagcattgacctggcaacgccgcagcgtcagc

SEQ ID NO: 814194 - DNA, 75 bp, synthetic construct
  source 1..75: mol_type = other DNA
ccggacagcttgttgcagaaacagacttcaccggacgcacgctgacctatggctatgatgccgctggccgctgca

SEQ ID NO: 814195 - DNA, 75 bp, synthetic construct
  source 1..75: mol_type = other DNA
cgccacctggacgggcgactccggccagtttccactgtgcgaggaactgttcacttacgacaaaaacctgaacat

SEQ ID NO: 814196 - DNA, 75 bp, synthetic construct
  source 1..75: mol_type = other DNA
ctggtagaactgattgaaatcgacggtgaaaccaaactccgctatcgccctttcaaagtggactacgcgattttg

SEQ ID NO: 814197 - DNA, 75 bp, synthetic construct
  source 1..75: mol_type = other DNA
gcgcaccacagcaggtatcacagaacgctttacccgaaacctgatggggcatctggcatcctggcagatagcgga

SEQ ID NO: 814198 - DNA, 75 bp, synthetic construct
  source 1..75: mol_type = other DNA
agatgcgtgaggccggggtggacgcgcgcacgctcgccagtttcctcagtgaaacccggctggccattcagggcg

SEQ ID NO: 814199 - DNA, 75 bp, synthetic construct
  source 1..75: mol_type = other DNA
gcagtaccggttttatggcacacaactgccggaggtacgactggtcagcgaggcggacaagcgaagccgttacag

SEQ ID NO: 814200 - DNA, 75 bp, synthetic construct
  source 1..75: mol_type = other DNA
gcaggagaaagccgcccgtgagctggcggagcagtcccggcgtgagctgctgtcggtagtcccgcagaaagatga

SEQ ID NO: 814201 - DNA, 75 bp, synthetic construct
  source 1..75: mol_type = other DNA
agtgaaattcccgcctcaattaaaaatatggtggttgatacccacgatattaatgatttcattatgaagccgtta

SEQ ID NO: 814202 - DNA, 75 bp, synthetic construct
  source 1..75: mol_type = other DNA
accacccagtttcgggcggtgatgggtgccctgaacacgctgtctgaatctgtccgaccgcaggttatcggtctg

SEQ ID NO: 814203 - DNA, 75 bp, synthetic construct
  source 1..75: mol_type = other DNA
cggggcgctgctgacggaaattcgtattgaggatgacggaatgcgcgtggtgctcagcgaagagtcccggctgcg

SEQ ID NO: 814204 - DNA, 75 bp, synthetic construct
  source 1..75: mol_type = other DNA
gggcaggccgcgcgtaaagtggagagcgtgtctgcggtccggcttgccagtgaccaggttcgccagtcgaccggc

SEQ ID NO: 814205 - DNA, 75 bp, synthetic construct
  source 1..75: mol_type = other DNA
cggcagggaacggggaatgccctgtctgtgctgaaagaagccggtatcccgcagtaccggttttatggcacacaa

SEQ ID NO: 814206 - DNA, 75 bp, synthetic construct
  source 1..75: mol_type = other DNA
atggtgattgcagccgacggtcgcagtggccagtttatgtcagaaagtccgcatctggcaggccatgtgatgctg

SEQ ID NO: 814207 - DNA, 75 bp, synthetic construct
  source 1..75: mol_type = other DNA
cctgttgttggcagtacagagggtatccggactacaggccagcccgccagcgcgtcttccgctcagatatctgaa

SEQ ID NO: 814208 - DNA, 75 bp, synthetic construct
  source 1..75: mol_type = other DNA
aggtacgtgaacagatactgcgtaccgaacgagaatgggtggtgaatatgccggaaaaagaaatagagatggaaa

SEQ ID NO: 814209 - DNA, 75 bp, synthetic construct
  source 1..75: mol_type = other DNA
cgtgcgtccgcaggtcatcggcctgggacccacgcaccgggccgtgcatgagatgcgtgaggccggggtggaggc

SEQ ID NO: 814210 - DNA, 75 bp, synthetic construct
  source 1..75: mol_type = other DNA
cggatgcaattattggttccggcggaacgaaaagaacggttcgtattactgcgggcgttggacgggaacagggta

SEQ ID NO: 814211 - DNA, 75 bp, synthetic construct
  source 1..75: mol_type = other DNA
ctccggatgagtttctgtatcgcgcttgcgagctggtgcgtatgggcctgggcgttccggcaatgtacaacgatg

SEQ ID NO: 814212 - DNA, 75 bp, synthetic construct
  source 1..75: mol_type = other DNA
cgtgctaaagtggtggaaaaaatctttaaccaattaccggtaacaattcgcccagacgaattaatcgttggagcg

SEQ ID NO: 814213 - DNA, 75 bp, synthetic construct
  source 1..75: mol_type = other DNA
atgaactggctacatcctatatgttgcctgaaacgcttgattgtatggcagaaaatgtcttcacggtcggcaact

SEQ ID NO: 814214 - DNA, 75 bp, synthetic construct
  source 1..75: mol_type = other DNA
gtagaccgaaaatcacgttatacgatcatccttagactcaggggcaaagattctgtctcagtaaatcaggtgaac

SEQ ID NO: 814215 - DNA, 75 bp, synthetic construct
  source 1..75: mol_type = other DNA
ctagatctggttgctgctcagctaaacaacagaccgagaaagacactgaagttcaaaacactgaaccgccccggg

SEQ ID NO: 814216 - DNA, 75 bp, synthetic construct
  source 1..75: mol_type = other DNA
cgtaaatgtgcgctgatctactgccaggaagttgagaaatataccaacccgcgcggtggccagttccaggctggt

SEQ ID NO: 814217 - DNA, 75 bp, synthetic construct
  source 1..75: mol_type = other DNA
ttgagttctttatgaatcgcttccgtctgctggaggccgcgccgcgcgtggagtttagccagtatactggccttt

SEQ ID NO: 814218 - DNA, 75 bp, synthetic construct
  source 1..75: mol_type = other DNA
gcgcttggcgatctgcgccaggccattgaactaaatccgccgcatctttcctggtatcagttgaccatcgaaccc

SEQ ID NO: 814219 - DNA, 75 bp, synthetic construct
  source 1..75: mol_type = other DNA
ctggcaagcgagctggggctgcgtagctttaaccttgatttaatgcatgggctaccggatcaatcgctggaagag

SEQ ID NO: 814220 - DNA, 75 bp, synthetic construct
  source 1..75: mol_type = other DNA
ccaatagtatttcacggcctcagaatgaggtttactccacctcaacacaacaagggggggggacaaaaacaaaca

SEQ ID NO: 814221 - DNA, 75 bp, synthetic construct
  source 1..75: mol_type = other DNA
ctcacagaatgtgcggattactggcagataacggaacatggtaaattattcttaaactcacttcttgaattattc

SEQ ID NO: 814222 - DNA, 75 bp, synthetic construct
  source 1..75: mol_type = other DNA
cagttattaaccgcagcgggttatcagcaatatgaaacttccgcttactccaaacccggttatcagtgccagcac

SEQ ID NO: 814223 - DNA, 75 bp, synthetic construct
  source 1..75: mol_type = other DNA
agccgttccgtctggtacaacagcgcagcgccatcgatacggtggtgatgcaggagattgtccgtcagaccccgg

SEQ ID NO: 814224 - DNA, 75 bp, synthetic construct
  source 1..75: mol_type = other DNA
tgggagggcgatttagtctcaggtacaaaaaactctcatatagccacacttgtagaccgaaaatcacgttatacg

SEQ ID NO: 814225 - DNA, 75 bp, synthetic construct
  source 1..75: mol_type = other DNA
aaagcagccggagtatcagcagaaacggcacagcaacgcataaaagaattccactcagaaaaatttcttcagtct

SEQ ID NO: 814226 - DNA, 75 bp, synthetic construct
  source 1..75: mol_type = other DNA
atcgagcagttgcgtgaagagagccacgatatcaaagaagatttttcaaatttaatcagaacattgtcatcgtaa

SEQ ID NO: 814227 - DNA, 75 bp, synthetic construct
  source 1..75: mol_type = other DNA
acctgaccatactggcaaaccaccttttccagaagcacagtattgttgactggtcattctgcatcgtgccgtaca

SEQ ID NO: 814228 - DNA, 75 bp, synthetic construct
  source 1..75: mol_type = other DNA
taataacgggtccagtaacgtgccacctattgccgtggctaacattgcgttgttcatccaggagaaaggaagcgt

SEQ ID NO: 814229 - DNA, 75 bp, synthetic construct
  source 1..75: mol_type = other DNA
tataaggacttcggaaagaacaaccctattcaggatgatgatcggattatttacacctacgccggtaggcaggtg

SEQ ID NO: 814230 - DNA, 75 bp, synthetic construct
  source 1..75: mol_type = other DNA
ggcagtactttcctaaaaagacatgtcttgcccaatatactcaatatgaactagatctggttgctgctcagctaa

SEQ ID NO: 814231 - DNA, 75 bp, synthetic construct
  source 1..75: mol_type = other DNA
catctagaatttactatcagcaccggcgttaaagtttacttctgcgatcctcagagtccttggcagcggggaaca

SEQ ID NO: 814232 - DNA, 75 bp, synthetic construct
  source 1..75: mol_type = other DNA
tcgcatagccttcgccatggcaggcgtcatacccgcaaaggcgaaagaggtacgattaacatagtgaacggaaca

SEQ ID NO: 814233 - DNA, 75 bp, synthetic construct
  source 1..75: mol_type = other DNA
aacccgttgttcctttatggcggcacgggtctgggtaaaactcacctgctgcatgcggtgggtaacggcattatg

SEQ ID NO: 814234 - DNA, 75 bp, synthetic construct
  source 1..75: mol_type = other DNA
gctaaacaacagaccgagaaagacactgaagttcaaaacaccgaaagagataattgaaaggagtgttgcattgac

SEQ ID NO: 814235 - DNA, 75 bp, synthetic construct
  source 1..75: mol_type = other DNA
atgcgtaagataacaaccgccgaggcactggcggcgcaaattcaggacggcgcaaccattgccattagcggtaac

SEQ ID NO: 814236 - DNA, 75 bp, synthetic construct
  source 1..75: mol_type = other DNA
caggcgcagttgtgcacatcggtcttcctatcactgctgaattcgaaacactggatatcaatatcaacggccagg

SEQ ID NO: 814237 - DNA, 75 bp, synthetic construct
  source 1..75: mol_type = other DNA
aagcacgatatcaccgaaagcatgctggagctggcgacggatgtttgtcgtgatatcaaccaggctgccgggcaa

SEQ ID NO: 814238 - DNA, 75 bp, synthetic construct
  source 1..75: mol_type = other DNA
tggcaacaatttgaagccctgtttcgctgtctgagttacaccacgatgatcgacagcattaaagatctgcactgg

SEQ ID NO: 814239 - DNA, 75 bp, synthetic construct
  source 1..75: mol_type = other DNA
gaatgaagcgcagctgatgcgtgatttcgtcgccgatggcggctcgctgattggactggtgaaaaagcattgtga

SEQ ID NO: 814240 - DNA, 75 bp, synthetic construct
  source 1..75: mol_type = other DNA
gttgtcagaggcggtaaaatccggccagccgctggctgatgtccggactgaaatcgcccggcaggtgagcagcgg

SEQ ID NO: 814241 - DNA, 75 bp, synthetic construct
  source 1..75: mol_type = other DNA
accgctttatggccattcagggctacgccggggtggggaaaaccacccagttccgggcggtgatgggtgccctga

SEQ ID NO: 814242 - DNA, 75 bp, synthetic construct
  source 1..75: mol_type = other DNA
ggctatgacctgacgttttctgcccccaaaagtgtctccgtaatggcgctggtcggggaagaccggcgctttatt

SEQ ID NO: 814243 - DNA, 75 bp, synthetic construct
  source 1..75: mol_type = other DNA
ttcaatcgaaacgtgccacctgcgcttcgcaatgtggccacaactaactggcaaatggcgcgccagacattcagc

SEQ ID NO: 814244 - DNA, 75 bp, synthetic construct
  source 1..75: mol_type = other DNA
gttaaggttcgccagcttgacccactcccgctttctgttcttgctgtattgcctcgcctcaccgtcggaggcttc

SEQ ID NO: 814245 - DNA, 75 bp, synthetic construct
  source 1..75: mol_type = other DNA
atatggtggtgtagagaacagaccaggtacgcgctttgttggtcctgctaaataccctgatcgcaagtgccggtt

SEQ ID NO: 814246 - DNA, 75 bp, synthetic construct
  source 1..75: mol_type = other DNA
aggctgctgacgtaacagctcaggctgtagcgacctggtcagcaacagccaaaaaagacaccaccagtaagctgg

SEQ ID NO: 814247 - DNA, 75 bp, synthetic construct
  source 1..75: mol_type = other DNA
ctctggtaacggtgtttaccggcatgggtgtggcgcaggctgctgacgtaacagctcaggctgtagcgacctggt

SEQ ID NO: 814248 - DNA, 75 bp, synthetic construct
  source 1..75: mol_type = other DNA
gtggccaacgccggtgaagaaccgagcgtgatcgtggccaacgtcaaggccggcgaaggcagctacggctacaac

SEQ ID NO: 814249 - DNA, 75 bp, synthetic construct
  source 1..75: mol_type = other DNA
tcgttgctgattagctggcgtatgccagtggtggtgtcctttgatatgaaaaaaacgctggatcagttcaccgaa

SEQ ID NO: 814250 - DNA, 75 bp, synthetic construct
  source 1..75: mol_type = other DNA
tgcggcggtctccctgttactgacagagtggcgccagccaaaaacggtcagttttgatatggccggaaccgtgaa

SEQ ID NO: 814251 - DNA, 75 bp, synthetic construct
  source 1..75: mol_type = other DNA
aacggtaaagcgttatggaaccaaccggcgggccatctggaagcggatgagacgctagtggaagcggccgcgcgt

SEQ ID NO: 814252 - DNA, 75 bp, synthetic construct
  source 1..75: mol_type = other DNA
gtagatatcagcttcccggaaatcgagaagtttgaccgtctgccggaaccgcgcgccgaagggccgaccgcgttt

SEQ ID NO: 814253 - DNA, 75 bp, synthetic construct
  source 1..75: mol_type = other DNA
tggcatcgcaagaaggcgagcacattcgccagcgcgcccactatgtcgatattatttttgggccgcaaacgctgc

SEQ ID NO: 814254 - DNA, 75 bp, synthetic construct
  source 1..75: mol_type = other DNA
tcgttgctgattagctggcgtacgccaactgtggtgtcatttgatatgaaaaaaacgctggatcagttcactgaa

SEQ ID NO: 814255 - DNA, 75 bp, synthetic construct
  source 1..75: mol_type = other DNA
gaagacatcatcagatggtgctcatacccactcgctgtccggcacagcagcatctgcaggtgcacatgcacatac

SEQ ID NO: 814256 - DNA, 75 bp, synthetic construct
  source 1..75: mol_type = other DNA
gattaacgaatttcgcctggatcaacacatccggcgatacatatgatatttacgttgagattggcaattatgcga

SEQ ID NO: 814257 - DNA, 75 bp, synthetic construct
  source 1..75: mol_type = other DNA
attacgctgccatttctttcgtattacaccgtaaacgaaggcgaacgcggcattttattgcgctatggcaagatc

SEQ ID NO: 814258 - DNA, 75 bp, synthetic construct
  source 1..75: mol_type = other DNA
accagacaagcgtcagcagcgaagaacagcgccacgacggcatccacgaaggcgacagaggcagctggcagtgcg

SEQ ID NO: 814259 - DNA, 75 bp, synthetic construct
  source 1..75: mol_type = other DNA
tcccagacaagggccgcttcctgagtaacattaatgtttacagcaaaggtgaagtggataagaaaaaggggaagc

SEQ ID NO: 814260 - DNA, 75 bp, synthetic construct
  source 1..75: mol_type = other DNA
tgccacaagcgagttccatcgtttacatcgcattgattggtggcgctggttacaacgtcggttccccacatcagg

SEQ ID NO: 814261 - DNA, 75 bp, synthetic construct
  source 1..75: mol_type = other DNA
ggcggcgggcgttgcggtgctgatcaaacaactgatgccacaaatcaaagtgatcgccgtagaagcggaagactc

SEQ ID NO: 814262 - DNA, 75 bp, synthetic construct
  source 1..75: mol_type = other DNA
caacattaacgcggtcagtaaaacagactttgctgataagcgtggtatgcgttatgtgcgggttaacgctcctgc

SEQ ID NO: 814263 - DNA, 75 bp, synthetic construct
  source 1..75: mol_type = other DNA
tttaacgacgttcagatccgctcggataaacgcaacaagcgaaatctggtaaagctggataatgcgttagatcgt

SEQ ID NO: 814264 - DNA, 75 bp, synthetic construct
  source 1..75: mol_type = other DNA
ccaccgggtcctgccggagagagagggccgacaggcgaagccggacctgcgggtcaaccggggcacaaaggagac

SEQ ID NO: 814265 - DNA, 75 bp, synthetic construct
  source 1..75: mol_type = other DNA
acttttcatggaagaaaagcttgccccgattttccatgctgattcatatggttaccgaccaagcaaatcagctca

SEQ ID NO: 814266 - DNA, 75 bp, synthetic construct
  source 1..75: mol_type = other DNA
cagagttgtgaaaatggagaattaataacccgaacacgaggcactccgcaggacggggtcattagtccgctactt

SEQ ID NO: 814267 - DNA, 75 bp, synthetic construct
  source 1..75: mol_type = other DNA
aacgaatagcgggagtcaacctactggaatgtttccggcagggagtactcaagttagcgggactaatcaggttgg

SEQ ID NO: 814268 - DNA, 75 bp, synthetic construct
  source 1..75: mol_type = other DNA
gaacagaaagcgcacggtgtgatcaccgcctcggcgggtaaccatgcgcaaggtgtcgcgttttcctccgctcgg

SEQ ID NO: 814269 - DNA, 75 bp, synthetic construct
  source 1..75: mol_type = other DNA
atgatggcagactcacaacctctctccggcgccccggaaggcgccgaatatttaagagcggtgctgcgcgcgccg

SEQ ID NO: 814270 - DNA, 75 bp, synthetic construct
  source 1..75: mol_type = other DNA
aagagcggtgctgcgcgcgccggtctacgaagcggcgcaggtcacgccgctacaaaaaatggaaaagctctcgtc

SEQ ID NO: 814271 - DNA, 75 bp, synthetic construct
  source 1..75: mol_type = other DNA
gggcgtcgcgttttcttccgcacggttaggcgtgaaggcgctgatcgtcatgccaaccgccaccgccgatatcaa

SEQ ID NO: 814272 - DNA, 75 bp, synthetic construct
  source 1..75: mol_type = other DNA
ggcggcaggcgtagcggtactgatcaaacaactgatgccgcaagtcaaagttatcgctgtagaagcagaagattc

SEQ ID NO: 814273 - DNA, 75 bp, synthetic construct
  source 1..75: mol_type = other DNA
gcccagcacaacattcgcggtgagcgcctggcgcatgtgctctcgggagctaacgtcaatttccacggcctgcgc

SEQ ID NO: 814274 - DNA, 75 bp, synthetic construct
  source 1..75: mol_type = other DNA
ttccacattaaaccttcagaagcaggcgcggtttataccacctacaacaccattgaagcattaaaagatcgtctg

SEQ ID NO: 814275 - DNA, 75 bp, synthetic construct
  source 1..75: mol_type = other DNA
ggcgaagagcgcgagacggcgattggcttaaccaaagacaaacagggcgacagcaaagtccgcatcgacggtact

SEQ ID NO: 814276 - DNA, 75 bp, synthetic construct
  source 1..75: mol_type = other DNA
gcgtcattcgccatgagcaggaggcgtttgttctccacgggcgattacagggcgaagagcgcgagacggcgattg

SEQ ID NO: 814277 - DNA, 75 bp, synthetic construct
  source 1..75: mol_type = other DNA
aacaggaacgtcccgccatccctcaggaatgtggccaccacgaactggcagatggcgcgccggacatttggaggc

SEQ ID NO: 814278 - DNA, 75 bp, synthetic construct
  source 1..75: mol_type = other DNA
tcaggaatttttaaactcactccgaggcacaacacaatttgcgggtaccgattaccgcagcaaagacctcacccc

SEQ ID NO: 814279 - DNA, 75 bp, synthetic construct
  source 1..75: mol_type = other DNA
cagaaggccgacacaacacgaatgatggtgccttttttccggcagttctgggatatgggagcaaaggataaagcg

SEQ ID NO: 814280 - DNA, 75 bp, synthetic construct
  source 1..75: mol_type = other DNA
agcagcgtaatgcggcgctgaggcaggtgtcacgttacgaacagctccgcccgtgggataaagaactgatcccgc

SEQ ID NO: 814281 - DNA, 75 bp, synthetic construct
  source 1..75: mol_type = other DNA
tcaagaatttttaaactcactccggggcacaacacaatttgcgggtaccgattaccgcagcaaagacctcacccc

SEQ ID NO: 814282 - DNA, 75 bp, synthetic construct
  source 1..75: mol_type = other DNA
gagctgtgggaagaaaccggcatcagcgcgcagccgcaacactttattcgtatgcatcagtggattgcgcctgat

SEQ ID NO: 814283 - DNA, 75 bp, synthetic construct
  source 1..75: mol_type = other DNA
aaaacggtgcggtggtatttggctaatgaaagctggtggaagcgggtgcaggacggcagttatcagggtgagcgt

SEQ ID NO: 814284 - DNA, 75 bp, synthetic construct
  source 1..75: mol_type = other DNA
ggaggtgccgtcacgctggaatcaccgggggctgtagtgcacatcggcctgccaataactgctgaattcgaaaca

SEQ ID NO: 814285 - DNA, 75 bp, synthetic construct
  source 1..75: mol_type = other DNA
gttgagaaacacgcgcgcaggctgctcgatgattgggcgaaaaaggtggcttccggacagcagatacccgatccg

SEQ ID NO: 814286 - DNA, 75 bp, synthetic construct
  source 1..75: mol_type = other DNA
gtatttctggtggtgcgtacttcaccagtagtgatgtcggtgcgcaactacagttcccttataccggcgctgatt

SEQ ID NO: 814287 - DNA, 75 bp, synthetic construct
  source 1..75: mol_type = other DNA
aaagggcgcaaatcagtgtgcgcgggcaggggataaattaccggatttactcgatgaatatatcagagcaacaac

SEQ ID NO: 814288 - DNA, 75 bp, synthetic construct
  source 1..75: mol_type = other DNA
gcgcagtttatacaacctacaacaccattgaatctttaaaagagcgtctgatcgtccgccagctgccaacccaac

SEQ ID NO: 814289 - DNA, 75 bp, synthetic construct
  source 1..75: mol_type = other DNA
catacgcatagtctgagcggctctacaagctcggctggagcacactcgcacgttgatgggcgcaggtttaataca

SEQ ID NO: 814290 - DNA, 75 bp, synthetic construct
  source 1..75: mol_type = other DNA
taattctcctaaggggattaagggaaattctgatacagctacgaaacttcagacagcaataaaaatatctggtgt

SEQ ID NO: 814291 - DNA, 75 bp, synthetic construct
  source 1..75: mol_type = other DNA
gcagagaaacgtctgcagaaagaccagaacggtagagatattccagataagggcgctttcctgaataacattaac

SEQ ID NO: 814292 - DNA, 75 bp, synthetic construct
  source 1..75: mol_type = other DNA
gaatgttctggcaatatcaaaacaatgaacgagccatccactcaataatgatgagtaataagggcgatgatttgc

SEQ ID NO: 814293 - DNA, 75 bp, synthetic construct
  source 1..75: mol_type = other DNA
tgtcgagaaaatctccacacgtaaccaggctgtagtgtatcaggggttacaagcctacagccgtgaccagcaacc

SEQ ID NO: 814294 - DNA, 75 bp, synthetic construct
  source 1..75: mol_type = other DNA
gtcgtgccgtattgtctcaggaacaggacggcattaaatcgcacacccacagcgccagcgcatccagtacggatt

SEQ ID NO: 814295 - DNA, 75 bp, synthetic construct
  source 1..75: mol_type = other DNA
agcacttttataaaaatgttttaaaaccagttggtggtgatgaaaaagtgttgtttgttttaaaccaagtcgaca

SEQ ID NO: 814296 - DNA, 75 bp, synthetic construct
  source 1..75: mol_type = other DNA
ctatgcctgtggtatgttctgggcttattcatcatcggaacgcgctattcattccattctgatgagtaataaagg

SEQ ID NO: 814297 - DNA, 75 bp, synthetic construct
  source 1..75: mol_type = other DNA
tgttgaaccaggaagagccaacgagacttactgctacttaatgagcaggcttgttgagttctgcgagcgacatat

SEQ ID NO: 814298 - DNA, 75 bp, synthetic construct
  source 1..75: mol_type = other DNA
aagaccagcctggaacgacatacccggcattatgtttatgcttcagatgatggatttgatcctaacttctacacc

SEQ ID NO: 814299 - DNA, 75 bp, synthetic construct
  source 1..75: mol_type = other DNA
acgaagtctacggcgatttgccgcatcctgatgaagtccccgctggcaccgccttgccgctgtttaccgagaaaa

SEQ ID NO: 814300 - DNA, 75 bp, synthetic construct
  source 1..75: mol_type = other DNA
ttgtccgctgggatattgaaaacgaactgaaactaccggttgaagaaggcacgctgaaattctatttcgatggtg

SEQ ID NO: 814301 - DNA, 75 bp, synthetic construct
  source 1..75: mol_type = other DNA
ttgtcattaaatatatatatgaatggtgaaacgcgatccacaaacacggtggaacaggattcccctcgttcagct

SEQ ID NO: 814302 - DNA, 75 bp, synthetic construct
  source 1..75: mol_type = other DNA
aaagtggtgcgacgaatacttctacctcaaacatcgtaacgaacagcgcggcattggcgggctgttctttgatga

SEQ ID NO: 814303 - DNA, 75 bp, synthetic construct
  source 1..75: mol_type = other DNA
ggcgcaccgagtctatcctgatgtcaatgccgccactggtacgctggaatatgattatcagccaaaagatggcag

SEQ ID NO: 814304 - DNA, 75 bp, synthetic construct
  source 1..75: mol_type = other DNA
gcgtcaacttttcacatgtccacggtgaggcgatgcctgcttccgccaccgctcatcgcccggaacttgccgggc

SEQ ID NO: 814305 - DNA, 75 bp, synthetic construct
  source 1..75: mol_type = other DNA
ggcaatgctgctgctgaaactgggcgcggattgcttcaggctggcgttaacctggcaaacatccctgcatctgtc

SEQ ID NO: 814306 - DNA, 75 bp, synthetic construct
  source 1..75: mol_type = other DNA
tctcaggataatcctgaagcgctggcaaccgaccttggcactggtgttgttttgggtggtgcgattaaccaactt

SEQ ID NO: 814307 - DNA, 75 bp, synthetic construct
  source 1..75: mol_type = other DNA
gatgaaaattcggggtatcgtttcttaaataaaagcgacacatacaaaactatactttttgggcaactggtttta

SEQ ID NO: 814308 - DNA, 75 bp, synthetic construct
  source 1..75: mol_type = other DNA
agataaacgctttgacgctgtggttgtcgctgtatccgctaacaacatggttcatgttgtggaacaactggtaaa

SEQ ID NO: 814309 - DNA, 75 bp, synthetic construct
  source 1..75: mol_type = other DNA
tggtccggcagctgtattggcgcagggaagtattaagagcctggaatgtgttgaatatccggaactgggaatgga

SEQ ID NO: 814310 - DNA, 75 bp, synthetic construct
  source 1..75: mol_type = other DNA
tattggcgcagggtagtattaagagcctggaatgtgttgaatatccggaactaggaatggaagccatctggaaaa

SEQ ID NO: 814311 - DNA, 75 bp, synthetic construct
  source 1..75: mol_type = other DNA
tttatgcaggcggtaggtcacggctacaccgacgcttatttaccgattgttgaacgacgcaaagcgatggaatac

SEQ ID NO: 814312 - DNA, 75 bp, synthetic construct
  source 1..75: mol_type = other DNA
atagttatttatcagttagtgttcgtgggtgttcgttgtggtgtgtctttatcaattattgttatgattataaag

SEQ ID NO: 814313 - DNA, 75 bp, synthetic construct
  source 1..75: mol_type = other DNA
cacgcggatcaacagcgtttgagaaagccatgcagcaggcacaaaaggcaattaacgctatgacgcagggggcta

SEQ ID NO: 814314 - DNA, 75 bp, synthetic construct
  source 1..75: mol_type = other DNA
gctgactttatctataccgatgtatgggtgtcgatgggggaagcaaaagagaaatgggcagaaacggattgcatt

SEQ ID NO: 814315 - DNA, 75 bp, synthetic construct
  source 1..75: mol_type = other DNA
tttcctgcaaaccggacacccgcgcgatctgacattaatccactcgctgggtattggcgatcgcgacagcaaagg

SEQ ID NO: 814316 - DNA, 75 bp, synthetic construct
  source 1..75: mol_type = other DNA
ggcaggctcaaaaacagcggctgcgtcgtctgccagtgccgcgtcaacaagtgccgggcaggcctcagccagtgc

SEQ ID NO: 814317 - DNA, 75 bp, synthetic construct
  source 1..75: mol_type = other DNA
acgaagtctatggcgatctgcctcatcctgacgaagtaaataataaagaagaattacccctctttactgagacga

SEQ ID NO: 814318 - DNA, 75 bp, synthetic construct
  source 1..75: mol_type = other DNA
ctttctatggctttgaagaagacgccattcactggcaccgcaccgcccgtgacctgtgcctgccatttggcgaag

SEQ ID NO: 814319 - DNA, 75 bp, synthetic construct
  source 1..75: mol_type = other DNA
gccagacttcgactactgtttcgcctttatgcaggcggtaggcaaaggttacgccaacgcctacttgccgattgt

SEQ ID NO: 814320 - DNA, 75 bp, synthetic construct
  source 1..75: mol_type = other DNA
taacctgcagaagcttggtaaggttgctgataacgagacgatttcaaaacttcagtcatatcgtgatgagcttgt

SEQ ID NO: 814321 - DNA, 75 bp, synthetic construct
  source 1..75: mol_type = other DNA
attgtcaataaagctcctgcctctggtttttgggcctgccacggtattcgtctgcatatgggtgttgatatgggg

SEQ ID NO: 814322 - DNA, 75 bp, synthetic construct
  source 1..75: mol_type = other DNA
atattctggccgccattgaagcgcgctttctgcaaaccggacacccgcgcgatctgacattaatccactcgctgg

SEQ ID NO: 814323 - DNA, 75 bp, synthetic construct
  source 1..75: mol_type = other DNA
ttcattataaaaaagcagtaatcccacacagcaaatcatcattacaaaacatactacttagtattataggtgagg

SEQ ID NO: 814324 - DNA, 75 bp, synthetic construct
  source 1..75: mol_type = other DNA
gagcgcttagtgaactctattgttcaggaaagccctgatatggctactgaagaatggttcggctatggccgtctt

SEQ ID NO: 814325 - DNA, 75 bp, synthetic construct
  source 1..75: mol_type = other DNA
gtgtcaaccagttaaccgtggctaatatccccatacctacatacgctgagaacttgcatttttcgattgccggta

SEQ ID NO: 814326 - DNA, 75 bp, synthetic construct
  source 1..75: mol_type = other DNA
atgagcatcgataaaagttactgcggatttattgccatcgttggacgtccgaacgttggcaaatccacattgttg

SEQ ID NO: 814327 - DNA, 75 bp, synthetic construct
  source 1..75: mol_type = other DNA
ccctgaaaaagataaaaaaactcatcaacacaatccctgggcttgaagagcaaatctttgcatgccgaaataaaa

SEQ ID NO: 814328 - DNA, 75 bp, synthetic construct
  source 1..75: mol_type = other DNA
tacggaaatatcagagctgaaaaacctcactggatacgtctatttccctggtgatctgcctgtcggcaagttcaa

SEQ ID NO: 814329 - DNA, 75 bp, synthetic construct
  source 1..75: mol_type = other DNA
gatttctcgctgcgtgactggctggaagatgataaacccggcacgttgtttatcacctggcaggagcagatgaaa

SEQ ID NO: 814330 - DNA, 75 bp, synthetic construct
  source 1..75: mol_type = other DNA
ttttcctgactttttgagggagtgtgggttcaccaatttttcccacgaacagcgtgagacttatgactgctatcg

SEQ ID NO: 814331 - DNA, 75 bp, synthetic construct
  source 1..75: mol_type = other DNA
ttaaaaagcagtataagaacatcttccggggcaacgaggaaattaccctctccaaccgggcgttagcctttattg

SEQ ID NO: 814332 - DNA, 75 bp, synthetic construct
  source 1..75: mol_type = other DNA
caatgaaaagatcgaagacaacgatctgccgatcattgctgagaagtaccgcgaatttctcatggagcatgactg

SEQ ID NO: 814333 - DNA, 75 bp, synthetic construct
  source 1..75: mol_type = other DNA
gctccattggcgacgttgagctggtgatttttgtcgtagaaggcacccgctggacgccggacgatgaaatggtgc

SEQ ID NO: 814334 - DNA, 75 bp, synthetic construct
  source 1..75: mol_type = other DNA
ggctaaacgtcgacactatcgcggcaattgtacgcaaacaccttccagaagcgacgcatcacttcccggaagatt

SEQ ID NO: 814335 - DNA, 75 bp, synthetic construct
  source 1..75: mol_type = other DNA
catgacactgagccacaaatcaataatgaaccattagaaagatatggtgcagcaattgaacgtcttgttcagagt

SEQ ID NO: 814336 - DNA, 75 bp, synthetic construct
  source 1..75: mol_type = other DNA
gaaccgctggcgcgggtggataaggcggggaaagagggaccgaaccggatactgtattttcacacggatgtgaac

SEQ ID NO: 814337 - DNA, 75 bp, synthetic construct
  source 1..75: mol_type = other DNA
atttaagccccctcaatcctcgctatcaatcgtccttactgacacctgaatgtaaaattgttgctgtagcaaaag

SEQ ID NO: 814338 - DNA, 75 bp, synthetic construct
  source 1..75: mol_type = other DNA
tgtgatcctaaggccaggagaaagttataaaaatggcagcatcgtcgctgtaatagttccggatccgcttaaaaa

SEQ ID NO: 814339 - DNA, 75 bp, synthetic construct
  source 1..75: mol_type = other DNA
acgcgatccgtttgcccgccggaagatcgatgcgctggagatgtcatggatcctcgaaaccaatacaggcatgaa

SEQ ID NO: 814340 - DNA, 75 bp, synthetic construct
  source 1..75: mol_type = other DNA
tgctaggttagttcgattactcgtcgattttaaatgtgtttacgtttcgcatggttggtcttgtttatataatgg

SEQ ID NO: 814341 - DNA, 75 bp, synthetic construct
  source 1..75: mol_type = other DNA
gcgccccgaattgttagcgaatgtaatatcgaaaaagccccagtatagcctccatgtcgtaggagggggggaaag

SEQ ID NO: 814342 - DNA, 75 bp, synthetic construct
  source 1..75: mol_type = other DNA
aaattggataaaatattcgatgactatgaaaattatcgggaacaggcaattcgtgcctccgggaaatttgttatc

SEQ ID NO: 814343 - DNA, 75 bp, synthetic construct
  source 1..75: mol_type = other DNA
accggattacgcattggtctgggtgtgggctggtctaccctggtggcggcggagttgattgccgcgacgcgcggt

SEQ ID NO: 814344 - DNA, 75 bp, synthetic construct
  source 1..75: mol_type = other DNA
ttggctggtctacgctggtggcggcggagctgattgccgcgacgcgaggcttaggttttatggttcagtcagcgg

SEQ ID NO: 814345 - DNA, 75 bp, synthetic construct
  source 1..75: mol_type = other DNA
aacctcgaagatcttactgatctatttagcgatttttgcaccggtggcgatgtcggcgctggcgggggtgaaaag

SEQ ID NO: 814346 - DNA, 75 bp, synthetic construct
  source 1..75: mol_type = other DNA
cattgcctacaaatataaaaagtcgaggttatttacctgatgggacagaggtagttccagatatggcaagggttg

SEQ ID NO: 814347 - DNA, 75 bp, synthetic construct
  source 1..75: mol_type = other DNA
gcccgtgcgctggcggcgaatccccagctgttattactcgacgaaccgtttggtgcgctggacgccttcacccgc

SEQ ID NO: 814348 - DNA, 75 bp, synthetic construct
  source 1..75: mol_type = other DNA
ccggtgccgccgctggcttatttgccgctgatggtgatctggtttggtattggtgaaacctcgaagatcttactg

SEQ ID NO: 814349 - DNA, 75 bp, synthetic construct
  source 1..75: mol_type = other DNA
atgaccattacgtctctggatggctatcgctggctgaagaacgatattattcgcggtaattttcaaccggatgaa

SEQ ID NO: 814350 - DNA, 75 bp, synthetic construct
  source 1..75: mol_type = other DNA
aaatagagggcgagaaaccgcaaagtaaagagtccgcaaactcaactgaaaaccccggttatgaagaattctttt

SEQ ID NO: 814351 - DNA, 75 bp, synthetic construct
  source 1..75: mol_type = other DNA
cgtgtggatttaagccagaacggcaatttgataatggtcgcggtaaccttagtgctgggcgcgggtgattttgct

SEQ ID NO: 814352 - DNA, 75 bp, synthetic construct
  source 1..75: mol_type = other DNA
gcatgtccgcgagccagcgtcttttatggcacggcgctcgacgccgaccttcggacgcgcggcgtaagcacgctt

SEQ ID NO: 814353 - DNA, 75 bp, synthetic construct
  source 1..75: mol_type = other DNA
ggaggtgccggtggcttcacgcacggtaccggggcaggtggcgttgagccgcaggcgcttacgaccagcggcaac

SEQ ID NO: 814354 - DNA, 75 bp, synthetic construct
  source 1..75: mol_type = other DNA
gatattttcgacgcccgcgccaatatggaagcgatgttggtgagtctggcgattgcccgcggtggcgatgagtgg

SEQ ID NO: 814355 - DNA, 75 bp, synthetic construct
  source 1..75: mol_type = other DNA
cactggctgacggtatggaaatttctctgaccgatcatgaaatcaggaccgtcctggcgcgcctggaggacatcc

SEQ ID NO: 814356 - DNA, 75 bp, synthetic construct
  source 1..75: mol_type = other DNA
gaacaggcactgtggaaacgtgagtgggccgcccgtgataacggcctcgccgtcccggaatgcgttacccgccgt

SEQ ID NO: 814357 - DNA, 75 bp, synthetic construct
  source 1..75: mol_type = other DNA
atgtacggaacatgcgaaacgctatgccgggcgctggcagcaaagtatccgggaaacacgccgttgatgctggtt

SEQ ID NO: 814358 - DNA, 75 bp, synthetic construct
  source 1..75: mol_type = other DNA
ggcgtaaccacctacgccgagaatatcggtgtaatggccgtgacaaaagtctactcgacgctggtgtttgtcgct

SEQ ID NO: 814359 - DNA, 75 bp, synthetic construct
  source 1..75: mol_type = other DNA
atggcaatgttcggttttcctcactggcagttaaaatcgacctctacagagagcggcgtggtcgcgccggatgaa

SEQ ID NO: 814360 - DNA, 75 bp, synthetic construct
  source 1..75: mol_type = other DNA
ggcgattttactcaatgcgttgttaagcaaaaagcaggtaaaagttcctccccaggaaatggttcatcaggagcc

SEQ ID NO: 814361 - DNA, 75 bp, synthetic construct
  source 1..75: mol_type = other DNA
aaaacaactatataacatatcgtgagaagcaacgactcattggagtattatcaaaaatttgtaactccatcgaat

SEQ ID NO: 814362 - DNA, 75 bp, synthetic construct
  source 1..75: mol_type = other DNA
catctagaatttactgtcagcgccggcgttaaagtttacttctgcgatcctcagagtccttggcagcggggaaca

SEQ ID NO: 814363 - DNA, 75 bp, synthetic construct
  source 1..75: mol_type = other DNA
aaaccaacaacggatggccagcgcccgtgagttgctgtgtcatagtgactggagcatcgccagcattgcgcgtaa

SEQ ID NO: 814364 - DNA, 75 bp, synthetic construct
  source 1..75: mol_type = other DNA
acatggcgtggcgctcatcatacagttgatgagcttcatgccctgtttgcccgtaacggtctgtatctgcaggtc

SEQ ID NO: 814365 - DNA, 75 bp, synthetic construct
  source 1..75: mol_type = other DNA
aacgccatgcgccatggcgtatcaaacggaaatgcggaagcactgaacagcaagatcaggctgctgagaataaaa

SEQ ID NO: 814366 - DNA, 75 bp, synthetic construct
  source 1..75: mol_type = other DNA
gctatcaaaacgctctcaatggacatgaacgcgggctatataagagcagcgcgtatccacttacccagtgcggtt

SEQ ID NO: 814367 - DNA, 75 bp, synthetic construct
  source 1..75: mol_type = other DNA
aggccaggggataccgaaaccgggaacgctttaaactgggagttatgttccactatgggaaactgaatatggcgt

SEQ ID NO: 814368 - DNA, 75 bp, synthetic construct
  source 1..75: mol_type = other DNA
ttcttcggcacaggtccacagggggcagtaaaacgcgaaatgttctctgacagggagtccctgtatggctatgtg

SEQ ID NO: 814369 - DNA, 75 bp, synthetic construct
  source 1..75: mol_type = other DNA
tagaaaaatgtgagctgtttgaaaatcgctggatagggactcacctcgcgggcgcatcactgaaagagtcagact

SEQ ID NO: 814370 - DNA, 75 bp, synthetic construct
  source 1..75: mol_type = other DNA
cagagattttagcaaagaactatgttcgtaataaaatggttaaaaatccattttattcgaatttaaaatggaatt

SEQ ID NO: 814371 - DNA, 75 bp, synthetic construct
  source 1..75: mol_type = other DNA
tcctgaacgttttgttgtgccgttatctgattttggtcatgagtggaagatgcagtcgctcgtagccgtcatggg

SEQ ID NO: 814372 - DNA, 75 bp, synthetic construct
  source 1..75: mol_type = other DNA
atggttccggtaataccacaaaaacgacgcgacggcgggtcatcctttgatgacctggtgtcgtatattgtggtc

SEQ ID NO: 814373 - DNA, 75 bp, synthetic construct
  source 1..75: mol_type = other DNA
agtatgcagaggaagagagacggcaacaggaagaaaataatacggcacagaacaatcgtccccgtggtccgacaa

SEQ ID NO: 814374 - DNA, 75 bp, synthetic construct
  source 1..75: mol_type = other DNA
tatttcttccgccgctgcgatggagattatcagcaacgtgagcgaaaaccgccaggtgaccgtctctgctgaact

SEQ ID NO: 814375 - DNA, 75 bp, synthetic construct
  source 1..75: mol_type = other DNA
taatttgctgccgcttgtcgccgtactgggcatctatttttatatacaaaaatgtggaccacatttcttacgtat

SEQ ID NO: 814376 - DNA, 75 bp, synthetic construct
  source 1..75: mol_type = other DNA
taaaaaaagcagtgctttccctgttggcgtcctgtagcatagttgtttttgcatctgaatcagaacttggcgttg

SEQ ID NO: 814377 - DNA, 75 bp, synthetic construct
  source 1..75: mol_type = other DNA
gaaaacttcgcgtggcctcgctgctggtacttatgagttactacttttgttagctggggaacatccagaatacga

SEQ ID NO: 814378 - DNA, 75 bp, synthetic construct
  source 1..75: mol_type = other DNA
gttaggtaaaagaacgaaatctaagcgtacatttgaatcagctaagacccctggtcgttgtgtggatgtctacaa

SEQ ID NO: 814379 - DNA, 75 bp, synthetic construct
  source 1..75: mol_type = other DNA
gtggctcaaggataaaaattttgagcagactctcccatggaataaagaagaacaacctctgcgaacacgagttta

SEQ ID NO: 814380 - DNA, 75 bp, synthetic construct
  source 1..75: mol_type = other DNA
ttgatattactgcttgtgggttttatcgtttaaagaataaacccgaagagcttgattataaattcggcgatctta

SEQ ID NO: 814381 - DNA, 75 bp, synthetic construct
  source 1..75: mol_type = other DNA
atcctacacagcttctggcggatttgctgaccatgcaggagcatttaccaggtaaagcgttcaatgagatgacgc

SEQ ID NO: 814382 - DNA, 75 bp, synthetic construct
  source 1..75: mol_type = other DNA
ggtaaagcgtttaatgaaatgacgctggtctatgccggagatgcgcgtaacaacatgggcaactcaatgctggaa

SEQ ID NO: 814383 - DNA, 75 bp, synthetic construct
  source 1..75: mol_type = other DNA
tgcgtctggtcgcgccacaggcatgctggccggaagctgcgctggttacggaatgccgcgccctggcacagcaaa

SEQ ID NO: 814384 - DNA, 75 bp, synthetic construct
  source 1..75: mol_type = other DNA
taccgcccgcgtacttggtcgcatgtatgacggtattcagtatcgcggctatggtcaggagattgtcgaaacgct

SEQ ID NO: 814385 - DNA, 75 bp, synthetic construct
  source 1..75: mol_type = other DNA
tcctgaaattactcgatttcacgccagctgaactcaacaccttgttgcagttagccgcgaagctgaaagccgata

SEQ ID NO: 814386 - DNA, 75 bp, synthetic construct
  source 1..75: mol_type = other DNA
ccgccagtattgtttttgatcaggcggaaaaccgtatgcataccatcaaagcggtaatggttgcgacgctcgccc

SEQ ID NO: 814387 - DNA, 75 bp, synthetic construct
  source 1..75: mol_type = other DNA
ttttagttaccggaggtgctcacggtattggcaaagggatagctaaacaatttgctgatcgtggtgcacatactg

SEQ ID NO: 814388 - DNA, 75 bp, synthetic construct
  source 1..75: mol_type = other DNA
atgtacggaacatgcgaaacgctatgccgggagctggcagcaaagtattcgggagacacgccgctgatgctggtt

SEQ ID NO: 814389 - DNA, 75 bp, synthetic construct
  source 1..75: mol_type = other DNA
atgtacggaacatgcgaaacgctatgccggtagctggcagcaaagtatccgggagacacgccactgatgctggtt

SEQ ID NO: 814390 - DNA, 75 bp, synthetic construct
  source 1..75: mol_type = other DNA
atgtacggaacatgcgaaacgctatgccggaagctggcagcaaagtatccgggagacacgcctctgatgctggtt

SEQ ID NO: 814391 - DNA, 75 bp, synthetic construct
  source 1..75: mol_type = other DNA
atgtacggaacatgcgaaacgctctgccgtgagctggcagcaaagtatccgggaaacacgccactgatgctggtt

SEQ ID NO: 814392 - DNA, 75 bp, synthetic construct
  source 1..75: mol_type = other DNA
gggccgcccgtgataacggcctcgccgtcccggaatgcgtcacccgccgacaggcggtggttaatcaggcccgcg

SEQ ID NO: 814393 - DNA, 75 bp, synthetic construct
  source 1..75: mol_type = other DNA
ctcgatcaatttgagttctacagtggcggagggatcgatatcaccttcctcggcatgggagagatggatcagtac

SEQ ID NO: 814394 - DNA, 75 bp, synthetic construct
  source 1..75: mol_type = other DNA
gccaggtgaccgtcccggaatgcgttacccgccgtcaggcggtggttaatcaggcccgcgccctgctgaaaaaca

SEQ ID NO: 814395 - DNA, 75 bp, synthetic construct
  source 1..75: mol_type = other DNA
gccaggtgaccgtccctgctgaactgctggagaccctgactcagatcgctgaacaggcactgtggaaacgtgaat

SEQ ID NO: 814396 - DNA, 75 bp, synthetic construct
  source 1..75: mol_type = other DNA
ttattgttgactataacgaagagaacggcaaggccactgcagcagagttaacttttggcgatgttaaatcgttgt

SEQ ID NO: 814397 - DNA, 75 bp, synthetic construct
  source 1..75: mol_type = other DNA
aacgtgagagaaaaccgccaggtgaccgtccctgctgaactgctggcgtccctgattcagaccgctgaacaggca

SEQ ID NO: 814398 - DNA, 75 bp, synthetic construct
  source 1..75: mol_type = other DNA
tctgaccggtcatgaaatcaggaccgtcctggcacgcctagaggacattccggaagaccagcggactgaatccgg

SEQ ID NO: 814399 - DNA, 75 bp, synthetic construct
  source 1..75: mol_type = other DNA
gcctcgaagaagaagcgattgatatggatagctattccatggcgctggcagcacacaacagcggcggcaaagtgt

SEQ ID NO: 814400 - DNA, 75 bp, synthetic construct
  source 1..75: mol_type = other DNA
ggtcattatcaccacggcaatgcgaaccgcaggcgatccgatgaataactgcgagtttaacggatttgttatgcc

SEQ ID NO: 814401 - DNA, 75 bp, synthetic construct
  source 1..75: mol_type = other DNA
tctgtcgctttgctggccatctttcgcacttctacagggtcgcccaacatgcggttctttgcagccagctcgtgc

SEQ ID NO: 814402 - DNA, 75 bp, synthetic construct
  source 1..75: mol_type = other DNA
cgttatccggatcttgatgccaaagggcgtgaacgggcgattgcgaaagatctcggcgcggtattcctcgttggg

SEQ ID NO: 814403 - DNA, 75 bp, synthetic construct
  source 1..75: mol_type = other DNA
caaagcagtcagaggatgcgtcctcgtcctcggcttctgcggccgctcaaaaagccagtgagtcatcacaaagtg

SEQ ID NO: 814404 - DNA, 75 bp, synthetic construct
  source 1..75: mol_type = other DNA
agagatgttcaacgtgattccactggcaccgggccatgcctacgggatgtttatggaacgttttaaagagctgca

SEQ ID NO: 814405 - DNA, 75 bp, synthetic construct
  source 1..75: mol_type = other DNA
gtacagaactgcaccattgtgctgaaggccagacggaccagcagcacggtggtggtgaacacggtggcctctgaa

SEQ ID NO: 814406 - DNA, 75 bp, synthetic construct
  source 1..75: mol_type = other DNA
tctgtcgctttgcaggccatctttcgcacttctacagggtcgcccaacatgcggtgctttgcagccagctagtgc

SEQ ID NO: 814407 - DNA, 75 bp, synthetic construct
  source 1..75: mol_type = other DNA
ttgtgccggtgggcctgggcaccgagcagcttgagcagacgcttgccccgatgttccctggtgtacccatttcac

SEQ ID NO: 814408 - DNA, 75 bp, synthetic construct
  source 1..75: mol_type = other DNA
ttacagcacatcatcaatggtacgctggcgcttattaatacaataccggattcccgtaaggtgaaatgggtgctg

SEQ ID NO: 814409 - DNA, 75 bp, synthetic construct
  source 1..75: mol_type = other DNA
ttgttccctggtgtgcccatttctcgtatcgaccgcgataccaccagccgcaaaggcgcgctggaacaacaactg

SEQ ID NO: 814410 - DNA, 75 bp, synthetic construct
  source 1..75: mol_type = other DNA
acctcccgggccaaagggggaacaggggcccgcgggtcctcaggggccgaagggtgataagggagagcgcggtga

SEQ ID NO: 814411 - DNA, 75 bp, synthetic construct
  source 1..75: mol_type = other DNA
aggaggcgaagaagaatgccggagaggcggagacgtcagcgaggaatgccggcatatcagccagtcaggcagaag

SEQ ID NO: 814412 - DNA, 75 bp, synthetic construct
  source 1..75: mol_type = other DNA
atgcctacgggatgtttatggagcgctttaacgagttatcggagttacgtgtcacgaacggtgcaatagtgatcc

SEQ ID NO: 814413 - DNA, 75 bp, synthetic construct
  source 1..75: mol_type = other DNA
tgaaagacggtacaggaaaaccggtagagaactgcaccattcaactgaaagccagacggaccagcagcacggtgg

SEQ ID NO: 814414 - DNA, 75 bp, synthetic construct
  source 1..75: mol_type = other DNA
gcctcccgggccaaagggggaaccgggtcccgcgggtcctcaggggccgaagggagataaaggagagcgtggcga

SEQ ID NO: 814415 - DNA, 75 bp, synthetic construct
  source 1..75: mol_type = other DNA
ggacctcccgggccaaagggggaacaggggcccgctggccctcaggggccgaagggtgataagggagagcgcggt

SEQ ID NO: 814416 - DNA, 75 bp, synthetic construct
  source 1..75: mol_type = other DNA
caccggactgacctttcttgaccccaaagatgccacacgggttcagggtttttttcagcatttgcaggtcaggtt

SEQ ID NO: 814417 - DNA, 75 bp, synthetic construct
  source 1..75: mol_type = other DNA
aaagttattcctctggctcctggccatgcctacgggctgtttatggaacgctttaacgagttatcggagttacgc

SEQ ID NO: 814418 - DNA, 75 bp, synthetic construct
  source 1..75: mol_type = other DNA
ttacagcatggacgttgagtacggtcagtacagcgttattctgttggtggagggattcccgccgtcacatgccgg

SEQ ID NO: 814419 - DNA, 75 bp, synthetic construct
  source 1..75: mol_type = other DNA
taggaaatggtgatatgtgttatataaagcataatagtgataatttcacaatcattgattgtaacattaatactg

SEQ ID NO: 814420 - DNA, 75 bp, synthetic construct
  source 1..75: mol_type = other DNA
cggggacgctgaatgattttctcggtgccatgacggaggatgacgtccggccggaggcactgcgtcgctttgaac

SEQ ID NO: 814421 - DNA, 75 bp, synthetic construct
  source 1..75: mol_type = other DNA
ccgatgccagcaccacgctgcgtagcgcgggtggcggcgtactgatgggcttcggtgccagcattgccggcggct

SEQ ID NO: 814422 - DNA, 75 bp, synthetic construct
  source 1..75: mol_type = other DNA
accgtgtatgaagattctcaacccgggacgctgaatgattttctcggtgccatgtcggaggatgacgtccggccg

SEQ ID NO: 814423 - DNA, 75 bp, synthetic construct
  source 1..75: mol_type = other DNA
tggtgaacacggtggcctctgaaaatccggatgaagcagggcgttacagcatggacgtcgagtacggtcagtaca

SEQ ID NO: 814424 - DNA, 75 bp, synthetic construct
  source 1..75: mol_type = other DNA
gggcaaagggagatacgggagctgcaggcccggcaggcgcacaggggccaaaaggtgacaaaggcgatccgggag

SEQ ID NO: 814425 - DNA, 75 bp, synthetic construct
  source 1..75: mol_type = other DNA
tgatcctctccagcccgctggcagacgacaaactgtgggttctcggtcccgttccggcactggcacctaaacgtg

SEQ ID NO: 814426 - DNA, 75 bp, synthetic construct
  source 1..75: mol_type = other DNA
cgatcaccgaacgttttggcccgtcgcacatggccttcctggtggtgccgatggtcggtgcgttctttatcgata

SEQ ID NO: 814427 - DNA, 75 bp, synthetic construct
  source 1..75: mol_type = other DNA
taaaacattccaccacgccaaacggtatccctgatgaccaggaagtcccaaccgcgttcgaaaaaccggatgtgg

SEQ ID NO: 814428 - DNA, 75 bp, synthetic construct
  source 1..75: mol_type = other DNA
ctggtggtgctgactgcgtttatttccccacaccgcgccgaacgccagatggttcgtgaacgtgtaggagcaggt

SEQ ID NO: 814429 - DNA, 75 bp, synthetic construct
  source 1..75: mol_type = other DNA
ctcaagcagcgtttaactgctgagccggtgcgttttgtttatcagcgcgatatgcccaatgcgctggttgaagtg

SEQ ID NO: 814430 - DNA, 75 bp, synthetic construct
  source 1..75: mol_type = other DNA
ggcggtccggtggcgcgctatctggtgaaacactccaccacaccgaacggtattccggatgaccaggaagtcccg

SEQ ID NO: 814431 - DNA, 75 bp, synthetic construct
  source 1..75: mol_type = other DNA
cctgttagggcttgatccgctgatggggctgctggccggttctattacgctttccggcggtcacggtacgggagc

SEQ ID NO: 814432 - DNA, 75 bp, synthetic construct
  source 1..75: mol_type = other DNA
gcgcggtaaaagcggtacgcaatcaaaatcaggctggaaaaattgctgtctttggttcggatatgaccaccgaaa

SEQ ID NO: 814433 - DNA, 75 bp, synthetic construct
  source 1..75: mol_type = other DNA
cagtagccgtaccgttcgtcgcgccagtgaagcgggcattccggtgatttgctacaacacctgtattaatcaaaa

SEQ ID NO: 814434 - DNA, 75 bp, synthetic construct
  source 1..75: mol_type = other DNA
acgccattatgggggaatcgggcggagcgacactcggcgcggtaaaagcggtacgtaatcaaaatcaggccggaa

SEQ ID NO: 814435 - DNA, 75 bp, synthetic construct
  source 1..75: mol_type = other DNA
ccggatggcatgaaagatatcaccgttgaccgtctcgctccgcgccagcgtctgctggcagctctggatgaggtg

SEQ ID NO: 814436 - DNA, 75 bp, synthetic construct
  source 1..75: mol_type = other DNA
agttggcagcatcaccgtacaaatgataatgttccaggcttgctttccctgataactgcacatctcaaagacctg

SEQ ID NO: 814437 - DNA, 75 bp, synthetic construct
  source 1..75: mol_type = other DNA
cgcgatttgccctgaaaacgaattaccttcagtcccctgatgaaggcgtctatgaactggcgtttgataatgcca

SEQ ID NO: 814438 - DNA, 75 bp, synthetic construct
  source 1..75: mol_type = other DNA
attagcgacaacattcgtgccatcagtattgttgaccgttaccttgaacatgaccgggtttatatttttgaaaat

SEQ ID NO: 814439 - DNA, 75 bp, synthetic construct
  source 1..75: mol_type = other DNA
agatcataacaatcagcacgcgccgctgttcttgcagcaactgcgtaatctgatcctctccagcccgctggcgga

SEQ ID NO: 814440 - DNA, 75 bp, synthetic construct
  source 1..75: mol_type = other DNA
ggatttaaaaggccagaaagtgcaggcggggctggctccggcgttgatcacccgtatgcgccagcatttacaggc

SEQ ID NO: 814441 - DNA, 75 bp, synthetic construct
  source 1..75: mol_type = other DNA
cgaagtggtgctgcaaacgcatcatccggaacatcctctcttgcaaacgttgctctataaaggctacgacgcctt

SEQ ID NO: 814442 - DNA, 75 bp, synthetic construct
  source 1..75: mol_type = other DNA
ctggcgctcatcaatacaataccggattcccgtaaggtgaaatgggtgctggatgttgatccgattgagggttaa

SEQ ID NO: 814443 - DNA, 75 bp, synthetic construct
  source 1..75: mol_type = other DNA
gcggaagtacatcgcggtggcgcgaggattttgattggcacgcaaatgctggcgaaaggtcaccactttccggat

SEQ ID NO: 814444 - DNA, 75 bp, synthetic construct
  source 1..75: mol_type = other DNA
tggacggcgcgctgttttctgccgattttcgctcggcagaacgtttcgcccagctttacacccaggtcgccggtc

SEQ ID NO: 814445 - DNA, 75 bp, synthetic construct
  source 1..75: mol_type = other DNA
acatcgaaatatctgttcggtattggtgcagcggttctggtttatttcgggattaaaaaactgaaaaaagggcgg

SEQ ID NO: 814446 - DNA, 75 bp, synthetic construct
  source 1..75: mol_type = other DNA
gcggcaagtatggaacagcgtattcggatgctgcagcagaccatagaacaagcgttacttgaacaaggtcgcatc

SEQ ID NO: 814447 - DNA, 75 bp, synthetic construct
  source 1..75: mol_type = other DNA
aaagcccagttccgcaatggttttgatgccattcgcgaacgcgatgtgttgctctattatccttatcataccttt

SEQ ID NO: 814448 - DNA, 75 bp, synthetic construct
  source 1..75: mol_type = other DNA
cgcgtccggcaattcaacacgtgctggatttaaaaggtcagaaggtgcaggcaggtctggctccggcgttaatca

SEQ ID NO: 814449 - DNA, 75 bp, synthetic construct
  source 1..75: mol_type = other DNA
tgtattggctggggtatcacaacatcgaaatatctgttcggtattggtgcagcggttctggtttatttcgggatt

SEQ ID NO: 814450 - DNA, 75 bp, synthetic construct
  source 1..75: mol_type = other DNA
tatatgccaacagccctgctgcgcggtatttttcataatgttcctgattcgtgtttccggcagtggattaaatag

SEQ ID NO: 814451 - DNA, 75 bp, synthetic construct
  source 1..75: mol_type = other DNA
agggaccgaaaggggatacgggagctgcaggcccggcagggccacagggaccgaaaggggatgcaggagtcgcag

SEQ ID NO: 814452 - DNA, 75 bp, synthetic construct
  source 1..75: mol_type = other DNA
agcgaaacgaatgccaaaaccagtgaaactgcggcgaaaagcaagtcaggctgcagcagccgaaagcgagagtgc

SEQ ID NO: 814453 - DNA, 75 bp, synthetic construct
  source 1..75: mol_type = other DNA
cactcatcaccggactgacctttcttgaccccaaagatgccacacaggttcaggggctgtttcagcatttgcagg

SEQ ID NO: 814454 - DNA, 75 bp, synthetic construct
  source 1..75: mol_type = other DNA
cgaagggcgacccgggggagacgcaaatacggttccgtctggggccgggaaacattattgagacaaacagcaatg

SEQ ID NO: 814455 - DNA, 75 bp, synthetic construct
  source 1..75: mol_type = other DNA
tgcctttcgaatggtactcccctggttgcttccggtaatgtgggggagacccgtttaccgggcacgtggcgtgca

SEQ ID NO: 814456 - DNA, 75 bp, synthetic construct
  source 1..75: mol_type = other DNA
ggctcactgctggatgatggtcgcctgagctatagcctggaacaaagtctggatgacgataacaaccataacagt

SEQ ID NO: 814457 - DNA, 75 bp, synthetic construct
  source 1..75: mol_type = other DNA
ggcaatatatggtttgaataatacttttacgctgtatggcggcctgctcggttctgaagattattatgcgctggg

SEQ ID NO: 814458 - DNA, 75 bp, synthetic construct
  source 1..75: mol_type = other DNA
gagcaacttctgcagccacagtttacggtagaacaactacgtgagctgggtattaaggtggatgaaatcccggcg

SEQ ID NO: 814459 - DNA, 75 bp, synthetic construct
  source 1..75: mol_type = other DNA
caccatcatacactaaatcagtaagttggcagcatcaccgcactaccgctaacgccgaagagtattatttcgacc

SEQ ID NO: 814460 - DNA, 75 bp, synthetic construct
  source 1..75: mol_type = other DNA
tttttcaaaaaaatacgcacaactaccaggaacttatcaggttgatatctggctgaataaaaagaaggtttcaca

SEQ ID NO: 814461 - DNA, 75 bp, synthetic construct
  source 1..75: mol_type = other DNA
agaacgtgaaatgggctgcaatcaatgattatggcggcaggttccgggacagaaactcgtccactgcaataacaa

SEQ ID NO: 814462 - DNA, 75 bp, synthetic construct
  source 1..75: mol_type = other DNA
gcccacagggaccgaaaggagaaacaggtgcggctggcccggtgggggcaaccggacctcagggaccgaagggcg

SEQ ID NO: 814463 - DNA, 75 bp, synthetic construct
  source 1..75: mol_type = other DNA
atggcagtaaagatttcaggtgtactgaaagacggtacaggaaaaccggtagagaactgcaccattcaactgaaa

SEQ ID NO: 814464 - DNA, 75 bp, synthetic construct
  source 1..75: mol_type = other DNA
acacgagcctttagagcttgtgattttgcgtttgttgtacccgttgccatttctattcctctggtggattggtgg

SEQ ID NO: 814465 - DNA, 75 bp, synthetic construct
  source 1..75: mol_type = other DNA
acggtttgtgattttgcgtttactgcttttgtcgccatgtggtgtacccctcataaaaaacaaatgcagtatgca

SEQ ID NO: 814466 - DNA, 75 bp, synthetic construct
  source 1..75: mol_type = other DNA
cattattgagacaaacagccatggctggttcccggatacagatggcgcactcatcaccggactgacctttcttga

SEQ ID NO: 814467 - DNA, 75 bp, synthetic construct
  source 1..75: mol_type = other DNA
ggaccgaaaggagaaacaggtgcggctggcccggtaggggcaaccggacctcagggaccgaagggcgacccgggg

SEQ ID NO: 814468 - DNA, 75 bp, synthetic construct
  source 1..75: mol_type = other DNA
ggtccaaagggagagaccggtctgacgggaaatgcaggtcgacggggtccggcagggagagaccggtctgacggg

SEQ ID NO: 814469 - DNA, 75 bp, synthetic construct
  source 1..75: mol_type = other DNA
aaagggggaaccggggcccgcgggtcctcaggggccgaagggagataaaggagagcgtggcgacaccggcccggc

SEQ ID NO: 814470 - DNA, 75 bp, synthetic construct
  source 1..75: mol_type = other DNA
ccggcatatcagccagtaaggcggaagcgagcgccgcaaatgctgatacttcagcagaggaggcatcggagtcag

SEQ ID NO: 814471 - DNA, 75 bp, synthetic construct
  source 1..75: mol_type = other DNA
gaggcggagacgtccgcgaggaatgccggcatatcagccagtcaggcagaagagagcgcggcaaatgctgacact

SEQ ID NO: 814472 - DNA, 75 bp, synthetic construct
  source 1..75: mol_type = other DNA
ggacggaacgcgaagcgcgtaaccgttgcccgtccggttgtgtcgctgtattcgccgcccgtattcgtcaggagg

SEQ ID NO: 814473 - DNA, 75 bp, synthetic construct
  source 1..75: mol_type = other DNA
aaggcaaagcgtaacagcaccactgtactggtgaacacggtggcctctgaaaatccggatgaagccgggcgttac

SEQ ID NO: 814474 - DNA, 75 bp, synthetic construct
  source 1..75: mol_type = other DNA
agacaaacagccatggctggttcccggatacagatggcgcactcatcaccggactgacctttcttgaccccaaag

SEQ ID NO: 814475 - DNA, 75 bp, synthetic construct
  source 1..75: mol_type = other DNA
gtcagcgtcttccagcgcaggaacagcatcaacaaaggccactgaagcatcaaaaagtgctgccgccgcagagtc

SEQ ID NO: 814476 - DNA, 75 bp, synthetic construct
  source 1..75: mol_type = other DNA
gaagcagagacgtccgcgaggaatgccggcatatcagccagtcaggcggaagcgagcgccgcaaatgctgacact

SEQ ID NO: 814477 - DNA, 75 bp, synthetic construct
  source 1..75: mol_type = other DNA
ccgaagggcgacccgggggagacacaaatacggttccgtctggggccgggaaacattattgagacaaacagcaat

SEQ ID NO: 814478 - DNA, 75 bp, synthetic construct
  source 1..75: mol_type = other DNA
ggccggcagacatcctggagtccgatgagaatggtattattccggagcaggacagggtaatcacgcaggtggtga

SEQ ID NO: 814479 - DNA, 75 bp, synthetic construct
  source 1..75: mol_type = other DNA
ccggacaggccgcgtcgtcggctcaggaggcttcttccggcgcaggacagcatcagcaaaggccactgaagcatc

SEQ ID NO: 814480 - DNA, 75 bp, synthetic construct
  source 1..75: mol_type = other DNA
accccaaagatgccacacgggttcaggggttttttcagcatttgcaggtcaggtttggtgacgggccgtggcagg

SEQ ID NO: 814481 - DNA, 75 bp, synthetic construct
  source 1..75: mol_type = other DNA
acgggaaatgcaggtccacagggtccaaagggagataccggtgcggcaggtccggcaggcccacagggaccgaaa

SEQ ID NO: 814482 - DNA, 75 bp, synthetic construct
  source 1..75: mol_type = other DNA
acaggggagagcggggagagaccgggctgacaggaagtacaggtccacagggtccaaagggagacaccggggcag

SEQ ID NO: 814483 - DNA, 75 bp, synthetic construct
  source 1..75: mol_type = other DNA
gcaggcccacagggaccgaaaggagaaacaggtgcggctggcccggtgggggcaaccggacctcagggaccaaag

SEQ ID NO: 814484 - DNA, 75 bp, synthetic construct
  source 1..75: mol_type = other DNA
tgaggaggcgaagaagaatgccggagaggcggagacatcagcgaggaatgccggcatatcatccagtaaggcgga

SEQ ID NO: 814485 - DNA, 75 bp, synthetic construct
  source 1..75: mol_type = other DNA
agtgatacaggcagaacaggagaatgacatgaacatactaaaaaaacttatgcagcgtctgtgcgggcacggaaa

SEQ ID NO: 814486 - DNA, 75 bp, synthetic construct
  source 1..75: mol_type = other DNA
ctcatcaccggactgacctttcttgcccccaaagatgccacacgggttcagggtttttttcagcatttgcaggtc

SEQ ID NO: 814487 - DNA, 75 bp, synthetic construct
  source 1..75: mol_type = other DNA
gccggcatatcagccagtcaggcagaagagagcgctgcaaatgctgacacttcagcaggggaggcatcggagtca

SEQ ID NO: 814488 - DNA, 75 bp, synthetic construct
  source 1..75: mol_type = other DNA
agggaccgaaaggagaaacaggagcggcaggtccggtaggggctaccggacctcagggggcgaagggcgacccgg

SEQ ID NO: 814489 - DNA, 75 bp, synthetic construct
  source 1..75: mol_type = other DNA
gatttatatattgtttatgaaacacagcaggtgacgcccgcgatggttaagctgttggctgcattgacacagtag

SEQ ID NO: 814490 - DNA, 75 bp, synthetic construct
  source 1..75: mol_type = other DNA
tcattttccgtccgctcaaagagcgcatcccggcagatttatatattgtttatgaaacgcagcaggtgacgcccg

SEQ ID NO: 814491 - DNA, 75 bp, synthetic construct
  source 1..75: mol_type = other DNA
cgaacggggaccggcaggtgatgctggtccggcaggaccacagggaccgaaaggcgacaggggagagcggggaga

SEQ ID NO: 814492 - DNA, 75 bp, synthetic construct
  source 1..75: mol_type = other DNA
gaggcactgcgtcgttttgaactgatggtggaagaagcggcgcgtcacgctgaggaggcgaagaagatgccggag

SEQ ID NO: 814493 - DNA, 75 bp, synthetic construct
  source 1..75: mol_type = other DNA
accgtgtatgaagattctcaatccggtacgctgaatgattttctcggtgccatgacggaggatgatgcccgtccg

SEQ ID NO: 814494 - DNA, 75 bp, synthetic construct
  source 1..75: mol_type = other DNA
tacagcatggacgttgagtacggtcagtacagcgtcattctgttggtggaaggattcccgccgtcacatgccggg

SEQ ID NO: 814495 - DNA, 75 bp, synthetic construct
  source 1..75: mol_type = other DNA
acagggaccgaaaggagaaacaggtgcggctggcccggtgggggcaaccggacctcaggggccgaagggcgaccc

SEQ ID NO: 814496 - DNA, 75 bp, synthetic construct
  source 1..75: mol_type = other DNA
ctgaatggtgaacaattagtaacaaatttggttcagcaattattagatctactgagacagaacgatattatcaga

SEQ ID NO: 814497 - DNA, 75 bp, synthetic construct
  source 1..75: mol_type = other DNA
ggcgaacggggaccggcaggtgatgctggtccggcaggcccgcaggggccgaaaggcgacaggggagagcgggga

SEQ ID NO: 814498 - DNA, 75 bp, synthetic construct
  source 1..75: mol_type = other DNA
catgtcggaggatgacgtccggccggaggcactgcgtcgttttgaactgatggtggaagaagcagcgcgtcacgc

SEQ ID NO: 814499 - DNA, 75 bp, synthetic construct
  source 1..75: mol_type = other DNA
cacacttctacagcgtcgcccaacatgcggtgctttgcagccagctggtaccgcaggaatttgcttttgaagcgt

SEQ ID NO: 814500 - DNA, 75 bp, synthetic construct
  source 1..75: mol_type = other DNA
ccggcaggcggcagaaagtgcagccgctgcaaagcagtcagaggaggcgtcctcgtcctcggcttctgcggccgc

SEQ ID NO: 814501 - DNA, 75 bp, synthetic construct
  source 1..75: mol_type = other DNA
ctcgtattcgtggtctttcttcttcattgactaaagaggatttactgcagctggaagaaggatttgaataccgaa

SEQ ID NO: 814502 - DNA, 75 bp, synthetic construct
  source 1..75: mol_type = other DNA
ccagtgcaagtgtcagtgaactgaaaaaaaatccgatggcgacagtcagcgccggtgatggttatccggtcgcca

SEQ ID NO: 814503 - DNA, 75 bp, synthetic construct
  source 1..75: mol_type = other DNA
gattcgctggtgcaagggctgggtaaagagttgcctgcggcactggctccgatagcgaaagggaatgcagcttaa

SEQ ID NO: 814504 - DNA, 75 bp, synthetic construct
  source 1..75: mol_type = other DNA
ggtccaggcagttaaaaacgactccggtaccaatgtgctctccatgccgagtatcaccacgctggacaaccagga

SEQ ID NO: 814505 - DNA, 75 bp, synthetic construct
  source 1..75: mol_type = other DNA
acgttggtaaatggtgagccgtatcaggggcaattacttttccctacccaaaaatataaaattaagatcaaagcg

SEQ ID NO: 814506 - DNA, 75 bp, synthetic construct
  source 1..75: mol_type = other DNA
ccagtgcaagtgtcagtgaactgaaaaaaaatccgatggctacagtcagtgccggagatggtttccctgtcgcca

SEQ ID NO: 814507 - DNA, 75 bp, synthetic construct
  source 1..75: mol_type = other DNA
agctggagaaagagtacgtcattgccgctcgcctggatggcgcaaccacactgaatattctgtggttcgccgttc

SEQ ID NO: 814508 - DNA, 75 bp, synthetic construct
  source 1..75: mol_type = other DNA
accacgaaggcgtcagaagctgccacctcggcacggggtgcggcggcctcaaaagaggcagcgaagacatccgag

SEQ ID NO: 814509 - DNA, 75 bp, synthetic construct
  source 1..75: mol_type = other DNA
aaaacggctgccgcatcgtcagccagttcggcggcgtcatcggcatcatcggcgtctgcttcaaaagatgaggcg

SEQ ID NO: 814510 - DNA, 75 bp, synthetic construct
  source 1..75: mol_type = other DNA
atcaggagttggttaaactggtagccgaacgcagcaaccaaccgctgcatgatgtagacctggataaatacctat

SEQ ID NO: 814511 - DNA, 75 bp, synthetic construct
  source 1..75: mol_type = other DNA
gaaagaatgcttgatgccttggatgaccaggagctggtaaaactggttactgaacgcagcagtcagtctctgcat

SEQ ID NO: 814512 - DNA, 75 bp, synthetic construct
  source 1..75: mol_type = other DNA
gggtttcttaacaaaacagcacctcagctaaacgtattcacattatcactgccagtaaaaagtttgatagcaatc

SEQ ID NO: 814513 - DNA, 75 bp, synthetic construct
  source 1..75: mol_type = other DNA
cgctggcaggatggtaactcggttaccgaagaggatatccacgcgctggcaggatggctgaaaaatgcccatgct

SEQ ID NO: 814514 - DNA, 75 bp, synthetic construct
  source 1..75: mol_type = other DNA
ttcgcccaacagacattccccgtgccaatcagcaccgagtaaatatgttacgtgctggtttttgcgacattgcgg

SEQ ID NO: 814515 - DNA, 75 bp, synthetic construct
  source 1..75: mol_type = other DNA
aggagctgtagcgtatataccctcagaagttgctcttggtggggaattaataaaacaagaaggagtccgatatca

SEQ ID NO: 814516 - DNA, 75 bp, synthetic construct
  source 1..75: mol_type = other DNA
gtttgcggcaataaggttcccacgatcctttttccggaggatccatcagaagagcgcttactagtgtggttatcc

SEQ ID NO: 814517 - DNA, 75 bp, synthetic construct
  source 1..75: mol_type = other DNA
catggtcactacccgcagatttattgactatggtgatacctgggcgaatgctgaaaacaacgaaaagaacagcat

SEQ ID NO: 814518 - DNA, 75 bp, synthetic construct
  source 1..75: mol_type = other DNA
caaaacatcaaacaaatctattccccggtggaaagccatcttggagcatcacggttatttccgtctgaagatgag

SEQ ID NO: 814519 - DNA, 75 bp, synthetic construct
  source 1..75: mol_type = other DNA
cgcattccacaaggcgctaaaagataaccctgggctggtggagcaaatttttccgactgagcgatgtgtactcgt

SEQ ID NO: 814520 - DNA, 75 bp, synthetic construct
  source 1..75: mol_type = other DNA
ggacattttcttcaggcatcactgtttcccggtatattcaacagtatcgctggtttcatttcggaaatatatcct

SEQ ID NO: 814521 - DNA, 75 bp, synthetic construct
  source 1..75: mol_type = other DNA
gaatggattgcttatccggatacactcgttggtactgactcgcacaccactatgatcaacggccttggcgtgctg

SEQ ID NO: 814522 - DNA, 75 bp, synthetic construct
  source 1..75: mol_type = other DNA
ttggtactgactcgcacaccactatgatcaacggccttggcgtgctggggtggggcgatgttaggccagccggtt

SEQ ID NO: 814523 - DNA, 75 bp, synthetic construct
  source 1..75: mol_type = other DNA
cacagtatctagcttcagcagaagctgccctgagcaaggccattagccgtagtcatttctcaaattgttttgagt

SEQ ID NO: 814524 - DNA, 75 bp, synthetic construct
  source 1..75: mol_type = other DNA
gaaatatcttcactagataatattggttattcgtatgaaaactcgctcagaatatcctatttaagggcagaaata

SEQ ID NO: 814525 - DNA, 75 bp, synthetic construct
  source 1..75: mol_type = other DNA
acgtgttcgtctgatcgatattgatgcaccagaaaaaaagcagccatacggccaaaaagcaaaacagttcctaac

SEQ ID NO: 814526 - DNA, 75 bp, synthetic construct
  source 1..75: mol_type = other DNA
acgatggcgaatacgaactctgctggcgcgcacacccactcactgtccggcactgctgcaagcgcaggcgcacac

SEQ ID NO: 814527 - DNA, 75 bp, synthetic construct
  source 1..75: mol_type = other DNA
tctcaatttacttatggtgttcctgtaaactttaacgcttccagaacctggtctggtgccacaagcactacaggt

SEQ ID NO: 814528 - DNA, 75 bp, synthetic construct
  source 1..75: mol_type = other DNA
agattgaggaaagggcaggtagcacaaatgcttatattgtccttccttatgaacaagaagccaagacacaacaag

SEQ ID NO: 814529 - DNA, 75 bp, synthetic construct
  source 1..75: mol_type = other DNA
tttatggaaagctttaatcagaaagttttcgaagaagctgtaggacgtaaggttgaatttgttcaggataaccat

SEQ ID NO: 814530 - DNA, 75 bp, synthetic construct
  source 1..75: mol_type = other DNA
ttatgcacaaggaaaattggtgcgctgcgttgtcggtgaagtttttgacgtagctgttgatattcgtaaatcgtc

SEQ ID NO: 814531 - DNA, 75 bp, synthetic construct
  source 1..75: mol_type = other DNA
gtgcatctgtctggcgagaacaagcgccagctgtggatcccggaaggtttcgcccacggctttatgaccctgagc

SEQ ID NO: 814532 - DNA, 75 bp, synthetic construct
  source 1..75: mol_type = other DNA
tcctcaaaaacggctgccgcatcgtccgccagttcggcggcgtcatcggcatcatcggcgtctgcttcaaaagat

SEQ ID NO: 814533 - DNA, 75 bp, synthetic construct
  source 1..75: mol_type = other DNA
atggacgtcgagtatggtcagtacagcgtcagtctgttggtggagggattcccgccgtcacacgccgggaccatc

SEQ ID NO: 814534 - DNA, 75 bp, synthetic construct
  source 1..75: mol_type = other DNA
caatatggttatacaagctcaggtcaaaatacctggggtgtacaaggctcagtaggtatgtctacggggtggtta

SEQ ID NO: 814535 - DNA, 75 bp, synthetic construct
  source 1..75: mol_type = other DNA
gtcggcgcaccaatcccgtggccatcagataccgttccgtctggttatgccctgatgcaggggcagacttttgac

SEQ ID NO: 814536 - DNA, 75 bp, synthetic construct
  source 1..75: mol_type = other DNA
cagcaggagtgccacgctatcggcgatggttcactacgccgggattgtgcgggaaaaatccatccagcggtacgc

SEQ ID NO: 814537 - DNA, 75 bp, synthetic construct
  source 1..75: mol_type = other DNA
tccgaatcgcaacgcggtgttcttcgtggtttacattatcagcttgaccccttttctcagggcaaactcgttcgc

SEQ ID NO: 814538 - DNA, 75 bp, synthetic construct
  source 1..75: mol_type = other DNA
aggcgcgcaattgcatccgttactgaagcaaacagcgatcgcagcagtgttccataaaggtgaaaaccctttagt

SEQ ID NO: 814539 - DNA, 75 bp, synthetic construct
  source 1..75: mol_type = other DNA
ttatgcacaaggaaaattggtgcgctgcgtagttggtgaagtttttgatgtagcggttgatattcgtaaatcgtc

SEQ ID NO: 814540 - DNA, 75 bp, synthetic construct
  source 1..75: mol_type = other DNA
acgaacgcatcctcgagcgccagtaatgccgcttcctcggcaacggcggcaggaaattctgcgaaggcggcaaaa

SEQ ID NO: 814541 - DNA, 75 bp, synthetic construct
  source 1..75: mol_type = other DNA
gtttgctattgataacgcaaccggcgaactggttattggaaccaaactgtccgcaagtctgaacggtaatgcatt

SEQ ID NO: 814542 - DNA, 75 bp, synthetic construct
  source 1..75: mol_type = other DNA
ggaaaaggcgttgccggtagtcaatgtgatacagcataacctgagcagttatgagcaactactgcgtggcaaggg

SEQ ID NO: 814543 - DNA, 75 bp, synthetic construct
  source 1..75: mol_type = other DNA
cagaagagcaacggatacgtatgccgatgcggatgggggcgttccatggaatgccgaatcaggcgcttacaatgt

SEQ ID NO: 814544 - DNA, 75 bp, synthetic construct
  source 1..75: mol_type = other DNA
cagatttggggacgaaaaccacatcgtcgtttgattacggcactaaatccacgaataacactggtgcgcataccc

SEQ ID NO: 814545 - DNA, 75 bp, synthetic construct
  source 1..75: mol_type = other DNA
atatccgcacctggtgctgatctcgttgttaatgatacgacctataagtttggggcaacaaatccggcgactgaa

SEQ ID NO: 814546 - DNA, 75 bp, synthetic construct
  source 1..75: mol_type = other DNA
tcggggaagcgacgaagttttcccagtatctgctggactccgacaaacgctatcgggtcattgcgcgtcttggac

SEQ ID NO: 814547 - DNA, 75 bp, synthetic construct
  source 1..75: mol_type = other DNA
atgagtcgtcctcgtcgtcgcggtcgcgacattaacggcgttttgttgctggataaaccgcagggtatgtccagc

SEQ ID NO: 814548 - DNA, 75 bp, synthetic construct
  source 1..75: mol_type = other DNA
ccagatataaatattatttggccaaatattgcagagcctctcttatctaacaaagataaactagctaaaaatatc

SEQ ID NO: 814549 - DNA, 75 bp, synthetic construct
  source 1..75: mol_type = other DNA
atgggaaaaaagtatatcatcgttggagtgttcccgattttgagcgttttttaggtggtgaggagttggggaaag

SEQ ID NO: 814550 - DNA, 75 bp, synthetic construct
  source 1..75: mol_type = other DNA
tctccaggaaacccggggcggttcagtttatgggtttgggatgaaacgggaaaaccaacaagaaaaacatgggat

SEQ ID NO: 814551 - DNA, 75 bp, synthetic construct
  source 1..75: mol_type = other DNA
cggcggcactggatactttccgtggcgatatcgaacagatcccttcgatgtattcagcactgaaatatcagggca

SEQ ID NO: 814552 - DNA, 75 bp, synthetic construct
  source 1..75: mol_type = other DNA
ttgccgggttgttcgttgcgcattacatgacgctctgggcggcagacagccgggctattctggctggtggtccgg

SEQ ID NO: 814553 - DNA, 75 bp, synthetic construct
  source 1..75: mol_type = other DNA
atctttccctacatcgtcgggctgtatgttgcgcactacatgtacctttacgccgccgatatgcgtggtgtagct

SEQ ID NO: 814554 - DNA, 75 bp, synthetic construct
  source 1..75: mol_type = other DNA
ttgtttccgtactttgccggattgttcgttgcacactacatgacgctctgggcggcagacatccgggcgatgctg

SEQ ID NO: 814555 - DNA, 75 bp, synthetic construct
  source 1..75: mol_type = other DNA
atggtgttcaggcctcaaagtccgtggataaggtaagcgtcagttatgacaccagtgcgacgctgaatcctgatg

SEQ ID NO: 814556 - DNA, 75 bp, synthetic construct
  source 1..75: mol_type = other DNA
tgaatcctgatgcaggtttctggaataacacccgatatggcgctgaattttatcagttgatcacgatgttcggtg

SEQ ID NO: 814557 - DNA, 75 bp, synthetic construct
  source 1..75: mol_type = other DNA
accagcgcgacgctaaaccatgacgcaggcttctggaataacacccgatatggcgctgaattttatcagctgatc

SEQ ID NO: 814558 - DNA, 75 bp, synthetic construct
  source 1..75: mol_type = other DNA
tcgttgcgcactacatgacgctctgggcggcagacagcagagcgatgctggctggtggtccgggcggttcaacca

SEQ ID NO: 814559 - DNA, 75 bp, synthetic construct
  source 1..75: mol_type = other DNA
cagtaagtgattttcggcgcgactttccacagtttgctggccctgccaaatatcccgaagcacaaatccagtttc

SEQ ID NO: 814560 - DNA, 75 bp, synthetic construct
  source 1..75: mol_type = other DNA
aatgttattccactgtctcctggccatgcctatgggatgtttatggatcgttttaacgagttatcggagttacgc

SEQ ID NO: 814561 - DNA, 75 bp, synthetic construct
  source 1..75: mol_type = other DNA
cgcgacttcccgcagtttgctgacccggcaaaatatcccgacgcccaaatcgggttccgtctgaatctggccgat

SEQ ID NO: 814562 - DNA, 75 bp, synthetic construct
  source 1..75: mol_type = other DNA
tcgtggctcactacatgacgctatgggcggcagatagtcgggcaatgctggttggtggcccgggcggttcaacca

SEQ ID NO: 814563 - DNA, 75 bp, synthetic construct
  source 1..75: mol_type = other DNA
tcgttgcacactacatgacgctctggcggcagacagccgggcgatgctggctggcgggccgggcggttcaaccaa

SEQ ID NO: 814564 - DNA, 75 bp, synthetic construct
  source 1..75: mol_type = other DNA
cattcttacagcgcgtttgccagcaggcggggttttcaccaatgattgttagggaagcggtagagccgcaaactg

SEQ ID NO: 814565 - DNA, 75 bp, synthetic construct
  source 1..75: mol_type = other DNA
gcgcaatataccttgatacccagggatattacgctggagtgcgtcagggcgttcaggatgcggcaaaagattctt

SEQ ID NO: 814566 - DNA, 75 bp, synthetic construct
  source 1..75: mol_type = other DNA
tctgtcgctttgcgggccatctttcgcacttctacagggtcgcccaacatgcggtcctttgcagccagctggtgc

SEQ ID NO: 814567 - DNA, 75 bp, synthetic construct
  source 1..75: mol_type = other DNA
gcgagcggcagcagatgttgccagtagggtgagcggagtgaagcgggtcacgacggccttctcctgtatacggtg

SEQ ID NO: 814568 - DNA, 75 bp, synthetic construct
  source 1..75: mol_type = other DNA
ttgctcaggaactggaaaacaaccaggtgctgaaagcggtggtggatatttccggtaagaaaatgggcaatgctg

SEQ ID NO: 814569 - DNA, 75 bp, synthetic construct
  source 1..75: mol_type = other DNA
tttggttcagatatgacgactgaaattgcccaggaactggaaaacaaccaggtgctgaaagcggtagtggatatt

SEQ ID NO: 814570 - DNA, 75 bp, synthetic construct
  source 1..75: mol_type = other DNA
ttgctatcgatttacctgctgaagtccgcgagcaaataatccactggcgcgccgcacagtttccgccagacgcag

SEQ ID NO: 814571 - DNA, 75 bp, synthetic construct
  source 1..75: mol_type = other DNA
gatgcctctgcgatggtcggtctgtacggctgcgcgggactggctgtactgtgtatttttggcggctggtttgcg

SEQ ID NO: 814572 - DNA, 75 bp, synthetic construct
  source 1..75: mol_type = other DNA
gctgcctggagcggcaattatgatcagcgtgttgttggttaacctccttggcgatggtgtacgtcgtgcgattat

SEQ ID NO: 814573 - DNA, 75 bp, synthetic construct
  source 1..75: mol_type = other DNA
agatatgcggttatgaaaacacgtcatattttgtaagtgttttcagaaggtattttggtgttcctccccatcaat

SEQ ID NO: 814574 - DNA, 75 bp, synthetic construct
  source 1..75: mol_type = other DNA
tgtaagtgtttttagaggatattttggtgtgcctccgcaccaatatttatcaagattttcggtaatgactccaac

SEQ ID NO: 814575 - DNA, 75 bp, synthetic construct
  source 1..75: mol_type = other DNA
gcatctgacgctggcgtttttaggcgaagtgagcgcagagaaagagaaggcgctctcacttttggccggacggat

SEQ ID NO: 814576 - DNA, 75 bp, synthetic construct
  source 1..75: mol_type = other DNA
agtctggatgtcgtgtttggtgagcgtaaactaaaaaccaccgttctcgccaatgatggcgaattaatagttctt

SEQ ID NO: 814577 - DNA, 75 bp, synthetic construct
  source 1..75: mol_type = other DNA
aaagtaaggaattgaagatagttttttatgatcagggtgttggtatccctaaaactttacctgcatcaaaagttt

SEQ ID NO: 814578 - DNA, 75 bp, synthetic construct
  source 1..75: mol_type = other DNA
aaacactcaatgaatcaaggtaatacaaaaataaaaactaagagttttgcatccccaatctatggtacactaata

SEQ ID NO: 814579 - DNA, 75 bp, synthetic construct
  source 1..75: mol_type = other DNA
cagtggtttgtccgaagctattacaaatgttgttcatcatgcttatccagataataaaggctatcatgagcatga

SEQ ID NO: 814580 - DNA, 75 bp, synthetic construct
  source 1..75: mol_type = other DNA
aagcccttcgccccgatgaagagcgtctttctccgttgcactcggtctatgttgaccagtgggactgggaacgcg

SEQ ID NO: 814581 - DNA, 75 bp, synthetic construct
  source 1..75: mol_type = other DNA
aggggcaattgcaggactcattttctggccgatgctgtggggtgcgttgaaaactgaagcgttttactggttggc

SEQ ID NO: 814582 - DNA, 75 bp, synthetic construct
  source 1..75: mol_type = other DNA
cagttaattcaaggcgaaaacgagtttgaaatcttctgcgtttctgacagtaaagagcacctttccagttcatcg

SEQ ID NO: 814583 - DNA, 75 bp, synthetic construct
  source 1..75: mol_type = other DNA
cgatcactgaacgctttggcccgtcgcacatggcgttcctggtagtgccgatggtcggtgcgttctttatcgata

SEQ ID NO: 814584 - DNA, 75 bp, synthetic construct
  source 1..75: mol_type = other DNA
ttctggtggtacagaccatcttcatggcgttgtatgccatcttcgttacctggcgcatgatgggcaaaaactacg

SEQ ID NO: 814585 - DNA, 75 bp, synthetic construct
  source 1..75: mol_type = other DNA
acattgatcgccttgaacgttttcattctctgctggcggggcaatactggtccgccctcgtcgatattccggcag

SEQ ID NO: 814586 - DNA, 75 bp, synthetic construct
  source 1..75: mol_type = other DNA
gataaaaaatctgaggtaaaatcagtaagcttcgctctgcctgtttgtggtacacttatagtatggagtacaaag

SEQ ID NO: 814587 - DNA, 75 bp, synthetic construct
  source 1..75: mol_type = other DNA
gagagagagatattttacgatcctatttacatcgtacaggaagagatgttgtatctgcagggcgctctaagatta

SEQ ID NO: 814588 - DNA, 75 bp, synthetic construct
  source 1..75: mol_type = other DNA
atgcggtggcgattcccgcaccaggattttgctggtcatttccggtgagtgaatttgtcctgtatgcctccacat

SEQ ID NO: 814589 - DNA, 75 bp, synthetic construct
  source 1..75: mol_type = other DNA
tttctccggtacggatttttcgacccattacattgtgcttggtttccgcctgcaggtggacgccgggaccttaac

SEQ ID NO: 814590 - DNA, 75 bp, synthetic construct
  source 1..75: mol_type = other DNA
atgtttttacgtcaggaagactttgccacggtagtgcgctccactccgcttgtctctctcgactttattgtcgag

SEQ ID NO: 814591 - DNA, 75 bp, synthetic construct
  source 1..75: mol_type = other DNA
ggcgagcaaattattgctaacgccttagatactaaaccagaagtcatttggcctagtcgttatcaagtaggtgaa

SEQ ID NO: 814592 - DNA, 75 bp, synthetic construct
  source 1..75: mol_type = other DNA
cattctctggtatcccggacaggcaaaagcctctgacttgtaacaaaaacaaagataaaaatgagaacgaggatg

SEQ ID NO: 814593 - DNA, 75 bp, synthetic construct
  source 1..75: mol_type = other DNA
tcaacagtatggtccgactataaaaatgaaaaactcaccgacgctatctccctgcgctacctggtcgccggtgaa

SEQ ID NO: 814594 - DNA, 75 bp, synthetic construct
  source 1..75: mol_type = other DNA
aggtctgtttttagcaaacatttctattggcattttcgcagtgctttgatttttacatttatgaaaaaaagattg

SEQ ID NO: 814595 - DNA, 75 bp, synthetic construct
  source 1..75: mol_type = other DNA
acgcactatgtggtgctcggttttcgcttcagcgtcgcggaagaagagctgttactgccggatgaacagcatgac

SEQ ID NO: 814596 - DNA, 75 bp, synthetic construct
  source 1..75: mol_type = other DNA
attgctgatgcgctggagatagctccagagatcatctggccttccagatacttcgacagcaaaggtaatcgcctg

SEQ ID NO: 814597 - DNA, 75 bp, synthetic construct
  source 1..75: mol_type = other DNA
gcaatgtatatcagtttaaggatgtaaaagaggtgctggctaaagccaacgaactgcgttcgggggtgtgctggc

SEQ ID NO: 814598 - DNA, 75 bp, synthetic construct
  source 1..75: mol_type = other DNA
cgatgttcacgttaatagccgtgtttattttaataatgacccacgtgcagtcattggcttaaataaaaaggaagt

SEQ ID NO: 814599 - DNA, 75 bp, synthetic construct
  source 1..75: mol_type = other DNA
gaatataaagtgcttccaccattgcccgacaagaatgaagccagtacgactgatatgacagagcagcaaatcatg

SEQ ID NO: 814600 - DNA, 75 bp, synthetic construct
  source 1..75: mol_type = other DNA
actgcgctatctggtacgattcacgctggtggatgtagctacaggtgagtgggctgcctggtcgccggtgaatta

SEQ ID NO: 814601 - DNA, 75 bp, synthetic construct
  source 1..75: mol_type = other DNA
cacagcgtaaatataattatatgcgcgctgaacagatctatcgggatgaggaaggaataagcctgatgccggaaa

SEQ ID NO: 814602 - DNA, 75 bp, synthetic construct
  source 1..75: mol_type = other DNA
atgacaatctggctacgtttacactaagtggcgggcggaatgccgaatacagtataacagccactcaacgccaga

SEQ ID NO: 814603 - DNA, 75 bp, synthetic construct
  source 1..75: mol_type = other DNA
attatttctataaacctgttacatatatcgacatggtcaaaattatcctttctaaaccgaaggtgaaggttgtgg

SEQ ID NO: 814604 - DNA, 75 bp, synthetic construct
  source 1..75: mol_type = other DNA
acattctgcatgaaaatggttttgtcatcgcgctggatgatttcggtactggttactcagggctttcttatctgc

SEQ ID NO: 814605 - DNA, 75 bp, synthetic construct
  source 1..75: mol_type = other DNA
ggtcagcagatgaaaaattgcagctgaaggtctacaccaccgctccggctctgcaattctactccggcaacttcc

SEQ ID NO: 814606 - DNA, 75 bp, synthetic construct
  source 1..75: mol_type = other DNA
gtgaaacatctgcatcgattctttagcagtgatgcctcgggaggcattattcttatcattgccgctatcctggcg

SEQ ID NO: 814607 - DNA, 75 bp, synthetic construct
  source 1..75: mol_type = other DNA
acagggaacggtctggtgcacatccttaccggggaatcgggtcctgctatctcgtattcctgttttcccggacag

SEQ ID NO: 814608 - DNA, 75 bp, synthetic construct
  source 1..75: mol_type = other DNA
gaagcgtcacaggcgactcaaacggcggttaacattgccgggaaggaatgcgacctcgaggagcaatatcagctt

SEQ ID NO: 814609 - DNA, 75 bp, synthetic construct
  source 1..75: mol_type = other DNA
ctgtatagttcaggctccgcagccaccaaaacccatcgagcgcagttacgccagtccggctctgctggcccgcat

SEQ ID NO: 814610 - DNA, 75 bp, synthetic construct
  source 1..75: mol_type = other DNA
gacgagcaacaatttcgtgactggttgtcagttcacttatctacgtgggcctcggagaagggtcatttctgcccg

SEQ ID NO: 814611 - DNA, 75 bp, synthetic construct
  source 1..75: mol_type = other DNA
tcggaagcccagcagacgctgcaggcagagcaccgggtccgggtccgggtccgggtccgggtccgggtccgggtc

SEQ ID NO: 814612 - DNA, 75 bp, synthetic construct
  source 1..75: mol_type = other DNA
gtttctgggggcctctattggtcgttatgccaaccgcatcgccaatagccgttatacctttgacggtgaaaccgt

SEQ ID NO: 814613 - DNA, 75 bp, synthetic construct
  source 1..75: mol_type = other DNA
gttataccttaaacggtgaaaccgtgacgctgttgccaagtcagggtgttaaccagctgcatggcggcccggaag

SEQ ID NO: 814614 - DNA, 75 bp, synthetic construct
  source 1..75: mol_type = other DNA
ctccgggtagttgcactggggcggcgtaactacatgttcttcggctctgatggtggaggcgagagtgcggcagtg

SEQ ID NO: 814615 - DNA, 75 bp, synthetic construct
  source 1..75: mol_type = other DNA
gcagtgatgcctcgggaggcattattcttatcattgccgctatcctggcgatgatgatggccaacagcggcgcaa

SEQ ID NO: 814616 - DNA, 75 bp, synthetic construct
  source 1..75: mol_type = other DNA
tctctggttcggaggctacaacagcaaaacggatcgggagaataactttggctttctcttatcagagaatggtaa

SEQ ID NO: 814617 - DNA, 75 bp, synthetic construct
  source 1..75: mol_type = other DNA
ccaggccgcatttccagttatcgccgcaatcggcgggatgattgtcccggcattgctctatctggcttttaacta

SEQ ID NO: 814618 - DNA, 75 bp, synthetic construct
  source 1..75: mol_type = other DNA
atgaagaagcgctggattacaccctcagaattgtgagaaacggaaaaaaacttgaagccggaaattattttgccg

SEQ ID NO: 814619 - DNA, 75 bp, synthetic construct
  source 1..75: mol_type = other DNA
atgattttattctgggacctgatctcgttgttacgaccgtcggtcattttcagggtgggatcaacgtaccccggc

SEQ ID NO: 814620 - DNA, 75 bp, synthetic construct
  source 1..75: mol_type = other DNA
ttcactatttatgactggcttgcccactatggcatgacctatctgattgcaggcgaaccttctaagcgggatttc

SEQ ID NO: 814621 - DNA, 75 bp, synthetic construct
  source 1..75: mol_type = other DNA
cgtaactacgataaccagtttgcacttttcgcctctgataagaattttgatgatttgaccgcacaacaaatatct

SEQ ID NO: 814622 - DNA, 75 bp, synthetic construct
  source 1..75: mol_type = other DNA
tatgacgataaccggggacgtgaatcccgtagtgatccgggttatgacaatgtgctgggtgtcgccgtcatcccg

SEQ ID NO: 814623 - DNA, 75 bp, synthetic construct
  source 1..75: mol_type = other DNA
gacattaaatctttaattgcttatttaagtaatacagatgatttaattgttgatttttttgctggctcaggcaca

SEQ ID NO: 814624 - DNA, 75 bp, synthetic construct
  source 1..75: mol_type = other DNA
tagccgctatcatggattgtccggtaggtacggtgcgttcacgtatcttccgagcgagggaagctattgataaca

SEQ ID NO: 814625 - DNA, 75 bp, synthetic construct
  source 1..75: mol_type = other DNA
tcggcggcctatgcccttgccagcgccgccgaccggatcctggtcccccgcacgggtggcgtggggtccgttggt

SEQ ID NO: 814626 - DNA, 75 bp, synthetic construct
  source 1..75: mol_type = other DNA
tcgggatcacccggataaaaacgggggcctggtatgacgatgatgaagacgatttctgccgtcccgcccgtgaaa

SEQ ID NO: 814627 - DNA, 75 bp, synthetic construct
  source 1..75: mol_type = other DNA
gcctttttaatacaccgctggcgctgcacccaagtaaagctgaagtcatcatggcatccgttatggaccggtttg

SEQ ID NO: 814628 - DNA, 75 bp, synthetic construct
  source 1..75: mol_type = other DNA
gaatcatccgcgagcgaacggcactgtgcaatgaaatccgggggctgttaagtgagtttggtctggtgctgcccg

SEQ ID NO: 814629 - DNA, 75 bp, synthetic construct
  source 1..75: mol_type = other DNA
ctatcggtagtgatatcgccctgatgcagcttaacggcatcgcccagaaactgaaattcaaagcattacaggagc

SEQ ID NO: 814630 - DNA, 75 bp, synthetic construct
  source 1..75: mol_type = other DNA
taatcatggaaatcgatgaaggctttgcggtaggcatgtcgccagccgaactcagcgctgagcagctcttaagca

SEQ ID NO: 814631 - DNA, 75 bp, synthetic construct
  source 1..75: mol_type = other DNA
ccagccggaagtaaccgatgcggtgaacgctctgcttgcgctcgatcccttagataatcacccgacaaaaatccc

SEQ ID NO: 814632 - DNA, 75 bp, synthetic construct
  source 1..75: mol_type = other DNA
attggggcatgtcgaggtgcgagaaagggacgagcccgaggttagggagtttgagccgccgaaggcgaaaacaaa

SEQ ID NO: 814633 - DNA, 75 bp, synthetic construct
  source 1..75: mol_type = other DNA
acctcaaccaaggtgtattcattgcctggaaacagcttggggacctttatgacttgatcagccacgacaagatcc

SEQ ID NO: 814634 - DNA, 75 bp, synthetic construct
  source 1..75: mol_type = other DNA
cgccctgacagaagccgagcgcaatgccagtgaactgacccgctgggcaggcagaaaatgcccgagcggtcgggt

SEQ ID NO: 814635 - DNA, 75 bp, synthetic construct
  source 1..75: mol_type = other DNA
accgtaacagttacgccctgacagaaaccgagcgcaatgccagcgaattgatccgctgggcaggcagaaaatgcc

SEQ ID NO: 814636 - DNA, 75 bp, synthetic construct
  source 1..75: mol_type = other DNA
actggcgaataaaggttgggtgcgtggtgaaccgcaggatggtggctggatcggctggatgatcaaacctctggg

SEQ ID NO: 814637 - DNA, 75 bp, synthetic construct
  source 1..75: mol_type = other DNA
gctcgatcccttagataatcacccgacaaaaatccccactcttccggccttttatcagccatcgctctggacgcg

SEQ ID NO: 814638 - DNA, 75 bp, synthetic construct
  source 1..75: mol_type = other DNA
cccggtattaaaagcaaacgcccaatcactgccagatagcgccctcctccacctcggtgaaatgctccgcttccc

SEQ ID NO: 814639 - DNA, 75 bp, synthetic construct
  source 1..75: mol_type = other DNA
caaactgctgaaaaaagatgcgcgtaccgtcgccgcccagcaggtggcaaggcttgaatccgccatgtgcctgcg

SEQ ID NO: 814640 - DNA, 75 bp, synthetic construct
  source 1..75: mol_type = other DNA
gtctggatgataacggttcgctgctgctggatttcggcccacgtcagttcaccgtcagctttgatgaaaccttaa

SEQ ID NO: 814641 - DNA, 75 bp, synthetic construct
  source 1..75: mol_type = other DNA
agcactcaaggatgttgggggtggactgggggacatcgactttccgtttgacgcattcagcgcatcggcagagac

SEQ ID NO: 814642 - DNA, 75 bp, synthetic construct
  source 1..75: mol_type = other DNA
atttcgaaattacaaactttttacaacttgtgctcacctggagtttgttaatcattctttcatgtggcgtcggct

SEQ ID NO: 814643 - DNA, 75 bp, synthetic construct
  source 1..75: mol_type = other DNA
agaagacgaagaccgggcggttgtgggcgtatgttcgtgatgaccgcaatgcagggtcagcgttggcacctgcag

SEQ ID NO: 814644 - DNA, 75 bp, synthetic construct
  source 1..75: mol_type = other DNA
cgtgtatggctcatgcccggagaaaaatccacgatgtgcatgcaagagcgcccaccgacatcaccacggaagccc

SEQ ID NO: 814645 - DNA, 75 bp, synthetic construct
  source 1..75: mol_type = other DNA
caatgttcactctggtaaccctgttcattggtctggcgttataccgaactcgtgaggaggccatgctgacatcat

SEQ ID NO: 814646 - DNA, 75 bp, synthetic construct
  source 1..75: mol_type = other DNA
agaaagtcaccgtagaggcattatttctacgagaaatacgaacacgttttggtaagtttcgtctggggtatttgt

SEQ ID NO: 814647 - DNA, 75 bp, synthetic construct
  source 1..75: mol_type = other DNA
caatgtttactctggtcaccctgttcatcggcctggcattataccgaacgcgtgaagaggcaatgctgacatcat

SEQ ID NO: 814648 - DNA, 75 bp, synthetic construct
  source 1..75: mol_type = other DNA
taacaccgaaagccgggtttatccttgccctgagcagtgggtagcggagatcgagcaatcaatgagaaatctggg

SEQ ID NO: 814649 - DNA, 75 bp, synthetic construct
  source 1..75: mol_type = other DNA
tcctggaagaggatggctgcttagtaaccagtgacaaagccttcgacatgattgccggtgaaaacatcggcatca

SEQ ID NO: 814650 - DNA, 75 bp, synthetic construct
  source 1..75: mol_type = other DNA
cttcctaagcgggaggttcaaccagtggctcctgagcccaaagttgagcgtgagaaggaattgggacacgtcgag

SEQ ID NO: 814651 - DNA, 75 bp, synthetic construct
  source 1..75: mol_type = other DNA
cgctcagtcgtatcggtgcgctgtatgctatcgagtcagagatccgcggcagtccggcagaagagccagaagcgt

SEQ ID NO: 814652 - DNA, 75 bp, synthetic construct
  source 1..75: mol_type = other DNA
gagccgcaatacgatggggcgctgggttgacattatgggagagcaacttcgtccgctgtatgatgaactgaacca

SEQ ID NO: 814653 - DNA, 75 bp, synthetic construct
  source 1..75: mol_type = other DNA
ttgctgatgatgttaaatcccgaacggggaaagcagttaaaacatgctggatcgctcatgttaaatcattgcatg

SEQ ID NO: 814654 - DNA, 75 bp, synthetic construct
  source 1..75: mol_type = other DNA
acgatgctattaatgccctgaaaacaggcaaccatgtcgatttctcgtttattcagcagggcaatatctccttac

SEQ ID NO: 814655 - DNA, 75 bp, synthetic construct
  source 1..75: mol_type = other DNA
acgacgctattgacgctattaatgccctgaaaaccggcaaccatgtcgatttctcgtttattcagcagggcaata

SEQ ID NO: 814656 - DNA, 75 bp, synthetic construct
  source 1..75: mol_type = other DNA
gacattgatatgaatagtaaaaagattaccatttcgcacgaagcaatcccggcggtgggctggcctgcaatgacc

SEQ ID NO: 814657 - DNA, 75 bp, synthetic construct
  source 1..75: mol_type = other DNA
tgcgagaaggcgatacgctgattgtgattgctatagatcgcctggggcgtaacacgattgacgttctttccaccg

SEQ ID NO: 814658 - DNA, 75 bp, synthetic construct
  source 1..75: mol_type = other DNA
acaactgttatgccgccgacagcggcctgtccgaggcgctgaccgctcgtctgcaccacgacgctcgccctaagg

SEQ ID NO: 814659 - DNA, 75 bp, synthetic construct
  source 1..75: mol_type = other DNA
tcaccatttcgcatgaagcaattccagcggtgggctggcctgcaatgaccatgcgctttacttttgttaatgcag

SEQ ID NO: 814660 - DNA, 75 bp, synthetic construct
  source 1..75: mol_type = other DNA
tgaaggagctgcctaagtgcggcgggtggcctgatggtatgatcgattgtcgcctgctcagtgccaatttaatgg

SEQ ID NO: 814661 - DNA, 75 bp, synthetic construct
  source 1..75: mol_type = other DNA
tgggcgcaattcgttattgacggcaatggtctgggacgcgttgcctggctattaccggagcagagttcaaccatt

SEQ ID NO: 814662 - DNA, 75 bp, synthetic construct
  source 1..75: mol_type = other DNA
tggcctccattctgccgttggggattatcgcggggttgctgattggcaagccgctgggtattagcctgttctgct

SEQ ID NO: 814663 - DNA, 75 bp, synthetic construct
  source 1..75: mol_type = other DNA
cgaagaactgaacgtcagtgaagaagaaaaaaaacgttggtatgcgcactggatccagcaagggttaagcgcggt

SEQ ID NO: 814664 - DNA, 75 bp, synthetic construct
  source 1..75: mol_type = other DNA
agatcaccgtcaatggtgatgtcgtcggggaggggctccagcttgcagggaaactacatctgcccgagagccact

SEQ ID NO: 814665 - DNA, 75 bp, synthetic construct
  source 1..75: mol_type = other DNA
ggagaggggggctgtttacgccttccacgctaagaacatgcagcctttctacaaagacggtactcgcatggtaaa

SEQ ID NO: 814666 - DNA, 75 bp, synthetic construct
  source 1..75: mol_type = other DNA
tgagcagttactcactacgtacgttttagatgcgaaagaagaagcacgcgcagagtcattattagcgcaattaca

SEQ ID NO: 814667 - DNA, 75 bp, synthetic construct
  source 1..75: mol_type = other DNA
tcctttccgaaaacgccaattttgctgagcaggttgaacgctctggctttatcttcatcggcccgaaagcagaca

SEQ ID NO: 814668 - DNA, 75 bp, synthetic construct
  source 1..75: mol_type = other DNA
atcgtgaaggtaaagtcagccgcattgttgaattcatcgaaaagccggatcagccgcagacgctggactcagaca

SEQ ID NO: 814669 - DNA, 75 bp, synthetic construct
  source 1..75: mol_type = other DNA
gggttatatgcaggcgtttgtgaagtatggactacgcaacctgaaagaaggagcgaagttccgcaaaggcattga

SEQ ID NO: 814670 - DNA, 75 bp, synthetic construct
  source 1..75: mol_type = other DNA
gagcagcaccatgacgctgaccgacgccgaaatcgctgaaggttacgtactggcgtgttcatgtcatccgcaggg

SEQ ID NO: 814671 - DNA, 75 bp, synthetic construct
  source 1..75: mol_type = other DNA
tcgtaacaacaatggccgtatcaccactcgtcatatcggtggtggccacaagcaggcttaccgtattgttgactt

SEQ ID NO: 814672 - DNA, 75 bp, synthetic construct
  source 1..75: mol_type = other DNA
aaatcatcaatattcaccattcattcctgcctgcgtttatcggcgcacgtccttatcaccaggcctatgaacgtg

SEQ ID NO: 814673 - DNA, 75 bp, synthetic construct
  source 1..75: mol_type = other DNA
gatcagccgcagacgctggactcagacatcatggccgtgggccgttatgtgctttctgccgatatttggccggaa

SEQ ID NO: 814674 - DNA, 75 bp, synthetic construct
  source 1..75: mol_type = other DNA
ccgccgcctgcgtgccgctaataagttcccggcaatcatctacggtggcaaagaagcgccgctggctgtcgaact

SEQ ID NO: 814675 - DNA, 75 bp, synthetic construct
  source 1..75: mol_type = other DNA
gatgcattcaaatacggtcaatttatgatgaatgcgaaggaaaatgagtaccgtgatttcttcctaaaagtagtc

SEQ ID NO: 814676 - DNA, 75 bp, synthetic construct
  source 1..75: mol_type = other DNA
ttctgccgatatttggccggaactggaacgtactcagcctggtgcatgggggcgtattcagctgactgatgccat

SEQ ID NO: 814677 - DNA, 75 bp, synthetic construct
  source 1..75: mol_type = other DNA
gggttatatgcaagcgtttgtgaagtatgggctgcgtaacctaaaagaaggggcgaagttccgtaaagggattga

SEQ ID NO: 814678 - DNA, 75 bp, synthetic construct
  source 1..75: mol_type = other DNA
attgcgcgcttcaatgaaacgggccgtagccaggtgctggcaaaacgtatgccgggtgacctctctgaatactcc

SEQ ID NO: 814679 - DNA, 75 bp, synthetic construct
  source 1..75: mol_type = other DNA
ctgcaaggcgtgacgctggatggcctgacctccatcctgccattagggatcatcgccggtttgctgattggcaag

SEQ ID NO: 814680 - DNA, 75 bp, synthetic construct
  source 1..75: mol_type = other DNA
gcctgggccactccattttgtgcgcgcgtccgatcgttggcgataacccgtttgtggttgttctgcctgatatca

SEQ ID NO: 814681 - DNA, 75 bp, synthetic construct
  source 1..75: mol_type = other DNA
atcatgaacgtgcgtcaggcgcagccgctgggcctgggccactccatcctctgcgcccgcccggtagtcggcgac

SEQ ID NO: 814682 - DNA, 75 bp, synthetic construct
  source 1..75: mol_type = other DNA
ggtataccgccagcaatgcagggcgtttttacggcatctgggatagagccagaggacgacagcgtcacgctgttt

SEQ ID NO: 814683 - DNA, 75 bp, synthetic construct
  source 1..75: mol_type = other DNA
aactatgggctgcggaacctgaaggaaggggcgaagttcagaagccggattgagaagttgttagctaacgactga

SEQ ID NO: 814684 - DNA, 75 bp, synthetic construct
  source 1..75: mol_type = other DNA
gcgaccgatcgttggcgataacccgtttgtggttgttctgcccgatatcattctcgatggcgcatccgccgaccc

SEQ ID NO: 814685 - DNA, 75 bp, synthetic construct
  source 1..75: mol_type = other DNA
cgactttacccaaagcgcgttattatccgcaggtcgcgtaacgcaaatgctgacctcactggcgttaaaatacaa

SEQ ID NO: 814686 - DNA, 75 bp, synthetic construct
  source 1..75: mol_type = other DNA
gatgatttcgatggtgtttttacatgcgatgcagctgttcgcgatcatcgttctggcgcgttttatagtggtaag

SEQ ID NO: 814687 - DNA, 75 bp, synthetic construct
  source 1..75: mol_type = other DNA
gctcaagcgtattgatttggctgttgatgatttcgatggtgtttttacatgcgatgcagctgttcgcgatcatcg

SEQ ID NO: 814688 - DNA, 75 bp, synthetic construct
  source 1..75: mol_type = other DNA
caaatttggtctgatggtccagattagcgatctgtggcaatttttactgtttctctttccactgctggcgacaat

SEQ ID NO: 814689 - DNA, 75 bp, synthetic construct
  source 1..75: mol_type = other DNA
atgtagcttgtttagcccgagaaaataatttcaggttacatgcaatacaaaacatggtcggttcatccggccgcc

SEQ ID NO: 814690 - DNA, 75 bp, synthetic construct
  source 1..75: mol_type = other DNA
caaaaattcacggactcattcagatgagcaagttgaacagttggtgaacagtatccgtgagttcggtttcactaa

SEQ ID NO: 814691 - DNA, 75 bp, synthetic construct
  source 1..75: mol_type = other DNA
ccattcccactgaattatattctttatgtagagtcgtttcgtattcgatgttagatcttacatgttttcatgcga

SEQ ID NO: 814692 - DNA, 75 bp, synthetic construct
  source 1..75: mol_type = other DNA
agcttttagccgaggtgcagtctatctgtcctcctggcgtgactattatgaacgttcgtcaggctcagttactgg

SEQ ID NO: 814693 - DNA, 75 bp, synthetic construct
  source 1..75: mol_type = other DNA
tttgcgatgggttgtttctggggtgtggagcgtctgttctggcagttacccggcgtttacagcaccgccgcaggc

SEQ ID NO: 814694 - DNA, 75 bp, synthetic construct
  source 1..75: mol_type = other DNA
cggcgatgcttgccgccgatgacgatcgtcacatcaccacggaaatcgctaacgccacaccgttttattatgccg

SEQ ID NO: 814695 - DNA, 75 bp, synthetic construct
  source 1..75: mol_type = other DNA
gggaagtgtgctccggtgatacgggtcatgccgaagcggtacgcattgtttacgatccttccgtcatcagctatg

SEQ ID NO: 814696 - DNA, 75 bp, synthetic construct
  source 1..75: mol_type = other DNA
gcagtgatgcctcgggaggcattattctcattattgccgctgttctggcgatgattatggccaacagcggcgcaa

SEQ ID NO: 814697 - DNA, 75 bp, synthetic construct
  source 1..75: mol_type = other DNA
gcactgaagatttttttgatggcgctggctattatcgacgatcttggagccatcattatcatcgccttgttttac

SEQ ID NO: 814698 - DNA, 75 bp, synthetic construct
  source 1..75: mol_type = other DNA
aagacgatcatcaacagtatttgcataaaaatccgtacggctattgtggcattggtggaattggggtctgtctac

SEQ ID NO: 814699 - DNA, 75 bp, synthetic construct
  source 1..75: mol_type = other DNA
tgctgagttggcaaaaaaacaagcagttgacgcaatgctgatgactggggacagttacgactgcggaaagaaaat

SEQ ID NO: 814700 - DNA, 75 bp, synthetic construct
  source 1..75: mol_type = other DNA
atggaattatcagcaccaaagcatcgatgctaaaagcggcaagagcggaaggttttttctgtattcatcgcctgt

SEQ ID NO: 814701 - DNA, 75 bp, synthetic construct
  source 1..75: mol_type = other DNA
gctgctggcattacggaaatagtgctggttactcactcgtctaaaaattctattgaaaaccacttcgataccagt

SEQ ID NO: 814702 - DNA, 75 bp, synthetic construct
  source 1..75: mol_type = other DNA
cttggcccgaactcctgatacggcaatgaaggaagtgtttcagcacaaaaaaggactcagggaatcggactcgat

SEQ ID NO: 814703 - DNA, 75 bp, synthetic construct
  source 1..75: mol_type = other DNA
cggtctcggcaaaccttggcagagaatgggcagcacgtatcaccccatcactcacagcggctgttcgcgccccgg

SEQ ID NO: 814704 - DNA, 75 bp, synthetic construct
  source 1..75: mol_type = other DNA
aaagaatttgttgagcaagatgacaggataaaactttttgtttcagataaaaataaaggcgcaggcgcagcaaga

SEQ ID NO: 814705 - DNA, 75 bp, synthetic construct
  source 1..75: mol_type = other DNA
gaagaggctttggacctgatgcctaatcctagcattaaggcgttcgcagtcttaacaatggccccatccaatccg

SEQ ID NO: 814706 - DNA, 75 bp, synthetic construct
  source 1..75: mol_type = other DNA
agcagcatgaacgttacgaagccgtagcggtgcaggttttgcgtggtcgtgccggttacaagcctgccgtgaaaa

SEQ ID NO: 814707 - DNA, 75 bp, synthetic construct
  source 1..75: mol_type = other DNA
gcaatgattcgtaatgcagcgatcggaaccgcccagattagtgatgctagtatcactacggctaagatcggcaca

SEQ ID NO: 814708 - DNA, 75 bp, synthetic construct
  source 1..75: mol_type = other DNA
tacctcgtgaaatggatgaaccagaaaattcagttgccggatttcctgctggcgttcaaaaccacatttttgctg

SEQ ID NO: 814709 - DNA, 75 bp, synthetic construct
  source 1..75: mol_type = other DNA
cgcgatgttcctggcgtttatggggatcagtgaaggtgcgattccgtttgcactggaaagccctatcaccgccat

SEQ ID NO: 814710 - DNA, 75 bp, synthetic construct
  source 1..75: mol_type = other DNA
attgctaatattgccaaaaaacatgatgcctcatcctggaaaatcacttctatgcggattgataataactcaact

SEQ ID NO: 814711 - DNA, 75 bp, synthetic construct
  source 1..75: mol_type = other DNA
taaagagtctgattgctaccagcgagcaagctagctccactaagattgatcaggttaaagctgaactgaaaggcg

SEQ ID NO: 814712 - DNA, 75 bp, synthetic construct
  source 1..75: mol_type = other DNA
tcaagttcgccagatgaatttgcactctaacggtgcatgtgatccgaacgccagctttaaagagaacttgaccgg

SEQ ID NO: 814713 - DNA, 75 bp, synthetic construct
  source 1..75: mol_type = other DNA
aatttctaagaaagaaaacaataagttagtgcaaatcttcgcaattgccgagggtgaaattgaccattacaaagc

SEQ ID NO: 814714 - DNA, 75 bp, synthetic construct
  source 1..75: mol_type = other DNA
aaggcaactggtgagacaatccacggtaaaaacgtaactttgacatgggatgcaccggaagatttcaaccgctac

SEQ ID NO: 814715 - DNA, 75 bp, synthetic construct
  source 1..75: mol_type = other DNA
atgggatttgaagtattggtaggcgcggtgatcgctggtgcttcggcggggatggcggcagccgcaacattttct

SEQ ID NO: 814716 - DNA, 75 bp, synthetic construct
  source 1..75: mol_type = other DNA
gcagactttcggcggggtaatgttcgaatccttcggaagaattaccctgaaactggatgctcctgatattgttaa

SEQ ID NO: 814717 - DNA, 75 bp, synthetic construct
  source 1..75: mol_type = other DNA
tcagcgtatagagcgcatgaaacacggcagttcgccagagagttgaatctggagccctgcacaacggcaatcagc

SEQ ID NO: 814718 - DNA, 75 bp, synthetic construct
  source 1..75: mol_type = other DNA
aagtccgcgtctttatcgaacataacgataacttccgcctgccagccaatccggaaaccccggtgattatgattg

SEQ ID NO: 814719 - DNA, 75 bp, synthetic construct
  source 1..75: mol_type = other DNA
tcatcgacctgatcgtggtcgatgaccgcgaccggcaacctattggccgcccgtacctgaccctcgccatcgacg

SEQ ID NO: 814720 - DNA, 75 bp, synthetic construct
  source 1..75: mol_type = other DNA
aggccgccctgacgctgcgcgagctagagcgctggctcacattggcggtcggcacctaccacggttcggtgcaca

SEQ ID NO: 814721 - DNA, 75 bp, synthetic construct
  source 1..75: mol_type = other DNA
tgttcgggagccgatgatcatgcaggccaatcaggcgctgtatgcgcaattacaccccctaaaagaatccatttt

SEQ ID NO: 814722 - DNA, 75 bp, synthetic construct
  source 1..75: mol_type = other DNA
gccgttagtgggcgataaagcgaagttgcagcactatgcggccaccacgccgattgttgatatggtgcgtttcgc

SEQ ID NO: 814723 - DNA, 75 bp, synthetic construct
  source 1..75: mol_type = other DNA
tgtcgaattgctgtggctgaaaggcgatgaatctgtcaccgttgacggcaaaaccctgccgttggctgaagcttt

SEQ ID NO: 814724 - DNA, 75 bp, synthetic construct
  source 1..75: mol_type = other DNA
cattatctggatcacccacacttcactgtgcgagttccggttccggatagcgggcgcggagattgcggcgttctt

SEQ ID NO: 814725 - DNA, 75 bp, synthetic construct
  source 1..75: mol_type = other DNA
gccggggatcattaatgtggtccgtgattttaatgccgatgtcagtctggccccggcagccgtcagtctctatct

SEQ ID NO: 814726 - DNA, 75 bp, synthetic construct
  source 1..75: mol_type = other DNA
aatatccgcgcgtcattggtcatgaattctttggcgtcattgatgcagtgggtgaaggcgtggaaagcgccagag

SEQ ID NO: 814727 - DNA, 75 bp, synthetic construct
  source 1..75: mol_type = other DNA
gttcacccgctgcgtgctcggcatggtcgtcacgctggaagcgccgtctgccgtttcggttggcctgtgcctcgt

SEQ ID NO: 814728 - DNA, 75 bp, synthetic construct
  source 1..75: mol_type = other DNA
atgtcgcaaaaaccgttaaaaaccaccgtgatttgtatcacggtagtgctcattatctggatcacccacagttca

SEQ ID NO: 814729 - DNA, 75 bp, synthetic construct
  source 1..75: mol_type = other DNA
atgttaggagcgatagaaaaacgttttggcgataaaggaccggaacggccaatccagtggctgacagataacggt

SEQ ID NO: 814730 - DNA, 75 bp, synthetic construct
  source 1..75: mol_type = other DNA
gccatgattcgtaatggggcgatcggaacagcccagatcaacgatgctagcatcaccacggctaaaatcggcaca

SEQ ID NO: 814731 - DNA, 75 bp, synthetic construct
  source 1..75: mol_type = other DNA
tctgattggtcgcaccgacctgctgaaagagctggacggtttcaccgccaaacagcaaaaactggcgctatcgaa

SEQ ID NO: 814732 - DNA, 75 bp, synthetic construct
  source 1..75: mol_type = other DNA
taactacagcgcggaagagctggattccgtgatccgcgtgctgggcgaaaacggtcaggaagcggtcggttcgat

SEQ ID NO: 814733 - DNA, 75 bp, synthetic construct
  source 1..75: mol_type = other DNA
gaggagcactatcgcgcggatacgctggatatcacctttgacgccagcaaaaccacgctcgacgcgacgattaaa

SEQ ID NO: 814734 - DNA, 75 bp, synthetic construct
  source 1..75: mol_type = other DNA
ttccagggcgcagtcagccgcattggcggcgcgagctttgaagatttccagcaggatctgctgaatctttcaaaa

SEQ ID NO: 814735 - DNA, 75 bp, synthetic construct
  source 1..75: mol_type = other DNA
ttgccgcgcttttacctggatcttgctgatctgcgtctggaatcagctatctgcctgttccatcaacgcttctcc

SEQ ID NO: 814736 - DNA, 75 bp, synthetic construct
  source 1..75: mol_type = other DNA
cgcagaaagcttcggcttcggcactggcccgatggtggcgctcggctgtaaatatctgcgtatttgccacctgaa

SEQ ID NO: 814737 - DNA, 75 bp, synthetic construct
  source 1..75: mol_type = other DNA
cttcctgaataaagatcctgaactcgccgctgccgcacgccgcatcgttgaagaagagctgcaacgcgaaacctt

SEQ ID NO: 814738 - DNA, 75 bp, synthetic construct
  source 1..75: mol_type = other DNA
gtgaaggcggtgaagatccggcgcgctacggcaccaacaaagtgtcgcgcatcaagcaggtggcttccggtcgct

SEQ ID NO: 814739 - DNA, 75 bp, synthetic construct
  source 1..75: mol_type = other DNA
agaaaatctgcaagttctgagcgaaaaactggaatttgacgcctatctggcgctacttcgtcagtgcgatcttgg

SEQ ID NO: 814740 - DNA, 75 bp, synthetic construct
  source 1..75: mol_type = other DNA
aaccacgctcgaagcgacggtgaaagagctgtgcgacaaagccgaaaaaatggtacgtagcggcaccgtgctgct

SEQ ID NO: 814741 - DNA, 75 bp, synthetic construct
  source 1..75: mol_type = other DNA
tccgcaaacgcgttaacccggaactggtcgaggtcttaagcgttgactccctggcgatccatgaagagcatctgc

SEQ ID NO: 814742 - DNA, 75 bp, synthetic construct
  source 1..75: mol_type = other DNA
cctgctaaacgcgcagttgctgcaacaggcaaaaccgtttgtcgatgagcgtcagagcaaaaccttctggttcga

SEQ ID NO: 814743 - DNA, 75 bp, synthetic construct
  source 1..75: mol_type = other DNA
atagaaggcgaccctagccacaaggtagtgcgtactgcaatacacgcactggcccgcatgcagcaccgtggcgcg

SEQ ID NO: 814744 - DNA, 75 bp, synthetic construct
  source 1..75: mol_type = other DNA
ggtgcatgtgatccgaacgccagctttaaagagaacttgactagccttatgcagactttcggcggggtgatgttc

SEQ ID NO: 814745 - DNA, 75 bp, synthetic construct
  source 1..75: mol_type = other DNA
cgtaactgtatggggcgcggacgtccagggcgtcgagatgatcggcatcgagatgtatttagggcgcttcgatta

SEQ ID NO: 814746 - DNA, 75 bp, synthetic construct
  source 1..75: mol_type = other DNA
cacagcccagattaacggcgctcacatccaacacgcacagatcggaacaggtcatatcattgatggctctatcga

SEQ ID NO: 814747 - DNA, 75 bp, synthetic construct
  source 1..75: mol_type = other DNA
agataacaaagtttatcttgataatgcgatgattcgtaatgctgcaattggcacagcccagattagtgatgctag

SEQ ID NO: 814748 - DNA, 75 bp, synthetic construct
  source 1..75: mol_type = other DNA
cgccccagcgcgtttagtggctatcaacccacaacataagccaatgaaaggttttagtgcgcgtggtggctttaa

SEQ ID NO: 814749 - DNA, 75 bp, synthetic construct
  source 1..75: mol_type = other DNA
tttcggtatcatcgctcgatccgattgggtagaactgattaaccagaatccgactgttacctatgaattgccgac

SEQ ID NO: 814750 - DNA, 75 bp, synthetic construct
  source 1..75: mol_type = other DNA
ccgttaccggaactgttgagctacttctcgctaaatatcggtctgatgcaagaaagtctggaggcggggcaaggt

SEQ ID NO: 814751 - DNA, 75 bp, synthetic construct
  source 1..75: mol_type = other DNA
caggcgctggggccggaaggcggcgaaattattctgcgtacccgcacggctttccagctgaccttgcacggtgag

SEQ ID NO: 814752 - DNA, 75 bp, synthetic construct
  source 1..75: mol_type = other DNA
tggactccgtaattcgcgtactgggcgaaaacggtcaggaagcggtcggttcgatgggcgatgataccccattcg

SEQ ID NO: 814753 - DNA, 75 bp, synthetic construct
  source 1..75: mol_type = other DNA
atgggcgtagaagtattggtcggtgcagtgattgcgggtgcatcggctgggatggctgctgctgcaactttttcc

SEQ ID NO: 814754 - DNA, 75 bp, synthetic construct
  source 1..75: mol_type = other DNA
gcagccagtagctgaacaggcgcacaaactggcgtatcaactggccgataaactgcgtaatcaaaaaaacgccag

SEQ ID NO: 814755 - DNA, 75 bp, synthetic construct
  source 1..75: mol_type = other DNA
taaccaacagcaacacaatactgaaaggtgcggaagataatggcgtaggatttattcttgaaagtaatggttcgc

SEQ ID NO: 814756 - DNA, 75 bp, synthetic construct
  source 1..75: mol_type = other DNA
accacctcccgcctgctgcataccgccaccggggctgtggcacacgttacccgcgagctggaagcatggcagcag

SEQ ID NO: 814757 - DNA, 75 bp, synthetic construct
  source 1..75: mol_type = other DNA
ccagacccgcagaggacgacatcaccgataccgatgatggagatacccgcatttcagcgggtgcattctggccgg

SEQ ID NO: 814758 - DNA, 75 bp, synthetic construct
  source 1..75: mol_type = other DNA
atgaaagcaatcacgctttttaatacaccgatccgtgttgatgaatcaggaatgatctgcctcactgatatgtgg

SEQ ID NO: 814759 - DNA, 75 bp, synthetic construct
  source 1..75: mol_type = other DNA
tctggtgagaatattgctgtgaaaaataaccagatatatcctatgctagtacagtcacagatgtttgatgaagac

SEQ ID NO: 814760 - DNA, 75 bp, synthetic construct
  source 1..75: mol_type = other DNA
ccggacccgcagaggacgacatcaccgataccgatgatggcgacactcgcatttcagcaggtgcattctggccgg

SEQ ID NO: 814761 - DNA, 75 bp, synthetic construct
  source 1..75: mol_type = other DNA
ccagacccgcagaggacgacatcaccgacaccgatgatggcgatacccgtatttcagcgggtgcattctggccgg

SEQ ID NO: 814762 - DNA, 75 bp, synthetic construct
  source 1..75: mol_type = other DNA
tttgcttttgatgaatctattgattcgacactacgaatcaaagcagctggattctacaaacccacttggggtagt

SEQ ID NO: 814763 - DNA, 75 bp, synthetic construct
  source 1..75: mol_type = other DNA
gtgaaaacctttttccagactctccacagcaaatcgcagagcgagcaacagatgcattactcgcattgggttgct

SEQ ID NO: 814764 - DNA, 75 bp, synthetic construct
  source 1..75: mol_type = other DNA
tatcttagtgcttgatgaagcgcatatgtatagaggagcagggggagcagaggtagcccttttaatacgtcgcct

SEQ ID NO: 814765 - DNA, 75 bp, synthetic construct
  source 1..75: mol_type = other DNA
catgatctgcctcactgatatgtggaaagccagtggtaaaagtgaatctgaatcgccttaccactacctgcgaaa

SEQ ID NO: 814766 - DNA, 75 bp, synthetic construct
  source 1..75: mol_type = other DNA
tcagcctggttttgtcgttgtagtcaccactcaaagcggcatgacgatacaaattcacaagccaaaggaggaagg

SEQ ID NO: 814767 - DNA, 75 bp, synthetic construct
  source 1..75: mol_type = other DNA
ggttttgctcatctggttttatatggcttacaggagtgggcagtggattgtcagtgtagtctgtagcaagggatg

SEQ ID NO: 814768 - DNA, 75 bp, synthetic construct
  source 1..75: mol_type = other DNA
gtgatgtggtgcagattgagcgtcaggtgacgatgtaccgccagaatgcttacggcgaaagcgatcccagctatc

SEQ ID NO: 814769 - DNA, 75 bp, synthetic construct
  source 1..75: mol_type = other DNA
gggggagtaattcaactcaggaagcgcagttctccgtgctcgacgacatcaccgccagcgaactcattaacgata

SEQ ID NO: 814770 - DNA, 75 bp, synthetic construct
  source 1..75: mol_type = other DNA
ccattaccggcctgctacctgcggcactcggcaaagccggtgaatcccaggataacgcccgtgccgctttacgta

SEQ ID NO: 814771 - DNA, 75 bp, synthetic construct
  source 1..75: mol_type = other DNA
ctcacttccctttttacctatgcaaaaagcgattaagctatgggaatttctcagcaaagagccgcataccgcgat

SEQ ID NO: 814772 - DNA, 75 bp, synthetic construct
  source 1..75: mol_type = other DNA
cagctcttcctggttgagcatccgctggttcgtcacttaacccgccgtctgatttggggcgtttatagcgccgaa

SEQ ID NO: 814773 - DNA, 75 bp, synthetic construct
  source 1..75: mol_type = other DNA
tttcgcgtagcggaagataacagctacagcaccgctgacgatgatcttttcaccctgccggaaggcgatatctct

SEQ ID NO: 814774 - DNA, 75 bp, synthetic construct
  source 1..75: mol_type = other DNA
atcagttggggaaaagttggcaccaaagggcaaagtcagataaaaagtttttcagatgctgcggcagcggaaaaa

SEQ ID NO: 814775 - DNA, 75 bp, synthetic construct
  source 1..75: mol_type = other DNA
atcaggtgctggtgacacgttgtaagcagacgttgcatcaagtcgaaccattgcgggaagttgaggctggcaggc

SEQ ID NO: 814776 - DNA, 75 bp, synthetic construct
  source 1..75: mol_type = other DNA
gaaatgcctgctaattacctgattgtcggcagcccggcaaaagcgattcgtgaacttagtgagcaggaactggca

SEQ ID NO: 814777 - DNA, 75 bp, synthetic construct
  source 1..75: mol_type = other DNA
gcagacgttgcatcaagtcgagccattgcgggaagttgaacctggcaggcagcgtctggtatttgatgaggatct

SEQ ID NO: 814778 - DNA, 75 bp, synthetic construct
  source 1..75: mol_type = other DNA
tcccaaacggtaacgggctctctcaaggtagcggacttatccaccattattcaggaacaaccctctttcgtagca

SEQ ID NO: 814779 - DNA, 75 bp, synthetic construct
  source 1..75: mol_type = other DNA
gaaatgcctgctaattacctgattgtcggcagcccggcgaaagcgattcgtgaacttagtgagcaggagctggca

SEQ ID NO: 814780 - DNA, 75 bp, synthetic construct
  source 1..75: mol_type = other DNA
ggttttatcatgcatcggacaatgcctgatatatcttttccggttttcttattgaatggattaattccttacttt

SEQ ID NO: 814781 - DNA, 75 bp, synthetic construct
  source 1..75: mol_type = other DNA
tggcctctatcaacgcccctataaacaccaatcacaggcacttgagtcatttcttggcgaaaacgcttctgatct

SEQ ID NO: 814782 - DNA, 75 bp, synthetic construct
  source 1..75: mol_type = other DNA
ccgttgacccgctggactccaccagccgtcagctggacccgctggtggttggtcaggaacactacgacaccgcgc

SEQ ID NO: 814783 - DNA, 75 bp, synthetic construct
  source 1..75: mol_type = other DNA
ctctgggccgtatcatgaacgtactgggtgaaccggtcgacatgaaaggcgagatcggtgaagaagagcgttggg

SEQ ID NO: 814784 - DNA, 75 bp, synthetic construct
  source 1..75: mol_type = other DNA
ggcgtactgaccaactcgcagggcttgcctttacagccggagatcgacgttccggcgggggcgactaatgttgct

SEQ ID NO: 814785 - DNA, 75 bp, synthetic construct
  source 1..75: mol_type = other DNA
attttcccgaccttattccgctttacgctgttttccaataacttaccgaaagggaccgtctccgcatcgctgaat

SEQ ID NO: 814786 - DNA, 75 bp, synthetic construct
  source 1..75: mol_type = other DNA
gtgtacgatgctcttgaggtgcaaaatggtaatgagcgtctggtgctggaagttcagcagcagctcgggggcggt

SEQ ID NO: 814787 - DNA, 75 bp, synthetic construct
  source 1..75: mol_type = other DNA
aaggtcgtgacgtattgctgttcgtcgataacatctatcgttacaccctggccggtaccgaagtatccgcactgc

SEQ ID NO: 814788 - DNA, 75 bp, synthetic construct
  source 1..75: mol_type = other DNA
aattatctggaaaagtgaacggttgaaaaattcacgtcgtgtatggatttttaccaccggcgatgtaacagcaga

SEQ ID NO: 814789 - DNA, 75 bp, synthetic construct
  source 1..75: mol_type = other DNA
aattatctggaaaagtgaacggttgaaaaattcacgccgtgtatggatttttaccaccggcgatgcaacagcaga

SEQ ID NO: 814790 - DNA, 75 bp, synthetic construct
  source 1..75: mol_type = other DNA
tgcccgtctggcctgcgctgacttcgctgacccatcgtcagcaacttcctcccgccgtgtatgtgttgatcgacg

SEQ ID NO: 814791 - DNA, 75 bp, synthetic construct
  source 1..75: mol_type = other DNA
tttggcgaggacggcacggtgacggcgatcttacccggcgacagcgaccccacggaactggggcaactgacgctg

SEQ ID NO: 814792 - DNA, 75 bp, synthetic construct
  source 1..75: mol_type = other DNA
gcgtcaggttgacggcggacatgatgcgctttgttggcgcggtggcttgatgcaggggctaatcgacctctggca

SEQ ID NO: 814793 - DNA, 75 bp, synthetic construct
  source 1..75: mol_type = other DNA
agagggcgtgttacttgaaaagctaaaagctggtgaagttagcgccgaaggtctgcgcattgtgctggaagcggg

SEQ ID NO: 814794 - DNA, 75 bp, synthetic construct
  source 1..75: mol_type = other DNA
agcctgataaggatagaaatggaaacctttgacaaggtatgtggtgataaaaggggcctccttgccgtcacccaa

SEQ ID NO: 814795 - DNA, 75 bp, synthetic construct
  source 1..75: mol_type = other DNA
gcgcgtttgcagttactgcatgatgaaggtcgtttgctgactgcgggaccaatgccagcagttgatagcaatgat

SEQ ID NO: 814796 - DNA, 75 bp, synthetic construct
  source 1..75: mol_type = other DNA
agttgagggtaattattttgatgggcttttaactgcagaggcggcgggtatggttgttaccagttttgttctggc

SEQ ID NO: 814797 - DNA, 75 bp, synthetic construct
  source 1..75: mol_type = other DNA
gcttattatcatcagctgtttgattacgccagcgggcatcaagaatatgcgcagttccgtgctgccatcgattaa

SEQ ID NO: 814798 - DNA, 75 bp, synthetic construct
  source 1..75: mol_type = other DNA
atggatttgaacgaagctagcctgaacgcggcatcgacaagggctggggaatcaaaaattaaacataaaattagc

SEQ ID NO: 814799 - DNA, 75 bp, synthetic construct
  source 1..75: mol_type = other DNA
gttgctgatgccattagtttatttgaacaggatcaaaaacattgctgcaaagtcttactcactttttctgaataa

SEQ ID NO: 814800 - DNA, 75 bp, synthetic construct
  source 1..75: mol_type = other DNA
agatgtcaccacggaaaatggtgatattcagccggagccaccggtgacggatatgacagacacacagccagaacc

SEQ ID NO: 814801 - DNA, 75 bp, synthetic construct
  source 1..75: mol_type = other DNA
tcctttccttatctagtcaagccagaaaacgccttcgcggcgaaggcaaatccctcagcattatctaaagcggtg

SEQ ID NO: 814802 - DNA, 75 bp, synthetic construct
  source 1..75: mol_type = other DNA
atgccaaactgcgatcgattcagatgccattttgcacttaccctaaagctttatgactggtgggttttgggagta

SEQ ID NO: 814803 - DNA, 75 bp, synthetic construct
  source 1..75: mol_type = other DNA
tgtaaactggcgtggaagaagatgggctgcatcatctattgagacttctggaataattggtgttcctccatcaaa

SEQ ID NO: 814804 - DNA, 75 bp, synthetic construct
  source 1..75: mol_type = other DNA
ctgctggggccgctttccgacaggattggccgcaggccggtgctgattaccggggcgctaatatttacccttgcc

SEQ ID NO: 814805 - DNA, 75 bp, synthetic construct
  source 1..75: mol_type = other DNA
ggccggcctcgcactgttgattgtcggcaatttgctgtcgccacacgtctggcagtggtcggtgctcggcaccag

SEQ ID NO: 814806 - DNA, 75 bp, synthetic construct
  source 1..75: mol_type = other DNA
cacctccatcgtactgattgcgccgattatcggcccgctttccggcgcagctctgatgcactttgtgcactggaa

SEQ ID NO: 814807 - DNA, 75 bp, synthetic construct
  source 1..75: mol_type = other DNA
ctgcgaccagtggtctgaaattcaccaaattacaaccggcacaagaattttatgccccggttggcaccacgctgc

SEQ ID NO: 814808 - DNA, 75 bp, synthetic construct
  source 1..75: mol_type = other DNA
tgctggttgatggtcgtttgatctataccgccaacgacctgaaagtaggtctgttccaggatacgtctgcattct

SEQ ID NO: 814809 - DNA, 75 bp, synthetic construct
  source 1..75: mol_type = other DNA
gcctctggtcgcggtgaactgtttggtgctaaaggcccacaattaccagcaccgaacatgctgatgatggaccga

SEQ ID NO: 814810 - DNA, 75 bp, synthetic construct
  source 1..75: mol_type = other DNA
tctgggcctggatgccatgtggcagttagtagggttctacctcggctggctgggcggcgaaggtaaaggccgcgc

SEQ ID NO: 814811 - DNA, 75 bp, synthetic construct
  source 1..75: mol_type = other DNA
tggtacctgatgtgttaattatcagcaccgacgtgttgaataaacttggtgataaagagcgcacggcattattaa

SEQ ID NO: 814812 - DNA, 75 bp, synthetic construct
  source 1..75: mol_type = other DNA
ttgaaaaactgcttaattctgaagatgaaaagcaagtagctgagacactcctttatatagcttacaatgttaaag

SEQ ID NO: 814813 - DNA, 75 bp, synthetic construct
  source 1..75: mol_type = other DNA
taattccttcgaaagtaaaatcccgcccgcaatgtagcgatgacgatggcctgatcattagctctgcgatgacag

SEQ ID NO: 814814 - DNA, 75 bp, synthetic construct
  source 1..75: mol_type = other DNA
ttggcgatccggttatgccgggatgcctgggcctggacgcaatgtggcagctggtagggttctacctcggctggc

SEQ ID NO: 814815 - DNA, 75 bp, synthetic construct
  source 1..75: mol_type = other DNA
tatttagttccatgtactgctgatgtgttctccgcttattgcataggtctaattggtgaaaccttgcccaaattt

SEQ ID NO: 814816 - DNA, 75 bp, synthetic construct
  source 1..75: mol_type = other DNA
acaaggggggagtgggtaaaactactctaacttggaatctaagtgtgtccctatcggctaagggtaaatccgttt

SEQ ID NO: 814817 - DNA, 75 bp, synthetic construct
  source 1..75: mol_type = other DNA
atcctatacaaaagaagcccttcttgcctctggtcgcggtgaactgtttggcgctaaaggcccgcaattgccagc

SEQ ID NO: 814818 - DNA, 75 bp, synthetic construct
  source 1..75: mol_type = other DNA
taaacgcattgttaaccgtcgtctgattatgggcctggcggatggcgaagtgctggttgatggtcgtttgatcta

SEQ ID NO: 814819 - DNA, 75 bp, synthetic construct
  source 1..75: mol_type = other DNA
aatgaccgaaacgggtggtaacttcgacaaagggtatgttgaagcagaactggatatcaatccggatctgtggtt

SEQ ID NO: 814820 - DNA, 75 bp, synthetic construct
  source 1..75: mol_type = other DNA
ctcaggaagccagaagattttatcgaaaaaatggatatggagagtcggaaatctacgctcgtgtttctatggatc

SEQ ID NO: 814821 - DNA, 75 bp, synthetic construct
  source 1..75: mol_type = other DNA
cgcgattggatggtcagacggaaccgcatcgccaactgcggctgaaaatggtgcatccggtgcagtcgatggcct

SEQ ID NO: 814822 - DNA, 75 bp, synthetic construct
  source 1..75: mol_type = other DNA
tgaccattttcatctccacccactttatgaacgaagcggaacgctgcgaccgtatctcgctgatgcacgccggaa

SEQ ID NO: 814823 - DNA, 75 bp, synthetic construct
  source 1..75: mol_type = other DNA
cgttacggccagaagattgagcgccgctttactgccatccgcgcggctaccgaagcggcgcggatgctgacggaa

SEQ ID NO: 814824 - DNA, 75 bp, synthetic construct
  source 1..75: mol_type = other DNA
cgacggcgttagtcgctttgatgtttcagctatccgtaagtggcttgcagaccgcaaagacacaaccagcacgcg

SEQ ID NO: 814825 - DNA, 75 bp, synthetic construct
  source 1..75: mol_type = other DNA
ttagaagagaaaatattcaaaaaaattagtgaaaactatcaagtgaaatatggtgattatgcttcaattaatatt

SEQ ID NO: 814826 - DNA, 75 bp, synthetic construct
  source 1..75: mol_type = other DNA
aaaagcagtgtcaaaactctcgtcaggaatatttgatcatattctaccaatttatgagctaacaaagtcacgaaa

SEQ ID NO: 814827 - DNA, 75 bp, synthetic construct
  source 1..75: mol_type = other DNA
ggcttcagcgggtataacgagctggagtccctgctgcgtgagcgggggtacgtcatcagcaaatccgctatccat

SEQ ID NO: 814828 - DNA, 75 bp, synthetic construct
  source 1..75: mol_type = other DNA
cgctacggccagaaaatcgaacgtcgttttaccgccatccgcgcagccaccgaagcggcgcggatgctgaccgag

SEQ ID NO: 814829 - DNA, 75 bp, synthetic construct
  source 1..75: mol_type = other DNA
tgaacacgacggaaaacttattgatcgtccaaatataaaacaggctatcaatgtttttcgttatcatgcccgtaa

SEQ ID NO: 814830 - DNA, 75 bp, synthetic construct
  source 1..75: mol_type = other DNA
gctatggcgctatccgtgcggctaccgaagcggcccgcatgctgaccgagggagctgctgacgatcaggatgcgc

SEQ ID NO: 814831 - DNA, 75 bp, synthetic construct
  source 1..75: mol_type = other DNA
gctcggaggcggtcatagccctgattcagaccgaactgttcgagagcattgttcagctgcaggaggcggaagaag

SEQ ID NO: 814832 - DNA, 75 bp, synthetic construct
  source 1..75: mol_type = other DNA
gtgggtaaacagttcgacgttacgcgtgaacgtatccgtcagattgaagcgaaggcactgcgtaaactgcgccac

SEQ ID NO: 814833 - DNA, 75 bp, synthetic construct
  source 1..75: mol_type = other DNA
tatttccaggggttaactcaagtaatacaagatgttttaatgacgatatttaaagcatcgtgtattttgtttatg

SEQ ID NO: 814834 - DNA, 75 bp, synthetic construct
  source 1..75: mol_type = other DNA
cagggttattatttctataaacctgttacatacatcgacctggtcaaaattatcctttctaaaccgaaggtgaag

SEQ ID NO: 814835 - DNA, 75 bp, synthetic construct
  source 1..75: mol_type = other DNA
ttacgcaaagcctgatgaatcaggttgccagacagatgaacgctatcgcgagtaaattgccggaaggttttcata

SEQ ID NO: 814836 - DNA, 75 bp, synthetic construct
  source 1..75: mol_type = other DNA
ccgcagcctacctgcttgataagtattttaataaaagcgcaacgcctgaagaggtcctgcgacgggccataagta

SEQ ID NO: 814837 - DNA, 75 bp, synthetic construct
  source 1..75: mol_type = other DNA
tggcgacatcgttacggtgaaagaagcgacggacgccctgctgcattgtgcggaacagcttcgcaaaggaggcaa

SEQ ID NO: 814838 - DNA, 75 bp, synthetic construct
  source 1..75: mol_type = other DNA
catcccaagtgatttaaaggttaacgaaacaaacgctgattatctggtgcgtaaatttgctgaagcggaggccaa

SEQ ID NO: 814839 - DNA, 75 bp, synthetic construct
  source 1..75: mol_type = other DNA
ggaagatgatgttactgaaaccccagccaccgacgcattcctggctgaagtacgggcgcagggagtggagatggc

SEQ ID NO: 814840 - DNA, 75 bp, synthetic construct
  source 1..75: mol_type = other DNA
ttgtctggagattcagggggccagtctagcaacctcgaggagcaatatcagcttggcactgaagcagctctgaaa

SEQ ID NO: 814841 - DNA, 75 bp, synthetic construct
  source 1..75: mol_type = other DNA
aaaaaaagcattacctcgccatgatagtgaatatactcccgaggtgaatgaagatgtgggcgttgtatataacga

SEQ ID NO: 814842 - DNA, 75 bp, synthetic construct
  source 1..75: mol_type = other DNA
acaaggaggaggacacaatgagttatttctgctgcccgggcatgtaaaactaaccagattgtatagtgaggcaac

SEQ ID NO: 814843 - DNA, 75 bp, synthetic construct
  source 1..75: mol_type = other DNA
gatcagcatattcgtggagcgcttaatgtgcccttgaaaggggtaaggtatgcattacgcgtagcggatgacatt

SEQ ID NO: 814844 - DNA, 75 bp, synthetic construct
  source 1..75: mol_type = other DNA
atgtgccgttgaagggggtgaaatatagtttgcgcgtgggggataatattattgggccgtcgggagatgtgacaa

SEQ ID NO: 814845 - DNA, 75 bp, synthetic construct
  source 1..75: mol_type = other DNA
tatttcaataaaagcgcaacgcctgaagagatcctgcgacgggcaataaataatggggagatcgtccctttttac

SEQ ID NO: 814846 - DNA, 75 bp, synthetic construct
  source 1..75: mol_type = other DNA
ggcagcggagagtgcggggctgaaaaagttctgtgaagacgcagcgtttgatgctgattatgagtcagaacttct

SEQ ID NO: 814847 - DNA, 75 bp, synthetic construct
  source 1..75: mol_type = other DNA
aacacctgtttcatcaagtgaaaaggtagctaatgataatgaggaggatgtgttaaagaattttgcctctcttat

SEQ ID NO: 814848 - DNA, 75 bp, synthetic construct
  source 1..75: mol_type = other DNA
gcgcgaagccaagatatcacgaaacgaggcgtaagaggaatcattgcagagctatgtttcgatacatatatcata

SEQ ID NO: 814849 - DNA, 75 bp, synthetic construct
  source 1..75: mol_type = other DNA
tgacgtgaccggggctattgaattaccggaggacaactggttttttactatgacagaaattcctcagggcatgga

SEQ ID NO: 814850 - DNA, 75 bp, synthetic construct
  source 1..75: mol_type = other DNA
tttctgtatcatcaataaaaagtatggttactgtcggtgttgctgttgttttatatttactaagtggattgcctt

SEQ ID NO: 814851 - DNA, 75 bp, synthetic construct
  source 1..75: mol_type = other DNA
aaagagtcttcttttgatgttcttgatgattgggatacgcctttaccgtgggagacggaagaaacacctgtttca

SEQ ID NO: 814852 - DNA, 75 bp, synthetic construct
  source 1..75: mol_type = other DNA
gatgcacgaccaggaagttctaatgtctatcaagtggtagatattccacaagaagaagctagacaagaagccaaa

SEQ ID NO: 814853 - DNA, 75 bp, synthetic construct
  source 1..75: mol_type = other DNA
actaccgaaacgaaggattggtacggcttgcgcccggaacagaacctcaacgtggggacatcttctttatccaat

SEQ ID NO: 814854 - DNA, 75 bp, synthetic construct
  source 1..75: mol_type = other DNA
cgcggcgatgtcttcttcatccagtacgggaaaatgcctgatcactgcgcggtgtatatcggagacggcatgatc

SEQ ID NO: 814855 - DNA, 75 bp, synthetic construct
  source 1..75: mol_type = other DNA
actaccgtaacgagggattggtgcgtcttgcgcccggaacagagcctcaacgtggggacgtattctttatccaat

SEQ ID NO: 814856 - DNA, 75 bp, synthetic construct
  source 1..75: mol_type = other DNA
atgattattgatttagacactctgtttccaggtcgaaatcgaaagactttcacagatattgtaagttattgtact

SEQ ID NO: 814857 - DNA, 75 bp, synthetic construct
  source 1..75: mol_type = other DNA
tgtaactgctgattcaaataaaacagttaacgtgcttcgtgctaatgccggactcgtttgcatcaaagctgatgc

SEQ ID NO: 814858 - DNA, 75 bp, synthetic construct
  source 1..75: mol_type = other DNA
atctggcattcacatactgatgaatcagcagaagcatctgatgccgatcgtgcaggctgcgaagcgacggaagtt

SEQ ID NO: 814859 - DNA, 75 bp, synthetic construct
  source 1..75: mol_type = other DNA
agtctacatggttccacagccgccgttctttaaggtaggggctaagcaaaagcaggttattcgtatcatcaatac

SEQ ID NO: 814860 - DNA, 75 bp, synthetic construct
  source 1..75: mol_type = other DNA
ggatagcaacctgccgaaggaccgtgaatctctgttctggctgaacgtgcaggaagttccccccaaacaggaagt

SEQ ID NO: 814861 - DNA, 75 bp, synthetic construct
  source 1..75: mol_type = other DNA
ttttgctgatttaaacgcgcaggttgagcaactcagcaagcgttgttcagaggcgttctccagaggagcgtctga

SEQ ID NO: 814862 - DNA, 75 bp, synthetic construct
  source 1..75: mol_type = other DNA
tgaagagcctgagtggaaagctgagcgtggaggccattaatgactggggcggcacacagacctatgaggttaaat

SEQ ID NO: 814863 - DNA, 75 bp, synthetic construct
  source 1..75: mol_type = other DNA
aggtgaagctgatttaccggccgaaggcggtagcggacggccgtaaggatgcggagaagcagctgacgttcatca

SEQ ID NO: 814864 - DNA, 75 bp, synthetic construct
  source 1..75: mol_type = other DNA
ggacagtaacctgccgaaggaccgtgaatctttgttctggctgaacgtccaggaagtgccaccgaagccggacgt

SEQ ID NO: 814865 - DNA, 75 bp, synthetic construct
  source 1..75: mol_type = other DNA
ttttgctgatttaaacgggcaggttgagcaactcagcaagcgttgttcagaggcttttggctcatatggccgtta

SEQ ID NO: 814866 - DNA, 75 bp, synthetic construct
  source 1..75: mol_type = other DNA
atgattgatttgcaacagcgttatgaaactattaagtcggcttgtgaaaacttaaagttacaagccaaaccaaag

SEQ ID NO: 814867 - DNA, 75 bp, synthetic construct
  source 1..75: mol_type = other DNA
cctcacacaaaccaaaaacacgcaagattccaaagtggtgtatcgaccgtatcccttccgatgctcaaattatag

SEQ ID NO: 814868 - DNA, 75 bp, synthetic construct
  source 1..75: mol_type = other DNA
ttttgaggaaattggcgagcaggtcgagcatattggtcagcagtgtcagaccgcgttttctgctaatggccgttg

SEQ ID NO: 814869 - DNA, 75 bp, synthetic construct
  source 1..75: mol_type = other DNA
ttatgctgatttaaacgcgcaggttgagcaactcagcaagcgttgttcagaggtttttggctcatatggcagtta

SEQ ID NO: 814870 - DNA, 75 bp, synthetic construct
  source 1..75: mol_type = other DNA
aacgttatgtggttaccagtgacagcttccagtttattctccacgagaaaaagagagcggaaagcggtaaaaacg

SEQ ID NO: 814871 - DNA, 75 bp, synthetic construct
  source 1..75: mol_type = other DNA
ttgcaggtgtgctctcattcgcattctgtagccagactatggctgcatttgtactgaatgggacgcgcttcattt

SEQ ID NO: 814872 - DNA, 75 bp, synthetic construct
  source 1..75: mol_type = other DNA
tcccatgggatattgcaaaggctgggtgggataatttactgttatcttattttttgtctgtttcgattttgtcgt

SEQ ID NO: 814873 - DNA, 75 bp, synthetic construct
  source 1..75: mol_type = other DNA
attctctttgctatgtgtttacttacttgagtgcgtcagggggaaagtggcaactttattttccaaaatatactt

SEQ ID NO: 814874 - DNA, 75 bp, synthetic construct
  source 1..75: mol_type = other DNA
aacgtgaagcatgacggtaagagcgtgtctctcagcgataaggtgatgaaggaagttgcacaacttaaaccgttc

SEQ ID NO: 814875 - DNA, 75 bp, synthetic construct
  source 1..75: mol_type = other DNA
caacagaaaatataacacagactatccagcgccttgaccggtacgaacgggattactttattgtgtttgcccacg

SEQ ID NO: 814876 - DNA, 75 bp, synthetic construct
  source 1..75: mol_type = other DNA
aaagcggagggaaaattaccgttgatgccgtgtgccgtcacggacgggcctatcagatagttcgcattttcggtc

SEQ ID NO: 814877 - DNA, 75 bp, synthetic construct
  source 1..75: mol_type = other DNA
gatagggatccgcggcagcggcaaatcctccatccttgaagggatccgatatgccctggacattccgtttggcga

SEQ ID NO: 814878 - DNA, 75 bp, synthetic construct
  source 1..75: mol_type = other DNA
gtggcagtcagcaaactgtcatcgggcatgaagaacatcagcgtggatgccgtcaacgactggggcggtgtggat

SEQ ID NO: 814879 - DNA, 75 bp, synthetic construct
  source 1..75: mol_type = other DNA
ttttgatcacgacaacagcaaagacatggatgcgctaatggcaaccccgctgtggcaggccatgccgtttgtccg

SEQ ID NO: 814880 - DNA, 75 bp, synthetic construct
  source 1..75: mol_type = other DNA
gcaattgcgatgaactccagagtgaagctgatttatcgtccatccggtcttaagaatgggagggaaaatgctgag

SEQ ID NO: 814881 - DNA, 75 bp, synthetic construct
  source 1..75: mol_type = other DNA
tggctggaaagctatgaaattcgcctcaatcccgttttgctgttggaaaacagtgaagcctttattgaagaagtg

SEQ ID NO: 814882 - DNA, 75 bp, synthetic construct
  source 1..75: mol_type = other DNA
gtgcgccgccataaccgcgtggtgcgtggagaggccgtctatcgctgcgttcactgcggtgaacaactggttgcc

SEQ ID NO: 814883 - DNA, 75 bp, synthetic construct
  source 1..75: mol_type = other DNA
gcatttactggtgtggaaacactttggtcgcgtggcaccgcatggcaaagagtggaaatggatgatggaaagtgt

SEQ ID NO: 814884 - DNA, 75 bp, synthetic construct
  source 1..75: mol_type = other DNA
atgggcgtgatgaagttaagccgaaaaaggccagtaacaaagatggagaacgcacggggccgttttacgtcaaaa

SEQ ID NO: 814885 - DNA, 75 bp, synthetic construct
  source 1..75: mol_type = other DNA
ggatgctgtttattactcataacctcagcatcgtcagaaaactggctcaccgcgtggcagtgatgcaaaacggtc

SEQ ID NO: 814886 - DNA, 75 bp, synthetic construct
  source 1..75: mol_type = other DNA
gaagcgcattgtggatcataatgtggtggtgaaaaacatcagttttacgctacgggcgggtgaaacactgggttt

SEQ ID NO: 814887 - DNA, 75 bp, synthetic construct
  source 1..75: mol_type = other DNA
taagccctcgctgatcatacttgatgaaccgacatcatcactcgacaaaacggtacaggcgcaaatattgacgct

SEQ ID NO: 814888 - DNA, 75 bp, synthetic construct
  source 1..75: mol_type = other DNA
tataaacaactcaaggatttaggatataacagtacacaagaaattattttagaatatgccgatgaagtagaattt

SEQ ID NO: 814889 - DNA, 75 bp, synthetic construct
  source 1..75: mol_type = other DNA
cgtttttgacggtcagccattgcaaaatctaactcgtcgccagctattgcccattcgccatcgcattcaggtggt

SEQ ID NO: 814890 - DNA, 75 bp, synthetic construct
  source 1..75: mol_type = other DNA
acggattacccgcatcaactctccggcggtgaacgccagcgggtgatgatcgcaatggctcttctcacacggccg

SEQ ID NO: 814891 - DNA, 75 bp, synthetic construct
  source 1..75: mol_type = other DNA
caactcgcacgcgccgcgaagatttggccacaactcgaagccaatactcaacagattatggatgactacgattcc

SEQ ID NO: 814892 - DNA, 75 bp, synthetic construct
  source 1..75: mol_type = other DNA
agagcctggtcgattacttgtctgccggacatttcagtatttatgagcgcattcttcataagctggaaggcaacg

SEQ ID NO: 814893 - DNA, 75 bp, synthetic construct
  source 1..75: mol_type = other DNA
atccggtaactccggatggttggataagctgtagtgagcgaatgcccgctcaagatgattggattttaatttatt

SEQ ID NO: 814894 - DNA, 75 bp, synthetic construct
  source 1..75: mol_type = other DNA
ccgatggtgtcgttaaatccattgcataccctggaaaaacagctttatgaagtgctttcactccaccgcgggatg

SEQ ID NO: 814895 - DNA, 75 bp, synthetic construct
  source 1..75: mol_type = other DNA
gttacgaaatggatccccagctcctgacacactttaatcagcatctggattcattattcggggtctattcgaagc

SEQ ID NO: 814896 - DNA, 75 bp, synthetic construct
  source 1..75: mol_type = other DNA
gcctgaccattctgattatcactggtagctaccagaatcagaagatgtctgaaaccacaaacgcccagcaatatg

SEQ ID NO: 814897 - DNA, 75 bp, synthetic construct
  source 1..75: mol_type = other DNA
cgatctggttggcgttctccagtggggatatgcccttaaccccaactcaggtcgtcgtgtcgtgcttgaaacgga

SEQ ID NO: 814898 - DNA, 75 bp, synthetic construct
  source 1..75: mol_type = other DNA
caaacgggtgctgtggataccggttgaaggcgagcgcagcatcccgctggcgctacgtcgcgtagggtcaccatt

SEQ ID NO: 814899 - DNA, 75 bp, synthetic construct
  source 1..75: mol_type = other DNA
ggttcctgaataagcgcgcaaaaaagcgactaaacactaagctattcaggattcagccatatcctaaaaacactt

SEQ ID NO: 814900 - DNA, 75 bp, synthetic construct
  source 1..75: mol_type = other DNA
ggttcctgaacaagcgagcaaggaagcggctaaatactaagctattcagggttcaaccataccctaaaagcactc

SEQ ID NO: 814901 - DNA, 75 bp, synthetic construct
  source 1..75: mol_type = other DNA
cgacgttatcgcactggctggtttctacccagtagccacccctatcacagaagacatgctgcaacgtgctgttgc

SEQ ID NO: 814902 - DNA, 75 bp, synthetic construct
  source 1..75: mol_type = other DNA
cacttgccgggttggttgcgccggagaatttaaaacgcgataaaggttggatcggtgtgttactggagatctggc

SEQ ID NO: 814903 - DNA, 75 bp, synthetic construct
  source 1..75: mol_type = other DNA
acgctgccgcgcggcttttatttgaagaaaaatttcaccagtgcgctgctggcccgtcattttctgatccagtag

SEQ ID NO: 814904 - DNA, 75 bp, synthetic construct
  source 1..75: mol_type = other DNA
acaacagattgctgctatccgtggcgcggtaaacggtctgatgcgggaagtgattaaaggtcatctgacggaaca

SEQ ID NO: 814905 - DNA, 75 bp, synthetic construct
  source 1..75: mol_type = other DNA
gtcatctgacggaacacatcgttcaccagggggatgagctaaaacgtgaagaagatctggatgtcgttctgaagg

SEQ ID NO: 814906 - DNA, 75 bp, synthetic construct
  source 1..75: mol_type = other DNA
aaatttaatcaatatcgctacatcagattcctgaacaagcgtgcaagaaagcgcctaaacaccaaactattcagg

SEQ ID NO: 814907 - DNA, 75 bp, synthetic construct
  source 1..75: mol_type = other DNA
ggttcctgaacaaacgagcaaggaagcggctaaatactaaactattcagggttcagccgtaccctaaaagcactc

SEQ ID NO: 814908 - DNA, 75 bp, synthetic construct
  source 1..75: mol_type = other DNA
ggttcctgaacaagcgtgcaaaaaagcgcctaaacaccaagctattcaggattcagccataccccaaaaacacat

SEQ ID NO: 814909 - DNA, 75 bp, synthetic construct
  source 1..75: mol_type = other DNA
taataaagagcgtgccgtggtgcacaaatttaatcagtatcgctacatcagattcctgaacaagcgagcaaggaa

SEQ ID NO: 814910 - DNA, 75 bp, synthetic construct
  source 1..75: mol_type = other DNA
cgtcgcgctggcagcacgcccttcttatatcgcactggggcatgtgttccccacgcaaaccaaacagatgccttc

SEQ ID NO: 814911 - DNA, 75 bp, synthetic construct
  source 1..75: mol_type = other DNA
gaacgtctgttggatgcaggcgtacgtactctccagctacgcatcaaagatcggcgcgatgaagaggtggaagcc

SEQ ID NO: 814912 - DNA, 75 bp, synthetic construct
  source 1..75: mol_type = other DNA
gaacgtctgttggatgcaggcgtgcgtactctccagctgcgcatcaaagatcggcgcgatgaagaggtggaagcc

SEQ ID NO: 814913 - DNA, 75 bp, synthetic construct
  source 1..75: mol_type = other DNA
gaatgcgatgttgaagcaacggacacagcaacttatcgacatcattagtaatactgacaatgactactgcatgtg

SEQ ID NO: 814914 - DNA, 75 bp, synthetic construct
  source 1..75: mol_type = other DNA
ctcatgacgatatggagatcgacgtcgcgctggcggcacgtccttcttatatcgcgctgggacatgtgtttccga

SEQ ID NO: 814915 - DNA, 75 bp, synthetic construct
  source 1..75: mol_type = other DNA
cagtctggcgcgcgcgcctgcggtgatggcgacgggtgtcggcagtatcgccatcgtcagtgccattacccaggc

SEQ ID NO: 814916 - DNA, 75 bp, synthetic construct
  source 1..75: mol_type = other DNA
gtgaaaaaattacgtatcggcgtagtggggttaggcggcattgcgcaaaaagcgtggttaccggtgctggcggca

SEQ ID NO: 814917 - DNA, 75 bp, synthetic construct
  source 1..75: mol_type = other DNA
caaaccgccggcgaacaggccgtgctggcgcaacgtatcgttgacaagatctggcgcgatgcgatgagtgaataa

SEQ ID NO: 814918 - DNA, 75 bp, synthetic construct
  source 1..75: mol_type = other DNA
cggttgtgcacggcacttcatcgaatgtgtgcaaaatcaaacagttccgcaaactgctggagaacaagcggtgct

SEQ ID NO: 814919 - DNA, 75 bp, synthetic construct
  source 1..75: mol_type = other DNA
cgaatcaactggcgattatcgaacgtgaaattcccatcccgaatacgggtgaagtacgagtaaaggtgaaactcg

SEQ ID NO: 814920 - DNA, 75 bp, synthetic construct
  source 1..75: mol_type = other DNA
atggataaacatcgtagcaatagtgtcgggccacacgatctttatttcacgttgctggatgattatctgcatgtg

SEQ ID NO: 814921 - DNA, 75 bp, synthetic construct
  source 1..75: mol_type = other DNA
tggggttaggagggatcgcgcaaaaagcgtggttaccggtgctggcggcagcgtctgactggacgttacaggggg

SEQ ID NO: 814922 - DNA, 75 bp, synthetic construct
  source 1..75: mol_type = other DNA
aaaacttagctatctacgccgtgcacatggttttgctgtttcgcttgatagcgatgatgtcgaaacccgtatgat

SEQ ID NO: 814923 - DNA, 75 bp, synthetic construct
  source 1..75: mol_type = other DNA
tgggcgaacttcagccgcaatatcgatccgctggtagaagctggttatcgggtgatcctgctggattgtcctggt

SEQ ID NO: 814924 - DNA, 75 bp, synthetic construct
  source 1..75: mol_type = other DNA
caaaggagaggagcatggaaataaaaccagaaggatgacccacgtaatcaggttaattttctttatgagccatcg

SEQ ID NO: 814925 - DNA, 75 bp, synthetic construct
  source 1..75: mol_type = other DNA
tgatgtccgacctcatgggcgggctgctgcacttcctgaataccattcctccgtcaatgaagtttgcggcggcgt

SEQ ID NO: 814926 - DNA, 75 bp, synthetic construct
  source 1..75: mol_type = other DNA
tgagggaaaagcctcaccccagccctctcgggtaaaaacattgatgaaggttaatactatgaaagcattacattt

SEQ ID NO: 814927 - DNA, 75 bp, synthetic construct
  source 1..75: mol_type = other DNA
tctaactgcgaaattataaatattgatcatatagatgcaggcgtcggttggttctattctgacggagagtttata

SEQ ID NO: 814928 - DNA, 75 bp, synthetic construct
  source 1..75: mol_type = other DNA
tgttctcgaagaactcaatgaaaatgcccgcagtctgcggttgatgagcgatctcaaccgtaacctgttgctgct

SEQ ID NO: 814929 - DNA, 75 bp, synthetic construct
  source 1..75: mol_type = other DNA
tggatggttttctaaaaggtaaatgcatcccacgagatttaaaggttaacgaaacaaacgctgaatatctggtgc

SEQ ID NO: 814930 - DNA, 75 bp, synthetic construct
  source 1..75: mol_type = other DNA
ggtgtccgggctggacgatggcgactgcgttacggtgaaagaggcgactgacgccctgctgcattgtgcggaaca

SEQ ID NO: 814931 - DNA, 75 bp, synthetic construct
  source 1..75: mol_type = other DNA
tcaaagaacaactgcgtattgctgctggtcagccactgtcgatcaagcaagaagaagttcacgttcgcggccatg

SEQ ID NO: 814932 - DNA, 75 bp, synthetic construct
  source 1..75: mol_type = other DNA
gcggtgttcgttaaggacgcgacggttatcgggctggacgatggcgacatcgttacggtgaaagaagcgacggac

SEQ ID NO: 814933 - DNA, 75 bp, synthetic construct
  source 1..75: mol_type = other DNA
atggaaatcctaaatcaaaccgtcgcaagttccatcagtgaatcaaaacaaatatctgaatgcgatgtggcggag

SEQ ID NO: 814934 - DNA, 75 bp, synthetic construct
  source 1..75: mol_type = other DNA
cgattacgaagcagagctaggtatggagcgtggtggattcagtgatgcgcttaacgaaataaaaaccccagacac

SEQ ID NO: 814935 - DNA, 75 bp, synthetic construct
  source 1..75: mol_type = other DNA
tgtggtggataccgcgctgtggctatctggtggcaaagctgtcctggatggtggcacgctactgactaacgacgc

SEQ ID NO: 814936 - DNA, 75 bp, synthetic construct
  source 1..75: mol_type = other DNA
tttgtcgtggtgctgccggatgttgttatcgacgacgccagtgccgatccgctgcgttacaacctggccgcaatg

SEQ ID NO: 814937 - DNA, 75 bp, synthetic construct
  source 1..75: mol_type = other DNA
tttgtcgtggtactgccagacgttgtgattgacgacgccagcgccgacccgctgcgctacaaccttgctgccatg

SEQ ID NO: 814938 - DNA, 75 bp, synthetic construct
  source 1..75: mol_type = other DNA
gttgacgccatgctgatgactggagacagctacgactgcggtaaaaaaatgggctatatgcaagcgttcgtgaag

SEQ ID NO: 814939 - DNA, 75 bp, synthetic construct
  source 1..75: mol_type = other DNA
atgctggcgaaaaaaaatcgaacaagctataattcagcaaccattttacaggtggatgaaataatgacgaattta

SEQ ID NO: 814940 - DNA, 75 bp, synthetic construct
  source 1..75: mol_type = other DNA
attgcgcgcttcaatgaaacgggacgcagccaggtgctggcaaaacgtatgccgggtgatctctctgaatactcc

SEQ ID NO: 814941 - DNA, 75 bp, synthetic construct
  source 1..75: mol_type = other DNA
acgacctgccattggtgacaacccatttgtcgtggtactgccagacgttgtgatcgatgacgccagcgccgaccc

SEQ ID NO: 814942 - DNA, 75 bp, synthetic construct
  source 1..75: mol_type = other DNA
atggagcatatgcagtcgagcggttcgttaacatttggagattgctacatatcacttaacgagttcgccgcccag

SEQ ID NO: 814943 - DNA, 75 bp, synthetic construct
  source 1..75: mol_type = other DNA
gcaggtgatctacaacgtgcgtacgccgcaggatgtgattttcgccgatgagtggcgtaactatccggtaacgct

SEQ ID NO: 814944 - DNA, 75 bp, synthetic construct
  source 1..75: mol_type = other DNA
cgaaaaatcgcccgcaggcggatgtgcaggtgatctacaacgtgcgtacgccgcaggatgttattttcgccgatg

SEQ ID NO: 814945 - DNA, 75 bp, synthetic construct
  source 1..75: mol_type = other DNA
tgttgaatttatcgaaaaacccgatcagccgcagacgctggactcagacattatggcggttggtcgctatgtgct

SEQ ID NO: 814946 - DNA, 75 bp, synthetic construct
  source 1..75: mol_type = other DNA
aacgtgcgtcagggcgaacctttaggtttgggccactccattctgtgtgccagacctgccattggcgacaatcca

SEQ ID NO: 814947 - DNA, 75 bp, synthetic construct
  source 1..75: mol_type = other DNA
gcgcgaacatccatcaatcaaactttgctccttgacgcacatatgtgacgagttagccgcccagcttcgcaaagg

SEQ ID NO: 814948 - DNA, 75 bp, synthetic construct
  source 1..75: mol_type = other DNA
gcggtaaaaaaatgggttatatgcaggcgtttgtgaagtatggactacgcaacctgaaagaaggagcgaagttcc

SEQ ID NO: 814949 - DNA, 75 bp, synthetic construct
  source 1..75: mol_type = other DNA
atgcgcagtgtggcaaagctgatcagcgatttggcaacgcaactggaagtgcaactggtgcgtgctaatgcgatg

SEQ ID NO: 814950 - DNA, 75 bp, synthetic construct
  source 1..75: mol_type = other DNA
ggtgtggatatggctcgtaacgcgatgattgattttgtcgatggtgaagttgggccaaacaagaacgttccgggg

SEQ ID NO: 814951 - DNA, 75 bp, synthetic construct
  source 1..75: mol_type = other DNA
aaggacgcgacggttgtcgggctggacgatggcgacatcgttacggtgaaagaagcgaaggacgccctgctgcat

SEQ ID NO: 814952 - DNA, 75 bp, synthetic construct
  source 1..75: mol_type = other DNA
tgctgacaatctgttgtgtccagaccttgatggcactatccgtgactttgctgcccagcttcgcaaaggaggcaa

SEQ ID NO: 814953 - DNA, 75 bp, synthetic construct
  source 1..75: mol_type = other DNA
tgtttgctgagtgcgcatacacacttgaacatcatgatcacgcagtagccttcgccgctgagcttcgcaaaggag

SEQ ID NO: 814954 - DNA, 75 bp, synthetic construct
  source 1..75: mol_type = other DNA
tggatggatttctgaaaggtaaatgcattccacgagatttaaaggttaacgaaacaaacgctgaatatctggtgc

SEQ ID NO: 814955 - DNA, 75 bp, synthetic construct
  source 1..75: mol_type = other DNA
agcttggttatatccaggttccgacagtggaaacagacccggcacttgaaaccattcgcgttgctgtatcaccac

SEQ ID NO: 814956 - DNA, 75 bp, synthetic construct
  source 1..75: mol_type = other DNA
gtcaaaacgactaatggaaaatacccctgccaccgatgctttcctggctgaagtacgggccagtgctattgaaca

SEQ ID NO: 814957 - DNA, 75 bp, synthetic construct
  source 1..75: mol_type = other DNA
acagctacgactgcggtaaaaaaaatgggttatatgcaggcatttgtgaagtatggactacgcaacctgaaagaa

SEQ ID NO: 814958 - DNA, 75 bp, synthetic construct
  source 1..75: mol_type = other DNA
cgaaactattgaagccgttcgcagtgttgcggataactccagtggaattgccggatggcatttgaatggcgatat

SEQ ID NO: 814959 - DNA, 75 bp, synthetic construct
  source 1..75: mol_type = other DNA
gtgcgtgctaatgcgctggccgaagaccaacagaaagcgattgagtcaattaagcaggctgattcggctgttaag

SEQ ID NO: 814960 - DNA, 75 bp, synthetic construct
  source 1..75: mol_type = other DNA
ggatgattcttacctctactgagtttatggctaatgcgccggaaggcgattttgaccgctcattctctgatggcg

SEQ ID NO: 814961 - DNA, 75 bp, synthetic construct
  source 1..75: mol_type = other DNA
cgaagcgcccgctttcccgaccaataaccggatggtgaccagctggttcccggaacatgaacgcgcttctgccgt

SEQ ID NO: 814962 - DNA, 75 bp, synthetic construct
  source 1..75: mol_type = other DNA
tggtttttatacgtctggtcagtttgtcggtctggcgtttctgactccgctgctgatctggattcaggaaatgtt

SEQ ID NO: 814963 - DNA, 75 bp, synthetic construct
  source 1..75: mol_type = other DNA
ttgtcgcgatcaccaactgccccgccgggatcgctcacacctacatggtggcgggaacagaaagcccgttctctc

SEQ ID NO: 814964 - DNA, 75 bp, synthetic construct
  source 1..75: mol_type = other DNA
atgggcattcaggtgatggaagaagccccggatgccgatgatctgatgctggctgaaaacaccgcggacgaagat

SEQ ID NO: 814965 - DNA, 75 bp, synthetic construct
  source 1..75: mol_type = other DNA
agtggcgacgttattccagggctttgccacgggattaatgtcattaattggtctgcgcgcgataaccggtatttt

SEQ ID NO: 814966 - DNA, 75 bp, synthetic construct
  source 1..75: mol_type = other DNA
agtgaattaccgacaaactcacaactttttgccgcagatagcggcgtgaagctcggcaaacaggaagtgcaaagt

SEQ ID NO: 814967 - DNA, 75 bp, synthetic construct
  source 1..75: mol_type = other DNA
ggccgatgtcttcctggcggttaacagcgtggcaggccttggcgaaaagcgcaacaggcaccggaaaatgatgag

SEQ ID NO: 814968 - DNA, 75 bp, synthetic construct
  source 1..75: mol_type = other DNA
gtatctctgggggatttatatacatcagatttaataactaatggtagtacttctgcatggaaaatttttaaaata

SEQ ID NO: 814969 - DNA, 75 bp, synthetic construct
  source 1..75: mol_type = other DNA
tgacaaagccctgctcggcacccagtctggcgcgggcttcctcggtgcggtggtgctggggctggcgattggcta

SEQ ID NO: 814970 - DNA, 75 bp, synthetic construct
  source 1..75: mol_type = other DNA
tccttacgctctggcagctccgttgccgatgattaccccaatacgctggcgggcggcattaccggcgtgctggtg

SEQ ID NO: 814971 - DNA, 75 bp, synthetic construct
  source 1..75: mol_type = other DNA
tttttgccgcagatagcggcgtgaagcttggcaaacaggaagtgcaaagcggcagcgtgatgagccacctgatgg

SEQ ID NO: 814972 - DNA, 75 bp, synthetic construct
  source 1..75: mol_type = other DNA
gcctaaggccatagcagaggctataaaagccggaggttctcttgatgattttcttatatctcaggatacatcatc

SEQ ID NO: 814973 - DNA, 75 bp, synthetic construct
  source 1..75: mol_type = other DNA
acttacggtaatactgacagaagcggcacgaattgatatttataaaggaacacgcttattaggaacgcgctatga

SEQ ID NO: 814974 - DNA, 75 bp, synthetic construct
  source 1..75: mol_type = other DNA
tgtatcgactgcttttatcagtcagcagtcgatatctctcagccatggcgcacaagaggagagtgtgggggggaa

SEQ ID NO: 814975 - DNA, 75 bp, synthetic construct
  source 1..75: mol_type = other DNA
aaccaatattaatatcgggctttccgtattaatttatcttgttgatattatgtttgtatatatgacaaatgccat

SEQ ID NO: 814976 - DNA, 75 bp, synthetic construct
  source 1..75: mol_type = other DNA
gcctcgccatgatggtgaatatacccctgaggtgaatgaagatgtggggtgtgtctataacgaagagtctcaaac

SEQ ID NO: 814977 - DNA, 75 bp, synthetic construct
  source 1..75: mol_type = other DNA
gtttggttcttttttctgcatcatcagcactggcaaactcccccccccctgaatttaaaactttagctctcggtc

SEQ ID NO: 814978 - DNA, 75 bp, synthetic construct
  source 1..75: mol_type = other DNA
catgaattacacccaggtattacctggacggaggctgctcaataccatgataaaaattatctcatggaaaacgat

SEQ ID NO: 814979 - DNA, 75 bp, synthetic construct
  source 1..75: mol_type = other DNA
gcgtcaccattcagcggagaaccgccatccagtcacctactactggtgcaatggaatatacctggaatgaccttg

SEQ ID NO: 814980 - DNA, 75 bp, synthetic construct
  source 1..75: mol_type = other DNA
gactgcaggggcaaaaggtaaacgtttctgcctgccgaattcgcgcgtgatgattcaccaaccgttgggcggcta

SEQ ID NO: 814981 - DNA, 75 bp, synthetic construct
  source 1..75: mol_type = other DNA
aaacccagaaaaagatatctatctgtacattaactccccaggcggggtgatcactgccgggatgtctatctatga

SEQ ID NO: 814982 - DNA, 75 bp, synthetic construct
  source 1..75: mol_type = other DNA
acgtcgtcgaaaaaactatcgtgaatggcggctggaacgtctaacggggttcgaatatcgtccacttacgcccaa

SEQ ID NO: 814983 - DNA, 75 bp, synthetic construct
  source 1..75: mol_type = other DNA
gcattgaggggatccttcctgaccctgatagtggactcgaatatctcacgcttccgtgctcagagggggtaaagg

SEQ ID NO: 814984 - DNA, 75 bp, synthetic construct
  source 1..75: mol_type = other DNA
cggcgtgaaatagcgaaaaagttcggcatgccgctgcgtacagtgaataactacgtttatttcgacaggaggatt

SEQ ID NO: 814985 - DNA, 75 bp, synthetic construct
  source 1..75: mol_type = other DNA
ggctgcgcgacagaaaacttgtggatatcacagacattcccgaatcctccatagtcacatgttctgcgacaccgg

SEQ ID NO: 814986 - DNA, 75 bp, synthetic construct
  source 1..75: mol_type = other DNA
gaagtatatgcgcgtattaacgccagagttcgtagcacgcttcccgaataaaattatcaatattcaccattcatt

SEQ ID NO: 814987 - DNA, 75 bp, synthetic construct
  source 1..75: mol_type = other DNA
atcagctgtatcgtgagccgaccatcgagaacctgaagctgatgatggagatctttgtcttcgacaccagcgacc

SEQ ID NO: 814988 - DNA, 75 bp, synthetic construct
  source 1..75: mol_type = other DNA
ggatccgtcaggcgatcacccgttctatcgcggatcaggcgcgcaccatccgtattccggtacatatgattgaga

SEQ ID NO: 814989 - DNA, 75 bp, synthetic construct
  source 1..75: mol_type = other DNA
gcaccaagataaaaatgttcgagaatggacaagccggctacaagcactttggtgtactggtcaacatcaatgatg

SEQ ID NO: 814990 - DNA, 75 bp, synthetic construct
  source 1..75: mol_type = other DNA
tgaaaaggctcagcaagaaaacaaagcacagatagccagtcttgcttcgcaagttcagcaactcactacgcagtt

SEQ ID NO: 814991 - DNA, 75 bp, synthetic construct
  source 1..75: mol_type = other DNA
aggagcaggaagacctgattaacaggctgcacattcaggcggtcaggcaacagttgagcgttaaaggtgaaagcc

SEQ ID NO: 814992 - DNA, 75 bp, synthetic construct
  source 1..75: mol_type = other DNA
atgccggccagaatcacacaatccggatcagtcagtgccctgaaagacgtgaaagggatgggcggtagcgtgtcc

SEQ ID NO: 814993 - DNA, 75 bp, synthetic construct
  source 1..75: mol_type = other DNA
tagcttgccgcacaaaaatctgattgaaggtattgccgctgcaatgcacttttgcagtgaagatgatcctcaggc

SEQ ID NO: 814994 - DNA, 75 bp, synthetic construct
  source 1..75: mol_type = other DNA
taaaactttatttgaaggtcagaaagttgaattcgccattcaccgcggagacaagggtcctgctgcaaacgtaac

SEQ ID NO: 814995 - DNA, 75 bp, synthetic construct
  source 1..75: mol_type = other DNA
tgaacgtttcaactgacagcagcaacatttcgatagcagaacttaaaaaagaatatataccgggtcttctgctta

SEQ ID NO: 814996 - DNA, 75 bp, synthetic construct
  source 1..75: mol_type = other DNA
acccggatatggtcagtaaagctacccaggcacaccaggcgcttatgaaaagtctgcataagagtttagagggga

SEQ ID NO: 814997 - DNA, 75 bp, synthetic construct
  source 1..75: mol_type = other DNA
atgaaggtaaaaagcattggcgcgcttatcggacgaactgaagcggcagtgagaacgaaggcacgggagctgggc

SEQ ID NO: 814998 - DNA, 75 bp, synthetic construct
  source 1..75: mol_type = other DNA
cggggcgattatcaccagtcagcaaaatatcctcagagtgatatagagctgatgcggcagttgcatcaacacggt

SEQ ID NO: 814999 - DNA, 75 bp, synthetic construct
  source 1..75: mol_type = other DNA
ggcgtaccccgacggaaaattgccgaaaagtttgggatgaagttgggcgcagtgaataactacgtttatttcgac

SEQ ID NO: 815000 - DNA, 75 bp, synthetic construct
  source 1..75: mol_type = other DNA
cgatgacagtcgacagcatcggcagtctgattggtcgtagtgagccggcggtcagggcgaaagcacgggaactgg

SEQ ID NO: 815001 - DNA, 75 bp, synthetic construct
  source 1..75: mol_type = other DNA
aactttcaccagtcagcaaaatatccgcagcgcgatattttgctggtgcggcatctgcatcagagcggtatttcc

SEQ ID NO: 815002 - DNA, 75 bp, synthetic construct
  source 1..75: mol_type = other DNA
ggagctgcggatcagcatgattctgaaaggagactttcaccagtcagccaaataccggcagagcgatatagaact

SEQ ID NO: 815003 - DNA, 75 bp, synthetic construct
  source 1..75: mol_type = other DNA
ggagatgggaataagtctgattctgcgtggtgattttcaccagtcagcaaaatatcttcagagcgatattgagct

SEQ ID NO: 815004 - DNA, 75 bp, synthetic construct
  source 1..75: mol_type = other DNA
ttgatggaaaactaaaaacatcgtattttttccttactcgcatctggggtgacataacaaaaccaccacacataa

SEQ ID NO: 815005 - DNA, 75 bp, synthetic construct
  source 1..75: mol_type = other DNA
catgtttataatgacaaggttcttttgttctccgacaataaaacagataagttctataaagcgtttagcattgcc

SEQ ID NO: 815006 - DNA, 75 bp, synthetic construct
  source 1..75: mol_type = other DNA
ggccggaattctttatattaccttcgcatgttgcatacacaacgagcaatctgccatagtagaggatgccatagc

SEQ ID NO: 815007 - DNA, 75 bp, synthetic construct
  source 1..75: mol_type = other DNA
atgatgaaatcagacgaaaaatatcaggttcccgtgtggatgcgacctctgttgccgttgctctgcaataccggt

SEQ ID NO: 815008 - DNA, 75 bp, synthetic construct
  source 1..75: mol_type = other DNA
gaatgttgtccgttatgtactgatagttgcagtgcggtcgcaggttgatctgctgcagctactgtacaggaaagg

SEQ ID NO: 815009 - DNA, 75 bp, synthetic construct
  source 1..75: mol_type = other DNA
agattcccgcgtggatgcgacctctgttgccgttgttctgcaacaccgggggtaacgatccggaggagcttctga

SEQ ID NO: 815010 - DNA, 75 bp, synthetic construct
  source 1..75: mol_type = other DNA
ttgccaacaacgaaggtctggcatccgaaggcgacaacgtctggtctgcgacgcaatcttctggcgtggcgctgt

SEQ ID NO: 815011 - DNA, 75 bp, synthetic construct
  source 1..75: mol_type = other DNA
aacggcgcagaacccgccacgtttagcctgagcttcctcaactccatgcagcaaaataccggcgctaacaatatt

SEQ ID NO: 815012 - DNA, 75 bp, synthetic construct
  source 1..75: mol_type = other DNA
tgctggggcagattgtgctggctaatttcgccaacaatgaaggcctggcatcagaaggtgacaacgtctggtctg

SEQ ID NO: 815013 - DNA, 75 bp, synthetic construct
  source 1..75: mol_type = other DNA
aaccattattaaaaatttcaaactacctataccccatgcaagcgatccccaaaaatcacttaaggaacaagctcg

SEQ ID NO: 815014 - DNA, 75 bp, synthetic construct
  source 1..75: mol_type = other DNA
gttgcccagcgtaactatcagtctaacgcccagaccatcaaaacccaggaccagatccttaacacgctggttaac

SEQ ID NO: 815015 - DNA, 75 bp, synthetic construct
  source 1..75: mol_type = other DNA
caacgatgacggcacggtagtcggtaactattccaacgaacaaacccagttgctggggcagattgtactggcgaa

SEQ ID NO: 815016 - DNA, 75 bp, synthetic construct
  source 1..75: mol_type = other DNA
ccacccgcccgtatgaccgcttctggggtcgtcgcaagctggcgagcctgggctaccagttccagccagacagcc

SEQ ID NO: 815017 - DNA, 75 bp, synthetic construct
  source 1..75: mol_type = other DNA
caagcagagcaacggcctgcacggcgattacgacgtcgagagcggcctgcaacaactgctggacggcagcggact

SEQ ID NO: 815018 - DNA, 75 bp, synthetic construct
  source 1..75: mol_type = other DNA
ctgtgcaaagcggcaatgtggaaccggaaaaagcgcgaacctgggaactcggtacccgctacgacgacggcgcgc

SEQ ID NO: 815019 - DNA, 75 bp, synthetic construct
  source 1..75: mol_type = other DNA
tgactgttttcgatagtcagggtaatgctcatgacatgagcgtctactttgtgaagaccggggataataactggc

SEQ ID NO: 815020 - DNA, 75 bp, synthetic construct
  source 1..75: mol_type = other DNA
aggtctacacccaggatagcagtgatccaacaggtacagctgagcctgcaatgacgctggtgtttaatgccaatg

SEQ ID NO: 815021 - DNA, 75 bp, synthetic construct
  source 1..75: mol_type = other DNA
caccaaaagaagatgccctgaccgtggtcggcgactggctgggtgatgcgcgtgaaaacgacgtatttgaacatg

SEQ ID NO: 815022 - DNA, 75 bp, synthetic construct
  source 1..75: mol_type = other DNA
tgccacaaattgcaactcctgatacagataagtttgaagttccaatcccttgcccggataatccggaaaaatccc

SEQ ID NO: 815023 - DNA, 75 bp, synthetic construct
  source 1..75: mol_type = other DNA
agcgcaaagtgaaatcgcttcctcgcggaacagatattttttacggcgatgtttcattgcctgaaacactcaccg

SEQ ID NO: 815024 - DNA, 75 bp, synthetic construct
  source 1..75: mol_type = other DNA
ccgctgagcttaacatgcgtaaaaaacagtacaactactatcgcgaccagttgttgagttttgatgaggagcagg

SEQ ID NO: 815025 - DNA, 75 bp, synthetic construct
  source 1..75: mol_type = other DNA
ccgaactgagtgccgagcaactcttaagcaagctgtggctatgggaaggcaaagcggaaagctatggctggggga

SEQ ID NO: 815026 - DNA, 75 bp, synthetic construct
  source 1..75: mol_type = other DNA
tgaggttcatgacaggaaaagacgtgccgagcgtctggtcagggccagcggtcatccctatattatcgtccggcc

SEQ ID NO: 815027 - DNA, 75 bp, synthetic construct
  source 1..75: mol_type = other DNA
taacgatgcagccacaaataaaacgtttgagctggtcgctgagcgaggggaggcacaactggattttacacctct

SEQ ID NO: 815028 - DNA, 75 bp, synthetic construct
  source 1..75: mol_type = other DNA
gttcgcatcgccctgatgacaacgattggcgtaactgagcggctcagtagctggaatcaacgtactgaagttcat

SEQ ID NO: 815029 - DNA, 75 bp, synthetic construct
  source 1..75: mol_type = other DNA
acgtgaggacttcgctacactcatccaaatgtttaaagcccaccatgcaccgtatcagggggagtggcatctcaa

SEQ ID NO: 815030 - DNA, 75 bp, synthetic construct
  source 1..75: mol_type = other DNA
acaccatccataatccggtggtgaaaggcaatgagtctgcgcatgagggagtaatccctgccgctgccgaaacac

SEQ ID NO: 815031 - DNA, 75 bp, synthetic construct
  source 1..75: mol_type = other DNA
ctacaaatttctgttttactggctaacaatagaagccaaaaaacatgtttactcaggaatgggaaaccccaagtt

SEQ ID NO: 815032 - DNA, 75 bp, synthetic construct
  source 1..75: mol_type = other DNA
tcggatggatgatcaaacctttgggtcgctggtcgttaatcatggaaatcgatgaaggctttgcggtaggcatgt

SEQ ID NO: 815033 - DNA, 75 bp, synthetic construct
  source 1..75: mol_type = other DNA
gcagttcaccgtcagctttgatgaaaccttaaaaccgtttgtgcgcgatgtttccggcagccgcctgaaagactt

SEQ ID NO: 815034 - DNA, 75 bp, synthetic construct
  source 1..75: mol_type = other DNA
tttatcagccatcgctctggacgcgcccggtattaaaagcaaatgcccaatcactgccagatagcgccctcctcc

SEQ ID NO: 815035 - DNA, 75 bp, synthetic construct
  source 1..75: mol_type = other DNA
ttctggtagtacggtgataactggtcgtatagcaaatggtcagcaaataccgctgccaacaggattttctgccag

SEQ ID NO: 815036 - DNA, 75 bp, synthetic construct
  source 1..75: mol_type = other DNA
gggaacccctgtaggtattctgggttttgcaattattatggcggctgtgagtgcgcttgttaatgataagtttat

SEQ ID NO: 815037 - DNA, 75 bp, synthetic construct
  source 1..75: mol_type = other DNA
cggaatcgcttaacacggcccgtaatgcattaaccagagctgaacaacagctgacgcaacagaaaaacacacctg

SEQ ID NO: 815038 - DNA, 75 bp, synthetic construct
  source 1..75: mol_type = other DNA
atgcttgctgaatacgagcgcagaaaaggtattctggacacgcggttgtcagagctggaaaaaaatggcggggca

SEQ ID NO: 815039 - DNA, 75 bp, synthetic construct
  source 1..75: mol_type = other DNA
atggaaggcgcggaaggcaatgtgtttgtgttacgcaagacttatcagaacgagcaggcagcaagacgcgcagcg

SEQ ID NO: 815040 - DNA, 75 bp, synthetic construct
  source 1..75: mol_type = other DNA
gggttttgcaattattatggcggctgtgagtgcgcttgttaatgataagtttattgagcaggtcaataaacttat

SEQ ID NO: 815041 - DNA, 75 bp, synthetic construct
  source 1..75: mol_type = other DNA
atgcaaaagatcgtgcagcgattgccgcagcccttgagtctgtgaagctgtctgatatatcgtctaatctgaaca

SEQ ID NO: 815042 - DNA, 75 bp, synthetic construct
  source 1..75: mol_type = other DNA
cctccgaaaactacaccagcccgcgcgtaatgcaggctcagggttctcagctgaccaacaaatatgctgaaggtt

SEQ ID NO: 815043 - DNA, 75 bp, synthetic construct
  source 1..75: mol_type = other DNA
gtaaacattcagttggttgatgcgaataacaatgcgtttacaggcgaggtggatttaacgattacaccatcgacg

SEQ ID NO: 815044 - DNA, 75 bp, synthetic construct
  source 1..75: mol_type = other DNA
atcaacgcagttcactgcatcgaaatcgggccagtacacaattcaggccgagcatgttcaggatgggaaacgcat

SEQ ID NO: 815045 - DNA, 75 bp, synthetic construct
  source 1..75: mol_type = other DNA
agagctggaaaaaaatggcggggcagcccttgccgttcttgatgcacaacaggcccgtctgctcgggcagcagac

SEQ ID NO: 815046 - DNA, 75 bp, synthetic construct
  source 1..75: mol_type = other DNA
tgctggaaccaggtgataccgttctgggtatgaatctggcgcatggcggtcacctgactcacggttctccggtta

SEQ ID NO: 815047 - DNA, 75 bp, synthetic construct
  source 1..75: mol_type = other DNA
ctgaaagaagcgatggagcctgagttcaaaacttaccagcagcaggtcgcgaaaaacgccaaagcgatggtagaa

SEQ ID NO: 815048 - DNA, 75 bp, synthetic construct
  source 1..75: mol_type = other DNA
ttacggcaacgattgcttgatgccagaaataaaatcacctctgctgaatctgcggtaaattcggcgagaaataac

SEQ ID NO: 815049 - DNA, 75 bp, synthetic construct
  source 1..75: mol_type = other DNA
cggaatgagcaccggctttgattcaggcagttcgctggattatgtctatcaaaatcaaccgcaaggtagtaacgc

SEQ ID NO: 815050 - DNA, 75 bp, synthetic construct
  source 1..75: mol_type = other DNA
aagttatctaggagcgagaagcccattgacgcaaattgcagaacaaattaaaggtataagagaggattggaaacc

SEQ ID NO: 815051 - DNA, 75 bp, synthetic construct
  source 1..75: mol_type = other DNA
atgacatggcgacatttgaaggaataagttatctaggagcgagaagcccattgacgcaaattgcagaacaaatta

SEQ ID NO: 815052 - DNA, 75 bp, synthetic construct
  source 1..75: mol_type = other DNA
atgaagcgattagttatattcgagccagacgttcgcatattgtgctgacagacgagcacaaagcgatgctgaaat

SEQ ID NO: 815053 - DNA, 75 bp, synthetic construct
  source 1..75: mol_type = other DNA
tttgctgtccctgctggcgcaacttatcagatcacctcttatccggcccaaaactactcttgtggctcaggggta

SEQ ID NO: 815054 - DNA, 75 bp, synthetic construct
  source 1..75: mol_type = other DNA
aaatagcaaatgggcaacagatcccattgccatctggtttttctgccagccagtgtacctggagtgtcagtaatg

SEQ ID NO: 815055 - DNA, 75 bp, synthetic construct
  source 1..75: mol_type = other DNA
tggtcgggcgctatcgaccagttacgtcgccacgcgccagagaaaaaaatagttgttgaagccgacacgccagag

SEQ ID NO: 815056 - DNA, 75 bp, synthetic construct
  source 1..75: mol_type = other DNA
gtaatgccgcagcacttcatcagggatggaaggcagtccagaatgtgctggagtggagttgcggtgtttctgatt

SEQ ID NO: 815057 - DNA, 75 bp, synthetic construct
  source 1..75: mol_type = other DNA
agataatgaagctgcgcatgagggcgtaacgcctgccgctgcacaaacgcaggccagttcgccggaacagaagcc

SEQ ID NO: 815058 - DNA, 75 bp, synthetic construct
  source 1..75: mol_type = other DNA
aaatgcagaacatagaaaaaatagcggcataccatttagcaaggtcagcgtattaaaaaacgggcattccctcaa

SEQ ID NO: 815059 - DNA, 75 bp, synthetic construct
  source 1..75: mol_type = other DNA
cttgcggaccgtttcggcaatgttgttcctggttatgctgtcacattgtctttaccagcagggataactcaagtt

SEQ ID NO: 815060 - DNA, 75 bp, synthetic construct
  source 1..75: mol_type = other DNA
gctatatagagttttttctccgtcagggcggctgcgtcagcggcgtttctgtcgcgtgtaagatgttaactacgc

SEQ ID NO: 815061 - DNA, 75 bp, synthetic construct
  source 1..75: mol_type = other DNA
gccaacggcggatctgtgcgtgggatttacaaccatgctcagtatctcgataagcgcagggagatgatgcagtgg

SEQ ID NO: 815062 - DNA, 75 bp, synthetic construct
  source 1..75: mol_type = other DNA
tcactaaaccagtatcagagtttgtttttgccggacgcaacgataagaagaagccaatctgcgagaacgcggtgc

SEQ ID NO: 815063 - DNA, 75 bp, synthetic construct
  source 1..75: mol_type = other DNA
taaacgcagagaaatgatgcagtggtgggcggactggttagatgataaggtgacacaatgccaccaaagcaaatt

SEQ ID NO: 815064 - DNA, 75 bp, synthetic construct
  source 1..75: mol_type = other DNA
atggctaatatcgtcaccgcaaaaatctatggccccgctcagaaaatgcgtttccttccttacgcgttcgcagaa

SEQ ID NO: 815065 - DNA, 75 bp, synthetic construct
  source 1..75: mol_type = other DNA
aatcaccatcaccgaaattggcgaatatcctgaaaatacaaccactatcgccccgttaactccatacgatgaatg

SEQ ID NO: 815066 - DNA, 75 bp, synthetic construct
  source 1..75: mol_type = other DNA
tgggtaattctttcttctggcgttgatgccgatatttttggccgtgcagtaagtattgccatgaaaggtggtgcg

SEQ ID NO: 815067 - DNA, 75 bp, synthetic construct
  source 1..75: mol_type = other DNA
actgaacggcagcgagccgcagaactggaggttgccagacagcaacgccagcaacgggtgaaacaggcgatggcg

SEQ ID NO: 815068 - DNA, 75 bp, synthetic construct
  source 1..75: mol_type = other DNA
ctgacaccagaagaaacggcaaaactgaacgccgtgctggattatatcgacgagctgaacgcactggatatcagc

SEQ ID NO: 815069 - DNA, 75 bp, synthetic construct
  source 1..75: mol_type = other DNA
ttcaggacagtctgaaaaaggttgaaaaggcgagcctcactaacctgacgcccgaactgaaagcgtcgatggatg

SEQ ID NO: 815070 - DNA, 75 bp, synthetic construct
  source 1..75: mol_type = other DNA
cgcggtgcaatggagcgagccaacaaagcccgcagaagatgcggcgaggtttttcgttacgctattgtcaccgga

SEQ ID NO: 815071 - DNA, 75 bp, synthetic construct
  source 1..75: mol_type = other DNA
gccaacggcggatctgtgcgtgggatttacaaccatgctcagtatctcgataagcgcagagaaatgatgcagtgg

SEQ ID NO: 815072 - DNA, 75 bp, synthetic construct
  source 1..75: mol_type = other DNA
aatcacagctccgggtgattaccctaataatacaaccactatcgccccattaacgccatacgataaatgggatgg

SEQ ID NO: 815073 - DNA, 75 bp, synthetic construct
  source 1..75: mol_type = other DNA
aatttatcgccacccaggcaggaaatattacggtttataactatgatggtgaaacacgagaatatattttcacat

SEQ ID NO: 815074 - DNA, 75 bp, synthetic construct
  source 1..75: mol_type = other DNA
aacaactgctggacggcagcggactgcaggtaaaaccgctgggaaataacagctggacgctggagcccgcgcccg

SEQ ID NO: 815075 - DNA, 75 bp, synthetic construct
  source 1..75: mol_type = other DNA
actccactcttcaagaaattcattgcattttagaagtgattgctatcgtgaccagtatgataaatcagtcactca

SEQ ID NO: 815076 - DNA, 75 bp, synthetic construct
  source 1..75: mol_type = other DNA
ggttgcgcaagtataaaccagaggaatatgagctaattatagctcattttgttattggtatttcgcttagaacta

SEQ ID NO: 815077 - DNA, 75 bp, synthetic construct
  source 1..75: mol_type = other DNA
atcggtcaaagacaaaactgtcgagctggcaaagcaaaaacagatctgcgcgggctatgacaacaatattaaggc

SEQ ID NO: 815078 - DNA, 75 bp, synthetic construct
  source 1..75: mol_type = other DNA
gcaggaaagcgccacggcgaaagcgcaaaaagcggtggatgacatcgccgtccagtgctggctgcggcataagtt

SEQ ID NO: 815079 - DNA, 75 bp, synthetic construct
  source 1..75: mol_type = other DNA
cccaacctcttcacaaaacaacccgaaagagacgcacaacctgatggtgggcggcacagcggacaacggttttgg

SEQ ID NO: 815080 - DNA, 75 bp, synthetic construct
  source 1..75: mol_type = other DNA
cataccacaacgtccgtcaaagagccgttctgcattagcgtgagtgtgtcgcattacgcgctgacccgtgaagca

SEQ ID NO: 815081 - DNA, 75 bp, synthetic construct
  source 1..75: mol_type = other DNA
aactaccaagtgaattaaattatgtattaaacaagaataaaaaacttattaccgacgtaataattggtaattcgg

SEQ ID NO: 815082 - DNA, 75 bp, synthetic construct
  source 1..75: mol_type = other DNA
cggtgaggcgtgggtaaccgatactgaacggcagcgagccgcagaactggaggttgccagacagcaacgccagca

SEQ ID NO: 815083 - DNA, 75 bp, synthetic construct
  source 1..75: mol_type = other DNA
atgcgtgatattcaaatggttcttgaacgttggggggcatgggctgcaagtgatagctctggggtagactattcg

SEQ ID NO: 815084 - DNA, 75 bp, synthetic construct
  source 1..75: mol_type = other DNA
aagaatactggatgttaattactacgcgcagtaatggtcgtggggttattgcccgatacagttcaacggatttaa

SEQ ID NO: 815085 - DNA, 75 bp, synthetic construct
  source 1..75: mol_type = other DNA
atcagtgagatttttgtcaatgaaaatgataactttcagcctactctaagcgggctaaatcctatttttttaata

SEQ ID NO: 815086 - DNA, 75 bp, synthetic construct
  source 1..75: mol_type = other DNA
aaaaatgaagtggttaattttttacgtaataagaattttcataatcttgcggatatgcccaatatcgacgtgatc

SEQ ID NO: 815087 - DNA, 75 bp, synthetic construct
  source 1..75: mol_type = other DNA
acgatccgcatatggataacagcttccagatcaacgatggtctgcgtattgcccgcaaattgctgctcgatatta

SEQ ID NO: 815088 - DNA, 75 bp, synthetic construct
  source 1..75: mol_type = other DNA
gatgcctgcattggctgggaagataccgatgctctgttacgtcaactggcgaatgcagtaaaagcgcgtcgcggg

SEQ ID NO: 815089 - DNA, 75 bp, synthetic construct
  source 1..75: mol_type = other DNA
ccacgctaactcgtccaaacagtttaaaaaacagatggatgtttgcgccgatgtttgccagcagattgccggtgg

SEQ ID NO: 815090 - DNA, 75 bp, synthetic construct
  source 1..75: mol_type = other DNA
ctgaattctctcaaaaaacatgagagagaaagtgccgaaaagttaattggacgagtaaacacattccgtttttct

SEQ ID NO: 815091 - DNA, 75 bp, synthetic construct
  source 1..75: mol_type = other DNA
tcaagttatgggcagaaaaggtattggtaagcttgccatgttttcacttgccaataaaatccaagtttattctta

SEQ ID NO: 815092 - DNA, 75 bp, synthetic construct
  source 1..75: mol_type = other DNA
gctggcctacggtaagagcatcaccgatgcctgcattggctgggatgataccgatgctctgttacgtcaactggc

SEQ ID NO: 815093 - DNA, 75 bp, synthetic construct
  source 1..75: mol_type = other DNA
acagccagcgcattgcgatggaacaaaagctgaaacgcagtcaggcactggaaaccacagaaagcatgcacctgc

SEQ ID NO: 815094 - DNA, 75 bp, synthetic construct
  source 1..75: mol_type = other DNA
attgccgatcgcgtcgagtataaacgtgatgtgctgttgccgcgctgggttcccactgtggaagcctatctggag

SEQ ID NO: 815095 - DNA, 75 bp, synthetic construct
  source 1..75: mol_type = other DNA
ctcgcgccagcatgcatcgtggattacacctctaatcatcgggattatcatcttcatcgtcgctccatatctgcc

SEQ ID NO: 815096 - DNA, 75 bp, synthetic construct
  source 1..75: mol_type = other DNA
cgcgaagcacgttgctgaagtgaaagaagggctgaacaaagcaggcctgccagcacaggtgatgatcgatttcag

SEQ ID NO: 815097 - DNA, 75 bp, synthetic construct
  source 1..75: mol_type = other DNA
ccaccgacaacagcgaggccggacacagcatagaaccgtatttttcgcgcaccttcaggaacgtcaccacctcgt

SEQ ID NO: 815098 - DNA, 75 bp, synthetic construct
  source 1..75: mol_type = other DNA
aacactactcaaaaattggcgtcagaacggcgcggcagacaattgccgcccgtatccgaaaactgactcaagggt

SEQ ID NO: 815099 - DNA, 75 bp, synthetic construct
  source 1..75: mol_type = other DNA
ggtattagcctttgaaagacttagaattcaagacaaccttgatgcattagataaaataagcaaccttcaatcaga

SEQ ID NO: 815100 - DNA, 75 bp, synthetic construct
  source 1..75: mol_type = other DNA
ggtgttatttcttacagcctttcggaaagaccagtgatgaacatggttgagaatatgctcgatcaggcattcaaa

SEQ ID NO: 815101 - DNA, 75 bp, synthetic construct
  source 1..75: mol_type = other DNA
acgaagtgatttcctacagtatctcagagcgtccagcaatggctatgattgatgagatgctggacaaggcgtttg

SEQ ID NO: 815102 - DNA, 75 bp, synthetic construct
  source 1..75: mol_type = other DNA
ctccggcaggaggcaggccgcattaaccataaagttgttcagcggctgatgaacctgctttccctgaaagcggct

SEQ ID NO: 815103 - DNA, 75 bp, synthetic construct
  source 1..75: mol_type = other DNA
gcattgtgaatgaactaaggctggaatggccattgtcccgattgttaattgtttccgggctgccccggagtacat

SEQ ID NO: 815104 - DNA, 75 bp, synthetic construct
  source 1..75: mol_type = other DNA
cgccagagtgatgaacgatacccgtggggtattaaaagcgattatcgataataaaacccaacgtatattaggggc

SEQ ID NO: 815105 - DNA, 75 bp, synthetic construct
  source 1..75: mol_type = other DNA
gagatgatcaatatagtgaaaatggtgatggatgccgggctgccttatagcatattacgcgatcagatatttact

SEQ ID NO: 815106 - DNA, 75 bp, synthetic construct
  source 1..75: mol_type = other DNA
tggcctgtatgagctttttcccgaaaatgagcaggtaaaaaactcactcgcaggtcttgccaatgccatcgaacc

SEQ ID NO: 815107 - DNA, 75 bp, synthetic construct
  source 1..75: mol_type = other DNA
agaacggacattacaaaaaatagataaagaatgggatgaatggcgaagagcaaaaggtcttagcgaggttaaaaa

SEQ ID NO: 815108 - DNA, 75 bp, synthetic construct
  source 1..75: mol_type = other DNA
tagttaagccatcacagttaaagaaagaccctgaaatatctaacaacagcattactgtaatctctcacggacgtg

SEQ ID NO: 815109 - DNA, 75 bp, synthetic construct
  source 1..75: mol_type = other DNA
gtgcgtgatgccggatttgataaatgcacacaacggattgatgagtggggtattttttacggtttcgatggcggt

SEQ ID NO: 815110 - DNA, 75 bp, synthetic construct
  source 1..75: mol_type = other DNA
gggatgcccgagggcatggacaaacttcggggccgcgtggttatagcccatctcttgcgcgttcagtgcaggatg

SEQ ID NO: 815111 - DNA, 75 bp, synthetic construct
  source 1..75: mol_type = other DNA
aatgagcaggtaaaaaactcactcgcaggtcttgccaatgccatcgaaccgggcggcattctcatctacaccggg

SEQ ID NO: 815112 - DNA, 75 bp, synthetic construct
  source 1..75: mol_type = other DNA
tgaaaagcgtttcacagcggtaatcagggcggttgtgctggcaaccaataataacccgatgatattcaccgaacg

SEQ ID NO: 815113 - DNA, 75 bp, synthetic construct
  source 1..75: mol_type = other DNA
gaaaatattgccgcagggattaccatgccggaacagaaaaaatcacaactttcacagatggcagacagtgaacgg

SEQ ID NO: 815114 - DNA, 75 bp, synthetic construct
  source 1..75: mol_type = other DNA
ctggaggaagcgcgtggcctgatgatgggcggcggtggtgattccgtgaagtacacaaccaggaacagcctttac

SEQ ID NO: 815115 - DNA, 75 bp, synthetic construct
  source 1..75: mol_type = other DNA
gatgtgtttcatgctttttgtgtggctgggtgcagtggtgacgctctgtgcagtggctgccgtaatgatgcaata

SEQ ID NO: 815116 - DNA, 75 bp, synthetic construct
  source 1..75: mol_type = other DNA
ataacgttaaaaatgtgattgttgccgatcgcattgatgaacgactggaaaaagcgaaagagagcggggcagact

SEQ ID NO: 815117 - DNA, 75 bp, synthetic construct
  source 1..75: mol_type = other DNA
gcacttgtagactcgtcgcctgacgcactgaatacgctgaacgagctggcggcggcgctgggcaacgacccgaat

SEQ ID NO: 815118 - DNA, 75 bp, synthetic construct
  source 1..75: mol_type = other DNA
gtctgacaggtcaggttatgtcgttactggttcagttaacggaaaccgtgatgaattaattgatacaactcaggc

SEQ ID NO: 815119 - DNA, 75 bp, synthetic construct
  source 1..75: mol_type = other DNA
gtgaatatataacgcgcagggttaaaggacttacgcaaaccaatgtgacaacaacagaggattgcgacgcgtttt

SEQ ID NO: 815120 - DNA, 75 bp, synthetic construct
  source 1..75: mol_type = other DNA
tatccgcgacaacgcgccaaactttcataaatggcttgatcacgcagccggaaaagacccgcgcaagatgatgcg

SEQ ID NO: 815121 - DNA, 75 bp, synthetic construct
  source 1..75: mol_type = other DNA
gtgtggcttggggagcagcagctatccgaactggataatctgcaaattgtgccggaaggccgaaaatcagcacgc

SEQ ID NO: 815122 - DNA, 75 bp, synthetic construct
  source 1..75: mol_type = other DNA
tatggcgaaccggtacgactggcagatgtttattgaggccaccggagacggcgggagcggtaaaagtacattcac

SEQ ID NO: 815123 - DNA, 75 bp, synthetic construct
  source 1..75: mol_type = other DNA
tgccctgctgtacagttccgcgtgaattacaggaacggcggtattttttatcgttcagcgcgtgatggttatgga

SEQ ID NO: 815124 - DNA, 75 bp, synthetic construct
  source 1..75: mol_type = other DNA
gatgattctccttgtggtgcaattaacgttattgggcgactgatgattcgcagtcagtggagcgatgacaaagct

SEQ ID NO: 815125 - DNA, 75 bp, synthetic construct
  source 1..75: mol_type = other DNA
tggtgtggagagtcgaaacctaccgaggataaatttaacagtacaaatcatcattgtgacccgaacggcttggct

SEQ ID NO: 815126 - DNA, 75 bp, synthetic construct
  source 1..75: mol_type = other DNA
gaatcccgcgctggcgttggcctgtctgttatcgttgttcctacgaatacccttaagcgtcagattctccgccag

SEQ ID NO: 815127 - DNA, 75 bp, synthetic construct
  source 1..75: mol_type = other DNA
cagtcagacagtgccgcgaacgcttccgagcggctattggtctggtcgaggctctgccgaaagaagagaagacgc

SEQ ID NO: 815128 - DNA, 75 bp, synthetic construct
  source 1..75: mol_type = other DNA
aaagatgtacgcgccatagccagccagcagattgatcgtctggaacaggctatgtgccagcgcagacgctggacg

SEQ ID NO: 815129 - DNA, 75 bp, synthetic construct
  source 1..75: mol_type = other DNA
ctattttgaaaaaccacgaactgttgtcggctggaaaggactcatctccgatccagatttaaacggtagctatcg

SEQ ID NO: 815130 - DNA, 75 bp, synthetic construct
  source 1..75: mol_type = other DNA
gttgcgcctgatgagcttgcttacttctaccgccctgaaaactgcaactggcagtacatcgctaaatacctctga

SEQ ID NO: 815131 - DNA, 75 bp, synthetic construct
  source 1..75: mol_type = other DNA
cattactccggacgacgggggatgctgttatatccgcctgcaacggtgtgacagttcccggggtgatatcagtac

SEQ ID NO: 815132 - DNA, 75 bp, synthetic construct
  source 1..75: mol_type = other DNA
attgagcgtcgggcttatgaaattgctctggcatcgctggaagcagaagcgccaaatttgcctggtggtttcaca

SEQ ID NO: 815133 - DNA, 75 bp, synthetic construct
  source 1..75: mol_type = other DNA
tctcgacccgcaggaaatgccgctgctgatcctcaacggctttgagtatgtgactcaggttggtaagaggcgatc

SEQ ID NO: 815134 - DNA, 75 bp, synthetic construct
  source 1..75: mol_type = other DNA
gcacgccgtgccggaatcaacaaccggacagaatgcttttctcaaagcctgccgcgagttcctgatttgcgatga

SEQ ID NO: 815135 - DNA, 75 bp, synthetic construct
  source 1..75: mol_type = other DNA
tggtgtggagagtcgaagcctaccgaggatagatttaatagttctaatcatcattgtgacccaaacggcttggca

SEQ ID NO: 815136 - DNA, 75 bp, synthetic construct
  source 1..75: mol_type = other DNA
gcatcttggcgagatttcacggcttgttagtatgtcgcgggagattgctcagaattgccaacaagcgattgctgt

SEQ ID NO: 815137 - DNA, 75 bp, synthetic construct
  source 1..75: mol_type = other DNA
acacgccaccagcaccaggggagaatatccgcgacaacgcgccaaactttcataaatggcttgatcacgcagccg

SEQ ID NO: 815138 - DNA, 75 bp, synthetic construct
  source 1..75: mol_type = other DNA
atgaaaaagaaattaatcagcgggctgtttctgatgttatggatggcgctgttgatcgcagcaatggtgtatccg

SEQ ID NO: 815139 - DNA, 75 bp, synthetic construct
  source 1..75: mol_type = other DNA
aatgccgccttagaaataatgaggttgttggttctctggcttttttttctgaggcctgtattcgtgccggaataa

SEQ ID NO: 815140 - DNA, 75 bp, synthetic construct
  source 1..75: mol_type = other DNA
agtaagtacggtagaaggcttttctgaactctgtattcgtgcaggaataaaaccggaactgctgacaggaaaata

SEQ ID NO: 815141 - DNA, 75 bp, synthetic construct
  source 1..75: mol_type = other DNA
caaaatgcgaagttgcaggccgatgctgcgcactctgcgctaaaacagagtgatgacctgaaaccggtctttgat

SEQ ID NO: 815142 - DNA, 75 bp, synthetic construct
  source 1..75: mol_type = other DNA
tctcctgagcagcgccaggcagtccgcgagaaaatgcagactaacccgcagaaccagcagcgaagagaggcagcg

SEQ ID NO: 815143 - DNA, 75 bp, synthetic construct
  source 1..75: mol_type = other DNA
agcgaagagaggcggcacgtcagcgtattcagtccgcgtcgcctgagcagcgccaggcggttcgcgagaaaatgc

SEQ ID NO: 815144 - DNA, 75 bp, synthetic construct
  source 1..75: mol_type = other DNA
atctttgctgaagaccattacccgaaaagaaaacgtatttatcagctgggtgatgcgattgctgattgtcgtaag

SEQ ID NO: 815145 - DNA, 75 bp, synthetic construct
  source 1..75: mol_type = other DNA
aaattgctgaacacaattttcaccgaagaagaaccggaagagccagaaagcgctccagcctcatcaacggaggcg

SEQ ID NO: 815146 - DNA, 75 bp, synthetic construct
  source 1..75: mol_type = other DNA
gcggctattatgacgatggaagtgaggcatcattaattgatgacacatgtaagataaaacctacttcttatcttt

SEQ ID NO: 815147 - DNA, 75 bp, synthetic construct
  source 1..75: mol_type = other DNA
tcatcctgtccgttgcgggcgtaaccctgagctttgaaccgaacaaaacggcatttaacaacctcatcaacgaaa

SEQ ID NO: 815148 - DNA, 75 bp, synthetic construct
  source 1..75: mol_type = other DNA
ctggtcttttatctgctgaccgttattgtcttctggatcacccgtaaccagatggcgcaacaggtagcagcatga

SEQ ID NO: 815149 - DNA, 75 bp, synthetic construct
  source 1..75: mol_type = other DNA
gcactggctgcgttaattcagaatggcccgctctggcaggagttaaggacatctttgctgaagacaattacccga

SEQ ID NO: 815150 - DNA, 75 bp, synthetic construct
  source 1..75: mol_type = other DNA
tctgggtgtgctggcgcaacagctgcaaaatgcgaagttgcaggccgatgctgcacactctgcgctaaaacagag

SEQ ID NO: 815151 - DNA, 75 bp, synthetic construct
  source 1..75: mol_type = other DNA
ttattctcatggctaaatgagcaaaacgtcgtaccatggactccattaataacaagaaagataagacgggcagac

SEQ ID NO: 815152 - DNA, 75 bp, synthetic construct
  source 1..75: mol_type = other DNA
tggatgctgattttgataatataatcagaatagcctcagatatggatttaagtctaataaaagatattgtgcgag

SEQ ID NO: 815153 - DNA, 75 bp, synthetic construct
  source 1..75: mol_type = other DNA
gtggtactggcgaccaacaacaacccgatgatattcacggaacgggccggaggcgtgtcacgtcgtcgcgtgatt

SEQ ID NO: 815154 - DNA, 75 bp, synthetic construct
  source 1..75: mol_type = other DNA
ttaaccccggcgaagaaaaaagatttgctgccttctcagcgtcagtggatcaaaactaaggatgctatgtgcggt

SEQ ID NO: 815155 - DNA, 75 bp, synthetic construct
  source 1..75: mol_type = other DNA
ggtatgaggcggagaagcaaatagagaggcaggcacaacttcagccgcaaaaagctgaaagccttgatcagtccc

SEQ ID NO: 815156 - DNA, 75 bp, synthetic construct
  source 1..75: mol_type = other DNA
atctccacaacatcaagtgacacgggcagcacaatgaaaacttgtgaagggaccgtgacgatgactctatctgcg

SEQ ID NO: 815157 - DNA, 75 bp, synthetic construct
  source 1..75: mol_type = other DNA
caggccaatgggggaaccgtcaggtgatttattgccgttctctaatggcgtgcttgacatgaaaactggcgaatt

SEQ ID NO: 815158 - DNA, 75 bp, synthetic construct
  source 1..75: mol_type = other DNA
gtaaatgctacatggtggtcgcaggggatatctccgacatcaacaatgcggttgctgttgccagcgaaagtgcag

SEQ ID NO: 815159 - DNA, 75 bp, synthetic construct
  source 1..75: mol_type = other DNA
ggacgactgcaccatcaaaactatctgcaaagccgcgaacaaaggcgatagcctggcctcggaagtgattgaata

SEQ ID NO: 815160 - DNA, 75 bp, synthetic construct
  source 1..75: mol_type = other DNA
gcggtggtggtgacaccgtgaagtacacgaccagaaacagcctttaccgtgtctatatggccttcatggcatata

SEQ ID NO: 815161 - DNA, 75 bp, synthetic construct
  source 1..75: mol_type = other DNA
gatgacatcactcgatgatgcaggagggcgcgcgcaggttgtcgggagtcgtcttatcgtccttgccgatcagct

SEQ ID NO: 815162 - DNA, 75 bp, synthetic construct
  source 1..75: mol_type = other DNA
tgggcggcggtggcgattccgtgaagtacacaaccaggaacagcctttaccgcgtctatctggcgtttatggcgt

SEQ ID NO: 815163 - DNA, 75 bp, synthetic construct
  source 1..75: mol_type = other DNA
ttgagactggtttcgattccggcagtaccctagactacatctatcgcaaccagcctcagggcagcacctcgttgg

SEQ ID NO: 815164 - DNA, 75 bp, synthetic construct
  source 1..75: mol_type = other DNA
catgacaccttaggcgaaaaagagcggcatctggcatttgacaggatgcgcagttttattgataccttgtatgcc

SEQ ID NO: 815165 - DNA, 75 bp, synthetic construct
  source 1..75: mol_type = other DNA
tgtgcgaatcagttggtcgggaacacacgccagccctgagtgatgccgcagagcaataccttaacaccgttgcga

SEQ ID NO: 815166 - DNA, 75 bp, synthetic construct
  source 1..75: mol_type = other DNA
catctgccgcaggcgcgggcgcgctatcaatcggcgctgctgcccgtttgtttacaggtttcgccggagatcctg

SEQ ID NO: 815167 - DNA, 75 bp, synthetic construct
  source 1..75: mol_type = other DNA
ttcgcactaatctgccggtggtacgttctgagctggatcaccgctcggcaatcggcgcttttgcgctggtaaaac

SEQ ID NO: 815168 - DNA, 75 bp, synthetic construct
  source 1..75: mol_type = other DNA
tatcgctgccaacgccgccattgaacaacgagtgttgaatctgttaaagcagggctatcagagccgcgtgccgct

SEQ ID NO: 815169 - DNA, 75 bp, synthetic construct
  source 1..75: mol_type = other DNA
cggtagccatgggcgtcgggcgaaatccatcgcttttgcgaatatggacgaaaccgagtttcagcaggtttataa

SEQ ID NO: 815170 - DNA, 75 bp, synthetic construct
  source 1..75: mol_type = other DNA
tctatcgcgtttgcaaatatggacgataccgagtttcagcaggtttataaatccgtactgaatgtgctttggaac

SEQ ID NO: 815171 - DNA, 75 bp, synthetic construct
  source 1..75: mol_type = other DNA
tggatcctgttccgtaaattttcctcaccggaacaagtcgaaaatgttgctgcgcagctgctggagtttgcgtaa

SEQ ID NO: 815172 - DNA, 75 bp, synthetic construct
  source 1..75: mol_type = other DNA
ctgcatcaaatcaaaataggcgagtggatacacgctgactttaagcgtgttcgtaactacgcattccacaagcgt

SEQ ID NO: 815173 - DNA, 75 bp, synthetic construct
  source 1..75: mol_type = other DNA
agctttaccggtatgactgacaaatggttttgcacgctggtattgtggaaatcaaccctgtcccgggtgttggcg

SEQ ID NO: 815174 - DNA, 75 bp, synthetic construct
  source 1..75: mol_type = other DNA
tgtgcgaatcagttggtcgggaacacactccagccctgagcgaagccgcagagcaatatctgaatgccgttgcga

SEQ ID NO: 815175 - DNA, 75 bp, synthetic construct
  source 1..75: mol_type = other DNA
acctctggctgcacgccggattcgacgtgctggtcaacggctcacgcgcccatctgccgcaggcgcgggcgcgct

SEQ ID NO: 815176 - DNA, 75 bp, synthetic construct
  source 1..75: mol_type = other DNA
tgcatcagctaccgctggtctgcaaaatcggtgcgcccgatgacgtcacgctgcttatcaacgtggcgctgaacg

SEQ ID NO: 815177 - DNA, 75 bp, synthetic construct
  source 1..75: mol_type = other DNA
cgggatgccctgacgcccggaaagctgaaaacgcaggcagtacgcctgcgttttgctgatggcacgctgatcgat

SEQ ID NO: 815178 - DNA, 75 bp, synthetic construct
  source 1..75: mol_type = other DNA
tggctctgattccgtagaatctgccgctcgcgaaatcgcctacttcttcggtgaaggcgaagtgtgcccgcgcac

SEQ ID NO: 815179 - DNA, 75 bp, synthetic construct
  source 1..75: mol_type = other DNA
tggaaaacagagaaatatggtaactgtaagccttgcggaccgtttcggcaatgttgttcctggttatgctgtcac

SEQ ID NO: 815180 - DNA, 75 bp, synthetic construct
  source 1..75: mol_type = other DNA
gtaagtcaggcgaagcattaagtggtcgagcattgaatgttaagacatctgggccgtctaaatatggtgcgttgg

SEQ ID NO: 815181 - DNA, 75 bp, synthetic construct
  source 1..75: mol_type = other DNA
aactggacacaggatgagagttatattccaccgttactggcgtttaacgcccatgacggactggtacagcgtctg

SEQ ID NO: 815182 - DNA, 75 bp, synthetic construct
  source 1..75: mol_type = other DNA
gtgggcggagctcgctcgtctggcaggcagtatgctgactttttccctggagcatgatcctgacgccataccggg

SEQ ID NO: 815183 - DNA, 75 bp, synthetic construct
  source 1..75: mol_type = other DNA
tgggtccgtccggctccgggaaagacagcctgctggcggaactccgccagcgggaacaaacccagctactggtag

SEQ ID NO: 815184 - DNA, 75 bp, synthetic construct
  source 1..75: mol_type = other DNA
tattatggcgtcggcgtcgagattgatctctggctgcacgccggattcgacgtgctggtcaacggctcacgcgcc

SEQ ID NO: 815185 - DNA, 75 bp, synthetic construct
  source 1..75: mol_type = other DNA
cggttctgattccgtagaatctgccgctcgcgaaattgcctacttcttcggcgaaggcgaagtgtgcccgcgcac

SEQ ID NO: 815186 - DNA, 75 bp, synthetic construct
  source 1..75: mol_type = other DNA
tacccgtcttgttcgtgatgcacagggacagtggtgcagggatccgcgttttattccccctctgctgacgctgtc

SEQ ID NO: 815187 - DNA, 75 bp, synthetic construct
  source 1..75: mol_type = other DNA
ccagcggcacgtattgtattgatgggcttctccagggaaggtgcgaataagcggggaaattcttctcggctgact

SEQ ID NO: 815188 - DNA, 75 bp, synthetic construct
  source 1..75: mol_type = other DNA
gagtgggtaaccattcaggccggattttacaccgagcatatttatccggacggtagccgtgggcgtcgggcaaaa

SEQ ID NO: 815189 - DNA, 75 bp, synthetic construct
  source 1..75: mol_type = other DNA
atgccagcgatgtcgaaggccgtattcagcggcgtattgaagcaatcctgtcgcctattgttggtaacggtaata

SEQ ID NO: 815190 - DNA, 75 bp, synthetic construct
  source 1..75: mol_type = other DNA
atctcattgtaatgttctttcctttgtttcttgggtggtactccgcaaggttgctggaagaatggggttacaggc

SEQ ID NO: 815191 - DNA, 75 bp, synthetic construct
  source 1..75: mol_type = other DNA
gacaagacgcccgtagctggctgctgaaatacccggaacacgccattaccggcctgctgcccgcggcgctcggca

SEQ ID NO: 815192 - DNA, 75 bp, synthetic construct
  source 1..75: mol_type = other DNA
cgtcgccgcgaatactcaccgacgttttaaaaaggtgatcaccttcgattacagcacctgttcactggactggca

SEQ ID NO: 815193 - DNA, 75 bp, synthetic construct
  source 1..75: mol_type = other DNA
atggctgctgaggttctggatcaggatggacagttagtcgggtatgtggctcaggctggaagcttgtttactagg

SEQ ID NO: 815194 - DNA, 75 bp, synthetic construct
  source 1..75: mol_type = other DNA
gcggcatttataaattatgatgctaactattataagtacagtaattctgatatcaataacgaacagacttacctg

SEQ ID NO: 815195 - DNA, 75 bp, synthetic construct
  source 1..75: mol_type = other DNA
gcaggacggtggctggatcggctggatgatcaaacctctgggccgctggtcgttaatcatggaaatcgatgaagg

SEQ ID NO: 815196 - DNA, 75 bp, synthetic construct
  source 1..75: mol_type = other DNA
gcgatatctctgttggtattcctcacgttctggaaatatcacccacggatgctgccgcctttggtcagctttttg

SEQ ID NO: 815197 - DNA, 75 bp, synthetic construct
  source 1..75: mol_type = other DNA
aacttcttgcgcaaaaagaagagaatagttggcgcattatgctaatgacgatgcttatctcgcaaccggcactag

SEQ ID NO: 815198 - DNA, 75 bp, synthetic construct
  source 1..75: mol_type = other DNA
tatcaacgggaatggcagctttacatgttagccgccctgcctatcgaaaaaacagcgcaggcgtggaatgtcctc

SEQ ID NO: 815199 - DNA, 75 bp, synthetic construct
  source 1..75: mol_type = other DNA
agctcttcctggttgagcatccgctggttcgtcacttaacccgccgtctgatttggggcgtttatagcgccgaaa

SEQ ID NO: 815200 - DNA, 75 bp, synthetic construct
  source 1..75: mol_type = other DNA
agcaccgctgacgatgatcttttcaccctgccggaaggcgatatctctattggtattcctcacgttctggaaata

SEQ ID NO: 815201 - DNA, 75 bp, synthetic construct
  source 1..75: mol_type = other DNA
aaagcgatgatgaatcacaggcgaacgatgctgttaaccgctacaaattgctgaaaaaagatgcgcgtaccgtcg

SEQ ID NO: 815202 - DNA, 75 bp, synthetic construct
  source 1..75: mol_type = other DNA
gaaacgacggtgccagccggaccatttgtcatcaatgatttatatcccagtggatatgctggtgaccttctcgtt

SEQ ID NO: 815203 - DNA, 75 bp, synthetic construct
  source 1..75: mol_type = other DNA
gcagagattgcgcagttgcttttacgcaatggtgcggcgactgtccaggtctggtgcctttgtcgaaccttgtag

SEQ ID NO: 815204 - DNA, 75 bp, synthetic construct
  source 1..75: mol_type = other DNA
tatgagtggttttctgcactcgttttcacgctaccctcaagaaggttttgcagttgctgattattttgccgcaac

SEQ ID NO: 815205 - DNA, 75 bp, synthetic construct
  source 1..75: mol_type = other DNA
ggcgatcacgcctcgcgaacgaaaactggtttcaggattcgttgattacctgtgtgaatctgtaggccgggaaca

SEQ ID NO: 815206 - DNA, 75 bp, synthetic construct
  source 1..75: mol_type = other DNA
gtttttaggtgttgttttattttttatacactgtcgtttttttctaatctggaatatggtaagacaaaaattatt

SEQ ID NO: 815207 - DNA, 75 bp, synthetic construct
  source 1..75: mol_type = other DNA
taccacagcttcaggatatacagcggggttagctggcctggcctttaatacccatctgggtgctatagcatctga

SEQ ID NO: 815208 - DNA, 75 bp, synthetic construct
  source 1..75: mol_type = other DNA
gtaaaatctggtgtgcgacagtactcaaggagcaaggtgtcgctgcgttggcccgttttgccccttacgctgctg

SEQ ID NO: 815209 - DNA, 75 bp, synthetic construct
  source 1..75: mol_type = other DNA
cccacaagcattaatgctacttatacgtgtgtctggcaaaactaaacgctgccatgaacgaatgactaaggcttg

SEQ ID NO: 815210 - DNA, 75 bp, synthetic construct
  source 1..75: mol_type = other DNA
gctggttcgtcacttaacccgccgtctgatttggggcgtttatagcgccgaaaaccagctactggcttgctttcg

SEQ ID NO: 815211 - DNA, 75 bp, synthetic construct
  source 1..75: mol_type = other DNA
aacaaactcaaaaccctacgacaagacgcccgtagctggctgctgaaatacccggaacacgccattaccggcctg

SEQ ID NO: 815212 - DNA, 75 bp, synthetic construct
  source 1..75: mol_type = other DNA
ccaaaccgaacaaaagcgatgatgaatcgcggtcgaacgatgcggttaaccgctacaaattgctgaaaaaagatg

SEQ ID NO: 815213 - DNA, 75 bp, synthetic construct
  source 1..75: mol_type = other DNA
tggtttaacaggttttatccactcagcatctcgctatccgcaggaagctcttcccgtggcacaatatttcgcggc

SEQ ID NO: 815214 - DNA, 75 bp, synthetic construct
  source 1..75: mol_type = other DNA
atcggtcaaagacaaaaccgtcgagctggcaaagcaaaaacagatttgcgcgggttatgacaacaatatcaaggc

SEQ ID NO: 815215 - DNA, 75 bp, synthetic construct
  source 1..75: mol_type = other DNA
gggcaaccaccctatgaagccggattttatgaagtggctgaaaaatctgttgaagtgggtgagttcaagcgcctc

SEQ ID NO: 815216 - DNA, 75 bp, synthetic construct
  source 1..75: mol_type = other DNA
attcgaagttactgtcggcggcaatctgaccggactggatgttatcagttgcgctattgaaagcctgtacgcaac

SEQ ID NO: 815217 - DNA, 75 bp, synthetic construct
  source 1..75: mol_type = other DNA
atcaggcgatcggttgactatttcgacgccgaataatctgtttgcactggccccttcggcacataaacatctgtt

SEQ ID NO: 815218 - DNA, 75 bp, synthetic construct
  source 1..75: mol_type = other DNA
ctaagaagctgcagctggttggtgtaggttaccgtgcagcggttaaaggcaatgtgattaacctgtctctgggtt

SEQ ID NO: 815219 - DNA, 75 bp, synthetic construct
  source 1..75: mol_type = other DNA
tgggatgagcaggcgatctccatccatgcggatagcgatagtgaagtgttactgttcgatctgccgccggtttaa

SEQ ID NO: 815220 - DNA, 75 bp, synthetic construct
  source 1..75: mol_type = other DNA
attacgccacgttatgaacaacgtcgcttcgatgccgtacagggtaaacagctggtgctttcgcctaatgcgcga

SEQ ID NO: 815221 - DNA, 75 bp, synthetic construct
  source 1..75: mol_type = other DNA
gtctatcaaaagttcactgaaggtcgcacgcaggaacaatggttacaacatctgtacgccaaaatgcttgccaaa

SEQ ID NO: 815222 - DNA, 75 bp, synthetic construct
  source 1..75: mol_type = other DNA
ggcaatgaggctgtatatattcagtactcttcagggatcgttggcggcaatatgacccgctcttcgccatccgcc

SEQ ID NO: 815223 - DNA, 75 bp, synthetic construct
  source 1..75: mol_type = other DNA
ctatgggtcagggagcatggcatgaagcaaatatgtctggcgataaaatcgaccatggcggttgcgtcaatacac

SEQ ID NO: 815224 - DNA, 75 bp, synthetic construct
  source 1..75: mol_type = other DNA
tatcgcgggcggtattggtatcacccctttcctgtcgcatctggcagagttgcaacacacggacgtcgactggca

SEQ ID NO: 815225 - DNA, 75 bp, synthetic construct
  source 1..75: mol_type = other DNA
taccgaacaggtgaaacgcttcacgctggtggcaaccgatggcaaaccattacctacgtttaccggaggaagtca

SEQ ID NO: 815226 - DNA, 75 bp, synthetic construct
  source 1..75: mol_type = other DNA
aaccatctgaacggagagatgccggagcggctgaacggaccggtctcgaaaaccggagtgggggcaactccaccg

SEQ ID NO: 815227 - DNA, 75 bp, synthetic construct
  source 1..75: mol_type = other DNA
gaacggccaaagagcgacctcctgactgtcagatagtgaagcgcaaagggcgattgtatgtaatttgtaaatcca

SEQ ID NO: 815228 - DNA, 75 bp, synthetic construct
  source 1..75: mol_type = other DNA
atgggccgtcgcgggtacgactcaaacggctgggcagtgatatcagcgaggagcaaagccgggaagtggactggg

SEQ ID NO: 815229 - DNA, 75 bp, synthetic construct
  source 1..75: mol_type = other DNA
atctaatcagacgtacctcgggcggatactggtatgacggcgaactgacttattattatgaggaaagtctgcacg

SEQ ID NO: 815230 - DNA, 75 bp, synthetic construct
  source 1..75: mol_type = other DNA
agctgcgcttatcgcgcagttcggggtactccgtccgcagcgcctgactccggtggccctgctcctgagtgccgg

SEQ ID NO: 815231 - DNA, 75 bp, synthetic construct
  source 1..75: mol_type = other DNA
tttgacgctgacagcctgcgttactactacactgcgaaactctcttcgcgcattgatgatatcgatctcaacctg

SEQ ID NO: 815232 - DNA, 75 bp, synthetic construct
  source 1..75: mol_type = other DNA
ggctggttactacgataccgaccatgcgctttcaccacatagcgactggtcgtatagcgcatcacgcgatgccgg

SEQ ID NO: 815233 - DNA, 75 bp, synthetic construct
  source 1..75: mol_type = other DNA
tgcggctggtcggtggtacagcccggcgattccggctacgcacctttgattaatgaactcagcggccagagcgct

SEQ ID NO: 815234 - DNA, 75 bp, synthetic construct
  source 1..75: mol_type = other DNA
tagcagaagcaacaatgaaagcctgtcttgatgcaactggctattttcaaccagccgcaccagcgaatttatctc

SEQ ID NO: 815235 - DNA, 75 bp, synthetic construct
  source 1..75: mol_type = other DNA
cttgcagcgacgccagcgcccgccgcagaaatgccgggtataactattatctccgcctcgcaaaccggcaatgcg

SEQ ID NO: 815236 - DNA, 75 bp, synthetic construct
  source 1..75: mol_type = other DNA
atgacgggaataccggatatttctatgcacttgatgagtccgctgaaggtaaccctgtcagggatgctgtgcata

SEQ ID NO: 815237 - DNA, 75 bp, synthetic construct
  source 1..75: mol_type = other DNA
cagcggtggggttgggaatattaatcatcgcccggatcgtctacggtctgaccgtgtcagcaatggtgccagcct

SEQ ID NO: 815238 - DNA, 75 bp, synthetic construct
  source 1..75: mol_type = other DNA
gggctggctcgctaccagtcacacacttggctatggactgtgcgctttgctggtgccgctggtatcgaaaacagg

SEQ ID NO: 815239 - DNA, 75 bp, synthetic construct
  source 1..75: mol_type = other DNA
ttcttcggtaagggcatcggggcgctgggttgggcagtaatggcagataccgcgccaaaagagatcagcggtctt

SEQ ID NO: 815240 - DNA, 75 bp, synthetic construct
  source 1..75: mol_type = other DNA
ccggtaacatgggatatctcattttcctccagcctgtcaccagcgaaaaattcgaacgcaaaccgatttactgga

SEQ ID NO: 815241 - DNA, 75 bp, synthetic construct
  source 1..75: mol_type = other DNA
caagccctcgtgggttgatgataaccatgataaaattcccggctcagacaattatgagcaagagaattattggca

SEQ ID NO: 815242 - DNA, 75 bp, synthetic construct
  source 1..75: mol_type = other DNA
tgcttgcatggtaacaccatcacctgttctggatcatgacacctggctgcgtatccgcctgctgatgggcgagat

SEQ ID NO: 815243 - DNA, 75 bp, synthetic construct
  source 1..75: mol_type = other DNA
gaacgctgcatcgagcgcgggctgggtgacattctgctttatgtgggcggtaacctggtggtgggtaaacatgac

SEQ ID NO: 815244 - DNA, 75 bp, synthetic construct
  source 1..75: mol_type = other DNA
tatggggattttgctttcagcatctgacctgaatgatattgaaaaaataacgtatataaaagcaggcaggaagtt

SEQ ID NO: 815245 - DNA, 75 bp, synthetic construct
  source 1..75: mol_type = other DNA
aatacttcctctccagttgtaatatgcaatgaattacacagatttattgttgcagaacaactcaggcacttaaat

SEQ ID NO: 815246 - DNA, 75 bp, synthetic construct
  source 1..75: mol_type = other DNA
gacatcgtttgccacgagacagaaaatagttatatttatactgagtctggattggtagcaactattggtattcaa

SEQ ID NO: 815247 - DNA, 75 bp, synthetic construct
  source 1..75: mol_type = other DNA
taccgtgcactggaggttctgcgccgtctgcatgacaaggcgggtatcgggattgttctggcgggtatgccgcgc

SEQ ID NO: 815248 - DNA, 75 bp, synthetic construct
  source 1..75: mol_type = other DNA
ccaatacccgccgcgtgccagccaaagaaggaacagaatgggtcttgaaaaatattatcaacccgcttaaacaaa

SEQ ID NO: 815249 - DNA, 75 bp, synthetic construct
  source 1..75: mol_type = other DNA
agagaaattacgccgtgagagagcattggcagatgcagccgaacgagagaaccaggaagcaatgaacctcctgat

SEQ ID NO: 815250 - DNA, 75 bp, synthetic construct
  source 1..75: mol_type = other DNA
tataaaaatgaatgacattcctgaaacccccataataaatgacctcaaagcactagcaccaggtgtagtaaaact

SEQ ID NO: 815251 - DNA, 75 bp, synthetic construct
  source 1..75: mol_type = other DNA
agtacctgaataataaatacgacggcgatattgcatcgctggaaaacgatattcgtagctttatcgatcgtcagc

SEQ ID NO: 815252 - DNA, 75 bp, synthetic construct
  source 1..75: mol_type = other DNA
tgcggtcctgattgaagccgacccgggctatacagccagaacactgcttgaggagctgtgccgccagctgggggt

SEQ ID NO: 815253 - DNA, 75 bp, synthetic construct
  source 1..75: mol_type = other DNA
agtgccagctacaacttcctcggcgactggagtgtttacggcaccgcacgctacacccgtctgtctgatgaagtt

SEQ ID NO: 815254 - DNA, 75 bp, synthetic construct
  source 1..75: mol_type = other DNA
cgtttaccctgcgcagtgcagcagcagcggtacaacaggccagcgaaaaagtggtctggggtgcctgttccgtca

SEQ ID NO: 815255 - DNA, 75 bp, synthetic construct
  source 1..75: mol_type = other DNA
acattgcacttcgcgtggagctgtttgacgaggaagtggaacgattgtcgttatttgacccgctgaccgggcaga

SEQ ID NO: 815256 - DNA, 75 bp, synthetic construct
  source 1..75: mol_type = other DNA
atgggccggacaatgcaaaccacctcccgccagcgaagcaaatctgcctcgtctggtgctggcacataatcccga

SEQ ID NO: 815257 - DNA, 75 bp, synthetic construct
  source 1..75: mol_type = other DNA
ggctgggactcccctgaacgtagcgccttcccgctacaactatttggttttcattataaatctcgcactcactcc

SEQ ID NO: 815258 - DNA, 75 bp, synthetic construct
  source 1..75: mol_type = other DNA
actcgaaaaagatgaagtaataagcccactgccggtttatgcctcaaccttcgaaggctgggacgcccctgaacg

SEQ ID NO: 815259 - DNA, 75 bp, synthetic construct
  source 1..75: mol_type = other DNA
cggcgaaatacgcagatattctgctgccggatctgatgactgttgaacaagaagatattatccctaatgactctg

SEQ ID NO: 815260 - DNA, 75 bp, synthetic construct
  source 1..75: mol_type = other DNA
atgcagcaaataacactggcagaagcctcactgcaagcgcaacaggtcgaagtaattagccgcatgattgaacgc

SEQ ID NO: 815261 - DNA, 75 bp, synthetic construct
  source 1..75: mol_type = other DNA
gcgctacacccgtctgtccgatgaagttaccgatagcccgatggttgataagtcctggacaggtctgatttctac

SEQ ID NO: 815262 - DNA, 75 bp, synthetic construct
  source 1..75: mol_type = other DNA
gaaattaccgacagcccgatggtggataaatcctggacgggtctgatttctaccgggatcacctacaaattctga

SEQ ID NO: 815263 - DNA, 75 bp, synthetic construct
  source 1..75: mol_type = other DNA
acgaaaaatctatacgacccgcggcgtgggaagtttgtatgggctgcggcttaactgccgtccggaagtgacgat

SEQ ID NO: 815264 - DNA, 75 bp, synthetic construct
  source 1..75: mol_type = other DNA
ccgaatgtgcgccgacatttgcctgttacggcaaccacgatcgccctgttggtacagagaaaaatcgcttaattg

SEQ ID NO: 815265 - DNA, 75 bp, synthetic construct
  source 1..75: mol_type = other DNA
tgcgggactgattaaacaactttccagcaatgtggctgtatggttaatgacggaggaggaaaaacgcggtgaaca

SEQ ID NO: 815266 - DNA, 75 bp, synthetic construct
  source 1..75: mol_type = other DNA
cgaaaaatataacacacatgaagcatataactcagaggaactatattttaccagagaggactatacgtatgatta

SEQ ID NO: 815267 - DNA, 75 bp, synthetic construct
  source 1..75: mol_type = other DNA
aaaacagacctctattcaaatggtcactttacttaacgcgttacaaccaggtggaaaatgcattatcactggtga

SEQ ID NO: 815268 - DNA, 75 bp, synthetic construct
  source 1..75: mol_type = other DNA
atgaaatcaggaggttaaacgtaatttttagttgtggaactggagatatcgttgatctatcctctctggacttac

SEQ ID NO: 815269 - DNA, 75 bp, synthetic construct
  source 1..75: mol_type = other DNA
tggaaacgagaacgatctattcttctcccgtgccgggaagtggaactcagaaagcaagtggcattcatcgaagaa

SEQ ID NO: 815270 - DNA, 75 bp, synthetic construct
  source 1..75: mol_type = other DNA
ctcgagaaagacgaaaattcttcggacaattgctttgaagtcgaaaaatataacgcatatgaagcatataactca

SEQ ID NO: 815271 - DNA, 75 bp, synthetic construct
  source 1..75: mol_type = other DNA
tcgtcgattgttataccagtccacccacgttagtgtggccagttccacttctgtccggtttttccagctattacg

SEQ ID NO: 815272 - DNA, 75 bp, synthetic construct
  source 1..75: mol_type = other DNA
ggccaccacactgacgcaggccctgaataaactgaacagcgtggctgattccgtggcaaaacgtaacggtatcag

SEQ ID NO: 815273 - DNA, 75 bp, synthetic construct
  source 1..75: mol_type = other DNA
gcagagccagattaagcagtataatgatgcacttaaccgcagccatgaatatgctcagatggccagttatgcgga

SEQ ID NO: 815274 - DNA, 75 bp, synthetic construct
  source 1..75: mol_type = other DNA
aatgcctcttcgtccctgtctgagcagctggccagcaacctgagcgatttgcagagccagattaagcagtataat

SEQ ID NO: 815275 - DNA, 75 bp, synthetic construct
  source 1..75: mol_type = other DNA
tggaaacgagaacgatctattcttctcccgtgccgggaagtggaatagcgaaagcaagtggcattcatcgaagaa

SEQ ID NO: 815276 - DNA, 75 bp, synthetic construct
  source 1..75: mol_type = other DNA
cggagcgggaacaactggcacaggcatttgtggatgagaaactgaaaccccagctggagcaggaattcagggaaa

SEQ ID NO: 815277 - DNA, 75 bp, synthetic construct
  source 1..75: mol_type = other DNA
attcggatatcagttcgaaaacggatcatgatcgcagcctgacagcgcaggaaaccaaagatgtgcgtgatgcca

SEQ ID NO: 815278 - DNA, 75 bp, synthetic construct
  source 1..75: mol_type = other DNA
tatggatgcgaacggcggcaacggcaacatgtcttccgaagagcaggctcgtctgcaaatgcaacagctgcagca

SEQ ID NO: 815279 - DNA, 75 bp, synthetic construct
  source 1..75: mol_type = other DNA
tacttatggtcagagcagtggctggtgcgctatcgcgatatggatttcatccagaacgtgttaaacggcatggca

SEQ ID NO: 815280 - DNA, 75 bp, synthetic construct
  source 1..75: mol_type = other DNA
ccagagcgtgttaaacggcatggcaagccgtcgcccacgtctggatgccctgcgtgactcctggtacgatttaga

SEQ ID NO: 815281 - DNA, 75 bp, synthetic construct
  source 1..75: mol_type = other DNA
tagctcacctggcggaaagctcgctttccggcaatttgctggctgatttcgtacgcggaaatcctgaagaaagtt

SEQ ID NO: 815282 - DNA, 75 bp, synthetic construct
  source 1..75: mol_type = other DNA
ggctctgctgagtggtggcattaagcccagccagtttttctggcatatctggggggcagacctgtatgagctttc

SEQ ID NO: 815283 - DNA, 75 bp, synthetic construct
  source 1..75: mol_type = other DNA
aaactggaatttgacgcctatctgacgctacttcgccagtgcgatctcggctactttatttttgcccgccagcag

SEQ ID NO: 815284 - DNA, 75 bp, synthetic construct
  source 1..75: mol_type = other DNA
cgcccattacgatgcccttgaaacccgcttctggcagttttatccccggatgatggcgcaggcgtcgaacaagac

SEQ ID NO: 815285 - DNA, 75 bp, synthetic construct
  source 1..75: mol_type = other DNA
gaagtgattcttgaggcgcaacattttgcttttcctgaggtgacgttgccgccgccagaagcggcggcggtgccc

SEQ ID NO: 815286 - DNA, 75 bp, synthetic construct
  source 1..75: mol_type = other DNA
aaatttactgcaacactatcgttttccggggaacgtgcgcgaactggaacatgctattcatcgggcggtagtgct

SEQ ID NO: 815287 - DNA, 75 bp, synthetic construct
  source 1..75: mol_type = other DNA
aaagaaaaacctgcagtattgggtcatgacgaagcggcatactccaaaaaccgtcgtgcggtactggtttactaa

SEQ ID NO: 815288 - DNA, 75 bp, synthetic construct
  source 1..75: mol_type = other DNA
atgtggtgcgctttcccgcagacagcgaattgcccgatccctatgacggtttgattccagggcaggagagtctga

SEQ ID NO: 815289 - DNA, 75 bp, synthetic construct
  source 1..75: mol_type = other DNA
catcacaactgggccgcctgtgcgcggatgctggaaaccgacgtcgcaacctgcatcggctggcgaaacgtctgg

SEQ ID NO: 815290 - DNA, 75 bp, synthetic construct
  source 1..75: mol_type = other DNA
catcacaactgggccgcctgtgcgcggatgctggaaaccgacgtcgccaacctgcataggctggcgaaacgtctg

SEQ ID NO: 815291 - DNA, 75 bp, synthetic construct
  source 1..75: mol_type = other DNA
gatctggacaaatacgatatccgttctgacttcgctcaaatgctggatgcacacgcaaacttcctgcgtagcaac

SEQ ID NO: 815292 - DNA, 75 bp, synthetic construct
  source 1..75: mol_type = other DNA
taatgcaccacagcgggtgatggatgtcgctgctgcgccaggctccaaaacgacgcaaattgccgcgcggatgaa

SEQ ID NO: 815293 - DNA, 75 bp, synthetic construct
  source 1..75: mol_type = other DNA
aaagaactgtggttgttcccggtgggcattgaagccctgatcggtaaagtccgattttctcgcttggggattaaa

SEQ ID NO: 815294 - DNA, 75 bp, synthetic construct
  source 1..75: mol_type = other DNA
aaaaggtaatccgttaaccggagccgagaaacaacgcatatctgtttcccggaaaaaggggacacataaagcgat

SEQ ID NO: 815295 - DNA, 75 bp, synthetic construct
  source 1..75: mol_type = other DNA
cggttgctgccttgtttgctgacggtaacgccccaaaacgggtgatggatgtcgctgccgcgccaggctccaaaa

SEQ ID NO: 815296 - DNA, 75 bp, synthetic construct
  source 1..75: mol_type = other DNA
tgaaagatcgcgaagccggacaaattcgtcaggcggctgcaagtgttggcttaaactgggatgaaaacctgcgcc

SEQ ID NO: 815297 - DNA, 75 bp, synthetic construct
  source 1..75: mol_type = other DNA
attcaggaagccagttcaatgttgcccgttgccgccttgtttgctgacggtaatgcaccacagcgggtgatggat

SEQ ID NO: 815298 - DNA, 75 bp, synthetic construct
  source 1..75: mol_type = other DNA
gcatggcaagctgtctgggacagcgaaatcgcgccccagatggcgacattgatcaaaaaaccgggttacagcatg

SEQ ID NO: 815299 - DNA, 75 bp, synthetic construct
  source 1..75: mol_type = other DNA
tcttggcaagctatctgggatgccgaaatcgcgccccaaatggaggctttgataaagaaacccggttacagcatg

SEQ ID NO: 815300 - DNA, 75 bp, synthetic construct
  source 1..75: mol_type = other DNA
ccgatctgcaggcgatttgctctatgggcattaacctgttccgcgtgctgatgacgtacctgaaaccggtactgc

SEQ ID NO: 815301 - DNA, 75 bp, synthetic construct
  source 1..75: mol_type = other DNA
catgagtttagcgccctacttactcgatgcaaaagcacgctcaggttatcgtctgggagacggtcaggtttatga

SEQ ID NO: 815302 - DNA, 75 bp, synthetic construct
  source 1..75: mol_type = other DNA
gtcttggagacggacaggtttatgacgtaatcctgcgcgatggcctgatgtgcgccacccatggttatcatatgg

SEQ ID NO: 815303 - DNA, 75 bp, synthetic construct
  source 1..75: mol_type = other DNA
tgctgcctttgccaacgtcactatccaaccagagccggtagtgccggatgaaatcgagccagacgatagcaatac

SEQ ID NO: 815304 - DNA, 75 bp, synthetic construct
  source 1..75: mol_type = other DNA
actgacaccacaggaagcggaagagtggtatcgcgggcgcgacgtctacccacaaaccgcgccaactacggatga

SEQ ID NO: 815305 - DNA, 75 bp, synthetic construct
  source 1..75: mol_type = other DNA
cgggctgctgttgctcaacggtaagccgttgctgatccgcggcgtcaaccgccacgaacatcatcaccggcgtgg

SEQ ID NO: 815306 - DNA, 75 bp, synthetic construct
  source 1..75: mol_type = other DNA
gcaaatggaggggtatgacgcaccgatttacagcaacgtccgctatccgattggtaccatgccgccgcgagtgcc

SEQ ID NO: 815307 - DNA, 75 bp, synthetic construct
  source 1..75: mol_type = other DNA
tatcctacaggttcatgggcgaagtgatctttttttgcgtttggaaatactaaaaaagacattgatgacaattat

SEQ ID NO: 815308 - DNA, 75 bp, synthetic construct
  source 1..75: mol_type = other DNA
cttgatattaatctgttgctcaaagagttgccattgtatgctgaatcgctgtttgacaaaagagtaatgcaagaa

SEQ ID NO: 815309 - DNA, 75 bp, synthetic construct
  source 1..75: mol_type = other DNA
actaggttgttttatcggcaggagtaccttaaagcacaaagaagaaaggtaagcgttgtaaataaatgtatttat

SEQ ID NO: 815310 - DNA, 75 bp, synthetic construct
  source 1..75: mol_type = other DNA
ggcgtcagcgaagccggacatatcgatccgaacgcatggactgagcgctggaagcgctccggtctgtaccagctg

SEQ ID NO: 815311 - DNA, 75 bp, synthetic construct
  source 1..75: mol_type = other DNA
gtggagcaggcactggcgcggttgcctgaacaaccttgccgtattctcgatctcgggacgggtaccggggcgatt

SEQ ID NO: 815312 - DNA, 75 bp, synthetic construct
  source 1..75: mol_type = other DNA
taacgaaggggcgatccttgccaatgagttttctgccagtcgggtaaaagtgttgcacgccaatatcagtcgttg

SEQ ID NO: 815313 - DNA, 75 bp, synthetic construct
  source 1..75: mol_type = other DNA
tgccttcgacgctctcatttgatgattttcttgccgcctgtcagcgcccgttgcgccgcagcattcgcgttaata

SEQ ID NO: 815314 - DNA, 75 bp, synthetic construct
  source 1..75: mol_type = other DNA
attatatacatcacactaattcgaattatgtacaaagaaatatttatgactattatttctcttataaaaaataag

SEQ ID NO: 815315 - DNA, 75 bp, synthetic construct
  source 1..75: mol_type = other DNA
atccacgcgggatatcatgaagtcgaaacctgtcgggactatggtgataacgagcgcgtaacgctcggtcgctat

SEQ ID NO: 815316 - DNA, 75 bp, synthetic construct
  source 1..75: mol_type = other DNA
cgccgtatattgacgagcaggacccaggtaatgactccaacttattgatagtgttttatgttcagataatgcccg

SEQ ID NO: 815317 - DNA, 75 bp, synthetic construct
  source 1..75: mol_type = other DNA
gggcgcaagcagcaatgaacgcctacaacatccatgaagctgacgcgatggttatcgaaaccaaccagggtggtg

SEQ ID NO: 815318 - DNA, 75 bp, synthetic construct
  source 1..75: mol_type = other DNA
gcacaggcggcgctgacttaccgttatggtgatgaacatcagcccgtcaccactaccgacattctgacgccacga

SEQ ID NO: 815319 - DNA, 75 bp, synthetic construct
  source 1..75: mol_type = other DNA
agggtctggcgaaaggcctgggacacgcggtattgtgtgctcacccggtagtgggtgatgaaccggtagctgtta

SEQ ID NO: 815320 - DNA, 75 bp, synthetic construct
  source 1..75: mol_type = other DNA
aagttccggccgataaagttcacgagctgcgtctgcgtctggcgcagcaaggcttacctaaaggcggtacagttg

SEQ ID NO: 815321 - DNA, 75 bp, synthetic construct
  source 1..75: mol_type = other DNA
ggcaaaagcccctgattaccgcacgttattcagcaatctttccgatcaggatggcggcgcaatcgtcagccaact

SEQ ID NO: 815322 - DNA, 75 bp, synthetic construct
  source 1..75: mol_type = other DNA
tggtggatcagggcggacatctgttaacccagtccaataccagcgggcgcgatcttaatgatgctcagttgaaat

SEQ ID NO: 815323 - DNA, 75 bp, synthetic construct
  source 1..75: mol_type = other DNA
atggataagaaaaaaggcggagcggatcaggtggttatagtgatgacctacaagcaagccctgcgcgtcgccgca

SEQ ID NO: 815324 - DNA, 75 bp, synthetic construct
  source 1..75: mol_type = other DNA
gaaaatggtgaatgaagcgcggagactgtgcggtgaaaaagaagtacgcaacaacgacttcattgcacgcatcaa

SEQ ID NO: 815325 - DNA, 75 bp, synthetic construct
  source 1..75: mol_type = other DNA
gtcattgatggtgagattcagcgcctaatcatcaacgtcccgcctgggtacacaaaaacggagctggcgaccatc

SEQ ID NO: 815326 - DNA, 75 bp, synthetic construct
  source 1..75: mol_type = other DNA
gcatgattaagtcccaggcctatcagtcgatgtggcccatgtcgctacgcgatgacgctgacagtaaggcgatgt

SEQ ID NO: 815327 - DNA, 75 bp, synthetic construct
  source 1..75: mol_type = other DNA
atatgataaaaggtggattatcggggcgaagtacctccggtaaaaataccaggacaagagccattacaggtattg

SEQ ID NO: 815328 - DNA, 75 bp, synthetic construct
  source 1..75: mol_type = other DNA
atgattaacaatattgcaaatcagtcttcgtttccggctgcaacaatcgacagccagatgctgttgaaaatggtt

SEQ ID NO: 815329 - DNA, 75 bp, synthetic construct
  source 1..75: mol_type = other DNA
cagcaatagtgggccacgtagcacacagcgtaatgaaaccagcaactacgaagtcgatcgcactattcgccatac

SEQ ID NO: 815330 - DNA, 75 bp, synthetic construct
  source 1..75: mol_type = other DNA
gcaccggggaaatgtggtggataaagttattgaaggggcttacgaggtggtgggcgtgtttgaccggattgagga

SEQ ID NO: 815331 - DNA, 75 bp, synthetic construct
  source 1..75: mol_type = other DNA
gcaccggggaaatgtggtggaaagagtcattgaaggggcttacgaggtggtgggcgtgtttgaccggattgagga

SEQ ID NO: 815332 - DNA, 75 bp, synthetic construct
  source 1..75: mol_type = other DNA
gcaccggggaaatgtggtggaaacagtgattgaaggggcttacgaggtggtgggcgtgtttgaccggattgagga

SEQ ID NO: 815333 - DNA, 75 bp, synthetic construct
  source 1..75: mol_type = other DNA
gcccgtatggcgcaccgcagtataacgaaaccaaagggcatatgaccaaatgcgatggttgctatgaccgtgtcg

SEQ ID NO: 815334 - DNA, 75 bp, synthetic construct
  source 1..75: mol_type = other DNA
gactacaaagatttgacgccagaagtcagcttccgccgcatttatgaatatgctggcggcgactggcaggaagat

SEQ ID NO: 815335 - DNA, 75 bp, synthetic construct
  source 1..75: mol_type = other DNA
gcaccggggaaatgtggtggatatagtaattgaaggggcttacgaggtggtgggcgtgtttgaccggattgagga

SEQ ID NO: 815336 - DNA, 75 bp, synthetic construct
  source 1..75: mol_type = other DNA
aactcgccgttcaatagcagtgacgaaagcggcggagcactgccgttctggcaacagcaagcgtttatcgatcag

SEQ ID NO: 815337 - DNA, 75 bp, synthetic construct
  source 1..75: mol_type = other DNA
ttactgagcgccggacgctggttgcttgtactgctggtggcgtggctactgtggcgaaaagcggtacgtccgcag

SEQ ID NO: 815338 - DNA, 75 bp, synthetic construct
  source 1..75: mol_type = other DNA
ctgcgcctggcgcaacaaggtttgcccaaaggcggcgcggtcggtttcgaactgctcgatcaggaaaagtttggt

SEQ ID NO: 815339 - DNA, 75 bp, synthetic construct
  source 1..75: mol_type = other DNA
cggggcgaagtgcctccggtaaaaataccagaacaagagccattacaggcattgacggtgatatccgaatcaaca

SEQ ID NO: 815340 - DNA, 75 bp, synthetic construct
  source 1..75: mol_type = other DNA
acaacctgccggacggctggctatggttgcataagcatagtgataaagatgaatcaactcttaaatcacatcgcc

SEQ ID NO: 815341 - DNA, 75 bp, synthetic construct
  source 1..75: mol_type = other DNA
gatcttaatgatgctcagttgaaatatgccagcgatgtcgaaggccgtattcagcggcgtattgaagcgatcctg

SEQ ID NO: 815342 - DNA, 75 bp, synthetic construct
  source 1..75: mol_type = other DNA
taccgcgttgtgaagatgcctgttaccaaaggtgggaggctggaactgaccatcactgaactggggaatgaatga

SEQ ID NO: 815343 - DNA, 75 bp, synthetic construct
  source 1..75: mol_type = other DNA
aaacaccatcatacactaaatcagtaagttggcagcatcacccagtgcgggatgtcgatgaatttgtccgttttg

SEQ ID NO: 815344 - DNA, 75 bp, synthetic construct
  source 1..75: mol_type = other DNA
atcatacactaaatcagtaagttggcagcatcaccaacatctcgttgatgaactggcgatgccagatactgcttt

SEQ ID NO: 815345 - DNA, 75 bp, synthetic construct
  source 1..75: mol_type = other DNA
ttgattccagtcgctgcaccggttgtaaaacctgcgaactggcgtgcaaagactttaaagatcttggcaccgagg

SEQ ID NO: 815346 - DNA, 75 bp, synthetic construct
  source 1..75: mol_type = other DNA
acatgggttcatgattatgcgcctgctattcgcgggctggtgctggcttctccggcctttaaggttaaattgtat

SEQ ID NO: 815347 - DNA, 75 bp, synthetic construct
  source 1..75: mol_type = other DNA
tcagcatgaagactgcacaggaccatcagcggatcgatggcggctactttctggtggacccgtgccattatcgcc

SEQ ID NO: 815348 - DNA, 75 bp, synthetic construct
  source 1..75: mol_type = other DNA
atattttgttacgtgattacagtgagttaaatgttgcacaggggcaagagatgattgcccaacggggaatgtctg

SEQ ID NO: 815349 - DNA, 75 bp, synthetic construct
  source 1..75: mol_type = other DNA
ggttgtcgccggactgcttttgtcggcagccctgacctctttcctgacgggaatcactgagcccattgagttctc

SEQ ID NO: 815350 - DNA, 75 bp, synthetic construct
  source 1..75: mol_type = other DNA
taaatcggataaaggcaccgccgggcttgcggcattgctggcgtttctggtgatgaacgccaccatcaacgcttt

SEQ ID NO: 815351 - DNA, 75 bp, synthetic construct
  source 1..75: mol_type = other DNA
acaggaaagcgccacggcgaaagcgcaaaaagcggtggacgacatcgccgtgcagtgctggctgcggcacaaatt

SEQ ID NO: 815352 - DNA, 75 bp, synthetic construct
  source 1..75: mol_type = other DNA
attcgcgcgtcgccgaggggaaacaacccatatgtgtcgaatcctgcccgctgcgtgcacttgagttcggtccaa

SEQ ID NO: 815353 - DNA, 75 bp, synthetic construct
  source 1..75: mol_type = other DNA
tgctggcggcgactggcaggaagataacggtgtctggcaccagaacgtgtttgcctactatctgtcgatttcatg

SEQ ID NO: 815354 - DNA, 75 bp, synthetic construct
  source 1..75: mol_type = other DNA
cccatagtgggaataccgtggttcttcctttactacttcactttccgctatttgattaaccgctttggctggctg

SEQ ID NO: 815355 - DNA, 75 bp, synthetic construct
  source 1..75: mol_type = other DNA
tgaacacactaacccacacggcagcgcatgaggtgccgtaccggatggaaaccactgcagaaggcggcctgcaca

SEQ ID NO: 815356 - DNA, 75 bp, synthetic construct
  source 1..75: mol_type = other DNA
tcagtttgcagaccggctcgatagagatattcaggtggggaaagtcaatgtagatcaggcgccggtgctgacaac

SEQ ID NO: 815357 - DNA, 75 bp, synthetic construct
  source 1..75: mol_type = other DNA
aaaaaagctcagtcttccgactgagcctttcgctaaatttgatgcctggcagttccctactctcgcatggggaga

SEQ ID NO: 815358 - DNA, 75 bp, synthetic construct
  source 1..75: mol_type = other DNA
gatcgctctctggaaaaccgccgtatgcaggcagggcaggtgatcagcggtgcaattctgattgtgacgactgag

SEQ ID NO: 815359 - DNA, 75 bp, synthetic construct
  source 1..75: mol_type = other DNA
atggcacatagcctcgctcaaattggagtcaggtttgtgccaataccagcagaaacagacgaagaatttcatacg

SEQ ID NO: 815360 - DNA, 75 bp, synthetic construct
  source 1..75: mol_type = other DNA
ggtgttttttatgagatgataatattttcatgtatttctttgttttcaatgcaaagagggtttgtttcctttgta

SEQ ID NO: 815361 - DNA, 75 bp, synthetic construct
  source 1..75: mol_type = other DNA
tgtttttagctatatcaatgcaaactccctgcgttcagctgccttttatgaaatgataatattttcatgtgtttc

SEQ ID NO: 815362 - DNA, 75 bp, synthetic construct
  source 1..75: mol_type = other DNA
agagtcctgcccgctgcgggcgctggatttcggccctatcgacgagctgcgtaaaaaacatggcgatctggcggc

SEQ ID NO: 815363 - DNA, 75 bp, synthetic construct
  source 1..75: mol_type = other DNA
tcgtgacggtatatctgtaccgcagaacaatgcagcactgaatgcgctggggctgtctcttggcgattacacagg

SEQ ID NO: 815364 - DNA, 75 bp, synthetic construct
  source 1..75: mol_type = other DNA
ccagacagaccgatgatggctctcagctctggcggcatgaaacgattgagtgtatggcttcgttttatggtccgg

SEQ ID NO: 815365 - DNA, 75 bp, synthetic construct
  source 1..75: mol_type = other DNA
actgatggctggttcctgggctctgtccatgataccggctacggacctgtctgctactggttccgtaataccata

SEQ ID NO: 815366 - DNA, 75 bp, synthetic construct
  source 1..75: mol_type = other DNA
aatctaagcggcagatacagcgtacattaaaacggcaagacataaatcgctcaccaatcgccccattcgaagcac

SEQ ID NO: 815367 - DNA, 75 bp, synthetic construct
  source 1..75: mol_type = other DNA
caaagaggaaatggcgtacaatgaggcgagctttgtttactctggatgtcgaatcaactagtggtatcccctact

SEQ ID NO: 815368 - DNA, 75 bp, synthetic construct
  source 1..75: mol_type = other DNA
ttgcctactatctctcaatttcgtgcaaccactgcgatgatccggcgtgtaccaaagtctgccccagcggcgcaa

SEQ ID NO: 815369 - DNA, 75 bp, synthetic construct
  source 1..75: mol_type = other DNA
accctgcatttttgctgctcgcttcactcttgatgcgatggagatcctcaattactggaatctgccgatgaactg

SEQ ID NO: 815370 - DNA, 75 bp, synthetic construct
  source 1..75: mol_type = other DNA
gtctggatatgcctgaggtttcgctggtggcgatcctcgatgcggataaagagggcttcctgcgctctgagcgtt

SEQ ID NO: 815371 - DNA, 75 bp, synthetic construct
  source 1..75: mol_type = other DNA
gtcaggctgtggggctcttttgatgggttttgctggtctgttgctgtcgattgtgtctggcactatttgtcgtat

SEQ ID NO: 815372 - DNA, 75 bp, synthetic construct
  source 1..75: mol_type = other DNA
ttagacctcacgcccctgggtggcgaggttatccgcttccattccggcgtgaatggctattacggcccggttatc

SEQ ID NO: 815373 - DNA, 75 bp, synthetic construct
  source 1..75: mol_type = other DNA
tttattgacaaatccgtcgattttattgtggtaagaggagaatcagctcgtgtcggtactttagaaaccccctcg

SEQ ID NO: 815374 - DNA, 75 bp, synthetic construct
  source 1..75: mol_type = other DNA
tttcagcaggcatacgctaatgcttatgcgtctggtgatcgcggtgctttgcgtcagttggctactcaatatcca

SEQ ID NO: 815375 - DNA, 75 bp, synthetic construct
  source 1..75: mol_type = other DNA
atggattatccaaatctaccaaaacaaacttttgctgatttaatcgcactcaggcaagctgtcgtggctctaatc

SEQ ID NO: 815376 - DNA, 75 bp, synthetic construct
  source 1..75: mol_type = other DNA
acccaatcgaggcgactggcttcgaaatgaaaaacgaaggcgtttactcacgcccccaaatggtagtagccaaca

SEQ ID NO: 815377 - DNA, 75 bp, synthetic construct
  source 1..75: mol_type = other DNA
cgcccgcaaatggttgtagccaacattggcggcctaatcaccgggatgaataacgatttcaacgacctgcgagga

SEQ ID NO: 815378 - DNA, 75 bp, synthetic construct
  source 1..75: mol_type = other DNA
ttttctaccgatttgcgcaattctctcagttactggtgcctccctgttaacgcttctgctcaggagggactatga

SEQ ID NO: 815379 - DNA, 75 bp, synthetic construct
  source 1..75: mol_type = other DNA
aaccctgcatatcatgaaggtaagggtattggcgatgctatcgcagcaggtgaaaccgttgtagctgactacgtg

SEQ ID NO: 815380 - DNA, 75 bp, synthetic construct
  source 1..75: mol_type = other DNA
ttgatggcaagtccatcaccgaaacccgcctcgctggtgctgaattaaaaccaggtgaactggttaaactgcagg

SEQ ID NO: 815381 - DNA, 75 bp, synthetic construct
  source 1..75: mol_type = other DNA
cgcatccggtattggtctggcgattgtagaggaattattagcacaaggcgcaaatgtacagatggtcgatattca

SEQ ID NO: 815382 - DNA, 75 bp, synthetic construct
  source 1..75: mol_type = other DNA
gcgtcgtttaaatgaagtaggggacttgttcgaaaatgcagatttgggagaagacgaggaagaagaattaccatt

SEQ ID NO: 815383 - DNA, 75 bp, synthetic construct
  source 1..75: mol_type = other DNA
ttgatggtaaatccattaccgaaacacgcgcagcaggtgctgaattaaaaccggggacgctggtggtgttgaaag

SEQ ID NO: 815384 - DNA, 75 bp, synthetic construct
  source 1..75: mol_type = other DNA
gatccggttttcgctttctgccaggaaactgtaacccttgaagcggctgattttgtacgtgtccgcgttgcataa

SEQ ID NO: 815385 - DNA, 75 bp, synthetic construct
  source 1..75: mol_type = other DNA
acagccacgcactgacaccagcgcagaagccttagcccgtttaaatccttcatttgacagtctcggttctgtgac

SEQ ID NO: 815386 - DNA, 75 bp, synthetic construct
  source 1..75: mol_type = other DNA
caccattccgcagattggcggtatgtatcgcggcgaccgggcacgtaaagaaaccctggtggagtatggttttcg

SEQ ID NO: 815387 - DNA, 75 bp, synthetic construct
  source 1..75: mol_type = other DNA
aagcgatcaagatcgttatcgaggcatttcccgtactctctcaatctggcatggtcggcggctggggtggcaaag

SEQ ID NO: 815388 - DNA, 75 bp, synthetic construct
  source 1..75: mol_type = other DNA
ctgatgtcgcaggcggtggcgcgacagatggtcaaacaacatgatggcgtgattgtgaatgtttcctcagaaagt

SEQ ID NO: 815389 - DNA, 75 bp, synthetic construct
  source 1..75: mol_type = other DNA
tggtcgctttaaatcgtacgaaggcgtagcgatggaatatgcttttctggtcgcgctggcacagggaacattacc

SEQ ID NO: 815390 - DNA, 75 bp, synthetic construct
  source 1..75: mol_type = other DNA
gccagatccgatcatcgcatactgccaggaagacgtaaccctggaggcggaagattttatccgcgttcgcgttgc

SEQ ID NO: 815391 - DNA, 75 bp, synthetic construct
  source 1..75: mol_type = other DNA
gcattaaaccaattagtttgccacaagcgcaaagcatcatagataaggctaatgagggttccaagaaggcggcag

SEQ ID NO: 815392 - DNA, 75 bp, synthetic construct
  source 1..75: mol_type = other DNA
gcgaaatccgcgttccacataaaggtgatattgggctccgtttgggaaacggaaaatattgtacgttaaggctat

SEQ ID NO: 815393 - DNA, 75 bp, synthetic construct
  source 1..75: mol_type = other DNA
atattaacgggcaggaagttcctgaaattatcctgcttaattcacatgatggttcatccagttatcagatgatcc

SEQ ID NO: 815394 - DNA, 75 bp, synthetic construct
  source 1..75: mol_type = other DNA
gatataattccattcgccgtgagcgcccgttgacggatgacgaattaatgcagtttgtgccgtctgttttttctg

SEQ ID NO: 815395 - DNA, 75 bp, synthetic construct
  source 1..75: mol_type = other DNA
ggactggtcagggccgtactcctaaagcaattgctactgctattgaagcaggtaaaacactggaagacttcgcaa

SEQ ID NO: 815396 - DNA, 75 bp, synthetic construct
  source 1..75: mol_type = other DNA
tattatcaggccatcatttagctatccgcgacgcactgcaacgcgttattaaaggtgagataacccgactcatca

SEQ ID NO: 815397 - DNA, 75 bp, synthetic construct
  source 1..75: mol_type = other DNA
catctgatgagtctgacgaaaccgggatcgtggcatgttccgcctatggtggcggcaagaatgctcagtattctg

SEQ ID NO: 815398 - DNA, 75 bp, synthetic construct
  source 1..75: mol_type = other DNA
taacgggcaggaagttccggaaattattttgcttaactctcatgatggttcgtccagctatcagatgatccccgg

SEQ ID NO: 815399 - DNA, 75 bp, synthetic construct
  source 1..75: mol_type = other DNA
agtgacgaacaatatttatttggcagagctgcattgatggccaggtacgaagatgaaaataaaacgccagtgacg

SEQ ID NO: 815400 - DNA, 75 bp, synthetic construct
  source 1..75: mol_type = other DNA
ttgattccggccgttgcaccggttgcaaaacctgcgagctggcctgtaaagactacaaagatttgacgccagaag

SEQ ID NO: 815401 - DNA, 75 bp, synthetic construct
  source 1..75: mol_type = other DNA
agtgacgagcaacatttatttggcagagctgcaatgatgggcaggtaggaagatgaaaataaaacgccagtgacg

SEQ ID NO: 815402 - DNA, 75 bp, synthetic construct
  source 1..75: mol_type = other DNA
agtgacgaccaacatttatttggcagagctgcagtgatggacaggtaggaagatgaaaataaaacgccagtgacg

SEQ ID NO: 815403 - DNA, 75 bp, synthetic construct
  source 1..75: mol_type = other DNA
agtgacgaacaacatttatttggcagagctgcagtgatggccaggtaggaagatgaaaataaaacgccagtgacg

SEQ ID NO: 815404 - DNA, 75 bp, synthetic construct
  source 1..75: mol_type = other DNA
ctttcagcggtaggttccactaagcctaaaaccaaatcgacacgcactccacgccctgctaaatataaatataca

SEQ ID NO: 815405 - DNA, 75 bp, synthetic construct
  source 1..75: mol_type = other DNA
atgcgattagcttcccgttttggtcggtataattccattcgccgtgagcgtcctttaacggatgatgaattaatg

SEQ ID NO: 815406 - DNA, 75 bp, synthetic construct
  source 1..75: mol_type = other DNA
gtttggaggataaacagaacgatctctggacaacctggcagcgggttcaggagaatatgataaaaggtggactgt

SEQ ID NO: 815407 - DNA, 75 bp, synthetic construct
  source 1..75: mol_type = other DNA
cctgaacaaataattactccccgtcgtcgggaggataaacagaacgatctctggacaacctggcagcgggttcag

SEQ ID NO: 815408 - DNA, 75 bp, synthetic construct
  source 1..75: mol_type = other DNA
gatattagccgagcaaatgcgttaacgtcagcatatgcaccaacagccgcaatgcagaattacaatcagtacgcg

SEQ ID NO: 815409 - DNA, 75 bp, synthetic construct
  source 1..75: mol_type = other DNA
tcaggacaagatggctggtcgtgagattgaccgaggcagactggcagagacaatccgcagcaatcaggccggcga

SEQ ID NO: 815410 - DNA, 75 bp, synthetic construct
  source 1..75: mol_type = other DNA
tatcaattctggccaacagatatttcttgtgctcaacaagtaaataacactgttgcacaaataattcagcgcttt

SEQ ID NO: 815411 - DNA, 75 bp, synthetic construct
  source 1..75: mol_type = other DNA
cggtatcacccacgaactgcgaacgccgttagtgcgcctgcgttatcgactggagatgagcgaaaatctgagcgc

SEQ ID NO: 815412 - DNA, 75 bp, synthetic construct
  source 1..75: mol_type = other DNA
atgaaaaaactgtttatccagttttatcttctactgtttgtctgctttctggtgatgtccctactggttgggctg

SEQ ID NO: 815413 - DNA, 75 bp, synthetic construct
  source 1..75: mol_type = other DNA
tacggcttatttcacgcaatgatgaatggtatttcgattacatcaccgacttcagttatatgggagtggtgtacc

SEQ ID NO: 815414 - DNA, 75 bp, synthetic construct
  source 1..75: mol_type = other DNA
ttcatcttaacagtgacgagcaacatttatttggcagagctgcactgatggtcaggtatgaagatgaaaataaaa

SEQ ID NO: 815415 - DNA, 75 bp, synthetic construct
  source 1..75: mol_type = other DNA
tggaagtcatgataatataagtaaagccccgaaaatttttcggggctttacttatattatcattcttcggcatcg

SEQ ID NO: 815416 - DNA, 75 bp, synthetic construct
  source 1..75: mol_type = other DNA
catgaatagtaagcaatggccaggtaaagccgctattggtcgtctgaaaggcgaggaactggcgcaatataattc

SEQ ID NO: 815417 - DNA, 75 bp, synthetic construct
  source 1..75: mol_type = other DNA
tgctattccagacccattacatgacggtgaaatgctggcggtattgttggtcactgatgctgttacttacaaggg

SEQ ID NO: 815418 - DNA, 75 bp, synthetic construct
  source 1..75: mol_type = other DNA
tatatcggtatcgacaccgctaaagagaaactggatgtcgatgtgttgcgtcctgatggtcgtcatcgcaccaaa

SEQ ID NO: 815419 - DNA, 75 bp, synthetic construct
  source 1..75: mol_type = other DNA
aaactggatgtcgatgtgttgcgtcctgatggtcgtcatcgcaccaaaaaattcgctaacaccactaaagggcac

SEQ ID NO: 815420 - DNA, 75 bp, synthetic construct
  source 1..75: mol_type = other DNA
aaataaaaaaagttaaggatggtatatccgagattattacatctgcgaatgcagaagagtatctgaaaactgtga

SEQ ID NO: 815421 - DNA, 75 bp, synthetic construct
  source 1..75: mol_type = other DNA
taaacagatggagaaagaattaaaaaatatatatttaaattctatatcttatcctgtagatgataatagattgac

SEQ ID NO: 815422 - DNA, 75 bp, synthetic construct
  source 1..75: mol_type = other DNA
atgagagcgaagaaaacagcagatcagaaagcgttagttatcactacaactgatgtgtcgttattcacgaagggt

SEQ ID NO: 815423 - DNA, 75 bp, synthetic construct
  source 1..75: mol_type = other DNA
cagcgacgctggcgctgccggaattctgaacccgatgccggaaaggtgcttaatacgcggctcgccagtgacggt

SEQ ID NO: 815424 - DNA, 75 bp, synthetic construct
  source 1..75: mol_type = other DNA
caatgtgcttattgaagatgaccagggaacgcatttccggctggttatccgcaatgccgaagggcagctacgctg

SEQ ID NO: 815425 - DNA, 75 bp, synthetic construct
  source 1..75: mol_type = other DNA
gttactcgctggtggttgctgaccgtaacccagaagctattgctgacgtgattgctgcaggtgcagaaacagcgt

SEQ ID NO: 815426 - DNA, 75 bp, synthetic construct
  source 1..75: mol_type = other DNA
gtatcgacaccgctaaagagaaactggatgtcgatgtgttgtgtcctgatggtcgtcatcgcaccaaaaaattcg

SEQ ID NO: 815427 - DNA, 75 bp, synthetic construct
  source 1..75: mol_type = other DNA
cctcggttgtatgagctatggtgaacctgaacgtcttcctcaatgtcaacgacggatgaaaagtgatccacttat

SEQ ID NO: 815428 - DNA, 75 bp, synthetic construct
  source 1..75: mol_type = other DNA
taccgcaatgtgcttattgaagatgaccagggaacgaatttccggctggttatccgcaatgccgaagggcagcta

SEQ ID NO: 815429 - DNA, 75 bp, synthetic construct
  source 1..75: mol_type = other DNA
gaaaaccacaaggaaatgaagcgtgcagcagcacagtctgcggccctgacaggtctgttccagccgtacagcgtg

SEQ ID NO: 815430 - DNA, 75 bp, synthetic construct
  source 1..75: mol_type = other DNA
tcgtgtgggtgtggcgcttgatatggggaatacgttgtcgccagaggattttacgccaatagccacagaattgat

SEQ ID NO: 815431 - DNA, 75 bp, synthetic construct
  source 1..75: mol_type = other DNA
taaaaacggatgtttcaaaggctatttctatcgaaacagcgccagcctatgttgccgctgtccgttctggcggta

SEQ ID NO: 815432 - DNA, 75 bp, synthetic construct
  source 1..75: mol_type = other DNA
gtgctattaatacaacaacaggaagcatcatggcctttaatgaaaaggagtttactaattttttagcaacacacg

SEQ ID NO: 815433 - DNA, 75 bp, synthetic construct
  source 1..75: mol_type = other DNA
gcatcaccatgcctaacctgcatgaaatgggtggcgagaacgcgccgatcatcatggcgcagctgaaagacgtta

SEQ ID NO: 815434 - DNA, 75 bp, synthetic construct
  source 1..75: mol_type = other DNA
aatctgaaatctatcgtctaatccttagagaaagtgaactcattacagcatgggtaaaatctggagacacgccgt

SEQ ID NO: 815435 - DNA, 75 bp, synthetic construct
  source 1..75: mol_type = other DNA
cttgcggctgcgaaagacaataacggtgcattactgaatgagttcaaccgtcttggtacaaatgtaaatgacctg

SEQ ID NO: 815436 - DNA, 75 bp, synthetic construct
  source 1..75: mol_type = other DNA
acttactgctgatgttaaaggaaaaatacaaaattacataaatacaataaaatatcctgtttacgctgaatcctt

SEQ ID NO: 815437 - DNA, 75 bp, synthetic construct
  source 1..75: mol_type = other DNA
aaaaatacatcagtgggtatagtaaatacagaaactggtagtatcatgtcatataataaaaatgagatggataag

SEQ ID NO: 815438 - DNA, 75 bp, synthetic construct
  source 1..75: mol_type = other DNA
gctttatcaaaagagtactctcgcatttctgggaatatcgaacagctgaataaagacaccacttttgcaattgac

SEQ ID NO: 815439 - DNA, 75 bp, synthetic construct
  source 1..75: mol_type = other DNA
tggcgtgaaggatgttgtggctgaagttgttgaggataccaccgttcgtgtggcagaagacggttccctgaccac

SEQ ID NO: 815440 - DNA, 75 bp, synthetic construct
  source 1..75: mol_type = other DNA
ataaatactaaaaaagatttatttgatggaattattaatgcgaaaacaggcactgttactactgtaaacaaaaaa

SEQ ID NO: 815441 - DNA, 75 bp, synthetic construct
  source 1..75: mol_type = other DNA
agacaaatctgtactgcagatggtggctcaagttgcaggtgaagcggcccgttatagcatatctttaccacctga

SEQ ID NO: 815442 - DNA, 75 bp, synthetic construct
  source 1..75: mol_type = other DNA
aggtaacgtcaccaaactggcgaatcaggtcattgtggcgctgaatattgccgcgatgtcagaagcgttaacgct

SEQ ID NO: 815443 - DNA, 75 bp, synthetic construct
  source 1..75: mol_type = other DNA
gcagagcgaaaggtgaagccgagctacgggcggcattgtttaagcttgccagaaaaggggatgcctttgctctgc

SEQ ID NO: 815444 - DNA, 75 bp, synthetic construct
  source 1..75: mol_type = other DNA
tttgtaaaaattgatccgcaatttgagcctgcactggatgaaaaaggccaagtgatcgccgaccctaaactcaaa

SEQ ID NO: 815445 - DNA, 75 bp, synthetic construct
  source 1..75: mol_type = other DNA
tacaacgcaggcaatgtaagcgtaacgcgtctggaagatggcctgccagtgggcgtggtcgatgtggttgaggga

SEQ ID NO: 815446 - DNA, 75 bp, synthetic construct
  source 1..75: mol_type = other DNA
cggcgcaacagaatgctacaataaaggtcagtccacacagattccggtatctccggagttcaaaacatctcctcg

SEQ ID NO: 815447 - DNA, 75 bp, synthetic construct
  source 1..75: mol_type = other DNA
tggcgcaacgcaggcatacaatagcggtacttctacgcagatcccagcttcacccgagataaaaaccccccggcg

SEQ ID NO: 815448 - DNA, 75 bp, synthetic construct
  source 1..75: mol_type = other DNA
cgtttattgcccgaaggccctttctcacgcaaccaggctcttgccgtcacaacggcttaccttaatgtgcttatt

SEQ ID NO: 815449 - DNA, 75 bp, synthetic construct
  source 1..75: mol_type = other DNA
tccgacacccgttgggcggctgatattcatatcactccggatggtcgacatttatatgcttgtgaccgtaccgcc

SEQ ID NO: 815450 - DNA, 75 bp, synthetic construct
  source 1..75: mol_type = other DNA
gtatgctgatccgccgtttggagtccgaccctggccgagatctgtcgaagaacattcgtcagggcagcacgctgt

SEQ ID NO: 815451 - DNA, 75 bp, synthetic construct
  source 1..75: mol_type = other DNA
agtgattagcatcctgcaaacaatactgtattcgtgttcccgtacagtggttgtttctcctgcgattaacgatag

SEQ ID NO: 815452 - DNA, 75 bp, synthetic construct
  source 1..75: mol_type = other DNA
gtatacgaaattgtcggcgaacagggactgttgcatgaaaaaggtcgctatgcggtcgggcaggggccgatgtgg

SEQ ID NO: 815453 - DNA, 75 bp, synthetic construct
  source 1..75: mol_type = other DNA
gtatacgaaattgttggcgagcaggggctactgcatgaaaaaggccgctatgcggttgggcaggggccaatgtgg

SEQ ID NO: 815454 - DNA, 75 bp, synthetic construct
  source 1..75: mol_type = other DNA
caggggctactgcatgaaaaaggccgctatgcggtcgggcagggaccaatgtgggtggtggttaacgcacactaa

SEQ ID NO: 815455 - DNA, 75 bp, synthetic construct
  source 1..75: mol_type = other DNA
cgctggcgcagccggaattctgaacccgatgccggaaaggtgcttaatacgcggctcgccagtgacggtcttctc

SEQ ID NO: 815456 - DNA, 75 bp, synthetic construct
  source 1..75: mol_type = other DNA
ccgcttgtggctttgccgtgcagctcaatcgttgcctgatgtttttcacccccggcgtcccatcggaatttaagg

SEQ ID NO: 815457 - DNA, 75 bp, synthetic construct
  source 1..75: mol_type = other DNA
gatttaagcgcactcgccgctgcgacagcaaaaggtgaaggcctggtgctgcatgaggcctggctcaaagagatg

SEQ ID NO: 815458 - DNA, 75 bp, synthetic construct
  source 1..75: mol_type = other DNA
tgccggacagagcgtgattttcgaaggcaccgaaggactgcccgcgcagatcagtcgcgaattgcaaaaccgcca

SEQ ID NO: 815459 - DNA, 75 bp, synthetic construct
  source 1..75: mol_type = other DNA
atgcgctgccagaagctctggcactggtgaaatctggtgcactggctggcaccgtgctgaacgatgctaacaacc

SEQ ID NO: 815460 - DNA, 75 bp, synthetic construct
  source 1..75: mol_type = other DNA
ccggcggctggaataatgacactttcgtcccgtttgattacggctatttcgccttcgtctatgacaagaacaaac

SEQ ID NO: 815461 - DNA, 75 bp, synthetic construct
  source 1..75: mol_type = other DNA
ttcaccggtggtttattggctttgcaactttctcgcgcaggtgctccattgctggcgtgtgaagtggttccttca

SEQ ID NO: 815462 - DNA, 75 bp, synthetic construct
  source 1..75: mol_type = other DNA
atgtgggactgtcaccctgttttattgcccgaaggccctttctcacgcgaacaggcggttggcgtcacaacagct

SEQ ID NO: 815463 - DNA, 75 bp, synthetic construct
  source 1..75: mol_type = other DNA
atgtcggactgcctccctgttttattgcccgaaggccctttctcacgcgaacaggcggttggcgtcacaacagct

SEQ ID NO: 815464 - DNA, 75 bp, synthetic construct
  source 1..75: mol_type = other DNA
atgttggactgaccccctgttttattgcccgaaggccctttctcacgcgaacaggcggttggcgtcacaacagct

SEQ ID NO: 815465 - DNA, 75 bp, synthetic construct
  source 1..75: mol_type = other DNA
gttcagcctgacgttgagtgagcaattcaccggtggtttattggctttgcaactcgcgcgcgcaggtgcgccatt

SEQ ID NO: 815466 - DNA, 75 bp, synthetic construct
  source 1..75: mol_type = other DNA
gttaccggaagagagccagtttcaaacatggctgaatgcggtgatcccgcagtttcaggaagaatcggaagtgac

SEQ ID NO: 815467 - DNA, 75 bp, synthetic construct
  source 1..75: mol_type = other DNA
gaaggtcagcgacgctggcgctgccggaactctgaagctgatgccggaaaacagcttaatgcgtggctcgccagt

SEQ ID NO: 815468 - DNA, 75 bp, synthetic construct
  source 1..75: mol_type = other DNA
ctggtgcatgccgggagaaccgctgaattcattaccggaaaacagcctgatacggtgaagcccaccggaccttcc

SEQ ID NO: 815469 - DNA, 75 bp, synthetic construct
  source 1..75: mol_type = other DNA
gccgcctgtaagtataacgacattattccggcggaccattgtctgcatgatgtgcaggacatgagccgtcttaac

SEQ ID NO: 815470 - DNA, 75 bp, synthetic construct
  source 1..75: mol_type = other DNA
gcggagttactgaagaagggcggacgtgtgagcgtacggtttaagttgccgggttcactggtgccgaatcagttt

SEQ ID NO: 815471 - DNA, 75 bp, synthetic construct
  source 1..75: mol_type = other DNA
ggaacgctactgagagtaaagacactaatgaaaatggccaatcatccccgcccgggggacattattcaggaatca

SEQ ID NO: 815472 - DNA, 75 bp, synthetic construct
  source 1..75: mol_type = other DNA
ggtaaggccctgcaactgaataaaccggaaaaccacatctggtttctggagcatgatgcagccggacagggagtg

SEQ ID NO: 815473 - DNA, 75 bp, synthetic construct
  source 1..75: mol_type = other DNA
tgaaaccgtcaggtgacggaagcacagttatcagcaccaccagcgaaccggagtattaccttgttgttgtcctgg

SEQ ID NO: 815474 - DNA, 75 bp, synthetic construct
  source 1..75: mol_type = other DNA
aacgcgggggcatcatcgacagtatcagaggtgcgcccgtcatcgccttccagtgcagaagccacaggcgtcaca

SEQ ID NO: 815475 - DNA, 75 bp, synthetic construct
  source 1..75: mol_type = other DNA
atcactgtctccatgatgtacaggatatgagcagccttcatcatccgaacgccgatctgtcaaaaggtcagtatg

SEQ ID NO: 815476 - DNA, 75 bp, synthetic construct
  source 1..75: mol_type = other DNA
gtcaggagaaggtaacgatatgctgatgtctttcttcctgcagacggatacgacgaacctgaacgcgatgcatca

SEQ ID NO: 815477 - DNA, 75 bp, synthetic construct
  source 1..75: mol_type = other DNA
gtgttaacaaaaacattgctgaagcggtggtcagtgatgcgggggctacgggaggtaaggctctgcaactgaaca

SEQ ID NO: 815478 - DNA, 75 bp, synthetic construct
  source 1..75: mol_type = other DNA
aggaagcaatgaatctcctgattcccgtcggttatgtggagcaggagctagcggaatactgcgggaaagtgaagc

SEQ ID NO: 815479 - DNA, 75 bp, synthetic construct
  source 1..75: mol_type = other DNA
gtttaaaatccccgaaaacgtcaatcttgagacaaccagaaacaagtatgcctttggtttgtactggcgaatagc

SEQ ID NO: 815480 - DNA, 75 bp, synthetic construct
  source 1..75: mol_type = other DNA
ggatgttacaaaaaatgcagcgtatggcgttgtgatagaaagtctgatgctggagataaatgcaccggcagcata

SEQ ID NO: 815481 - DNA, 75 bp, synthetic construct
  source 1..75: mol_type = other DNA
acagctgaacagtcagttatactttacgacgctaaaaatgcctcagataccaatttacaggcgctgaactgggag

SEQ ID NO: 815482 - DNA, 75 bp, synthetic construct
  source 1..75: mol_type = other DNA
gtcaccctgacaggggatgcagggaataatctgctggcagcgttttacatccagacggatgcaaaagacctgaat

SEQ ID NO: 815483 - DNA, 75 bp, synthetic construct
  source 1..75: mol_type = other DNA
ttgtggtgatacgacatattactggaaaaacgctggcaccgataaatatgaggcggtatacggtggctacaaagg

SEQ ID NO: 815484 - DNA, 75 bp, synthetic construct
  source 1..75: mol_type = other DNA
cgaacaaaagcagcactgaagaagaacccgaaaaatgtgctgtttgccgtggtgtggatgcagggggaatttgat

SEQ ID NO: 815485 - DNA, 75 bp, synthetic construct
  source 1..75: mol_type = other DNA
ctggttgataaattccgtgcagacctggcggatatggcaggccagtgcgtcggtggctctgctggcggtgttccc

SEQ ID NO: 815486 - DNA, 75 bp, synthetic construct
  source 1..75: mol_type = other DNA
ggcgcatttgataacgaatggcatacgctgggcttccgttttgccggtaacaacagtattgaggtgacgccggtc

SEQ ID NO: 815487 - DNA, 75 bp, synthetic construct
  source 1..75: mol_type = other DNA
tggtgaagggcttccgttaccggattcatttgaccgcccggatccacggattaagcaactggcacgccgcagcac

SEQ ID NO: 815488 - DNA, 75 bp, synthetic construct
  source 1..75: mol_type = other DNA
ctagctgaatattgtgggaaggtgaagcagactatcttgcagatttgtacgatcgatgctttagaaattctcgaa

SEQ ID NO: 815489 - DNA, 75 bp, synthetic construct
  source 1..75: mol_type = other DNA
aacctggtccctgatgcatccggtggatgacgcagtctccctgctgacacggggtggcagactgagctgtaagtt

SEQ ID NO: 815490 - DNA, 75 bp, synthetic construct
  source 1..75: mol_type = other DNA
ggtcacgccaggtggtacgccgtgtaaatacaatgacatcattccggcagaccactgcctgcatgatgtgcagga

SEQ ID NO: 815491 - DNA, 75 bp, synthetic construct
  source 1..75: mol_type = other DNA
ctgttgtggatgatgccggagccagtggaggtaaggcgatgaagcttaccaaagcgacgggaaaatcctcctggt

SEQ ID NO: 815492 - DNA, 75 bp, synthetic construct
  source 1..75: mol_type = other DNA
catcatttctgaccgtctggcctcagccattctgctccatgcgggacgcacggctgaagttatgggcggacaggc

SEQ ID NO: 815493 - DNA, 75 bp, synthetic construct
  source 1..75: mol_type = other DNA
tgcggagcgactgactcaaaaactgaaggaggggtggcagccatttggcagtcctgtcgccatcacgccttatac

SEQ ID NO: 815494 - DNA, 75 bp, synthetic construct
  source 1..75: mol_type = other DNA
ccaaaaccatcggtgaatggtttccaaaatcagaacgcccgatcgccgcaggctgggcaggcgtcggtttttcca

SEQ ID NO: 815495 - DNA, 75 bp, synthetic construct
  source 1..75: mol_type = other DNA
atgttgcaggtgacgagcgatcaatggctttcctggttaagcctgtatttctggccattactgcgcgtgctggcg

SEQ ID NO: 815496 - DNA, 75 bp, synthetic construct
  source 1..75: mol_type = other DNA
gaccctgaatctggcattaggtttactgaatcgtatggccccgcaattatccatttttgttattggatttccatt

SEQ ID NO: 815497 - DNA, 75 bp, synthetic construct
  source 1..75: mol_type = other DNA
ggctgggcaggcgtcggtttttccatcggtgccatgctggccccaccgattatctattttgcccacgcttcattc

SEQ ID NO: 815498 - DNA, 75 bp, synthetic construct
  source 1..75: mol_type = other DNA
ttaccaataacccgtatatcgccatcgtccttatctccatcggcggcttcggtcaccagatcatctcctgcatgc

SEQ ID NO: 815499 - DNA, 75 bp, synthetic construct
  source 1..75: mol_type = other DNA
tctgtatctatggtatcagtccagggtatttttctcataaacttaatcagttaaggcattgtagtcgaatgatta

SEQ ID NO: 815500 - DNA, 75 bp, synthetic construct
  source 1..75: mol_type = other DNA
tgcgtttctggcactcaccaaagcagggagtttgattttccttaacgggctgatgctggcgttaccgctcattac

SEQ ID NO: 815501 - DNA, 75 bp, synthetic construct
  source 1..75: mol_type = other DNA
ggctttcctggttaagtctgtatttctggccattgctgcgcgtgctggcgctgatctccaccgcgcccattttaa

SEQ ID NO: 815502 - DNA, 75 bp, synthetic construct
  source 1..75: mol_type = other DNA
taccatttctttgcgctgatttaggaagtattgccagcggaggtagtgactccaacttactgatagtgttttatg

SEQ ID NO: 815503 - DNA, 75 bp, synthetic construct
  source 1..75: mol_type = other DNA
ggctttcctggttaagtctgtacttctggccgttactgcgcgtgctggcgctcatttctaccgcgccaattctga

SEQ ID NO: 815504 - DNA, 75 bp, synthetic construct
  source 1..75: mol_type = other DNA
cagccatctcaatatgcccgttctagcgcgtatcatggatatgctggcgttactgctgttcctgacatttaacgg

SEQ ID NO: 815505 - DNA, 75 bp, synthetic construct
  source 1..75: mol_type = other DNA
tgcgccacggttatataaacgcgttaaggtgtcgtgccacgcctgccactgcaacgagctttgcagaacatacat

SEQ ID NO: 815506 - DNA, 75 bp, synthetic construct
  source 1..75: mol_type = other DNA
ccactatttttcaggccgaagccagtgcgttgcaaacccgcctggacgttactcgttcccgtccgcatcagggag

SEQ ID NO: 815507 - DNA, 75 bp, synthetic construct
  source 1..75: mol_type = other DNA
gcggatgcagccgaacgagagaaccaggaagcaatgaatctcctgattccggtcggttatgtagaacaggaacta

SEQ ID NO: 815508 - DNA, 75 bp, synthetic construct
  source 1..75: mol_type = other DNA
aggaacagaatgggtcctaaagaacatcatcaacccgcttaaagaaactacggtcaaggaacaaatcgacgtaga

SEQ ID NO: 815509 - DNA, 75 bp, synthetic construct
  source 1..75: mol_type = other DNA
gggagccggtaaacccctgtatcaggacctgctcagtcgcaccagagcggcgctggcgaagaacccgaaaaataa

SEQ ID NO: 815510 - DNA, 75 bp, synthetic construct
  source 1..75: mol_type = other DNA
aaaagacctgaatgtgatgtaccacaatgcgaaggtggcgacaaataacctgaaactgggaagctttggcgcatt

SEQ ID NO: 815511 - DNA, 75 bp, synthetic construct
  source 1..75: mol_type = other DNA
tgccgacgaacaaaccggaagaagacccggacattccgggtatcggatattacggttcgaaatggcgtgacagct

SEQ ID NO: 815512 - DNA, 75 bp, synthetic construct
  source 1..75: mol_type = other DNA
accgtctggcaacggcgattcttgtgcatgccgggagaaccgctgaattcattaccggaaaacagcctgatacgg

SEQ ID NO: 815513 - DNA, 75 bp, synthetic construct
  source 1..75: mol_type = other DNA
atatcttcctttgtcagtcgtgagctggagaagcaaagtaatcgtcgtgttaaagcgaaatttgtcgccacggaa

SEQ ID NO: 815514 - DNA, 75 bp, synthetic construct
  source 1..75: mol_type = other DNA
ccgcagatgacagcgctgtttatggcacgatgcaaaatcagggcggactcgatgaaaacactacggtgcagtccg

SEQ ID NO: 815515 - DNA, 75 bp, synthetic construct
  source 1..75: mol_type = other DNA
caacgacagcgatggttcagtagacagctacagtgccgcgttatacgccagctattatgatcaaagtcgtttctg

SEQ ID NO: 815516 - DNA, 75 bp, synthetic construct
  source 1..75: mol_type = other DNA
tcgcagtacggtgacaccgggaggtgccgcctgtaagtataacgacatcattccggcggaccactgtctgcatga

SEQ ID NO: 815517 - DNA, 75 bp, synthetic construct
  source 1..75: mol_type = other DNA
ttactggccggtttcctctctgccgcagggtgtcaccctgacaggggatgcagggaataatctgctggcagcgtt

SEQ ID NO: 815518 - DNA, 75 bp, synthetic construct
  source 1..75: mol_type = other DNA
ggcgattctgattcatgcgggacgaaccacagtaaaagtcgatgctccatcttctgaaactggcgcaccgacgcc

SEQ ID NO: 815519 - DNA, 75 bp, synthetic construct
  source 1..75: mol_type = other DNA
agttcagcagcaaaagcggcttcatgttgttgagtcaaaggttagccaggttgctgaaaccgtcgagcagatcaa

SEQ ID NO: 815520 - DNA, 75 bp, synthetic construct
  source 1..75: mol_type = other DNA
tggttgctcgaagcattatccgaaaaccgccaatggctgttttcgaaaaaatcaataacttaggattgcgtcgtg

SEQ ID NO: 815521 - DNA, 75 bp, synthetic construct
  source 1..75: mol_type = other DNA
tgtcggaggctgaacaccgaggaaaacgctggtatcaccccaaaatggggcaattccaggtgatcggttggggag

SEQ ID NO: 815522 - DNA, 75 bp, synthetic construct
  source 1..75: mol_type = other DNA
cagacaatccggaattgatcccgcgtgtgctacaactgagatttgacgagtcactgtcgtacccgcgcatttctg

SEQ ID NO: 815523 - DNA, 75 bp, synthetic construct
  source 1..75: mol_type = other DNA
gtgtataaagccgcctattccggtgcgctgaaaaccctgctcgacctgctgccagaacgcgctttgcaaggcaaa

SEQ ID NO: 815524 - DNA, 75 bp, synthetic construct
  source 1..75: mol_type = other DNA
attggctaccgccagttagcggcgaaatgcggcctgaccgaagccaaatgccgcaaccttgtcaacgcttaccgg

SEQ ID NO: 815525 - DNA, 75 bp, synthetic construct
  source 1..75: mol_type = other DNA
gttggtgcgacggtaatggtggcgacgactcacgaagacctgaagaacgcgctgcgccctgatatgcagatcacc

SEQ ID NO: 815526 - DNA, 75 bp, synthetic construct
  source 1..75: mol_type = other DNA
aaacctccaacgtgctgctcgtaaggtcggcgcaacggtaatggtggcgacgacccacgaagatctgaagaacgc

SEQ ID NO: 815527 - DNA, 75 bp, synthetic construct
  source 1..75: mol_type = other DNA
cgtttcagacacgcgtaaataaaaccacgcgcacgttggaaatcgctgagtcgttcgggcttggcctggacgaaa

SEQ ID NO: 815528 - DNA, 75 bp, synthetic construct
  source 1..75: mol_type = other DNA
atgcctttgattgaatacatcaacaagttctatcgggggaatcaggcatcgttcgccaggctgaccggagttcaa

SEQ ID NO: 815529 - DNA, 75 bp, synthetic construct
  source 1..75: mol_type = other DNA
ggcagcataaccatgcatctttgcccaaaatgttttggacaaaagatagtatcgatacttcaaccattcccggtt

SEQ ID NO: 815530 - DNA, 75 bp, synthetic construct
  source 1..75: mol_type = other DNA
ttagccacatcaggcgaggtggacctggttattccccaacaacaaggattcggttaatctggatatccccaacaa

SEQ ID NO: 815531 - DNA, 75 bp, synthetic construct
  source 1..75: mol_type = other DNA
catatttggctactggttaatgatgaccagcggctggagcagatgataagccaaatcgacaaactggaagatgtg

SEQ ID NO: 815532 - DNA, 75 bp, synthetic construct
  source 1..75: mol_type = other DNA
cgataccaatgaagtggaaagcgaaccgctgtggaataaagtctctgatgagcaactgaaagcgatgctggcaaa

SEQ ID NO: 815533 - DNA, 75 bp, synthetic construct
  source 1..75: mol_type = other DNA
aacaactgaaagcgatgctggcaaagcatggcattcgtcatgacaccacggtgattctatatggtcgtgatgtat

SEQ ID NO: 815534 - DNA, 75 bp, synthetic construct
  source 1..75: mol_type = other DNA
acgacggtggttggtacgaatggagcagcgatccgaaaaacccggtagcaaccggtgaacgcggcccggacagta

SEQ ID NO: 815535 - DNA, 75 bp, synthetic construct
  source 1..75: mol_type = other DNA
gaaagccgttaaagcaaagccggagaaagtaaaagcagtgcgcaagatagtgcctgctgatttagatgagatcca

SEQ ID NO: 815536 - DNA, 75 bp, synthetic construct
  source 1..75: mol_type = other DNA
cccgcgatatgctgattcgccctgagactgtgctggctatcgcccattcccgctttagcaacgtccacacgcacc

SEQ ID NO: 815537 - DNA, 75 bp, synthetic construct
  source 1..75: mol_type = other DNA
gtcgatgacttggccgaacagtggaaagacgatgctgatattactctggctgaatacaacgccatccgcagccgc

SEQ ID NO: 815538 - DNA, 75 bp, synthetic construct
  source 1..75: mol_type = other DNA
cccgtctgcaaaaactgccgcactttgagcagctggtttatccgcaatggctgcacgacctgcaacaaggtaaag

SEQ ID NO: 815539 - DNA, 75 bp, synthetic construct
  source 1..75: mol_type = other DNA
caaaaaaccgatctttctgcggtacgctttggcgcaatcggcattggtagtcgtgaatacgacactttttgtggt

SEQ ID NO: 815540 - DNA, 75 bp, synthetic construct
  source 1..75: mol_type = other DNA
ctgaccgacgtggcggaagaagcggatgtgctgctgctgaacacctgctcaatccgcgagaaggctcaggaaaaa

SEQ ID NO: 815541 - DNA, 75 bp, synthetic construct
  source 1..75: mol_type = other DNA
cactggtcagcattcgttcatgggctgaatttatcggcaccaccagcggctatgactacatcaagccaaaaggtg

SEQ ID NO: 815542 - DNA, 75 bp, synthetic construct
  source 1..75: mol_type = other DNA
aaacctggtccgacgcgggtctgcccgttgagcgcggtacgccaccgaaagtgaaagcggaaccggatttcggcg

SEQ ID NO: 815543 - DNA, 75 bp, synthetic construct
  source 1..75: mol_type = other DNA
aaatagccggagcacgttggggacacgctggtagcgactcgacgcatatggaagatttccataacccggatggca

SEQ ID NO: 815544 - DNA, 75 bp, synthetic construct
  source 1..75: mol_type = other DNA
tgccaaagaagtacagaaaacgacggctgacactaaaggtgactggcgtccccttgtattcctgatgacggatgg

SEQ ID NO: 815545 - DNA, 75 bp, synthetic construct
  source 1..75: mol_type = other DNA
tagcctcaaactatttgtcaaaattgtggggtgttttatctatatatatattcattcctttttatatatctattt

SEQ ID NO: 815546 - DNA, 75 bp, synthetic construct
  source 1..75: mol_type = other DNA
gtttatcggggaattgatgacgggagtggctgttatttcgccattgtagatgaccgaatggcaaactactggacg

SEQ ID NO: 815547 - DNA, 75 bp, synthetic construct
  source 1..75: mol_type = other DNA
atgaagaaattactgaccacaacggcgctggccatcagtctctgcgcaggcgctacctttccggcgtctgccgaa

SEQ ID NO: 815548 - DNA, 75 bp, synthetic construct
  source 1..75: mol_type = other DNA
ttatccggtacatctcaacccgaatgtcagagaaccggttagtcgcattctggggcacgtaaaaaacgtcattct

SEQ ID NO: 815549 - DNA, 75 bp, synthetic construct
  source 1..75: mol_type = other DNA
aggagtacctttcagatattctttatcatagaatccaactggtagttgaaatatataaagcagtcctgcaaccta

SEQ ID NO: 815550 - DNA, 75 bp, synthetic construct
  source 1..75: mol_type = other DNA
tgatgctattgacggattcagtatattaaagggattgctctctttttcttttggaatgttttgtctttctattgt

SEQ ID NO: 815551 - DNA, 75 bp, synthetic construct
  source 1..75: mol_type = other DNA
gtgcacaacggcactgatcatgatagacatgcaacgtgattttgtcgaagcaggagggtttggagaagcattggg

SEQ ID NO: 815552 - DNA, 75 bp, synthetic construct
  source 1..75: mol_type = other DNA
gagtgtctttcgattgtgactgtggtcgtcatcaatactggtatcgttacatcgccactgcgggtaactttgccc

SEQ ID NO: 815553 - DNA, 75 bp, synthetic construct
  source 1..75: mol_type = other DNA
gtcatatcatctcatgccaaagataaaaacaaacaaatcactgatgaatcccctaatgatttttatcaaaatcat

SEQ ID NO: 815554 - DNA, 75 bp, synthetic construct
  source 1..75: mol_type = other DNA
ccgatgggacgcattctggtcaggggtgaagcaggtcatgacatcattcctgaactgtacccggtggcaggcgaa

SEQ ID NO: 815555 - DNA, 75 bp, synthetic construct
  source 1..75: mol_type = other DNA
cgtgcgcgaagcaaatgatcgtggctatgaatgcattatcccggaagattgtgtcggctcctatttcccggaatt

SEQ ID NO: 815556 - DNA, 75 bp, synthetic construct
  source 1..75: mol_type = other DNA
tttattggtgaaccaggaccgatgggacgcattctggtcaggggtgaagcaggtcatgacatcattcctgaactg

SEQ ID NO: 815557 - DNA, 75 bp, synthetic construct
  source 1..75: mol_type = other DNA
tgttggtcacgttgaggctggtctgcgcacgggcgatctctattcgccgtggccggaagaggctaaccgtacatt

SEQ ID NO: 815558 - DNA, 75 bp, synthetic construct
  source 1..75: mol_type = other DNA
ttctcgatacatcaggttcaatgcacggagagcctatagaggcagttaaaaatggtgtccagacactactgacca

SEQ ID NO: 815559 - DNA, 75 bp, synthetic construct
  source 1..75: mol_type = other DNA
tcgatctgagattaaatgaagacgacaaacacatgatcgaagaagctgcagcaatgactaaccagtcaatttcac

SEQ ID NO: 815560 - DNA, 75 bp, synthetic construct
  source 1..75: mol_type = other DNA
taactcactggcgtacagccgtgactacagcgtgatgttgttggtaagcattatttttgcgttgctgtgctggcg

SEQ ID NO: 815561 - DNA, 75 bp, synthetic construct
  source 1..75: mol_type = other DNA
cggagagcctatcgaagcggttaagaatggcgttcagacgctgcttaccacgctgaaacaggatccgtatgcact

SEQ ID NO: 815562 - DNA, 75 bp, synthetic construct
  source 1..75: mol_type = other DNA
agcggaactaccgctctgggcgaagccttatccctgactgcaaaccgaattgatgcagaagttcagaaaacgaca

SEQ ID NO: 815563 - DNA, 75 bp, synthetic construct
  source 1..75: mol_type = other DNA
ccctgaagcaggatccttatgcactggaaactgcatatgtctctgtcattactttcgactctactgctcgtcagg

SEQ ID NO: 815564 - DNA, 75 bp, synthetic construct
  source 1..75: mol_type = other DNA
cccgccgttgctcgaaatagcaacactgctgcggcgagcgcaaaggcgctcgccgcttattcgaagagaatcgat

SEQ ID NO: 815565 - DNA, 75 bp, synthetic construct
  source 1..75: mol_type = other DNA
gcactgttatgggtgcgtgaccaggtgatgagcagcgacacgctgcgttcagaactggcggcaaattacccgttt

SEQ ID NO: 815566 - DNA, 75 bp, synthetic construct
  source 1..75: mol_type = other DNA
ataccactgagcgcccggaagcggtaacagcgggtacggtgcgtctggttggcacggataagcagcggattgtcg

SEQ ID NO: 815567 - DNA, 75 bp, synthetic construct
  source 1..75: mol_type = other DNA
cgtactctatgacggacaacttagccgcagcgatggtatctttctcctttttctggctgtgctatggctgctgtt

SEQ ID NO: 815568 - DNA, 75 bp, synthetic construct
  source 1..75: mol_type = other DNA
ttgttggtttacttttggtcgtttacagtgccgaccgtctggtatttgccgcctcaattctttgccgaacgtttg

SEQ ID NO: 815569 - DNA, 75 bp, synthetic construct
  source 1..75: mol_type = other DNA
aatcagtggcacaaagttcaataaaaatatacctgacacattatacgaagaagattttatggttttttctgttga

SEQ ID NO: 815570 - DNA, 75 bp, synthetic construct
  source 1..75: mol_type = other DNA
gctgaagcccgtcagcttggcgttgcaacggtaattgccggaggtggagatggcactattaatgaagtctccacg

SEQ ID NO: 815571 - DNA, 75 bp, synthetic construct
  source 1..75: mol_type = other DNA
tcttgatggcgaaccgttgagtgggcaaaattttcatattgaaatacttccggcagcgttgcgttgccgtctgcc

SEQ ID NO: 815572 - DNA, 75 bp, synthetic construct
  source 1..75: mol_type = other DNA
ctctcgtatcaaccttaaaatctgacgaagataacccgaatattatcgaaggtgcttcgtcgtggtttgatatac

SEQ ID NO: 815573 - DNA, 75 bp, synthetic construct
  source 1..75: mol_type = other DNA
tagaaataggtaacgccagaggagacagtatggctcccacaatctcacctggcgaccttctttttcttgataaga

SEQ ID NO: 815574 - DNA, 75 bp, synthetic construct
  source 1..75: mol_type = other DNA
tgttaaacgtttgagttatgttaagtcagttcatctatgtgaaataaaccctgtggagtatatgtataaaaatga

SEQ ID NO: 815575 - DNA, 75 bp, synthetic construct
  source 1..75: mol_type = other DNA
atatagagtctaaggttattagtataaattttgatttcaatcatttagctggctatttaagtcgtgatgagcgag

SEQ ID NO: 815576 - DNA, 75 bp, synthetic construct
  source 1..75: mol_type = other DNA
cgtcaatggtgtatttcctgcgtgatgcggttgatgccggagttctcactgaatgcaacggattttatgacgttc

SEQ ID NO: 815577 - DNA, 75 bp, synthetic construct
  source 1..75: mol_type = other DNA
ggaaggtaataccatccccgcgctggcaaaagagtttgcgacgggcgtgctgacctgtgagtcagttcacattgt

SEQ ID NO: 815578 - DNA, 75 bp, synthetic construct
  source 1..75: mol_type = other DNA
ggctggaatatcaccgaccacgtcatgcgctatctcattcttgattattcaccagctccggcagcaacacaggaa

SEQ ID NO: 815579 - DNA, 75 bp, synthetic construct
  source 1..75: mol_type = other DNA
atgaaaaacttaaagagcactgaaaatcgaattacaaagctgctacaggagaaaggctggagccaagcagagctg

SEQ ID NO: 815580 - DNA, 75 bp, synthetic construct
  source 1..75: mol_type = other DNA
accgctggccagcaggtcaaacggatgttccacaatcacttccattggtgaatgctgagaaatctatctcagaag

SEQ ID NO: 815581 - DNA, 75 bp, synthetic construct
  source 1..75: mol_type = other DNA
cctccatggtttattttttgcgtgatgcggttgatgcaggcgtgctgacggaatgtaacggtttttatgatattc

SEQ ID NO: 815582 - DNA, 75 bp, synthetic construct
  source 1..75: mol_type = other DNA
gcccgtaagctgggtgtaagcgcacaatcagtacaatactggactacaggaaagacgtttcccagaagcgataaa

SEQ ID NO: 815583 - DNA, 75 bp, synthetic construct
  source 1..75: mol_type = other DNA
tcgcgggtatcgcgtttgcgaacgccttcctgggggtatgtcactcaatggcgcacaaactgggttcccagttcc

SEQ ID NO: 815584 - DNA, 75 bp, synthetic construct
  source 1..75: mol_type = other DNA
agcagactgcattcagccagtacgatcgtccgcaggctcgtcgtcgttatgctgaaatcgcagaccatctgggtc

SEQ ID NO: 815585 - DNA, 75 bp, synthetic construct
  source 1..75: mol_type = other DNA
ctatctacttccgccgtggctccctgccaatcgcgctggatgaagtgattactgatggtcacaaacgtgcgctca

SEQ ID NO: 815586 - DNA, 75 bp, synthetic construct
  source 1..75: mol_type = other DNA
tcgaaaaacaataattgactatatgttccgttattgggagcgagttacccaaaaacacccttttcttggcaatta

SEQ ID NO: 815587 - DNA, 75 bp, synthetic construct
  source 1..75: mol_type = other DNA
agagcccacatcctcccttcaaaaattcccgcccacgtttctgaaaccgtttgtggctggtgtctgtgcggcatt

SEQ ID NO: 815588 - DNA, 75 bp, synthetic construct
  source 1..75: mol_type = other DNA
attacccctcatgccgcttcatttaccgatgaggccgaccataacacaatgcaaatttctattaaaaacgtatta

SEQ ID NO: 815589 - DNA, 75 bp, synthetic construct
  source 1..75: mol_type = other DNA
acccagacatcaacctgatcctcgcgactggtggtccgggcatggttaaagccgcatacagctccggtaaaccag

SEQ ID NO: 815590 - DNA, 75 bp, synthetic construct
  source 1..75: mol_type = other DNA
atcaaccgcgtttgtggaatccacgatcaatgaagtgatcgccagacgaatggccaaaaagcagcagatgcagtg

SEQ ID NO: 815591 - DNA, 75 bp, synthetic construct
  source 1..75: mol_type = other DNA
tggagcatcgaaaaagagggaatgccgctgttatatatccagtcaaaagtcatctcatcggtaccattcaatatc

SEQ ID NO: 815592 - DNA, 75 bp, synthetic construct
  source 1..75: mol_type = other DNA
gtatcggtcacacctcttgcctgtacacagaccaggacaaccagccagagcgtgttgcttacttcggtcagatga

SEQ ID NO: 815593 - DNA, 75 bp, synthetic construct
  source 1..75: mol_type = other DNA
tggctggatcgatcaaccttctgttgaactgtccaacgcgctgatgcaccatcctgatattaacctgatcctcgc

SEQ ID NO: 815594 - DNA, 75 bp, synthetic construct
  source 1..75: mol_type = other DNA
gataaccaaccggcacgcgtttcttacttcggtcagaaaatgaaaactgcccgtatcctgatcaacaccccggcg

SEQ ID NO: 815595 - DNA, 75 bp, synthetic construct
  source 1..75: mol_type = other DNA
tggaatatcaccgaccatgtggtgcgttatctcattcttgattattcaccggttccggcgacaacacaggaagtc

SEQ ID NO: 815596 - DNA, 75 bp, synthetic construct
  source 1..75: mol_type = other DNA
tacacggcgtatttgccgatgactcgcaggtgcttgatttccaacataagccgcaattcacgccgaatctgcaat

SEQ ID NO: 815597 - DNA, 75 bp, synthetic construct
  source 1..75: mol_type = other DNA
tttctggcaggcattgcaccgccgcgatgttcaggttcctgatcttcattctctgcgaggtaatgcccatgcgta

SEQ ID NO: 815598 - DNA, 75 bp, synthetic construct
  source 1..75: mol_type = other DNA
ctgtctatgtgggcacatatcacaaatacaactgcggcagtatctacggcaaatggtttgatctgacggagtttg

SEQ ID NO: 815599 - DNA, 75 bp, synthetic construct
  source 1..75: mol_type = other DNA
ggcgtcggcgcgcaactgccgctcacagctgcggttatggagatgatgcaggcactgcgtgcagatggtttagga

SEQ ID NO: 815600 - DNA, 75 bp, synthetic construct
  source 1..75: mol_type = other DNA
atgaattcatccatcaccactccggccatctacgtgggcacgtatcaccagtacaactgcggcagtatttttggc

SEQ ID NO: 815601 - DNA, 75 bp, synthetic construct
  source 1..75: mol_type = other DNA
gccggaacgcgctttgcaaggcaaagtggtgctgccgctggcgacgggcggcacggtggctcatctgctggcggt

SEQ ID NO: 815602 - DNA, 75 bp, synthetic construct
  source 1..75: mol_type = other DNA
atgtctggatttaaatttagtaagatctgtaaagccgtatgtttatatgcagcggtgtccatgcctgctttttcc

SEQ ID NO: 815603 - DNA, 75 bp, synthetic construct
  source 1..75: mol_type = other DNA
atagacaaaaacagaaaacgtgcagatgcaggtattgctggtgcgatggcaatgacggggataccgtccgtaccc

SEQ ID NO: 815604 - DNA, 75 bp, synthetic construct
  source 1..75: mol_type = other DNA
tgaaaagtttctgaaagggtatcgtatctactcttctggattctcttatgacaaagtaatggatcaactgcgtgc

SEQ ID NO: 815605 - DNA, 75 bp, synthetic construct
  source 1..75: mol_type = other DNA
tactattctgttgcagtcaatgcaggttattacgtaacacctaacgcaaaagtttatgttgaaggcgcatggaat

SEQ ID NO: 815606 - DNA, 75 bp, synthetic construct
  source 1..75: mol_type = other DNA
ggagtgaaggtgctgttgctgccggcttccattttaatacaagtgaaaacagtgctgttaaagtgaatgcagcct

SEQ ID NO: 815607 - DNA, 75 bp, synthetic construct
  source 1..75: mol_type = other DNA
gataaaattttaaaaagaacactgtatgataaaaatgatgggaacataaatgctgataaatggtatgaattccat

SEQ ID NO: 815608 - DNA, 75 bp, synthetic construct
  source 1..75: mol_type = other DNA
gccggaagcagcagaaccggaaatcagcgaggcgctttatacacgttcgctgggtaatgcccgccgcctgttcaa

SEQ ID NO: 815609 - DNA, 75 bp, synthetic construct
  source 1..75: mol_type = other DNA
tgttgcgggaaagaaagctgatctgattatcagctcagcactgttacggcgggttatggcggtgaaaatgtcgga

SEQ ID NO: 815610 - DNA, 75 bp, synthetic construct
  source 1..75: mol_type = other DNA
gtgaagggcgtgttgtgatggatggtccgcgggacgaaatactgaaaagactgtccggaaaacaggaggccggtg

SEQ ID NO: 815611 - DNA, 75 bp, synthetic construct
  source 1..75: mol_type = other DNA
ccgggattgattttcgttctgttggcgagtttcttcgtagtgaaggatttgataatcatctttcccggcggtctc

SEQ ID NO: 815612 - DNA, 75 bp, synthetic construct
  source 1..75: mol_type = other DNA
cattgggtaataactggggtgtaactgcttcaaactatcctgtttccggtatgcaaagcaaaggatctatggaga

SEQ ID NO: 815613 - DNA, 75 bp, synthetic construct
  source 1..75: mol_type = other DNA
ttaaactatcgaaaagatattctaacaatatgtgccgataagttagctgtacgagattatatatcttctacgata

SEQ ID NO: 815614 - DNA, 75 bp, synthetic construct
  source 1..75: mol_type = other DNA
acacccatatttctgaaccgggtcgcagccactggaaggttatgaaaccggtactcgcgcagcagcaaaaggtgg

SEQ ID NO: 815615 - DNA, 75 bp, synthetic construct
  source 1..75: mol_type = other DNA
gataatcatctttccagacgggctctggaggatattccttcacttgcggttccagtgcttcttttactgaatgct

SEQ ID NO: 815616 - DNA, 75 bp, synthetic construct
  source 1..75: mol_type = other DNA
cggatttgtgatatcagcgatgcgccggtcagtgtgcaggccattgataaattcgcagaaatgttaattcactga

SEQ ID NO: 815617 - DNA, 75 bp, synthetic construct
  source 1..75: mol_type = other DNA
ccgcttggtcagatagcatcactggccactcgttttcagcaggcccgtctggctatgcagggggtgaatgaaatt

SEQ ID NO: 815618 - DNA, 75 bp, synthetic construct
  source 1..75: mol_type = other DNA
cggaagatatcccgtcacttgcggttccggcgcttcttttattgaacgctcaggaagctattgtggtagtgcgta

SEQ ID NO: 815619 - DNA, 75 bp, synthetic construct
  source 1..75: mol_type = other DNA
agggcatattacggacaggtcattgttgcgagttttatcattaactttcttgcactggtcagctccctctatgta

SEQ ID NO: 815620 - DNA, 75 bp, synthetic construct
  source 1..75: mol_type = other DNA
tttcttctggaacagaatccccggctttttctgggaactctgcgtgaaaatctgcagctttcgcgtctgccggga

SEQ ID NO: 815621 - DNA, 75 bp, synthetic construct
  source 1..75: mol_type = other DNA
cgtggtgtggatgcagggggaatttgattttggcggtacgcctgtaaatcacgcagcacagtttggtgcgctggt

SEQ ID NO: 815622 - DNA, 75 bp, synthetic construct
  source 1..75: mol_type = other DNA
tttgccggaggggccggattcaaaggttcacgagaaaattaccagaactgtaagaactatgcgcatgaaggcctg

SEQ ID NO: 815623 - DNA, 75 bp, synthetic construct
  source 1..75: mol_type = other DNA
agaactcaattctttgaattgacaggcattccggcaagcacccaaaaacagtacgaaacaggtagaagggatgga

SEQ ID NO: 815624 - DNA, 75 bp, synthetic construct
  source 1..75: mol_type = other DNA
gacagccccgcaagctggtcagatagcaccggctttcgcacacattgggcaagaatcaacagaatcagaccactc

SEQ ID NO: 815625 - DNA, 75 bp, synthetic construct
  source 1..75: mol_type = other DNA
atctttggcataacgggaaatgggataaatcgggtgaattatcgcaaggtcgggcctacggagtatcattgccct

SEQ ID NO: 815626 - DNA, 75 bp, synthetic construct
  source 1..75: mol_type = other DNA
tacgcggtggacgtgaagttcgtgttcgcatggaaggtcagcttttactgaatacgatagatctgatcattgatg

SEQ ID NO: 815627 - DNA, 75 bp, synthetic construct
  source 1..75: mol_type = other DNA
tctttggcataacgggaaatgggataaatcgggtgaattatcgcaaggtcgggcctacggagtatcattgccctg

SEQ ID NO: 815628 - DNA, 75 bp, synthetic construct
  source 1..75: mol_type = other DNA
tctcaatatgggaaaaaccgaccgcagcgccaacccttcgccgggcaacgagaacggcgggctcgcaaacgtggt

SEQ ID NO: 815629 - DNA, 75 bp, synthetic construct
  source 1..75: mol_type = other DNA
tctcaatatgggaaaaaccgaccgcagcgccaacccttcgccgggcaacgacaatggcggtctcgcaaacgtggt

SEQ ID NO: 815630 - DNA, 75 bp, synthetic construct
  source 1..75: mol_type = other DNA
tctcaatatgggaaaaaccgaccgcagcgccaacccttcgccgggcaacgaaaagggcggactcgcaaacgtggt

SEQ ID NO: 815631 - DNA, 75 bp, synthetic construct
  source 1..75: mol_type = other DNA
gataccttttaaaatcctgttattcattcttgttgggggctggcaaaaattatttgaatttctgttggtggtaaa

SEQ ID NO: 815632 - DNA, 75 bp, synthetic construct
  source 1..75: mol_type = other DNA
attttttcttttatcattactgcctatatttgttgttattggtacttcattcctgaaaatttcgattgtattggg

SEQ ID NO: 815633 - DNA, 75 bp, synthetic construct
  source 1..75: mol_type = other DNA
aagaagaaaactttctcggatcaatggggactgcataaccagctggcggtgtttaacccggcaccggtgacctga

SEQ ID NO: 815634 - DNA, 75 bp, synthetic construct
  source 1..75: mol_type = other DNA
actgcaggcggcaaagcggtgacggattcagttttgatctctgtgaaggataataaagtcacagtacaaaactaa

SEQ ID NO: 815635 - DNA, 75 bp, synthetic construct
  source 1..75: mol_type = other DNA
cggtgtttgttagcgtggtcgatccgggcgtaggcactgaccgtaaatcggtagtgctgaaaaccaaaaacggtc

SEQ ID NO: 815636 - DNA, 75 bp, synthetic construct
  source 1..75: mol_type = other DNA
cgtacagtggcagcatgaaagcctgaaaccggtactggagccaacctacggcatcatcctgtatcaggaacaggt

SEQ ID NO: 815637 - DNA, 75 bp, synthetic construct
  source 1..75: mol_type = other DNA
ttcgtcgccagctcgtcaacgtcaccggcgtgttgctcgcttcattcatcgtcattccagccctggcagcgcaag

SEQ ID NO: 815638 - DNA, 75 bp, synthetic construct
  source 1..75: mol_type = other DNA
cggtgctttccgttaccgaaggtgaagacaaaccgctgaaatatccgcatatgtttgccgcagcttcgctgatgc

SEQ ID NO: 815639 - DNA, 75 bp, synthetic construct
  source 1..75: mol_type = other DNA
aggtgttggtacagaccgtaaatcggtagtgctgaaaaccaaaaacggtcagtacttcgtttcaccagataacgg

SEQ ID NO: 815640 - DNA, 75 bp, synthetic construct
  source 1..75: mol_type = other DNA
atagcgtccgggaaatcgacgaaaaagctaaccgcctgaaaggttctgaaaagtcatataccttccacggtcgtg

SEQ ID NO: 815641 - DNA, 75 bp, synthetic construct
  source 1..75: mol_type = other DNA
taattatgaattgctgtttcttgaatcgctgaagttggtcgttcgtcccaatcacccactgcttcaagagaacgt

SEQ ID NO: 815642 - DNA, 75 bp, synthetic construct
  source 1..75: mol_type = other DNA
acacatgcagtcagagttcttgacgctattaacactgccggacagtcgcttcatcgtaaagaaggtcttaacaat

SEQ ID NO: 815643 - DNA, 75 bp, synthetic construct
  source 1..75: mol_type = other DNA
gatgtcgtcagggttggtgcactacctactgcggcactggggatattaccttcggttataggtcagtttcatcag

SEQ ID NO: 815644 - DNA, 75 bp, synthetic construct
  source 1..75: mol_type = other DNA
gtcctgtacggttcgattaccaagaaaccaaccattccaattatgcttgtttcggcactggtagccatgatcaac

SEQ ID NO: 815645 - DNA, 75 bp, synthetic construct
  source 1..75: mol_type = other DNA
gaaaacttgccgcaggcggggcaatcgcggcagttaatctgcgtgccgattattggcggaccgtccggtaaactc

SEQ ID NO: 815646 - DNA, 75 bp, synthetic construct
  source 1..75: mol_type = other DNA
gcaactgaagcaaaagtttggcctgaaagacgttgtggtggtgtcaggaaatgatgaggatgaagatactcaact

SEQ ID NO: 815647 - DNA, 75 bp, synthetic construct
  source 1..75: mol_type = other DNA
aagtgcgattgttgaagtgctgtcaccgggtcaacgtccgaccaaacgtggattaatttacgcggccacacctgc

SEQ ID NO: 815648 - DNA, 75 bp, synthetic construct
  source 1..75: mol_type = other DNA
atgatgaatgacggtaagcaacaatctacctttttgtttcacgattacgaaacctttggaacgcaccccgcgtta

SEQ ID NO: 815649 - DNA, 75 bp, synthetic construct
  source 1..75: mol_type = other DNA
gcgaagagaaaagtttcaccgacaatttcagcgttaacccgctgcaactgcccggcgagcgcacgattctgtgta

SEQ ID NO: 815650 - DNA, 75 bp, synthetic construct
  source 1..75: mol_type = other DNA
tgttacccgagccttagttatcagcgaccgggctttagcgatatcgagaaaaaagcgactgataacattaaccac

SEQ ID NO: 815651 - DNA, 75 bp, synthetic construct
  source 1..75: mol_type = other DNA
ctgtcaaaagaaggatttgcgatgtatatcggaaagaccgttgatgccatcgtaagcatggcaaaagcaggaaag

SEQ ID NO: 815652 - DNA, 75 bp, synthetic construct
  source 1..75: mol_type = other DNA
atgcaagaagtcactcaaaacgcgcctgaatcgcctgccgaaacacagtgcgatcagttgacagatgcgccagaa

SEQ ID NO: 815653 - DNA, 75 bp, synthetic construct
  source 1..75: mol_type = other DNA
atgacagacacagataaacaacctaccttcctctttcacgattacgaaacctttggcacgcaccccgcgttagat

SEQ ID NO: 815654 - DNA, 75 bp, synthetic construct
  source 1..75: mol_type = other DNA
cgcttacaacagatccgtgaagaactggctttgctgcatattccgcctgagaagatcacccgccttgccgcctgc

SEQ ID NO: 815655 - DNA, 75 bp, synthetic construct
  source 1..75: mol_type = other DNA
ctggtcatccttgacgactcgccgcaaagccatcaacacatcatcgaccgcctgaccaatggcacgccggaagcc

SEQ ID NO: 815656 - DNA, 75 bp, synthetic construct
  source 1..75: mol_type = other DNA
ggcgacgctaaaaagcatcgacgatccgcagctcaaaggaatgcgcttatctgaaatgcaggcacacggtcagcg

SEQ ID NO: 815657 - DNA, 75 bp, synthetic construct
  source 1..75: mol_type = other DNA
aggaacaatgctaaaaagcctgccggggctggtgcacgcgcaggactgccgcaaagtgtgcgcttatctggtgaa

SEQ ID NO: 815658 - DNA, 75 bp, synthetic construct
  source 1..75: mol_type = other DNA
tggcgcattaagctccctgccccactgggcagaaaaattgggccgcttaagcggtgatgtgaacctgatttgcaa

SEQ ID NO: 815659 - DNA, 75 bp, synthetic construct
  source 1..75: mol_type = other DNA
gttaccagcgaccgggctttagtgatatcgagcaaaaagtgactgataatattagtcactttttcaataaattgc

SEQ ID NO: 815660 - DNA, 75 bp, synthetic construct
  source 1..75: mol_type = other DNA
agtcgaagaagctccatcagaatggcacgactggaaaaatcgcattagttacagcaaatcaagacatggccgtgc

SEQ ID NO: 815661 - DNA, 75 bp, synthetic construct
  source 1..75: mol_type = other DNA
tggtcataatagtggcgatctgtttctcattcaggttggcgagcgccttaatacgctccagcaaaatggcgaagt

SEQ ID NO: 815662 - DNA, 75 bp, synthetic construct
  source 1..75: mol_type = other DNA
ttagcggcgcgtttgtggaaatgaactgcgccaccctgcgtggcgataccgccatgtcgacgctgtttggtcatg

SEQ ID NO: 815663 - DNA, 75 bp, synthetic construct
  source 1..75: mol_type = other DNA
acgctgccactggcaaccaaagtcccggcccccttaccgccgctggaaggatacacctttgagggctatcgcaat

SEQ ID NO: 815664 - DNA, 75 bp, synthetic construct
  source 1..75: mol_type = other DNA
ttacgttttggatataggtaagcgaataccactttccgcagcagatttaagcaacgtatacgaaagtgtaatacg

SEQ ID NO: 815665 - DNA, 75 bp, synthetic construct
  source 1..75: mol_type = other DNA
ttcacgccgcatccggcacctgagcaccattgcctgctgttaaaaatcggtgtggggcgggcgcaggccccactt

SEQ ID NO: 815666 - DNA, 75 bp, synthetic construct
  source 1..75: mol_type = other DNA
tatcaggcctacaaggttgtgcaatacactgaattcacatcatttggtaggccggataaggcgttcacgccgcat

SEQ ID NO: 815667 - DNA, 75 bp, synthetic construct
  source 1..75: mol_type = other DNA
gcgtcatcatcacttcagtcaacaggcgctgatggctgaacgcgttgcctttgtggtacgtaaaatgacggtgga

SEQ ID NO: 815668 - DNA, 75 bp, synthetic construct
  source 1..75: mol_type = other DNA
cacgcaacgtattgtcaacgccgagaatactctgctgaatgaagctgaggttctgattgtttgcgttgacccact

SEQ ID NO: 815669 - DNA, 75 bp, synthetic construct
  source 1..75: mol_type = other DNA
ggcaacgcacgacatcaacctgattgcacggcgttcctatcgcatgctgaccttgagcgatggtcacttgcatgg

SEQ ID NO: 815670 - DNA, 75 bp, synthetic construct
  source 1..75: mol_type = other DNA
cgacggcagcgtgggcaccaaaaacctgttgggtattaccaccagcgtgcactgcatggcagacgttgaggacta

SEQ ID NO: 815671 - DNA, 75 bp, synthetic construct
  source 1..75: mol_type = other DNA
tgagcggcagaaatatttattcgagttatcgcgtaagggtgatgccgcaagtattgctaaatttattcgtgaggc

SEQ ID NO: 815672 - DNA, 75 bp, synthetic construct
  source 1..75: mol_type = other DNA
cacgcaacgtattgtcaacgctgagaatactctgctgaatgaagccgaggttctgattgtttgcgttgacccact

SEQ ID NO: 815673 - DNA, 75 bp, synthetic construct
  source 1..75: mol_type = other DNA
atgcgtaaaacagtggcttttggctttgtcggaaccgtactggattatgccgggcgtggcagccaacgctggtcg

SEQ ID NO: 815674 - DNA, 75 bp, synthetic construct
  source 1..75: mol_type = other DNA
gactggaaatatcatcatcccggtgatatccgtgaaggaaagatgcttacggttaacgaaaccggattcgctccg

SEQ ID NO: 815675 - DNA, 75 bp, synthetic construct
  source 1..75: mol_type = other DNA
gagtatggcagtgagttcgggggctttttccccgtccaggttcgtttcacgcctgcccacgaacgtttccacctg

SEQ ID NO: 815676 - DNA, 75 bp, synthetic construct
  source 1..75: mol_type = other DNA
aaccttttacccgtttggcagcgatcgccaggtgagcagtgattttcagcttatcgccggaacggtgcgcgattt

SEQ ID NO: 815677 - DNA, 75 bp, synthetic construct
  source 1..75: mol_type = other DNA
gcgcaaaaaagagcggcccgatagccctggcgcagtgacgattatcgatctcgatttaagccgttataacgccat

SEQ ID NO: 815678 - DNA, 75 bp, synthetic construct
  source 1..75: mol_type = other DNA
caggactgcgccagcgtcaggaggatatcgagcctaatctggattatgaagtggagcgccacgcctcactcaccg

SEQ ID NO: 815679 - DNA, 75 bp, synthetic construct
  source 1..75: mol_type = other DNA
gccttaccgtgttgttatcaggctgcggtgaaaaaggtgattttgagaaagctatcaatgcgaagatttcacatt

SEQ ID NO: 815680 - DNA, 75 bp, synthetic construct
  source 1..75: mol_type = other DNA
tgaaggtaaacaagccaaaatctgggatgccaaagaaggtgtttgtattggtcgccaagttgttgatgaagtcaa

SEQ ID NO: 815681 - DNA, 75 bp, synthetic construct
  source 1..75: mol_type = other DNA
aataacaacaccaagacagaactagcccaaaagacttatataaacatgaccgagagggccaaaaaaaggcaaaaa

SEQ ID NO: 815682 - DNA, 75 bp, synthetic construct
  source 1..75: mol_type = other DNA
ttttccccgtccaggtgcgtttcagcccgttccatgagcgttttcatattgtcgtatgcagccccggtgaggcca

SEQ ID NO: 815683 - DNA, 75 bp, synthetic construct
  source 1..75: mol_type = other DNA
actgatgcgatggggtgccagaaagatattgcagagaagatataaaaacagggcggtgattatttattcgctgta

SEQ ID NO: 815684 - DNA, 75 bp, synthetic construct
  source 1..75: mol_type = other DNA
tgatgaaatccttaaaggacttgctgaacaagggttgctcactgtttcacaacaggcaaatggctttagcagtgt

SEQ ID NO: 815685 - DNA, 75 bp, synthetic construct
  source 1..75: mol_type = other DNA
tgtgaacctgttcggcggcagtaaattcaatgataaaacggaaacctattcggcgtttggtgaactgacctgggc

SEQ ID NO: 815686 - DNA, 75 bp, synthetic construct
  source 1..75: mol_type = other DNA
attggtggcgtcagcgaaccgattgaatttctgttcttatttgtcagtccactgctgtttgtcttccatgccttt

SEQ ID NO: 815687 - DNA, 75 bp, synthetic construct
  source 1..75: mol_type = other DNA
ttattagtcgccagtatgtataaaaagatcgttaacttacgtattcctgaatcattaggattttatagtggccca

SEQ ID NO: 815688 - DNA, 75 bp, synthetic construct
  source 1..75: mol_type = other DNA
cgaacttttatcttaaacaacatgacttattggtcgctgctgatcaaatgtcgacacatgggcaaaccattattc

SEQ ID NO: 815689 - DNA, 75 bp, synthetic construct
  source 1..75: mol_type = other DNA
taccgacaagtaagtgaactggcagcaacccgacaattgagcggcaggccatcgccaccaacaattctcagatgg

SEQ ID NO: 815690 - DNA, 75 bp, synthetic construct
  source 1..75: mol_type = other DNA
atcgccaccaacaattctcagatggattggaagcaaaacttctccccactcatatcagacactactgatgctcaa

SEQ ID NO: 815691 - DNA, 75 bp, synthetic construct
  source 1..75: mol_type = other DNA
gcagttttatccgcaatattgtgtcaaatagtctggattatcagatagtggcatcgatttgccacctggcgcgaa

SEQ ID NO: 815692 - DNA, 75 bp, synthetic construct
  source 1..75: mol_type = other DNA
gcggttgatgcattgtaccggttcaggtcagataaactgtgtgctgatatagcaagtgatgtcctgttaggcctg

SEQ ID NO: 815693 - DNA, 75 bp, synthetic construct
  source 1..75: mol_type = other DNA
tctggcaagggcagcctttgcatcaggtacgcgacagctaccatcaaaacctgttatggataggccatcagccgg

SEQ ID NO: 815694 - DNA, 75 bp, synthetic construct
  source 1..75: mol_type = other DNA
tgttatgggtggattctctgtatccggcgttaattgttaactggttaacgtcacctggaggcaccaggcactgca

SEQ ID NO: 815695 - DNA, 75 bp, synthetic construct
  source 1..75: mol_type = other DNA
caacattctgaattaaaacaacttgtgatttcttgcatagagggatgttgtgatgctgagttgaaaattgaggct

SEQ ID NO: 815696 - DNA, 75 bp, synthetic construct
  source 1..75: mol_type = other DNA
tggcggggtgtgatagtcatcgggttccggccaggaaagtcagtagtgtcagtccggataataatataaagccag

SEQ ID NO: 815697 - DNA, 75 bp, synthetic construct
  source 1..75: mol_type = other DNA
aaaatggaacgatgccgacgggaacttgaggcacttaaaagaattgatatcaggatatacaaccagagaaaagta

SEQ ID NO: 815698 - DNA, 75 bp, synthetic construct
  source 1..75: mol_type = other DNA
gatgaggttattcataggcttattggaacaacacgaaggggaaagattgttaaaggagagccaacaccgcaatcc

SEQ ID NO: 815699 - DNA, 75 bp, synthetic construct
  source 1..75: mol_type = other DNA
aagcgaaagttccgttctttactatctccggttctgacttcgtagaaatgttcgtcggtgtgggtgcatcccgtg

SEQ ID NO: 815700 - DNA, 75 bp, synthetic construct
  source 1..75: mol_type = other DNA
agatggatggcttcgaaggtaacgaagggatcatcgttatcgccgcgactaaccgtccggacgttctcgacccgg

SEQ ID NO: 815701 - DNA, 75 bp, synthetic construct
  source 1..75: mol_type = other DNA
gcgcatgttgacggaagatcagatcaaaacgacctttgctgacgttgcgggctgcgacgaagcaaaagaagaagt

SEQ ID NO: 815702 - DNA, 75 bp, synthetic construct
  source 1..75: mol_type = other DNA
cagcaaaccctcgatttcctcaaatccggcattgccacgcgtaacccccacttcaaccgcatgattgagcagatc

SEQ ID NO: 815703 - DNA, 75 bp, synthetic construct
  source 1..75: mol_type = other DNA
acagcgtgcgttttaacaccgaagcgcggcgcgcctggctggcctttgcgacatctccccaggcaacatggcgcg

SEQ ID NO: 815704 - DNA, 75 bp, synthetic construct
  source 1..75: mol_type = other DNA
gtcagaaactggaaagccagatttctacgctgtacggtggtcgtctggcagaagagatcatctacgggccggaac

SEQ ID NO: 815705 - DNA, 75 bp, synthetic construct
  source 1..75: mol_type = other DNA
agtggggcttctctgagaaattgggtccactgctgtacgcggaagaagaaggtgaagtgttcctcggccgtagcg

SEQ ID NO: 815706 - DNA, 75 bp, synthetic construct
  source 1..75: mol_type = other DNA
tgctgaccaagaacgtcaaggttgtcggtgaaccgcctgaagagccaagcctgttggcttctatcttcatttcat

SEQ ID NO: 815707 - DNA, 75 bp, synthetic construct
  source 1..75: mol_type = other DNA
ggtgttctttgatggtatcaccgccggggaaaaagatttctcaacgctggtggcgcgtctgaaaaaagagaatat

SEQ ID NO: 815708 - DNA, 75 bp, synthetic construct
  source 1..75: mol_type = other DNA
cgaagcgggtcacgcgattatcggtcgcctggtgccggaacacgatccggtgcacaaagtaacgattatcccgcg

SEQ ID NO: 815709 - DNA, 75 bp, synthetic construct
  source 1..75: mol_type = other DNA
cgctgctgcgtcctggccgtttcgaccgtcaggttgtggttggcttgccagatgttcgcggtcgtgaacagatcc

SEQ ID NO: 815710 - DNA, 75 bp, synthetic construct
  source 1..75: mol_type = other DNA
ccgtcaggttgtggttggcttgccagatgttcgtggtcgtgagcagatcctgaaagttcacatgcgtcgcgtacc

SEQ ID NO: 815711 - DNA, 75 bp, synthetic construct
  source 1..75: mol_type = other DNA
cgcggcatcagtttagcggcgcgtttgtggaagtgaactgcgccaccctgcgtggcgataccgccatgtcgacgc

SEQ ID NO: 815712 - DNA, 75 bp, synthetic construct
  source 1..75: mol_type = other DNA
atgaaggtctggttcgtgaagatctgactgcactggattttgtcaccatcgacagtgccagcacggaagatatgg

SEQ ID NO: 815713 - DNA, 75 bp, synthetic construct
  source 1..75: mol_type = other DNA
gaaatcactgtccaaatggccgagcgtcgccgtctcaaccggatggcagaacgtgatgttggtgactggttatac

SEQ ID NO: 815714 - DNA, 75 bp, synthetic construct
  source 1..75: mol_type = other DNA
ttgccaaccgtatcgtcgaagaagcgatgattgccgctaacatttgtgcggcccgcgtactgcgcgataagctcg

SEQ ID NO: 815715 - DNA, 75 bp, synthetic construct
  source 1..75: mol_type = other DNA
gcgagccgcccgacaagcgttagcaaattgctttatgccaaaaaaagaatattgtagattatttggaatctctat

SEQ ID NO: 815716 - DNA, 75 bp, synthetic construct
  source 1..75: mol_type = other DNA
gatgtacatcttatttcgagtttaaacagacgaaaagtcattgggcgtcctactatttatacagtggtggatcgt

SEQ ID NO: 815717 - DNA, 75 bp, synthetic construct
  source 1..75: mol_type = other DNA
tatatcatgcacatgctctatcaccgccagccccggaaagtcatccaggcactggctggtcacagggatccacgt

SEQ ID NO: 815718 - DNA, 75 bp, synthetic construct
  source 1..75: mol_type = other DNA
cgtactgacgcaaactatggttaccagtgctgatgaaggcggcctgcacactaaagacggcgaatatattgaggc

SEQ ID NO: 815719 - DNA, 75 bp, synthetic construct
  source 1..75: mol_type = other DNA
ccacagccacctgtggaaaccgttgctgcatgaagtagcgactggctcgctcgatgaaggcgttgatgcgctgag

SEQ ID NO: 815720 - DNA, 75 bp, synthetic construct
  source 1..75: mol_type = other DNA
agctggttgccgaaggcaaattccgcgaagatctgtacgcgcggatcaatctctggaccttcaccctgccggggc

SEQ ID NO: 815721 - DNA, 75 bp, synthetic construct
  source 1..75: mol_type = other DNA
gtgaatatcgccagcgatctgcgcaaagcgtttatcaccgcagtcggcaaagcgtatgtgaataatcacaacgag

SEQ ID NO: 815722 - DNA, 75 bp, synthetic construct
  source 1..75: mol_type = other DNA
ttttaaacgctattgagcgttcgggattacccaacttcattcagattgcgcccaccaatgcacaactgtcgggat

SEQ ID NO: 815723 - DNA, 75 bp, synthetic construct
  source 1..75: mol_type = other DNA
tttgttccgccgcgtgctcaggctgcacaccagatggcgacctgcgcaatgaacaacattctggcgcagatgaac

SEQ ID NO: 815724 - DNA, 75 bp, synthetic construct
  source 1..75: mol_type = other DNA
cggatgagaagccgtcacctgatacaccatcaaaaccgtccacaccaccggctgacacaacgacaatgagcacgt

SEQ ID NO: 815725 - DNA, 75 bp, synthetic construct
  source 1..75: mol_type = other DNA
ttcagtgaggtcagcggtgcttccgctgattcttcacgctggggagccggtaaacccctgtatcaggacctgctc

SEQ ID NO: 815726 - DNA, 75 bp, synthetic construct
  source 1..75: mol_type = other DNA
ttccgtacaaaagcggcgctgtcgaagaacccgaaaaacaggcttctggccgtggtatggatgcagggggaaaat

SEQ ID NO: 815727 - DNA, 75 bp, synthetic construct
  source 1..75: mol_type = other DNA
tgcggcagacaagttgcgcgtgaccgatattaccagtgcagcaacgtatccggtgctgattgacagcatagtggt

SEQ ID NO: 815728 - DNA, 75 bp, synthetic construct
  source 1..75: mol_type = other DNA
agggacagtatggttgtgtcagtcaggggctgcatattgccaaaaaactgctgccgtatatcccgcagaatgccg

SEQ ID NO: 815729 - DNA, 75 bp, synthetic construct
  source 1..75: mol_type = other DNA
aaggaaacaggtaaatcctcctggtaccttgagcatgatgccggtaatggtgcagacctgctgggtaaaggtggt

SEQ ID NO: 815730 - DNA, 75 bp, synthetic construct
  source 1..75: mol_type = other DNA
taaagtttccggtggtacagcggcatttcttgaggctccctttcctccggccgaaacaaaaggaggaatgacatt

SEQ ID NO: 815731 - DNA, 75 bp, synthetic construct
  source 1..75: mol_type = other DNA
cccggacattccgggtatcggatattacggttcgaaatggcgtgacagctcagtcacctggacgtcacaggacag

SEQ ID NO: 815732 - DNA, 75 bp, synthetic construct
  source 1..75: mol_type = other DNA
gaattgcggctaaccagtatgtcatggcgatgtactggccggtttcagccctgccgcagggtgtcaccctgacag

SEQ ID NO: 815733 - DNA, 75 bp, synthetic construct
  source 1..75: mol_type = other DNA
tttctgccctgccgcagggtgtcactctggagggtaatgcagggcataatctgctggcggcattctatgttcaga

SEQ ID NO: 815734 - DNA, 75 bp, synthetic construct
  source 1..75: mol_type = other DNA
tctgaagatacatccgtccgtacaatctccctgctgccgacagccggagaggctgctgcgcagggctggagcatt

SEQ ID NO: 815735 - DNA, 75 bp, synthetic construct
  source 1..75: mol_type = other DNA
tgacggatattaccaaaaatgcagcgtatggcgttgagatagaaagtctggtgctggagataaatgcaccagcat

SEQ ID NO: 815736 - DNA, 75 bp, synthetic construct
  source 1..75: mol_type = other DNA
ccttatatcccgcagaatgccgggatacttctggtgccctgttgccgtggcgggtcagcattcaccaccgggccg

SEQ ID NO: 815737 - DNA, 75 bp, synthetic construct
  source 1..75: mol_type = other DNA
agccagtgcagctcagtatggatgcgtggggcagggattacatatcgcgaagaaattgttgccgtttattccggc

SEQ ID NO: 815738 - DNA, 75 bp, synthetic construct
  source 1..75: mol_type = other DNA
tacatccagacagacgcaaaagacctgaatgtgatgtaccacaatgcaaaagtggcgacaaataaccttaagctg

SEQ ID NO: 815739 - DNA, 75 bp, synthetic construct
  source 1..75: mol_type = other DNA
gctttaaggcatccggtgaactggtggcaaatcagtatgtcattgcactttactggccggtttcctctctgccgc

SEQ ID NO: 815740 - DNA, 75 bp, synthetic construct
  source 1..75: mol_type = other DNA
gattccggctgaccattgtctgcatgatgtacaggatatgagcggtgttaatcatccgaaagcggacctgaataa

SEQ ID NO: 815741 - DNA, 75 bp, synthetic construct
  source 1..75: mol_type = other DNA
agaagccgaatgcgaagctggatacgttcggggtctttgataacggatggcacacactggcttttgagtttgccg

SEQ ID NO: 815742 - DNA, 75 bp, synthetic construct
  source 1..75: mol_type = other DNA
cctgggcatttactggcagttgtcgtccctgccggagggagtgacgctggcagaggaaggcaacgacatgctgat

SEQ ID NO: 815743 - DNA, 75 bp, synthetic construct
  source 1..75: mol_type = other DNA
gtaatgccggtcataacctgctggcgtcgttttacgtacagagcgatgccacagaccttaatgtgatgtaccaca

SEQ ID NO: 815744 - DNA, 75 bp, synthetic construct
  source 1..75: mol_type = other DNA
aaatccacggacactgcaacgcaaggcagcaacatcaacacacccacggcagaaccggagtattactttgtgatc

SEQ ID NO: 815745 - DNA, 75 bp, synthetic construct
  source 1..75: mol_type = other DNA
aaactgggaacatttggcgcattcgataatgaatggcacacgctggcattccgcttcgcagggaataacagcctt

SEQ ID NO: 815746 - DNA, 75 bp, synthetic construct
  source 1..75: mol_type = other DNA
gtcagcagcataatggtttattcacagccatggttcagcagttcagaaccgacctgtctccacttgcagcgcagt

SEQ ID NO: 815747 - DNA, 75 bp, synthetic construct
  source 1..75: mol_type = other DNA
cgggggcaaggcgctgaagctgacaaaacagaccggaaagtcatggtttatgcagcatgatgccggtaatggtgc

SEQ ID NO: 815748 - DNA, 75 bp, synthetic construct
  source 1..75: mol_type = other DNA
cacaaactgaaagagggctggcagccgtttggtagtcctgtggccataaccccttataccctgatgcaggcgatt

SEQ ID NO: 815749 - DNA, 75 bp, synthetic construct
  source 1..75: mol_type = other DNA
aaaaccactgtatcaggacctggtcagccgcacaaaagcggcgctggcgaagaacacgaaaaacaaacttctggc

SEQ ID NO: 815750 - DNA, 75 bp, synthetic construct
  source 1..75: mol_type = other DNA
aaatgccctgtctggcgttgtgtgttccctactcttcgttttgccagtccacgccgtagaattcaacgtcgatat

SEQ ID NO: 815751 - DNA, 75 bp, synthetic construct
  source 1..75: mol_type = other DNA
cacctccatgttgcgggtgaacaataacgatctgccagaaggtgtcgatgtcgaaaactcggttattcgcaccac

SEQ ID NO: 815752 - DNA, 75 bp, synthetic construct
  source 1..75: mol_type = other DNA
gtggcgcaaaatggtcgtatactttaccaaaccaccgtcgcaccgggtccatttaccatttcagatttaggccag

SEQ ID NO: 815753 - DNA, 75 bp, synthetic construct
  source 1..75: mol_type = other DNA
cgatatcactaacggtgcaacatacccggtgctgattgacagcattgtggtggaggttaataccccgtcagcggg

SEQ ID NO: 815754 - DNA, 75 bp, synthetic construct
  source 1..75: mol_type = other DNA
ctggaaggtaatgccggtcataacctgctggcatcgttttacgttcagagcgatgccacagaccttaacgtgatg

SEQ ID NO: 815755 - DNA, 75 bp, synthetic construct
  source 1..75: mol_type = other DNA
tctgctggttccctgctgccgtggtggttctgcattcacggcgggggctgacggcacgtacagtgacagcacggg

SEQ ID NO: 815756 - DNA, 75 bp, synthetic construct
  source 1..75: mol_type = other DNA
tgtggtcagtgatgagggtgccactggtggtaaggccctgcaactgaacaaaccggaaagccacatctggtttct

SEQ ID NO: 815757 - DNA, 75 bp, synthetic construct
  source 1..75: mol_type = other DNA
taaactgcatgtgacagacattaccaggaatgcgacttacccggtgctgattgacagcattgcggtggaagtgaa

SEQ ID NO: 815758 - DNA, 75 bp, synthetic construct
  source 1..75: mol_type = other DNA
ctgaggagccaggcaaccgtccgacgacctcaacgaatccttctgttgcgccagaatattactatgtgattgcgc

SEQ ID NO: 815759 - DNA, 75 bp, synthetic construct
  source 1..75: mol_type = other DNA
gggatagtttatccctttcaattaaaaatgccctttctggcgttatatattcactattattagttctgccaacgc

SEQ ID NO: 815760 - DNA, 75 bp, synthetic construct
  source 1..75: mol_type = other DNA
atcaggctatcactaccggtattggctttaaccttaaccaattcggttcgctttcttttgatgtcaccggagcag

SEQ ID NO: 815761 - DNA, 75 bp, synthetic construct
  source 1..75: mol_type = other DNA
tccctggatttgtggagacacaacatatttctggaagcagaagaacgaaacggcgtaccagacggtgtacggtag

SEQ ID NO: 815762 - DNA, 75 bp, synthetic construct
  source 1..75: mol_type = other DNA
ggagaggcagaccttgcttcaggaagtcagcagcataatggtttattcacagccatggttcagcagttcagaacc

SEQ ID NO: 815763 - DNA, 75 bp, synthetic construct
  source 1..75: mol_type = other DNA
aagaggtaaatcatacggtagcagaaattatccagcgttttggtcgcatcgacggtctggtcaataacgccgggg

SEQ ID NO: 815764 - DNA, 75 bp, synthetic construct
  source 1..75: mol_type = other DNA
tcgaaagagctgggcaagcacggtatccgtgtggtcggtatcgcgccggggattctggaaaaaacaggactgcgc

SEQ ID NO: 815765 - DNA, 75 bp, synthetic construct
  source 1..75: mol_type = other DNA
ctacaccaaaggcgcagccattgcccttgcgtcagatggcgctaaattgtcttctgctgtggacggcggatcggc

SEQ ID NO: 815766 - DNA, 75 bp, synthetic construct
  source 1..75: mol_type = other DNA
ggtgatgtcaccacacctgtggtggtgaagccggcggatggagaaggcacagttatcagcaccaccagcgaaccg

SEQ ID NO: 815767 - DNA, 75 bp, synthetic construct
  source 1..75: mol_type = other DNA
catcttttattgctctgtaccgacatggactcaggtcatggcggtaaatctggtcgctttaaatcgtacgaaggc

SEQ ID NO: 815768 - DNA, 75 bp, synthetic construct
  source 1..75: mol_type = other DNA
ttcatcgttaacccggcattccatgaaggcaaaaccattgctgatgaaattgctaaaggtgcaaccgttgttgct

SEQ ID NO: 815769 - DNA, 75 bp, synthetic construct
  source 1..75: mol_type = other DNA
atgatgcaagcacgccgcgcattcttagatgccggacattatcagccgctgcgtgatgcaattgtcgcccaactg

SEQ ID NO: 815770 - DNA, 75 bp, synthetic construct
  source 1..75: mol_type = other DNA
agaagtctggcaaacactggcagcaaaagaagtgttcgactgccagacggactttaatattcacctctggcagcg

SEQ ID NO: 815771 - DNA, 75 bp, synthetic construct
  source 1..75: mol_type = other DNA
cattacagcagagtgatgagttgtgttatccgatgcgtcttcgcggtgatgaagctgtcgcattattgcagatga

SEQ ID NO: 815772 - DNA, 75 bp, synthetic construct
  source 1..75: mol_type = other DNA
ttgacggtaaatccattaccgaaacctacgcagcaggcgaggaagttttaccgggtaaactggtttccctggttg

SEQ ID NO: 815773 - DNA, 75 bp, synthetic construct
  source 1..75: mol_type = other DNA
ggaaggttgcgattgggtgctaaagaacgtaattaacccacttaaacaaacttcaatcaaagaagcgattgatca

SEQ ID NO: 815774 - DNA, 75 bp, synthetic construct
  source 1..75: mol_type = other DNA
gctcaattgtgtgaatgtcttgagcagcacgcaacggcgatactggatattggttgtggggaagggtactacacc

SEQ ID NO: 815775 - DNA, 75 bp, synthetic construct
  source 1..75: mol_type = other DNA
cttccccatgacatggtcgaatcctcagctaccgcatggcgggatgaaatgagcaggaaggttgccggtaaatga

SEQ ID NO: 815776 - DNA, 75 bp, synthetic construct
  source 1..75: mol_type = other DNA
aacaaaagccttagcagaatccttatctgcggtgtacgtaacaggaaaatcatcgctatggtagctttgacgctc

SEQ ID NO: 815777 - DNA, 75 bp, synthetic construct
  source 1..75: mol_type = other DNA
gatgtcgatattgaacgtctcaacgaagcgatcaagatcgttatcgaggcatttcccgtactctctcaatctggc

SEQ ID NO: 815778 - DNA, 75 bp, synthetic construct
  source 1..75: mol_type = other DNA
accggatggcaaacttcagctgattgtggcgattgccgatccaaccgcgtggattgctgaaggcagcaagctgga

SEQ ID NO: 815779 - DNA, 75 bp, synthetic construct
  source 1..75: mol_type = other DNA
aactcgaacgcggcgatgtgcttccccatgacatggtcgaatcctccgctactgcatggcgggatgaaataagca

SEQ ID NO: 815780 - DNA, 75 bp, synthetic construct
  source 1..75: mol_type = other DNA
atcgatatcggcattggtcggatgtcagatcctgaactgatgaacgggcttaattacgaactgctgtttcttgaa

SEQ ID NO: 815781 - DNA, 75 bp, synthetic construct
  source 1..75: mol_type = other DNA
tgtgacagacattaccagaggtgcgacttacccggtgctgattgacagcattgcggtggaagtgaacagcacaga

SEQ ID NO: 815782 - DNA, 75 bp, synthetic construct
  source 1..75: mol_type = other DNA
cggcgaatgcgggcattctgctggttccgtgctgtcgtggtggttcagcgttcaccaccggagctgatggcacat

SEQ ID NO: 815783 - DNA, 75 bp, synthetic construct
  source 1..75: mol_type = other DNA
taaactgcatgtgacagacattaccaaaggtgcgacttacccggtgctgattgacagcattgcggtggaagtgaa

SEQ ID NO: 815784 - DNA, 75 bp, synthetic construct
  source 1..75: mol_type = other DNA
aactcgagcgcggcgatgtgcttccccatgacatggtcgaatcttctgctgctgcatggcgggatgagatgagca

SEQ ID NO: 815785 - DNA, 75 bp, synthetic construct
  source 1..75: mol_type = other DNA
acgtaatgcccgcaaaggactggcaacgctttgtatcggcggaggccagggtgtggcattgaccattgaacgtga

SEQ ID NO: 815786 - DNA, 75 bp, synthetic construct
  source 1..75: mol_type = other DNA
gacgttcaaaatatagcatctaaactgctggctacattgattgagagaaatgcattgttatcgatgtcatcagat

SEQ ID NO: 815787 - DNA, 75 bp, synthetic construct
  source 1..75: mol_type = other DNA
gccgctttccacgactatagcggtagtgctgactcgcgttttatgatcgacgcagacggcgctgaagatattccg

SEQ ID NO: 815788 - DNA, 75 bp, synthetic construct
  source 1..75: mol_type = other DNA
atgccaacaccaaccatcatcaaaacactcgctactcaccgcgaaaaacccttcgtgagcgtcgtcacgccaacc

SEQ ID NO: 815789 - DNA, 75 bp, synthetic construct
  source 1..75: mol_type = other DNA
aattcccagattgtaaaaattacaactaatggaaacttcattaatcaaggagcgcgttctcaatattttcaagat

SEQ ID NO: 815790 - DNA, 75 bp, synthetic construct
  source 1..75: mol_type = other DNA
ttattgaaccagttctccgttttctggcaggtaaacctgatggagtacctgatcgcgatgcgcatgaagctgcgg

SEQ ID NO: 815791 - DNA, 75 bp, synthetic construct
  source 1..75: mol_type = other DNA
tgagcactcgctggaagcctgctggcagccgctgctacgcgccgacaaatggctggcctgttacccgagcctttg

SEQ ID NO: 815792 - DNA, 75 bp, synthetic construct
  source 1..75: mol_type = other DNA
cactattgcgatgcgtttatggatggcaaggcgggagaacgggcggcgattgtgattgtggaggcgctggggtaa

SEQ ID NO: 815793 - DNA, 75 bp, synthetic construct
  source 1..75: mol_type = other DNA
tgctgaccgataacagcggctttattttcgatgctatccacgttgataagcgggtgatcctgctcgactttccgg

SEQ ID NO: 815794 - DNA, 75 bp, synthetic construct
  source 1..75: mol_type = other DNA
gaatcgacgctgaactgaaggatgcttttatggccgctgcaaaaagcatggatcgtaatggctctcagttaatcc

SEQ ID NO: 815795 - DNA, 75 bp, synthetic construct
  source 1..75: mol_type = other DNA
gaatcgacgctgaactgaaggatgcctttatggccgctgcaaaaagcatggaccgtaatggctctcagttaatcc

SEQ ID NO: 815796 - DNA, 75 bp, synthetic construct
  source 1..75: mol_type = other DNA
gtggatatcgaaaactcggttatcaccaccaccttaaccgagggtgctattggctacgccaaacttgatacccgc

SEQ ID NO: 815797 - DNA, 75 bp, synthetic construct
  source 1..75: mol_type = other DNA
caggaaattcgtcagtactctttgacgcgcaaaccggatggcaaaggctatcgtattgcagtgaaacgcgaagag

SEQ ID NO: 815798 - DNA, 75 bp, synthetic construct
  source 1..75: mol_type = other DNA
attaatgcgcggggggcgcgaagtcagggttcgcatggaaggccagcttttattgaatacgatagatctgatcct

SEQ ID NO: 815799 - DNA, 75 bp, synthetic construct
  source 1..75: mol_type = other DNA
cttttggtgacagtaatgccacgcgaaccacagacgcatttctggaaacggagtgcgtggaaaatgtcgccacaa

SEQ ID NO: 815800 - DNA, 75 bp, synthetic construct
  source 1..75: mol_type = other DNA
ggtgattcaaaattcaatggctggaagttatggaaccttgcccttgaggggataaccagtttctctaccttccct

SEQ ID NO: 815801 - DNA, 75 bp, synthetic construct
  source 1..75: mol_type = other DNA
ttgttgttgcagcagcttcattcttctatggagcatggatgattgcagataaaatattctggggaaatgaagtgc

SEQ ID NO: 815802 - DNA, 75 bp, synthetic construct
  source 1..75: mol_type = other DNA
caaaataagcaccccaaagatcgaggaaaatgtcggagattttcgactcatgtctcgtgaggttgtggagaacat

SEQ ID NO: 815803 - DNA, 75 bp, synthetic construct
  source 1..75: mol_type = other DNA
ctgatcgggattggtgttctcggagaatatataggtagaatctatattgaagtaaaaaatagacccaaatacatc

SEQ ID NO: 815804 - DNA, 75 bp, synthetic construct
  source 1..75: mol_type = other DNA
ctgagtggttttacaagctgcacaacaagatcagcaatccaaagatcgaggaaaacgttggcgatttccgcctta

SEQ ID NO: 815805 - DNA, 75 bp, synthetic construct
  source 1..75: mol_type = other DNA
aattttctataaaacggtacgtgaattcgaagagttgaagccatatgaagtggaaattgttttcataaatgacgg

SEQ ID NO: 815806 - DNA, 75 bp, synthetic construct
  source 1..75: mol_type = other DNA
gaggttacccctcacttctggtttcgattcttttccttggtggaatacagcttattgggatcggcgtacttggag

SEQ ID NO: 815807 - DNA, 75 bp, synthetic construct
  source 1..75: mol_type = other DNA
gctttggtaaaagcacgacccgttaccatttaccgtatgtacttaaccgcaaggatagctggcatgtcgcgcata

SEQ ID NO: 815808 - DNA, 75 bp, synthetic construct
  source 1..75: mol_type = other DNA
caaggaatctgaagttcttactaatctggaaatccttgagcgtggttttgaacaagcttctccctctacagtgac

SEQ ID NO: 815809 - DNA, 75 bp, synthetic construct
  source 1..75: mol_type = other DNA
gtgctggagtatgtcaatgacgagggcgtgacggtaagagaagagatgaagccggaggtgggcgactacggacgc

SEQ ID NO: 815810 - DNA, 75 bp, synthetic construct
  source 1..75: mol_type = other DNA
ccggcgaatgcgggcattcttctggttccatgctgtcgtggaggctcgggagtgactacaggtaatgagggaaca

SEQ ID NO: 815811 - DNA, 75 bp, synthetic construct
  source 1..75: mol_type = other DNA
cagatcgtcttgcaaccgcaattctgacccacgcaggcaaatacccggcgtttatcaccgggcggtcagaaacgg

SEQ ID NO: 815812 - DNA, 75 bp, synthetic construct
  source 1..75: mol_type = other DNA
atgatggcctcctttttcactcagacaaaagccagtaacctggatgtcatgtatcacggtaaaacacagcctaat

SEQ ID NO: 815813 - DNA, 75 bp, synthetic construct
  source 1..75: mol_type = other DNA
tgttgacttgcaagacccgattgaggttattcctcgtctgattgaaaagtggcaagcaggtgccgacatggtact

SEQ ID NO: 815814 - DNA, 75 bp, synthetic construct
  source 1..75: mol_type = other DNA
cttataggtataggggtacttggtgaatacattggaagaatctatgtggaagtaaagaaccgaccgcgatatatt

SEQ ID NO: 815815 - DNA, 75 bp, synthetic construct
  source 1..75: mol_type = other DNA
tcttcaatgaagaagaagcgataccaattttttataaaacggtacgtgaactcgaagagttgaagccatatgagg

SEQ ID NO: 815816 - DNA, 75 bp, synthetic construct
  source 1..75: mol_type = other DNA
tgtcgaccttcaggatccaatagaggtcattcctaatctgatcgaaaaatggcaggctggtgcagatatggtgtt

SEQ ID NO: 815817 - DNA, 75 bp, synthetic construct
  source 1..75: mol_type = other DNA
atacgtaagagccgaaagagccgcaggaaaaagtaagtttaatggctggaagctttggaatctggcgcttgaagg

SEQ ID NO: 815818 - DNA, 75 bp, synthetic construct
  source 1..75: mol_type = other DNA
ggcaaaacgctctgatcgttctactgatagcaggcttaagcgtaagtctgctgaatggttctacaagctgcacaa

SEQ ID NO: 815819 - DNA, 75 bp, synthetic construct
  source 1..75: mol_type = other DNA
ttgaaatcgtgttcattaatgacggaagcaaagacgcaacagaatcaattattaatgcgcttgctgtttctgact

SEQ ID NO: 815820 - DNA, 75 bp, synthetic construct
  source 1..75: mol_type = other DNA
ttcatgaagggcgtactgagttgggttggcggaaagactgatgttgtagaatatgttcgcgccgaacgcgtagca

SEQ ID NO: 815821 - DNA, 75 bp, synthetic construct
  source 1..75: mol_type = other DNA
gccgaccagcgaatccgcgaaatattgccggtggctcatgatgttgcggaactgcgttacttattgtcagaggta

SEQ ID NO: 815822 - DNA, 75 bp, synthetic construct
  source 1..75: mol_type = other DNA
gtaaacgcggcgcttacggatatcgtcagcgatccgctgctacgcaacgcttatctgggtctgcataacgccact

SEQ ID NO: 815823 - DNA, 75 bp, synthetic construct
  source 1..75: mol_type = other DNA
gtaatacctcaactgattgaaaaatggcaggcaggcgctgatatggtgcttgctaaacgatctgaccgctcaacg

SEQ ID NO: 815824 - DNA, 75 bp, synthetic construct
  source 1..75: mol_type = other DNA
tgttttctataaaacggtacgtgaattccaagagttgaagccatatgaagtagaaattgtattcataaatgacgg

SEQ ID NO: 815825 - DNA, 75 bp, synthetic construct
  source 1..75: mol_type = other DNA
agtacatcgggaggatttacatagaaaccaaggcaagacctaaatacatcttaaaggagaaaataaatgacaaga

SEQ ID NO: 815826 - DNA, 75 bp, synthetic construct
  source 1..75: mol_type = other DNA
ctactttaacacaccaaatgcagtagaactcagaagacaatatgcgatgaaaatatataaaacatacactaaatt

SEQ ID NO: 815827 - DNA, 75 bp, synthetic construct
  source 1..75: mol_type = other DNA
tcagcaagcaagttacgtcagagtgggcgtgtggctcaccgttgtgaaggagatacacgcagacatttcccgcgc

SEQ ID NO: 815828 - DNA, 75 bp, synthetic construct
  source 1..75: mol_type = other DNA
tgtttacggaaaagcagcaagcgcgctgtatcgagtgatgagtggtatctgtcagggaattacgtgggggcttaa

SEQ ID NO: 815829 - DNA, 75 bp, synthetic construct
  source 1..75: mol_type = other DNA
tgactcgcagccatgaatatgctgaaatggcatcccgtactgaaagcatgagtgggcagatgagtgaagacttgt

SEQ ID NO: 815830 - DNA, 75 bp, synthetic construct
  source 1..75: mol_type = other DNA
cagaacagcatccgaggcgaggaaaatattgtaaaagggcagtattctgaactacaaaatcatcataaaacagaa

SEQ ID NO: 815831 - DNA, 75 bp, synthetic construct
  source 1..75: mol_type = other DNA
ctggatctcaagacaatactactgagtcaggacgccaatctaatgctgacaatcatgataccagcagtcaggcag

SEQ ID NO: 815832 - DNA, 75 bp, synthetic construct
  source 1..75: mol_type = other DNA
agtaagccagtttgtaaaaaaaataaaagtacttctttcagagaaagactcatcgttagatgataattcgatcac

SEQ ID NO: 815833 - DNA, 75 bp, synthetic construct
  source 1..75: mol_type = other DNA
acgcccgttcgctgaccggcgcgcagctggtgcaggttacccggcggatggcagagctgattgtcgaagtgattg

SEQ ID NO: 815834 - DNA, 75 bp, synthetic construct
  source 1..75: mol_type = other DNA
cataccctttcgctctctggcagcacaatctggctggagggcgtacaactgccgctgcgcaatttgccggtggcg

SEQ ID NO: 815835 - DNA, 75 bp, synthetic construct
  source 1..75: mol_type = other DNA
acgaaaagcagcaagcgcgctgtatcgggtgatgagtggtatctgtcagggaattacgtgggggcttaatgagta

SEQ ID NO: 815836 - DNA, 75 bp, synthetic construct
  source 1..75: mol_type = other DNA
accagttcgtgaaaccagacctgtgcgcaatttctatgtcggcactaacgacccgcgggtgattttgtgcctgac

SEQ ID NO: 815837 - DNA, 75 bp, synthetic construct
  source 1..75: mol_type = other DNA
acagataaaaagaaagccataactcacaaatcagcagacaatgatgaggcatttgatggattacgcactggcgaa

SEQ ID NO: 815838 - DNA, 75 bp, synthetic construct
  source 1..75: mol_type = other DNA
gcaacgtctggcgcatgtctctatcggtcatgtgacaatgcgaaacctgccaatggtacagactatcctgacggg

SEQ ID NO: 815839 - DNA, 75 bp, synthetic construct
  source 1..75: mol_type = other DNA
tgccatcgaattttcccgcgtcaccgaatcagcggcgctggctggctacaaatggttaggacgcggcgataaaaa

SEQ ID NO: 815840 - DNA, 75 bp, synthetic construct
  source 1..75: mol_type = other DNA
gttatttctacggctccagccagtctgccagtcagattatgcgccagaacgtcaccatgaatgccctgaaagagg

SEQ ID NO: 815841 - DNA, 75 bp, synthetic construct
  source 1..75: mol_type = other DNA
ttttacgccagaaaaagccgttcatctggaatgcaacgaacattacccgccagctgcgtagccagctcatcagcc

SEQ ID NO: 815842 - DNA, 75 bp, synthetic construct
  source 1..75: mol_type = other DNA
gaagttgacgtgctgtacggcattggcggcgcgccagaaggtgtggtgtctgcggcggtgatccgcgcattggat

SEQ ID NO: 815843 - DNA, 75 bp, synthetic construct
  source 1..75: mol_type = other DNA
attggtggcgcgccggaaggcgtggtttctgcggcggtgatccgcgcattagatggcgacatgaacggtcgtctg

SEQ ID NO: 815844 - DNA, 75 bp, synthetic construct
  source 1..75: mol_type = other DNA
atctgaacctgccgctggcggataacctgcgcaatgttgcggcggcgctcggcaaaccgttgagcgaactgacgg

SEQ ID NO: 815845 - DNA, 75 bp, synthetic construct
  source 1..75: mol_type = other DNA
tgcagccctgaattcagcgaaacagagttacgaccagtacacgacgaatatgacccgcagccatgaatatgctga

SEQ ID NO: 815846 - DNA, 75 bp, synthetic construct
  source 1..75: mol_type = other DNA
ggcatgcgatggtggccggctatgagatggttttcgctcagcctgacagtgccacctacagcaagacaggcatgc

SEQ ID NO: 815847 - DNA, 75 bp, synthetic construct
  source 1..75: mol_type = other DNA
ctatgtgtttgccctgatgtggctgcagacctggccgttgttgtatgccattctgaacagtgccatgacattcta

SEQ ID NO: 815848 - DNA, 75 bp, synthetic construct
  source 1..75: mol_type = other DNA
tttgccatgagcaacaatgctggggaaaaatgcgcccgttcgtttctgattccgcacgctggcactacctgactc

SEQ ID NO: 815849 - DNA, 75 bp, synthetic construct
  source 1..75: mol_type = other DNA
agtggtcgtaatgcggatggcctcaaggctggaagttcctcaacctgatgaagcgcatagcgtggagtatcgggt

SEQ ID NO: 815850 - DNA, 75 bp, synthetic construct
  source 1..75: mol_type = other DNA
aggaaaacggacgtattcagtcgcctagtcatgctcgtcggggcgaactgacggcccgacaaattttatggcgcg

SEQ ID NO: 815851 - DNA, 75 bp, synthetic construct
  source 1..75: mol_type = other DNA
attggtgcaggttacccggcggatggcggaactgattgttgaagtgattgagggaacgctttcgcctctcgcgca

SEQ ID NO: 815852 - DNA, 75 bp, synthetic construct
  source 1..75: mol_type = other DNA
gttcagcgacgagtctcttctcctggcaaccgccctaagacagggggaaaatccccatctgaggttatcaggtct

SEQ ID NO: 815853 - DNA, 75 bp, synthetic construct
  source 1..75: mol_type = other DNA
tcttgactgcattgttcaacaagagaagcttcaaccggcttgggtgcgattatctgctacttaccgttctcttag

SEQ ID NO: 815854 - DNA, 75 bp, synthetic construct
  source 1..75: mol_type = other DNA
agactggttaatattctttacaggaatattaattatatgggagagaattcttcttttgaaaataagacgaattca

SEQ ID NO: 815855 - DNA, 75 bp, synthetic construct
  source 1..75: mol_type = other DNA
cttaggtaggtttttgactgcattacacaataagagaagctttaaccgccttggttgtgattatcttctactgac

SEQ ID NO: 815856 - DNA, 75 bp, synthetic construct
  source 1..75: mol_type = other DNA
ttcgcaagtttgatgaaatcgcaagtagagcaaggacggccgcagagcaaacattccgctgggctaacgttgctg

SEQ ID NO: 815857 - DNA, 75 bp, synthetic construct
  source 1..75: mol_type = other DNA
tcaacgataacgaaaagcgagcagataaacgcaaatgggtttttccagctcgttcatcacgaagcaagattggac

SEQ ID NO: 815858 - DNA, 75 bp, synthetic construct
  source 1..75: mol_type = other DNA
caatggaagaagaactccacaaacgtcctcctgcagcacaaaactcccccgccccaaataatggatgcgcattac

SEQ ID NO: 815859 - DNA, 75 bp, synthetic construct
  source 1..75: mol_type = other DNA
gcggctgatcgtggtcatattgtgctgacagaaagtaatggaatcgacaaagagaaaacggctgaccttgcaatt

SEQ ID NO: 815860 - DNA, 75 bp, synthetic construct
  source 1..75: mol_type = other DNA
ttaaagtctttgccccgaaaacgaaaaggaatgaacgttttttaaaatcttttgtaaaaggtgactactatcaga

SEQ ID NO: 815861 - DNA, 75 bp, synthetic construct
  source 1..75: mol_type = other DNA
gctgatgaagttccaatgctaacaaccagttctgctgaactggcacagcaacagattgcgatgcttaatggttgc

SEQ ID NO: 815862 - DNA, 75 bp, synthetic construct
  source 1..75: mol_type = other DNA
actctataccaacgctccttctaagttaaaaggcgatctcaactatctgcgtctggaatgggggccggattttca

SEQ ID NO: 815863 - DNA, 75 bp, synthetic construct
  source 1..75: mol_type = other DNA
tgcagaaacgctcatgagcacctggcaggccgcccgtaaggaggtggcgcatacctcacgacataacgagttttc

SEQ ID NO: 815864 - DNA, 75 bp, synthetic construct
  source 1..75: mol_type = other DNA
ggttttggtgtcaaaatcagtgccacgaaaaagacctatatcgttcagcgacgagtgtcttctcctggcaaccgc

SEQ ID NO: 815865 - DNA, 75 bp, synthetic construct
  source 1..75: mol_type = other DNA
ccattttcaatcctgaaagtgcagaaaaagttcaggactcgttctgaactggaagatagctatcgtgcgaaaggt

SEQ ID NO: 815866 - DNA, 75 bp, synthetic construct
  source 1..75: mol_type = other DNA
ctgcaaaagccagaacagcagcagagcagactttccggtgggccaatgttgctgtcaaacatgcgattgaaattg

SEQ ID NO: 815867 - DNA, 75 bp, synthetic construct
  source 1..75: mol_type = other DNA
aaggattgagcttcatatgctgatgacggcaccagagttgtataatacacttttggcttcggcaaaatatccgcc

SEQ ID NO: 815868 - DNA, 75 bp, synthetic construct
  source 1..75: mol_type = other DNA
cgcaatgctcgcccggcggtgatggcgctctcccagtcgctgggcgattttgtcgttgccagcgccgggccgcac

SEQ ID NO: 815869 - DNA, 75 bp, synthetic construct
  source 1..75: mol_type = other DNA
atcgagattcacctgttggcttcggtgtgaaggtcagtttgacgaaaaaaacctatgtaatccagcgaagagtag

SEQ ID NO: 815870 - DNA, 75 bp, synthetic construct
  source 1..75: mol_type = other DNA
gagtcacttacttggcagaaccaaacctgctaaaccaaacactctcaatgtgttagacaaagctgagaatcggtt

SEQ ID NO: 815871 - DNA, 75 bp, synthetic construct
  source 1..75: mol_type = other DNA
tacgaggctctacagcgcattgaattgcatatgttgatgactgcgcctacgttatacaatgcacttttagcatca

SEQ ID NO: 815872 - DNA, 75 bp, synthetic construct
  source 1..75: mol_type = other DNA
tgggttgtgattacctactgttgacggttcttcttggtgctcgtaaagaagaaacagcttctctgtgctggcgag

SEQ ID NO: 815873 - DNA, 75 bp, synthetic construct
  source 1..75: mol_type = other DNA
aagaaatccgaataggattaaacgagaaacagaggcttcagaactcactatcagtgaagtgtttgctcaatatcg

SEQ ID NO: 815874 - DNA, 75 bp, synthetic construct
  source 1..75: mol_type = other DNA
tctatcgacgtgaaaccgagccttgatccgcaaggcagagtagtctacttacccaatccagagcgaaaaccgtat

SEQ ID NO: 815875 - DNA, 75 bp, synthetic construct
  source 1..75: mol_type = other DNA
acatttcgctgggtgaatgttgctgtcaaacatgcaatcgatatcgaagcaagtaatgcacagactcaacaacga

SEQ ID NO: 815876 - DNA, 75 bp, synthetic construct
  source 1..75: mol_type = other DNA
tgttggacaaggcagaaaatcgtttaaaggaatgggctggtctacgagtgaaggatttaacaggtaatgaaattc

SEQ ID NO: 815877 - DNA, 75 bp, synthetic construct
  source 1..75: mol_type = other DNA
agaacagatatcatttttactgtaaaaccggggggtgcggacgatttcttggacggtttatacggacatcaatcc

SEQ ID NO: 815878 - DNA, 75 bp, synthetic construct
  source 1..75: mol_type = other DNA
ggaacgcttcttccgcagtctgaaaacagaatgggtgccaaccgatggctacacaggcaaagacgtggcccggca

SEQ ID NO: 815879 - DNA, 75 bp, synthetic construct
  source 1..75: mol_type = other DNA
gtgaccaaactcaaacttctggcacttggagtgcttatcgcaacgtctgcaggcgtagcgcacgctgaaggtttt

SEQ ID NO: 815880 - DNA, 75 bp, synthetic construct
  source 1..75: mol_type = other DNA
ataagcagtgccttgcggatggcgtatgaggtgcgtggtcagccgcgggacgtcatgttccatagcgaccaggga

SEQ ID NO: 815881 - DNA, 75 bp, synthetic construct
  source 1..75: mol_type = other DNA
atggatctttttgcccgcagggttatcggctggagcctgtcagcgaatgccgatactgccctgataagcagtgcc

SEQ ID NO: 815882 - DNA, 75 bp, synthetic construct
  source 1..75: mol_type = other DNA
ggaacacaatacgatattaaaaaaggctacaaccgcgctcttgatgtccgactcgctgaacggttcacgatagtt

SEQ ID NO: 815883 - DNA, 75 bp, synthetic construct
  source 1..75: mol_type = other DNA
acccagttctctaatcaggggacgatggcgggggcggcgttggtaaaagacgcgatgtataacggttctttgttg

SEQ ID NO: 815884 - DNA, 75 bp, synthetic construct
  source 1..75: mol_type = other DNA
ggcgaagtactggagcagcataccggtgtaccggtttatattcagcatgatattagtgcatggacgatggctgag

SEQ ID NO: 815885 - DNA, 75 bp, synthetic construct
  source 1..75: mol_type = other DNA
cgtatcgccagcacgcacgcggcgaatctgacgtcgacatcttcaaagagaaaggtttccttcgagtcgattatc

SEQ ID NO: 815886 - DNA, 75 bp, synthetic construct
  source 1..75: mol_type = other DNA
ctgggccggaaatcgctggtgctatctggcggtcgtcatggatctttttgcccgcagagttatcggctggagcct

SEQ ID NO: 815887 - DNA, 75 bp, synthetic construct
  source 1..75: mol_type = other DNA
tgctggccgtcggtgaagatattcaccaacttgcgcaggttgaagtttgtggcatcaagcgcgacgtgaatatcg

SEQ ID NO: 815888 - DNA, 75 bp, synthetic construct
  source 1..75: mol_type = other DNA
gcggtaatcatggttgtctggaaaccatcgccagcgttgacagcattctcgagctggcacgattgcgccttaatc

SEQ ID NO: 815889 - DNA, 75 bp, synthetic construct
  source 1..75: mol_type = other DNA
aaattagcggttatatcctgaattattacaatagcgtcaggcctcaccattacaacggtgggttgacgccggaag

SEQ ID NO: 815890 - DNA, 75 bp, synthetic construct
  source 1..75: mol_type = other DNA
gcaaccgccacacagacccgtgacggtaatatggtgatggatgccagcggggcgatgtcccggttaccggtcggt

SEQ ID NO: 815891 - DNA, 75 bp, synthetic construct
  source 1..75: mol_type = other DNA
ctgttcggggcgaatctgattgtgaaaagcaccgatttcctgtcccggaatccggaaatcatcaatctgtttcag

SEQ ID NO: 815892 - DNA, 75 bp, synthetic construct
  source 1..75: mol_type = other DNA
gacaatattcagagttaaaaaataatcacaaacaggaagaaattcaacaaaacaacagatataatgaagaaaata

SEQ ID NO: 815893 - DNA, 75 bp, synthetic construct
  source 1..75: mol_type = other DNA
atgttccatagcgaccagggaagtcaatatacaggactgaaatatcaacaacttctctggcgttacaggataaag

SEQ ID NO: 815894 - DNA, 75 bp, synthetic construct
  source 1..75: mol_type = other DNA
gtcagtatacaggactgaaatatcaacagcttctctggcgttacaggataaagcaaagtgtcagccgacggggaa

SEQ ID NO: 815895 - DNA, 75 bp, synthetic construct
  source 1..75: mol_type = other DNA
ctcatgccggaatagatgcaaagcccagcctttttggtgtacgtgttgatgtaggcgctaaggtcggtgggcgag

SEQ ID NO: 815896 - DNA, 75 bp, synthetic construct
  source 1..75: mol_type = other DNA
tgatatttacctgaatcataaatacacgctggaagatctgatggcctccgctgacccctacacgctgattttttc

SEQ ID NO: 815897 - DNA, 75 bp, synthetic construct
  source 1..75: mol_type = other DNA
atgaaggaaagtcggctcaggaaagaattcccggggctgacagtccacaggaacttatgaaaagggcaagggaat

SEQ ID NO: 815898 - DNA, 75 bp, synthetic construct
  source 1..75: mol_type = other DNA
tacaacggtgggttgactccggaagaatcagagaatagatatcgtttttactgtaaaacggtggccaatattact

SEQ ID NO: 815899 - DNA, 75 bp, synthetic construct
  source 1..75: mol_type = other DNA
gtggggaatggttacggaacaacctgaatgccattgccgcctttatggggacccggacgtgggattccattgaaa

SEQ ID NO: 815900 - DNA, 75 bp, synthetic construct
  source 1..75: mol_type = other DNA
taatgtgccggtcggactggcgatgccactttcactgacgacacgtatcgggcatgcaatggtggtcagctacga

SEQ ID NO: 815901 - DNA, 75 bp, synthetic construct
  source 1..75: mol_type = other DNA
agcaacgtctggcgcatgtctctatcggtcatgtgacaatgcgaaacctgccaatggtacagactatcctgacgg

SEQ ID NO: 815902 - DNA, 75 bp, synthetic construct
  source 1..75: mol_type = other DNA
aagggattcttacgtgtcgattattcgaaaaagcacccgccaattgcggatcgtgttaatgctgttaaccgaatg

SEQ ID NO: 815903 - DNA, 75 bp, synthetic construct
  source 1..75: mol_type = other DNA
agtatgtaatgaaacacgcgccacaggatgcagaagctattctgacaaacaccagttcaccggagattgcagaac

SEQ ID NO: 815904 - DNA, 75 bp, synthetic construct
  source 1..75: mol_type = other DNA
tgatatttacctgaaccacaaatacacgctggaagatctgatggcctccgctgacccctacacgctgattttttc

SEQ ID NO: 815905 - DNA, 75 bp, synthetic construct
  source 1..75: mol_type = other DNA
atggcctccgctgatccctacacgctgattttttcccgccccagtccgctgcggggcgtttacgacagcaataat

SEQ ID NO: 815906 - DNA, 75 bp, synthetic construct
  source 1..75: mol_type = other DNA
gaaacgcgcaccgcaggatgcagaagctattctgacaaataccagttcgccggagattgcagaacgccgtcgggc

SEQ ID NO: 815907 - DNA, 75 bp, synthetic construct
  source 1..75: mol_type = other DNA
tcatgctgaatggggggttaaacctaaaattcttggtgttggtggaggattaggcgttagaggcggtggtcgggc

SEQ ID NO: 815908 - DNA, 75 bp, synthetic construct
  source 1..75: mol_type = other DNA
aaattgcgctcacattgtctgttctcgcggtggccgtaatgtgggtacagcggcacaacgtgatggatttgctgg

SEQ ID NO: 815909 - DNA, 75 bp, synthetic construct
  source 1..75: mol_type = other DNA
gcattatctcagaataataaatataatgaagaaaagtcggttcaggaaagaatgcccggggctgacagtccacag

SEQ ID NO: 815910 - DNA, 75 bp, synthetic construct
  source 1..75: mol_type = other DNA
cggagattgcagaacgccgtcgggcgatggcatggtcttttgttcaggaacaggtgcagcctggtgttgataatg

SEQ ID NO: 815911 - DNA, 75 bp, synthetic construct
  source 1..75: mol_type = other DNA
gccagtgcctggaactcgctcagtcagtttggttctaaccggggagcagtgattctgtcacaggtggtgctgaca

SEQ ID NO: 815912 - DNA, 75 bp, synthetic construct
  source 1..75: mol_type = other DNA
aacgtgaacggcttcagctggagcaccaacagcaccacgtcgtttggtcagatgatgtaccagaccggcagtggc

SEQ ID NO: 815913 - DNA, 75 bp, synthetic construct
  source 1..75: mol_type = other DNA
tgcagtggaaagctatgcgaaggcgcataatatcagtaatgagcaggcgactcaggaactggcatcaacaagtac

SEQ ID NO: 815914 - DNA, 75 bp, synthetic construct
  source 1..75: mol_type = other DNA
cctgcttcagttggacagatgctatcgatcatggcccgcaaatgacggcaatccgcgacggcgtccggggcaaag

SEQ ID NO: 815915 - DNA, 75 bp, synthetic construct
  source 1..75: mol_type = other DNA
aagtaaaaaagaatactatggttttagcataattagaacaggggagcgtattttaagacttgatgataatcatat

SEQ ID NO: 815916 - DNA, 75 bp, synthetic construct
  source 1..75: mol_type = other DNA
cgcaacagtttgcacagtatgtgatgaaacacgcaccgcaggatgccgaagctattctgacaaataccagttcgc

SEQ ID NO: 815917 - DNA, 75 bp, synthetic construct
  source 1..75: mol_type = other DNA
acgctggaagacctgatggtggctgatgacccctatatggtgattttttcccagcccagcccgctgcggggggga

SEQ ID NO: 815918 - DNA, 75 bp, synthetic construct
  source 1..75: mol_type = other DNA
ccgcctcccgccagcgaagccaatctgccaagactggtgctggcgcataatcccgacagcaaagaagtcatgcgt

SEQ ID NO: 815919 - DNA, 75 bp, synthetic construct
  source 1..75: mol_type = other DNA
ttcatcgacacgcggcggtgcactgatcattggtacgccaaaaggcttctcggaatttcacaaactgtggactat

SEQ ID NO: 815920 - DNA, 75 bp, synthetic construct
  source 1..75: mol_type = other DNA
taaaagccccatgtaaaaactgcccattcctgaaagaaaatggcatcgagttagtcgaagggcggcttgatagca

SEQ ID NO: 815921 - DNA, 75 bp, synthetic construct
  source 1..75: mol_type = other DNA
gctgctgctatccatcaccgattacatgcgcttggggcacatctcactgccgatcagcggcaagccgttgctgac

SEQ ID NO: 815922 - DNA, 75 bp, synthetic construct
  source 1..75: mol_type = other DNA
agccagattatgcgtaagaatgtgacaataaatgcactgaaagagggtatcaccagtaatgcggcccgtaacggt

SEQ ID NO: 815923 - DNA, 75 bp, synthetic construct
  source 1..75: mol_type = other DNA
atattgtaagaggacagtattctgaactgcagaatcaccataaaacagaggcattatctcagaataataaatata

SEQ ID NO: 815924 - DNA, 75 bp, synthetic construct
  source 1..75: mol_type = other DNA
aataccaacaccgtctgaagatgcgttaaaacagatggtggatgataagaaagaacgattgaaggggccattatg

SEQ ID NO: 815925 - DNA, 75 bp, synthetic construct
  source 1..75: mol_type = other DNA
cagaacagtatccgtggcgaggaaaatattgtaagagggcagtattctgaactacaaaatcatcataaaacagaa

SEQ ID NO: 815926 - DNA, 75 bp, synthetic construct
  source 1..75: mol_type = other DNA
cataatatcagtaatgagcaggcgactcaggaactggcatcaacaagtaccaggctatctggtggaatgtatgct

SEQ ID NO: 815927 - DNA, 75 bp, synthetic construct
  source 1..75: mol_type = other DNA
ttgtcggaagtctctcagatacagctgaaatactccgacctggcatcaaccgcaggttatctctcagcgatgatc

SEQ ID NO: 815928 - DNA, 75 bp, synthetic construct
  source 1..75: mol_type = other DNA
cagaaaaaggcacatttcgccacttcctcgctgagtcggactggttcagcgaggccacaggtatcggcaaaggaa

SEQ ID NO: 815929 - DNA, 75 bp, synthetic construct
  source 1..75: mol_type = other DNA
gctgcgccatgtgcggattatcgcagtcactcattgcaggattccggctgtggcagatacgcaaccgccgtgtca

SEQ ID NO: 815930 - DNA, 75 bp, synthetic construct
  source 1..75: mol_type = other DNA
agagcaactttctcacgcgcatggccagaaccgtcgtctgggtcatttttccggtcgacgccctgcgcgttatcg

SEQ ID NO: 815931 - DNA, 75 bp, synthetic construct
  source 1..75: mol_type = other DNA
ttttaaagctgcgattttattacagggatgggatatatcacgtaacgatatttttatttccagaagtgagataga

SEQ ID NO: 815932 - DNA, 75 bp, synthetic construct
  source 1..75: mol_type = other DNA
atatccatagcactctgcctgatatggaaatatggatagacgcctggttgcacagaaaggctttgccggcaacgc

SEQ ID NO: 815933 - DNA, 75 bp, synthetic construct
  source 1..75: mol_type = other DNA
atacccttttcgtctacctcacgttgttgctgtgtttttggggggcggtggttgtagtgcgcggtgctttccgtg

SEQ ID NO: 815934 - DNA, 75 bp, synthetic construct
  source 1..75: mol_type = other DNA
tggatttttatggtcgcgttaaagcccgtcattacatctctgatggttctatggatggcgacagaacatttgcac

SEQ ID NO: 815935 - DNA, 75 bp, synthetic construct
  source 1..75: mol_type = other DNA
cgtcttgaaggcgtcgagatgcctttagtcactcttactgccgcagaggctttagcgcgccttgaagagctgagg

SEQ ID NO: 815936 - DNA, 75 bp, synthetic construct
  source 1..75: mol_type = other DNA
gtgaagaaactcaccgataagcaaaagtcccgtctctgggagcttcagcgtaatcgtaatttccaggccagccgc

SEQ ID NO: 815937 - DNA, 75 bp, synthetic construct
  source 1..75: mol_type = other DNA
cccgttatcgccatgattacccgcagttgccgattgaacttagcgttggtaacagccaggacgtgatgcaggcag

SEQ ID NO: 815938 - DNA, 75 bp, synthetic construct
  source 1..75: mol_type = other DNA
tgccgaagtttgagatggcgatggagttgggaaactccgaggccatcaaacatgctgtgcgtcacggactgggga

SEQ ID NO: 815939 - DNA, 75 bp, synthetic construct
  source 1..75: mol_type = other DNA
tccgcgcgcgctggcgctgctggaacaggctgttgaaattgaacaactgtttcgcgaagacaacggcgcgattcg

SEQ ID NO: 815940 - DNA, 75 bp, synthetic construct
  source 1..75: mol_type = other DNA
cgacagacgacgtatatttaccagtaaggccaacccggttgcgccctttgaaccagaagtcaaacgtcaggctgt

SEQ ID NO: 815941 - DNA, 75 bp, synthetic construct
  source 1..75: mol_type = other DNA
gaatatgttgatgaattaacaccagctgccaaactggtgggggccatcaacaccatcgttaatgatgatggctat

SEQ ID NO: 815942 - DNA, 75 bp, synthetic construct
  source 1..75: mol_type = other DNA
aaactctttaaccgtcgggatgagttcttcgataaagccctcgccttcgcgcagcgggttaacgaaaacaccgat

SEQ ID NO: 815943 - DNA, 75 bp, synthetic construct
  source 1..75: mol_type = other DNA
ggacttctggtcactgaatgcgtgtataacccgcatatgacgaagttattgcagcaggcgcaacaagcgggttgc

SEQ ID NO: 815944 - DNA, 75 bp, synthetic construct
  source 1..75: mol_type = other DNA
actggcagcataccgtcccaactaacggtgaaggttttcaggcgttttcgcagcgggtagaaaggtttattgcca

SEQ ID NO: 815945 - DNA, 75 bp, synthetic construct
  source 1..75: mol_type = other DNA
gggtgttggagcgccattgatatcaaccaaaaattcgcgacgttacgcgtcctcaatagccgtgccatcggggtc

SEQ ID NO: 815946 - DNA, 75 bp, synthetic construct
  source 1..75: mol_type = other DNA
atgcgactgtggttaattcgtcatggtgaaacgcaagcgaatatcgatggtctttacagcggtcatgcgcccaca

SEQ ID NO: 815947 - DNA, 75 bp, synthetic construct
  source 1..75: mol_type = other DNA
tatcccgacagacgacgtatatttaccagtaaggccaacccggttgcgccctttgaaccagaagtcaaacgtcag

SEQ ID NO: 815948 - DNA, 75 bp, synthetic construct
  source 1..75: mol_type = other DNA
tgctgcctggcgtttaccagcagaactctgggttatccctgcaccgatgtgctcgctcgctgggttaatgaacgt

SEQ ID NO: 815949 - DNA, 75 bp, synthetic construct
  source 1..75: mol_type = other DNA
aagaagtcgcccgactgaatcaggaaatacgccgccggcagatggagctggatattctaaaaaagacccgggcat

SEQ ID NO: 815950 - DNA, 75 bp, synthetic construct
  source 1..75: mol_type = other DNA
tgattgggctgatggcctatcccatccgccacagtttatcgcctgaaatgcagaataaagccttagaaaaagcgg

SEQ ID NO: 815951 - DNA, 75 bp, synthetic construct
  source 1..75: mol_type = other DNA
atgggaagcaggtggtggcgcaaaagaatccgttcgtcataagcaccgttactctgatgagcaaaaacaggttgc

SEQ ID NO: 815952 - DNA, 75 bp, synthetic construct
  source 1..75: mol_type = other DNA
gctcgtttgctgggttaatgaacgttaccccgacagacgacgtatatttaccagtaagaccagtccggttgcgcc

SEQ ID NO: 815953 - DNA, 75 bp, synthetic construct
  source 1..75: mol_type = other DNA
tattgacggtacacgtccgcagtttggtcgcaacgatccctgcccttgtggttcaggtaaaaaatttaaaaagtg

SEQ ID NO: 815954 - DNA, 75 bp, synthetic construct
  source 1..75: mol_type = other DNA
cggcgcaggcttccgaaatgtcgctgattgatttcgccttcaaaacgacgctgcctatctcaattgctgcaatta

SEQ ID NO: 815955 - DNA, 75 bp, synthetic construct
  source 1..75: mol_type = other DNA
gtcgcctgtctgatgtctctggccgtctcttccgcaaccggtctgggtgttttgctgatggcaaccctatttccg

SEQ ID NO: 815956 - DNA, 75 bp, synthetic construct
  source 1..75: mol_type = other DNA
ctgcgacagaaatatcatcagatgaaagacctgattcgcgaaacgcgtaaaaaactggggcacgaaccggagtgg

SEQ ID NO: 815957 - DNA, 75 bp, synthetic construct
  source 1..75: mol_type = other DNA
cccgcggtcagtaacgcagttgcacgcctgaaggtgatgtttaacgatgagctgttcgtccgttatggtcgtggt

SEQ ID NO: 815958 - DNA, 75 bp, synthetic construct
  source 1..75: mol_type = other DNA
catgaaatgttagatgtcagtgaaatcaccaccactgctcctgcgttttatgccattttgccgttcacgccgatc

SEQ ID NO: 815959 - DNA, 75 bp, synthetic construct
  source 1..75: mol_type = other DNA
taccggtgcttgtcggactggtgattgttatcgttgcgactgagttaatggtgccaggaacagccgccgcagtta

SEQ ID NO: 815960 - DNA, 75 bp, synthetic construct
  source 1..75: mol_type = other DNA
gcgtcggctatgacgaaaaaaccttacccgcagatgcaccaaaaaatggtcactataaagcctatattcttggtg

SEQ ID NO: 815961 - DNA, 75 bp, synthetic construct
  source 1..75: mol_type = other DNA
gagtgcttcggtgccggtactgacgcccgttcgctgactggcgggcagctggtgcaggttacccgccggatggca

SEQ ID NO: 815962 - DNA, 75 bp, synthetic construct
  source 1..75: mol_type = other DNA
tgtcaggcggcattgcgcggcgatctgctggcaaaagacatcattaccggggtgggcgcgcatgtagggcgcatt

SEQ ID NO: 815963 - DNA, 75 bp, synthetic construct
  source 1..75: mol_type = other DNA
tggcagggaactggaagatcagtttgtcacccagcaaatgctgcaacacgcgctttcactattaagcgaaaaaga

SEQ ID NO: 815964 - DNA, 75 bp, synthetic construct
  source 1..75: mol_type = other DNA
cataaactgaccgaacatctgctggagcagggttataagaatatcggatttatcggtgcgcatatggacaaccgc

SEQ ID NO: 815965 - DNA, 75 bp, synthetic construct
  source 1..75: mol_type = other DNA
acggttcagacagttgcgatcaaacacacccaaccttgacatccatccgtattgactacaaaaaaatggggatag

SEQ ID NO: 815966 - DNA, 75 bp, synthetic construct
  source 1..75: mol_type = other DNA
tcgtttcgcgtcatttagtcaaacctggtatgacacggtagataagcaagccagtatcgcgtatcagggcatggc

SEQ ID NO: 815967 - DNA, 75 bp, synthetic construct
  source 1..75: mol_type = other DNA
agccccgatacccctaaagcaaaattctgggggcatatggccgaaacgatgaccggtgcaggcgggcttatttat

SEQ ID NO: 815968 - DNA, 75 bp, synthetic construct
  source 1..75: mol_type = other DNA
gccaaaagcgaaatactggggccatatgccggaaacgtttaccagctcggcaggcgtgaccttcaagcgcccatt

SEQ ID NO: 815969 - DNA, 75 bp, synthetic construct
  source 1..75: mol_type = other DNA
gatgctttgtctgacgcagcctcacgctttatcatcaagcgtgaccctcacgtcagccgcatttgatgagacgaa

SEQ ID NO: 815970 - DNA, 75 bp, synthetic construct
  source 1..75: mol_type = other DNA
tggcaagttactgggggcatatgcctgaaacgtttactacccggtcgggaattgcctttaagcggccattgctta

SEQ ID NO: 815971 - DNA, 75 bp, synthetic construct
  source 1..75: mol_type = other DNA
cgtcaaaatgccgagatgataaataagtcgattacggtaattaacgcggcaggcgcttctgcgaggatgaatagt

SEQ ID NO: 815972 - DNA, 75 bp, synthetic construct
  source 1..75: mol_type = other DNA
ggttgtggtcaatggtggcctggcggacgaaacttcgctcaatgatactgccgcagcatacagcgccatgaccgg

SEQ ID NO: 815973 - DNA, 75 bp, synthetic construct
  source 1..75: mol_type = other DNA
tctcaaacgtgaaggatcgacaaatcgccagaatacactgatggtgaacagaactatcaccgtaatcaacgccgc

SEQ ID NO: 815974 - DNA, 75 bp, synthetic construct
  source 1..75: mol_type = other DNA
atgaaatggtgttggtagccagcaaaaatcatccaacaattaaaggcccgttactgaaacatgatgtttataacg

SEQ ID NO: 815975 - DNA, 75 bp, synthetic construct
  source 1..75: mol_type = other DNA
gctttttgttcgttatggccgtggtattcaaccgactgctcgcgcatttcaactttttggttcagttcgtcaggc

SEQ ID NO: 815976 - DNA, 75 bp, synthetic construct
  source 1..75: mol_type = other DNA
ggggtgccgacaacagccggaaactggtggacttatgagcttactcttagtggcacgtcctggtattatcaggtc

SEQ ID NO: 815977 - DNA, 75 bp, synthetic construct
  source 1..75: mol_type = other DNA
gggttgccgatagcgtcaggaaactggtggatttatgaattacttaactccaatggtagctcctggtattatcag

SEQ ID NO: 815978 - DNA, 75 bp, synthetic construct
  source 1..75: mol_type = other DNA
atccgcaggttacggctaatcaggacctgatattcacggtagtgaccagcccggattctgcgaaggctaactact

SEQ ID NO: 815979 - DNA, 75 bp, synthetic construct
  source 1..75: mol_type = other DNA
ttacgtcagagtgggcgtgtggctcaccgttgtgaaggggatacacgcagacatttcccgcggctgactgagata

SEQ ID NO: 815980 - DNA, 75 bp, synthetic construct
  source 1..75: mol_type = other DNA
gattttgtgcctgacccgcctggctgaagaactggagtccaggggcttattccgtcgagctgcaacggtgtggat

SEQ ID NO: 815981 - DNA, 75 bp, synthetic construct
  source 1..75: mol_type = other DNA
ggtatcccggtggaccgtatcatcaaactggcgcgtgaaattggcacagcaaaacccgcttatatctgccagggc

SEQ ID NO: 815982 - DNA, 75 bp, synthetic construct
  source 1..75: mol_type = other DNA
tgaacggcgggcgaaagagggcgattttcgttccaatttgcatcgtggcggcgcggcaagcgtcgccagtatcac

SEQ ID NO: 815983 - DNA, 75 bp, synthetic construct
  source 1..75: mol_type = other DNA
gtgagcatgagtcttttgaatgacgttcagaaattcattgaagcccatccggggtgtacttccggagacattgcg

SEQ ID NO: 815984 - DNA, 75 bp, synthetic construct
  source 1..75: mol_type = other DNA
gttcgtgaaaccagacctgtgcgcaatttctatgtcggcactaacgacccgcgggtgattttgtgcctgacccgc

SEQ ID NO: 815985 - DNA, 75 bp, synthetic construct
  source 1..75: mol_type = other DNA
atgagtctttttaatgacgttcagaaattcattgaagcccatccggggtgtacttccggggacattgcggatgct

SEQ ID NO: 815986 - DNA, 75 bp, synthetic construct
  source 1..75: mol_type = other DNA
atgagtctattcaatgacgttcagaaattcattgaagcccatccggggtgtacttccggcgacattgcggatgct

SEQ ID NO: 815987 - DNA, 75 bp, synthetic construct
  source 1..75: mol_type = other DNA
ccacaagcggcgtcattatggttacacatcaacccggtgtctggaacctggccgatgatatttgtgacattagcg

SEQ ID NO: 815988 - DNA, 75 bp, synthetic construct
  source 1..75: mol_type = other DNA
atgagtctcttcaatgacgttcagaaattcattgaagcccatccggggtgtacttccggagacattgcggatgct

SEQ ID NO: 815989 - DNA, 75 bp, synthetic construct
  source 1..75: mol_type = other DNA
atgagtctcttaaatgacgttcagaaattcattgaagcccatccggggtgtacttccggcgacattgcggatgct

SEQ ID NO: 815990 - DNA, 75 bp, synthetic construct
  source 1..75: mol_type = other DNA
atgagtcttttgaatgacgttcagaaattcattgaagcccatccggggtgtacttccggtgacattgcggatgct

SEQ ID NO: 815991 - DNA, 75 bp, synthetic construct
  source 1..75: mol_type = other DNA
gcgatgatgaggttgtgccttattttaataacgattgtgaacaaataaaattcgaatttgcttatttaatagttc

SEQ ID NO: 815992 - DNA, 75 bp, synthetic construct
  source 1..75: mol_type = other DNA
cggaaacgatgaaagcggtcactgtgttcaatatcggcactctggatcaaccaggacatgctgacaacaaggcac

SEQ ID NO: 815993 - DNA, 75 bp, synthetic construct
  source 1..75: mol_type = other DNA
taccatcgatgcaaaacgcagtgctgaatatgaagagcaaaacttcagcggtagccgctcagtcatggagtccgt

SEQ ID NO: 815994 - DNA, 75 bp, synthetic construct
  source 1..75: mol_type = other DNA
cctgccactttccgctttgaatgcatcccattcgagggcctgagcaaccgtgagttcaccctgcgtctaagtatt

SEQ ID NO: 815995 - DNA, 75 bp, synthetic construct
  source 1..75: mol_type = other DNA
atgatgattttacaacccatggggcgaaaaggccgtgcacccgctcatgttagcgcatggacacctgaagaagat

SEQ ID NO: 815996 - DNA, 75 bp, synthetic construct
  source 1..75: mol_type = other DNA
tgattggtgctggattaacaaagtgcggagagttacgccccggcacgcgcatatctgattatgatgtacgtctta

SEQ ID NO: 815997 - DNA, 75 bp, synthetic construct
  source 1..75: mol_type = other DNA
atgaaattacaacccatggggggaaaaggctgtgcacccgctcatgtccgcccgtggacacctgaagaagacgcg

SEQ ID NO: 815998 - DNA, 75 bp, synthetic construct
  source 1..75: mol_type = other DNA
tggttggataaaatgaataaatggagcaggttaaaccattgttcgcttttgggtgatgctgccaacttactgatt

SEQ ID NO: 815999 - DNA, 75 bp, synthetic construct
  source 1..75: mol_type = other DNA
gcgatccggcgaaaatctttcaattagatgattctcaagggccggaaaaaataaaattattttcaatgctaaatc

SEQ ID NO: 816000 - DNA, 75 bp, synthetic construct
  source 1..75: mol_type = other DNA
ctgacatataataataaaatatctttgttttctattcttggcggtttttttggagggtgggtgtataatgcaaaa

SEQ ID NO: 816001 - DNA, 75 bp, synthetic construct
  source 1..75: mol_type = other DNA
tatcagtgcgtacgtgctcaatgtggtttccggttctcttccgcttcctcgcccactcgctcactaacgttcggt

SEQ ID NO: 816002 - DNA, 75 bp, synthetic construct
  source 1..75: mol_type = other DNA
tgagaaactgtacagcgaactgcgtgcacaaggtatcgaagtgctgctggatgaccgcaaagagcgtccgggcgt

SEQ ID NO: 816003 - DNA, 75 bp, synthetic construct
  source 1..75: mol_type = other DNA
tctatcggcggcagcgcctctcacgaattccaggggctggcgcagagcggtgaagacgatgtggtcttctccgac

SEQ ID NO: 816004 - DNA, 75 bp, synthetic construct
  source 1..75: mol_type = other DNA
gcaaagcgcgggtacgctctcattcactgttggtggaacagaatggaatatccaggggtatatggtctataccgt

SEQ ID NO: 816005 - DNA, 75 bp, synthetic construct
  source 1..75: mol_type = other DNA
tggagagcatggacgatggggtgatggcgtggaacgaacagggcgtgctgcagtttctcaatgttcaggcggcga

SEQ ID NO: 816006 - DNA, 75 bp, synthetic construct
  source 1..75: mol_type = other DNA
cagccgatcaacaccgccggcgatcggcattttaagcaggcgctacagccatggagtttttgctcgacgccggtg

SEQ ID NO: 816007 - DNA, 75 bp, synthetic construct
  source 1..75: mol_type = other DNA
ctgctgctgcacccggtggagcagatgcggcagctgatgaccagccagctcggtaaagtgagccacacctttgag

SEQ ID NO: 816008 - DNA, 75 bp, synthetic construct
  source 1..75: mol_type = other DNA
cattaaaaacgccatccggtaagattgaaatttactccagccaactggcggaaatcgcccgtacctgggagctgg

SEQ ID NO: 816009 - DNA, 75 bp, synthetic construct
  source 1..75: mol_type = other DNA
cctaccgtactgctttaaccgcaaagaggcaaaagaccacggtgaaggcggtaatctggttggtagcgcgttaca

SEQ ID NO: 816010 - DNA, 75 bp, synthetic construct
  source 1..75: mol_type = other DNA
cctgccgtactgctttaaccgcaaagaagcaaaagaccatggtgaaggcggcaatctggttggtagcgcgttaca

SEQ ID NO: 816011 - DNA, 75 bp, synthetic construct
  source 1..75: mol_type = other DNA
tgcgtgaattgtgtgaccgccacaatgcattgctgatttttgatgaagtacaaactggcgtcgggcgcaccgggg

SEQ ID NO: 816012 - DNA, 75 bp, synthetic construct
  source 1..75: mol_type = other DNA
aggctacagaacgaacatcatgatacttattatcttccggaacatcccgtttgctggactgtatccagggagaaa

SEQ ID NO: 816013 - DNA, 75 bp, synthetic construct
  source 1..75: mol_type = other DNA
atgcgactgtggttaattcgtcatggcgaaacgcaagcgaatgtcgatggtctgtacagcggtcatgcgcccaca

SEQ ID NO: 816014 - DNA, 75 bp, synthetic construct
  source 1..75: mol_type = other DNA
atgactgttcagactcaggaaaccgggaaggtggtctcttccgtcatcgcccagtcatggcaccgctgcagcaag

SEQ ID NO: 816015 - DNA, 75 bp, synthetic construct
  source 1..75: mol_type = other DNA
catggctggggttttacaattaatgatgaaattcgggtcatccgcaatgcgcaggaacacctgcgggttgtaaac

SEQ ID NO: 816016 - DNA, 75 bp, synthetic construct
  source 1..75: mol_type = other DNA
acttggtagcgttaaaggggattacaaacgcgtttcgccaaacgaccatgctaattttggtcagtccaccaatga

SEQ ID NO: 816017 - DNA, 75 bp, synthetic construct
  source 1..75: mol_type = other DNA
cgcatcgtgagcggtgcttacggaaaagcagcaagcgcgctgcatcgggtgaagagtggtatctgtcagggaatt

SEQ ID NO: 816018 - DNA, 75 bp, synthetic construct
  source 1..75: mol_type = other DNA
gtatgttgatagcaaaatatctctgtctgttgaagcccttttggctgcgtaagaataataaaacttcagtgttgt

SEQ ID NO: 816019 - DNA, 75 bp, synthetic construct
  source 1..75: mol_type = other DNA
aaccctgaccaacgtatcgctgaagacattctcttactgatcagcaaaacgctcagcctttcatttggcttcatc

SEQ ID NO: 816020 - DNA, 75 bp, synthetic construct
  source 1..75: mol_type = other DNA
gaataataaaacttcagtgttgttaatcattattatcctcgccatgatccttggcgtggttaaaattcaggtctg

SEQ ID NO: 816021 - DNA, 75 bp, synthetic construct
  source 1..75: mol_type = other DNA
atgttgatagcaaagtatctctgtctgttgaagcccttttggctgcgtaagaataataaaacttcagtgttgtta

SEQ ID NO: 816022 - DNA, 75 bp, synthetic construct
  source 1..75: mol_type = other DNA
ttggtctggggaaattggctgcgcgtattcatgaccacgatcgctggggagatattctttccagcggcgaaaaac

SEQ ID NO: 816023 - DNA, 75 bp, synthetic construct
  source 1..75: mol_type = other DNA
cactgctggccgtggtttaaaggtgatatttcttctcctgctgacagttggtatgtgtcacaaacaccgttaatc

SEQ ID NO: 816024 - DNA, 75 bp, synthetic construct
  source 1..75: mol_type = other DNA
gcaacgatccctgcccttgtggttcaggtaaaaatttaaaagtgctgcggccaataatggttgacggtacggttt

SEQ ID NO: 816025 - DNA, 75 bp, synthetic construct
  source 1..75: mol_type = other DNA
gaaaatccagatggcttgctgcctggtggctacgggtgaagcggcaactatcagcgatggcctggcgcgcgttaa

SEQ ID NO: 816026 - DNA, 75 bp, synthetic construct
  source 1..75: mol_type = other DNA
gaaaatccagatggcttgctgcctggtggcaacaggtgaggcggcaactattagcgatggcctggcgcgcgttaa

SEQ ID NO: 816027 - DNA, 75 bp, synthetic construct
  source 1..75: mol_type = other DNA
aaggcgatgctgacgctcgggcaagcggcgctggaagatgcctgggaatatatggcaccccgagagtgcgccctg

SEQ ID NO: 816028 - DNA, 75 bp, synthetic construct
  source 1..75: mol_type = other DNA
atgagaggcggttttcacaacgatgaccaggctaactctccctggattgcagcatcctgggagcgatgccgcaaa

SEQ ID NO: 816029 - DNA, 75 bp, synthetic construct
  source 1..75: mol_type = other DNA
gacggtacacgtccgcagtttggtcgcaacgatccctgcccttgtggttcaggtaaaaatttaaaaagtgctgcg

SEQ ID NO: 816030 - DNA, 75 bp, synthetic construct
  source 1..75: mol_type = other DNA
gcgaaaccgcgctgaactcttcaactgacgtgctgttcactgcggcagcttgccaggcggaagacgatcgtctgg

SEQ ID NO: 816031 - DNA, 75 bp, synthetic construct
  source 1..75: mol_type = other DNA
attccggggcttttgaaagtgatggtggtgggggaaggattactcagcgctgcgcgcttcgcccttcgggtcgtt

SEQ ID NO: 816032 - DNA, 75 bp, synthetic construct
  source 1..75: mol_type = other DNA
tctggctaaaaacctgatgtttgctcaaaccaccaaaggtgttctggagacaggcatctaccgtggtgtagtaag

SEQ ID NO: 816033 - DNA, 75 bp, synthetic construct
  source 1..75: mol_type = other DNA
ttctggttgccgcgatgttgtctgttgctggctctgcgttagcagtacaaaaagatatcactgtaacggctaacg

SEQ ID NO: 816034 - DNA, 75 bp, synthetic construct
  source 1..75: mol_type = other DNA
gaaaaccacgcagatatgcagttgcctaaagatgaccgccgttggtttatacctgaggaggttagctaccccatc

SEQ ID NO: 816035 - DNA, 75 bp, synthetic construct
  source 1..75: mol_type = other DNA
ctggcactcgagtcgaaccttggtcgaagcttctcatccttccccgcatgggcagaatatttaattgcggattcg

SEQ ID NO: 816036 - DNA, 75 bp, synthetic construct
  source 1..75: mol_type = other DNA
gaagcttctcatcctttcccgcatgggcagaatatttaattgcggattcgtttgagagttcacggacttttgaaa

SEQ ID NO: 816037 - DNA, 75 bp, synthetic construct
  source 1..75: mol_type = other DNA
cgttggccgcattttgccgaagcaacggcccgcagcgccgcactttgtgctgaacaagagagcctgttggatgaa

SEQ ID NO: 816038 - DNA, 75 bp, synthetic construct
  source 1..75: mol_type = other DNA
cttattcgcccgttgctcgcccgcacgcggggggaactggtgcagtgggcgcgtcagtatgatttacgctggatt

SEQ ID NO: 816039 - DNA, 75 bp, synthetic construct
  source 1..75: mol_type = other DNA
ctgctggcggatgatttagcacactgtcaaacgtcgcagggaacgttgctgattacgccaatgatgacgatgagc

SEQ ID NO: 816040 - DNA, 75 bp, synthetic construct
  source 1..75: mol_type = other DNA
aagaggggctaggtattgaggcccaggcgcggcaggcacgttatcaggcatttgctcgtaccctgttacctggtg

SEQ ID NO: 816041 - DNA, 75 bp, synthetic construct
  source 1..75: mol_type = other DNA
tggcaacagccgctggaattaccggcaagtctgggaagtgtgcaacttattgcgggtggagatattcgccctccg

SEQ ID NO: 816042 - DNA, 75 bp, synthetic construct
  source 1..75: mol_type = other DNA
gtggttgagcgcgtacaacttgcgcaagaggggctaggtattgaggcccaggcgcggcaggcgcgttatcaggca

SEQ ID NO: 816043 - DNA, 75 bp, synthetic construct
  source 1..75: mol_type = other DNA
taaccaaagacacgttaatgagattaacctcgctggtgagccagccagaggttaagggggaggccaagtacctcc

SEQ ID NO: 816044 - DNA, 75 bp, synthetic construct
  source 1..75: mol_type = other DNA
aggtgcgcagaaacagctggcgaagtatatccagcaagttgacgaccaggtaaatgaagaactggaacaagacct

SEQ ID NO: 816045 - DNA, 75 bp, synthetic construct
  source 1..75: mol_type = other DNA
tcaacagacacaggatgtaacccaggatactatgttccttttagggagcgatgcactggagtctatgattaagcg

SEQ ID NO: 816046 - DNA, 75 bp, synthetic construct
  source 1..75: mol_type = other DNA
taaaagggcaatcaccttgattctggcggttctgctgggtggcatggttggggcgggtattgtgctggggcgtaa

SEQ ID NO: 816047 - DNA, 75 bp, synthetic construct
  source 1..75: mol_type = other DNA
cagttgtggcgtgggaaggtgacaatcttcatcactgttattgtggcaatcgctctggctatcggatatctggcg

SEQ ID NO: 816048 - DNA, 75 bp, synthetic construct
  source 1..75: mol_type = other DNA
gttgccaaagaaaagtggacttccacagctatcgttactcaacctgatgtgggacaaatcgctggttataacaat

SEQ ID NO: 816049 - DNA, 75 bp, synthetic construct
  source 1..75: mol_type = other DNA
tgtcttatgtgggtgaaacacctgaaggtgcgcagaaacagctggcgaagtatatccagcaagttgacgaccagg

SEQ ID NO: 816050 - DNA, 75 bp, synthetic construct
  source 1..75: mol_type = other DNA
aaggttttatgaagtaatgatcccaattgcagaccgcgagtttgcggcgcacttggataaattgaagaaggagtg

SEQ ID NO: 816051 - DNA, 75 bp, synthetic construct
  source 1..75: mol_type = other DNA
tcaacgataccgacagggccagcgtgcttgcggcgctgttggtcctgcgggaaaaggggccggggttatccagac

SEQ ID NO: 816052 - DNA, 75 bp, synthetic construct
  source 1..75: mol_type = other DNA
tttggcgatctccggtatggctcgcgccgaggcgcggttaattgtcagccgcgaagtaagcgacattctagaaag

SEQ ID NO: 816053 - DNA, 75 bp, synthetic construct
  source 1..75: mol_type = other DNA
gcttaccgctatgtgatgaaacctacgttacccatccgccgcgatagtcctaaaagggcaatcaccttgattctg

SEQ ID NO: 816054 - DNA, 75 bp, synthetic construct
  source 1..75: mol_type = other DNA
tgaatcaagagctagaaaaggatctcaaagacaacattgctctgggacggaaaaacttgcaggactctttaagaa

SEQ ID NO: 816055 - DNA, 75 bp, synthetic construct
  source 1..75: mol_type = other DNA
cacacaaaacagcctgtcttattgcacaacacggtgaaaattacatgcatattgcctgcttatttctgcgtaaag

SEQ ID NO: 816056 - DNA, 75 bp, synthetic construct
  source 1..75: mol_type = other DNA
tttacgcttgggcgcgtttgaaatccgccgctatcagtcgcaactgtggtggattaaatccgtcaccgggcaaag

SEQ ID NO: 816057 - DNA, 75 bp, synthetic construct
  source 1..75: mol_type = other DNA
ttgactttatcgtcttctctaccggtatccgtccgcgcgataagctggcaacccagtgtggtctggacgttgctc

SEQ ID NO: 816058 - DNA, 75 bp, synthetic construct
  source 1..75: mol_type = other DNA
tgtcgaagcgcgtaaaaccatgcgttttgccgacggtagcgagctggaagttgactttatcgtcttctctaccgg

SEQ ID NO: 816059 - DNA, 75 bp, synthetic construct
  source 1..75: mol_type = other DNA
agcgaagacaacaaaaccctgctcggtgcggtactggtgggcgataccagcgactacggcaacctgctgcaactg

SEQ ID NO: 816060 - DNA, 75 bp, synthetic construct
  source 1..75: mol_type = other DNA
cacagagaagctacagcgtaaacagtgagcctaacgtgtccgttatcaagctgggcgatggctatgaacagcgcc

SEQ ID NO: 816061 - DNA, 75 bp, synthetic construct
  source 1..75: mol_type = other DNA
cgcaacgaagctacagcgtgaccagggagccggacgtatcagttgttaagctgggcgatggttatgagcaaagac

SEQ ID NO: 816062 - DNA, 75 bp, synthetic construct
  source 1..75: mol_type = other DNA
tcctgcttcgacgtcaccaaaggcgatctgattgctgccatcaacaaaggctgccacaccgttgcggcgctgaaa

SEQ ID NO: 816063 - DNA, 75 bp, synthetic construct
  source 1..75: mol_type = other DNA
gaaaccggtcatgcctatgcgaaagcactgcgtatggcgaaaacctgcgtgggtagcacctggtgccgctacggc

SEQ ID NO: 816064 - DNA, 75 bp, synthetic construct
  source 1..75: mol_type = other DNA
gccgaaaccaaagccggtacgggctgcggcgggttgtattccgctggtcactcaggtactgaacgcggaactggc

SEQ ID NO: 816065 - DNA, 75 bp, synthetic construct
  source 1..75: mol_type = other DNA
ccatgcgcagcgccgatgatataaccgctatgtggaaagcatggaatatcaaaccagatcagcaagtttcattct

SEQ ID NO: 816066 - DNA, 75 bp, synthetic construct
  source 1..75: mol_type = other DNA
gatcccgcgctctccgggcggtgaaatcaccccggaagggctgatggcggtaggtcgtatcgcgcgtgaatttaa

SEQ ID NO: 816067 - DNA, 75 bp, synthetic construct
  source 1..75: mol_type = other DNA
ggatctgctggcagcggatatcgatcgcgaaacgctgatcaaatatctcgaccgcttcatgatgttctacatccg

SEQ ID NO: 816068 - DNA, 75 bp, synthetic construct
  source 1..75: mol_type = other DNA
ttcggtgtctccggctgtacccgtgaatgttcagaagctcagggtaaagacgtgggtattatcgccactgaaaaa

SEQ ID NO: 816069 - DNA, 75 bp, synthetic construct
  source 1..75: mol_type = other DNA
gatcaacattccggaaggtcgcttccatgcctatggtcaggatctgatcgttcgcaaaggcgagttgctgttctc

SEQ ID NO: 816070 - DNA, 75 bp, synthetic construct
  source 1..75: mol_type = other DNA
ctcatatcgctgagaaaggtaaccatacggttctggaaaagaatgatgttcaagctatgaatgatgtgctaaaaa

SEQ ID NO: 816071 - DNA, 75 bp, synthetic construct
  source 1..75: mol_type = other DNA
ggaggttgagtttacagaagctgcacaaaaaacattaaatacaattaaagaacttgatcttattgaaggtttaga

SEQ ID NO: 816072 - DNA, 75 bp, synthetic construct
  source 1..75: mol_type = other DNA
taataagatttatgcctatgctatgaataacgcgatatcgttttcaaaagttattaataacgatataaagaatga

SEQ ID NO: 816073 - DNA, 75 bp, synthetic construct
  source 1..75: mol_type = other DNA
gaagacgaaagtaatcaggacgactcatacgatcgtaactttctgcgcctgcgcgtagtgccgttattgcagcag

SEQ ID NO: 816074 - DNA, 75 bp, synthetic construct
  source 1..75: mol_type = other DNA
tcagataaagaattaagagcatttgatgggagcgctattaattttgatgataaaattgattgcatatacattcaa

SEQ ID NO: 816075 - DNA, 75 bp, synthetic construct
  source 1..75: mol_type = other DNA
tccttcgacttctcaacgattattataagcaaggaatgactacaaagaaatactacggcactgatagcggtaact

SEQ ID NO: 816076 - DNA, 75 bp, synthetic construct
  source 1..75: mol_type = other DNA
ctgacccggcgatgtcacaacaggctgcattatcttacttgttgcgtggacaagggctggagagcggccaaagcg

SEQ ID NO: 816077 - DNA, 75 bp, synthetic construct
  source 1..75: mol_type = other DNA
aacttgacgtacgcgttgagcaaatctcgcagcccgatgtgagtatcaacctcgtcaccctgaatgccaaaggca

SEQ ID NO: 816078 - DNA, 75 bp, synthetic construct
  source 1..75: mol_type = other DNA
tcggcgtcgctatcaccctcctgttgctgctgggatcggttgcgtttctggtcggcaccaccagcggcctgcatt

SEQ ID NO: 816079 - DNA, 75 bp, synthetic construct
  source 1..75: mol_type = other DNA
gtcagaagatacggagcatggatgggttgaagtagactggccccctgaatctccagacaaccaatatcacttatt

SEQ ID NO: 816080 - DNA, 75 bp, synthetic construct
  source 1..75: mol_type = other DNA
aacttgttaatatcaacggtgatgttaatgatcctgataccctgcgtccattgttatctcttgaggattttttta

SEQ ID NO: 816081 - DNA, 75 bp, synthetic construct
  source 1..75: mol_type = other DNA
ctgaaactgaaacttaccggtaaaatgaccgattacacgctctctatgcgtacggcagtgaagggacaggagatc

SEQ ID NO: 816082 - DNA, 75 bp, synthetic construct
  source 1..75: mol_type = other DNA
cataaagacaacattgcttactttggcaacggcgatgatgaagcgcatatggtgtatcagttctcgctgccgccg

SEQ ID NO: 816083 - DNA, 75 bp, synthetic construct
  source 1..75: mol_type = other DNA
ttacctggaaaaaggcgcagagtatgtccgtctggatgccgttggctttatgtggaaagagccgggaacaagctg

SEQ ID NO: 816084 - DNA, 75 bp, synthetic construct
  source 1..75: mol_type = other DNA
gcattagtaaactggaaaaataatcccgacggtacgcgtagcccctatgaaatgaatgtcacctatatggatgcg

SEQ ID NO: 816085 - DNA, 75 bp, synthetic construct
  source 1..75: mol_type = other DNA
ggcgtaatgatgacctggaaggtgcggtgattggcgcgttttttctgcgtggggctgatccggaagtgatggata

SEQ ID NO: 816086 - DNA, 75 bp, synthetic construct
  source 1..75: mol_type = other DNA
ggcatctgccgacaggctcgtgtttcaggtgtgattgatcctgtgctgctgtgtaatgaaatgccggaacttgct

SEQ ID NO: 816087 - DNA, 75 bp, synthetic construct
  source 1..75: mol_type = other DNA
gtgcaaaaacagaacgttgaggcgctttgtgcgtgggcgcaaaacctgacactaccttccagcaacaccacctgg

SEQ ID NO: 816088 - DNA, 75 bp, synthetic construct
  source 1..75: mol_type = other DNA
gtaatgcgtattcaaagaagtaacgctgatggtaattgtctgactggattgtttaatgtcagtaaaaatattcag

SEQ ID NO: 816089 - DNA, 75 bp, synthetic construct
  source 1..75: mol_type = other DNA
cacccgtccgcgtgcgttaccgctattaacaccgtttcaaatggatgataattccacgcgccatttatggaccac

SEQ ID NO: 816090 - DNA, 75 bp, synthetic construct
  source 1..75: mol_type = other DNA
atgggaccgctaccacgaaaaggcaacatgaaacagaaaattacggattacctggacgaaatctacggtggaaca

SEQ ID NO: 816091 - DNA, 75 bp, synthetic construct
  source 1..75: mol_type = other DNA
ggaaaaaacacatctgattatcaaactgttacggtcgattattgataacgttgcgccaggtacagtgatcattac

SEQ ID NO: 816092 - DNA, 75 bp, synthetic construct
  source 1..75: mol_type = other DNA
taccatcgatacggttaattcatccgtaatgcgtattcaaagaagtaacgcagagggtaattgtctgaccggatt

SEQ ID NO: 816093 - DNA, 75 bp, synthetic construct
  source 1..75: mol_type = other DNA
gtcgggatctgattagtgaagttgatatattgggtaatgaaataacgctgcgcccctggcaggttatgtggatta

SEQ ID NO: 816094 - DNA, 75 bp, synthetic construct
  source 1..75: mol_type = other DNA
ggtgactgagcaggggcatggtgttcttctgttcacaatggaaatggcgaacatccagattggtgagcgcatggt

SEQ ID NO: 816095 - DNA, 75 bp, synthetic construct
  source 1..75: mol_type = other DNA
gctatcgcaccatgtacagaggtgctggcagccgcacgtcaaaaaggaattatggttattcatactcgtgaaggc

SEQ ID NO: 816096 - DNA, 75 bp, synthetic construct
  source 1..75: mol_type = other DNA
attaaacaaaaagatcaagatccagcgatctttctaaacagtgatgacaacaaagttcgtcaacgtttttcatgt

SEQ ID NO: 816097 - DNA, 75 bp, synthetic construct
  source 1..75: mol_type = other DNA
ttatccagcctaccgatccggtaccgattgtaggcatgataagatgcgcaagcgtcgcatccggcatcagcgcac

SEQ ID NO: 816098 - DNA, 75 bp, synthetic construct
  source 1..75: mol_type = other DNA
actgactggttacagcccgtagtttctgatttaatggaacgattacctgagaatgatacagtagatataacttaa

SEQ ID NO: 816099 - DNA, 75 bp, synthetic construct
  source 1..75: mol_type = other DNA
ggaaaacgggccgcagtgcggcggcagacaggcagagacagctgcgccatcaggcgcagtggccttacacaccgt

SEQ ID NO: 816100 - DNA, 75 bp, synthetic construct
  source 1..75: mol_type = other DNA
atttgtttcaaaagaactaaaaaggaaaaactcaatttattctggtgtcccggcccagttaataagagagaatat

SEQ ID NO: 816101 - DNA, 75 bp, synthetic construct
  source 1..75: mol_type = other DNA
ctgcgacgcaatgccgcactgcgcgatgcagaaaaaacactgaccgaagcattacagaatttacgtgatgcgcat

SEQ ID NO: 816102 - DNA, 75 bp, synthetic construct
  source 1..75: mol_type = other DNA
atcgcagaaatcaatatcacgaaacaacgtaacggttctctgggaacgatttaccggcgtttttataacggacat

SEQ ID NO: 816103 - DNA, 75 bp, synthetic construct
  source 1..75: mol_type = other DNA
tttattgcggctcgtccgtcaatgggcaaaaccgaactggcgctggacatcatcgacaaggtgactgagcagggg

SEQ ID NO: 816104 - DNA, 75 bp, synthetic construct
  source 1..75: mol_type = other DNA
aactgacgatggtctttgagtccttcggcttcaaacacggcattcctattgatgcagattacgtctttgatgtgc

SEQ ID NO: 816105 - DNA, 75 bp, synthetic construct
  source 1..75: mol_type = other DNA
aattcgtcgttacagtgacacgcgccgactgcatccgctttccagcaaaaacctgtcgctggaaagtgctatcga

SEQ ID NO: 816106 - DNA, 75 bp, synthetic construct
  source 1..75: mol_type = other DNA
ctggcagactacttccgctcacgcggtaaaaacgtccagtcacgccatcgtacgctggaaaaacgtaaaccatga

SEQ ID NO: 816107 - DNA, 75 bp, synthetic construct
  source 1..75: mol_type = other DNA
aggggcttaaaggcctggcaaaatccggtggttttccgttgattgcgctgagccagctttcccgtggtgtggagt

SEQ ID NO: 816108 - DNA, 75 bp, synthetic construct
  source 1..75: mol_type = other DNA
cactcgattgtgcctaaagaaaaagaattattagataatggggtattacgtagacctattatgaaacatgatggg

SEQ ID NO: 816109 - DNA, 75 bp, synthetic construct
  source 1..75: mol_type = other DNA
atttatttgtaatccagttttggaaaaacgccagttttcaaacgaaagtcagttaaaaaactgccgggatatgat

SEQ ID NO: 816110 - DNA, 75 bp, synthetic construct
  source 1..75: mol_type = other DNA
ttttctgctggggggcatatcgcctcaacgggtggggaatcagattggtgatttcaaacgttcttctgacagtaa

SEQ ID NO: 816111 - DNA, 75 bp, synthetic construct
  source 1..75: mol_type = other DNA
ttgaatatcggaatcagacctatatgcctcgtgtttaactgtccaactttttggggtcagtacaccagcgaaagt

SEQ ID NO: 816112 - DNA, 75 bp, synthetic construct
  source 1..75: mol_type = other DNA
gtggaaatcatggcggcgaacgggttcatctttgaccagttcctcagcagcgaattaaacacccgcaccgatgaa

SEQ ID NO: 816113 - DNA, 75 bp, synthetic construct
  source 1..75: mol_type = other DNA
ttctgagaattcctgataaagatgctcatatagaagatatattacgttttaaagatgattgtcaggatgatctta

SEQ ID NO: 816114 - DNA, 75 bp, synthetic construct
  source 1..75: mol_type = other DNA
gattcttatgccgtgggtgaagacggcaaagccggtattcgtggccgattagtgtcgaaacaaggccagctggtg

SEQ ID NO: 816115 - DNA, 75 bp, synthetic construct
  source 1..75: mol_type = other DNA
cgcaggaagtggtcgctcaagaacagaaagatctgcgtatccgtcagattcaggaagcgttgcagtatgcgaatc

SEQ ID NO: 816116 - DNA, 75 bp, synthetic construct
  source 1..75: mol_type = other DNA
tttcttatgtcgggcaaactgcggcggacgcacagaagaagctggctgaatatattcaacaggttgatgaccagg

SEQ ID NO: 816117 - DNA, 75 bp, synthetic construct
  source 1..75: mol_type = other DNA
aatacgtcgcatcaatgaaggttccactcagccatttctttgcaaatgtgatgatgggcagttgtatgttttgaa

SEQ ID NO: 816118 - DNA, 75 bp, synthetic construct
  source 1..75: mol_type = other DNA
cctattcagagtaaaacgtctccagaggaagaaacgtgggcggttcagtatcaatatcaaggtgccatgaaaaaa

SEQ ID NO: 816119 - DNA, 75 bp, synthetic construct
  source 1..75: mol_type = other DNA
gtgattcaggccaacctgcaactccccgaccgcccggattgccccggctactccttcccgtgggtaggcggcgaa

SEQ ID NO: 816120 - DNA, 75 bp, synthetic construct
  source 1..75: mol_type = other DNA
cgcggcgcggatggttatctgttaaaagatatggaaccggaagatctgctgaaagcattgcatcaggcagctgct

SEQ ID NO: 816121 - DNA, 75 bp, synthetic construct
  source 1..75: mol_type = other DNA
aaatggcgaacattcagatcggtgaacgcatggtgtctgctgccggaggaatgcctgtatcgcgcctgaaatctg

SEQ ID NO: 816122 - DNA, 75 bp, synthetic construct
  source 1..75: mol_type = other DNA
attcagccggttcacattgatgatgtccttccggaagtggtcgaccgtgttgaatgccgcaatcagggactggag

SEQ ID NO: 816123 - DNA, 75 bp, synthetic construct
  source 1..75: mol_type = other DNA
acgagcgtatagggatatctacacaggcatctgcagacaggctcgtgtttcaggtgtgattgatcctgtgctgct

SEQ ID NO: 816124 - DNA, 75 bp, synthetic construct
  source 1..75: mol_type = other DNA
ccggtgattactgataccgggcgcaaaacctgggtgaagtcgtcactggagcactatgttacggcgttgcgtcgc

SEQ ID NO: 816125 - DNA, 75 bp, synthetic construct
  source 1..75: mol_type = other DNA
attcagccggtacatattgatgatgtgcttccggaggtggttgagcgtgttgaatgccggaatcagggacaggag

SEQ ID NO: 816126 - DNA, 75 bp, synthetic construct
  source 1..75: mol_type = other DNA
ctgcggcgaaatgccgtactgcgcgatgcagaaaaaacactgaccgaagcattacagaatttacgggatgcacat

SEQ ID NO: 816127 - DNA, 75 bp, synthetic construct
  source 1..75: mol_type = other DNA
ctgtaatggagaaaacaaaggatgctgtagttgctacaatggatatcggttggaatgatgtaggagcatggtctt

SEQ ID NO: 816128 - DNA, 75 bp, synthetic construct
  source 1..75: mol_type = other DNA
tcctgttgatcgacgatcatccgatgttgcgaactggtgtgaaacagcttatcagcatggcccccgatatcacgg

SEQ ID NO: 816129 - DNA, 75 bp, synthetic construct
  source 1..75: mol_type = other DNA
gcgagcgcgatattctgaaactgattgctcagggcttaccgaataagatgatcgcccgtcgcctggacatcactg

SEQ ID NO: 816130 - DNA, 75 bp, synthetic construct
  source 1..75: mol_type = other DNA
tccggggaaatcgaggcggatgccgacatcattctgatgctttacagggatgaggtatacaacccggaaactcag

SEQ ID NO: 816131 - DNA, 75 bp, synthetic construct
  source 1..75: mol_type = other DNA
tccggagaaatagaggcggatgctgacattattctgatgctttacagggatgaagtatacaacccggatacgcag

SEQ ID NO: 816132 - DNA, 75 bp, synthetic construct
  source 1..75: mol_type = other DNA
gaagttaaagccatgctttctgccgccgctaccgggcacagtggttgcatggtaataccatcacctgtactggat

SEQ ID NO: 816133 - DNA, 75 bp, synthetic construct
  source 1..75: mol_type = other DNA
aatggttacaccaacgagccggtattacggctggcgaaaaagctcattgacgcgacgtttgccgatcgcgtgttc

SEQ ID NO: 816134 - DNA, 75 bp, synthetic construct
  source 1..75: mol_type = other DNA
aactaccgccaaagcgctgggcggcggtttcccggttggtgcgttgttggcaaccgaagagtgcgccagcgtgat

SEQ ID NO: 816135 - DNA, 75 bp, synthetic construct
  source 1..75: mol_type = other DNA
gcgaaacaaatttctcaggaagcggcgaaagcgggcgtaatggtgctgattgccggtggcaacgtggtgcgtttt

SEQ ID NO: 816136 - DNA, 75 bp, synthetic construct
  source 1..75: mol_type = other DNA
gagaagtcgtcgctaagcttggtccatccttggaagcaggaagaatcttgcttcttgaccttgaaaaacagaagt

SEQ ID NO: 816137 - DNA, 75 bp, synthetic construct
  source 1..75: mol_type = other DNA
aactgtatgcatatatgcactacggcgtgacgcccgatctgttaactaccgccaaagcgctgggcggcggtttcc

SEQ ID NO: 816138 - DNA, 75 bp, synthetic construct
  source 1..75: mol_type = other DNA
cgatttcgcgggtggcattgcagtgaacgcgctgggccatgcgcatccggaattgcgcgaggcgctaaacgagca

SEQ ID NO: 816139 - DNA, 75 bp, synthetic construct
  source 1..75: mol_type = other DNA
gcaaacccaggacgttacccaggaaaccatgttcctgttaggtaccgaagcgctgggctcaatggttgccaatga

SEQ ID NO: 816140 - DNA, 75 bp, synthetic construct
  source 1..75: mol_type = other DNA
gccagcgtcgcccggtgatgtcggacctgcgcgattccggcagtgttgagcaggacgctgacagcattttgtttt

SEQ ID NO: 816141 - DNA, 75 bp, synthetic construct
  source 1..75: mol_type = other DNA
gatttggatgcgattaacgagctttccgaactcgtctgcgccgcagaatgcggagagcgcattgaaccgtataag

SEQ ID NO: 816142 - DNA, 75 bp, synthetic construct
  source 1..75: mol_type = other DNA
aagcgctggagtcgatgattaagcacgaggcgactcgtccgttggtgttctcatcaaactactatcagactcgtc

SEQ ID NO: 816143 - DNA, 75 bp, synthetic construct
  source 1..75: mol_type = other DNA
atgagagtagaaaataatagtgtttctgggcaaaaccatgacccggaacaggttgatttgattgattcactggtc

SEQ ID NO: 816144 - DNA, 75 bp, synthetic construct
  source 1..75: mol_type = other DNA
gtgctgctgggcgggatgattggtgccggtgttgtgctgggccgcaacgcggtacggaattacaaagcaaaagca

SEQ ID NO: 816145 - DNA, 75 bp, synthetic construct
  source 1..75: mol_type = other DNA
gtttatcaccttgggatggctgctctcggtccgattgactacttcaatgttcaggacaagatggctggtcgtgag

SEQ ID NO: 816146 - DNA, 75 bp, synthetic construct
  source 1..75: mol_type = other DNA
ggtcgcttcgaaggaagaaatatagatggcttcacaagtgctgaagggcttgcaaaccgtaatgcgatagaagaa

SEQ ID NO: 816147 - DNA, 75 bp, synthetic construct
  source 1..75: mol_type = other DNA
tcaggaacagcaacagaaagcgattagtgcgttcaataaggttcatgctgatgcatgggcttctggtgatccatc

SEQ ID NO: 816148 - DNA, 75 bp, synthetic construct
  source 1..75: mol_type = other DNA
gcgcgtagtgccgttattgcagcagcgttggccgcattttgccgaagcaacagcccgcagcgccgcactttgcgc

SEQ ID NO: 816149 - DNA, 75 bp, synthetic construct
  source 1..75: mol_type = other DNA
actggctcgctcaggtgcaaataacgttggtctgaccgcgttacgtggtctggctggagttgctgatatttataa

SEQ ID NO: 816150 - DNA, 75 bp, synthetic construct
  source 1..75: mol_type = other DNA
aggttgcagcaagggaggctgaatcaatgggatatagttcatcaggttatgacacatatgttagtgagcgaaaat

SEQ ID NO: 816151 - DNA, 75 bp, synthetic construct
  source 1..75: mol_type = other DNA
tagcctctccaatgctgaaggccaaaaactggaaaacctgatcgcgaaactcgatataacacagcctgaagaggt

SEQ ID NO: 816152 - DNA, 75 bp, synthetic construct
  source 1..75: mol_type = other DNA
tttcagatgctgagggtaaaaaattatccgatgcggttggtgccctaagtcccaaaatgagtgaaaaggcttttc

SEQ ID NO: 816153 - DNA, 75 bp, synthetic construct
  source 1..75: mol_type = other DNA
gctctggatagacagatagccagagaaagcaatcagttaaagcttgaagagctaaaacagaaacaggcagatgtt

SEQ ID NO: 816154 - DNA, 75 bp, synthetic construct
  source 1..75: mol_type = other DNA
tcgtactcgcttcaccgacaacgtcaaccagacgcaaagtgataaaccagtcgaaaatcccggcatcgccgcccg

SEQ ID NO: 816155 - DNA, 75 bp, synthetic construct
  source 1..75: mol_type = other DNA
cgttgcagaagcaaagatgtattttcaaggtatgccacaggttgatttctcaagccctgaagcactgcaacaatc

SEQ ID NO: 816156 - DNA, 75 bp, synthetic construct
  source 1..75: mol_type = other DNA
gtgatgcggcagctagtcgtaatgctgccgattcaatgacaacgcttgctgacacgcttgagaaggagaagccaa

SEQ ID NO: 816157 - DNA, 75 bp, synthetic construct
  source 1..75: mol_type = other DNA
agcactgttaaaaaacagtttgattatcaggagccagtacagaatacgccagcgcaacaacctactactggcagt

SEQ ID NO: 816158 - DNA, 75 bp, synthetic construct
  source 1..75: mol_type = other DNA
atggacaaagaatataaaacactcatcaacaaagcacttgagcgtttttattttcgcttaagtgcatcaggcgct

SEQ ID NO: 816159 - DNA, 75 bp, synthetic construct
  source 1..75: mol_type = other DNA
ccgacccagcccgctacggggcgtttatgacaacaataataatttcataacctgtaaggatgcgtcggtcacgct

SEQ ID NO: 816160 - DNA, 75 bp, synthetic construct
  source 1..75: mol_type = other DNA
tcatgctgaatgggggattaaacctaaaattcttggtgttggtggtggcgcaggtgtcagaggtggtggtcgggc

SEQ ID NO: 816161 - DNA, 75 bp, synthetic construct
  source 1..75: mol_type = other DNA
tttctacggggccagccagtcggccagtcagattatgcgtaagaatgtgacaataaatgcactgaaagagggtat

SEQ ID NO: 816162 - DNA, 75 bp, synthetic construct
  source 1..75: mol_type = other DNA
aaaggaatggagagcgtaccttcgggtggtggcagccaggatattattgctgatcatcaggggcatcaggccatt

SEQ ID NO: 816163 - DNA, 75 bp, synthetic construct
  source 1..75: mol_type = other DNA
gtggaaagctatgcgaaggcgcataatatcagtaatgagcaggcgacgagagaactggcatccagaagtacgaga

SEQ ID NO: 816164 - DNA, 75 bp, synthetic construct
  source 1..75: mol_type = other DNA
ccactttcactgacgacccgtatcggacatgcgatggtggccggctatgagatggtgtttgctcagccggacagc

SEQ ID NO: 816165 - DNA, 75 bp, synthetic construct
  source 1..75: mol_type = other DNA
tttatttatacccaaagaataaataaaggcttcctgcttacactggctgaattatttaaaaagctaattaagtaa

SEQ ID NO: 816166 - DNA, 75 bp, synthetic construct
  source 1..75: mol_type = other DNA
aaccgtaaagagtttgcgcgccacagagaacaagaaatcaaaaaattacagacggaatctactaaaaataatatg

SEQ ID NO: 816167 - DNA, 75 bp, synthetic construct
  source 1..75: mol_type = other DNA
acccgtaaagagtttgcacgccacagagaacaagaaatcaaaaaattacagacggaatctgctaaaaataatata

SEQ ID NO: 816168 - DNA, 75 bp, synthetic construct
  source 1..75: mol_type = other DNA
tggtaactactcctacggaaacatgcagacggagaacgttaacggcttcagctggagtaccaacagcaccacctc

SEQ ID NO: 816169 - DNA, 75 bp, synthetic construct
  source 1..75: mol_type = other DNA
aaacagagttacgaccagtacacgacgaatatgacccgcagccatgaatatgctgaaatggcatcccgtactgaa

SEQ ID NO: 816170 - DNA, 75 bp, synthetic construct
  source 1..75: mol_type = other DNA
gattttttaagcccgaaccggcgaaggttcagtttatcaaaggtaaaaataaaccatttatttatacccaaagaa

SEQ ID NO: 816171 - DNA, 75 bp, synthetic construct
  source 1..75: mol_type = other DNA
agcaacgtctggcacatgtctccatcggccatgtagcgatgcggacactgcccatgacgcagaccatcctgacgg

SEQ ID NO: 816172 - DNA, 75 bp, synthetic construct
  source 1..75: mol_type = other DNA
cgatggtgaactgtatgctcaggttgcattttctgctgcgcctgaacaagggattccgcgcgggaggacacggcg

SEQ ID NO: 816173 - DNA, 75 bp, synthetic construct
  source 1..75: mol_type = other DNA
gcaggaacccaaactggtggatgctgaactggagtggcaagagaacagtggacaactcatcgtgatagcgcgagg

SEQ ID NO: 816174 - DNA, 75 bp, synthetic construct
  source 1..75: mol_type = other DNA
tcgcgctgctattgttgatcattcttgtgccattgacgttgctgatgacgctgggtctgtgggttcccacgttgg

SEQ ID NO: 816175 - DNA, 75 bp, synthetic construct
  source 1..75: mol_type = other DNA
gggggaatttactatgccgctcgtgccggatggacttcctgtaagtggtcatgctactgcgacgttaaacttgcc

SEQ ID NO: 816176 - DNA, 75 bp, synthetic construct
  source 1..75: mol_type = other DNA
ccggatgggcttcctgtaagtggtcatgctaccgcgacgttgaatttgccgcaggaaccgtcgctggtggatgct

SEQ ID NO: 816177 - DNA, 75 bp, synthetic construct
  source 1..75: mol_type = other DNA
cccaggaaaattgagcatggataacagtcagatgccactgcaactgaccggtgaagcaaaacaggctgatctcat

SEQ ID NO: 816178 - DNA, 75 bp, synthetic construct
  source 1..75: mol_type = other DNA
acctctctggcagccgacacactggataacagcaacggtatcgtctgggatacggcctggttgtaccgttacact

SEQ ID NO: 816179 - DNA, 75 bp, synthetic construct
  source 1..75: mol_type = other DNA
aggcgactcaggaactggcatccagaagtacgagagcttctgccgggatgtatggagatgctcatgctgaatggg

SEQ ID NO: 816180 - DNA, 75 bp, synthetic construct
  source 1..75: mol_type = other DNA
ctgcatggtttcagcagcagtattgccagtgcctggaacacactcagccagtttggctctaaccggggaagcagt

SEQ ID NO: 816181 - DNA, 75 bp, synthetic construct
  source 1..75: mol_type = other DNA
cagctgctccaaaaaccctcgcgcagtggcagtccatgctgcctaacacctggatcaatatcgataaactgattt

SEQ ID NO: 816182 - DNA, 75 bp, synthetic construct
  source 1..75: mol_type = other DNA
accaccctggctggcgataccctggataacagcaacggcatcgtctgggatatggcctggttgtatcgttacacc

SEQ ID NO: 816183 - DNA, 75 bp, synthetic construct
  source 1..75: mol_type = other DNA
ttactacctgtggaacgatgcaacggataaactttcgattaccgcttactggtcgccgctctacttcaaagctaa

SEQ ID NO: 816184 - DNA, 75 bp, synthetic construct
  source 1..75: mol_type = other DNA
ggcaatgaggtggaagtcgggatggtgggcgttaatgtaccgttgccggtaccagtggccttccacagcttcggc

SEQ ID NO: 816185 - DNA, 75 bp, synthetic construct
  source 1..75: mol_type = other DNA
gcgacttccaggcggtgggcgtcgtggccggtatcacaccgttcaacttcccggcgatggtgccactgtggatgt

SEQ ID NO: 816186 - DNA, 75 bp, synthetic construct
  source 1..75: mol_type = other DNA
acggtgaaatgcgtccggctgacgggcgtagtgttaacgtcttcaatccggctaccggcgtagccattcgtcagg

SEQ ID NO: 816187 - DNA, 75 bp, synthetic construct
  source 1..75: mol_type = other DNA
gtggttaaaaaaggcgaaaggctggcggttttatggccttgtaggttttggtgcaatagccctactttccgctgg

SEQ ID NO: 816188 - DNA, 75 bp, synthetic construct
  source 1..75: mol_type = other DNA
acgacattctcacagattcttttagatgccagaatgcagcacgcaaaaaatttgatacgcgtagaaggttcagtc

SEQ ID NO: 816189 - DNA, 75 bp, synthetic construct
  source 1..75: mol_type = other DNA
ataaaacactctccaggaaacccggggcggttcagtttaatatttccagccatcagcccgaatatattctcagat

SEQ ID NO: 816190 - DNA, 75 bp, synthetic construct
  source 1..75: mol_type = other DNA
ccgcagagccgtccggacagcgggcaggctgagcagatgcgcgccacacatttccccgcgaccttcctggtcgat

SEQ ID NO: 816191 - DNA, 75 bp, synthetic construct
  source 1..75: mol_type = other DNA
tcttcttctaccgggggaataatgccgtcgacaacctgatggccggtgtcatccgcgcgttctgcgaagaccggg

SEQ ID NO: 816192 - DNA, 75 bp, synthetic construct
  source 1..75: mol_type = other DNA
atacacagggatggagctttggcttaaatgtggctggaattggtggtatcaatgctggtcaaaatcaaaaatata

SEQ ID NO: 816193 - DNA, 75 bp, synthetic construct
  source 1..75: mol_type = other DNA
ctttatatgttaaggattattattgctgccagcgtatttatagggttctttttcgctgattctactgatgattta

SEQ ID NO: 816194 - DNA, 75 bp, synthetic construct
  source 1..75: mol_type = other DNA
taccatacccgactcgtttttgggcttctgcgctaatttcaaagccgcatgtcctgatggcaggcaacatcatcc

SEQ ID NO: 816195 - DNA, 75 bp, synthetic construct
  source 1..75: mol_type = other DNA
tccttattgtcacggcatcgctgcatgcggcgcctgacgacgtgctggcccccaactatgcccgggaggagggat

SEQ ID NO: 816196 - DNA, 75 bp, synthetic construct
  source 1..75: mol_type = other DNA
tatgaaggggttatccgcaagcaggccacctttgccagcgggccggtgaccttcaccagtcagtcccccattccg

SEQ ID NO: 816197 - DNA, 75 bp, synthetic construct
  source 1..75: mol_type = other DNA
gctgattatcaggacccgtggctgaaacagcggttggaagataaaggttgggtactgtgggcaccgattcgcttt

SEQ ID NO: 816198 - DNA, 75 bp, synthetic construct
  source 1..75: mol_type = other DNA
cctaacttctggtggctgctggcaattaccgttttgtttggctggatgagtctggtcggcgtggtgcgcgcagag

SEQ ID NO: 816199 - DNA, 75 bp, synthetic construct
  source 1..75: mol_type = other DNA
atcccgacaaaactggctgggaaccgatgccaacggcggtgatgtgctggcgcgcattctgtatggtacgcggat

SEQ ID NO: 816200 - DNA, 75 bp, synthetic construct
  source 1..75: mol_type = other DNA
ttcatggactggctggcggtgcagtacatcagcgcgctgaatatcattcactacatgcacgacaagtacagctac

SEQ ID NO: 816201 - DNA, 75 bp, synthetic construct
  source 1..75: mol_type = other DNA
atgccgcgactcagccccgtcaatcaggcccgttgggcgcgttttcgccataaccgtcgcggctggtcgttatgg

SEQ ID NO: 816202 - DNA, 75 bp, synthetic construct
  source 1..75: mol_type = other DNA
ttaccgtcttgtttggctggatgagtctggtgggcgtagtgcgtgcggaatttttgcgtacccgtaatttcgact

SEQ ID NO: 816203 - DNA, 75 bp, synthetic construct
  source 1..75: mol_type = other DNA
cctgtaaaccaaacttacaacttaccagaattaatcgaaggcatggaagtttccattgatgtaagcacttgtgat

SEQ ID NO: 816204 - DNA, 75 bp, synthetic construct
  source 1..75: mol_type = other DNA
aacgactggacttgccagccatcataggcatgatgttgatttgtgccggtgtgttagtcattaacttgttgtcac

SEQ ID NO: 816205 - DNA, 75 bp, synthetic construct
  source 1..75: mol_type = other DNA
cacctggatgaccgtaagagcaccatgatggctggtctgtcttatgctcactttacccagtacggttacctgcgt

SEQ ID NO: 816206 - DNA, 75 bp, synthetic construct
  source 1..75: mol_type = other DNA
gctgtgcaggctttacgcagcaacgactgggatctctggcaggcagaagtcgctatacgtagcaacaagatgtga

SEQ ID NO: 816207 - DNA, 75 bp, synthetic construct
  source 1..75: mol_type = other DNA
attgatacgataaaacaaaatcttaagaaactaaaatttgaaactgatgttgaatatattaaaagtaaacatgaa

SEQ ID NO: 816208 - DNA, 75 bp, synthetic construct
  source 1..75: mol_type = other DNA
atggtgcattacgaagtagttcagtatttgatggattgttgcggcatcacttacagccaggctgtacaggctcta

SEQ ID NO: 816209 - DNA, 75 bp, synthetic construct
  source 1..75: mol_type = other DNA
tggctgggcgattattcacaaaattttttagttcacacgcaaaacacatgcatactggttggcctcgttcaaatg

SEQ ID NO: 816210 - DNA, 75 bp, synthetic construct
  source 1..75: mol_type = other DNA
ttcacaaagagcgcaggcagaatccaataacattgccaccatacaggcaggtgttaaagcgttatatacatcggc

SEQ ID NO: 816211 - DNA, 75 bp, synthetic construct
  source 1..75: mol_type = other DNA
gcaggtgtaggaactgcaggtaatgtcaaagccgcaggtgaagtattagatgttgctaaaactgcaacacaatgt

SEQ ID NO: 816212 - DNA, 75 bp, synthetic construct
  source 1..75: mol_type = other DNA
ggaattgacgaccgcccaactgacgctgatcaccgatgaaggatcggtcaatgagaaacaggaaacatttattgt

SEQ ID NO: 816213 - DNA, 75 bp, synthetic construct
  source 1..75: mol_type = other DNA
acgtcttcagccgctccggcagcgaagcggccaacctgaaccagctggccaccgccacacagcgtgtcggccgta

SEQ ID NO: 816214 - DNA, 75 bp, synthetic construct
  source 1..75: mol_type = other DNA
aagcccaactatgcgcatcctcaatgagctacacagcaaaggctataacgttgacgccgctgtcgccgaatttaa

SEQ ID NO: 816215 - DNA, 75 bp, synthetic construct
  source 1..75: mol_type = other DNA
cggatggaacactcgatgtggcagccactgcagcagcctgtaataacgccacaagtaatacattagttttcacgt

SEQ ID NO: 816216 - DNA, 75 bp, synthetic construct
  source 1..75: mol_type = other DNA
gctgtcagtaaacatggaaaaaggcatcgagacggctgtaaacaatgccacagcatcatcaaactcagccaattc

SEQ ID NO: 816217 - DNA, 75 bp, synthetic construct
  source 1..75: mol_type = other DNA
cgagtcggtgttgaccctaataacgttgctcagatgtatcagcagaatccttcaggatttggtgagtttgttgat

SEQ ID NO: 816218 - DNA, 75 bp, synthetic construct
  source 1..75: mol_type = other DNA
caacgagtttaggtcagagtggatgagtgcaaatggcagcccaggacaatctgatcgcaaccgaaacatcatggg

SEQ ID NO: 816219 - DNA, 75 bp, synthetic construct
  source 1..75: mol_type = other DNA
cgcctggtacggtaacaccgtgctgaaaaacagtggtgcactggatatggatgtcacgacggggtacggacccga

SEQ ID NO: 816220 - DNA, 75 bp, synthetic construct
  source 1..75: mol_type = other DNA
aattctttcgggaattgaaaatattcacttgattgaaccgcagcagtacctgcagtttatatatttaatggaccg

SEQ ID NO: 816221 - DNA, 75 bp, synthetic construct
  source 1..75: mol_type = other DNA
cgaggcagactggcagagacaatccgcagcaatcaggctggagaagcacttcaggcgagagggcaaaacctttcc

SEQ ID NO: 816222 - DNA, 75 bp, synthetic construct
  source 1..75: mol_type = other DNA
cagcgcataatgactgcccgcagaccacgacaactgacaactcacgccgtcgcaaggcacatcgtgggatcgaga

SEQ ID NO: 816223 - DNA, 75 bp, synthetic construct
  source 1..75: mol_type = other DNA
acgatctgcttgagtcactcgaagaggaagcactgagcgaagctgagggcgattctgaagcgtctggtgatgaaa

SEQ ID NO: 816224 - DNA, 75 bp, synthetic construct
  source 1..75: mol_type = other DNA
actccgttgggaagatggtgcgcgagtcgctcaaatccgacgcagagctgcgtgcgaaggcgcgtgcagagaaaa

SEQ ID NO: 816225 - DNA, 75 bp, synthetic construct
  source 1..75: mol_type = other DNA
atgactgtagaaaaagacgagagcaaaactcgcctgacaccagctgagtgggcagaagccgaagcgaagtggact

SEQ ID NO: 816226 - DNA, 75 bp, synthetic construct
  source 1..75: mol_type = other DNA
gcgtctttccctcagatttgccgatgccggagaaccagtggtcgggaggctcccatgcttcaatcaaatccgcca

SEQ ID NO: 816227 - DNA, 75 bp, synthetic construct
  source 1..75: mol_type = other DNA
tcgcgcctggctacacagatgaggaaatttacgagtggatgacaaagaagctggcagctataaaccagcttcgtg

SEQ ID NO: 816228 - DNA, 75 bp, synthetic construct
  source 1..75: mol_type = other DNA
gtgagttatatggcgatgcaacgctggtggacgcgtttattggcggtgatggcgcagagagtgaaaatgggcgtt

SEQ ID NO: 816229 - DNA, 75 bp, synthetic construct
  source 1..75: mol_type = other DNA
gaacctgttcaaatactgcgcctccggcaaacacattccgaaagccgtgctgaccatgcgcaaagcaggcggcaa

SEQ ID NO: 816230 - DNA, 75 bp, synthetic construct
  source 1..75: mol_type = other DNA
tttactgacctgattgtggctgtggtttctcctagtggtagcaaggagggggagatcgcttcccgcgagagagtc

SEQ ID NO: 816231 - DNA, 75 bp, synthetic construct
  source 1..75: mol_type = other DNA
cacaggcggggttcggcacggccaatctgaacaccgtgctctacaacgccgggcaaatcccgagtggctggacct

SEQ ID NO: 816232 - DNA, 75 bp, synthetic construct
  source 1..75: mol_type = other DNA
gaccaccatcgacaactcccgtcgtgtggttaacgtcaatgtgcaggatccatcccctgcccgtcttaacgagtg

SEQ ID NO: 816233 - DNA, 75 bp, synthetic construct
  source 1..75: mol_type = other DNA
cgctgggcaatatcaaaggtatggataaggctgtcgaaatggcacaggccatggctgatccatgggaacaggccg

SEQ ID NO: 816234 - DNA, 75 bp, synthetic construct
  source 1..75: mol_type = other DNA
ccggcgataacatgtcagcagcgttcaccacgctgggtgccagtgcaaaagcggccggtattgatgcggctgaac

SEQ ID NO: 816235 - DNA, 75 bp, synthetic construct
  source 1..75: mol_type = other DNA
taaacttgatcaaaataccctacaagtcattatcggcactaaagtcatcgccctgcgtcgggatatggataacta

SEQ ID NO: 816236 - DNA, 75 bp, synthetic construct
  source 1..75: mol_type = other DNA
gggatggctgccggtgcggtaattactgcagcagcgcctgttgcgattagtgcagccgtcatttatgggctggtt

SEQ ID NO: 816237 - DNA, 75 bp, synthetic construct
  source 1..75: mol_type = other DNA
ggaatggctgctggcgctgtgattactgcagcagcgcctgttgcgattagtgcagcagtcatttacgggctggtt

SEQ ID NO: 816238 - DNA, 75 bp, synthetic construct
  source 1..75: mol_type = other DNA
aggatcggagttgcggaagcctacgttgtataatatcgaatatgaagtatataagtatcttgttcctttctttgg

SEQ ID NO: 816239 - DNA, 75 bp, synthetic construct
  source 1..75: mol_type = other DNA
gggtatgacggtagagagcgcacagcgcattctggctgctgcaccgcaaagtgcccaggcgcgtaccgatacggc

SEQ ID NO: 816240 - DNA, 75 bp, synthetic construct
  source 1..75: mol_type = other DNA
ttttgccagatgcgacgttgatgggagatgcccacttaatcgagctgaacaaaacatacacaaaaaatatagatc

SEQ ID NO: 816241 - DNA, 75 bp, synthetic construct
  source 1..75: mol_type = other DNA
tcgacatatcttatctcaatggcgttgttatcggtcacaaagttacaataggtgaaaattgttcaattaagcctg

SEQ ID NO: 816242 - DNA, 75 bp, synthetic construct
  source 1..75: mol_type = other DNA
gatatggatattgttataggacataatgtgaccattggttgtaatgccaccattcttggtggcaaagtgcgtata

SEQ ID NO: 816243 - DNA, 75 bp, synthetic construct
  source 1..75: mol_type = other DNA
aaaatttattcccgcgcgaagcctggcgaactggcgcagtttgatgaggcgctggagttccttgtcgaaaattac

SEQ ID NO: 816244 - DNA, 75 bp, synthetic construct
  source 1..75: mol_type = other DNA
caacatttgatctttgggaaggtgacgataacagcaaaaaactacttttgatgaatcttaataaagcgtggaatc

SEQ ID NO: 816245 - DNA, 75 bp, synthetic construct
  source 1..75: mol_type = other DNA
gtaataattcaggcctttgatagtacaaatatcagtgggcaggacaaggataacctgtgcaaggaaatagaaact

SEQ ID NO: 816246 - DNA, 75 bp, synthetic construct
  source 1..75: mol_type = other DNA
atccggacgcgcaagaggaaaataacatttccgccaaaattagcgtggcagaattaaccggtgcggaatttatgc

SEQ ID NO: 816247 - DNA, 75 bp, synthetic construct
  source 1..75: mol_type = other DNA
ggtaggtttcagtggtgattacatcctggatacgcatagtttgcgcagagtaataaccgaaccgtggaatctggt

SEQ ID NO: 816248 - DNA, 75 bp, synthetic construct
  source 1..75: mol_type = other DNA
caacaaacagacgaccccgtgagtctggtttctggctttgtcagttttgtagaggggcaattgacactggaacca

SEQ ID NO: 816249 - DNA, 75 bp, synthetic construct
  source 1..75: mol_type = other DNA
attatgctctattgtttttatatcgtattcgattcgatattatattattaataaggttttaaatgaggttggaaa

SEQ ID NO: 816250 - DNA, 75 bp, synthetic construct
  source 1..75: mol_type = other DNA
taaattattgggaataaaagacggaacattacgtaacagattgtattcattatcaaaaatggggattattgctag

SEQ ID NO: 816251 - DNA, 75 bp, synthetic construct
  source 1..75: mol_type = other DNA
caacaaacagaagatcccgttagtctggtttctgggtttatcaattttgctgaggggcaattgacactggaacca

SEQ ID NO: 816252 - DNA, 75 bp, synthetic construct
  source 1..75: mol_type = other DNA
gcagcagcattcgcttcgcacgctgtgattgcattgaaggcacactttgcgaacatgtcgtactggctgtgcagg

SEQ ID NO: 816253 - DNA, 75 bp, synthetic construct
  source 1..75: mol_type = other DNA
cgtcatttcttgaatacagttatgaaccctacctgaatttatgtgccgcgcttgctgcgctgaaagcaacgcgaa

SEQ ID NO: 816254 - DNA, 75 bp, synthetic construct
  source 1..75: mol_type = other DNA
gttaagtgatcaggctgataagccgttaatggagacgcagaattacggaacttcattcctggaatacagctatga

SEQ ID NO: 816255 - DNA, 75 bp, synthetic construct
  source 1..75: mol_type = other DNA
gcgagttttccgctatgggcgatgttgtggggttgagcaccgaagacataaccgatggcccgctggcaggccgca

SEQ ID NO: 816256 - DNA, 75 bp, synthetic construct
  source 1..75: mol_type = other DNA
ggcgcgatgagagggcaagattatccccgacgtttcccgttgatatcgcttgaacatccgactcaacaggaacgc

SEQ ID NO: 816257 - DNA, 75 bp, synthetic construct
  source 1..75: mol_type = other DNA
tgcagggtaaagaagctgctgcacgcgttgcgtggctactggaacgcgttggtctgttacccgaacatgcgtggc

SEQ ID NO: 816258 - DNA, 75 bp, synthetic construct
  source 1..75: mol_type = other DNA
gacaaaatgttattgcggcgccgcagtcgtgaggtgattgagcttagtgagcagagttcccggcaaatgcagcat

SEQ ID NO: 816259 - DNA, 75 bp, synthetic construct
  source 1..75: mol_type = other DNA
gggagcgtcgaacagattttccatgcgccgcaacattcttatacccgtgcgttgttagccgctgttccgcaactt

SEQ ID NO: 816260 - DNA, 75 bp, synthetic construct
  source 1..75: mol_type = other DNA
acgatcttcccagcaatattcatctgcgtggcgaagaggttgcagccgtctcgttgcaatgcgtcgggccggggc

SEQ ID NO: 816261 - DNA, 75 bp, synthetic construct
  source 1..75: mol_type = other DNA
acccggcaaacttcaggcattgcgccgcgatattcagtttatttttcaggatccttacgcctcactggatccacg

SEQ ID NO: 816262 - DNA, 75 bp, synthetic construct
  source 1..75: mol_type = other DNA
tggtattttcgccccgctgctgctggcgctggctcgatttggtcagggtctgggcttaggcggtgaatggggcgg

SEQ ID NO: 816263 - DNA, 75 bp, synthetic construct
  source 1..75: mol_type = other DNA
taagtctgatgggactgaccttcgggccgatgggcgcgctgttaccagagctgttcccgacagaagtgcgttaca

SEQ ID NO: 816264 - DNA, 75 bp, synthetic construct
  source 1..75: mol_type = other DNA
gtgcattgtacggctccttcccgcaactgggcgcaccgattggcttcttctttgccaacggcactttcttgctgc

SEQ ID NO: 816265 - DNA, 75 bp, synthetic construct
  source 1..75: mol_type = other DNA
gtctctcttttagcctgcgacgtggcgagacgctggcgattgttggagagtccggttccggcaagtcagtcacag

SEQ ID NO: 816266 - DNA, 75 bp, synthetic construct
  source 1..75: mol_type = other DNA
gcgtggggaagaggttgcagccgtctctttgcaacttgtcggaccaggacattacgtcgcacaaccacaatcaga

SEQ ID NO: 816267 - DNA, 75 bp, synthetic construct
  source 1..75: mol_type = other DNA
ctattgatgttctgaagcctgctatttttgtatttttaggcattattaccgttgccggatggtactttagcgaac

SEQ ID NO: 816268 - DNA, 75 bp, synthetic construct
  source 1..75: mol_type = other DNA
accccttcaccgcaccctccgggcagcgtatcgacgaactgcaactgactcgcctgaaggtcaaagatatgcgtg

SEQ ID NO: 816269 - DNA, 75 bp, synthetic construct
  source 1..75: mol_type = other DNA
tgaagtgtgggtgaaaaaggtggcgtctgaaccacttgggcaacgctataaagcgacagaagcattatttaagta

SEQ ID NO: 816270 - DNA, 75 bp, synthetic construct
  source 1..75: mol_type = other DNA
gcttcgatgaagcgctggaatctctggtcgagttgcatccgcagaaagactacatcctcaaagcgtccggcaaca

SEQ ID NO: 816271 - DNA, 75 bp, synthetic construct
  source 1..75: mol_type = other DNA
ttacaaaaaatggtttaagacctgttgataagaatattctcttaactatggtgaaagaatataaggagagtgatg

SEQ ID NO: 816272 - DNA, 75 bp, synthetic construct
  source 1..75: mol_type = other DNA
cggatcaactgttgatggccgcgaaatcagtccggtacatctgcgtgaagccgccgagaacttcaacccggatgt

SEQ ID NO: 816273 - DNA, 75 bp, synthetic construct
  source 1..75: mol_type = other DNA
ttgaaggaatgactttcttgcggccggttgcggtcggcgatgtggtgtgctgctatgcacgctgtgtccagaaag

SEQ ID NO: 816274 - DNA, 75 bp, synthetic construct
  source 1..75: mol_type = other DNA
tcgggcaacgctataaagcgacagaagcattatttaagtatgtcgcggttgatcctgaaggaaaacctcgcgcct

SEQ ID NO: 816275 - DNA, 75 bp, synthetic construct
  source 1..75: mol_type = other DNA
actgctcgtagcaaagtttatgaaaaagaagtagatctattatataaagccttcgattgtttttgcttattttcc

SEQ ID NO: 816276 - DNA, 75 bp, synthetic construct
  source 1..75: mol_type = other DNA
cgcctgaaagtaaaagatatgcgcaacgcgcgccggatcagcgaaaaacccgaagagtgggatgaaccgctaatg

SEQ ID NO: 816277 - DNA, 75 bp, synthetic construct
  source 1..75: mol_type = other DNA
tttcaatccatgcttagcgtggttacagaatcctcccctgctatggcaggcaatggcgctactggcgagatggtt

SEQ ID NO: 816278 - DNA, 75 bp, synthetic construct
  source 1..75: mol_type = other DNA
tccaggctgccagtctggtgaaacccgatgccgtcaacctggtgatgctcggcctgttcagcgcctttctgctgc

SEQ ID NO: 816279 - DNA, 75 bp, synthetic construct
  source 1..75: mol_type = other DNA
ctgaccgacagcggcaccggggcggtaacccaaagtatgcaggcagcgatgatgcgcggcgacgaagcctacagc

SEQ ID NO: 816280 - DNA, 75 bp, synthetic construct
  source 1..75: mol_type = other DNA
gagcgatcctggtagtaaaccattagaggaaggctttagtgataaagaaaaacagtcctctgaaaaggtttaccc

SEQ ID NO: 816281 - DNA, 75 bp, synthetic construct
  source 1..75: mol_type = other DNA
gacaatttcgtaatacagaaagcgaggcacgggtagaagcaatgaataacggtgttttgctttgcgaacaattat

SEQ ID NO: 816282 - DNA, 75 bp, synthetic construct
  source 1..75: mol_type = other DNA
ggctcagtgcacctgcggggccagcggcatgtgccgtcatcgcgtgatgctggtgttaagttatcaacgactttg

SEQ ID NO: 816283 - DNA, 75 bp, synthetic construct
  source 1..75: mol_type = other DNA
gtaactggcgctgggtgagtgagtcgctacggcaactacgagccagtgctggcgctttccacgcacgggccagtt

SEQ ID NO: 816284 - DNA, 75 bp, synthetic construct
  source 1..75: mol_type = other DNA
ttattcaactgctccataacggctggcgctatcaggaacagagtgctattggtcaggcagagttgctggcgaatg

SEQ ID NO: 816285 - DNA, 75 bp, synthetic construct
  source 1..75: mol_type = other DNA
tggtttctggctttgtcagttttgttgaggggcaattgacactggaaccacgggtgatgatgacaaaaacccgcg

SEQ ID NO: 816286 - DNA, 75 bp, synthetic construct
  source 1..75: mol_type = other DNA
cattaaaataaacatattaactgagttccttattaaatccatggctgtgagagggtttagtttagcatcaatagc

SEQ ID NO: 816287 - DNA, 75 bp, synthetic construct
  source 1..75: mol_type = other DNA
gaagtttacatcggatatgactcaggtgtcacaaaccctgtcagtccgcggggaccggataaaatccggggtccc

SEQ ID NO: 816288 - DNA, 75 bp, synthetic construct
  source 1..75: mol_type = other DNA
gtcattattaattcaggtgctacataacggctggcgctatcaggggcaaagtgtcatcagtcaggtcggcttgct

SEQ ID NO: 816289 - DNA, 75 bp, synthetic construct
  source 1..75: mol_type = other DNA
gtgactgtgtcggtgaagtaccgcccatgccgtggcgcacggtcgttggcgcagggattgccggagaagcaaaac

SEQ ID NO: 816290 - DNA, 75 bp, synthetic construct
  source 1..75: mol_type = other DNA
gcgagattatgttagagaaagcaaaacgctactttgaactaacgccgggagtgaggattgaagagtggtttaaaa

SEQ ID NO: 816291 - DNA, 75 bp, synthetic construct
  source 1..75: mol_type = other DNA
gtgaaggcattgatcaatcaaccttccataaacttttaaagaagtatgaaattcgcgtaaagattaccgccgagg

SEQ ID NO: 816292 - DNA, 75 bp, synthetic construct
  source 1..75: mol_type = other DNA
atgagggtatcgataaatcaacctttcataaactcttaaagaagtatgacattaaagtaaagattaccgccgagg

SEQ ID NO: 816293 - DNA, 75 bp, synthetic construct
  source 1..75: mol_type = other DNA
ctaaaagaagacacactgtcactttttgtggataaaacaaaatcgaatgacaacaataatgtgtttataaaaaaa

SEQ ID NO: 816294 - DNA, 75 bp, synthetic construct
  source 1..75: mol_type = other DNA
caaattatgttgaatatatttcaaaaaacaatcacccttatttatcaaaaaagagagatgccagcataaatctaa

SEQ ID NO: 816295 - DNA, 75 bp, synthetic construct
  source 1..75: mol_type = other DNA
aaatctacacggacagtagcaactggcccgtaattatccatagctgtagtgatcactcggtccgaattaaacgca

SEQ ID NO: 816296 - DNA, 75 bp, synthetic construct
  source 1..75: mol_type = other DNA
gaagagaaaccggggcgtaacgatccttgcccgtgcggcagtggtaagaaatttaagcagtgctgcctgcattaa

SEQ ID NO: 816297 - DNA, 75 bp, synthetic construct
  source 1..75: mol_type = other DNA
atgcacgataaaacaaaagcgctgctgattgcagccctgctgttaccggcaatggcagtggccggcaacgaaaat

SEQ ID NO: 816298 - DNA, 75 bp, synthetic construct
  source 1..75: mol_type = other DNA
agggcatgattcatgtgtgtcgctggtgtcaggccaacccggaaaaattcaccattttcgtggagagcggcaaca

SEQ ID NO: 816299 - DNA, 75 bp, synthetic construct
  source 1..75: mol_type = other DNA
cagaacacctgccggagccaaaaccccgcctgccatcttccgaaggcgactggtcgcatgtattccaggatgtga

SEQ ID NO: 816300 - DNA, 75 bp, synthetic construct
  source 1..75: mol_type = other DNA
tataacacgaaagttagtcaaagaaagttgttatgcaagtttctattggctaaataaacatgaatgtgactggct

SEQ ID NO: 816301 - DNA, 75 bp, synthetic construct
  source 1..75: mol_type = other DNA
caaggttctggcgtgttaccaacgcgaagctaacaaggaaatagcgcgtctattaaataatcatcagaagttaaa

SEQ ID NO: 816302 - DNA, 75 bp, synthetic construct
  source 1..75: mol_type = other DNA
gctcgtttatggctatccgcaagaccatgaccagcagtggacgcagcgccacctatgaggccagccgcagcgagg

SEQ ID NO: 816303 - DNA, 75 bp, synthetic construct
  source 1..75: mol_type = other DNA
gacgtcagcgccaccgacatcaccagctcgtttatggctatccgcaagaccatgaccagcagtggacgcagcgcc

SEQ ID NO: 816304 - DNA, 75 bp, synthetic construct
  source 1..75: mol_type = other DNA
aaacagttagaaaaattaaatcctccggaagatttacgaacagtaatagaaaaactggggtggaagaatagaact

SEQ ID NO: 816305 - DNA, 75 bp, synthetic construct
  source 1..75: mol_type = other DNA
tggtctttgccgctaaaagtgatggtcatattgatgccaaagaacgtgcggcaatcgaccagcaattgcgagaag

SEQ ID NO: 816306 - DNA, 75 bp, synthetic construct
  source 1..75: mol_type = other DNA
atggctaactggttaaatcaactgcaatccctgcttgggcaaagcagttcttctgcctcctcgtctgcggatcag

SEQ ID NO: 816307 - DNA, 75 bp, synthetic construct
  source 1..75: mol_type = other DNA
gtgataaacatgaatcccggagtgagcgttatacatatattccaacaatcaatatcatcaataagttacgtgatg

SEQ ID NO: 816308 - DNA, 75 bp, synthetic construct
  source 1..75: mol_type = other DNA
tatgactctcaatgggcggcaatttgttccattgccccaaagattggctgtacaccagagactctgcgtgtgtgg

SEQ ID NO: 816309 - DNA, 75 bp, synthetic construct
  source 1..75: mol_type = other DNA
aatgataattggcaatttgttccacattctaatgctctttttttgatggctatatcgtacctgggtggactgatt

SEQ ID NO: 816310 - DNA, 75 bp, synthetic construct
  source 1..75: mol_type = other DNA
aatgaaaattggcaatttgttcctcattctaatacctttttttttgatggttatatcgttccggggtggactgac

SEQ ID NO: 816311 - DNA, 75 bp, synthetic construct
  source 1..75: mol_type = other DNA
cgcaggtgagttgtaaaggttcagttgattctacgattacggatttattagaaaaaccattgaataatgcattat

SEQ ID NO: 816312 - DNA, 75 bp, synthetic construct
  source 1..75: mol_type = other DNA
tatgtattatttacttcacttatgggggtgtttgtagcatttatttcatttattttctggaaattggatcagcga

SEQ ID NO: 816313 - DNA, 75 bp, synthetic construct
  source 1..75: mol_type = other DNA
gtgagcatatctggaaatatttcgaattgcatgcacaacaaagaatgactgttttcaatttttacattgcgataa

SEQ ID NO: 816314 - DNA, 75 bp, synthetic construct
  source 1..75: mol_type = other DNA
actttctactaccactactatggggactcgtcaaggacatacagccattatatttccacaatctgattttttgag

SEQ ID NO: 816315 - DNA, 75 bp, synthetic construct
  source 1..75: mol_type = other DNA
gaagggaagtcttttgaaagaaaagatgatagttcattacacctgattactaacaaggttctggcgtgttaccaa

SEQ ID NO: 816316 - DNA, 75 bp, synthetic construct
  source 1..75: mol_type = other DNA
attctcaacacattacatcagccgataattttaaaccaaaaaatgaagtcttaaatacctggtgtgtgggaatga

SEQ ID NO: 816317 - DNA, 75 bp, synthetic construct
  source 1..75: mol_type = other DNA
gcaggagttaaataattctcaggacttaaataactcgcaggtgagttgtaaaggttcagttgattctacgattac

SEQ ID NO: 816318 - DNA, 75 bp, synthetic construct
  source 1..75: mol_type = other DNA
agcagtgggggagagttgttgagaaagagtgcggaagatgcaaaggtgtcggctattcaagaatgccagcaagcg

SEQ ID NO: 816319 - DNA, 75 bp, synthetic construct
  source 1..75: mol_type = other DNA
acctgatggttcgactaatcgttatgaaggaaagtcctttgaaagaaaagatgagagttcattacacctgattac

SEQ ID NO: 816320 - DNA, 75 bp, synthetic construct
  source 1..75: mol_type = other DNA
attaataaagaacagttagaaaaattaaatccaccggaagatttacgttatgcaatagaaaaatttgggtggaag

SEQ ID NO: 816321 - DNA, 75 bp, synthetic construct
  source 1..75: mol_type = other DNA
ttggcagcattaccccgaattgccgaggggcaggataacacaagaaatatccttgattctaagacatttttggag

SEQ ID NO: 816322 - DNA, 75 bp, synthetic construct
  source 1..75: mol_type = other DNA
tgaatgatatttttatgaaggagttttttatgaaaaatcctgagatggttaattggtacttccctcagttactta

SEQ ID NO: 816323 - DNA, 75 bp, synthetic construct
  source 1..75: mol_type = other DNA
taaataatatacaggagttaaataattcgcaggagttaaataattcgcaggagttaaataattcgcaggagttaa

SEQ ID NO: 816324 - DNA, 75 bp, synthetic construct
  source 1..75: mol_type = other DNA
tgaaaagatttattttgataagttggggtatgattttaataataaagagtctaatgatgagattatgaaaaatca

SEQ ID NO: 816325 - DNA, 75 bp, synthetic construct
  source 1..75: mol_type = other DNA
tattttagatagcactggtgtatcagttagtatagatcagataattgactttaatccaaagcgaactttaattaa

SEQ ID NO: 816326 - DNA, 75 bp, synthetic construct
  source 1..75: mol_type = other DNA
ccttcactgccagagcaaaaagccatcgcctctgtactgtcctctcttgatgacaaaatagacctgcttcatcgc

SEQ ID NO: 816327 - DNA, 75 bp, synthetic construct
  source 1..75: mol_type = other DNA
gaaccaaattcactaaacgagatactctgttagcgagaattaccccatgtttagaaaatggcaaagcggcctatg

SEQ ID NO: 816328 - DNA, 75 bp, synthetic construct
  source 1..75: mol_type = other DNA
gccagtgcgattatcgcctggggaacctgtgcttcctggggatgcgtgcaggccgcgcggcccaatccaacgcag

SEQ ID NO: 816329 - DNA, 75 bp, synthetic construct
  source 1..75: mol_type = other DNA
atggctgaacaggattttttaactcgccatcctgatgcggttgtattcagccctaaaaagcgccagtggggaacg

SEQ ID NO: 816330 - DNA, 75 bp, synthetic construct
  source 1..75: mol_type = other DNA
catttactgccattatctgcagactgagcacaaaaggtttgtgaggctggctgaagaactgactgccgaccgttg

SEQ ID NO: 816331 - DNA, 75 bp, synthetic construct
  source 1..75: mol_type = other DNA
gattcgtcgtgcggttaagcgtcacagtcaggtgagcggcggtcgtcgctctggtggacgtaataataacggtta

SEQ ID NO: 816332 - DNA, 75 bp, synthetic construct
  source 1..75: mol_type = other DNA
aatgaccagacatcaccagaagcaagcatctatggcaatgaatcagaccatgacaagactgttcgttttccaagc

SEQ ID NO: 816333 - DNA, 75 bp, synthetic construct
  source 1..75: mol_type = other DNA
ccatctcttcaaaacaccagagcgatgaaccgtgctcctatgagaagtaggaaacagaccaagccccgccagaat

SEQ ID NO: 816334 - DNA, 75 bp, synthetic construct
  source 1..75: mol_type = other DNA
tatcgttccgccattaaaaaccgactttataatgttaacaccacaagttacttattatagagtaaaagacaagaa

SEQ ID NO: 816335 - DNA, 75 bp, synthetic construct
  source 1..75: mol_type = other DNA
acgctcgataacttcatggacagtgtcagccgtaagcaactgacggaaagccagtctaaggcactgtcggatcgt

SEQ ID NO: 816336 - DNA, 75 bp, synthetic construct
  source 1..75: mol_type = other DNA
tctgaatgaaaattatacttatgatggtttacatttcacgttacaagcttacaaacagttagaaaatgatatttc

SEQ ID NO: 816337 - DNA, 75 bp, synthetic construct
  source 1..75: mol_type = other DNA
cggctgcctgggctgtgcggaaaatggtttctgggatcgcggttcgttctatagccgtgtagtcgatatcccgca

SEQ ID NO: 816338 - DNA, 75 bp, synthetic construct
  source 1..75: mol_type = other DNA
agaatcccggcacccgttttatgaggtgcagcggaaatgtaacccgacacgacgagcgctggcaagcggtttttg

SEQ ID NO: 816339 - DNA, 75 bp, synthetic construct
  source 1..75: mol_type = other DNA
cggcgtttgtgacggcaccgttactgacgtcgctggaaggcggcgtaccggttgttgttgatgggcagattattg

SEQ ID NO: 816340 - DNA, 75 bp, synthetic construct
  source 1..75: mol_type = other DNA
tagtgctgctgttgctgattgtacttactggttttttttatatgaaaaagtcaaaagaaattgcagttgttaata

SEQ ID NO: 816341 - DNA, 75 bp, synthetic construct
  source 1..75: mol_type = other DNA
aataattgagccagttattgaattgtataacgacgtggtacgggcgtcgttcaatacactgcacaataaaattaa

SEQ ID NO: 816342 - DNA, 75 bp, synthetic construct
  source 1..75: mol_type = other DNA
gcagtaccggcaaccaaagaacccggcccgaccgaagtcggccccgtacgccccgccataattctgacgcgaaaa

SEQ ID NO: 816343 - DNA, 75 bp, synthetic construct
  source 1..75: mol_type = other DNA
ctctttctatcagagctgaaaaggctgaatggcaggcgcttagctatcaaagactgattagccagcgccacgtgc

SEQ ID NO: 816344 - DNA, 75 bp, synthetic construct
  source 1..75: mol_type = other DNA
tgcctgggcgctggagaataaaccgcgcattccagtggtgtggatccacggtcttgaatgcacctgctgtaccga

SEQ ID NO: 816345 - DNA, 75 bp, synthetic construct
  source 1..75: mol_type = other DNA
acagtcgcgtagtcgatattccacaaatgggtacccattccaccgctgataccgtcggcttaaccgcgcttggcg

SEQ ID NO: 816346 - DNA, 75 bp, synthetic construct
  source 1..75: mol_type = other DNA
gatgatgacgctgcccgcaaaggttactgcctgtacaaaatgggctgcaaagggcctaccacctataacgcctgt

SEQ ID NO: 816347 - DNA, 75 bp, synthetic construct
  source 1..75: mol_type = other DNA
tgaggaaaatagcgcaaaaatggtgttatcccgtgcgatagataatgctataggcacatggagaaaagacaatcc

SEQ ID NO: 816348 - DNA, 75 bp, synthetic construct
  source 1..75: mol_type = other DNA
atacatagattttgaagaggttagaataaatataatgtgtatgcatacagaggccattatgatttgttatatgtg

SEQ ID NO: 816349 - DNA, 75 bp, synthetic construct
  source 1..75: mol_type = other DNA
aaggattctttgagcaggcgaacggtggttcggtgctgttggatgaaataggggaaatgtcaccacggatgcagg

SEQ ID NO: 816350 - DNA, 75 bp, synthetic construct
  source 1..75: mol_type = other DNA
aagtaaatccactaaactgaaaacctcctcttctcaaaacatcagagcaaagtaccgcgctcccatgaggtgtag

SEQ ID NO: 816351 - DNA, 75 bp, synthetic construct
  source 1..75: mol_type = other DNA
caccatatggacgccaatctgccgcaggatttccagatcctcgatagcgaggaccagctgcgcctgcttaagcgt

SEQ ID NO: 816352 - DNA, 75 bp, synthetic construct
  source 1..75: mol_type = other DNA
tgattttattactaaggttttatttatagctctattcataggtgggctaagcatagtcagacatattgctttaaa

SEQ ID NO: 816353 - DNA, 75 bp, synthetic construct
  source 1..75: mol_type = other DNA
actccaaaaaagctggcagaagtgtcgagacagatcatcgtggcgaatgcgcaggaaattgcctggacgcccggg

SEQ ID NO: 816354 - DNA, 75 bp, synthetic construct
  source 1..75: mol_type = other DNA
cagcggctacaagctcggccagcgtgtacgccacgctaagtttggtgaaggcaccatcgtcaatatggaaggcag

SEQ ID NO: 816355 - DNA, 75 bp, synthetic construct
  source 1..75: mol_type = other DNA
gacgaaggcctgcggccgcatcatattcagagctacggtaacccggtagagcaaacctggcagaaggtttatcag

SEQ ID NO: 816356 - DNA, 75 bp, synthetic construct
  source 1..75: mol_type = other DNA
agttaacgctgtggcaggcgtgccgtgaactgttgcaggaaaaagcgctcgccggacgtgcagccagcgccttgc

SEQ ID NO: 816357 - DNA, 75 bp, synthetic construct
  source 1..75: mol_type = other DNA
caaaatcggctctaatcttgctggtggtctggcgggttcgctggacacgctgcgccgtcatattctggataattt

SEQ ID NO: 816358 - DNA, 75 bp, synthetic construct
  source 1..75: mol_type = other DNA
gtcgatgccgcgttgaagatggttcgtgaccttaaaacaaccgttaacgacctggcgaaagcgctggcgaaactg

SEQ ID NO: 816359 - DNA, 75 bp, synthetic construct
  source 1..75: mol_type = other DNA
ctcgctgtttggcgcactgacgattgcgctgcgcattctgaacagtacgttctggatgtcgccgattggccttat

SEQ ID NO: 816360 - DNA, 75 bp, synthetic construct
  source 1..75: mol_type = other DNA
tttattaattctctcaggcataaggaattaactgaaatactgacaaaaatatcttttcctgaaaaatccgggagc

SEQ ID NO: 816361 - DNA, 75 bp, synthetic construct
  source 1..75: mol_type = other DNA
agtctcctgtcgataagtatgatctcatcaataaaacgtcccgtgtttctcctgacagtggccgtttttatgaac

SEQ ID NO: 816362 - DNA, 75 bp, synthetic construct
  source 1..75: mol_type = other DNA
gtgacctgaaagggtctgttaatgaactggcgaaagcgctggcgaaactgctcaatattgacccaaaatcatggt

SEQ ID NO: 816363 - DNA, 75 bp, synthetic construct
  source 1..75: mol_type = other DNA
attgcaggccagtatgccgtaccgtatttacggcgggatgcgcttcttcgaacgccaggaaatcaaagatgcgct

SEQ ID NO: 816364 - DNA, 75 bp, synthetic construct
  source 1..75: mol_type = other DNA
tggaaggccacacacaaaaatatcatatgagtgataatgctgactggccgaagccccgcgaagcgggaacccatc

SEQ ID NO: 816365 - DNA, 75 bp, synthetic construct
  source 1..75: mol_type = other DNA
tgaatcccgtaacagggttaatgctatcggcattaaccctgttacgggatatggctccggcctgatgcaaatcga

SEQ ID NO: 816366 - DNA, 75 bp, synthetic construct
  source 1..75: mol_type = other DNA
tatcttgaagccgctggcactgaagaacgtatcgatcaccgttctattgatactcaatacaatgaagcactcgaa

SEQ ID NO: 816367 - DNA, 75 bp, synthetic construct
  source 1..75: mol_type = other DNA
gaagtgacaccattaatgttgtttgaacatagtagtaaacaatcacaaaaatcaaaacagccaaattcaagattt

SEQ ID NO: 816368 - DNA, 75 bp, synthetic construct
  source 1..75: mol_type = other DNA
cgtagaagcccccgttcaggttgccgaaccgcaacctgaagtggttgaaacgacgcatcctgaagtgattgctgc

SEQ ID NO: 816369 - DNA, 75 bp, synthetic construct
  source 1..75: mol_type = other DNA
tgccggttttcgcaacacagaggaacaggaacgacgcagaaaaatttatgctacaaaaatacagaacatttatcg

SEQ ID NO: 816370 - DNA, 75 bp, synthetic construct
  source 1..75: mol_type = other DNA
aaaaaagaaagaagctggaatgacagaaaaatgtctgtgttgtggcgtgaatcatgggcttctatggctaacaga

SEQ ID NO: 816371 - DNA, 75 bp, synthetic construct
  source 1..75: mol_type = other DNA
aaattgtgaaacgttctgaaggcaagtcttccgttgcgaaagctgcctatcatgcccgttgcagaatcacagatg

SEQ ID NO: 816372 - DNA, 75 bp, synthetic construct
  source 1..75: mol_type = other DNA
gtgcgccacgctaagtttggtgaaggcactatcgtcaatatggaaggcagtggcgaacatagccgtttgcaggtg

SEQ ID NO: 816373 - DNA, 75 bp, synthetic construct
  source 1..75: mol_type = other DNA
aacttgatagcgatctcgactacagacctactccggcgaccagaaaaaaatcatctgggccaaagtttgatacga

SEQ ID NO: 816374 - DNA, 75 bp, synthetic construct
  source 1..75: mol_type = other DNA
tatccccaccgagttaaataatgatgacaagaaaaagcttgtccttgagtattgtcaaaaaaattttgtagaaaa

SEQ ID NO: 816375 - DNA, 75 bp, synthetic construct
  source 1..75: mol_type = other DNA
attttatcagtgaggaacatgataaacgtattgctgaaaactacgtctttgacgaggtattaggccgtcatattt

SEQ ID NO: 816376 - DNA, 75 bp, synthetic construct
  source 1..75: mol_type = other DNA
gtttctatctgaagccagccgccgtcaatagtgaacgggaggcgtgtaattacctcgacagcctgccagcctctg

SEQ ID NO: 816377 - DNA, 75 bp, synthetic construct
  source 1..75: mol_type = other DNA
atgcgattagcttcccgttttggtcggtatagttccattcgccgtgagcgcccgttaacggatgacgaattaatg

SEQ ID NO: 816378 - DNA, 75 bp, synthetic construct
  source 1..75: mol_type = other DNA
ttgacctgcgcacagtggctctggaaaaaaatcatcgccctgtacgagcaggccgccgaatgtgacggcgaggtg

SEQ ID NO: 816379 - DNA, 75 bp, synthetic construct
  source 1..75: mol_type = other DNA
cgatcgtttgccgaaattacgtggcgcacgctggattgccgtaggtcgtctcgacgttaacacttgcggcctgtt

SEQ ID NO: 816380 - DNA, 75 bp, synthetic construct
  source 1..75: mol_type = other DNA
tcgtgttctggcctattacaagccagaaggcgagttgtgtactcgtaatgacccggaagggcgtccgaccgtgtt

SEQ ID NO: 816381 - DNA, 75 bp, synthetic construct
  source 1..75: mol_type = other DNA
ccacgaaataaatcaccacagcaggatacagagaacaacaacgttacacagatgaaaaagaatatacaggccatg

SEQ ID NO: 816382 - DNA, 75 bp, synthetic construct
  source 1..75: mol_type = other DNA
aaggaaacataccagaataatccgcctggcggagttgaatgcaatttttataaaataaaaaagaatattcagacc

SEQ ID NO: 816383 - DNA, 75 bp, synthetic construct
  source 1..75: mol_type = other DNA
ttccggctgtgtggttcagcattgaactgattttcgggctgtttgccctgaaaaatggcccggaagcctgggcgg

SEQ ID NO: 816384 - DNA, 75 bp, synthetic construct
  source 1..75: mol_type = other DNA
atggcccggaagcctgggcgggattcgtcgacttttttacaaaacccggttatcgtgatcattaacctgatcact

SEQ ID NO: 816385 - DNA, 75 bp, synthetic construct
  source 1..75: mol_type = other DNA
ggtaggcggtatgactggcgtgctgctggcagtaccgggcgcggacttcgttctgcataacagcctgttcctgat

SEQ ID NO: 816386 - DNA, 75 bp, synthetic construct
  source 1..75: mol_type = other DNA
tatgggtggcaacatgatgatgtatatcaacctgatttgggcctggggccacccggaagtttacatcctgatcct

SEQ ID NO: 816387 - DNA, 75 bp, synthetic construct
  source 1..75: mol_type = other DNA
aaacgtgcccccgcactggcgtattcgctggcagaatggtcagaagacgaaatacggatgccatcgctgccagtg

SEQ ID NO: 816388 - DNA, 75 bp, synthetic construct
  source 1..75: mol_type = other DNA
ttgctcagactaactatctgcgtgagctggtggaacttccgccggaaaccagttctaaagtggctgttgagaaag

SEQ ID NO: 816389 - DNA, 75 bp, synthetic construct
  source 1..75: mol_type = other DNA
gcctgggcactgagcgtcttaaatttgcctcacagcagcgtgcatcggtgatggccttcaataaccagcagggtg

SEQ ID NO: 816390 - DNA, 75 bp, synthetic construct
  source 1..75: mol_type = other DNA
cgtgcgtttcatgcgggacattcgattctgctcagtgggatgcaggtcattaccgtacaacagctgcggctcccc

SEQ ID NO: 816391 - DNA, 75 bp, synthetic construct
  source 1..75: mol_type = other DNA
agtgacgagcaacatttatttggcagagctgcactgatggtcgtaaccggctcatttaaaccgtctggtctgttt

SEQ ID NO: 816392 - DNA, 75 bp, synthetic construct
  source 1..75: mol_type = other DNA
cgttctcttataacgtgtcgtcgattctcggtgcttccgttgcaccgtatatcgcggcctggttacaagctcact

SEQ ID NO: 816393 - DNA, 75 bp, synthetic construct
  source 1..75: mol_type = other DNA
caagcatcggcacggagcgtcttcagttcgccctgcagcagcgccgttcggtcatgaccttcaataatcagcaga

SEQ ID NO: 816394 - DNA, 75 bp, synthetic construct
  source 1..75: mol_type = other DNA
caccgaccgcatgaaaaatctggtctcccggggtaagaaaatttactccagtattgagctggcacgaaatttcac

SEQ ID NO: 816395 - DNA, 75 bp, synthetic construct
  source 1..75: mol_type = other DNA
tgccgattttgctatcgccacggaagctcttcatttatatgaagatttagtgatgctgccatgctatcactggaa

SEQ ID NO: 816396 - DNA, 75 bp, synthetic construct
  source 1..75: mol_type = other DNA
tcaccaccgactatttgcaacagtgccctggaaagtcagggcgaatatgactcacaatgggcggcaatttgttcc

SEQ ID NO: 816397 - DNA, 75 bp, synthetic construct
  source 1..75: mol_type = other DNA
ggagactaaactccctgagaaagaggtaaacaggatgactaaaaatactcgtttttcccccgaagtccgtcagcg

SEQ ID NO: 816398 - DNA, 75 bp, synthetic construct
  source 1..75: mol_type = other DNA
aaagaacctgtggcggccattgcgccgtctttatccacttccactcagaccagagtcagtgccagttcctgcaag

SEQ ID NO: 816399 - DNA, 75 bp, synthetic construct
  source 1..75: mol_type = other DNA
catactcaggcgcgctatgcattaccgaatgtcatcaaaggtttcattgagcgttatcctcgcgtttctttgcat

SEQ ID NO: 816400 - DNA, 75 bp, synthetic construct
  source 1..75: mol_type = other DNA
gatgcggctgtcgcattgcgctctaatgaagaaattgaggtcatgtttaaagatataaaactgccgggtgatgct

SEQ ID NO: 816401 - DNA, 75 bp, synthetic construct
  source 1..75: mol_type = other DNA
gcgttggttcgtctgggtactgacgattgtgagacatacaaaagtggcggcggtagcctctttaagtgggacggg

SEQ ID NO: 816402 - DNA, 75 bp, synthetic construct
  source 1..75: mol_type = other DNA
ttaatcagtacatgagtttatatgcgatggcagggatgggcgttgctaaagttagcgctgacctgaaaattaagg

SEQ ID NO: 816403 - DNA, 75 bp, synthetic construct
  source 1..75: mol_type = other DNA
ctcacagacatttattgatgtgcagtcagccgatcataccaggaagattaagaatccggcagcttctgccagaac

SEQ ID NO: 816404 - DNA, 75 bp, synthetic construct
  source 1..75: mol_type = other DNA
gtggcttacgaaggttccggctctggcgactggcgcacgagtggagttactgctggcattggcctgaaattctga

SEQ ID NO: 816405 - DNA, 75 bp, synthetic construct
  source 1..75: mol_type = other DNA
gagcagcggatgaatcgtaatctggaaacgctgatgcaaaagcgcgttgatggcttgctgttactgtgcaccgaa

SEQ ID NO: 816406 - DNA, 75 bp, synthetic construct
  source 1..75: mol_type = other DNA
aaacgctgatgcaaaaacgcgttgatggcttgctgttactgtgcaccgaaacgcatcaaccttcgcgtgaaatca

SEQ ID NO: 816407 - DNA, 75 bp, synthetic construct
  source 1..75: mol_type = other DNA
agtttctcacgttatcaataaagatcgcttcgtcagtgaagcgattaccgccaaagttgaagcggcgattaaaga

SEQ ID NO: 816408 - DNA, 75 bp, synthetic construct
  source 1..75: mol_type = other DNA
gcgcggcgggttacgacaaaccgttcaaaaccgttgccgaaggcgtaacggaatacatggcctggctgaatcgtg

SEQ ID NO: 816409 - DNA, 75 bp, synthetic construct
  source 1..75: mol_type = other DNA
gtgttgatgataccgatatccccgctaatttttgtctgggcaatcgggaaaataattgagccagttattgaattg

SEQ ID NO: 816410 - DNA, 75 bp, synthetic construct
  source 1..75: mol_type = other DNA
ttgaaccagttattgagctatataccgatgtgacatgggaatcattcagcgcactgcacaataaaattaatccgt

SEQ ID NO: 816411 - DNA, 75 bp, synthetic construct
  source 1..75: mol_type = other DNA
aataattgagccagttattgaattgtataacgacgtggtgtgggcgtcgttcaacacactgcacaataaaattaa

SEQ ID NO: 816412 - DNA, 75 bp, synthetic construct
  source 1..75: mol_type = other DNA
gcgcggcgggttatgacaaaccgttcaaaaccgttgccgaaggcgtaacggaatacatggcctggctgaatcgcg

SEQ ID NO: 816413 - DNA, 75 bp, synthetic construct
  source 1..75: mol_type = other DNA
ggccataaaggcagcatggcgagcgtcgctttccatctcaacacccagcttaacaacggtgaatcaccgaagctg

SEQ ID NO: 816414 - DNA, 75 bp, synthetic construct
  source 1..75: mol_type = other DNA
ctttctattcagaactggtgcgtggcgttgaacgcagctgcttcgaacgcggttatagtcttgtcctttgcaata

SEQ ID NO: 816415 - DNA, 75 bp, synthetic construct
  source 1..75: mol_type = other DNA
gccggtgaagctaaaactgatgctcgtgacgctgccatcattgccgaagctgcccgtaccctgcctcacgcgcta

SEQ ID NO: 816416 - DNA, 75 bp, synthetic construct
  source 1..75: mol_type = other DNA
ctgtcggccttcgccgcgctcagggatccgctctccagggcttactacacccgcaaaatgagtcagggaaaacga

SEQ ID NO: 816417 - DNA, 75 bp, synthetic construct
  source 1..75: mol_type = other DNA
acgaggtggctcttgaggtagaacagagggtgcttgttcaccctctttacccggtcctgaccagcatgcccggag

SEQ ID NO: 816418 - DNA, 75 bp, synthetic construct
  source 1..75: mol_type = other DNA
tcagagatattgttaatttcaccatcttcagaaacagacatgacacgggtacggagagcgtacagtcagaggtca

SEQ ID NO: 816419 - DNA, 75 bp, synthetic construct
  source 1..75: mol_type = other DNA
acgccttgctgcagatatcacccaggcactgacacagcaaaccgtcatcgtccccggtccgaatgctgctgtcgt

SEQ ID NO: 816420 - DNA, 75 bp, synthetic construct
  source 1..75: mol_type = other DNA
atatctgacctgaaacagcatggacagatactactggtcgttgaccagcctgctaccatcggggcgttacccgtc

SEQ ID NO: 816421 - DNA, 75 bp, synthetic construct
  source 1..75: mol_type = other DNA
cgtggcgttgaacgcagctgcttcgaacgcggttatagtctcgtcctttgcaataccgaaggcgatgaacagcgg

SEQ ID NO: 816422 - DNA, 75 bp, synthetic construct
  source 1..75: mol_type = other DNA
aaggttatcgggcggcgatgaaacgtgcgggtctcaacattcctgatggctatgaagtcactggtgattttgaat

SEQ ID NO: 816423 - DNA, 75 bp, synthetic construct
  source 1..75: mol_type = other DNA
aaacgcgttgatggcttgctgttactgtgcaccgaaacgcatcagccttcgcgtgaaatcatgcaacgttatccg

SEQ ID NO: 816424 - DNA, 75 bp, synthetic construct
  source 1..75: mol_type = other DNA
caatccaggtctttattggcgttgatgtaggtaaagacacccatcacgccgttgccgttaatcgttcaggtaaac

SEQ ID NO: 816425 - DNA, 75 bp, synthetic construct
  source 1..75: mol_type = other DNA
tgtcctttgtaatactgaaggcgatgagcagcgaatgaatcgcaatctggaaacattgatgcaaaagcgtgttga

SEQ ID NO: 816426 - DNA, 75 bp, synthetic construct
  source 1..75: mol_type = other DNA
gaactgctggcgctggtggacattattacgccaaacgaaacggaagcagaaaagctcaccggtattcgtgttgaa

SEQ ID NO: 816427 - DNA, 75 bp, synthetic construct
  source 1..75: mol_type = other DNA
tcttgccgattatgaacccgatttgggtattttgtttggaccgtatctgactgacgatccgcaaaaactgttcaa

SEQ ID NO: 816428 - DNA, 75 bp, synthetic construct
  source 1..75: mol_type = other DNA
atggcactgaatttattaagagattgcaaagacattaagggtgaagaggaaaagaaagaaggctgcgttaaacac

SEQ ID NO: 816429 - DNA, 75 bp, synthetic construct
  source 1..75: mol_type = other DNA
aactcaactctcaaatgaaccgcgagttttacgcatccggtaatgactccaacttattgatagtgttttatgttc

SEQ ID NO: 816430 - DNA, 75 bp, synthetic construct
  source 1..75: mol_type = other DNA
gtatacagtcggcgacgacgcctgatgaattgctttcggcgctggatgacaagggaggcacgcaaccctcagctt

SEQ ID NO: 816431 - DNA, 75 bp, synthetic construct
  source 1..75: mol_type = other DNA
aatgccaaagccgtaggtggtaatgactccaacttattgatagtgttttatgttcagataatgcccgatgacttt

SEQ ID NO: 816432 - DNA, 75 bp, synthetic construct
  source 1..75: mol_type = other DNA
acaccgttttggctgcagctggtttactgaccaacgccagaaaatcatataactgcgtcggtaatgactccaact

SEQ ID NO: 816433 - DNA, 75 bp, synthetic construct
  source 1..75: mol_type = other DNA
ctctattcctgtcatttctgactgtgttgcaatggccattgaaagtcgcttcaaatatatgatgctgctttttta

SEQ ID NO: 816434 - DNA, 75 bp, synthetic construct
  source 1..75: mol_type = other DNA
tatttattgtgattttacccgacattggtaatgactccaacttattgatagtgttttatgttcagataatgcccg

SEQ ID NO: 816435 - DNA, 75 bp, synthetic construct
  source 1..75: mol_type = other DNA
ttcggctcctgccgcgaaagatcgctggcgcgccgataaccgggccatttctgttaccggttttcgtgacaagct

SEQ ID NO: 816436 - DNA, 75 bp, synthetic construct
  source 1..75: mol_type = other DNA
gaaatagtttttgatggcggtaatgactccaacttactgatagtgttttatgttcagataatgcccgatgacctt

SEQ ID NO: 816437 - DNA, 75 bp, synthetic construct
  source 1..75: mol_type = other DNA
aaggtgaagttattgaagcaccgggtagtgactccaacttactgatagtgttttatgttcagataatgcccgatg

SEQ ID NO: 816438 - DNA, 75 bp, synthetic construct
  source 1..75: mol_type = other DNA
tcagtctgctgttgctttttactctctctattcctgtcatttctgattgtgttgcaatggccattgaaagtcgct

SEQ ID NO: 816439 - DNA, 75 bp, synthetic construct
  source 1..75: mol_type = other DNA
gcttgaactcttaaatcagctagacccagaggttcgccgagatctcatgcgaggcgctgaagaaaaacagcgtgt

SEQ ID NO: 816440 - DNA, 75 bp, synthetic construct
  source 1..75: mol_type = other DNA
gattataaattccttgacaaggagacgcctttttcattccaaaaattggggacaatgattggaaatgctgttccc

SEQ ID NO: 816441 - DNA, 75 bp, synthetic construct
  source 1..75: mol_type = other DNA
aaaagatgatacaaagtggcgtcttttatctgagtttcagaggattgtaagtgatgtcatgccagagcttgtgac

SEQ ID NO: 816442 - DNA, 75 bp, synthetic construct
  source 1..75: mol_type = other DNA
gcgttaatgattcgcgggtttatcccggtgcgatggtggaagaaacaggaagctgtattacagaaagtgctacta

SEQ ID NO: 816443 - DNA, 75 bp, synthetic construct
  source 1..75: mol_type = other DNA
caccgacgtgtgtgcagccgtggcgcagttgcgtgaatcggggtgcgatggggtgattgcgtttggcggcggctc

SEQ ID NO: 816444 - DNA, 75 bp, synthetic construct
  source 1..75: mol_type = other DNA
ccggtcggggtggacgacgacttttttgaattaggcgggcattcgctgctggtgacgcaattgacctcccgttta

SEQ ID NO: 816445 - DNA, 75 bp, synthetic construct
  source 1..75: mol_type = other DNA
ttagtgcattaaagactcttggatatcatttgtggtacgacgttgtaagatgttctgagtatggcttacctcaaa

SEQ ID NO: 816446 - DNA, 75 bp, synthetic construct
  source 1..75: mol_type = other DNA
ctgtcgttggcggattgatagccggttatctgatgcgctgggtgaaaaatcacttgcgtcttagcagtaaattca

SEQ ID NO: 816447 - DNA, 75 bp, synthetic construct
  source 1..75: mol_type = other DNA
acggtgctggcggtcgcggtattactgtcgcaaatcttcgggctacaagatttgtttaatgaagaaaactcctgg

SEQ ID NO: 816448 - DNA, 75 bp, synthetic construct
  source 1..75: mol_type = other DNA
tgggggctgcaatctcgactgcaattctcctgatctggcggcatcatgcggtaaagcatggaaactatctgactg

SEQ ID NO: 816449 - DNA, 75 bp, synthetic construct
  source 1..75: mol_type = other DNA
gagaattatatctacgctgacgaaaaagaatggagatatgtaccgcatccgtttgttggcgatttatggcctagc

SEQ ID NO: 816450 - DNA, 75 bp, synthetic construct
  source 1..75: mol_type = other DNA
gtggaaggagagatttgcattggcgggatggggctggcacaaggctacctgaacgatgcagagaaaacggcggcg

SEQ ID NO: 816451 - DNA, 75 bp, synthetic construct
  source 1..75: mol_type = other DNA
gccgcattttagccttaacctgacgctgtttaatcgtctgccgttgcacgcagatatcaatcacttaattggcga

SEQ ID NO: 816452 - DNA, 75 bp, synthetic construct
  source 1..75: mol_type = other DNA
ctcagcacctgcggctaaagatcgctggcgggccgacaacagggccatttctgtcaccggctttcgcgataaact

SEQ ID NO: 816453 - DNA, 75 bp, synthetic construct
  source 1..75: mol_type = other DNA
ttgttcgcaccttccctaggtttaggtgcagattacacctatagcaacggctaccgcgacgcgaacggcatcaac

SEQ ID NO: 816454 - DNA, 75 bp, synthetic construct
  source 1..75: mol_type = other DNA
ggattttttaacccgacaccctgacgcggttgtgttcagtgcgaaaaaacgccagtggggcagccaggaagattt

SEQ ID NO: 816455 - DNA, 75 bp, synthetic construct
  source 1..75: mol_type = other DNA
agctccgcgaaaaatgggatgaactggtcattcgcctggggcgttcacctgtacagcgttgtgtgaatcatattt

SEQ ID NO: 816456 - DNA, 75 bp, synthetic construct
  source 1..75: mol_type = other DNA
catcttcaccctgaacaagggagagcatgccggtgaacaacgcgtcagcctgaaggcccgcctgatcaaggtgga

SEQ ID NO: 816457 - DNA, 75 bp, synthetic construct
  source 1..75: mol_type = other DNA
gccagaaagcagtggatgaggaccgtaaggttttgcttggctttgcgttaagcaacctggccaccgatatcttca

SEQ ID NO: 816458 - DNA, 75 bp, synthetic construct
  source 1..75: mol_type = other DNA
gttgacccagtccattttcgatatgtcgaaatggcgtgcgctgaccttgcaggaaaaagcggccggaattcagga

SEQ ID NO: 816459 - DNA, 75 bp, synthetic construct
  source 1..75: mol_type = other DNA
atacgccaacctccggcgatgtgatctttaacggtcaaccgatgagcaaactgtcgtcggcggccaaagcagaac

SEQ ID NO: 816460 - DNA, 75 bp, synthetic construct
  source 1..75: mol_type = other DNA
cttgatgcgcgtaacgccgacagcatcttccagttgcttggggaattgaatcgcttgcagggcaccgccttcctg

SEQ ID NO: 816461 - DNA, 75 bp, synthetic construct
  source 1..75: mol_type = other DNA
tcgtttgcagggtactgccttcctggtggttactcacgacctgcaactggcgaaacgtatgagtcgccaactgga

SEQ ID NO: 816462 - DNA, 75 bp, synthetic construct
  source 1..75: mol_type = other DNA
atggtaagcaacgcctccgaattaggacgcaatggcgtacatgatttcatcctcgttcgcgctaccgctatcgtc

SEQ ID NO: 816463 - DNA, 75 bp, synthetic construct
  source 1..75: mol_type = other DNA
gacgcaatggcgtacatgatttcatcctcgttcgcgctaccgctatcgtcctgacgctctacatcatttatatgg

SEQ ID NO: 816464 - DNA, 75 bp, synthetic construct
  source 1..75: mol_type = other DNA
aaatacagaggtgtcatcgacggaatgcctgcatggattgatactccaccgccaactcatgaggaacaaattgcc

SEQ ID NO: 816465 - DNA, 75 bp, synthetic construct
  source 1..75: mol_type = other DNA
gtttattatggggagatgatttttaacaagataaaactggataaatattttcagagcttgtcgtgtcaagtatga

SEQ ID NO: 816466 - DNA, 75 bp, synthetic construct
  source 1..75: mol_type = other DNA
atgaaaaagattgatgcgattataaaacccttcaagctggacgatgtccgcgaagcactggctgaagtcggcatt

SEQ ID NO: 816467 - DNA, 75 bp, synthetic construct
  source 1..75: mol_type = other DNA
atgaacaaaaacagagggtttacgcctctggcgatcgttctgatgctctcaggcagcttagcgcttacaggatgt

SEQ ID NO: 816468 - DNA, 75 bp, synthetic construct
  source 1..75: mol_type = other DNA
tacagaacggtcaggcgactgcgctggcaaccgtgcagcaacttgatccgatctacgttgatgtgacccagtcca

SEQ ID NO: 816469 - DNA, 75 bp, synthetic construct
  source 1..75: mol_type = other DNA
tactctgccgggcgacagcggctcaccgctcatgttgcatactaatgacggctggcaattgattggcgtacaaag

SEQ ID NO: 816470 - DNA, 75 bp, synthetic construct
  source 1..75: mol_type = other DNA
ttctttatttgttagaagaaaactatttgtatcaggagcctggtaatgactccaacttattgatagtgttttatg

SEQ ID NO: 816471 - DNA, 75 bp, synthetic construct
  source 1..75: mol_type = other DNA
taccgagctgtaccgcggcgcggagtatatggtggattttctgccgaaagtgaaaattgagattgtcgtaccgga

SEQ ID NO: 816472 - DNA, 75 bp, synthetic construct
  source 1..75: mol_type = other DNA
caccggcaatatgactttgacactatcctctgctttggcgactgccgcccattgcataaagaagcaaaacgctgg

SEQ ID NO: 816473 - DNA, 75 bp, synthetic construct
  source 1..75: mol_type = other DNA
tatgaagctgtttaagaagtttcgtggatatatattgatgaagacacagcttaatgcagtttattatgggatttt

SEQ ID NO: 816474 - DNA, 75 bp, synthetic construct
  source 1..75: mol_type = other DNA
tctggcaggctgattttaaaccagatatgaagctgtttaagaagtttcgtggatatatattgatgaagacacagc

SEQ ID NO: 816475 - DNA, 75 bp, synthetic construct
  source 1..75: mol_type = other DNA
ggcagggcagccgtataaaggccgcaacggtcgtgtggaaggaacatctggaccacacaaggtagcgtgtaacgt

SEQ ID NO: 816476 - DNA, 75 bp, synthetic construct
  source 1..75: mol_type = other DNA
caatgaaacgtattggccatgcgatgtggtattacctgataggctggcattaccgtcatgagtttcctcgctatc

SEQ ID NO: 816477 - DNA, 75 bp, synthetic construct
  source 1..75: mol_type = other DNA
catgttgagaacttaaaaccttcaacgatgaaacgtattggccatgcgatgtggtattacctgatgggctggcat

SEQ ID NO: 816478 - DNA, 75 bp, synthetic construct
  source 1..75: mol_type = other DNA
atcctcgctgcgctgggtaccggtgatgcactggcgtcgaagtatcgccgccagctgtatgcgttgttgtattga

SEQ ID NO: 816479 - DNA, 75 bp, synthetic construct
  source 1..75: mol_type = other DNA
tgccattgctgaaagacgcctggcagttgtcgaatcagaacggggagatcggcctgctgttggcagaaacgctga

SEQ ID NO: 816480 - DNA, 75 bp, synthetic construct
  source 1..75: mol_type = other DNA
accaggacagaatgccccgcatcacagccagtatcaaccgcacagataaccagtcagatggccggaaatatccgg

SEQ ID NO: 816481 - DNA, 75 bp, synthetic construct
  source 1..75: mol_type = other DNA
gctcctgcgaaagccagcgatgaagaaggtaccagggtcagtattaacaacgccacggcagaagagttagcccgt

SEQ ID NO: 816482 - DNA, 75 bp, synthetic construct
  source 1..75: mol_type = other DNA
acagaacgccccgtgtcacagccagcaccaaccgcacagatcaccagtcagatggccggaaatatccgggcgtta

SEQ ID NO: 816483 - DNA, 75 bp, synthetic construct
  source 1..75: mol_type = other DNA
acagaatgccccgcgtcacagccagtatcaaccgcacagataaccagtcagatggcagggaatatccgggcatta

SEQ ID NO: 816484 - DNA, 75 bp, synthetic construct
  source 1..75: mol_type = other DNA
gcgccaaactattcaggatgttgaagaagaacggcgataacgctgagtacgtgctggtagaaggggccgagcatg

SEQ ID NO: 816485 - DNA, 75 bp, synthetic construct
  source 1..75: mol_type = other DNA
agatgttcaggcagttgccacactttatgggatttctgacttgttgaatattggcgaggggttccctgaatcagt

SEQ ID NO: 816486 - DNA, 75 bp, synthetic construct
  source 1..75: mol_type = other DNA
ttacctgagagagcatgccagcgattatgggattgatcctcaaagaatcggagttctgggtgactctgccggtgg

SEQ ID NO: 816487 - DNA, 75 bp, synthetic construct
  source 1..75: mol_type = other DNA
atgcaaacgatatgatcatcctctcaggcccggggaggtttgggttgagatgggtaagatcatttactattcatt

SEQ ID NO: 816488 - DNA, 75 bp, synthetic construct
  source 1..75: mol_type = other DNA
tcacattactcttacttgttgtgcttgtgtatgcaggattagtaaagggcgatgtattccctgaatggatcatga

SEQ ID NO: 816489 - DNA, 75 bp, synthetic construct
  source 1..75: mol_type = other DNA
cgcctgatattagcggcgtcattggtgaagtagatttgagcggcgcgttaaggaaggtgcgaataagtggggaaa

SEQ ID NO: 816490 - DNA, 75 bp, synthetic construct
  source 1..75: mol_type = other DNA
atgaaacacggaattaaagcactgctcattaccctgtccctgtccctgtccctgtccctggcctgtgccggaatg

SEQ ID NO: 816491 - DNA, 75 bp, synthetic construct
  source 1..75: mol_type = other DNA
taccaggtgggagcattacgtcgtctgatgcgtgaagagccggactacaaccgcatcgcaacctatcagtcctcc

SEQ ID NO: 816492 - DNA, 75 bp, synthetic construct
  source 1..75: mol_type = other DNA
atcggtggtctgccgacgtatctcgcaccgttcttcccgaaagacgccatgctcatcacctcactgagcaacctg

SEQ ID NO: 816493 - DNA, 75 bp, synthetic construct
  source 1..75: mol_type = other DNA
tcagtctgcatatgaattagaaaaaaaaattaaacactctcgttttatagttatccctggtggggggcatatatt

SEQ ID NO: 816494 - DNA, 75 bp, synthetic construct
  source 1..75: mol_type = other DNA
ctggatgagtggcacaaggacgccccggatctggttgttgtcatgggccgcaacctgttcaacacgctgcgtctg

SEQ ID NO: 816495 - DNA, 75 bp, synthetic construct
  source 1..75: mol_type = other DNA
ttgatgcgtatcttgagcgacaggccgaactcaaccacatcaacaaatcccacgtaacaaaggcgttcagcattg

SEQ ID NO: 816496 - DNA, 75 bp, synthetic construct
  source 1..75: mol_type = other DNA
atgaatctggtgatgtcagatattacccgcaacaagctgggttgctatatggcgaagcaggcgtcgcttaacaat

SEQ ID NO: 816497 - DNA, 75 bp, synthetic construct
  source 1..75: mol_type = other DNA
aataaaaaatagcaaccataatgccgagagacatgctgaaaacagggaaaaacttttcaaatcagcaatatatct

SEQ ID NO: 816498 - DNA, 75 bp, synthetic construct
  source 1..75: mol_type = other DNA
agacatcattggaacgattttttaaagatggttacatctctataaaattcactccatatagtgagtttaatgatc

SEQ ID NO: 816499 - DNA, 75 bp, synthetic construct
  source 1..75: mol_type = other DNA
ggtcagcattaataatgccagcgcggaagagctagcccgcgcgatgaatggcgttggcctgaagaaagcgcaggc

SEQ ID NO: 816500 - DNA, 75 bp, synthetic construct
  source 1..75: mol_type = other DNA
ccaatagatatatcatcttataatatttctgaacgttcatggagtgaaaatcaaataatgcaatcttatcatgga

SEQ ID NO: 816501 - DNA, 75 bp, synthetic construct
  source 1..75: mol_type = other DNA
tgcttaacgagtatctgtctccgctggatattactgcggcacagtttaaggtgctctgctctatccgctgcgcgg

SEQ ID NO: 816502 - DNA, 75 bp, synthetic construct
  source 1..75: mol_type = other DNA
caacacgacattatcattcacaagaatgtggagaaccatatgtgcgacttgaagcaacatttgattgtgatctat

SEQ ID NO: 816503 - DNA, 75 bp, synthetic construct
  source 1..75: mol_type = other DNA
gggctggggctgtttttactgctgcttggcccgctaatgtggtttggcattgtctatttcggctcgctgctgaca

SEQ ID NO: 816504 - DNA, 75 bp, synthetic construct
  source 1..75: mol_type = other DNA
gcagtattgatgtggatgataccgcacagcatggtcttgatgtgaacgtctggaacggagggaactatggcctct

SEQ ID NO: 816505 - DNA, 75 bp, synthetic construct
  source 1..75: mol_type = other DNA
aacgtttaccagttactggccgataagctgggtgtaaaccagaagatcatccgtgagaaaggcgagaaaggaaaa

SEQ ID NO: 816506 - DNA, 75 bp, synthetic construct
  source 1..75: mol_type = other DNA
cgtcgctttattaccatgcttcaggatcagggcggctatcacggctggtcactgtcagatgcacagggtgcgtcc

SEQ ID NO: 816507 - DNA, 75 bp, synthetic construct
  source 1..75: mol_type = other DNA
tgatagtcgatttgctcggcaatatctctgccaaatcccgccagtggtctcaggaactgggggcattctcacgtt

SEQ ID NO: 816508 - DNA, 75 bp, synthetic construct
  source 1..75: mol_type = other DNA
aactggaaaagcagcaattgattaatcaggtcaacgaatacataaacagtaagcaatggcctggtaaagcggcga

SEQ ID NO: 816509 - DNA, 75 bp, synthetic construct
  source 1..75: mol_type = other DNA
cgaaatatctcctgtatatgtatctcgccacccgtgcgctgaaggcggtccgcgccatagggattggggcactgc

SEQ ID NO: 816510 - DNA, 75 bp, synthetic construct
  source 1..75: mol_type = other DNA
ggctgcgcaggacgatatttgtctgcgtagcaacccgcgtactgccagcctggagcagatcgtcggcctgtacgc

SEQ ID NO: 816511 - DNA, 75 bp, synthetic construct
  source 1..75: mol_type = other DNA
cctcgctgatgccggatgtcgcgattctcgacgctgcgctgaccgaaggcgtgccgtcgcatgtcacggcgatga

SEQ ID NO: 816512 - DNA, 75 bp, synthetic construct
  source 1..75: mol_type = other DNA
ccggtatcgacgcgttaactcatgccattgaagcgtacagcgcgctgaacgctacaccgtttaccgacagcctgg

SEQ ID NO: 816513 - DNA, 75 bp, synthetic construct
  source 1..75: mol_type = other DNA
caggaaacagaacttgtcggttcccgtatgcagcgaacgcttgccggtgttcgtggcagcatccgcacggtaacg

SEQ ID NO: 816514 - DNA, 75 bp, synthetic construct
  source 1..75: mol_type = other DNA
gttgcgcagccgttaccgccagaagcaacttgtggccacaggtaagagccagaccatgaacagccgccaccttac

SEQ ID NO: 816515 - DNA, 75 bp, synthetic construct
  source 1..75: mol_type = other DNA
gcggcgctgcatattccgcacggtctggcgaacgccatgttgttgccaacggtgatggaatttaaccggatggtt

SEQ ID NO: 816516 - DNA, 75 bp, synthetic construct
  source 1..75: mol_type = other DNA
cgtcccctgtgccaccgccttcctcttctggtgggtcaggatcctgggggcgcatgatgaggcgcgccggtgggt

SEQ ID NO: 816517 - DNA, 75 bp, synthetic construct
  source 1..75: mol_type = other DNA
cccctgcccccattaccggtattccccggctgacagagatatccggagttcagccccagataaccgccaggatac

SEQ ID NO: 816518 - DNA, 75 bp, synthetic construct
  source 1..75: mol_type = other DNA
cagctcgtgaccacaggcaagagccagaccatgaacagtcgccatctcaaagggcatgccgtggatgttgtggct

SEQ ID NO: 816519 - DNA, 75 bp, synthetic construct
  source 1..75: mol_type = other DNA
ccagaagcaacttgtggccacgggtaagagccagaccatgaacagccgccaccttacggggcatgccgtggatgt

SEQ ID NO: 816520 - DNA, 75 bp, synthetic construct
  source 1..75: mol_type = other DNA
gccacgaaatgtcagaccgtggatgtgtccctgattgccggtgaacccaaagccggggttgaacatcttgaaccc

SEQ ID NO: 816521 - DNA, 75 bp, synthetic construct
  source 1..75: mol_type = other DNA
atgaacgacaatgtcacgctacgggtaaatggccgggaacccaaagccggggttgaacatcttgaaccctacggt

SEQ ID NO: 816522 - DNA, 75 bp, synthetic construct
  source 1..75: mol_type = other DNA
aacgtatgcagccttctgaaagcctgctacgcgctgttttgcacaccaaacatctgatgaaccccgaagtactgg

SEQ ID NO: 816523 - DNA, 75 bp, synthetic construct
  source 1..75: mol_type = other DNA
tgaaaggcttcctggattatgccgatgcggcacagaaaagcggcttacaggataagctggccacacagacggcct

SEQ ID NO: 816524 - DNA, 75 bp, synthetic construct
  source 1..75: mol_type = other DNA
ctgcaactcaaacagatgtttgcccgccagagtatccaggcagcggacgccaatattctgaccggatacgggatt

SEQ ID NO: 816525 - DNA, 75 bp, synthetic construct
  source 1..75: mol_type = other DNA
cgaaatacctgctgtacatgtatctcgccacccgtgccctgaaaatggcgcgggctgtcggaatggggattatac

SEQ ID NO: 816526 - DNA, 75 bp, synthetic construct
  source 1..75: mol_type = other DNA
gggcgaaaactgaagatgtccgcaggtgggcgatacagaatgcgaaggaaaccacctggggactggcgggcgtca

SEQ ID NO: 816527 - DNA, 75 bp, synthetic construct
  source 1..75: mol_type = other DNA
cggcaaaaacagaagaaattcgtaagtgggcagagcaaaacgccaaagacacctcatggggattgtctggtgtta

SEQ ID NO: 816528 - DNA, 75 bp, synthetic construct
  source 1..75: mol_type = other DNA
cggttatggcgatgcactggatcgtattggtcagggggcgcagaccgccgcaaaatacctgatgtatatgtatct

SEQ ID NO: 816529 - DNA, 75 bp, synthetic construct
  source 1..75: mol_type = other DNA
atgatagttcattacacctgattactaacaaggttctggcgtgttaccaacgcgaagctaacaaggaaatagctc

SEQ ID NO: 816530 - DNA, 75 bp, synthetic construct
  source 1..75: mol_type = other DNA
atcgatttcatacttgctgggtaaaaaagggatactgaaagaaatagatgaccttaacgtattaaataattatct

SEQ ID NO: 816531 - DNA, 75 bp, synthetic construct
  source 1..75: mol_type = other DNA
gaagcgggtagaaatatgatggctcatattgagtcctcatcttatatcaaaaataatgatggcagtgaaataatg

SEQ ID NO: 816532 - DNA, 75 bp, synthetic construct
  source 1..75: mol_type = other DNA
gaagctcaattacgaaaggagcagcgtcagttggtggcgatgactaaccagctatggaacgccgctgtgaaaaaa

SEQ ID NO: 816533 - DNA, 75 bp, synthetic construct
  source 1..75: mol_type = other DNA
tgagataatgaagtttgttatgaataatcctgaaggggagcgagcggatttatctaaggtggaaatagaaattac

SEQ ID NO: 816534 - DNA, 75 bp, synthetic construct
  source 1..75: mol_type = other DNA
tgcggatgcaggcgcagaagcccaggctgctgcccgccgtcatctgggactgggaggattatcaggaaaagacag

SEQ ID NO: 816535 - DNA, 75 bp, synthetic construct
  source 1..75: mol_type = other DNA
cgggcaactggattactacatcggcgcgtgtaataccggtgcgggcgcggcattgtcgattgccatcgcggtgat

SEQ ID NO: 816536 - DNA, 75 bp, synthetic construct
  source 1..75: mol_type = other DNA
ggatatcaacatcacgtcaggaatgacgcagtcaaccgcagatggccggtatgtacagaatgttcagcttggagc

SEQ ID NO: 816537 - DNA, 75 bp, synthetic construct
  source 1..75: mol_type = other DNA
aggtcagatgcggtttacgggactgaagatgggttaccgtctggcagagcagattatgatgcatgagccgctggc

SEQ ID NO: 816538 - DNA, 75 bp, synthetic construct
  source 1..75: mol_type = other DNA
atgtatcagaggttactgaaggttgacccgctgaagtgcattctgtgcggaagtcagatgcgttttacggggctg

SEQ ID NO: 816539 - DNA, 75 bp, synthetic construct
  source 1..75: mol_type = other DNA
acagggcggcgaatgccctgccatcggacggcaccgccgttgccgcgaacaggctggcaaatgcccacacaatta

SEQ ID NO: 816540 - DNA, 75 bp, synthetic construct
  source 1..75: mol_type = other DNA
atcgaatcgaaccataaccgccatcgctggactgtcgaagaatgcagggcgatcaaggcgaagtatcagcagaaa

SEQ ID NO: 816541 - DNA, 75 bp, synthetic construct
  source 1..75: mol_type = other DNA
ccggatgctgccatactggtgcatccagaatcaccacaagctattgtcgatatggcggatgcggtcggttccacc

SEQ ID NO: 816542 - DNA, 75 bp, synthetic construct
  source 1..75: mol_type = other DNA
tagtttgggtgaaaaaatcatctgggcacccgacaaacatctggggcgttacgtgcaaaaacagacgggcgcaga

SEQ ID NO: 816543 - DNA, 75 bp, synthetic construct
  source 1..75: mol_type = other DNA
ccgcaggtgagggtgcaacctgccgcagctgcgcgcattgtccgtggatggccatgaatggccttcagtccatcg

SEQ ID NO: 816544 - DNA, 75 bp, synthetic construct
  source 1..75: mol_type = other DNA
aggcactcgccagcaatattgctctgaccgccgagaattttggcgatgcgctggaagatccatcgttcctcgcga

SEQ ID NO: 816545 - DNA, 75 bp, synthetic construct
  source 1..75: mol_type = other DNA
ttacggatggttaaaggaacctttgtgggaacaactgacacattgcgtgaaatgcaacattataaacaactgagt

SEQ ID NO: 816546 - DNA, 75 bp, synthetic construct
  source 1..75: mol_type = other DNA
taaccgctatcgctggactgtcgaagagtgcagggccatcaaggcggagtatcaacagaaacttaaaaaactgcg

SEQ ID NO: 816547 - DNA, 75 bp, synthetic construct
  source 1..75: mol_type = other DNA
gcggtgctgctggtgattttacgcctgaccttcggaccccaatgggcggcagaaggcgtctttatgctatttgcc

SEQ ID NO: 816548 - DNA, 75 bp, synthetic construct
  source 1..75: mol_type = other DNA
cggtcacagcgcctgtaacggtaccaacagcaagcacaaccgagccgactgtcagcagtacatcaaccagtacgc

SEQ ID NO: 816549 - DNA, 75 bp, synthetic construct
  source 1..75: mol_type = other DNA
ggaacaacaagaagtgaaggcggggcaaaaaatagcgactatgggtagcaccggaaccagttcaacacgcttgca

SEQ ID NO: 816550 - DNA, 75 bp, synthetic construct
  source 1..75: mol_type = other DNA
aacgtcggtttacgggaaacggtaaataaggctgctgatgccctgccatcgggtggaaccgccgtggcagcaaac

SEQ ID NO: 816551 - DNA, 75 bp, synthetic construct
  source 1..75: mol_type = other DNA
cgacaagcagcagccaaccgaaatacggttacaggctgccgctgttctgatgccatattttcacgaaaccctaac

SEQ ID NO: 816552 - DNA, 75 bp, synthetic construct
  source 1..75: mol_type = other DNA
atgggccagaacaaagttggcctgagcttctcgctgccgatttatcagggcggaatggttaactcgcaagtgaaa

SEQ ID NO: 816553 - DNA, 75 bp, synthetic construct
  source 1..75: mol_type = other DNA
cgtcacgtatcagaccgatcaacaaaccttgatcctcaacaccgcgaccgcttatttcaacgtgttgaatgctat

SEQ ID NO: 816554 - DNA, 75 bp, synthetic construct
  source 1..75: mol_type = other DNA
ggcctgctggcaaccgtggtgtacaaccagaaccgtcagcagaaccgtgtgcgcattttcgaaagcggtctgcgt

SEQ ID NO: 816555 - DNA, 75 bp, synthetic construct
  source 1..75: mol_type = other DNA
ttggcttcctggtatctgcacattttttttaggatcttttattctaatattgttgaaaaaaagaaacttaaacag

SEQ ID NO: 816556 - DNA, 75 bp, synthetic construct
  source 1..75: mol_type = other DNA
tctaatattgttgaaaaaaagaaacttaaacagaagttaaagaatgatattcttgagatattcattcctgtattt

SEQ ID NO: 816557 - DNA, 75 bp, synthetic construct
  source 1..75: mol_type = other DNA
aactggagatgatccaccagaccggctatgaagcgggtgtctatagccagaaactcactcttgagcgtgatgccg

SEQ ID NO: 816558 - DNA, 75 bp, synthetic construct
  source 1..75: mol_type = other DNA
tatggttctggaaagtcaggacgaatatgactcacaatgggcggcaatttgttccattgctccaaagattggctg

SEQ ID NO: 816559 - DNA, 75 bp, synthetic construct
  source 1..75: mol_type = other DNA
atgatgggcatgaatgtcataaccttgagtgatgtggcctttcttgccgattatgaacccgatttgggtattttg

SEQ ID NO: 816560 - DNA, 75 bp, synthetic construct
  source 1..75: mol_type = other DNA
gtgtgtcagaacagacgatcccacagtgtgaccagcaggtggataatgcggtcccgggctttgcgcagaagctgt

SEQ ID NO: 816561 - DNA, 75 bp, synthetic construct
  source 1..75: mol_type = other DNA
atgactaaaaatactcgtttttcccccgaagtccgtcaacgggcagttcgtatggttgtggaaagtcagggcgaa

SEQ ID NO: 816562 - DNA, 75 bp, synthetic construct
  source 1..75: mol_type = other DNA
tggcgataaatggttgattagcgaaggtctgaaatctggcgatcaagtcattgtcagcggcctgcaaaaagcgcg

SEQ ID NO: 816563 - DNA, 75 bp, synthetic construct
  source 1..75: mol_type = other DNA
aactgcgtggcgaaccgtctgaagggatgctgtgctctttctccgagctgggcatttctgacgatcataacggca

SEQ ID NO: 816564 - DNA, 75 bp, synthetic construct
  source 1..75: mol_type = other DNA
gttttcgtcacaccatgagtaccattctgcacgaacagggctttaattctgcctggattgaaatgcagttagctc

SEQ ID NO: 816565 - DNA, 75 bp, synthetic construct
  source 1..75: mol_type = other DNA
tgcgcctacaaataccaattctggtatgttgattacgccgccgccgaaaatggggacgacgtctacagcgcagca

SEQ ID NO: 816566 - DNA, 75 bp, synthetic construct
  source 1..75: mol_type = other DNA
ctgaaactcgatgacaacaccatcgaaatcagcgtaacgccaaaccgtgccgactgcttaggtatcattggtgtt

SEQ ID NO: 816567 - DNA, 75 bp, synthetic construct
  source 1..75: mol_type = other DNA
ctgtggctgactcacgttatgttcaaagcattcgaagaggttcaaggtcaacgattggaatgcaatataatattt

SEQ ID NO: 816568 - DNA, 75 bp, synthetic construct
  source 1..75: mol_type = other DNA
cccgccgtcatctggggctgggaggattatcaggaaaagacagtctggctgctgctgatgtgggagcactggaga

SEQ ID NO: 816569 - DNA, 75 bp, synthetic construct
  source 1..75: mol_type = other DNA
tatctcgatggtcgccgtgaaatgatgcaatggtacgctgactacattgattcactttccagccaggagagttaa

SEQ ID NO: 816570 - DNA, 75 bp, synthetic construct
  source 1..75: mol_type = other DNA
gacgtaaccaactacgtgctgctcgaactgggccagccgatgcacgctttcgataaagatcgtattgaaggcggc

SEQ ID NO: 816571 - DNA, 75 bp, synthetic construct
  source 1..75: mol_type = other DNA
ctgaaacttgatgacaacaccatcgaaatcagcgtgacgccaaaccgtgccgactgcttaggcatcattggtgtt

SEQ ID NO: 816572 - DNA, 75 bp, synthetic construct
  source 1..75: mol_type = other DNA
gtgttgcggaggggtataagagcctcgccataagcctgatcctgcaagataccagccgtacactcgaagaagagg

SEQ ID NO: 816573 - DNA, 75 bp, synthetic construct
  source 1..75: mol_type = other DNA
ggcaccgttgggcattcgtcaggatctgatgttagccggtgtgatttgcggtaaccgttacgaagagcactggaa

SEQ ID NO: 816574 - DNA, 75 bp, synthetic construct
  source 1..75: mol_type = other DNA
gcctgatcctgcaagataccagccgtacactcgaagaagaggagattgccactaccgtcgccaaatgtgtagagg

SEQ ID NO: 816575 - DNA, 75 bp, synthetic construct
  source 1..75: mol_type = other DNA
gcgaatgggtgaacccggcgattgatagcgacgcgctggcgaatcaaatcaccatggcgggtctggaagttgacg

SEQ ID NO: 816576 - DNA, 75 bp, synthetic construct
  source 1..75: mol_type = other DNA
gatgacggcgacggcgtgaccgacagctacagctaccagggcaacagcgatcaccgccagaccaccgtgtcgaac

SEQ ID NO: 816577 - DNA, 75 bp, synthetic construct
  source 1..75: mol_type = other DNA
acgtgtttggcggtaccatcaacgatcagccgccgattgtggcggtggacgatgacggcgacggcgtgaccgaca

SEQ ID NO: 816578 - DNA, 75 bp, synthetic construct
  source 1..75: mol_type = other DNA
cgacctgctggaagcggcgaacggcaccaataccgctgattcgctcgcaagcctcgggcaggatattcagtcgct

SEQ ID NO: 816579 - DNA, 75 bp, synthetic construct
  source 1..75: mol_type = other DNA
aactatcaggatgaagacgggcattacgtctttggcggcaccatcaacgatcagccgccgattgtggcggtggac

SEQ ID NO: 816580 - DNA, 75 bp, synthetic construct
  source 1..75: mol_type = other DNA
ggtgcagagcgatattcagaacgccgttgatgtggtggacaccgcctcggacgacctcaacgcctcgattgcgtc

SEQ ID NO: 816581 - DNA, 75 bp, synthetic construct
  source 1..75: mol_type = other DNA
ggtgcaaagcgatattcagaacgccgttaatgtggtggacaccgcctcggacgacctcaacgcctcgattgcgtc

SEQ ID NO: 816582 - DNA, 75 bp, synthetic construct
  source 1..75: mol_type = other DNA
cttattccctaaatattatacacagcaaattgccatcccagagtttaactggaaaatgacgattatggtgccctt

SEQ ID NO: 816583 - DNA, 75 bp, synthetic construct
  source 1..75: mol_type = other DNA
tacggtattggcagcaccacaaacacaccgggattttttctctcaaccagtattaaagataaagggaaagtcgtt

SEQ ID NO: 816584 - DNA, 75 bp, synthetic construct
  source 1..75: mol_type = other DNA
ggattatatttttaagttcaaaatcgccatggcgaatgcgaacactgcaaccgttacctgttcaggcaaaacaaa

SEQ ID NO: 816585 - DNA, 75 bp, synthetic construct
  source 1..75: mol_type = other DNA
acaacctcaatgcttcgattgcttcgcttggcgagacgcagaataccatgtcgatgttgagcgatgcgcagacgg

SEQ ID NO: 816586 - DNA, 75 bp, synthetic construct
  source 1..75: mol_type = other DNA
attgccccctcaacggttgacccgtcaaattttgatggatcaactgttgataaaaaactgccgattaggggggcg

SEQ ID NO: 816587 - DNA, 75 bp, synthetic construct
  source 1..75: mol_type = other DNA
aaaaataatgttgagagacgaattaaagccgcctccatgccgctatttgtgaattgcgatgaactcggccttgag

SEQ ID NO: 816588 - DNA, 75 bp, synthetic construct
  source 1..75: mol_type = other DNA
cggacgtcgacccggcagatccgcaggtgcagagcgatattcagaatgccgttgatgtggtggacaccgcctcgg

SEQ ID NO: 816589 - DNA, 75 bp, synthetic construct
  source 1..75: mol_type = other DNA
ggttattcgactgtggcgtggtcccgcgcagcgttgtgtgaatcacatttctgaaccggacaccgaaattccgcc

SEQ ID NO: 816590 - DNA, 75 bp, synthetic construct
  source 1..75: mol_type = other DNA
aaacacttttagtccggaagcctcgcaaccggacccgcagacggctgaacaggattttttaatccggcaccctga

SEQ ID NO: 816591 - DNA, 75 bp, synthetic construct
  source 1..75: mol_type = other DNA
gatggaagaggtcaaagtgaaacgttccattggttcaaaacgacccaatgtcatcaggtcaaaatggcccgatga

SEQ ID NO: 816592 - DNA, 75 bp, synthetic construct
  source 1..75: mol_type = other DNA
attgtgttgcagcagttgcattactggttgagagataccaattccggcatggaatgtgatggtgttcgctggatt

SEQ ID NO: 816593 - DNA, 75 bp, synthetic construct
  source 1..75: mol_type = other DNA
agcagttcccgttctggtcagagtcaacgttaaaacgcgcatttgcaagtctgaaaacgctggggcttttacgtt

SEQ ID NO: 816594 - DNA, 75 bp, synthetic construct
  source 1..75: mol_type = other DNA
ggttattcgactgtggcgtggtcccgcgcagcgttgtgtgaatcatatttctgaaccggataccgaaattccgcc

SEQ ID NO: 816595 - DNA, 75 bp, synthetic construct
  source 1..75: mol_type = other DNA
acgacccaatgtcatcgggtcaaaatggcccgatgatcctacagagattactacagagattactacagagaataa

SEQ ID NO: 816596 - DNA, 75 bp, synthetic construct
  source 1..75: mol_type = other DNA
tccctgtcgcaggagctgcaaaacccggacgttgaccccgccgatccgcaggtgcagagcgatattcagaacgcc

SEQ ID NO: 816597 - DNA, 75 bp, synthetic construct
  source 1..75: mol_type = other DNA
ccatcgccagactaccgtgtcgaacggtgtggaagtggacaccaacgtggcggcgagcgattttttcggcagtaa

SEQ ID NO: 816598 - DNA, 75 bp, synthetic construct
  source 1..75: mol_type = other DNA
caggcgagcagcagtagtctgatgtcggcaatactggcagggattatcttcaatatttccaatattcttctggtc

SEQ ID NO: 816599 - DNA, 75 bp, synthetic construct
  source 1..75: mol_type = other DNA
cttggcgagcgtgtaatggaccgcatggtcatgaacggtggtcgctgggtgaattttaactgggagagctggcgt

SEQ ID NO: 816600 - DNA, 75 bp, synthetic construct
  source 1..75: mol_type = other DNA
tgcgaccgaaagaaccaaactggaccgtgtgggccaatgacgtgcgcacaatgcggatgctggatggcagaactc

SEQ ID NO: 816601 - DNA, 75 bp, synthetic construct
  source 1..75: mol_type = other DNA
taaatactggagaatgcgatctcatgcacaacaattattaacactggcgaatgaaacattagaaaaacaggttaa

SEQ ID NO: 816602 - DNA, 75 bp, synthetic construct
  source 1..75: mol_type = other DNA
tatcaccagtactacgcggttaatgcagcagtactttccactattcgtgcctcaggtgtaaatgcagattccccc

SEQ ID NO: 816603 - DNA, 75 bp, synthetic construct
  source 1..75: mol_type = other DNA
ctccacgccgttttcgttgaaagcgttaaagcgttttaagcagattaaagatgattacgacatcatcaactacca

SEQ ID NO: 816604 - DNA, 75 bp, synthetic construct
  source 1..75: mol_type = other DNA
cttactatcccgatacctacggcggtattgagcaggtcatttatcagctaagtcagggctgcgcccgccggggaa

SEQ ID NO: 816605 - DNA, 75 bp, synthetic construct
  source 1..75: mol_type = other DNA
agggctgattggcagttcaaaacgtattaaagccattgcagcggatatggttcagcactttgaacagcgcttaaa

SEQ ID NO: 816606 - DNA, 75 bp, synthetic construct
  source 1..75: mol_type = other DNA
tatcaccagtactacgcggtcaatgcagcagttctttccactattcgtgcctcagcggtgaatgcggactccccc

SEQ ID NO: 816607 - DNA, 75 bp, synthetic construct
  source 1..75: mol_type = other DNA
cgtattgctctacaacgcctgaatccgcaccttagtgaacagaagtgtgaggaagccctgaaacaggtgatgcag

SEQ ID NO: 816608 - DNA, 75 bp, synthetic construct
  source 1..75: mol_type = other DNA
cgttaatcgacagttattaagcattaataagaagaaagaaaaagaacttcgccgtgatattgaaaagtacaaaaa

SEQ ID NO: 816609 - DNA, 75 bp, synthetic construct
  source 1..75: mol_type = other DNA
gaccgccgcgctaatgcgaccgttccgtgaactaccggactggcgtattgatgatctgatgatctctttttctgt

SEQ ID NO: 816610 - DNA, 75 bp, synthetic construct
  source 1..75: mol_type = other DNA
ggtgatattctttatattccgccaggattcccgcatgaaggctacgcgctggaaaatgcgatgaactattccgtg

SEQ ID NO: 816611 - DNA, 75 bp, synthetic construct
  source 1..75: mol_type = other DNA
cttgcagagatttgcgatagatcgctctgaacagttttccgatgctacagagctggcggttgtgggtgatccgtt

SEQ ID NO: 816612 - DNA, 75 bp, synthetic construct
  source 1..75: mol_type = other DNA
tacccgatttgtaaatctgaaaagctagattattggagaaataaattcggagaaaatttttttctttttgttgga

SEQ ID NO: 816613 - DNA, 75 bp, synthetic construct
  source 1..75: mol_type = other DNA
aacggtgattgttgagggttcagccacagctccagaagatggcgaaaatgattacagcgtaacgtctacctctgc

SEQ ID NO: 816614 - DNA, 75 bp, synthetic construct
  source 1..75: mol_type = other DNA
atggcaaagatgactgagtctgatattgaacttatggcggttgaacacctacaagggctgggctatgagtatgtt

SEQ ID NO: 816615 - DNA, 75 bp, synthetic construct
  source 1..75: mol_type = other DNA
gcaccgacggcggtgaagaaagttacggattgaataacgcccgcgtgctggcagaatcaaaactcgactgcgcca

SEQ ID NO: 816616 - DNA, 75 bp, synthetic construct
  source 1..75: mol_type = other DNA
ggttgaaataccgcgagttaaacgacgacggtaaacgcattctcttaccgaccgaatttgaatattaccgcgatt

SEQ ID NO: 816617 - DNA, 75 bp, synthetic construct
  source 1..75: mol_type = other DNA
aggaactcaatcctatcgctttcgctcaggcagttcagctgcaggtgagcgcctgacaacgtttggtgatccgat

SEQ ID NO: 816618 - DNA, 75 bp, synthetic construct
  source 1..75: mol_type = other DNA
ggagacgctgcaaacgacgctcgaccagcgttactatctggcaatcctgcaggtttataacgacagccagattcg

SEQ ID NO: 816619 - DNA, 75 bp, synthetic construct
  source 1..75: mol_type = other DNA
atgtctgttttactgcctgaaaacaaaccgttttcatttctgagtctgatcatgcaacggctgtaccgtttttat

SEQ ID NO: 816620 - DNA, 75 bp, synthetic construct
  source 1..75: mol_type = other DNA
ggggataaaccgatgtggtgatcgtctctatataacagatgcccgatggatttggcaggttaatgtcacaggaag

SEQ ID NO: 816621 - DNA, 75 bp, synthetic construct
  source 1..75: mol_type = other DNA
cgcgcgttctggcacaaatcaccccgttgcaggcatcaatgacgctgtcagactgggagcgcgtgtatgacgtgg

SEQ ID NO: 816622 - DNA, 75 bp, synthetic construct
  source 1..75: mol_type = other DNA
aatgtcagtcttgactggacagtgaaagaagcagcaagagcaaaaattcgcgtggtggtaaaacgtctgctcaaa

SEQ ID NO: 816623 - DNA, 75 bp, synthetic construct
  source 1..75: mol_type = other DNA
ccgttgatcgttatcgaactaaaaaacgccgctgatgaaaatgccacggtatcaggtgcttataaccagataaaa

SEQ ID NO: 816624 - DNA, 75 bp, synthetic construct
  source 1..75: mol_type = other DNA
agcaaccttggctacatcatcacaattgatgaaccgcaacctttcagggcgggagttggccgcgccggtgatcgc

SEQ ID NO: 816625 - DNA, 75 bp, synthetic construct
  source 1..75: mol_type = other DNA
gcaccgcgaaacggtaacgctaatgggattacacaccgactcatttaagtctggcgatcggcatgttaaacggcg

SEQ ID NO: 816626 - DNA, 75 bp, synthetic construct
  source 1..75: mol_type = other DNA
gcgcgttctggcacaaatcaccccgttgcaggcatcgatgacgctgtccgactgggagcgcgtgtacggtgttgt

SEQ ID NO: 816627 - DNA, 75 bp, synthetic construct
  source 1..75: mol_type = other DNA
atttcatagggaacgttgtttggcaaaaaagaacttctccagataatcgattacgtcttgggaatgctcacgacc

SEQ ID NO: 816628 - DNA, 75 bp, synthetic construct
  source 1..75: mol_type = other DNA
ggggcgccgatggataatggttgaattgggtgagcattgcaatacccatattgtacctcgtcttaaaaaaataat

SEQ ID NO: 816629 - DNA, 75 bp, synthetic construct
  source 1..75: mol_type = other DNA
ttaactggattggtaaacataagcgtcctcgtctggagccgcgtattctgcttgaagacaaagagttgtcttatg

SEQ ID NO: 816630 - DNA, 75 bp, synthetic construct
  source 1..75: mol_type = other DNA
taaccaaagaaaaccactctggctggactcttcgtatacttgaggcactatttttcaataaaaaattaattacta

SEQ ID NO: 816631 - DNA, 75 bp, synthetic construct
  source 1..75: mol_type = other DNA
taaagaagtttctttcagaagctaaacaaggtgttgtgcctgcaactttatggttgcaccaggatgcaggtacaa

SEQ ID NO: 816632 - DNA, 75 bp, synthetic construct
  source 1..75: mol_type = other DNA
ttaactggattggtaagcataagcgtcctcgtctggagccgcgtattctattggaagataaggctttatcttatg

SEQ ID NO: 816633 - DNA, 75 bp, synthetic construct
  source 1..75: mol_type = other DNA
cccgaccgaatccgtggctattgatattgcttatgaaggctccggcagtggcgactggcgcactgacggtttcat

SEQ ID NO: 816634 - DNA, 75 bp, synthetic construct
  source 1..75: mol_type = other DNA
tcccggcagcgataatctgaacgggattaacgtgaaataccgttatgagtttacggacacactggggatggtgac

SEQ ID NO: 816635 - DNA, 75 bp, synthetic construct
  source 1..75: mol_type = other DNA
tgaccttgcttatgaaggttccggtagtggcgactggcgaacggatgcatttattgttggtatcggataccgttt

SEQ ID NO: 816636 - DNA, 75 bp, synthetic construct
  source 1..75: mol_type = other DNA
ttcgtgggcagatagctgaagaaaaacgcagggtggaactgctgacgtctcagatccaccaggccggtatgaagc

SEQ ID NO: 816637 - DNA, 75 bp, synthetic construct
  source 1..75: mol_type = other DNA
gtgacgcggtggcttcgctcatccgtaaaaataactatctccatgaaccgccccgggtttcctggagagtgtttt

SEQ ID NO: 816638 - DNA, 75 bp, synthetic construct
  source 1..75: mol_type = other DNA
ttcggtgaaaccagtgagccgccttctggtaaggcagacaacacggatatccggaaaacggcggaagaaaaagtg

SEQ ID NO: 816639 - DNA, 75 bp, synthetic construct
  source 1..75: mol_type = other DNA
atgatgacgctggcgcagtggtttgaagagaaagggattgagaaggggattcagcagggaagacaggaggaaagg

SEQ ID NO: 816640 - DNA, 75 bp, synthetic construct
  source 1..75: mol_type = other DNA
atgacaatcccagaacagaacaataacccgatcgttgaaatttctatccctgtttcgacgcaacaggcgcttgag

SEQ ID NO: 816641 - DNA, 75 bp, synthetic construct
  source 1..75: mol_type = other DNA
acctttcctcttttccggctgtaacgcagcgggcactggaaaccctgaatgccgccagaaatgagtggcttgaag

SEQ ID NO: 816642 - DNA, 75 bp, synthetic construct
  source 1..75: mol_type = other DNA
cgttcgccagtctacaaaatggcgatggactggaaactggcactaccgctgcaccctgaataccgcaccctgccg

SEQ ID NO: 816643 - DNA, 75 bp, synthetic construct
  source 1..75: mol_type = other DNA
tgctgaccaccatccagacccgcctgaaggcaatggaggccagtggggagatggcgcgggagcaggaagcgttca

SEQ ID NO: 816644 - DNA, 75 bp, synthetic construct
  source 1..75: mol_type = other DNA
atgaacaacaccgcagagaataacgacctttccacttttccggctgtaacgcagcgggcactggaaacccttaat

SEQ ID NO: 816645 - DNA, 75 bp, synthetic construct
  source 1..75: mol_type = other DNA
agtaataaactctctccagcagctatgcataaaatgaaggttcgtcaggaacgtgctgagaaggagaaagcagta

SEQ ID NO: 816646 - DNA, 75 bp, synthetic construct
  source 1..75: mol_type = other DNA
tatcctgcgctatgcgctggtgtatgtagccgaaccgggcggcatccaaaaacacatcatgcgctacccgcagct

SEQ ID NO: 816647 - DNA, 75 bp, synthetic construct
  source 1..75: mol_type = other DNA
tgtccgcagcagtattcctgaccgtatcgggtacgacagtgagtgcagcagaacaccagagcacattaagcgcag

SEQ ID NO: 816648 - DNA, 75 bp, synthetic construct
  source 1..75: mol_type = other DNA
tcccggcagtgatgatctgaacgggattaacgtgaaataccgttatgagtttacggatacgctggggctggtgac

SEQ ID NO: 816649 - DNA, 75 bp, synthetic construct
  source 1..75: mol_type = other DNA
tgacagctcgccgcttaatcaatatcagcgacgctttagccaggatgtcgcgccgcaatatgtcgacatcagtgc

SEQ ID NO: 816650 - DNA, 75 bp, synthetic construct
  source 1..75: mol_type = other DNA
cgttcgccggtttacaaaatggcaatggactggaaactggcgctgccgctgcaccctgaatatcgcaccctgccg

SEQ ID NO: 816651 - DNA, 75 bp, synthetic construct
  source 1..75: mol_type = other DNA
acaaacgtaatgaattaaaggcggagaataaacgccaatcatcaaaggctaaccactgcataccaccagcctgga

SEQ ID NO: 816652 - DNA, 75 bp, synthetic construct
  source 1..75: mol_type = other DNA
gtgcagtttaacccgaccgaatccgtggccattgatattgcttatgaaggctccggcagtggtgactggcgcact

SEQ ID NO: 816653 - DNA, 75 bp, synthetic construct
  source 1..75: mol_type = other DNA
gaacatcagtccacgctgagcgcggggtatcttcatgcccggaccaacgttcccggcagcgatgatctgaacggg

SEQ ID NO: 816654 - DNA, 75 bp, synthetic construct
  source 1..75: mol_type = other DNA
gcatcaccggtggacgtcaccgcagactgctgcctgtttcagccctgacaggtgcgttgctgttggtggttgccg

SEQ ID NO: 816655 - DNA, 75 bp, synthetic construct
  source 1..75: mol_type = other DNA
agttattgatacatcagagattattagagtgtttggttctcttgatggtgtaatcgatgctgtaaaacatgatgt

SEQ ID NO: 816656 - DNA, 75 bp, synthetic construct
  source 1..75: mol_type = other DNA
ttgcttttctgatgctggagcggatctcgcgtgattccggtatctgggacgatgataagggagttcgtaatacgc

SEQ ID NO: 816657 - DNA, 75 bp, synthetic construct
  source 1..75: mol_type = other DNA
tgggcaattcctgatgaggctccagtagaagtactggctgtggttgacaggagatttaatttccctgagccatca

SEQ ID NO: 816658 - DNA, 75 bp, synthetic construct
  source 1..75: mol_type = other DNA
atggttaatgccaatccttgcgcacgccctgaattcatctggcgcttctattcttgtcaaaaacgtcactatcac

SEQ ID NO: 816659 - DNA, 75 bp, synthetic construct
  source 1..75: mol_type = other DNA
gcggggccgtctgtacgcgtgaatgaatggttcagtgcttatgcgatgacgggtgtggcttacagccgtgtttcg

SEQ ID NO: 816660 - DNA, 75 bp, synthetic construct
  source 1..75: mol_type = other DNA
cacagccgcaggataccctgcttcatccgctgttgatgcgtaatggcgacagccgtccgttgcataaaccgacga

SEQ ID NO: 816661 - DNA, 75 bp, synthetic construct
  source 1..75: mol_type = other DNA
atggtaacgtcctatactggacatgttttagataatcaacgcgccaccactcgcggagttttctcctccggtagc

SEQ ID NO: 816662 - DNA, 75 bp, synthetic construct
  source 1..75: mol_type = other DNA
cggcacagcttgttaaggttagtcgccccacgatttacaagatgattaacagtggtaagttaagttacacctctg

SEQ ID NO: 816663 - DNA, 75 bp, synthetic construct
  source 1..75: mol_type = other DNA
ggaaaatctgtaaaagccattgatactacagagcttattcgtgttttcggttctcttagttttgacagtgaacgt

SEQ ID NO: 816664 - DNA, 75 bp, synthetic construct
  source 1..75: mol_type = other DNA
gcatcaccggtggacgtcaccgcaggctgctgcctgtttcggccctgacaggtgcgttgctgttggtggttgccg

SEQ ID NO: 816665 - DNA, 75 bp, synthetic construct
  source 1..75: mol_type = other DNA
aggcacgttctcagcttccggatgctccctgtattttctctgcccgcttttccactgattcgcgcaactctctca

SEQ ID NO: 816666 - DNA, 75 bp, synthetic construct
  source 1..75: mol_type = other DNA
cccgacagaatccgtggccattgaccttgcttatgaaggttccggtagtggcgactggcgaacggatgcatttat

SEQ ID NO: 816667 - DNA, 75 bp, synthetic construct
  source 1..75: mol_type = other DNA
aatggttcagcgcgtatgcgatggcaggcgtggcttacagccgtgtgtcgactttttccggggattatctccgcg

SEQ ID NO: 816668 - DNA, 75 bp, synthetic construct
  source 1..75: mol_type = other DNA
aatacaataatgaaattttctggactcgaggtggtgggcttaagggggggcaaccgttcgattttgaaagtctca

SEQ ID NO: 816669 - DNA, 75 bp, synthetic construct
  source 1..75: mol_type = other DNA
atccggtgcgcctgcatgggcgtctgaacatcagtccacgctgagcgcggggtatcttcatgccccgaccaacgt

SEQ ID NO: 816670 - DNA, 75 bp, synthetic construct
  source 1..75: mol_type = other DNA
atttctgccgctgagcctgagtttttgccgcgatctcgacctccttgcactcggcgatgcgcgcgccaccacgct

SEQ ID NO: 816671 - DNA, 75 bp, synthetic construct
  source 1..75: mol_type = other DNA
tggtgctgccgctgctggcctttgcgggcggcatggcggggttgatattgctgaagatgctggcaaagacccacc

SEQ ID NO: 816672 - DNA, 75 bp, synthetic construct
  source 1..75: mol_type = other DNA
ctttcagtgatctactattccgcgcagctatttagctgccaaattgtggcgctaaagctgattagcacggtgata

SEQ ID NO: 816673 - DNA, 75 bp, synthetic construct
  source 1..75: mol_type = other DNA
atgaaacccctggtgcacgtttccggaatgtttggggcatggcgcggcaataccagctgggtggcaccgctggcg

SEQ ID NO: 816674 - DNA, 75 bp, synthetic construct
  source 1..75: mol_type = other DNA
tttgcagaagctgaaccgtttacaccatcagataatgtagatgcacagctttataatggcttttttagcgacgcc

SEQ ID NO: 816675 - DNA, 75 bp, synthetic construct
  source 1..75: mol_type = other DNA
ggaacactgaaaaatatatacgtcggaatagcgccagatatcggcgcagaacacgagagcgactactatggccca

SEQ ID NO: 816676 - DNA, 75 bp, synthetic construct
  source 1..75: mol_type = other DNA
gtcattcagctatgcaggagacaggaatcgccagcttacccgttacagcgatacccgctggcatgaagattctgt

SEQ ID NO: 816677 - DNA, 75 bp, synthetic construct
  source 1..75: mol_type = other DNA
ctacttttttgttccacgattacgaaacttttggcacgcatccggcgctggatcgccctgcgcagtttgccgcta

SEQ ID NO: 816678 - DNA, 75 bp, synthetic construct
  source 1..75: mol_type = other DNA
cgccagcacggcgcagacggtctggtgctgttgccgaatacccgtcgcggcaaattactggcggcaaaactgggt

SEQ ID NO: 816679 - DNA, 75 bp, synthetic construct
  source 1..75: mol_type = other DNA
cgccggtgtcatggctgacactattcgccagcacggcgcagacggtctggtgctgttgccaaatacccgtcgcgg

SEQ ID NO: 816680 - DNA, 75 bp, synthetic construct
  source 1..75: mol_type = other DNA
gcgaagaacgcattgccacgccgtatgcggtactgaccatcagcagcggcacgttcgatgcggctcagccagacg

SEQ ID NO: 816681 - DNA, 75 bp, synthetic construct
  source 1..75: mol_type = other DNA
ttcccttcgtcatatcaacaaaacgtttcatgccacgcgagcgctgcgcgatgtttctctcgactttatgtcggg

SEQ ID NO: 816682 - DNA, 75 bp, synthetic construct
  source 1..75: mol_type = other DNA
tgtcgcttatgaaggctccggcagtggtgactggcgcactgacgggttcatcgtgggtgttggttataaattctg

SEQ ID NO: 816683 - DNA, 75 bp, synthetic construct
  source 1..75: mol_type = other DNA
gaatggttcagcgcgtatgcgatggcgggtgtggcttacagccgtgtgtcgacttttgcgtattttcatgaaagg

SEQ ID NO: 816684 - DNA, 75 bp, synthetic construct
  source 1..75: mol_type = other DNA
attatcttaatcaaatgcgcccggaacgattgccgaataacttctgggtgccacggcaattgttttcgcctcaga

SEQ ID NO: 816685 - DNA, 75 bp, synthetic construct
  source 1..75: mol_type = other DNA
ccatacggcctcgcttggcgcctgcgaaattcctcgccgggattacctcaattatctcaatcaaatgcgccccga

SEQ ID NO: 816686 - DNA, 75 bp, synthetic construct
  source 1..75: mol_type = other DNA
attcgccctgcgtcttctgagtaaaggaatgtctcgggaagacgttgcagagatggcaaatttacctcttgctga

SEQ ID NO: 816687 - DNA, 75 bp, synthetic construct
  source 1..75: mol_type = other DNA
agaacattgcgctggcagaacagctttgtaaggcgataggtgcggagttggcctgttctcgtccggtggcggaaa

SEQ ID NO: 816688 - DNA, 75 bp, synthetic construct
  source 1..75: mol_type = other DNA
tattcagcgataccccttctcgtctgccggaactgatgaacggtgcgcaggctttagctaatcaaatcaacacct

SEQ ID NO: 816689 - DNA, 75 bp, synthetic construct
  source 1..75: mol_type = other DNA
atggcttaccagcgtggtatttttccgtggttttctccaggcgaccccatcctctggtggtcgcccgatcctcgc

SEQ ID NO: 816690 - DNA, 75 bp, synthetic construct
  source 1..75: mol_type = other DNA
tcacgtcgtaccacactggacctgatgaaaacctatcctgacttgaaagcggttgtctcctttggttcaaacggt

SEQ ID NO: 816691 - DNA, 75 bp, synthetic construct
  source 1..75: mol_type = other DNA
ttcacaaaacctaatatcgtaatcaaacctaacgccaacagccgcccgaccggcgataccactggttatctggct

SEQ ID NO: 816692 - DNA, 75 bp, synthetic construct
  source 1..75: mol_type = other DNA
tttggtgaaattacggcggcagatattggccgtatgaatgtaactaaagaagaacgcgataaactgcgtcagaaa

SEQ ID NO: 816693 - DNA, 75 bp, synthetic construct
  source 1..75: mol_type = other DNA
actgatgccattgctgaatttgagaaaacattaattacgccggattccccatttgataaatggttgcgtggagat

SEQ ID NO: 816694 - DNA, 75 bp, synthetic construct
  source 1..75: mol_type = other DNA
cgatgtgctgaccggaagtgatgacggtcgccgcagcaacacgtctctggcgtggggagctggcgtgcagtttaa

SEQ ID NO: 816695 - DNA, 75 bp, synthetic construct
  source 1..75: mol_type = other DNA
aacggtgtctggcatcagaacgtctttgcctactatctctcgatttcgtgcaaccactgcgacgatccggcctgt

SEQ ID NO: 816696 - DNA, 75 bp, synthetic construct
  source 1..75: mol_type = other DNA
cttgcttatgaaggttccggtagtggcgactggcgaacggatgcatttattgttggtatcggataccgtttctga

SEQ ID NO: 816697 - DNA, 75 bp, synthetic construct
  source 1..75: mol_type = other DNA
gcttacagccgtgtgtcgactttctccggggattatctccgcgtaactgacaacaaggggaaaacgcacgatgtg

SEQ ID NO: 816698 - DNA, 75 bp, synthetic construct
  source 1..75: mol_type = other DNA
atccggtgcgcctgcatgggcgtctgagcagcaggccacactgagcgcagggtatcttcatgcccgtacgaacgc

SEQ ID NO: 816699 - DNA, 75 bp, synthetic construct
  source 1..75: mol_type = other DNA
aacgcatgggtggcaagggcggctatgtgatttacgtgggtagtttgaccgtgccgcagcataacttatgggctg

SEQ ID NO: 816700 - DNA, 75 bp, synthetic construct
  source 1..75: mol_type = other DNA
ccattgctgaatttgagaaaacattaattacgccggatccccatttgataaatggttgcgtggagatgagaatgc

SEQ ID NO: 816701 - DNA, 75 bp, synthetic construct
  source 1..75: mol_type = other DNA
gatgtcgcttatgaaggttccggcagtggtgactggcgcactgacggtttcatcgtgggtgtcggttataaattc

SEQ ID NO: 816702 - DNA, 75 bp, synthetic construct
  source 1..75: mol_type = other DNA
gcttacagccgtgtgtcgactttctccggggattatctgcaggtgaccgacaacaaggggaaaacgcatgatgtg

SEQ ID NO: 816703 - DNA, 75 bp, synthetic construct
  source 1..75: mol_type = other DNA
aatggttcagcgcgtatgcgatggcgggcgtggcttacagccgtgtgtcgaccttctccggggattatctccgcg

SEQ ID NO: 816704 - DNA, 75 bp, synthetic construct
  source 1..75: mol_type = other DNA
ctatgaatcagatttgtacttatgggtcagtatgttttttatgagtggtaacaaaatcgcatcgactgataaact

SEQ ID NO: 816705 - DNA, 75 bp, synthetic construct
  source 1..75: mol_type = other DNA
attacgagttcataccagatattaacctatgggaactgtcatttgacaaacgccctgttcgtggcgttcgctgtg

SEQ ID NO: 816706 - DNA, 75 bp, synthetic construct
  source 1..75: mol_type = other DNA
agccggaagtttgaactcaaaaccatcccagcccgtgtgacgctggctgaagatcgtcgccgtctgcgggtggat

SEQ ID NO: 816707 - DNA, 75 bp, synthetic construct
  source 1..75: mol_type = other DNA
tcaaaaactcaactggtgcacgccatatctggtttagagatgatagcgatacggaaaaggctgttatctgggcta

SEQ ID NO: 816708 - DNA, 75 bp, synthetic construct
  source 1..75: mol_type = other DNA
atctggcatgaaacagttgatgaccaaaattatcgtcttgctactggatacgacgatgtaaaccaacaattattg

SEQ ID NO: 816709 - DNA, 75 bp, synthetic construct
  source 1..75: mol_type = other DNA
gtcagtcaatggactatattgaattaatccattggggtaacagtaataccgctcgtaacaacgttttgagtatga

SEQ ID NO: 816710 - DNA, 75 bp, synthetic construct
  source 1..75: mol_type = other DNA
atcaacacatcatgcgcactgccgggctggactcttcccaggggccaacggcggcaaaatacattcttgagacgg

SEQ ID NO: 816711 - DNA, 75 bp, synthetic construct
  source 1..75: mol_type = other DNA
gatgaaaaaggcgatcttaagggatttgattttggtgtcttccagtggcacgccgacggttcatccacggcagcc

SEQ ID NO: 816712 - DNA, 75 bp, synthetic construct
  source 1..75: mol_type = other DNA
ataaggagcaggtgaactggacccgacagcagctcgccggccagaccagcgtgaaggtcatcctggtgaacggca

SEQ ID NO: 816713 - DNA, 75 bp, synthetic construct
  source 1..75: mol_type = other DNA
cagtgaagatctgaaagaccatcaggggcgggtgtttgcccgtaagggacaggtgattaatccgcttgatacggt

SEQ ID NO: 816714 - DNA, 75 bp, synthetic construct
  source 1..75: mol_type = other DNA
atggcccgggagcaggaagcgttcaaacaacgtgtcattgaaaacaccctgcgccctaagccggtggaagggctg

SEQ ID NO: 816715 - DNA, 75 bp, synthetic construct
  source 1..75: mol_type = other DNA
cgtcttcttcgacggcattaccgccggggagaaagatttctccgcgctgatcgcccgcctgaaaaaagaaaacat

SEQ ID NO: 816716 - DNA, 75 bp, synthetic construct
  source 1..75: mol_type = other DNA
atctggcatgaaaccgttgatgaccagaattatcgtcttgccactggcggtacagattcaggtcaacaattattg

SEQ ID NO: 816717 - DNA, 75 bp, synthetic construct
  source 1..75: mol_type = other DNA
tcagatgtagagagaaatgagcatgctgtctcatttatcaggaatgcaatgaatagtgaagagcacacaatcatt

SEQ ID NO: 816718 - DNA, 75 bp, synthetic construct
  source 1..75: mol_type = other DNA
catctgagtctgaaggacggttgacaccacagggttgggctgccggaggtggcaaggctcaaatcgtggatgatg

SEQ ID NO: 816719 - DNA, 75 bp, synthetic construct
  source 1..75: mol_type = other DNA
acgtactcacctgcaggatgcagtgccaatgactctcggccaggagttccatggctggggttttacaattaatga

SEQ ID NO: 816720 - DNA, 75 bp, synthetic construct
  source 1..75: mol_type = other DNA
cgcacgatgtgctgaccggaagtgatgacggtcgccacagcaacacgtctctggcgtggggggctggcgtgcagt

SEQ ID NO: 816721 - DNA, 75 bp, synthetic construct
  source 1..75: mol_type = other DNA
gcaggacgcagtaccgatgaccctcggtcaggaattccgcgccttcagcatcttgctgaaagaagaagtgaaaaa

SEQ ID NO: 816722 - DNA, 75 bp, synthetic construct
  source 1..75: mol_type = other DNA
tgcgaaggttacgtttacaactctatcggtatcgttacttacctgagcccgttcatcggtcaccacaacggtgac

SEQ ID NO: 816723 - DNA, 75 bp, synthetic construct
  source 1..75: mol_type = other DNA
tattcctacgataaagttaaatcactttctgatgatacagtggttggacgcgaattaggtgtcattgctcaagat

SEQ ID NO: 816724 - DNA, 75 bp, synthetic construct
  source 1..75: mol_type = other DNA
accaaaaacaccttcttcgggaaaatgaaaattaatcgtggatctgatgcaattatcatgaatgccgaaagtggt

SEQ ID NO: 816725 - DNA, 75 bp, synthetic construct
  source 1..75: mol_type = other DNA
aattccgatcgaactgcagagatggtaatgcattcctgcggtattgtgactctcctgaagccacatctgggatat

SEQ ID NO: 816726 - DNA, 75 bp, synthetic construct
  source 1..75: mol_type = other DNA
aggcgtggcttacagccgtgtgtcgactttttccggggattatctccgcgtaactgacaacaagggaaaaacgca

SEQ ID NO: 816727 - DNA, 75 bp, synthetic construct
  source 1..75: mol_type = other DNA
tggctgggagaaaaggaagatcggcgaccactgtcagaagtgattgagcaatggtattccctgtacggtcagaca

SEQ ID NO: 816728 - DNA, 75 bp, synthetic construct
  source 1..75: mol_type = other DNA
cagatataaaaatgacaatggtttattctcatttttccccagaccatcttgaagatgccgttaccaaaaaccctt

SEQ ID NO: 816729 - DNA, 75 bp, synthetic construct
  source 1..75: mol_type = other DNA
tggataaatacggcaccatgccgctgaacaaagtggttcagcccgcgtttaaactggcgcgtgatggttttatcg

SEQ ID NO: 816730 - DNA, 75 bp, synthetic construct
  source 1..75: mol_type = other DNA
acgctgccactggcaaccaaagtcccggaacccttaccgccgctggaaggatacacctttgagggctatcgcaat

SEQ ID NO: 816731 - DNA, 75 bp, synthetic construct
  source 1..75: mol_type = other DNA
catgcagaaaagcctttgaacgggcggtaaaacgggccggtattgaactaccggaaggccaatgcacccacgtcc

SEQ ID NO: 816732 - DNA, 75 bp, synthetic construct
  source 1..75: mol_type = other DNA
ctttccacggacgaaatcaagcgcctgttggcggcatgtgctgaatctcaaaaccctagcttactaatgattgca

SEQ ID NO: 816733 - DNA, 75 bp, synthetic construct
  source 1..75: mol_type = other DNA
gctgcaaatggtggtgaatagcatcgattatggcatgaacgtcgccgaagcgaccaatgcgccgcgtttccacca

SEQ ID NO: 816734 - DNA, 75 bp, synthetic construct
  source 1..75: mol_type = other DNA
acaaacgcccgctgtcgtcgatgtcgccgaccattgtggtgaaagacggtaaaacctggctggttaccggtagcc

SEQ ID NO: 816735 - DNA, 75 bp, synthetic construct
  source 1..75: mol_type = other DNA
ggtattctgcttaataaccagatggatgatttctccgccaaaccgggcgtaccgaacgtttacgggctggtgggc

SEQ ID NO: 816736 - DNA, 75 bp, synthetic construct
  source 1..75: mol_type = other DNA
gaatgccgttgatgctgccgtggcggtgggctacgcgctggcggtaacgcatccgcaggcagggaatctgggcgg

SEQ ID NO: 816737 - DNA, 75 bp, synthetic construct
  source 1..75: mol_type = other DNA
cgacccggattttgtcaaagtcccgtggcaggcgctgaccaataaagcctatgccaaatctattgccgatcaaat

SEQ ID NO: 816738 - DNA, 75 bp, synthetic construct
  source 1..75: mol_type = other DNA
cggacagcaaaaaatcactcacttcgcatctggcttctggtacgcccggtacggtagcaggtttctcgctggcgc

SEQ ID NO: 816739 - DNA, 75 bp, synthetic construct
  source 1..75: mol_type = other DNA
aaccctaactttggcggcgaagtaatggtgattggcctgggttgtgaaaagttgcagcctgagcgcctgctgact

SEQ ID NO: 816740 - DNA, 75 bp, synthetic construct
  source 1..75: mol_type = other DNA
ggcgcgtgcgctacaggggatcgcggctacgctaaatcgtcacggcctgtttaccacgccggagatcgcccatcg

SEQ ID NO: 816741 - DNA, 75 bp, synthetic construct
  source 1..75: mol_type = other DNA
agaaagcatggaaccagctcatcgcacgccacgatatgttgcgtatggtggttgatgccgacgggcagcagcgaa

SEQ ID NO: 816742 - DNA, 75 bp, synthetic construct
  source 1..75: mol_type = other DNA
tctgattgcgcaggtcagcccgaacagtttaacgcccgctggcaggaggcatggcgtctgctttcacagcgtcat

SEQ ID NO: 816743 - DNA, 75 bp, synthetic construct
  source 1..75: mol_type = other DNA
tattttccggaccggaagcccgtctcgcagtattttgcgccacgctctcgcagcatgatattaactatcgtcgcc

SEQ ID NO: 816744 - DNA, 75 bp, synthetic construct
  source 1..75: mol_type = other DNA
atcagcgcctggctgccgctcgctagcgcgttgaacaggcgcgttttcggcctgcaagcaaaatcgccgcagcgc

SEQ ID NO: 816745 - DNA, 75 bp, synthetic construct
  source 1..75: mol_type = other DNA
ttttgcgccacgctctcgcagcatgacattaactatcgtcgcctgagcgtaaccggtgcggcgcactccgcttta

SEQ ID NO: 816746 - DNA, 75 bp, synthetic construct
  source 1..75: mol_type = other DNA
tattctcgacgttgccagcggaaagaagaaaaccttctcagaccaatgggggttgcataaccaactggcggtgtt

SEQ ID NO: 816747 - DNA, 75 bp, synthetic construct
  source 1..75: mol_type = other DNA
gccaccggcgaagagacgattgaagaggtgggctggaaactgttccactttattctcgacgttgccagcggaaag

SEQ ID NO: 816748 - DNA, 75 bp, synthetic construct
  source 1..75: mol_type = other DNA
tgctggtgcgctgcggtgcaacggtgatgttctcggaagtgacggaagtacgcgacgccattcatctgctgacgc

SEQ ID NO: 816749 - DNA, 75 bp, synthetic construct
  source 1..75: mol_type = other DNA
aagtcgcgcaggtaaaaggtctgcaatctctgatgggcaatgataaagactatattgccacccgcgccgcgtaca

SEQ ID NO: 816750 - DNA, 75 bp, synthetic construct
  source 1..75: mol_type = other DNA
cgcgcagtgaacgaagaggtcggcaaacggctgctggaggagatggagtggtacgataactatctcaatatggga

SEQ ID NO: 816751 - DNA, 75 bp, synthetic construct
  source 1..75: mol_type = other DNA
acgctccggcggcggtggtacctattcgtaccattcacaacatttcgctgaacccaaactttggcggcgaggtga

SEQ ID NO: 816752 - DNA, 75 bp, synthetic construct
  source 1..75: mol_type = other DNA
tttagcggcgtataaagcggtcgaacgcacaccgataagcggcgattatcgcgggtatcaggtttactccatgcc

SEQ ID NO: 816753 - DNA, 75 bp, synthetic construct
  source 1..75: mol_type = other DNA
cttccggtcgacgcgcaggggtgctgaccgggctgggcgtggcgctgggcgatgcattttattccgggttgggtt

SEQ ID NO: 816754 - DNA, 75 bp, synthetic construct
  source 1..75: mol_type = other DNA
gtcggtcgtatccgttatctcggcgtgctgttgtacgatgcggacgccattgaacgtgcagccagcaccgagaac

SEQ ID NO: 816755 - DNA, 75 bp, synthetic construct
  source 1..75: mol_type = other DNA
gactgcctgcatgggtagatattcctccaccaacacgtgaagaacaaattgcatcagccgaaactaaaaagcagc

SEQ ID NO: 816756 - DNA, 75 bp, synthetic construct
  source 1..75: mol_type = other DNA
caccgggcttggtgtggcgctgggcgacgccatctattccgggctgggattgtttgggatggcaacgctcattac

SEQ ID NO: 816757 - DNA, 75 bp, synthetic construct
  source 1..75: mol_type = other DNA
aaagtgtagccagtcgggtaattggcgcgattatcagcgtattcgcgctacgcctgatttacgaaggaatagtgc

SEQ ID NO: 816758 - DNA, 75 bp, synthetic construct
  source 1..75: mol_type = other DNA
agcacactacaacaaccgattagcgccccctggtatgtcttttttcgccgcggattaattaccgatctctctaac

SEQ ID NO: 816759 - DNA, 75 bp, synthetic construct
  source 1..75: mol_type = other DNA
gcgctccggcaagcgacactgacaagcaaaacgtttcccagccaaacccattcattaaacgcggtacgccgcaat

SEQ ID NO: 816760 - DNA, 75 bp, synthetic construct
  source 1..75: mol_type = other DNA
gggcgcttaatcagcggggtatttactgacttctttaactggcgaattgctctggcggttattggctgtttcgct

SEQ ID NO: 816761 - DNA, 75 bp, synthetic construct
  source 1..75: mol_type = other DNA
cccactttccgatgccataggtcgcaagccggtgatggtgacggcactactgttggcctccatctgcacgttact

SEQ ID NO: 816762 - DNA, 75 bp, synthetic construct
  source 1..75: mol_type = other DNA
catgaacagtaagcaatggcccggtaaagccgctattggtcgtctgaaaggcgatgaactggcgcaatataattt

SEQ ID NO: 816763 - DNA, 75 bp, synthetic construct
  source 1..75: mol_type = other DNA
cttctctattgcgtgcagcctattcttccggtgctttcgcaagaatttggcttaacgcctgctaacagtagtatt

SEQ ID NO: 816764 - DNA, 75 bp, synthetic construct
  source 1..75: mol_type = other DNA
atggggtcgttcgtcacgctgtttaattacatcggctatcggttgatgctctctccctggcatgtcagccaggcc

SEQ ID NO: 816765 - DNA, 75 bp, synthetic construct
  source 1..75: mol_type = other DNA
caatctgaaagaagcctgggtgttccggactggcgatgtgaagcagccgaacgatccaggtgaaatcaccaatga

SEQ ID NO: 816766 - DNA, 75 bp, synthetic construct
  source 1..75: mol_type = other DNA
ggcagtacacaaagcattatggttgggccggacggtgagttgtacggcgcatccgacccgcgctcggtggatgat

SEQ ID NO: 816767 - DNA, 75 bp, synthetic construct
  source 1..75: mol_type = other DNA
gtgcttcccgctatcgaaagcctacgtataccggtgcaatatctcgccaatatgttgagtgcgggcgataccggt

SEQ ID NO: 816768 - DNA, 75 bp, synthetic construct
  source 1..75: mol_type = other DNA
tggactggaaactggcgctaccgctgcaccctgaataccgcaccctgccgatggtctggtacgttcctccgctgt

SEQ ID NO: 816769 - DNA, 75 bp, synthetic construct
  source 1..75: mol_type = other DNA
ccactcaggtgggggtggatatcctcaaggagggcgggaatgccgttgatgccgccgtggcggtgggctacgcgc

SEQ ID NO: 816770 - DNA, 75 bp, synthetic construct
  source 1..75: mol_type = other DNA
attctgcttaacaatcagatggatgatttctcagccaaaccaggtgtaccgaacgtttacgggctggtaggcggc

SEQ ID NO: 816771 - DNA, 75 bp, synthetic construct
  source 1..75: mol_type = other DNA
ttctcgctggcgctggataaatacggcaccatgccgctgaacaaagtcgtgcagcccgcgtttaaactggcacgc

SEQ ID NO: 816772 - DNA, 75 bp, synthetic construct
  source 1..75: mol_type = other DNA
cgaacatacctttacctttaactcaccaaactcgtgggcaccagcggcctatgacgcgaagctggatctggtcta

SEQ ID NO: 816773 - DNA, 75 bp, synthetic construct
  source 1..75: mol_type = other DNA
ctggcctgcctatggtcgtaatcaggaaggtcaacgcttttcacctctgaaacaaattaacgccgataacgttca

SEQ ID NO: 816774 - DNA, 75 bp, synthetic construct
  source 1..75: mol_type = other DNA
agcatggggctatatctcggcattggatctgaaaaccaatgaagtggtgtggaagaaacgtattggtacgccgca

SEQ ID NO: 816775 - DNA, 75 bp, synthetic construct
  source 1..75: mol_type = other DNA
aggaaaaatacaaaggcggctggatccgtaaaatcaacggcaaactgcagccgcgcatgggtaaccgtgccatgt

SEQ ID NO: 816776 - DNA, 75 bp, synthetic construct
  source 1..75: mol_type = other DNA
agcatggggctatatctcggcgttggatctgaaaaccaacgaagtggtgtggaagaaacgcattggtacgccgca

SEQ ID NO: 816777 - DNA, 75 bp, synthetic construct
  source 1..75: mol_type = other DNA
aagttccggttatttacgctccagcgaaaaccggcaacatttttgtgcttgatcgccgcaatggtgaactggtgg

SEQ ID NO: 816778 - DNA, 75 bp, synthetic construct
  source 1..75: mol_type = other DNA
acgtggatcaggtactggaaaacggtaagcggttgattgagacggcgcggttttatggtattgagctgtatctga

SEQ ID NO: 816779 - DNA, 75 bp, synthetic construct
  source 1..75: mol_type = other DNA
cccaccatttccgtggcgacagctactgctacggcggcggttactaccgtcgtggtcatgctcaccgcgctctgg

SEQ ID NO: 816780 - DNA, 75 bp, synthetic construct
  source 1..75: mol_type = other DNA
gtgtttactctcgacaaagcgcgggaagtttctgcggcggcggtgaaggccgggcgaatccagtctgtgctgctc

SEQ ID NO: 816781 - DNA, 75 bp, synthetic construct
  source 1..75: mol_type = other DNA
gtgatgtggtgttggtatcgggtattcagcgtggcgaaccggaaattgtcggtcgttatgacagtcttggaaact

SEQ ID NO: 816782 - DNA, 75 bp, synthetic construct
  source 1..75: mol_type = other DNA
actaagtttgtggcagcagggcaagatcgccccggacagctgggtgatcgacgtggatcaggtactggaaaacgg

SEQ ID NO: 816783 - DNA, 75 bp, synthetic construct
  source 1..75: mol_type = other DNA
agaacccggcgctgatttccgccgcactaagtttgtggcagcagggcaagatcgccccggacagctgggtgatcg

SEQ ID NO: 816784 - DNA, 75 bp, synthetic construct
  source 1..75: mol_type = other DNA
acggaagtcgttactgatatgaaagatgccgccaacgcgctgcgctggtgtgttaacgagatggagcgtcggtat

SEQ ID NO: 816785 - DNA, 75 bp, synthetic construct
  source 1..75: mol_type = other DNA
tggtaaatctctgacagctggccagcatgtctatgacaaactgctgttaatggttgacgctctgggcaatcccct

SEQ ID NO: 816786 - DNA, 75 bp, synthetic construct
  source 1..75: mol_type = other DNA
ttgcaaaaaatcctcggacatcacgacataaaaatgactatgcgttacgcacatctagcaccggatcacctggaa

SEQ ID NO: 816787 - DNA, 75 bp, synthetic construct
  source 1..75: mol_type = other DNA
gatgacagcagtatcgactacaccctgccgctggcaggcgagtatccggtgagcagtgcagtggtgctctgtttc

SEQ ID NO: 816788 - DNA, 75 bp, synthetic construct
  source 1..75: mol_type = other DNA
cccatcatttccgtggcgacagctactgctacggcggcggttactaccgtcgtggtcatgcgcaacatgcgctgg

SEQ ID NO: 816789 - DNA, 75 bp, synthetic construct
  source 1..75: mol_type = other DNA
tttgttcgcgatcaggaagttcatgccgtggtgcaggactggaaagcgcgtggtcgcccacagtatgttgatggc

SEQ ID NO: 816790 - DNA, 75 bp, synthetic construct
  source 1..75: mol_type = other DNA
cgtaatctggcgggttataacgaaaaaattgctgaagccgatcgcatgatgcgtccgattccagacccgtactgg

SEQ ID NO: 816791 - DNA, 75 bp, synthetic construct
  source 1..75: mol_type = other DNA
gtacagcagccgcaacaaccggttgcaccgcagcagcaatatcagcagccgcaacaaccagttccgccgcagccg

SEQ ID NO: 816792 - DNA, 75 bp, synthetic construct
  source 1..75: mol_type = other DNA
ttaattattggcggtgaaactgcaggcggcaaagcggtgacggattcagttttgatctctgtgaaggataataaa

SEQ ID NO: 816793 - DNA, 75 bp, synthetic construct
  source 1..75: mol_type = other DNA
cattggtttaggtagcgcaggtacggcatggtacaagctggatacacaggccaaagataaaagatggacagcgtt

SEQ ID NO: 816794 - DNA, 75 bp, synthetic construct
  source 1..75: mol_type = other DNA
gagcagcaggccacgctgagcgcggggtatcttcatgcccggacgaacgctcccggcagcgataatcttaacggg

SEQ ID NO: 816795 - DNA, 75 bp, synthetic construct
  source 1..75: mol_type = other DNA
catcatgccacatacaaagtttcgttttatcgctaccggcaacagtgcgggcagcggtgaccagacgggcttgta

SEQ ID NO: 816796 - DNA, 75 bp, synthetic construct
  source 1..75: mol_type = other DNA
ggtgctgaaaaaagaaccatacattgtggtgttggttgacgaatttgccgacctgatgatgacggtaggtaaaaa

SEQ ID NO: 816797 - DNA, 75 bp, synthetic construct
  source 1..75: mol_type = other DNA
agctgcattccctggtggaccaagagatcaagcaacctcggcatttattgatggcaatctgtatgtgtttggcgg

SEQ ID NO: 816798 - DNA, 75 bp, synthetic construct
  source 1..75: mol_type = other DNA
atcagcagccgcaacaaccagttgcgccgcagcagcaatatcagcagccacaacaaccggttgcaccacagccgc

SEQ ID NO: 816799 - DNA, 75 bp, synthetic construct
  source 1..75: mol_type = other DNA
cgtattatcgaacagatggaagcgcaagggattgtcagcgaacaggggcacaacggtaatcgtgaagtgctggcc

SEQ ID NO: 816800 - DNA, 75 bp, synthetic construct
  source 1..75: mol_type = other DNA
cggtgaaactacgggcggcaaagctgtggcggattcagtgttgctctctgtgaaagataataaagttactgtgca

SEQ ID NO: 816801 - DNA, 75 bp, synthetic construct
  source 1..75: mol_type = other DNA
ttatcatgggcacatcatttgccgcaaatgcctctgtactacccgaaaccccagtgccatttaaaagtggtacag

SEQ ID NO: 816802 - DNA, 75 bp, synthetic construct
  source 1..75: mol_type = other DNA
ccatgtgacttttgtacacaacggcaaggcttatgttactggcggtgttaaccagaatatcttcaatggctattt

SEQ ID NO: 816803 - DNA, 75 bp, synthetic construct
  source 1..75: mol_type = other DNA
atataaaaatgactatgcgttacgcacatctggcaccggatcatctagaaacggcgctccgtttcaatcctctgg

SEQ ID NO: 816804 - DNA, 75 bp, synthetic construct
  source 1..75: mol_type = other DNA
ttgtccgtacgtcaaggcagaatgtttaaaccctgctatcaggagtttaaaaagatgctcaaactaacgaatatt

SEQ ID NO: 816805 - DNA, 75 bp, synthetic construct
  source 1..75: mol_type = other DNA
gtaaatggctctgcgaatgctaccctgccggacgttctgggcgtagggtacgaaaacaatttgcaaccaaaggcg

SEQ ID NO: 816806 - DNA, 75 bp, synthetic construct
  source 1..75: mol_type = other DNA
ctggcgccggaagaaattaaacgcctgctggatgcctgcgctgattcagaaaaccccagcctgctcatgattgca

SEQ ID NO: 816807 - DNA, 75 bp, synthetic construct
  source 1..75: mol_type = other DNA
gagaagccgtaaatcttactcgttcacaggtgaccaaataccgaattacctttgtaagaacgaaggggaagaaaa

SEQ ID NO: 816808 - DNA, 75 bp, synthetic construct
  source 1..75: mol_type = other DNA
acttacacgtccccaactttccccatgcaagctgactttcaccaaaaccaaaggtaagaagaatcgcacggttcc

SEQ ID NO: 816809 - DNA, 75 bp, synthetic construct
  source 1..75: mol_type = other DNA
taactgtcaatcgcgagcagcaatacctcgaagcggtgttcaatgaactgcgacgattaggggagtggagtttac

SEQ ID NO: 816810 - DNA, 75 bp, synthetic construct
  source 1..75: mol_type = other DNA
gacatctatcagaattaattgagctgtggtattccctgtatggtcaaacactcacagaccccaagcgcctcatgg

SEQ ID NO: 816811 - DNA, 75 bp, synthetic construct
  source 1..75: mol_type = other DNA
ctgggccactggtcagcgcccaatccgctcgccggattgccaacatttaaaatcgctgagggcgaactggcattc

SEQ ID NO: 816812 - DNA, 75 bp, synthetic construct
  source 1..75: mol_type = other DNA
ccaatacggatagcggcagaaaaagtaccgcgctgctgctcagcgccgccagcaacagcgcgttgcggcggctgg

SEQ ID NO: 816813 - DNA, 75 bp, synthetic construct
  source 1..75: mol_type = other DNA
taaaccttgaacaacgcaacctatcatcagtttttggcacgctgaaaaagctgggccactggtcagcccccaacc

SEQ ID NO: 816814 - DNA, 75 bp, synthetic construct
  source 1..75: mol_type = other DNA
ctcgcagaccccaagcgactcatggcgaaacttggaattatctgtaatggtctgggcgatcccatcgcttcagag

SEQ ID NO: 816815 - DNA, 75 bp, synthetic construct
  source 1..75: mol_type = other DNA
aagctcgagcctactaatgattgcaaaaatatgcttagctaccggcgcacggtggagtgaagccgaaaaccttca

SEQ ID NO: 816816 - DNA, 75 bp, synthetic construct
  source 1..75: mol_type = other DNA
ctgactgctgggcagcatgtctatgacaaattgctgttgatggttgacgctctgggcaatccccttgcaaccgat

SEQ ID NO: 816817 - DNA, 75 bp, synthetic construct
  source 1..75: mol_type = other DNA
taataaccaaaatcttcgccaacccggtggtgccgcagattgatgattactacgaacctttcaccttcgactacg

SEQ ID NO: 816818 - DNA, 75 bp, synthetic construct
  source 1..75: mol_type = other DNA
caacgtcgaaaccaaaccgggcattggttacccgaaaaactgggaagatcaggatgagtggcaaggcggctggct

SEQ ID NO: 816819 - DNA, 75 bp, synthetic construct
  source 1..75: mol_type = other DNA
tatgttgagtgccggtgataccggtccggtactgcgggcgctgaaacggatgatggcgatgcgccactatatgcg

SEQ ID NO: 816820 - DNA, 75 bp, synthetic construct
  source 1..75: mol_type = other DNA
ggcgaatggtcgtatccgaacccactggagaacatgcgaaaattcaccatcgcagaaaaagagatggcatggctt

SEQ ID NO: 816821 - DNA, 75 bp, synthetic construct
  source 1..75: mol_type = other DNA
atggttcaaactacatggtaaatctctaaccgctgggcagcatgtctatgataaattgctgttgatggttgacgc

SEQ ID NO: 816822 - DNA, 75 bp, synthetic construct
  source 1..75: mol_type = other DNA
gtttcgatggcgctgaagaactggatccgttgttcgatcaggcggtgcagtttgtcactgaaaaacgcaaagcgt

SEQ ID NO: 816823 - DNA, 75 bp, synthetic construct
  source 1..75: mol_type = other DNA
tctcggaaatcccctcgccaccgatttaacatccaaaatgttcgcgcactatcgcgataaacgcctgacaggaga

SEQ ID NO: 816824 - DNA, 75 bp, synthetic construct
  source 1..75: mol_type = other DNA
acccatgagcagattgttgaattgctggctgattgcaaatgtcagaacccaattctggcactggtagttaagata

SEQ ID NO: 816825 - DNA, 75 bp, synthetic construct
  source 1..75: mol_type = other DNA
atcaaaattaacggtacgtcttgttggttagtttcctgccaaaacgttaacgaggagtggattgataatattgat

SEQ ID NO: 816826 - DNA, 75 bp, synthetic construct
  source 1..75: mol_type = other DNA
gtatctgggcgtgctgctttacgacgccgaccgcatcgaggaagcggcgagcaccgagcgcgaagttgacctcta

SEQ ID NO: 816827 - DNA, 75 bp, synthetic construct
  source 1..75: mol_type = other DNA
agaaaaaccgaactgttcctatttctcaggaactgtatgaagaattacccaaaaacagaggaaagttattcacac

SEQ ID NO: 816828 - DNA, 75 bp, synthetic construct
  source 1..75: mol_type = other DNA
ttgacagcaggtgatttcacaaaataccgggaagccagattaaaaggtgaggtcaaaaacgaagatggtgtgctc

SEQ ID NO: 816829 - DNA, 75 bp, synthetic construct
  source 1..75: mol_type = other DNA
atgcccgtcatggaggccatgaagcacatcaatgactggcttggcgaagaggtgatccgctttaacccttatgca

SEQ ID NO: 816830 - DNA, 75 bp, synthetic construct
  source 1..75: mol_type = other DNA
acgctgcgcgccaaactgcgcgctataaatcccgacctttcgccaattaatactcatcgcggaatgggatacagc

SEQ ID NO: 816831 - DNA, 75 bp, synthetic construct
  source 1..75: mol_type = other DNA
caagtcgccaggccgcgtctggtcacgccagcaattgatggatagtgtctgggaagacgcgcaggacacttacga

SEQ ID NO: 816832 - DNA, 75 bp, synthetic construct
  source 1..75: mol_type = other DNA
atgcaacgggaaacggtctggttagtagaagacgagcaagggatagccgacacgctggtctacatgttgcagcag

SEQ ID NO: 816833 - DNA, 75 bp, synthetic construct
  source 1..75: mol_type = other DNA
ttgatctctccagatactctcccgagcttgatgacaacggtcagtacatccttcccgcttccggtaaatatgagc

SEQ ID NO: 816834 - DNA, 75 bp, synthetic construct
  source 1..75: mol_type = other DNA
aacctggtaccgggaaaaaccacttagcggcggctatcgggaatcgcctgctgaaagatggccagacagtgattg

SEQ ID NO: 816835 - DNA, 75 bp, synthetic construct
  source 1..75: mol_type = other DNA
tcagcggtaaaaccggcaccaggaaaaatcaccttgcagcggcgatgggcaaccggctgatggtgaaggggcgca

SEQ ID NO: 816836 - DNA, 75 bp, synthetic construct
  source 1..75: mol_type = other DNA
cttaacaagccgcatatcctgcaacactaccgcgaacgttttaccaatatcctggtagacgaattccaggatacc

SEQ ID NO: 816837 - DNA, 75 bp, synthetic construct
  source 1..75: mol_type = other DNA
gcagcaacgtaacgatatgggcgatttagccatgagggctaacgtcgctctttctcagggaccggaagcctacag

SEQ ID NO: 816838 - DNA, 75 bp, synthetic construct
  source 1..75: mol_type = other DNA
atttaataacaactatcgacaatcgtattgatggattttcatggcaggcatcgcaaaaattaggaaaagcagccc

SEQ ID NO: 816839 - DNA, 75 bp, synthetic construct
  source 1..75: mol_type = other DNA
gaggagtggcgggaatggcaacttgctgaaggacgaaaacgcagcgaggagattaaccgcctgaatcatcaggtg

SEQ ID NO: 816840 - DNA, 75 bp, synthetic construct
  source 1..75: mol_type = other DNA
aacgggcgtctgggtaaaaaactgtggaccgatggcgcggacggtgagcctatttccctctattgcgcttttaac

SEQ ID NO: 816841 - DNA, 75 bp, synthetic construct
  source 1..75: mol_type = other DNA
tttatcggcgagctgccggaagagtgtgtggaagaggtgcgcctgcgcgccacggtaagccgcccggtcagccat

SEQ ID NO: 816842 - DNA, 75 bp, synthetic construct
  source 1..75: mol_type = other DNA
ttcttgagcgtatccgtaagctggtcccgcagcatgtaatcgcgccgtaccggacagttgacgagtggcgagagt

SEQ ID NO: 816843 - DNA, 75 bp, synthetic construct
  source 1..75: mol_type = other DNA
gccgctgcaccgcaaatgttcgttcgcgaattaccaggtgcggaacgacgggcagaaacatgcgctgagccaggc

SEQ ID NO: 816844 - DNA, 75 bp, synthetic construct
  source 1..75: mol_type = other DNA
gccgcaggatgcaatccctccgtaccgtacggtggcggagtggctggaatggcagcttgctgaagggcgtaagcg

SEQ ID NO: 816845 - DNA, 75 bp, synthetic construct
  source 1..75: mol_type = other DNA
gagaggattatggaccgcatgaccatgaacggtggtcgatgggtgacgtttaactgggatagctggcgtccaaat

SEQ ID NO: 816846 - DNA, 75 bp, synthetic construct
  source 1..75: mol_type = other DNA
aacctggtaccggaaaaaaccatctggcggcggctatcgggaatcgcctgctgaaagatggccagaccgtgattg

SEQ ID NO: 816847 - DNA, 75 bp, synthetic construct
  source 1..75: mol_type = other DNA
atgaacggtggtcgctgggtgagttttaactgggaaagctggcgtcccaatgtcagccatctgagagtattgaag

SEQ ID NO: 816848 - DNA, 75 bp, synthetic construct
  source 1..75: mol_type = other DNA
tgagaggattatggacaggatgaccatgaacggtggtcgctgggtgagttttaactgggaaagctggcgtcccaa

SEQ ID NO: 816849 - DNA, 75 bp, synthetic construct
  source 1..75: mol_type = other DNA
tcaccggaagtgtacgttcggtaactaccgggtgcagaacgatgggcagcgccatgccctgagtcaggcgaaatc

SEQ ID NO: 816850 - DNA, 75 bp, synthetic construct
  source 1..75: mol_type = other DNA
gccatgctctgagccaggcgaaatccattgtcgatgaattgatgaccggttatacaaacttcgtgttcagcggga

SEQ ID NO: 816851 - DNA, 75 bp, synthetic construct
  source 1..75: mol_type = other DNA
tatcgccgatgaactgatgaccggatgcacaaatttcgtgttcagcggtaagccgggtaccggaaagaaccacct

SEQ ID NO: 816852 - DNA, 75 bp, synthetic construct
  source 1..75: mol_type = other DNA
agcgcgagacaaaaaacgagcaggtggtgctgcaccagattgttgatcgccggacagcgtcgatgcgcagcgtgg

SEQ ID NO: 816853 - DNA, 75 bp, synthetic construct
  source 1..75: mol_type = other DNA
gcaccgcaaatgttcgtttgcgaattaccaggtgcagaacgacggccagcgatacgcgttaagccaagcgaaatc

SEQ ID NO: 816854 - DNA, 75 bp, synthetic construct
  source 1..75: mol_type = other DNA
gcacagcaaatgctcgtttgcgaattatcaggtgcagaacgacggccagcgatacgcgttaagccaggcgaaatc

SEQ ID NO: 816855 - DNA, 75 bp, synthetic construct
  source 1..75: mol_type = other DNA
tagatatagtatttatgacaagctaataatgagattactcatttttataggtgaagataatgtggtgaagttaca

SEQ ID NO: 816856 - DNA, 75 bp, synthetic construct
  source 1..75: mol_type = other DNA
cctgactgcgaatatttttttgattctgtcataaataattcagcagcactagcagaatactatctcccttatatc

SEQ ID NO: 816857 - DNA, 75 bp, synthetic construct
  source 1..75: mol_type = other DNA
cgatgacgtggaagaaggcgtgtggggaacggatttcctctacaccgatgtttgggtctccatgggtgaaccgaa

SEQ ID NO: 816858 - DNA, 75 bp, synthetic construct
  source 1..75: mol_type = other DNA
cgagccgtgtccgggtgacctttgatggtctgcagggcgaaacgcctgacaaattctcgctgaccggtcaggcag

SEQ ID NO: 816859 - DNA, 75 bp, synthetic construct
  source 1..75: mol_type = other DNA
ctgatggcaagcctcattctctgtggaaacaggggcgcgcattagcttctcaaccagagaatgtcacaaagacaa

SEQ ID NO: 816860 - DNA, 75 bp, synthetic construct
  source 1..75: mol_type = other DNA
gggaatgaaactgaagttctttcaaagaaagaaaatatattaaattgcctaaacactttccaagaaaattttctt

SEQ ID NO: 816861 - DNA, 75 bp, synthetic construct
  source 1..75: mol_type = other DNA
tagtaagtttaaaaataagtgcggtgaagatggttatcagaaagcaaaatcagcactattttcaaaatatgagat

SEQ ID NO: 816862 - DNA, 75 bp, synthetic construct
  source 1..75: mol_type = other DNA
attgatataaaaggaaatcctcagttaggagagcttgctaataaatataaaactggtattgaaattaaatttagg

SEQ ID NO: 816863 - DNA, 75 bp, synthetic construct
  source 1..75: mol_type = other DNA
agacagagaagcagacggtctcgacactggcaacggttgctgccggtctggccggtggtctggtgggagactcag

SEQ ID NO: 816864 - DNA, 75 bp, synthetic construct
  source 1..75: mol_type = other DNA
gaactgagcgaggcagagaagcagacggtctcgacactggcaacggttgctgccggcctggccggtggcctggtg

SEQ ID NO: 816865 - DNA, 75 bp, synthetic construct
  source 1..75: mol_type = other DNA
acaatatgttgaacgtgatagccactgaaacagcagctaatacggcagcagcaatagctggtgctacaggtaatg

SEQ ID NO: 816866 - DNA, 75 bp, synthetic construct
  source 1..75: mol_type = other DNA
aagccagactttgacggataaacagatccacaattacgcacagcaactggcaggcgatacaccgctgaaagaggt

SEQ ID NO: 816867 - DNA, 75 bp, synthetic construct
  source 1..75: mol_type = other DNA
tgtacgtgatccgagtcgcgatggcacccggggaccggggcatgtgctgaatggcgacaatacagacgaaaacaa

SEQ ID NO: 816868 - DNA, 75 bp, synthetic construct
  source 1..75: mol_type = other DNA
taatctacccaatgcggaaaaaatatgtaaagctattatacagtatcatgagttgattcttaggtatatgccaga

SEQ ID NO: 816869 - DNA, 75 bp, synthetic construct
  source 1..75: mol_type = other DNA
ccgtaaaaacaaaagaaaccgggcgactgtttgatgtgaagtacagagagttttgccgggcattaaaaaaaataa

SEQ ID NO: 816870 - DNA, 75 bp, synthetic construct
  source 1..75: mol_type = other DNA
caaaaacggtagaaaaagaacggtgcctgtgtcgcaggaaatatgcgatgccgtaaaaacaaaagaaaccgggcg

SEQ ID NO: 816871 - DNA, 75 bp, synthetic construct
  source 1..75: mol_type = other DNA
ctctatcagccgggtcatcccttgatgtacctcaaacccggcagccctattcggatcctaatttgcgataaaagc

SEQ ID NO: 816872 - DNA, 75 bp, synthetic construct
  source 1..75: mol_type = other DNA
tggtcactgtggctgatgtgatgctggcgttgcacggcagctacgacaacaaaaactcgggtgaaaagtttttgc

SEQ ID NO: 816873 - DNA, 75 bp, synthetic construct
  source 1..75: mol_type = other DNA
ctaacgcttcgatggcattttattatagggcgatgcctgttcctaagtttttttccaccatatttatcttgcttt

SEQ ID NO: 816874 - DNA, 75 bp, synthetic construct
  source 1..75: mol_type = other DNA
agatatatgaacagattatcagggatgtttacaaccctgaaaaagatcggtttgtgggatgcagaacatcctgtt

SEQ ID NO: 816875 - DNA, 75 bp, synthetic construct
  source 1..75: mol_type = other DNA
ggtattcaaaggcgcagaagagccgaagctgcccggatatttgcaggtcagcggtgtaaatagcgggaaactggg

SEQ ID NO: 816876 - DNA, 75 bp, synthetic construct
  source 1..75: mol_type = other DNA
agccttctgaagctgaatcaagtccataacggtggacagggcagtaaggtggaaaaggacagcgtgacactgaat

SEQ ID NO: 816877 - DNA, 75 bp, synthetic construct
  source 1..75: mol_type = other DNA
cttggggcaaggcttgcccttttcatattcgaaaaatttcctgtaacgctgaatgtaaaggatgacgaagatgac

SEQ ID NO: 816878 - DNA, 75 bp, synthetic construct
  source 1..75: mol_type = other DNA
ccatcacactgaatgagtggttgcaaaagaatccgacaggaaaagcaatcgtcttctgcgatcgtccggatcttg

SEQ ID NO: 816879 - DNA, 75 bp, synthetic construct
  source 1..75: mol_type = other DNA
aacctacatccagcaacgcgctgcatgccgcgcgatggcatccatttctagtagtgccgttgaactcgaacccca

SEQ ID NO: 816880 - DNA, 75 bp, synthetic construct
  source 1..75: mol_type = other DNA
tgttatcgatgttaccagcgacattattggtgagattaatcgccgtattgttattccatttatccgtattcgccc

SEQ ID NO: 816881 - DNA, 75 bp, synthetic construct
  source 1..75: mol_type = other DNA
attgcaggctgtaataaagtcgtgctgtgctcaccgccgccgattgccgatgagatcctctacgcagcgcagctg

SEQ ID NO: 816882 - DNA, 75 bp, synthetic construct
  source 1..75: mol_type = other DNA
tcggtggcgcacaggccattgccgcgctggcgtttggtacagaatccgtgccgaaagtggacaaaatcttcgggc

SEQ ID NO: 816883 - DNA, 75 bp, synthetic construct
  source 1..75: mol_type = other DNA
tgagatcctttacgcggcgcaactgtgtggcgtgcaggacgtgtttaacgtcggcggcgctcaggccattgccgc

SEQ ID NO: 816884 - DNA, 75 bp, synthetic construct
  source 1..75: mol_type = other DNA
gcaccgttaacgatattctcgataacgtgaaaacgcgtggcgatgaggccctgcgggaatacagcgcgaagtttg

SEQ ID NO: 816885 - DNA, 75 bp, synthetic construct
  source 1..75: mol_type = other DNA
attaatgctggcgactccggcgcgtattgcaggttgtaataaagtggtgctgtgctcaccgccgccgattgccga

SEQ ID NO: 816886 - DNA, 75 bp, synthetic construct
  source 1..75: mol_type = other DNA
acaggaattaaccccacaaggtttctctgccctggcctcaaccattgaaacactggccgctgctgaacgactgac

SEQ ID NO: 816887 - DNA, 75 bp, synthetic construct
  source 1..75: mol_type = other DNA
ggtgctacgccagtaacacattgatcaatcaacatggcgacatcaatcacacccatgaggtgcttcaggatgaca

SEQ ID NO: 816888 - DNA, 75 bp, synthetic construct
  source 1..75: mol_type = other DNA
aatttattctgaacgactggcgaagattgcggatacctgggaattgaaaaaagatgaaattattcatccccttcc

SEQ ID NO: 816889 - DNA, 75 bp, synthetic construct
  source 1..75: mol_type = other DNA
aacactatcaataagttggagtcattacctgcctggtctattctctcttctcataatacgtccggaaatatggat

SEQ ID NO: 816890 - DNA, 75 bp, synthetic construct
  source 1..75: mol_type = other DNA
ccagcaagtcacgcgcccggtcgcttcagttgggttgtatattcctggcggctccgccccgctcttctcaacggt

SEQ ID NO: 816891 - DNA, 75 bp, synthetic construct
  source 1..75: mol_type = other DNA
agcgaagttgccaaacgcttaggaccagacgtttatcaaacctttactgaaggccgcagtcagcacgaatggatc

SEQ ID NO: 816892 - DNA, 75 bp, synthetic construct
  source 1..75: mol_type = other DNA
cccgtaccgtctgatgaactcttgcggcggttttcttagtcgctatggcagctacagtaccgcccaaatcagcgc

SEQ ID NO: 816893 - DNA, 75 bp, synthetic construct
  source 1..75: mol_type = other DNA
cgtcacaggccacacagctgaaacagcagttatcggcggaaaaagcggtggctgatcaggccctgaagcaggcgg

SEQ ID NO: 816894 - DNA, 75 bp, synthetic construct
  source 1..75: mol_type = other DNA
agggctcttctcaaacaaggcagtaaccagcctgatgcgctgcccggcgtttctgacagtgccaatagcgcagct

SEQ ID NO: 816895 - DNA, 75 bp, synthetic construct
  source 1..75: mol_type = other DNA
caaaacacctacaacatctatggcggtaatgctcaggaaattgggcaggaagtcagtcgccgccagcttgatgct

SEQ ID NO: 816896 - DNA, 75 bp, synthetic construct
  source 1..75: mol_type = other DNA
attgcgcagcgtggccataacggaatcgggcggaaatcagttcgctgtttcaggcgctggcgctaaagggctgtt

SEQ ID NO: 816897 - DNA, 75 bp, synthetic construct
  source 1..75: mol_type = other DNA
cgaggcggccagaagctccaacaaattcatgacctccctgcgcgaattcggcgcgatggcaggcatggcccgtga

SEQ ID NO: 816898 - DNA, 75 bp, synthetic construct
  source 1..75: mol_type = other DNA
caggcaagataattattgtgaccggtggaacatcgggaattggttatgccattgttgaggagttattagcacaag

SEQ ID NO: 816899 - DNA, 75 bp, synthetic construct
  source 1..75: mol_type = other DNA
tggctggagttgctgatatttataagcaggaacagcaacagaaagctattagggcgttcaataaggttcacgctg

SEQ ID NO: 816900 - DNA, 75 bp, synthetic construct
  source 1..75: mol_type = other DNA
tcattggctggtcgatgtcgccgcgtatgacggcacaacttgcctgcgatgcactgcaaatggcgctctggcggc

SEQ ID NO: 816901 - DNA, 75 bp, synthetic construct
  source 1..75: mol_type = other DNA
agacgttcgggcaggtgacccacacggtgctggacaatgcccggcagtataccgaccagcgtttcagtcagctgg

SEQ ID NO: 816902 - DNA, 75 bp, synthetic construct
  source 1..75: mol_type = other DNA
ccacggggcagcacagtacggctgtcggtgagggcagtatggcgctggggaacaatatgacggcggaacaggcgc

SEQ ID NO: 816903 - DNA, 75 bp, synthetic construct
  source 1..75: mol_type = other DNA
cctagtttctgcgttggtatccgcctggcaggttcttaactcggagtttctcaagtcgccaatcggccttgtgat

SEQ ID NO: 816904 - DNA, 75 bp, synthetic construct
  source 1..75: mol_type = other DNA
tctgtttcagtttatggatggtacggcgcgcgacatgggccttcgcggaaacgatgtattcgacccgcaaaagtc

SEQ ID NO: 816905 - DNA, 75 bp, synthetic construct
  source 1..75: mol_type = other DNA
caaatgtcatcaaaatggggttggccgttgaaggagcagcactgtccgtggtggcctttacggctaagattgcct

SEQ ID NO: 816906 - DNA, 75 bp, synthetic construct
  source 1..75: mol_type = other DNA
gcatcattatgaaggtgtgacagatattatggatctggctgccgtgtatttagttgctattgctcgcggtcatat

SEQ ID NO: 816907 - DNA, 75 bp, synthetic construct
  source 1..75: mol_type = other DNA
cggacgaccgacgaatggcgggaatggcaactggctgagggccgtaagcgcagcgaggaaattaaccgcctgaat

SEQ ID NO: 816908 - DNA, 75 bp, synthetic construct
  source 1..75: mol_type = other DNA
ttcttgaacgggtgtgccgtctggcaccaccgcacgtggcagcaccgttccggacgaccgacgaatggcgggaat

SEQ ID NO: 816909 - DNA, 75 bp, synthetic construct
  source 1..75: mol_type = other DNA
tgtgttgcacgacagttacgacaacggcaaatcgggtgaaaaatttttacaggagctttgcggggtggatttgct

SEQ ID NO: 816910 - DNA, 75 bp, synthetic construct
  source 1..75: mol_type = other DNA
tcgtcaccgtgtctgatgtcatgagcgtgttgcatgacagctacgacaacggccagtccggggaaaaatttttac

SEQ ID NO: 816911 - DNA, 75 bp, synthetic construct
  source 1..75: mol_type = other DNA
actcgatagtcacggacaatactcactccctgcttctggcaaatatgagctgcgagtgctgcaaacccgaaacga

SEQ ID NO: 816912 - DNA, 75 bp, synthetic construct
  source 1..75: mol_type = other DNA
caatgttgagttcagaaaaggccatagcagcgctcagtactccggcgaaataaagggatacgattacgatacata

SEQ ID NO: 816913 - DNA, 75 bp, synthetic construct
  source 1..75: mol_type = other DNA
cgtgatggaccgcatggccatgaacggtggtcgctgggtgaattttaactgggatagctggcgttcaaatgtcag

SEQ ID NO: 816914 - DNA, 75 bp, synthetic construct
  source 1..75: mol_type = other DNA
taccaggtgaagaacgacggccaacgccacgcgctgagccaggcaaaatccatcgcggaagaaatgatgaccgga

SEQ ID NO: 816915 - DNA, 75 bp, synthetic construct
  source 1..75: mol_type = other DNA
ttgtcggaccatctggctgcggtaaatccactttactgcgcatgattgccggtcttgagacgatcaccagcggcg

SEQ ID NO: 816916 - DNA, 75 bp, synthetic construct
  source 1..75: mol_type = other DNA
ttgttgcgacaggtgatttagcgcaggatcaaacggcggcggcctatctgcattttgcggaaggcatcgcaagtt

SEQ ID NO: 816917 - DNA, 75 bp, synthetic construct
  source 1..75: mol_type = other DNA
cactttgcggaaggcatcgcaagctttcgtgcgccctgcgtctggctgccgggaaaccatgatttccagcctgcg

SEQ ID NO: 816918 - DNA, 75 bp, synthetic construct
  source 1..75: mol_type = other DNA
gcgaactggataacgtgctggcgaagtttccgaacgttaaatacttgctgtgtggacatatccatcaggagctgg

SEQ ID NO: 816919 - DNA, 75 bp, synthetic construct
  source 1..75: mol_type = other DNA
agcggacgtctcaacgccacggtggccaataaaatacctggcctgcactgggtgccaaataaccgtcattcaaac

SEQ ID NO: 816920 - DNA, 75 bp, synthetic construct
  source 1..75: mol_type = other DNA
ggaacgtcaataacctgttcgacaaaacctacgataccaacgtggaaggttctatcgtctacggcgcaccgcgta

SEQ ID NO: 816921 - DNA, 75 bp, synthetic construct
  source 1..75: mol_type = other DNA
atgtactttactaaagaaaaccttgtcgccaactcccggatgcagagccattggaaagaactgtgggcgcaacgc

SEQ ID NO: 816922 - DNA, 75 bp, synthetic construct
  source 1..75: mol_type = other DNA
tgatgggcgtgcaaaccgtactgcctatcggtaaaacgctgaaaatgtacagcgtatccggcgacatcaacgatg

SEQ ID NO: 816923 - DNA, 75 bp, synthetic construct
  source 1..75: mol_type = other DNA
cgactaactcccgcctcggagggcactggagcgagctgtgggcaaaccgcaacatgtggaacctgcagaacgatt

SEQ ID NO: 816924 - DNA, 75 bp, synthetic construct
  source 1..75: mol_type = other DNA
aaaatcatgtctgccgaaggtttacaaatcacctgcgacatgctgggccgttccggcgtagtttacggtcataaa

SEQ ID NO: 816925 - DNA, 75 bp, synthetic construct
  source 1..75: mol_type = other DNA
aacgccgtcggtggttttgaaaaatcattctggaaagaaattgataaccagattatcgaactgaacaccgaagaa

SEQ ID NO: 816926 - DNA, 75 bp, synthetic construct
  source 1..75: mol_type = other DNA
aaactgcccgctgccactgcctgttgatatgcagggcgagttttttccggagcgtgtccataaccagacggcgcg

SEQ ID NO: 816927 - DNA, 75 bp, synthetic construct
  source 1..75: mol_type = other DNA
gcgagtgagcttgaaccggccttctggcgttggcagacgcgatttacatctctcagggatcttcgctggctcctt

SEQ ID NO: 816928 - DNA, 75 bp, synthetic construct
  source 1..75: mol_type = other DNA
agcggccgcattaacaacgaagtgccgcgacgcattcccggcttatatcgtgatccaaaggaccgactctcaaac

SEQ ID NO: 816929 - DNA, 75 bp, synthetic construct
  source 1..75: mol_type = other DNA
atatgctgccactcgtgtcacccttgccgatccgctgcatctgatcctcggcgcacgttataccaactggcgggt

SEQ ID NO: 816930 - DNA, 75 bp, synthetic construct
  source 1..75: mol_type = other DNA
aactgcgtccacaagacattttgctgccagattatgacgcgacaaccgttgccgtgggcgaagatgcgatggaag

SEQ ID NO: 816931 - DNA, 75 bp, synthetic construct
  source 1..75: mol_type = other DNA
gatatcatgccgttaaccgaattgttcgtcgctcgctttgctgacgagcagggagtaccccggccgaaattggct

SEQ ID NO: 816932 - DNA, 75 bp, synthetic construct
  source 1..75: mol_type = other DNA
atgaatggttcagcgcgtattcgatggcgggtgtggcttacagccgtgtgtcgactttctccggggattatctcc

SEQ ID NO: 816933 - DNA, 75 bp, synthetic construct
  source 1..75: mol_type = other DNA
gtcgccacagcgacacctctctggcgtggggagctggcgtgcagtttaacccgaccgaatccgtggccattgata

SEQ ID NO: 816934 - DNA, 75 bp, synthetic construct
  source 1..75: mol_type = other DNA
cgtggggggctggcgtgcagtttaacccgaccgaatccgtggcaattgatattgcttatgaaggttccggcagtg

SEQ ID NO: 816935 - DNA, 75 bp, synthetic construct
  source 1..75: mol_type = other DNA
gggctggcgtgcagtttaacccgaccgaatccgtgaccattgaccttgcttatgaaggttccggtagtggcgact

SEQ ID NO: 816936 - DNA, 75 bp, synthetic construct
  source 1..75: mol_type = other DNA
cgatgtgctgaccggaagtgatgacgatcgccacagcaacacgtctctggcgtggggagctggcgtgcagtttaa

SEQ ID NO: 816937 - DNA, 75 bp, synthetic construct
  source 1..75: mol_type = other DNA
attaacgtgaaataccgttatgagtttacggacacactgggtatggtgacgtcattcagctatgcaggagacaag

SEQ ID NO: 816938 - DNA, 75 bp, synthetic construct
  source 1..75: mol_type = other DNA
gtgaaataccgttatgagtttacggacacactggggctggtgacgtcattcagctatgcaggagacaagaatcgc

SEQ ID NO: 816939 - DNA, 75 bp, synthetic construct
  source 1..75: mol_type = other DNA
cagcgatacccgctggcatgaagattccgttcgtaaccgctggttcagcgtaatggcggggccgtctgtgcgcgt

SEQ ID NO: 816940 - DNA, 75 bp, synthetic construct
  source 1..75: mol_type = other DNA
aagcatggaaaaagtatcgggtattgctgaaccgtgttgatacgtcaactgcacaggatattgaatggccagcac

SEQ ID NO: 816941 - DNA, 75 bp, synthetic construct
  source 1..75: mol_type = other DNA
cgtggggggctggcgtgcagtttaacccgaccgaatccgtggccgttgatgtcgcttatgaaggctccggcagtg

SEQ ID NO: 816942 - DNA, 75 bp, synthetic construct
  source 1..75: mol_type = other DNA
ttacggacacgctggggatggtgacgtcattcagctatgcagaagacaagaatcgccagcttacccgttacagcg

SEQ ID NO: 816943 - DNA, 75 bp, synthetic construct
  source 1..75: mol_type = other DNA
ctgacaacaaggggaaaacgcacgatgtgctgaccggaagtgatgacggtcgccacagcaacacgtctctggcgt

SEQ ID NO: 816944 - DNA, 75 bp, synthetic construct
  source 1..75: mol_type = other DNA
ggtatcttcaggcccatactgatatgccaggcagtgatgacctgaagggcattaacgtgaaataccgttatgaat

SEQ ID NO: 816945 - DNA, 75 bp, synthetic construct
  source 1..75: mol_type = other DNA
agccgtgtgtcgaccttctccggggattatctccgcgtaactgacaacaaggggaaaacgcacgatgtgctgaac

SEQ ID NO: 816946 - DNA, 75 bp, synthetic construct
  source 1..75: mol_type = other DNA
attgatgtcgcttatgaaggttccggcagtggtgactggcgcactgacggtttcatcgtgggtgtcggttataaa

SEQ ID NO: 816947 - DNA, 75 bp, synthetic construct
  source 1..75: mol_type = other DNA
ccgaatccgtggccattgatattgcttatgaagggtccggcagtggcgactggcgcactgacggtttcatcgtgg

SEQ ID NO: 816948 - DNA, 75 bp, synthetic construct
  source 1..75: mol_type = other DNA
ccgaatccgtggccattgatattgcttatgaagggtccggaagtggagactggcgcactgacggtttcatcgtgg

SEQ ID NO: 816949 - DNA, 75 bp, synthetic construct
  source 1..75: mol_type = other DNA
ccgaatacgtggccattgatattgcttatgaagggtccggaagtggcgactggcgcactgacggtttcatcgtgg

SEQ ID NO: 816950 - DNA, 75 bp, synthetic construct
  source 1..75: mol_type = other DNA
ggcagcgatgatctgaacgggattaacgtgaaataccgttatgagtttacggacacactggggatggtgacgtca

SEQ ID NO: 816951 - DNA, 75 bp, synthetic construct
  source 1..75: mol_type = other DNA
tttaacccgaccgaatccgtggccattgatattgcttatgaaggctccggcagtggtgactggcgcactgacggt

SEQ ID NO: 816952 - DNA, 75 bp, synthetic construct
  source 1..75: mol_type = other DNA
tgtccgcagccatctgtctggccgtatccggtgtgcctgcatgggcgtctgagcagcaggccacgctgagcgcgg

SEQ ID NO: 816953 - DNA, 75 bp, synthetic construct
  source 1..75: mol_type = other DNA
gtgcagtttaacccgaccgaatccgtggccattgaccttgcttatgaaggttccggcagtggtgactggcgcact

SEQ ID NO: 816954 - DNA, 75 bp, synthetic construct
  source 1..75: mol_type = other DNA
aagaaaagtgacacgatgaagacgggtgaaaataccttccattatgaaagcctgcgcggtcgttatgtcagtctg

SEQ ID NO: 816955 - DNA, 75 bp, synthetic construct
  source 1..75: mol_type = other DNA
tgtccgcagtagtctggcaggtcgtcgctgctacgccagcgagtgcagcagaacatcagtccacgctgagcgcgg

SEQ ID NO: 816956 - DNA, 75 bp, synthetic construct
  source 1..75: mol_type = other DNA
tcggcggactcattacggggatgaacaacgattttaacgaccttagaggaatgaaggttacgcgccgccaggtgg

SEQ ID NO: 816957 - DNA, 75 bp, synthetic construct
  source 1..75: mol_type = other DNA
tggcttacagccgtgtgtcgactttttccggggattatctccgcgtaactgacaacaagggaaaaacgcacgacg

SEQ ID NO: 816958 - DNA, 75 bp, synthetic construct
  source 1..75: mol_type = other DNA
attctgtccgcagtagtctggctggttgccgctggtacgccagcgagcgcagcagagcatcagtccacactaagc

SEQ ID NO: 816959 - DNA, 75 bp, synthetic construct
  source 1..75: mol_type = other DNA
cgtgtgtcgactttctccggggattatcttcgcgttattgacaacaaggggaaaacgcacgatgtgctgaccgga

SEQ ID NO: 816960 - DNA, 75 bp, synthetic construct
  source 1..75: mol_type = other DNA
gcgtaaccgctggttcagcgtaatggcggggccatctgtgcgcgtgaatgaatggttcagagagtatgcgatggc

SEQ ID NO: 816961 - DNA, 75 bp, synthetic construct
  source 1..75: mol_type = other DNA
gacggtcgccacagcaatacctctctggcgtggggagctggcgtgcagtttaacccgaccgaatccgtggccatt

SEQ ID NO: 816962 - DNA, 75 bp, synthetic construct
  source 1..75: mol_type = other DNA
gagcagcaggccacactgagcgcagggtatcttcatgcccgtacgaacgctcccgacagcgataatctgaacggg

SEQ ID NO: 816963 - DNA, 75 bp, synthetic construct
  source 1..75: mol_type = other DNA
taactgacaacaaggggaaaacgcatgatgtgctgaccggaagtgatgacggtcgccacagcaacatgtctctgg

SEQ ID NO: 816964 - DNA, 75 bp, synthetic construct
  source 1..75: mol_type = other DNA
tgagcggttgtcgtttgcgtttcccgcgccctaatccgttaccaatttcatgtttcccaggatcgagcaaggtgg

SEQ ID NO: 816965 - DNA, 75 bp, synthetic construct
  source 1..75: mol_type = other DNA
aatggttcagtgcttatgcgatggcaggtgtggcttacagccgtgtttcgacgttctccggggattatctccgcg

SEQ ID NO: 816966 - DNA, 75 bp, synthetic construct
  source 1..75: mol_type = other DNA
gagacaagaatcgccagctgacccgttacagcgatacccgctggcatgaagattccgttcgtaaccgctggttca

SEQ ID NO: 816967 - DNA, 75 bp, synthetic construct
  source 1..75: mol_type = other DNA
attaacgtgaaataccgttatgagtttacggacacactggggctggtgacgacattcagctatgcaggagacaag

SEQ ID NO: 816968 - DNA, 75 bp, synthetic construct
  source 1..75: mol_type = other DNA
atggacggtaaacgcatgttcgccctggctttcgcgatcgcgatggctatcgctgttaacgtcgccttgttcggc

SEQ ID NO: 816969 - DNA, 75 bp, synthetic construct
  source 1..75: mol_type = other DNA
ctcggcgtcgcctggatgctgtggcgcagtaaacgcgccgcgctttggctatacgcggctctgctgctcggcact

SEQ ID NO: 816970 - DNA, 75 bp, synthetic construct
  source 1..75: mol_type = other DNA
gatcgtcgtaatggcgaactggtggttccggcaccggaaaaaccggttccccaaggtgcagcgaaaggcgattac

SEQ ID NO: 816971 - DNA, 75 bp, synthetic construct
  source 1..75: mol_type = other DNA
gaaaaccggcaacatttttgtgctcgatcgtcgcaatggcgaactggtggttccggccccggaaaaaccggtgcc

SEQ ID NO: 816972 - DNA, 75 bp, synthetic construct
  source 1..75: mol_type = other DNA
caacgactgtcgaacaattccactatacgtttatcacgatgggcattattactgttgcttcagcagcaatgttca

SEQ ID NO: 816973 - DNA, 75 bp, synthetic construct
  source 1..75: mol_type = other DNA
gttcggggaaaagattgtcgccagttggattgccttgacagtgattgtcgtcagcatagggttactgcttcttta

SEQ ID NO: 816974 - DNA, 75 bp, synthetic construct
  source 1..75: mol_type = other DNA
tccggcgaaaaccggcaacatttttgtgctcgatcgtcgcaatggcgaactggtggttccggccccggaaaaacc

SEQ ID NO: 816975 - DNA, 75 bp, synthetic construct
  source 1..75: mol_type = other DNA
tcagtaaacgtgccgcgctttggctgtacgcagccctgctgctcggcaccatgatttggggcgtctgggaagttg

SEQ ID NO: 816976 - DNA, 75 bp, synthetic construct
  source 1..75: mol_type = other DNA
aagggttcagcgcgtatgcgatggcgggtgtggcttacagtcgtgtgtcgactttttccggggattatctccgtg

SEQ ID NO: 816977 - DNA, 75 bp, synthetic construct
  source 1..75: mol_type = other DNA
tctggagcgcggcctgttgactgaagcggaactagacgatattttctccgtacagaacctgatgcatccggctta

SEQ ID NO: 816978 - DNA, 75 bp, synthetic construct
  source 1..75: mol_type = other DNA
acttctcaacccgcgaaacgtctggcgtgatccgtggttttgatgtcaacaccggggagctgctgtgggcttttg

SEQ ID NO: 816979 - DNA, 75 bp, synthetic construct
  source 1..75: mol_type = other DNA
gatcgtcgtaatggcgaactggtcgttccggctccggaaaaaccggttccacaaggcgcagcgaaaggcgattac

SEQ ID NO: 816980 - DNA, 75 bp, synthetic construct
  source 1..75: mol_type = other DNA
gtggcactgctgattagcggtggtatcctgacctgggccggatttaacgatccgcaggaaatcaacggcacctta

SEQ ID NO: 816981 - DNA, 75 bp, synthetic construct
  source 1..75: mol_type = other DNA
tttgatttacgcgagagtatggcgaacggcggcggcccggcgtgcctgcgtttgcgcgtagtattgacggcagaa

SEQ ID NO: 816982 - DNA, 75 bp, synthetic construct
  source 1..75: mol_type = other DNA
ttagggttcagaggcagcgatgaacaggtgctggagaacgttgcccgtcaggctccacactggctttccagcgtt

SEQ ID NO: 816983 - DNA, 75 bp, synthetic construct
  source 1..75: mol_type = other DNA
caacccgattagcgaactaaaagtctttgatttacgtgaaagcatggcgaatggcggtgaatccggcagtgatga

SEQ ID NO: 816984 - DNA, 75 bp, synthetic construct
  source 1..75: mol_type = other DNA
gaaagtttcctgtcctgaatgtaaagggaagggagagatttccactgcctgtaaagactgccgtgggcgtggtgt

SEQ ID NO: 816985 - DNA, 75 bp, synthetic construct
  source 1..75: mol_type = other DNA
gcgttccttgggaaaataggtatcagtatgaatgacagagaacgggcaacagaactgctgacagaatatgccctg

SEQ ID NO: 816986 - DNA, 75 bp, synthetic construct
  source 1..75: mol_type = other DNA
gtattgagccaattactgaatctcggttcggtttatccgttccagcgcgagggaggtgcccctattaagttgtca

SEQ ID NO: 816987 - DNA, 75 bp, synthetic construct
  source 1..75: mol_type = other DNA
actttttgtctacgggcgagaagaaggcaatgatacccggccttcccgttatccggcgcgacagactcgcgaagc

SEQ ID NO: 816988 - DNA, 75 bp, synthetic construct
  source 1..75: mol_type = other DNA
ccaatgcggcaacgatcgcgccatctgccgatacgctggatggcaaagtgcatctcaccgttgccaacctgaaca

SEQ ID NO: 816989 - DNA, 75 bp, synthetic construct
  source 1..75: mol_type = other DNA
ttgcaacgagatcatcaacgcctgtggatattcaccctttttattggagccagtgaactagccttaccaatggcg

SEQ ID NO: 816990 - DNA, 75 bp, synthetic construct
  source 1..75: mol_type = other DNA
ttagtgtccattcggcgttgccgcaggtagcgttgctcggtgatgagggggcggcaaaccacaatcgtctcggcg

SEQ ID NO: 816991 - DNA, 75 bp, synthetic construct
  source 1..75: mol_type = other DNA
agttccgcttcgccaatgtgggtagccaatgcggcaacggtcgcgccatctgccgatacgctggatggcaaagtg

SEQ ID NO: 816992 - DNA, 75 bp, synthetic construct
  source 1..75: mol_type = other DNA
acgggctggtagggctgacgcaccattacgcgggcctgtcgtttggcaatgaagcttctaccagtcaccgttttc

SEQ ID NO: 816993 - DNA, 75 bp, synthetic construct
  source 1..75: mol_type = other DNA
aaaattgccttgcgcatgctggagcagggctttgatcgtgacctggtgctcgcggccacccagctaagcgaagcc

SEQ ID NO: 816994 - DNA, 75 bp, synthetic construct
  source 1..75: mol_type = other DNA
tgccggtggcggtgtgggtggttatcaggaaatgacccgtcagtctctgatccacctggaaaatatcgcttatat

SEQ ID NO: 816995 - DNA, 75 bp, synthetic construct
  source 1..75: mol_type = other DNA
ctgggtgtttgccgcaggccataaatggaaaggactgatgaaccgtcgcgaagtggaaatggctatctggaatat

SEQ ID NO: 816996 - DNA, 75 bp, synthetic construct
  source 1..75: mol_type = other DNA
tcgcataacagccttgaagtatggggcaaaacttggagcacaggagtccgccaaatgagcaacatcaacaaacag

SEQ ID NO: 816997 - DNA, 75 bp, synthetic construct
  source 1..75: mol_type = other DNA
caggtggtgcagcgccgtatattgctgaaattatcaaacagaccaccccggacggtgcggggcgtgtggcagccc

SEQ ID NO: 816998 - DNA, 75 bp, synthetic construct
  source 1..75: mol_type = other DNA
agaatgccagtgccggaggcagcttcactttcgggtccatgagcggttcggcgagtgtgagcctcagccgggata

SEQ ID NO: 816999 - DNA, 75 bp, synthetic construct
  source 1..75: mol_type = other DNA
gaagaaagctgttgcccggagtgtggcggtgagctggattatctggggaagtcagcgctgaacaactggaactgg

SEQ ID NO: 817000 - DNA, 75 bp, synthetic construct
  source 1..75: mol_type = other DNA
ccaactcctattataacattgccaaaatttatgaaacctcgggccagaatgctgaagcattgcagcattatcaac

SEQ ID NO: 817001 - DNA, 75 bp, synthetic construct
  source 1..75: mol_type = other DNA
acaccgttgatttactctgccagcgtcattacggcatgacaaaaggcgtgacggagcgcgtcctggcagccaatc

SEQ ID NO: 817002 - DNA, 75 bp, synthetic construct
  source 1..75: mol_type = other DNA
aggctgaacacggcccggactcacaggtgattttactgacgcccgatgctgatatggcgcatcaagttgccgagg

SEQ ID NO: 817003 - DNA, 75 bp, synthetic construct
  source 1..75: mol_type = other DNA
gttgatatgcgcagcgtggcaaagctgatcagcgatttggcaacgcaactggaagtgcaactggtgcgtgctaat

SEQ ID NO: 817004 - DNA, 75 bp, synthetic construct
  source 1..75: mol_type = other DNA
gcaaatgcggcgacaacgcgcgctaactcctattataacattgccaaaatttatgaaactgcaggacagaacgct

SEQ ID NO: 817005 - DNA, 75 bp, synthetic construct
  source 1..75: mol_type = other DNA
aggcaacagaattagacggcaattacggacaggcatttagtaacctgggtctggcttatcagaaaaatggcaaca

SEQ ID NO: 817006 - DNA, 75 bp, synthetic construct
  source 1..75: mol_type = other DNA
gcgcaatctgatgcggcattgctctggagtttctggaactcttactctacagatgaactggtcgatgacttagtc

SEQ ID NO: 817007 - DNA, 75 bp, synthetic construct
  source 1..75: mol_type = other DNA
gaacatcagtccacgctgagcgcggggtatcttcatgcttcgacgaacgttcccggcagcgatgatctgaacggg

SEQ ID NO: 817008 - DNA, 75 bp, synthetic construct
  source 1..75: mol_type = other DNA
gcgtaaccgctggttcagcgtaatggcggggccgtctgtgcgcgtgaatgaatggttcagtgcttatgcgatggc

SEQ ID NO: 817009 - DNA, 75 bp, synthetic construct
  source 1..75: mol_type = other DNA
ggaaaaaacggttaagcaattctatgacactctggtggttcggtttgacattgaagaggcatgggcggagcggca

SEQ ID NO: 817010 - DNA, 75 bp, synthetic construct
  source 1..75: mol_type = other DNA
ccgaatcttgtagaatacgactacttcggttggcttaataatagcccttatgtttccccccttgccaaagtagca

SEQ ID NO: 817011 - DNA, 75 bp, synthetic construct
  source 1..75: mol_type = other DNA
cccgaccgaattcgtggtcgttgatattgcttatgaaggttctggcagtggtgactggcgcactgacggtttcat

SEQ ID NO: 817012 - DNA, 75 bp, synthetic construct
  source 1..75: mol_type = other DNA
gccacagcaatacctctctggcgtggggagctggcgtgcagtttaacccgaccgaatccgtggccattgatattg

SEQ ID NO: 817013 - DNA, 75 bp, synthetic construct
  source 1..75: mol_type = other DNA
ccgaatgcgtggccattgatattgcttatgaagggtccgggagtggcgactggcgcactgacggtttcatcgtgg

SEQ ID NO: 817014 - DNA, 75 bp, synthetic construct
  source 1..75: mol_type = other DNA
ccgaatccgtggccattgatattgcttatgaagggtccgggagtggggactggcgcactgacggtttcatcgtgg

SEQ ID NO: 817015 - DNA, 75 bp, synthetic construct
  source 1..75: mol_type = other DNA
tgtggcttacagccgtgtgtcgactttctccggggattatctccgcgtaactgacaacaaggggaaaacgcacga

SEQ ID NO: 817016 - DNA, 75 bp, synthetic construct
  source 1..75: mol_type = other DNA
gggtgtggcttacagccgtgtttcgacgttctccggggattatctccgcgtaactgacaacaaggggaaaacgca

SEQ ID NO: 817017 - DNA, 75 bp, synthetic construct
  source 1..75: mol_type = other DNA
tgtccgcagccatttgtctggccgtatccgatgcgcctgcatgggcatctgaacatcagtccacgctgagcgcgg

SEQ ID NO: 817018 - DNA, 75 bp, synthetic construct
  source 1..75: mol_type = other DNA
actactccccaaaatcgcctggcctgactgatgcatccgtctcgacgtcaaaagatacgctgagtatcactgatg

SEQ ID NO: 817019 - DNA, 75 bp, synthetic construct
  source 1..75: mol_type = other DNA
gactgatgcatccgtctcgacgtcaaaagatacgctgagtatcactgatgtgatggctgcgcagggtatgacaca

SEQ ID NO: 817020 - DNA, 75 bp, synthetic construct
  source 1..75: mol_type = other DNA
atgctggaacagggtattgatcgtgacctggctgctcgcagccacccagctaagcgaagccgatctggcagcgaa

SEQ ID NO: 817021 - DNA, 75 bp, synthetic construct
  source 1..75: mol_type = other DNA
gaccgatgcgtccgcctcgacatcaaaagatgcgctgagtatcactgatgtgatggccgcgcagggcatgacaca

SEQ ID NO: 817022 - DNA, 75 bp, synthetic construct
  source 1..75: mol_type = other DNA
ccccttccagctacgcttcctgtttgccagctacccggacctgatgggcaaggccttgggcatcgtctatcgctc

SEQ ID NO: 817023 - DNA, 75 bp, synthetic construct
  source 1..75: mol_type = other DNA
caggaaggacatcaaattggctggcaagaaggtaaattagaaggtttgcatgaacaagcgattaaaattgccttg

SEQ ID NO: 817024 - DNA, 75 bp, synthetic construct
  source 1..75: mol_type = other DNA
atgagactggaagatttaccgaaatactattccccaaaatcgccaggcctgactgatgcatccgtctcgacgtca

SEQ ID NO: 817025 - DNA, 75 bp, synthetic construct
  source 1..75: mol_type = other DNA
gcagtgcagcgagtaaaaaacagtgcccttgttgcggtgggaaaaaatttattgaaagcgtagtttttacaaaca

SEQ ID NO: 817026 - DNA, 75 bp, synthetic construct
  source 1..75: mol_type = other DNA
gggaaaaaacagttaagaaattctatgatgcgctggtgacccggtttgatattgaagaagcatgggctgagcggc

SEQ ID NO: 817027 - DNA, 75 bp, synthetic construct
  source 1..75: mol_type = other DNA
taaaatacccaaagaatgtttgttcggttttactcatttccataacaataaagattttcatactcattattttgt

SEQ ID NO: 817028 - DNA, 75 bp, synthetic construct
  source 1..75: mol_type = other DNA
gcagcgcagcgagtaaaaagcagtgcccctgttgccgaggggaaaaatttattgaaggcgaagtttttacaaaca

SEQ ID NO: 817029 - DNA, 75 bp, synthetic construct
  source 1..75: mol_type = other DNA
gccgatgcctcgcagcattatcaactgtcgtatgcggaaaaaaataagccctcttatgaagaagctatcgcacgt

SEQ ID NO: 817030 - DNA, 75 bp, synthetic construct
  source 1..75: mol_type = other DNA
aaacgtggtatgcctgttatcagagattgccagcgttgtggtggtcgtggctgtgaaaggctgccatcaacggag

SEQ ID NO: 817031 - DNA, 75 bp, synthetic construct
  source 1..75: mol_type = other DNA
tctatatttatctaacgagatggagcgtaaatgaaccatcacggacaaataaattagtgctaaataatgaaagag

SEQ ID NO: 817032 - DNA, 75 bp, synthetic construct
  source 1..75: mol_type = other DNA
aaagaccctggtgtagtgtgggtacagcggcagcggtgggtatttttatcggcgcactgttaagcatgcgcaaat

SEQ ID NO: 817033 - DNA, 75 bp, synthetic construct
  source 1..75: mol_type = other DNA
actaaatcagtaagttggcagcatcaccttgatttcgaagaaaatattcgtttaaccaaagaggctgttgatttc

SEQ ID NO: 817034 - DNA, 75 bp, synthetic construct
  source 1..75: mol_type = other DNA
ccataattgattcattgagggaacttgctggtaatgctttaggtacagggaatggaatctctccatcgagtatag

SEQ ID NO: 817035 - DNA, 75 bp, synthetic construct
  source 1..75: mol_type = other DNA
cggctagagatgctatttcacaaacagcgggcggccagctggctgcgcaaatccgtgctcaaactgcatcacgca

SEQ ID NO: 817036 - DNA, 75 bp, synthetic construct
  source 1..75: mol_type = other DNA
attcagagctatgcaaggtggttattctggacacttgcattaatttcaatggtctggacttttgccatcatgtac

SEQ ID NO: 817037 - DNA, 75 bp, synthetic construct
  source 1..75: mol_type = other DNA
ttcatcgttaaatgaagctcagcgactgatcagaatcagcacagataacattcagccactaacaacagataaaga

SEQ ID NO: 817038 - DNA, 75 bp, synthetic construct
  source 1..75: mol_type = other DNA
ttttggagagcacctgcatccacaacggtcacgggccaggaaggcggcgctggagtggttatgcagcgcccgcat

SEQ ID NO: 817039 - DNA, 75 bp, synthetic construct
  source 1..75: mol_type = other DNA
gacttccagcaaatgcgcgaggaggtcaataaactctccggggcagataccgaactcatttgccgactggcggag

SEQ ID NO: 817040 - DNA, 75 bp, synthetic construct
  source 1..75: mol_type = other DNA
ctcacatgatggtatcaatggcacaaaaagcaacggtgccggtaataactcattgggatcatggtcggagtatgg

SEQ ID NO: 817041 - DNA, 75 bp, synthetic construct
  source 1..75: mol_type = other DNA
ttttggtgagggccagtttacttttaatggtgatggtagttcattgtctaacctggatattgaaggcaaagtcga

SEQ ID NO: 817042 - DNA, 75 bp, synthetic construct
  source 1..75: mol_type = other DNA
accgcttaatgtcgccacagaaaccgcaaaacagcttaatttatctgaaggaatggatgcggaaaaagcgcaaaa

SEQ ID NO: 817043 - DNA, 75 bp, synthetic construct
  source 1..75: mol_type = other DNA
ggtgcatcagcacttaaagcggcatttgaatcggcacaagcagcgatggccgaagagtctagtactggtagtaaa

SEQ ID NO: 817044 - DNA, 75 bp, synthetic construct
  source 1..75: mol_type = other DNA
gaatgaagcgatgctcaatccctatcatcctctttatcgagatcattatcctattgatagtcgagaatggggtgg

SEQ ID NO: 817045 - DNA, 75 bp, synthetic construct
  source 1..75: mol_type = other DNA
cgcgcttattacaatcagagacatcgttgctgacgccggggatcattgaaatgacaggcgttgctggcgtaccag

SEQ ID NO: 817046 - DNA, 75 bp, synthetic construct
  source 1..75: mol_type = other DNA
tggtcgcatggctagccatatggggagtagtttgattaacggagctatggattatcaaacgactaaccaaaaaat

SEQ ID NO: 817047 - DNA, 75 bp, synthetic construct
  source 1..75: mol_type = other DNA
tttgataccatctggtgtccgccttcaggtgtactggtgggtgagatttcatcggtgtttgactgcgagatacgc

SEQ ID NO: 817048 - DNA, 75 bp, synthetic construct
  source 1..75: mol_type = other DNA
ggcagaacgtccggtggaaacgaaccgggctgagtacgctgatactggagtttgataccatctggtgtccgcctt

SEQ ID NO: 817049 - DNA, 75 bp, synthetic construct
  source 1..75: mol_type = other DNA
acaatagatcgtctttatcatcagacagggacaggcgcgatccggtggagtaatctgcctgatacggcgaaggag

SEQ ID NO: 817050 - DNA, 75 bp, synthetic construct
  source 1..75: mol_type = other DNA
ggaagccagccagatacagccaatggttctggagagtcacaggctccacaaggcagtgatgaatatgaacagttc

SEQ ID NO: 817051 - DNA, 75 bp, synthetic construct
  source 1..75: mol_type = other DNA
gacacggctatgcagggtgctttcgccagtaacgataacgccagcacaaatcagtttagtggtgacggtctgagt

SEQ ID NO: 817052 - DNA, 75 bp, synthetic construct
  source 1..75: mol_type = other DNA
tatgcagggcgctttcgccagtaacgataccgccagcgcaaatcagtttggtggtgacggactgagcggaagtca

SEQ ID NO: 817053 - DNA, 75 bp, synthetic construct
  source 1..75: mol_type = other DNA
ccataattaactcaatgagacaacttgcagcaaacgctttaggaataagtactggtatttcaccctcaagcatag

SEQ ID NO: 817054 - DNA, 75 bp, synthetic construct
  source 1..75: mol_type = other DNA
gactatgcaaattggctcttctgggggctggtattaataagtatggtttggacatttggtatgatggcgatgcaa

SEQ ID NO: 817055 - DNA, 75 bp, synthetic construct
  source 1..75: mol_type = other DNA
aattatgcgaattggctcttctgggggttggtattaataagtatggtttggagatttggtatgatggcgatccaa

SEQ ID NO: 817056 - DNA, 75 bp, synthetic construct
  source 1..75: mol_type = other DNA
cgtcccggtattcagtctgaccgcagcaactggctactgcgcctgttgatggcccgtgttgccgaacagactgga

SEQ ID NO: 817057 - DNA, 75 bp, synthetic construct
  source 1..75: mol_type = other DNA
atcttatcagtgaagaacatgataaacgtattgctgaaaactatgtctttgatgaagtattaggtcatcatgttt

SEQ ID NO: 817058 - DNA, 75 bp, synthetic construct
  source 1..75: mol_type = other DNA
catacctgccgagttaaataatgacgacaagaaaaaacttgtccttgaatactgccagaaaaatttcgttgataa

SEQ ID NO: 817059 - DNA, 75 bp, synthetic construct
  source 1..75: mol_type = other DNA
atagtatcagtgaagaacatgataaacgtattgctaaaaactacgtctatgatgaagtattaggctatcctgttc

SEQ ID NO: 817060 - DNA, 75 bp, synthetic construct
  source 1..75: mol_type = other DNA
cacccttacacttttaccgcgcaaaaggcagtgatagcgatccctatcacgccacaggtgacgggaattgttact

SEQ ID NO: 817061 - DNA, 75 bp, synthetic construct
  source 1..75: mol_type = other DNA
ggcggtttactccgaccatttcagccatgtttcggtgatgcggaaagtgctgctaagaatgaccagctggatgca

SEQ ID NO: 817062 - DNA, 75 bp, synthetic construct
  source 1..75: mol_type = other DNA
ctcgtgctgaatatgagaaacaagctaagtttaacagtgatacttacaaaccaacacctgatgagattcgacgtt

SEQ ID NO: 817063 - DNA, 75 bp, synthetic construct
  source 1..75: mol_type = other DNA
cttactccatccatacttgaaaacaaaaaaagcaattcaccacaattgagaccatccagttatcgtgttaataaa

SEQ ID NO: 817064 - DNA, 75 bp, synthetic construct
  source 1..75: mol_type = other DNA
ctgaaccagaagagatcgtattacctgaaacgcgctccggctcttctaccaatgaaaagcaaagacctgtgctgg

SEQ ID NO: 817065 - DNA, 75 bp, synthetic construct
  source 1..75: mol_type = other DNA
aaattgtgaaacgaagcgaaggcatgacttctgttgcgaaagctgcctaccatgcccgtacacgtattacggatg

SEQ ID NO: 817066 - DNA, 75 bp, synthetic construct
  source 1..75: mol_type = other DNA
aatgaagaacaaaatcaagaaaaacgtaatctctccgagatttcgtcagaaaaacaaagacctttactggtagca

SEQ ID NO: 817067 - DNA, 75 bp, synthetic construct
  source 1..75: mol_type = other DNA
ttctgattttggaacaaatactatcctgaaaacatcctcctctcaaaaaccaaacagggcttccagaagcgcccc

SEQ ID NO: 817068 - DNA, 75 bp, synthetic construct
  source 1..75: mol_type = other DNA
ctccagaacatattgttaaagattctacagcattgtggaatgaagttgaacgggtcgagcgtcagcaaaatggtc

SEQ ID NO: 817069 - DNA, 75 bp, synthetic construct
  source 1..75: mol_type = other DNA
gctgacccaggatgacgcggtaaaaaatatgttccgcgcaggtcctgcaggcattcgtaccacacaggcattctc

SEQ ID NO: 817070 - DNA, 75 bp, synthetic construct
  source 1..75: mol_type = other DNA
atgcctaagtaccgttccgccaccaccacccatggccgtaatatggcgggggcccgcgcactgtggcgcgccacc

SEQ ID NO: 817071 - DNA, 75 bp, synthetic construct
  source 1..75: mol_type = other DNA
cgccatgacgctggatatcgcgatgggcggttctaccaatacggttcttcatctgctggctgcggcacaagaagc

SEQ ID NO: 817072 - DNA, 75 bp, synthetic construct
  source 1..75: mol_type = other DNA
gcaggattgccgttgggattctctcgatgacgatcgcgcaaacggctgcatccgctcgctggagcacgcctacag

SEQ ID NO: 817073 - DNA, 75 bp, synthetic construct
  source 1..75: mol_type = other DNA
agggtgcgtctgcagcctgatatggaacatcttcttgccgggctcatcgccattgatgctgccagagctgccgtg

SEQ ID NO: 817074 - DNA, 75 bp, synthetic construct
  source 1..75: mol_type = other DNA
ccgggctggggcaaaatccggcgcgtcaggcactgttaaaaagcggactggccgaaacggtgtgcggattcacgg

SEQ ID NO: 817075 - DNA, 75 bp, synthetic construct
  source 1..75: mol_type = other DNA
gatgccgctgattaacgcgctggaatcgcgtctggcgcagtcgggtgggatgaacgcggtggtgccgcaaaacag

SEQ ID NO: 817076 - DNA, 75 bp, synthetic construct
  source 1..75: mol_type = other DNA
gatgacgatcgcgcaaatggctgcatccgttcgctggaacacgcctacagcaaagacggcggccttgcggtgctg

SEQ ID NO: 817077 - DNA, 75 bp, synthetic construct
  source 1..75: mol_type = other DNA
aaggcggccctggcatgcaggaaatgctctacccaaccagcttcctgaaatcaatgggtctcggtaaagcctgtg

SEQ ID NO: 817078 - DNA, 75 bp, synthetic construct
  source 1..75: mol_type = other DNA
ctgcatctctaactgtgacaaaatcaccccggggatgctgatggcttccctgcgcctgaatattccggtgatctt

SEQ ID NO: 817079 - DNA, 75 bp, synthetic construct
  source 1..75: mol_type = other DNA
cgcagttgtgcaaagttgcgccgagcacccagaaataccatatggaagatgttcatcgtgctggtggcgtgatcg

SEQ ID NO: 817080 - DNA, 75 bp, synthetic construct
  source 1..75: mol_type = other DNA
ggaaatcgaattcaccatgagtgatatcgataagctctcccgcaaggtaccgcagctgtgtaaagtcgcgccgag

SEQ ID NO: 817081 - DNA, 75 bp, synthetic construct
  source 1..75: mol_type = other DNA
ccactcatggtcgtaatatggcgggtgctcgtgcgctgtggcgcgccaccggaatgaccgatgccgattttggca

SEQ ID NO: 817082 - DNA, 75 bp, synthetic construct
  source 1..75: mol_type = other DNA
atacgcgcattgcaaatgagttgctggaagctgtgatgctggccggattaacacagcaccagcttctggtcttcc

SEQ ID NO: 817083 - DNA, 75 bp, synthetic construct
  source 1..75: mol_type = other DNA
ggccggattaacacagcaccagcttctggtcttcctggctgtcatgcgcaaaacatatggctttaataaaaaact

SEQ ID NO: 817084 - DNA, 75 bp, synthetic construct
  source 1..75: mol_type = other DNA
gatttaagtcctgagcaattattgaagctgaatatattcttgacctctcggaatgaattaaacccttacagcgag

SEQ ID NO: 817085 - DNA, 75 bp, synthetic construct
  source 1..75: mol_type = other DNA
tgatgaacaggtccggcagtcagccaaaactgatttttcacctgcagtcgtccgctctgtcaccgatgttattcc

SEQ ID NO: 817086 - DNA, 75 bp, synthetic construct
  source 1..75: mol_type = other DNA
agttactttttccgagtttatggaaaaaaatggacttccggttgtcccgtcggttcgggtaaaaaatgtagacga

SEQ ID NO: 817087 - DNA, 75 bp, synthetic construct
  source 1..75: mol_type = other DNA
aaagtttacctgaaagaggtaaatttacctgaatcaggtaaaaaaagtttacccaaatcaggtaaaggcgtttac

SEQ ID NO: 817088 - DNA, 75 bp, synthetic construct
  source 1..75: mol_type = other DNA
gactatgttcacaagctggaagtaacagacccacacaataaacgctttatcattgaagagtgtagcagactggat

SEQ ID NO: 817089 - DNA, 75 bp, synthetic construct
  source 1..75: mol_type = other DNA
atgaacaattacccaatgacagtactaattgaccaagaaactatgaattggttgattgacctgaataggtcagga

SEQ ID NO: 817090 - DNA, 75 bp, synthetic construct
  source 1..75: mol_type = other DNA
tgaacaattacccaatgcaaattatggttgaccaagaaactatgaattggttgattgacctgaacaggttaggat

SEQ ID NO: 817091 - DNA, 75 bp, synthetic construct
  source 1..75: mol_type = other DNA
aagccccgttgctggcgcaactccagctctaccgggctgaaagacacggctcagcagaactggtgccacctgcgc

SEQ ID NO: 817092 - DNA, 75 bp, synthetic construct
  source 1..75: mol_type = other DNA
gcttaatttaggttccctggccagtgttgccagcgccacctttttgatctgctaccttgcggtgtttgtggtggc

SEQ ID NO: 817093 - DNA, 75 bp, synthetic construct
  source 1..75: mol_type = other DNA
gtgggttatgtgatagtggtgataggtgctttgctggcgacggcatcagccatcaacgcaaacctgtttgcggtg

SEQ ID NO: 817094 - DNA, 75 bp, synthetic construct
  source 1..75: mol_type = other DNA
gtctggtcgctgcaaccggcgcatatttccgtctctgcgccccccagctccggcgcattcttctcttgtatcggg

SEQ ID NO: 817095 - DNA, 75 bp, synthetic construct
  source 1..75: mol_type = other DNA
gctgtaacgttgacggcagcctgcgcctgatgcaagcagcaaaagagagcggcttttgccaacgttttctgttta

SEQ ID NO: 817096 - DNA, 75 bp, synthetic construct
  source 1..75: mol_type = other DNA
gaaggctactccgcaggatagcggacctctgaaagaggcggatattcgcccgtatgacgatcgcgctacagcata

SEQ ID NO: 817097 - DNA, 75 bp, synthetic construct
  source 1..75: mol_type = other DNA
atgcatcaacgattgttctttgattacgcgcttggagtcggcgctatcacaagtcattcgtcgagcgttagataa

SEQ ID NO: 817098 - DNA, 75 bp, synthetic construct
  source 1..75: mol_type = other DNA
caggtatattcaggcacactgactccagctaatgcagccagtctttgtactggtgtgactaacagtattacattt

SEQ ID NO: 817099 - DNA, 75 bp, synthetic construct
  source 1..75: mol_type = other DNA
ggagaattataaaggtagctccggaaagattaacaatccatttggaggacgtttacatgtggctccaaatgataa

SEQ ID NO: 817100 - DNA, 75 bp, synthetic construct
  source 1..75: mol_type = other DNA
ttctctggatgaaacggcctttactgcactaaaagcaacaagtgaaaaagacgtaataaaaatcacctctgtgaa

SEQ ID NO: 817101 - DNA, 75 bp, synthetic construct
  source 1..75: mol_type = other DNA
gatgtttcggcattagagttagaaaaatatgccgataccgccgtagcgcaagccgcttctccgttgctcggacat

SEQ ID NO: 817102 - DNA, 75 bp, synthetic construct
  source 1..75: mol_type = other DNA
gcaggcacggctggcggaattatatccggacgttgattctaagtttggtgaaagtgactatgagcatatcaaagc

SEQ ID NO: 817103 - DNA, 75 bp, synthetic construct
  source 1..75: mol_type = other DNA
tcggtatattcaggcacactgactcctgctaacgcagctactctttgttctaaagtgactaacagtattacattt

SEQ ID NO: 817104 - DNA, 75 bp, synthetic construct
  source 1..75: mol_type = other DNA
aaggtcgataccattctggcgaaataccgtactaaagacggttttgaaacctacgacaaattgaccgatgctgac

SEQ ID NO: 817105 - DNA, 75 bp, synthetic construct
  source 1..75: mol_type = other DNA
cgtcgtggtgtggattccgtaccgactctgctgaaaaaaatgttctcacgcgtgctgtggctggcgcgcggtcgg

SEQ ID NO: 817106 - DNA, 75 bp, synthetic construct
  source 1..75: mol_type = other DNA
atagatgttgcttttgcatcaacttataccgcgcttacactatctagttttgccttccctcccatcgcattagcc

SEQ ID NO: 817107 - DNA, 75 bp, synthetic construct
  source 1..75: mol_type = other DNA
aatttttgaaaatcttaaaaattatttttccgcattatatgagactggaactatcataaagaataaaggtaatat

SEQ ID NO: 817108 - DNA, 75 bp, synthetic construct
  source 1..75: mol_type = other DNA
gccagctcgatttcctcgcccgtgagttgtcctcacatccgcaaaatctctctgatgggcagattcgtcagggac

SEQ ID NO: 817109 - DNA, 75 bp, synthetic construct
  source 1..75: mol_type = other DNA
attatcctcacatccgcaaaatctctctgatgggcagattcgtcagggactttccgcaatggtgcaactgcttga

SEQ ID NO: 817110 - DNA, 75 bp, synthetic construct
  source 1..75: mol_type = other DNA
gagttgctttcgttaacgccggtagagcatgtttgccgactggtacgtgagtcctcgcgcgttgccgcctggcgt

SEQ ID NO: 817111 - DNA, 75 bp, synthetic construct
  source 1..75: mol_type = other DNA
attctgatgttcataaattattaagcaaatactccatttccctgggtattaagaatattaggatactgaaaaaaa

SEQ ID NO: 817112 - DNA, 75 bp, synthetic construct
  source 1..75: mol_type = other DNA
atatacggtgtggagtggccgtcaggaaataatgttcgccatgcgcgtgatgagatgagcagtctggtgctgctg

SEQ ID NO: 817113 - DNA, 75 bp, synthetic construct
  source 1..75: mol_type = other DNA
attacccggaacaggcgcagccctgtgacatgctgatggtcataccctcccgtctggccacagagctgaacggtt

SEQ ID NO: 817114 - DNA, 75 bp, synthetic construct
  source 1..75: mol_type = other DNA
aatgaaattaataaagtatcagagcaaaacaaaatccttgtgaaggatgtatttctaacagataacgttggtact

SEQ ID NO: 817115 - DNA, 75 bp, synthetic construct
  source 1..75: mol_type = other DNA
taaaaattatttttccgcattatatgagactggaactatcataaagaataaaggtaatattaatgctaatttaat

SEQ ID NO: 817116 - DNA, 75 bp, synthetic construct
  source 1..75: mol_type = other DNA
agttgtcagattttatctcatctacagaaccagaagtaatggctatacagggtgaatggggaattggtaaaacct

SEQ ID NO: 817117 - DNA, 75 bp, synthetic construct
  source 1..75: mol_type = other DNA
gataaatcgttctcaaacaaaacaggtgccaggccacgaaaaaatccgtgatgccgtccgcgcctggtcggctga

SEQ ID NO: 817118 - DNA, 75 bp, synthetic construct
  source 1..75: mol_type = other DNA
aactaacaaaagacaatataaaaccttattcgtccgagaattctggcgaatcctctgacctgccagaaaacgacc

SEQ ID NO: 817119 - DNA, 75 bp, synthetic construct
  source 1..75: mol_type = other DNA
gattgaggaagtggcagccagcaaaatcagcggtgaagaagatcgctacagccacaccgatctgtgggatttcca

SEQ ID NO: 817120 - DNA, 75 bp, synthetic construct
  source 1..75: mol_type = other DNA
agtgaactggctttccctccttcaaaagtggtcggcggtgcagccggactgattgaggaagtggcagccagcaaa

SEQ ID NO: 817121 - DNA, 75 bp, synthetic construct
  source 1..75: mol_type = other DNA
aagagctgcttaactttacgctcctgtctgacgaagaccaccaggtatgtgaacaattcggcgtctggggcgaga

SEQ ID NO: 817122 - DNA, 75 bp, synthetic construct
  source 1..75: mol_type = other DNA
aggatgaactggcgctacattcacagcgtaaagcggcagccgcaattgagtccggtgcttttacagccgaaatcg

SEQ ID NO: 817123 - DNA, 75 bp, synthetic construct
  source 1..75: mol_type = other DNA
tgggcggaataccggcattaataatgtggtcagtgaatggtcaacattacccgaatcaggtaagaaaaataaagt

SEQ ID NO: 817124 - DNA, 75 bp, synthetic construct
  source 1..75: mol_type = other DNA
accaaaacagggacacacaaaagaaactattacaaaagaaaaaagaaaagattattcgtccgagaattctggcga

SEQ ID NO: 817125 - DNA, 75 bp, synthetic construct
  source 1..75: mol_type = other DNA
cggattgcggcccggggagaacttgcccgggggcagatgcgttacggggaaatcacgtttaccgttcgtcacctg

SEQ ID NO: 817126 - DNA, 75 bp, synthetic construct
  source 1..75: mol_type = other DNA
gagtacaccagacgccgtgcaggctggtctgacaacgggtaaaggtggcatggtcagtgaaggccgggctgggca

SEQ ID NO: 817127 - DNA, 75 bp, synthetic construct
  source 1..75: mol_type = other DNA
gtgacatccctgagtgatgtgcgggtgaatttccccggtgctgaggagccggtaaaacgctggcaggggagtttg

SEQ ID NO: 817128 - DNA, 75 bp, synthetic construct
  source 1..75: mol_type = other DNA
acccagcccagccgtcttcatcggtgtgtattgatgtatgcaatgcttacacaaatgtttcggacctcacctcac

SEQ ID NO: 817129 - DNA, 75 bp, synthetic construct
  source 1..75: mol_type = other DNA
ctgactgaacaaccactgaatgaattgctttcgccgtctcctaatacactcacttcgcgtgaaatagtcacttca

SEQ ID NO: 817130 - DNA, 75 bp, synthetic construct
  source 1..75: mol_type = other DNA
caggacgatcaataaaagtaactttttctcgaacgagcgaaagtatcgccagctggtacaagagtataaaaaaac

SEQ ID NO: 817131 - DNA, 75 bp, synthetic construct
  source 1..75: mol_type = other DNA
gccaatgcgtgcagtctttgctccgttagtaagtttatctaagttcgaagctattcttctctccaacggagtttc

SEQ ID NO: 817132 - DNA, 75 bp, synthetic construct
  source 1..75: mol_type = other DNA
aatgctgcactccagggagatatatttaaggagcttacagtatattcaattaaagggactaaaaaaacacgaggc

SEQ ID NO: 817133 - DNA, 75 bp, synthetic construct
  source 1..75: mol_type = other DNA
tgtctgatgatgtcaagttaacgcttgaggaaaatattacgtcagacacaaatttattaaactatcttcaacaaa

SEQ ID NO: 817134 - DNA, 75 bp, synthetic construct
  source 1..75: mol_type = other DNA
agtcgctgttgtcacaggagaatggcagccagcatattgccggtgcctgggtgacatccctgagtgatgtgcggg

SEQ ID NO: 817135 - DNA, 75 bp, synthetic construct
  source 1..75: mol_type = other DNA
agcccggtatgttgccggctctgttttttctgacttcagccagtgtgctggcacaccccctgatgatttcaccgg

SEQ ID NO: 817136 - DNA, 75 bp, synthetic construct
  source 1..75: mol_type = other DNA
tattggcagggagggcaatgtaaaccagaatatggtgaagaacggttttgtgctgagttaataaaatacggtgca

SEQ ID NO: 817137 - DNA, 75 bp, synthetic construct
  source 1..75: mol_type = other DNA
gtcttgatatggtgggtgaaccctgcccttatccggcagtcgcaacccttgaggcgatgccgcagttaaaaaaag

SEQ ID NO: 817138 - DNA, 75 bp, synthetic construct
  source 1..75: mol_type = other DNA
gtggtgagcgactgtccgcagtcgatcaataatattccactggatgcgcgtaatcacggctatacggtgctggat

SEQ ID NO: 817139 - DNA, 75 bp, synthetic construct
  source 1..75: mol_type = other DNA
cagcagctctggtcagccagtggatcggaggcggattgcatagcaaactggaagaaagaattcggatgaagtggc

SEQ ID NO: 817140 - DNA, 75 bp, synthetic construct
  source 1..75: mol_type = other DNA
cgaatcggaagtgaacaacatccgcaaacagtatgaagcgcagggctttgaagtggtgattccgaaaaccaacat

SEQ ID NO: 817141 - DNA, 75 bp, synthetic construct
  source 1..75: mol_type = other DNA
atcgcggcgaagagagccagcgctgcgtgatccgccatgtcgcctatatggggccgcagtatgaagtgacggtgg

SEQ ID NO: 817142 - DNA, 75 bp, synthetic construct
  source 1..75: mol_type = other DNA
tgcgcaacgtcactaaacgattcggcagtaatacggttatcgacaatatcaatctcaccatcccacaagggcaaa

SEQ ID NO: 817143 - DNA, 75 bp, synthetic construct
  source 1..75: mol_type = other DNA
atgctaaactgcgcgcctgttttttgccagtggtacatgctcgtggcccaacacaccgtttatttcccggacgcc

SEQ ID NO: 817144 - DNA, 75 bp, synthetic construct
  source 1..75: mol_type = other DNA
gcaagtcaacgccactcgtttacagcccgatactggtgagcactattacctcgaaatccatccttacgggatgtt

SEQ ID NO: 817145 - DNA, 75 bp, synthetic construct
  source 1..75: mol_type = other DNA
taaacctatttatgctatataatctactttgtttggtcctagcaatcccatttggattgctaggactttttatat

SEQ ID NO: 817146 - DNA, 75 bp, synthetic construct
  source 1..75: mol_type = other DNA
aagcctcgctaaaaaagcctcggtcagtctcactaaaaataaactggacacccttgaggcagcggttgcatttgt

SEQ ID NO: 817147 - DNA, 75 bp, synthetic construct
  source 1..75: mol_type = other DNA
cctgaactggctctacagcccgcaggcgcaaaccatcatcaccgactattactaccgcgtgaataacccggaagt

SEQ ID NO: 817148 - DNA, 75 bp, synthetic construct
  source 1..75: mol_type = other DNA
tgggccaaagataacggcggcgacaaactgacgataaaacaatctcatgccgggtcagcaaaacaggcgctggcg

SEQ ID NO: 817149 - DNA, 75 bp, synthetic construct
  source 1..75: mol_type = other DNA
gcacggaaaaagcagcaaaagcctacctgaactggctctacagcccgcaggcgcaaaccatcatcaccgactact

SEQ ID NO: 817150 - DNA, 75 bp, synthetic construct
  source 1..75: mol_type = other DNA
catgagtccaaaactgaacagaaatatgccaacgttttctcagatatgggactatgagcgtattacaccagccag

SEQ ID NO: 817151 - DNA, 75 bp, synthetic construct
  source 1..75: mol_type = other DNA
gacaacatcaaaatggttgttaccctgatccacccgatcgcgatggacgacggtctgcgtttcgcaatccgtgaa

SEQ ID NO: 817152 - DNA, 75 bp, synthetic construct
  source 1..75: mol_type = other DNA
ggaaggcgacgcagagtgggaagcgaagatcctggaactggctggcttcctggattcttatattccggaaccaga

SEQ ID NO: 817153 - DNA, 75 bp, synthetic construct
  source 1..75: mol_type = other DNA
gctaagcggctgcgcgatcggcgttccaaatcgctgatctttgaccccgaggaaatggcactgttgcaaagttag

SEQ ID NO: 817154 - DNA, 75 bp, synthetic construct
  source 1..75: mol_type = other DNA
tatcggccacgttgaccagggtaaaactaccctgaccgctgcaatcacgaccgtactggctaaaacctacggcgg

SEQ ID NO: 817155 - DNA, 75 bp, synthetic construct
  source 1..75: mol_type = other DNA
tatcggccacgttgaccacggtaaaactacgctgaccgctgcaatcacgaccgtactggctaaaacctacggcgg

SEQ ID NO: 817156 - DNA, 75 bp, synthetic construct
  source 1..75: mol_type = other DNA
atgaaccgtcgcgaggcgattcgtgaatcactgctggatgaagcccagggcgcagactgcctgatggttaaacct

SEQ ID NO: 817157 - DNA, 75 bp, synthetic construct
  source 1..75: mol_type = other DNA
cgccaggcgctggacgccgcaggttttaaagatactgcgatcatgtcgtattcgactaaattcgcctcctccttt

SEQ ID NO: 817158 - DNA, 75 bp, synthetic construct
  source 1..75: mol_type = other DNA
gcgagcatggcgtcgacaacgacgcgactctggaaaatttaggcaagcaagccgtggttgcagctgctgcaggtg

SEQ ID NO: 817159 - DNA, 75 bp, synthetic construct
  source 1..75: mol_type = other DNA
tgtaacgattccgttaattatttcaggttcccggagaacactgattattcagtgggggcaggcgagatttggtgg

SEQ ID NO: 817160 - DNA, 75 bp, synthetic construct
  source 1..75: mol_type = other DNA
tcagtggttacaggaatggaaacaaaagagaaatagatatgcaattaagaaagtagcaaaaaatgcagaaagatc

SEQ ID NO: 817161 - DNA, 75 bp, synthetic construct
  source 1..75: mol_type = other DNA
tctggatggcagcattgacgcccgtgaagatgattacgagcaaaaagccgccgatccgaaattcaccggtttcca

SEQ ID NO: 817162 - DNA, 75 bp, synthetic construct
  source 1..75: mol_type = other DNA
aagctggcgaacgcaaccattactgacatgcagcagcgccagcgtgctgctgatgcactcgatgctaaatacacg

SEQ ID NO: 817163 - DNA, 75 bp, synthetic construct
  source 1..75: mol_type = other DNA
taaaccttggtttgggagaagcggcaaaacggaatgtgggcaacggggaaaaccaaatccctgatatgtctttct

SEQ ID NO: 817164 - DNA, 75 bp, synthetic construct
  source 1..75: mol_type = other DNA
agccgcaagaatccgtttggtgatatcaaatcggatggcaccgtgaaaacagctctcgaaaaccttggtttggga

SEQ ID NO: 817165 - DNA, 75 bp, synthetic construct
  source 1..75: mol_type = other DNA
gcgtcaggtaaagagaaatttgttatacctgacgtctggttccatgagtgttatatgcgctttgctggtaaagct

SEQ ID NO: 817166 - DNA, 75 bp, synthetic construct
  source 1..75: mol_type = other DNA
tatcggccacgttgaccacggtaaaactactctgaccgctgcaatcaccaccgtattggctaaaacctacggcgg

SEQ ID NO: 817167 - DNA, 75 bp, synthetic construct
  source 1..75: mol_type = other DNA
ccgtctggaaaaagcattgtttggcgataacaccactaaagggatggataagtacgctgaccagctttataccga

SEQ ID NO: 817168 - DNA, 75 bp, synthetic construct
  source 1..75: mol_type = other DNA
atgaccattaacttccgccgtaacgcattgcagttgagtgtggctgcgctgttttcttctgcttttatggctaac

SEQ ID NO: 817169 - DNA, 75 bp, synthetic construct
  source 1..75: mol_type = other DNA
tcagtggttacaggaatggaaacaaaggaaaaatagatatgcaattaagaaagtagcaaaaaatgcagaaagatc

SEQ ID NO: 817170 - DNA, 75 bp, synthetic construct
  source 1..75: mol_type = other DNA
ttgaaatcattattcaatcggttaacgggaaaagcggttagccggacagctttcgtcgaacaccttggtcaggaa

SEQ ID NO: 817171 - DNA, 75 bp, synthetic construct
  source 1..75: mol_type = other DNA
tagcgaaaccatgcgctatctgatgcgctacgaagtgaccattgaccgcgaacaagccatcagtaatttgaagca

SEQ ID NO: 817172 - DNA, 75 bp, synthetic construct
  source 1..75: mol_type = other DNA
gaaacggtgtagaccttatatactgttctgaacctatacccactaaagatttccctttagagtcttctgtaatac

SEQ ID NO: 817173 - DNA, 75 bp, synthetic construct
  source 1..75: mol_type = other DNA
ctgatcaaaatgattgttgtgccgattgtgatctccacactggtggtgggtatcgcgggtgttggtgatgccaaa

SEQ ID NO: 817174 - DNA, 75 bp, synthetic construct
  source 1..75: mol_type = other DNA
cttgcctggacaccgttcctgttcctgaccgccaccgtcacactgtggagtatcccgccgtttaaagcgctgttt

SEQ ID NO: 817175 - DNA, 75 bp, synthetic construct
  source 1..75: mol_type = other DNA
cattgcacgtatgcctccggtagtcagcgaagccactgcttatgccgcggtgtttaagtttgactggttctctgc

SEQ ID NO: 817176 - DNA, 75 bp, synthetic construct
  source 1..75: mol_type = other DNA
atgggcaaaaccgaccgcagcgccaacccttcgccgggcaacaaaaagggcggtctcgccaacgtggtaaagaaa

SEQ ID NO: 817177 - DNA, 75 bp, synthetic construct
  source 1..75: mol_type = other DNA
atgggcaaaaccgaccgcagcgccaacccttcgccgggcaacaaaaacggcggtctcgcgaacgtggtaaagaaa

SEQ ID NO: 817178 - DNA, 75 bp, synthetic construct
  source 1..75: mol_type = other DNA
atgggcaaaaccgaccgcagcgccaacccttcgccgggcaacaaaaatggcgggctcgcaaacgtggtaaagaaa

SEQ ID NO: 817179 - DNA, 75 bp, synthetic construct
  source 1..75: mol_type = other DNA
acgctggcggtgagtatcgccatggtcgcccgtgcttttggcgcttatgccgtgcagtttttgcatgaaggcagc

SEQ ID NO: 817180 - DNA, 75 bp, synthetic construct
  source 1..75: mol_type = other DNA
gcgtcgcatcaggcaacggctgtcggatgcggcgtgaacgccttatccgacctacggctctacccctgcacaggc

SEQ ID NO: 817181 - DNA, 75 bp, synthetic construct
  source 1..75: mol_type = other DNA
gcgtgaacgccttatccgacctactgttctacccctgcacaggcctgataagatgcgccagcgtcgcatcaggca

SEQ ID NO: 817182 - DNA, 75 bp, synthetic construct
  source 1..75: mol_type = other DNA
attgtggcgcgcctgtgcgggttaagcgtctggatcctgattcgtattctgaaagatgagctgattctggcgtac

SEQ ID NO: 817183 - DNA, 75 bp, synthetic construct
  source 1..75: mol_type = other DNA
ggtttgtttaaacgtttcacgctactgatagtaggatatataagagagaaatttatctgggccaaaaggaaagca

SEQ ID NO: 817184 - DNA, 75 bp, synthetic construct
  source 1..75: mol_type = other DNA
ggatgcgaagtgcaggactgggcggtggttttcttattctgttgatgctgggtttctccagtctctggtttggtt

SEQ ID NO: 817185 - DNA, 75 bp, synthetic construct
  source 1..75: mol_type = other DNA
tattgcaaaacaacaaggatgttcagatggaacaattcgtaaaagattgcaaaaagccttaggttttttgactgg

SEQ ID NO: 817186 - DNA, 75 bp, synthetic construct
  source 1..75: mol_type = other DNA
gacttccgttgcgaaagctgcctaccatgcccgtacacgtattacagatgatcgcattggcgaaacatttgattt

SEQ ID NO: 817187 - DNA, 75 bp, synthetic construct
  source 1..75: mol_type = other DNA
gcataacaaagggtatcgctggcagcatgaagcggtcattgcgctggcatcgcccgacaacgctaacgcgttcga

SEQ ID NO: 817188 - DNA, 75 bp, synthetic construct
  source 1..75: mol_type = other DNA
attaacacctgatgaaatcaagcgtttcccaagccgtcctaagcgagttcaattagagtcagagagcggtatgga

SEQ ID NO: 817189 - DNA, 75 bp, synthetic construct
  source 1..75: mol_type = other DNA
ataaggcgctgaccgaagaaggctttttgcatgttttcccacaaatttacgactgcgaaggcttcttcgttgctc

SEQ ID NO: 817190 - DNA, 75 bp, synthetic construct
  source 1..75: mol_type = other DNA
ttaaactgggatgaaaacctgcgcctctggcagcgcgataaagaaatctggttattcccggtgggcattgaagcg

SEQ ID NO: 817191 - DNA, 75 bp, synthetic construct
  source 1..75: mol_type = other DNA
ttgcgacaataagtctgctggtatccggtcagacagttgcgcaacgtgaaccggtccgtacctatgtggacgaac

SEQ ID NO: 817192 - DNA, 75 bp, synthetic construct
  source 1..75: mol_type = other DNA
tatttccaaaggaaaaggttgttctgaaggcacgataaggaagaatttgcaaacagcacttggatttatagaagg

SEQ ID NO: 817193 - DNA, 75 bp, synthetic construct
  source 1..75: mol_type = other DNA
ttctggccatgagcagtttgccgctcaaagcggaagagatcatcactcccgctaaaccgttcaccggctggtcct

SEQ ID NO: 817194 - DNA, 75 bp, synthetic construct
  source 1..75: mol_type = other DNA
acactacggcatcatgttttttaccgggggcaggaccccatcgacgggcaactggcgcaggtcattaatggcttc

SEQ ID NO: 817195 - DNA, 75 bp, synthetic construct
  source 1..75: mol_type = other DNA
atgggcaaaaccgaccgcagcgccaacccttcgccgggcaacaaaaaaggcgggctcgctaacgtggtaaagaaa

SEQ ID NO: 817196 - DNA, 75 bp, synthetic construct
  source 1..75: mol_type = other DNA
aatttactctggaagagcagcttatcattatcatcgataagtatatctcaaaaagataccagccaggcgataaaa

SEQ ID NO: 817197 - DNA, 75 bp, synthetic construct
  source 1..75: mol_type = other DNA
tctcagagaactaaactctcttgttaattatatagatgacaatcaagaaaaagcagaagagatctatacaacttt

SEQ ID NO: 817198 - DNA, 75 bp, synthetic construct
  source 1..75: mol_type = other DNA
aacgattaaataacaaagaaggggttcttagagagctaaactcgcttgttaattatatagataacaatcaggaaa

SEQ ID NO: 817199 - DNA, 75 bp, synthetic construct
  source 1..75: mol_type = other DNA
gtcaacgtggccgcgaaggatgccgctactgccaagaaacaggcagatgagcgcgtcgcacaatacatttccttc

SEQ ID NO: 817200 - DNA, 75 bp, synthetic construct
  source 1..75: mol_type = other DNA
tcttcgtgaactaaactctcttgttaactacatagatagcaatcaagaaagagcggaagagatctacgcaacatt

SEQ ID NO: 817201 - DNA, 75 bp, synthetic construct
  source 1..75: mol_type = other DNA
taacgacacttgaagaacagcttgttgtcatcgtagataagtatatctcgaaacgataccagcccggagataaaa

SEQ ID NO: 817202 - DNA, 75 bp, synthetic construct
  source 1..75: mol_type = other DNA
tgagtcggtgcagcgttacattgttaagccgggtgaggttaatgccgtcaggccgcatccgttaccatcaggtca

SEQ ID NO: 817203 - DNA, 75 bp, synthetic construct
  source 1..75: mol_type = other DNA
atgtggagtacgaaacagaaggtgatgagtaatgttttgttttttatctgtttgttttataaggataaattaaat

SEQ ID NO: 817204 - DNA, 75 bp, synthetic construct
  source 1..75: mol_type = other DNA
tggtgacgctgctcggcccgtccggctgcggcaaaaccactattttgcgcctggttgccgggctggaaaaaccga

SEQ ID NO: 817205 - DNA, 75 bp, synthetic construct
  source 1..75: mol_type = other DNA
tttgccggtggctgaaagagacttaccccgacgcagtagagtttttaccgcttggcgatctcttccctggtgcaa

SEQ ID NO: 817206 - DNA, 75 bp, synthetic construct
  source 1..75: mol_type = other DNA
accggctgggggagcaggtgctgattctggccgtgggcggtgaactcgacacggcgttcgttctgccggggattt

SEQ ID NO: 817207 - DNA, 75 bp, synthetic construct
  source 1..75: mol_type = other DNA
cacttatgagtcggtacagcgatacatcgtgaagccgggagaagtccacgccgtaaggccgcacccgttgccgtc

SEQ ID NO: 817208 - DNA, 75 bp, synthetic construct
  source 1..75: mol_type = other DNA
taattgagtccgggctatggtcagaagacgctgtagagcttcagatgagccataaggaaagcaacagtgtccggg

SEQ ID NO: 817209 - DNA, 75 bp, synthetic construct
  source 1..75: mol_type = other DNA
aactcaatctgttgattttcattcgttccagtgaactccgctatgcacgatggtcagaaatcgacttcaacagta

SEQ ID NO: 817210 - DNA, 75 bp, synthetic construct
  source 1..75: mol_type = other DNA
tcttgaacagagaagattgatgctacagtggtgggcagattttcttgatgcaaaccgggatgggatggtaaggcc

SEQ ID NO: 817211 - DNA, 75 bp, synthetic construct
  source 1..75: mol_type = other DNA
cgttatgctgtccaagaagatatgattacccataatcccgctaatgaacttggcggcacgttaatcacacctaaa

SEQ ID NO: 817212 - DNA, 75 bp, synthetic construct
  source 1..75: mol_type = other DNA
acgccgcgacgccagccagcgattttgtctgtggcacgcaacaggtggcttcgggtatcaccgtgcaagtgttta

SEQ ID NO: 817213 - DNA, 75 bp, synthetic construct
  source 1..75: mol_type = other DNA
gaagaagaaaactttctcggatcaatggggactgcataaccagctggcggtgtttaacccggcaccggtgacctg

SEQ ID NO: 817214 - DNA, 75 bp, synthetic construct
  source 1..75: mol_type = other DNA
atccgtcagcttacctatgaagaaggtaacgaagccggattaattttcactggctgttatgactcattcaaaccc

SEQ ID NO: 817215 - DNA, 75 bp, synthetic construct
  source 1..75: mol_type = other DNA
aaaacgccaagccttccgacaagccaactaaaatttctgatggcaaagggctgtatctgctcgttcatcctaacg

SEQ ID NO: 817216 - DNA, 75 bp, synthetic construct
  source 1..75: mol_type = other DNA
ctgcctatacccataaggccaaacatcttgagcagcgaaggttgatgctacagtggtgggcagattatcttgatg

SEQ ID NO: 817217 - DNA, 75 bp, synthetic construct
  source 1..75: mol_type = other DNA
gcaggctcttaaaatactgaaagagatccgccagcttacctatgaagaaggtaatgaggcggggttaatttttac

SEQ ID NO: 817218 - DNA, 75 bp, synthetic construct
  source 1..75: mol_type = other DNA
ctatcggctcaaaagatattaccaagttgactacgcgcgatctgttgctacctctgcgtaaaattgagggcaagg

SEQ ID NO: 817219 - DNA, 75 bp, synthetic construct
  source 1..75: mol_type = other DNA
tacgcagcgtcgtttgatgatacaatggtgggctgattatttggacgcaaacaaagaaagacatattatgccgtt

SEQ ID NO: 817220 - DNA, 75 bp, synthetic construct
  source 1..75: mol_type = other DNA
ttctcaattggcacctacccttctgtttcgctctcagaagctcgtacaagcctcttagcgatgaaatctctgtta

SEQ ID NO: 817221 - DNA, 75 bp, synthetic construct
  source 1..75: mol_type = other DNA
aactccaagtcaccgacatcgacctttacgcaaatacttgcaagctggacggtgagtcatacccgttatcactgg

SEQ ID NO: 817222 - DNA, 75 bp, synthetic construct
  source 1..75: mol_type = other DNA
gtgtcgactcaagaaattgaacgttgtttaaaatggtcgaaaggtattgatgtatgcattatccatagcaagcat

SEQ ID NO: 817223 - DNA, 75 bp, synthetic construct
  source 1..75: mol_type = other DNA
atttttccaatgcgcattatgggagtaggctcatcaccagaaggggctgcaccatctcagccagtatgttattgc

SEQ ID NO: 817224 - DNA, 75 bp, synthetic construct
  source 1..75: mol_type = other DNA
ttttagagttcattgtagcagttatgctttcgctttctataccgggtatggctatggcagcagatgctggagtcc

SEQ ID NO: 817225 - DNA, 75 bp, synthetic construct
  source 1..75: mol_type = other DNA
gctgaaatgcgcaaagtactggcggcaaaaccggccataatcgccttgcaaatcatacgtggcaatgaaagcatc

SEQ ID NO: 817226 - DNA, 75 bp, synthetic construct
  source 1..75: mol_type = other DNA
atcggcatcaacaccgcaatccttgcccccggcggcggcagtgtggggattggttttgccatccccagtaatatg

SEQ ID NO: 817227 - DNA, 75 bp, synthetic construct
  source 1..75: mol_type = other DNA
aaaggttatgtgctgaccaacaatcacgtcattaatcaggcacagaaaatcagtattcagctcaatgacgggcgt

SEQ ID NO: 817228 - DNA, 75 bp, synthetic construct
  source 1..75: mol_type = other DNA
ttgaactgaaagctgagtgttcgataggtgaagaggatggcgtttatggtctaatccttgagtcgtgggggccgg

SEQ ID NO: 817229 - DNA, 75 bp, synthetic construct
  source 1..75: mol_type = other DNA
ccatggatacccgcttgtactttgaaggtgagctgattgacgcggctaccaacaaaccggtgattaaagtggttc

SEQ ID NO: 817230 - DNA, 75 bp, synthetic construct
  source 1..75: mol_type = other DNA
caggtaaagagctggacaggactcaccatgggggtgggcattgcgcctacaaaaacgctggctaaaagtgcacag

SEQ ID NO: 817231 - DNA, 75 bp, synthetic construct
  source 1..75: mol_type = other DNA
aatctcgaactggtgaaaaaacctcctgaatgccttgaattcattgtagttcacgagctagttcatctacacgaa

SEQ ID NO: 817232 - DNA, 75 bp, synthetic construct
  source 1..75: mol_type = other DNA
tgtcatagagaattgcactatagtaaaaatgcaaaagaactaatcgagatgctttacgttaatataaaccgatta

SEQ ID NO: 817233 - DNA, 75 bp, synthetic construct
  source 1..75: mol_type = other DNA
tgcatatcgtggcccaatggaaactggaaaaattgccttgtgtagtgcttttattttcttagttctttttgctaa

SEQ ID NO: 817234 - DNA, 75 bp, synthetic construct
  source 1..75: mol_type = other DNA
atgtgattaatcaggcacagaaaatcagtattcagctcaatgacgggcgtgagttcgatgcaaagctaattggtg

SEQ ID NO: 817235 - DNA, 75 bp, synthetic construct
  source 1..75: mol_type = other DNA
aaatataggggcaaatccagtaaaactctaattggctgcatggttgcaactgcccttgctactgtatcttcggca

SEQ ID NO: 817236 - DNA, 75 bp, synthetic construct
  source 1..75: mol_type = other DNA
tctggactataagactgtgacggtcgataacacgccgccgtccatcagtatcagctacgaaaccaaacctatcac

SEQ ID NO: 817237 - DNA, 75 bp, synthetic construct
  source 1..75: mol_type = other DNA
tccatctttgctgatggagttgatgatgcgaatggcatagacaagatccgtctggtcatcaagcgcggaaatggc

SEQ ID NO: 817238 - DNA, 75 bp, synthetic construct
  source 1..75: mol_type = other DNA
catcagccagtttgctcataaaccgtttattgtgttcatcaccgcgtggaaagaacatgcggtagaagcgtttga

SEQ ID NO: 817239 - DNA, 75 bp, synthetic construct
  source 1..75: mol_type = other DNA
ctgaaagatctggattttgaagtgccggtcagccgcagcaaagtgaaagaattccgccagttaatgcatctttaa

SEQ ID NO: 817240 - DNA, 75 bp, synthetic construct
  source 1..75: mol_type = other DNA
tcgaaccgtggtttaataacacctacattctgcggctgaaagatctggattttgaagtgccagtcagccgcagca

SEQ ID NO: 817241 - DNA, 75 bp, synthetic construct
  source 1..75: mol_type = other DNA
atgaaagcaccaggcttgcccgccgatcaacaatttttcgccgatctgttcagcggcctggtgcttaacccgcaa

SEQ ID NO: 817242 - DNA, 75 bp, synthetic construct
  source 1..75: mol_type = other DNA
ggcagtcattggtgatcatgacgttgtttgccgtactgttggcaacgctaattcatcattttggcgaacaaatta

SEQ ID NO: 817243 - DNA, 75 bp, synthetic construct
  source 1..75: mol_type = other DNA
agggcgggctggtgtacaacgggtttggtgggagtgcgggagataatttaagccagacgcagttgctcagccgcg

SEQ ID NO: 817244 - DNA, 75 bp, synthetic construct
  source 1..75: mol_type = other DNA
ggccatgaatggcgtcggatgtcgcgccagtgcacgcattatgggcgttggcctcaacacggttttacgtcactt

SEQ ID NO: 817245 - DNA, 75 bp, synthetic construct
  source 1..75: mol_type = other DNA
atttaccggccaacagcaaaccggtaatgctgttaagcctagtgttcgcgccgacctggctggggttatcgtttt

SEQ ID NO: 817246 - DNA, 75 bp, synthetic construct
  source 1..75: mol_type = other DNA
tttatcgaatatgttcgctgggtacggatggcgaaggcaaggatgatcttgcagaaataccacctgtcgattcat

SEQ ID NO: 817247 - DNA, 75 bp, synthetic construct
  source 1..75: mol_type = other DNA
ggtctcttgtttatcggtgttttaaatgcgcctatcaatgcttatgaaatggtgatttatcccatcgcctttttt

SEQ ID NO: 817248 - DNA, 75 bp, synthetic construct
  source 1..75: mol_type = other DNA
acgcaagctgaatgtgctgggcattaagaccgcgctcgatctcgccctgacgaacccggccttcatccgcaaaaa

SEQ ID NO: 817249 - DNA, 75 bp, synthetic construct
  source 1..75: mol_type = other DNA
ccagctgcgcgttttaacgctgaaattgatgaacctcgccctggtttacgtcgcgggcatattcctggtgcgcta

SEQ ID NO: 817250 - DNA, 75 bp, synthetic construct
  source 1..75: mol_type = other DNA
ctcgcgacgctggatgtgccaaacgtgaaactgtacgacggcgcatggagtgaatggggcgcacgggcagattta

SEQ ID NO: 817251 - DNA, 75 bp, synthetic construct
  source 1..75: mol_type = other DNA
ggatttcggccggcagctgcgtgaacacgtcaggaacgggactggcctgactatcggtgtcggaatggggccaac

SEQ ID NO: 817252 - DNA, 75 bp, synthetic construct
  source 1..75: mol_type = other DNA
tgcgttttcaagtaactatgaactttatgcctcgatgtcggcgcgcgtgatgaacagcctggaggaactggcccc

SEQ ID NO: 817253 - DNA, 75 bp, synthetic construct
  source 1..75: mol_type = other DNA
gccacaacggctctggagcgtatctggagggatggacaccggtatgccaaagccggagttatgctgaatgacttc

SEQ ID NO: 817254 - DNA, 75 bp, synthetic construct
  source 1..75: mol_type = other DNA
cgtacgcttatcagcattaaccgcgcgcaaccggcgaatctgccgctgactattcacgaactcgaacgtcatccg

SEQ ID NO: 817255 - DNA, 75 bp, synthetic construct
  source 1..75: mol_type = other DNA
gtggaagcgcgctccggtctgttcgaacagggcggctatcgggcgctcaacaaaggtaaagtcgactctgcctct

SEQ ID NO: 817256 - DNA, 75 bp, synthetic construct
  source 1..75: mol_type = other DNA
aacagggcggctatcgggcgctcaacaaaggcaaagttgactctgcctctgcggttatcattctcgaaagttatt

SEQ ID NO: 817257 - DNA, 75 bp, synthetic construct
  source 1..75: mol_type = other DNA
aacggcagccgtggttttgttagcactcgcgacgctggatgtgccaaacgtgaaactgtacgacggcgcatggag

SEQ ID NO: 817258 - DNA, 75 bp, synthetic construct
  source 1..75: mol_type = other DNA
ctcgctacgctggatgtgccaaacataaaactgtacgacggtgcatggagtgaatggggggcacgggcagatttg

SEQ ID NO: 817259 - DNA, 75 bp, synthetic construct
  source 1..75: mol_type = other DNA
ccgattttctgaccatcgatcgcggcggcagtgacaactgtgatgttgaaagtattcctgaacaggaactctgtt

SEQ ID NO: 817260 - DNA, 75 bp, synthetic construct
  source 1..75: mol_type = other DNA
tgtgaagacgtcaccgttcgctgttaacgaaccgtattacgggaatgtggccagtgaaaagctgatgactcccac

SEQ ID NO: 817261 - DNA, 75 bp, synthetic construct
  source 1..75: mol_type = other DNA
cagcgtggggccacgcagcaggatgcacaaggacgctggcaatttgagtatcggttaacaaggaaagttagcgat

SEQ ID NO: 817262 - DNA, 75 bp, synthetic construct
  source 1..75: mol_type = other DNA
gggctgacaacaagcattaccgcgttaaacgcactagaaacgtcactccgccaggatgcatcttttcatctcaat

SEQ ID NO: 817263 - DNA, 75 bp, synthetic construct
  source 1..75: mol_type = other DNA
cctggcgacagcaacgccggaccgcttttcttcgtttctggttgctgatgttcgttgcgcctctgctgctggccg

SEQ ID NO: 817264 - DNA, 75 bp, synthetic construct
  source 1..75: mol_type = other DNA
tttcatctcaatcagcggggagccacgcagcaggatgcgcagggacgctggcaatttgagtatcagttaacaagg

SEQ ID NO: 817265 - DNA, 75 bp, synthetic construct
  source 1..75: mol_type = other DNA
gcactggcggcgcttttacccgaacacgcctggctgacaacgataagctggcagcagggaacgctggagatcaag

SEQ ID NO: 817266 - DNA, 75 bp, synthetic construct
  source 1..75: mol_type = other DNA
aacaactcgcccgcagcttacagataacgaaaccacgtttgctggagcaacagcagttacgcgaacagcgtttgc

SEQ ID NO: 817267 - DNA, 75 bp, synthetic construct
  source 1..75: mol_type = other DNA
atggtcgcgctgacggcagaaaaccgtaatcggctcttgaaactactggggctgcagcctgttggtgaagtctgg

SEQ ID NO: 817268 - DNA, 75 bp, synthetic construct
  source 1..75: mol_type = other DNA
ggggcgaggaaccgcccctgaatggcaaatgaaacgggaaatattgagtcagtgttatacaactaaatggcaaga

SEQ ID NO: 817269 - DNA, 75 bp, synthetic construct
  source 1..75: mol_type = other DNA
gaagggtaccgctatatgaaggcaggattcatgctggctgatttcacaccatcgggtatagcgcagccgggatta

SEQ ID NO: 817270 - DNA, 75 bp, synthetic construct
  source 1..75: mol_type = other DNA
caacaattacgcgaacagcgtttgcaacgtcagcgccagcgacaatttacccgcgactggcaatctgcgctggag

SEQ ID NO: 817271 - DNA, 75 bp, synthetic construct
  source 1..75: mol_type = other DNA
gccccgcgtcgagatttacagtattgatgaggcattctgcgatctgacaggtgtgcataattgtcgcgatctgac

SEQ ID NO: 817272 - DNA, 75 bp, synthetic construct
  source 1..75: mol_type = other DNA
ccgattttctgacggttgatcgtggtggtagcgataactgcgatgtagaaagtatccccacgcatgaactttgtt

SEQ ID NO: 817273 - DNA, 75 bp, synthetic construct
  source 1..75: mol_type = other DNA
catcaggggaaaatagaagaagagggcgcgccagaacagttatttggtaacccgcaaagccctcgtctgcaacag

SEQ ID NO: 817274 - DNA, 75 bp, synthetic construct
  source 1..75: mol_type = other DNA
atgtccgagaataaattaaacgttatcgatttgcacaaacgctatggcgaacacgaagtgctgaaaggggtctca

SEQ ID NO: 817275 - DNA, 75 bp, synthetic construct
  source 1..75: mol_type = other DNA
catcaagggaaaattgaagaagagggtacgccagaacagttattcggcaacccgcaaagtccgcgtctgcaacag

SEQ ID NO: 817276 - DNA, 75 bp, synthetic construct
  source 1..75: mol_type = other DNA
ggccggaacctggggacccgttgcctcggtggcgatgattacccgtgatggtcgttcctggaatgagtttgagta

SEQ ID NO: 817277 - DNA, 75 bp, synthetic construct
  source 1..75: mol_type = other DNA
ggcattccggaagcccgcaaaatggtggaagccggacaaatgaccgcgacggttgcccagaacccggcggatatc

SEQ ID NO: 817278 - DNA, 75 bp, synthetic construct
  source 1..75: mol_type = other DNA
gtggctggattgttgcttttaattgcagcaattaaacttcctagttttgcaagaacggcaagaaataatggcgag

SEQ ID NO: 817279 - DNA, 75 bp, synthetic construct
  source 1..75: mol_type = other DNA
caatagagcagatatctgagaaagaagctttacgtctgacattgtatcaatccgtggcgaagcttatccgtgctt

SEQ ID NO: 817280 - DNA, 75 bp, synthetic construct
  source 1..75: mol_type = other DNA
ctatgcgtcatttactggatatgtatgttcgcgccgatggtagcgaagtgctgatggattttgaagagttaagtc

SEQ ID NO: 817281 - DNA, 75 bp, synthetic construct
  source 1..75: mol_type = other DNA
gtagaaatgaaacgctttgagcctgccatgcgccatttgttagatatgtatattcgtgcggatgacagcgaagta

SEQ ID NO: 817282 - DNA, 75 bp, synthetic construct
  source 1..75: mol_type = other DNA
cccatcgcgatcttgccgcagaggtgaatgccgggcgttttcgccaggatctctactatcgcctgaatgtggtgg

SEQ ID NO: 817283 - DNA, 75 bp, synthetic construct
  source 1..75: mol_type = other DNA
ttattcatccgtcgtcttatgctgttggtgattttggcagtcttgagtttgcttttaagctcattcttatcccgt

SEQ ID NO: 817284 - DNA, 75 bp, synthetic construct
  source 1..75: mol_type = other DNA
tactgcgcgccagtatgctggacgtcgccggtcagcgtcacgtcacctgggcgcggctacgcggcctgaatgaca

SEQ ID NO: 817285 - DNA, 75 bp, synthetic construct
  source 1..75: mol_type = other DNA
ccagcggcgcgatggtcggctttaacgtccatttccactctctggcaagtgcctcgattaccgcgatgttcagtt

SEQ ID NO: 817286 - DNA, 75 bp, synthetic construct
  source 1..75: mol_type = other DNA
aacacaagggttgaatcagtctattaaggatgctcacgcctcagctcccaaacggcagaaaggcgtatatgaggt

SEQ ID NO: 817287 - DNA, 75 bp, synthetic construct
  source 1..75: mol_type = other DNA
gaggtggttgtaaaaatatctggtggcgcagtaacccggcaaggtatcaaaaatagcattgattatatgagtagg

SEQ ID NO: 817288 - DNA, 75 bp, synthetic construct
  source 1..75: mol_type = other DNA
agtaagcgtattcaggagcctgtgaaagtttcacttggtggtgaagttgccattaaaccagatgaaaccagcttt

SEQ ID NO: 817289 - DNA, 75 bp, synthetic construct
  source 1..75: mol_type = other DNA
tgcttggctatcataacgacaaaaaagaacatccacacgtacatgtcgtttttcgtattcgtgataacgacggta

SEQ ID NO: 817290 - DNA, 75 bp, synthetic construct
  source 1..75: mol_type = other DNA
tgatcttgttaagctgaagaagttaggacaaaaggaggtgaaaatccctgcacttgataagaacggtgtacagca

SEQ ID NO: 817291 - DNA, 75 bp, synthetic construct
  source 1..75: mol_type = other DNA
tgatctcgttaagctgaaaaagttaggacaaaaggaggtaaaaatctctgcacttgataagaacggtgtacagca

SEQ ID NO: 817292 - DNA, 75 bp, synthetic construct
  source 1..75: mol_type = other DNA
acttgatgaaaagcatgtcaaacggtattgatgatttaaccacgattagctaccgagtgcagggattctttgaca

SEQ ID NO: 817293 - DNA, 75 bp, synthetic construct
  source 1..75: mol_type = other DNA
aagatgcaggtcaagtaaaagagttcacaaagtcattagctcaaacaacgggtttagatatcgctgaactgcaat

SEQ ID NO: 817294 - DNA, 75 bp, synthetic construct
  source 1..75: mol_type = other DNA
gcagacgcgtaccgattttggtaaaaccggatacgatggcgcagcgccgccgaaaggcgaaacccatcgctacat

SEQ ID NO: 817295 - DNA, 75 bp, synthetic construct
  source 1..75: mol_type = other DNA
ttctttactttcaatcaatcagctaatgaccagttcacgcaggatatgctcttaagttcaagctatccagaggaa

SEQ ID NO: 817296 - DNA, 75 bp, synthetic construct
  source 1..75: mol_type = other DNA
caactgggatgatacgatggttaaaatcttctcaggttcacaggatgagttaaacggcttcttatccagcctgag

SEQ ID NO: 817297 - DNA, 75 bp, synthetic construct
  source 1..75: mol_type = other DNA
tattgatgatttaaccacgattagctaccgagtgcagggattctttgacagagtgacccttgcttacagagaatt

SEQ ID NO: 817298 - DNA, 75 bp, synthetic construct
  source 1..75: mol_type = other DNA
aatgttgccaaactactgcgtgcgttcgccaatatcgccaatgaaatgcctgatgcaggctattctgcgcaagat

SEQ ID NO: 817299 - DNA, 75 bp, synthetic construct
  source 1..75: mol_type = other DNA
gttaagttcacatattagcccggtagtgccggtaataatcggttcgaaagaggaaggtttacgcatctggcgcga

SEQ ID NO: 817300 - DNA, 75 bp, synthetic construct
  source 1..75: mol_type = other DNA
ggcacctgtattgatgaagtgtattccgccaccgaaggccggatcggcaataaaaaagtgattctggccgggacc

SEQ ID NO: 817301 - DNA, 75 bp, synthetic construct
  source 1..75: mol_type = other DNA
gccgcccgggtatttgccgtgctgtgcgagttgcgctcggaaccggcggatgagattgccgaagtgttgcttaat

SEQ ID NO: 817302 - DNA, 75 bp, synthetic construct
  source 1..75: mol_type = other DNA
gtcattatggctttttttgctgctatcgatcttggtactactgtcgttgtggcatttagtctcggtaagcgggat

SEQ ID NO: 817303 - DNA, 75 bp, synthetic construct
  source 1..75: mol_type = other DNA
gcattacagaggagcatcgtctggtatacgcggttactgacgattcactgctcattgcagcctgtcgttatcatt

SEQ ID NO: 817304 - DNA, 75 bp, synthetic construct
  source 1..75: mol_type = other DNA
ctgcaggcattacgctgctgcgctgtagcgttaatgctgcacacagtcatgagcaaattgatgccatcattcagg

SEQ ID NO: 817305 - DNA, 75 bp, synthetic construct
  source 1..75: mol_type = other DNA
ttgtcgcgctactggtctacatcgcctgtcgcgggatggtgcaagatattggttcagatcctgacttccgaccac

SEQ ID NO: 817306 - DNA, 75 bp, synthetic construct
  source 1..75: mol_type = other DNA
atccaccgaaagatccgcgtctggatggtgctttcacactgttttacatgtcgatcaatattggttcattggtgg

SEQ ID NO: 817307 - DNA, 75 bp, synthetic construct
  source 1..75: mol_type = other DNA
cccgtctgggcagcaaaggcaaagatctctcgatgccgatgaaattcacccttggcatgtttatgtgttcattgg

SEQ ID NO: 817308 - DNA, 75 bp, synthetic construct
  source 1..75: mol_type = other DNA
ggtggcagtaggggaggtaggcctggatctctttggcgacgatccacaatttgatcgccaacagcggttgctcga

SEQ ID NO: 817309 - DNA, 75 bp, synthetic construct
  source 1..75: mol_type = other DNA
gcgagttacgtccggaaccagaagatgagattgccgaagtgttgcttaataatacgtatgcggtgtttagcgttc

SEQ ID NO: 817310 - DNA, 75 bp, synthetic construct
  source 1..75: mol_type = other DNA
gtaagatcggtctggtcacgctgggcgttgcagtagtgatgctgttgatggtgccatggctgaaacggatgattg

SEQ ID NO: 817311 - DNA, 75 bp, synthetic construct
  source 1..75: mol_type = other DNA
cgcttcatgggtgctacccgctggatttaagggggctcgtgacgcccgttacgctatgtgggtttctatgttgag

SEQ ID NO: 817312 - DNA, 75 bp, synthetic construct
  source 1..75: mol_type = other DNA
caccgtcaggtgatgcgcacgcagggggcgctgacgacgttcagcggctacaacgctgacaaccggttaagctgg

SEQ ID NO: 817313 - DNA, 75 bp, synthetic construct
  source 1..75: mol_type = other DNA
gcgagttacgcccggaaccagaagatgagattgccgaagtgttgcttaataacacgtatacgttgtttaacgtgc

SEQ ID NO: 817314 - DNA, 75 bp, synthetic construct
  source 1..75: mol_type = other DNA
tcgcgcactggcgtggttcacggtttttccggcagcctgcaacaggccgagcggtttgtacagctgggctacaaa

SEQ ID NO: 817315 - DNA, 75 bp, synthetic construct
  source 1..75: mol_type = other DNA
tgaccatggtatggctggccaaatggatacgtgaaaatgtcaaagacgcccgtgtattgatcgtgactgatcgta

SEQ ID NO: 817316 - DNA, 75 bp, synthetic construct
  source 1..75: mol_type = other DNA
ttcaggcaagcaatactttttgccagtctactgagcatggtatagtcattgacaataagctaagcgctattctcg

SEQ ID NO: 817317 - DNA, 75 bp, synthetic construct
  source 1..75: mol_type = other DNA
tccgggaccaaaatttggctggttgccggtatcaccgatatgagaaatggcttcaacggcctggctgcgaaagta

SEQ ID NO: 817318 - DNA, 75 bp, synthetic construct
  source 1..75: mol_type = other DNA
tcccgcattagcggaccgtaaaccgctatggcaatacgctgaaaaacttgacgatacctattgcgctggttgcca

SEQ ID NO: 817319 - DNA, 75 bp, synthetic construct
  source 1..75: mol_type = other DNA
aaacacgctctatgttgcacgtggtcagcggctggcaatagctacgttaagtgatgcaggtatcaaggctcttac

SEQ ID NO: 817320 - DNA, 75 bp, synthetic construct
  source 1..75: mol_type = other DNA
tgtcataaaggcattgcccattttccgccagaaataaaaatggatgacaacgcggcgcatgagctggaaagtcag

SEQ ID NO: 817321 - DNA, 75 bp, synthetic construct
  source 1..75: mol_type = other DNA
ggtaaacggggaatggcaggctgacgaatacggcaatcaatggcgtcaggcgtctttacagggtgtgcttaccga

SEQ ID NO: 817322 - DNA, 75 bp, synthetic construct
  source 1..75: mol_type = other DNA
ccaaaggaatgggggcacgaaccagcatgagcgaaaacgaactggacattttgacgcggtacttccagtacaacg

SEQ ID NO: 817323 - DNA, 75 bp, synthetic construct
  source 1..75: mol_type = other DNA
aaacacgctctacctggcggcaggtcaacgactggcgttagccacactaagcgaagaaggtatcaaggcgctaac

SEQ ID NO: 817324 - DNA, 75 bp, synthetic construct
  source 1..75: mol_type = other DNA
cggcattgccttcagttcatggtcatcgtgggtatttggtacggtaataggggcattttcgggcggcggtttgct

SEQ ID NO: 817325 - DNA, 75 bp, synthetic construct
  source 1..75: mol_type = other DNA
aaacctcgcctcggggatttccgtcgtcagcttatcggtcaggtgaaagaaacgctgcaaaaaggcaaaacgccc

SEQ ID NO: 817326 - DNA, 75 bp, synthetic construct
  source 1..75: mol_type = other DNA
aggactagaaataaagcagacgccttagttatgtcaattgctgaaataataaaggaaaatagcaatgataaatag

SEQ ID NO: 817327 - DNA, 75 bp, synthetic construct
  source 1..75: mol_type = other DNA
tcaaacggcattctcgattgctttgctatcgaaggaaagccggatgcggttgaaacggcactgttgcaaagttag

SEQ ID NO: 817328 - DNA, 75 bp, synthetic construct
  source 1..75: mol_type = other DNA
atgtttctgaaacagggcacgtttaattatgaaaaacagtccgtggtgctcagtgagctgtccgggctgcagaga

SEQ ID NO: 817329 - DNA, 75 bp, synthetic construct
  source 1..75: mol_type = other DNA
ttcccgctcactgtggaatgcggaacagtctcaggatgttgagacgctttgcgcatccgttattacaacatggtc

SEQ ID NO: 817330 - DNA, 75 bp, synthetic construct
  source 1..75: mol_type = other DNA
atgaacgcgacgaagcgcgcgatttgttgcacagtcacggcacgggtaaaggccgcgcattttgcgaaaaactgg

SEQ ID NO: 817331 - DNA, 75 bp, synthetic construct
  source 1..75: mol_type = other DNA
cgccaatccaggctgtgaatctcagcaagcggccaccgcaggtggatgttttgatgggggggataccttgtactg

SEQ ID NO: 817332 - DNA, 75 bp, synthetic construct
  source 1..75: mol_type = other DNA
caaggaaagtcgcatacaggacatcctggagccagttccgctcgattctgaacgttggaagtcatttgactatct

SEQ ID NO: 817333 - DNA, 75 bp, synthetic construct
  source 1..75: mol_type = other DNA
cattaaggggaatactggcggtgtacgacaaatatgattatcttgatgaacaaaaggaggcactaaataagtttg

SEQ ID NO: 817334 - DNA, 75 bp, synthetic construct
  source 1..75: mol_type = other DNA
gctggacttctgacggcacgactggggattaaagctatggagctttgccgcccgctgccgtggattgacgatgac

SEQ ID NO: 817335 - DNA, 75 bp, synthetic construct
  source 1..75: mol_type = other DNA
gtggatatggcgtttatcgcctggcgcaatctgcgtttgattaatcgcatcgccacgctgtatggcattgaactg

SEQ ID NO: 817336 - DNA, 75 bp, synthetic construct
  source 1..75: mol_type = other DNA
attgtggcgtcgatggcgaaaggcgaaatgttgccgatcatcttcttctcggtgctgtttggtctggggctttcc

SEQ ID NO: 817337 - DNA, 75 bp, synthetic construct
  source 1..75: mol_type = other DNA
cccgcccggtggccgaccgcctgaccgtacagagcgccagaatcgtgacatggcggctgaatgcaaaactgtact

SEQ ID NO: 817338 - DNA, 75 bp, synthetic construct
  source 1..75: mol_type = other DNA
tgcatgtgcacggtgtgcaacgcgtggagataaccgaacccacacagaatatggccatcagcgacatacaggcgg

SEQ ID NO: 817339 - DNA, 75 bp, synthetic construct
  source 1..75: mol_type = other DNA
gatcagcggttatggcatgcggtggccgaagctacgggtctgaaagctgaaagaacgctgtttattgatgacagc

SEQ ID NO: 817340 - DNA, 75 bp, synthetic construct
  source 1..75: mol_type = other DNA
gtatttttatccagggccggagtctgaacccatgcttgcggccgctgacgccgctttccgtgcatggctggcaga

SEQ ID NO: 817341 - DNA, 75 bp, synthetic construct
  source 1..75: mol_type = other DNA
ggccgccaacaacaacacccgccgcctggtcattcatccggccactgataccacggaagcagtgatggaaagcga

SEQ ID NO: 817342 - DNA, 75 bp, synthetic construct
  source 1..75: mol_type = other DNA
ctggcccgtcaggtgcatacgagtattttgcccgcagcgccagcggtctggtgcgtgatgcgcgggccatcagcc

SEQ ID NO: 817343 - DNA, 75 bp, synthetic construct
  source 1..75: mol_type = other DNA
ggcagccaacctgaatacgcagcgcctggtgatcactccggcaacagatactgccccggctgtcatggaaaacga

SEQ ID NO: 817344 - DNA, 75 bp, synthetic construct
  source 1..75: mol_type = other DNA
tggacaacctcgcgggcaatatgaacacaaagcgcctgaccatcactccggcaacggataccaccgacgcggtga

SEQ ID NO: 817345 - DNA, 75 bp, synthetic construct
  source 1..75: mol_type = other DNA
agccccgcagagttcaccggaaaaaagccgccggttgatcagcgcgtttaccgcccagtaagtaacgccgcatga

SEQ ID NO: 817346 - DNA, 75 bp, synthetic construct
  source 1..75: mol_type = other DNA
atgtatttttattatcagacttctggataaggattttattgaagtctataaaaaaacgctaaaaaaattactgca

SEQ ID NO: 817347 - DNA, 75 bp, synthetic construct
  source 1..75: mol_type = other DNA
acggcgagcgacgagctgatcgcaacagtaaacgacacgctctcagcggatgataagcggcctgtcgccgaccgg

SEQ ID NO: 817348 - DNA, 75 bp, synthetic construct
  source 1..75: mol_type = other DNA
agttttgctgaatcctcaggaagatatcgtgatcgatgatacccaggcggcacgatgtatttcgcacaccatcag

SEQ ID NO: 817349 - DNA, 75 bp, synthetic construct
  source 1..75: mol_type = other DNA
agcgcgtcaaccggcttatcagtaagctggagaatggagaatcgctttcggtatgcagcctctttcatgggggtg

SEQ ID NO: 817350 - DNA, 75 bp, synthetic construct
  source 1..75: mol_type = other DNA
cgccggagaatcttgatgtcctttccggggtgtttggcccggaactgcaacagcgtattggcatgcccgattcaa

SEQ ID NO: 817351 - DNA, 75 bp, synthetic construct
  source 1..75: mol_type = other DNA
atccggttaaacaggagtttgtaaaagaggctgccgccaatgcgcctgctttgctggaacctggtcgtgaaaagg

SEQ ID NO: 817352 - DNA, 75 bp, synthetic construct
  source 1..75: mol_type = other DNA
atgttattcaacaacaacgactggaaactgtcagtcaccgacatcaatccctacgaaaatactgtgagtctggac

SEQ ID NO: 817353 - DNA, 75 bp, synthetic construct
  source 1..75: mol_type = other DNA
ttgccaccgtcctgagcggaatctctctcacggcttatgccgcgcaaccgatgagtaacctggacagcggtcagc

SEQ ID NO: 817354 - DNA, 75 bp, synthetic construct
  source 1..75: mol_type = other DNA
cgcaagaacaaggcgcgaagggctatgtcattaactcagcaggcgggaaagaccagatgttcggtaccgcaacta

SEQ ID NO: 817355 - DNA, 75 bp, synthetic construct
  source 1..75: mol_type = other DNA
atagcgaaggttacttctttgatgaagcttcctccagcaatggcgaactggtgtttaaacgctacgagcagcgtt

SEQ ID NO: 817356 - DNA, 75 bp, synthetic construct
  source 1..75: mol_type = other DNA
gagattgctaactttcgcggtcatgctgctggttacagggctgctattgaggcagcaccacaactggaggttaac

SEQ ID NO: 817357 - DNA, 75 bp, synthetic construct
  source 1..75: mol_type = other DNA
ggcacgcgataaaaccctgggcctcgcaacactgtgtattggtggcggtcaggggattgcgatggtgatcgaacg

SEQ ID NO: 817358 - DNA, 75 bp, synthetic construct
  source 1..75: mol_type = other DNA
caacaggaagggtacgtacttatcggccttgatctcacatacagcgatggctccaccgcacataaacccgttacg

SEQ ID NO: 817359 - DNA, 75 bp, synthetic construct
  source 1..75: mol_type = other DNA
atgttattcaacaacaacgaatggaaactgtcagtcaccgacatcgacctttacgcaaatacttgcaagctggac

SEQ ID NO: 817360 - DNA, 75 bp, synthetic construct
  source 1..75: mol_type = other DNA
tccgcagtgctacccattccgctggtcgctcccgtgccgctattgtcgctgaccttgagtcaggcggtaactgga

SEQ ID NO: 817361 - DNA, 75 bp, synthetic construct
  source 1..75: mol_type = other DNA
agaacaagcgagtcgaagccgagcgtatcgctaaagagcagcgcattcaggcggaccgtatgcgtgaagagaaca

SEQ ID NO: 817362 - DNA, 75 bp, synthetic construct
  source 1..75: mol_type = other DNA
ctccaccgcgcataaacctgtaacagaatacggcagtgcgcaccctgatgatcaaaccgtgctggcgatacccgt

SEQ ID NO: 817363 - DNA, 75 bp, synthetic construct
  source 1..75: mol_type = other DNA
atgagctggcaggagaaaatcaacgcggcgctcgatgcgcggcgtactaccgatgccctgcgtcgccgttatccg

SEQ ID NO: 817364 - DNA, 75 bp, synthetic construct
  source 1..75: mol_type = other DNA
gaattaaagctatggaactttgccgtccgttgccgtggattgacgatgacaaaccccgtctgggtgatttccgtc

SEQ ID NO: 817365 - DNA, 75 bp, synthetic construct
  source 1..75: mol_type = other DNA
ttatggcgcttgcgccagcgtgctcatgagcgtgatgaagcgcgagatttgctgcatagccacggtactggaaaa

SEQ ID NO: 817366 - DNA, 75 bp, synthetic construct
  source 1..75: mol_type = other DNA
taggagaacatcgaggcaagaagcgcgtctggctggaaggccaaaagctactgcgtgaaggttactatcctggca

SEQ ID NO: 817367 - DNA, 75 bp, synthetic construct
  source 1..75: mol_type = other DNA
atggttatttttattaatttcatttattcttttgtgctcattattttcaggaggttgctgccttttctcaggaat

SEQ ID NO: 817368 - DNA, 75 bp, synthetic construct
  source 1..75: mol_type = other DNA
tccgggcatgtcagcggttatagcgtggcgcatcaggcgctggaagaagaactggccgagtggctgggctattca

SEQ ID NO: 817369 - DNA, 75 bp, synthetic construct
  source 1..75: mol_type = other DNA
gctgtggatgctggtgatcgggatgcggcaatgcgtctttacgggcagttgtcagagggtaatccgctgaggctg

SEQ ID NO: 817370 - DNA, 75 bp, synthetic construct
  source 1..75: mol_type = other DNA
caatattacgcctcgatgggactgccgcagtatcagcagaaaattcagcagcaaaaaattcaacaagtgattacc

SEQ ID NO: 817371 - DNA, 75 bp, synthetic construct
  source 1..75: mol_type = other DNA
gacagggcgatcgcttcactcaataccccggaaagtcttgatgcgctttctggtgtgtttgccccggaactgcaa

SEQ ID NO: 817372 - DNA, 75 bp, synthetic construct
  source 1..75: mol_type = other DNA
aaacctcgcctgggggattttcgtcgccagcttatcggtcaggtaaaggagacgctgcaaaagggcaaaacgacc

SEQ ID NO: 817373 - DNA, 75 bp, synthetic construct
  source 1..75: mol_type = other DNA
gcaaaaaatctttgatgacaagccggacagggcgatcgcttcactcaataccccggaaagtcttgatgcgctttc

SEQ ID NO: 817374 - DNA, 75 bp, synthetic construct
  source 1..75: mol_type = other DNA
tgataaggctgttgagcttgtcagggatcgcagtaaattcgcggaaatttcgaaaaatttcggttatttcacgcc

SEQ ID NO: 817375 - DNA, 75 bp, synthetic construct
  source 1..75: mol_type = other DNA
gaacttttccagtaacgattacttaggcttaagccatcatccgcacatcattcgcgcctggcagcagggggcgga

SEQ ID NO: 817376 - DNA, 75 bp, synthetic construct
  source 1..75: mol_type = other DNA
cgaaaaactggcggcactcattacgcgttttcgtgccggagtgcagggtttgccgtttactcttgcggattcacg

SEQ ID NO: 817377 - DNA, 75 bp, synthetic construct
  source 1..75: mol_type = other DNA
ttggtaaaggatttggtgtcagcggtgcggcggtgctttgctctgaaactgtggcggattatctgctgcaatttg

SEQ ID NO: 817378 - DNA, 75 bp, synthetic construct
  source 1..75: mol_type = other DNA
gtggcgcaaggggccggacgctggctggtggcggatgaatgccagtatctgaacttttccagtaacgattattta

SEQ ID NO: 817379 - DNA, 75 bp, synthetic construct
  source 1..75: mol_type = other DNA
ggggcagcaactggtggtgacagaaggcgtgttcagcatggacggcgatagtgcgccactggcggaaatccagca

SEQ ID NO: 817380 - DNA, 75 bp, synthetic construct
  source 1..75: mol_type = other DNA
tggcgcatcaggcgctggaagaagaactggccgagtggctgggctattcgcgggcattgctgtttatctccggtt

SEQ ID NO: 817381 - DNA, 75 bp, synthetic construct
  source 1..75: mol_type = other DNA
gcctctggatggcggagatgtcattgcgttgacgctcgacggtattggtatgggggagaacggcgctttgtgggg

SEQ ID NO: 817382 - DNA, 75 bp, synthetic construct
  source 1..75: mol_type = other DNA
cggtacacacggcaaaaccaccacggcgggaatggcgacctggattctggaacaatgcggttacaaaccgggatt

SEQ ID NO: 817383 - DNA, 75 bp, synthetic construct
  source 1..75: mol_type = other DNA
ttaaacttcgtgatgaagaaacaggaagaagattaagacttactaaatctgaaaccaggaagttcagaaacggtt

SEQ ID NO: 817384 - DNA, 75 bp, synthetic construct
  source 1..75: mol_type = other DNA
cgcattatcttgctgattttacgttgctcttcccgcagagtttaccggcgggcgatggtggattgtctctggggc

SEQ ID NO: 817385 - DNA, 75 bp, synthetic construct
  source 1..75: mol_type = other DNA
ttgcctgcgaacccgctccagcatttgctgttacaggaactgcaatgcccgctggtgatgacctccggcaacctg

SEQ ID NO: 817386 - DNA, 75 bp, synthetic construct
  source 1..75: mol_type = other DNA
tgacccgctcgatcgtcgcttccacgcccagccggtggcctgcccggagtgtggcccccatcttgaatgggtaag

SEQ ID NO: 817387 - DNA, 75 bp, synthetic construct
  source 1..75: mol_type = other DNA
aaaatcaggcacttagtttagctgagaaaagtgtcaaaaacctctatgaaaaatatgaacacaaattagaggtaa

SEQ ID NO: 817388 - DNA, 75 bp, synthetic construct
  source 1..75: mol_type = other DNA
tgatggcgatcgggtggagatttatcgccctctcattgccgatccgaaagagcttcgcaggcaacgagcagaaaa

SEQ ID NO: 817389 - DNA, 75 bp, synthetic construct
  source 1..75: mol_type = other DNA
catgaaatgatgaaagcgtctgatcccattggcaaagataacgatagccacttgatacgtcttgttagcggtgcc

SEQ ID NO: 817390 - DNA, 75 bp, synthetic construct
  source 1..75: mol_type = other DNA
catcgactttttatgcctttgcggcatcgtgcaatgcgtgtcggatgcggcgtgaacgccttatccgacctacgg

SEQ ID NO: 817391 - DNA, 75 bp, synthetic construct
  source 1..75: mol_type = other DNA
caacattggataaatttagccgccgctcgctgccaggaagcaggcgcgatgaatgacataatggtattggttaaa

SEQ ID NO: 817392 - DNA, 75 bp, synthetic construct
  source 1..75: mol_type = other DNA
taaacgaaatccttcaaagccgtattggattccaggttacatggcttgtattgcctgatggtaacagggtcgatt

SEQ ID NO: 817393 - DNA, 75 bp, synthetic construct
  source 1..75: mol_type = other DNA
gaatcagaacaggatgctcagctcaccgagatgcgcgcccgagtaaaaaatttcaacaaactctttgaagagtta

SEQ ID NO: 817394 - DNA, 75 bp, synthetic construct
  source 1..75: mol_type = other DNA
cactaaaaatctgcgtcatcacgtagaaaatgccgatctgttgatcgttgccgttggcaagccaggctttattcc

SEQ ID NO: 817395 - DNA, 75 bp, synthetic construct
  source 1..75: mol_type = other DNA
aagaagtcgggttcgtctcccgctcctatgacctcccggaaaccaccagcgaagcagaactgcttgagcttatcg

SEQ ID NO: 817396 - DNA, 75 bp, synthetic construct
  source 1..75: mol_type = other DNA
cgcaggttgaacatttgatgaacatcattttgcggatgtcgaacgataaaatagcaaaggtagttgctaccacgg

SEQ ID NO: 817397 - DNA, 75 bp, synthetic construct
  source 1..75: mol_type = other DNA
aagtgctggaacgtattcacccggacaaagacgtagacggtttccatccttataacgtcggtcgcctgtgccagc

SEQ ID NO: 817398 - DNA, 75 bp, synthetic construct
  source 1..75: mol_type = other DNA
gctgaatgccgacaacaccattgatggcattctggttcaactgccgttaccggcgggtattgataacgtcaaagt

SEQ ID NO: 817399 - DNA, 75 bp, synthetic construct
  source 1..75: mol_type = other DNA
atacgctgaatgccgacaacaccatcgatggcattctggttcaactgccgttaccggcggggattgataaagtca

SEQ ID NO: 817400 - DNA, 75 bp, synthetic construct
  source 1..75: mol_type = other DNA
ttgctctacagcagattcaaccagaatcttggcaagctatctgggatgccgaaatcgcgccccaaatggaggctt

SEQ ID NO: 817401 - DNA, 75 bp, synthetic construct
  source 1..75: mol_type = other DNA
cgttacgtccgaaacgcagcctgtggcgtaaaatggtgatgggcggcttggctctgtttggcgcaagcgttgtcg

SEQ ID NO: 817402 - DNA, 75 bp, synthetic construct
  source 1..75: mol_type = other DNA
ggtccagccagttttagatgcccaggcgcggcgcgaaatcagccgttcggcggcggaatcaacgttgatgattgc

SEQ ID NO: 817403 - DNA, 75 bp, synthetic construct
  source 1..75: mol_type = other DNA
tcctgtttatagttcctgtgtaaatatggggattcaactacaggattactggtctaacgtcctcggcaacaacaa

SEQ ID NO: 817404 - DNA, 75 bp, synthetic construct
  source 1..75: mol_type = other DNA
atcgacgccctctggcaagaggtccgtcaggcgataacgcaactgaacgccgcttcgccgctgccggtcaggcgg

SEQ ID NO: 817405 - DNA, 75 bp, synthetic construct
  source 1..75: mol_type = other DNA
aattcgtgacggcaaaacagatctccccacagggcaatgtcgatttcgatatcgacgccctctggcaggaggtcc

SEQ ID NO: 817406 - DNA, 75 bp, synthetic construct
  source 1..75: mol_type = other DNA
ggtttacgggactgaagcggggctaccgtctggcagagctggttatgatgcatgagctgctggcccggatgcggt

SEQ ID NO: 817407 - DNA, 75 bp, synthetic construct
  source 1..75: mol_type = other DNA
ataacgcgacggtgattaaagtccaactgagcgatggtcgtaagttcgacgcgaagatggttggcaaagatccgc

SEQ ID NO: 817408 - DNA, 75 bp, synthetic construct
  source 1..75: mol_type = other DNA
tttaagtcggttaaaccaaagaaactgaatgctgagattattaagccggttttcctcgatgagaaaaacggcaag

SEQ ID NO: 817409 - DNA, 75 bp, synthetic construct
  source 1..75: mol_type = other DNA
aaacgcttgattaccaaagcccgttagccactacgcgctatacgctgccagagctgttagacaacacccagcaac

SEQ ID NO: 817410 - DNA, 75 bp, synthetic construct
  source 1..75: mol_type = other DNA
tcccgtcgccattctggcaggcattgtctgtggctgcctcactgcgttaatccaggcattctggcaaggagcgcc

SEQ ID NO: 817411 - DNA, 75 bp, synthetic construct
  source 1..75: mol_type = other DNA
attattcagcgtctgcaaaaatcgaaaaccgccctgtgggcatttggcctgacggatgaggtttttgccgccgca

SEQ ID NO: 817412 - DNA, 75 bp, synthetic construct
  source 1..75: mol_type = other DNA
ttgtttgagcgtttttaccgcaccgaaggttcccgcaaccgtgccagcggcggttccggcctgggactggcgatt

SEQ ID NO: 817413 - DNA, 75 bp, synthetic construct
  source 1..75: mol_type = other DNA
actggatacacaaccgacgctggatgaacaggccaaacgtgacaagctggcaaacggctgttattcgcttgcaaa

SEQ ID NO: 817414 - DNA, 75 bp, synthetic construct
  source 1..75: mol_type = other DNA
ggcttttgccaacgttttctgtttatctcttcgctggcggcgcgccatcctgaactctcctggtatgcaaactcc

SEQ ID NO: 817415 - DNA, 75 bp, synthetic construct
  source 1..75: mol_type = other DNA
gcctcgtaatggtggtggtctctatggtaaacaatctatccgcttaaaagttattgatcctgatcatcgttgtta

SEQ ID NO: 817416 - DNA, 75 bp, synthetic construct
  source 1..75: mol_type = other DNA
aaacagcgttacggtgccccacgcctgacggatgaactgcgtgctcagggttacccctttaacgtaaaaaccgtg

SEQ ID NO: 817417 - DNA, 75 bp, synthetic construct
  source 1..75: mol_type = other DNA
ttaaaaggtggaaaacaggttacgatttggggtaaagacctgaaaaatcatttcgagtctgaaaagctccagcca

SEQ ID NO: 817418 - DNA, 75 bp, synthetic construct
  source 1..75: mol_type = other DNA
aaccgctgtttgactggatgctgcgcggcctgctgccacgacttggtgcgccagatacacaactctctttcctgc

SEQ ID NO: 817419 - DNA, 75 bp, synthetic construct
  source 1..75: mol_type = other DNA
gattagcctggaacacgcattaggtaatgactctaacttattgatagtgttttatgttcagataatgcccgatga

SEQ ID NO: 817420 - DNA, 75 bp, synthetic construct
  source 1..75: mol_type = other DNA
gtcagatctgttccgctttactgtcaaacacagcctgatattcacctgtatggtgggcgtgattaccacgcttca

SEQ ID NO: 817421 - DNA, 75 bp, synthetic construct
  source 1..75: mol_type = other DNA
cgcgcctggacaccgttcctgttcctgaccgccaccgtaacgctgtggagtattccaccgtttaaagccctgttc

SEQ ID NO: 817422 - DNA, 75 bp, synthetic construct
  source 1..75: mol_type = other DNA
ctggttctctgccaccggcaccgccatcctgtttgctgcgctgctctcggttgtctggctgaagatgaaaccgtc

SEQ ID NO: 817423 - DNA, 75 bp, synthetic construct
  source 1..75: mol_type = other DNA
attctgtttgcggcgctgctctctgtcgtgtggctgaagatgaaaccgtctgatgctatcagcaccttcggcagt

SEQ ID NO: 817424 - DNA, 75 bp, synthetic construct
  source 1..75: mol_type = other DNA
tgctctgtctgacactgttcctcaaacgctggcaaccagttcgcgtattccgcttcggtgacttaggggcgtcac

SEQ ID NO: 817425 - DNA, 75 bp, synthetic construct
  source 1..75: mol_type = other DNA
cggcggtaggcctggtaggcaaagagtcagatctgttccgctttactgtcaaacacagcctgatcttcacctgta

SEQ ID NO: 817426 - DNA, 75 bp, synthetic construct
  source 1..75: mol_type = other DNA
cagtgatccccacagaccgctgtttggtagcaacttgtggcactacatcgattatcccatcgagcgggcgatccc

SEQ ID NO: 817427 - DNA, 75 bp, synthetic construct
  source 1..75: mol_type = other DNA
tcgatcaaaaagtacgggcggcatggatgtactacattgccggacttaatcagagtgaaatcgcaagtcagttag

SEQ ID NO: 817428 - DNA, 75 bp, synthetic construct
  source 1..75: mol_type = other DNA
ctgatctgaataaaaaattgtcggtgctgattccttctgaagatgaaaaaaaacaccgcgatgagcagtttgcgg

SEQ ID NO: 817429 - DNA, 75 bp, synthetic construct
  source 1..75: mol_type = other DNA
ggtaaagtgtggtacgacaccccaaccgatgattataacggtctgcaacttgcagcccatctgacctggaaattc

SEQ ID NO: 817430 - DNA, 75 bp, synthetic construct
  source 1..75: mol_type = other DNA
tcctgatatctatgaagcatgtgataaagcgactagttgtattgattacgacttggattttattagagtcaatga

SEQ ID NO: 817431 - DNA, 75 bp, synthetic construct
  source 1..75: mol_type = other DNA
aatcgacggggaacatctgacgttacgtgtgcaatggcgcgccgctgacggcgtaatcaactcaacggaggtgtt

SEQ ID NO: 817432 - DNA, 75 bp, synthetic construct
  source 1..75: mol_type = other DNA
aggtggcgcactggccgttggtcaccctggaatctgtcgggaaaggcggtgtgttttcccggctgagtgattatt

SEQ ID NO: 817433 - DNA, 75 bp, synthetic construct
  source 1..75: mol_type = other DNA
aacagtgcatggtctggatgcacctggccagcatagctcggcttatgatttagctgtgctttctcgcgctatcat

SEQ ID NO: 817434 - DNA, 75 bp, synthetic construct
  source 1..75: mol_type = other DNA
ttttgttcagtgtggcgcaaaaagaacgttctcaacaatctgtgggcggctccgctgctggtgctgtatcgcatt

SEQ ID NO: 817435 - DNA, 75 bp, synthetic construct
  source 1..75: mol_type = other DNA
catagctggagaatgccctgagtgccattatccgctactcatcgaaaagaaaaccgcgcaaggtgtaaaacactt

SEQ ID NO: 817436 - DNA, 75 bp, synthetic construct
  source 1..75: mol_type = other DNA
ccgctctcgttatggtaaaacgtttcactcctgcgatcgctacccggagtgtcaatttgctattaacttcaaacc

SEQ ID NO: 817437 - DNA, 75 bp, synthetic construct
  source 1..75: mol_type = other DNA
cattatccactactcatcgaaaagaaaaccgcgcagggtgaaccgccccgggaatcctggagactaaacttcctg

SEQ ID NO: 817438 - DNA, 75 bp, synthetic construct
  source 1..75: mol_type = other DNA
tcacatctataactgggatgagtggtcgcaaaaaaccatcccggtgccgatggtcgtgggccatgaatatgtcgg

SEQ ID NO: 817439 - DNA, 75 bp, synthetic construct
  source 1..75: mol_type = other DNA
gctttccggcagggctggccggaattgttccgcagaacacagctggcctgggggatgttgaaaaggcggaaagga

SEQ ID NO: 817440 - DNA, 75 bp, synthetic construct
  source 1..75: mol_type = other DNA
agcgcaacccgcgcggcgataagtccaaaaaaatgagcatcatcacattcggcaaaccggaacccgtcctgacca

SEQ ID NO: 817441 - DNA, 75 bp, synthetic construct
  source 1..75: mol_type = other DNA
caggctttatggacgaagccatcagcgaaaacgtgctggcggggaacatcatgagccgccgtgcgctctactctt

SEQ ID NO: 817442 - DNA, 75 bp, synthetic construct
  source 1..75: mol_type = other DNA
atctactgtaacgacccaaatatgactgatgaagtggaagaagaaattattcagaagctggagcagtcaaagggg

SEQ ID NO: 817443 - DNA, 75 bp, synthetic construct
  source 1..75: mol_type = other DNA
aatatggtgacggcaaactataaagacggcggactgacgcatgaacagcttggtgcagccgtgttcgactggctg

SEQ ID NO: 817444 - DNA, 75 bp, synthetic construct
  source 1..75: mol_type = other DNA
tgcgtaaacgggcacagacagaaaattttactcccggacgcggcaatattatcacttttggggagccggaaccga

SEQ ID NO: 817445 - DNA, 75 bp, synthetic construct
  source 1..75: mol_type = other DNA
cggaagagggcatctggatgaccgacgttcctgtaccggaactcgggcataacgatctgctgatcaaaatccgta

SEQ ID NO: 817446 - DNA, 75 bp, synthetic construct
  source 1..75: mol_type = other DNA
ttgattcagtctggtctggatctctcgccgattatcactcatcgtttttccatcgatgatttccagaaaggcttt

SEQ ID NO: 817447 - DNA, 75 bp, synthetic construct
  source 1..75: mol_type = other DNA
tccgggctgcttcgccgagtatctggtgattccggcgttcaacgctttcaaaatccctgacaatatctccgatga

SEQ ID NO: 817448 - DNA, 75 bp, synthetic construct
  source 1..75: mol_type = other DNA
tcgtccgcaaaaaccgattgttgccgttatctacactcacagccacgccgaccactacggcggcgtgaaaggtat

SEQ ID NO: 817449 - DNA, 75 bp, synthetic construct
  source 1..75: mol_type = other DNA
gcctgctggatgatgcaatcactcaccgctcagcccatgaccctgaccggccacatccggtgcgcagaccctgat

SEQ ID NO: 817450 - DNA, 75 bp, synthetic construct
  source 1..75: mol_type = other DNA
cgttcgatctggtgggcgaggatgtgctggtctctggtgcaggcccgattggtattatggcggcggcggtggcga

SEQ ID NO: 817451 - DNA, 75 bp, synthetic construct
  source 1..75: mol_type = other DNA
atgacacaaaactatgaactgattgtgaaagggatccgcaattttgagaataaagttgcggtaactttagcgtta

SEQ ID NO: 817452 - DNA, 75 bp, synthetic construct
  source 1..75: mol_type = other DNA
tacgagcagcaaatactcaagaacaagatgtaaactctacaaaaaacgaaaatagcaaagccaataaaacaaaag

SEQ ID NO: 817453 - DNA, 75 bp, synthetic construct
  source 1..75: mol_type = other DNA
aaaaggagagaacggatttgctattgttaccagtgggctggcatcttctggtaatgatgtttatgaaaattatat

SEQ ID NO: 817454 - DNA, 75 bp, synthetic construct
  source 1..75: mol_type = other DNA
gccatctaagaacattggggctaatatgaaaaaacgtgttaacactgaaaaatcaagtagtgaaggtgaagacac

SEQ ID NO: 817455 - DNA, 75 bp, synthetic construct
  source 1..75: mol_type = other DNA
aaatgcggacgtaacaagctatgccgttcaagatggggctatggtgtccgatcacatccagatcaagaacaataa

SEQ ID NO: 817456 - DNA, 75 bp, synthetic construct
  source 1..75: mol_type = other DNA
aaacagcatcggtactggcatttgaacgcaaactggcaacctctgacgcggtgatgtatgcaggtaactggcaag

SEQ ID NO: 817457 - DNA, 75 bp, synthetic construct
  source 1..75: mol_type = other DNA
aaatgcagacgttacaagctatgccgtcgaatcaggatcagaagttagtgatcatgttcaaatacggaataacaa

SEQ ID NO: 817458 - DNA, 75 bp, synthetic construct
  source 1..75: mol_type = other DNA
ttaccggtgttccggcagacaaaatcgtcaaactggcacgtgagatcggcagtactaaacccgcgtttatcagtc

SEQ ID NO: 817459 - DNA, 75 bp, synthetic construct
  source 1..75: mol_type = other DNA
attgcgttggctacgacgagaaaaccctgccagccagtgcgccgaaaaatggtcactataaagcttatattctgg

SEQ ID NO: 817460 - DNA, 75 bp, synthetic construct
  source 1..75: mol_type = other DNA
agtggatccccattcgtccgggaacagatgccgcactggttaatggtctggcgtacgtcatgatcagcgaaaatc

SEQ ID NO: 817461 - DNA, 75 bp, synthetic construct
  source 1..75: mol_type = other DNA
attagacaaacttcgaaataatgagaagttaaagggtaagtttgacgagatttggtttttcgtcctcacggctga

SEQ ID NO: 817462 - DNA, 75 bp, synthetic construct
  source 1..75: mol_type = other DNA
ggagagcagtttgaggatatgaataggatatcccaaaactaccctggtctcgactatgtgcaaccgggaaagcgc

SEQ ID NO: 817463 - DNA, 75 bp, synthetic construct
  source 1..75: mol_type = other DNA
ctaactatgaccgactgggttcgttccggtagtgcgcctgctggctttggcctgggtgatgaagccgaactgaaa

SEQ ID NO: 817464 - DNA, 75 bp, synthetic construct
  source 1..75: mol_type = other DNA
atatgcttaaaacggcgggtattaacggcaatcgtagaatgcttatgcttgaatacctttatcagatcatggact

SEQ ID NO: 817465 - DNA, 75 bp, synthetic construct
  source 1..75: mol_type = other DNA
aacggattggttattcagccagcagcctggccgggcagccgtataaaggccgcaacggtcgtgtggaaggtaccc

SEQ ID NO: 817466 - DNA, 75 bp, synthetic construct
  source 1..75: mol_type = other DNA
atgtgcatcagtctgctccgggacgtgccacgaccgtgctgaccgatgccggaaatccgtcactgcgggcggagc

SEQ ID NO: 817467 - DNA, 75 bp, synthetic construct
  source 1..75: mol_type = other DNA
aaaagacaatatacattttattggtagggtggaacaaagtgaaatacctaatttaattgcaaatgttaaagtatg

SEQ ID NO: 817468 - DNA, 75 bp, synthetic construct
  source 1..75: mol_type = other DNA
tgttctggtttatgaggtcgatagccagtggggtaaagtgtatattctgcgcgtgttgcatacagcacagaaatg

SEQ ID NO: 817469 - DNA, 75 bp, synthetic construct
  source 1..75: mol_type = other DNA
atgaccgtccatttcatccgcagcggctgtgggatacctgccatcgcttcatgggcgcaggcgtttaccgcagca

SEQ ID NO: 817470 - DNA, 75 bp, synthetic construct
  source 1..75: mol_type = other DNA
gcattcgtgagtacattgcggagcagaacctgatagccgccattgaactggacgaacggattggttattcagcca

SEQ ID NO: 817471 - DNA, 75 bp, synthetic construct
  source 1..75: mol_type = other DNA
gcggcaccggcactcagatcaacggtaacgacgccaccgcgaataacagtggaaaaaccactgttgatggaaaag

SEQ ID NO: 817472 - DNA, 75 bp, synthetic construct
  source 1..75: mol_type = other DNA
acagccatctaagaacattggggctaatatgaaaaaacgtgttaacactgaaaaatcaagtagtgaaggtgaaga

SEQ ID NO: 817473 - DNA, 75 bp, synthetic construct
  source 1..75: mol_type = other DNA
gcaatgacgtttatgaaaattatatggcactggcctttgacagtgttgacgatgtgaacgtgagacgttcggcag

SEQ ID NO: 817474 - DNA, 75 bp, synthetic construct
  source 1..75: mol_type = other DNA
tgttgatagcaaagcgttaatgagctgccgttctcttcgagtgtaccgtgacaataaatccgtcacttttgccga

SEQ ID NO: 817475 - DNA, 75 bp, synthetic construct
  source 1..75: mol_type = other DNA
gttctggttgataaggataaaaccgcagacaatgcggcggaatatttcttcgatccatccgtgggtatcaacgtt

SEQ ID NO: 817476 - DNA, 75 bp, synthetic construct
  source 1..75: mol_type = other DNA
gggggcaacagtatccaatacgggtgatgttaacgttagcaatgaagcgacagggttcagcatcacaaccaacag

SEQ ID NO: 817477 - DNA, 75 bp, synthetic construct
  source 1..75: mol_type = other DNA
gaagcgattcgcaacgaccggatgccggacagcaccctgaaaggttccgctaatattctggtgatgccgaatatg

SEQ ID NO: 817478 - DNA, 75 bp, synthetic construct
  source 1..75: mol_type = other DNA
agtgctgacacaggagatggtgaagaaaatggctcgcgcgccgatgatcctggcgctggcaaatccggaaccgga

SEQ ID NO: 817479 - DNA, 75 bp, synthetic construct
  source 1..75: mol_type = other DNA
ctcaggaactggtaacgctgggactggcgaaaccgatccttattggtcgtccgaacgtgatcgaaatgcgcattc

SEQ ID NO: 817480 - DNA, 75 bp, synthetic construct
  source 1..75: mol_type = other DNA
gacagacagggacgaatgttgttttcccgctacctttccccgcgcgggtcgaatcaattacactgacaatggcag

SEQ ID NO: 817481 - DNA, 75 bp, synthetic construct
  source 1..75: mol_type = other DNA
tgctgtagtactggcaactcgcaagtatgtggatgataagacactggagctgaaggtgtatgtggatgaccaaat

SEQ ID NO: 817482 - DNA, 75 bp, synthetic construct
  source 1..75: mol_type = other DNA
taatattctggtgatgccgaatatggaagctgcccgcattagttacaacttactacgcgtttccagctcagaagg

SEQ ID NO: 817483 - DNA, 75 bp, synthetic construct
  source 1..75: mol_type = other DNA
tatttggaagtatgagcccgtgaagtctgtcggatggaacccactcacgcgggtattacccataaattttgatca

SEQ ID NO: 817484 - DNA, 75 bp, synthetic construct
  source 1..75: mol_type = other DNA
cctgatttacgcggtgaatttattcgtggctgggatgacggtcgcgggattgattctggtcgtactttgcttaat

SEQ ID NO: 817485 - DNA, 75 bp, synthetic construct
  source 1..75: mol_type = other DNA
ctttttacggaggtacctcagtccggaataacatcaatgtatctatgacatacgctaatgaccgaaaaatccgac

SEQ ID NO: 817486 - DNA, 75 bp, synthetic construct
  source 1..75: mol_type = other DNA
tggcattggcgaatcctgaaccagaaattctgccgccgctggcaaaagaagtccgaccggatgccatcatctgta

SEQ ID NO: 817487 - DNA, 75 bp, synthetic construct
  source 1..75: mol_type = other DNA
cggacagccctttgaaaggttctgccaatattctggtgatgccgaacatggaagctgcccgcattagttacaact

SEQ ID NO: 817488 - DNA, 75 bp, synthetic construct
  source 1..75: mol_type = other DNA
tcatgccatcaaggcgacaatgccagcaaataataatggctataaccttaccgttacgttcccgactgcctacga

SEQ ID NO: 817489 - DNA, 75 bp, synthetic construct
  source 1..75: mol_type = other DNA
aataacatgcagatggagaacgtctccggctttaaatgggataccaaccagtccgtgcgtgacggccagatgctg

SEQ ID NO: 817490 - DNA, 75 bp, synthetic construct
  source 1..75: mol_type = other DNA
aaaccgaacagaacggcaagctggagtggctgatccgtaaagacggttgtatgcactgtgaagatccgggctgcc

SEQ ID NO: 817491 - DNA, 75 bp, synthetic construct
  source 1..75: mol_type = other DNA
tgacaaccaacctggattctcccgtttttcatttgcaggtccttcgcgaggcgatggggttaattttgtgaccat

SEQ ID NO: 817492 - DNA, 75 bp, synthetic construct
  source 1..75: mol_type = other DNA
gacgccggacgcaaagcagactgcactggtaaatgagaaacgccgggctgctctgaatatgctctatatcgaccc

SEQ ID NO: 817493 - DNA, 75 bp, synthetic construct
  source 1..75: mol_type = other DNA
acggaagaattgcttaatgacgaaaagtataaagatataatatacatagttttacctaataataaaggtggtgga

SEQ ID NO: 817494 - DNA, 75 bp, synthetic construct
  source 1..75: mol_type = other DNA
agcgtctcaatcaagcttaagcaatattgctgcattaggttatgaatccggaaaccgtgtaatctggggatgctc

SEQ ID NO: 817495 - DNA, 75 bp, synthetic construct
  source 1..75: mol_type = other DNA
atggcgagaagatactgagttaagctgggagcaatttccagagcaggtatttagcacttcacctaatgaaattaa

SEQ ID NO: 817496 - DNA, 75 bp, synthetic construct
  source 1..75: mol_type = other DNA
taactcatgcgagtgggtaagcaatacaggatttaccgctcaggtcatgatgaatattgctgtaaatacaaacac

SEQ ID NO: 817497 - DNA, 75 bp, synthetic construct
  source 1..75: mol_type = other DNA
gcagtgtttacccaaaagtgattggccttgatgcttcaagaattgttccaactgcaaacgaaaatcgaccccgta

SEQ ID NO: 817498 - DNA, 75 bp, synthetic construct
  source 1..75: mol_type = other DNA
agttagtgattatcgtacaaaagaaataccagcatcagaagttatgggaagaggatatattgcaagcctgacgcc

SEQ ID NO: 817499 - DNA, 75 bp, synthetic construct
  source 1..75: mol_type = other DNA
cgctgactaatttgagtggaaaggatgtagctggtcttctcacataccttggtttgggagaattatctctggctg

SEQ ID NO: 817500 - DNA, 75 bp, synthetic construct
  source 1..75: mol_type = other DNA
ctggatacactgaacgaactggctgcggcgctggggaatgacccgaactttgccacgacaatgcttaatgcactg

SEQ ID NO: 817501 - DNA, 75 bp, synthetic construct
  source 1..75: mol_type = other DNA
tgtggctggtcttctcgcataccttggtttgggagaagcggcaaaacggaatgtggggacaggggaaaatcagat

SEQ ID NO: 817502 - DNA, 75 bp, synthetic construct
  source 1..75: mol_type = other DNA
ggtggaagtgctttgcccgcttttcaaaacccaggcggtactgaaacgcgtccccgtaacatcgcattcaacttt

SEQ ID NO: 817503 - DNA, 75 bp, synthetic construct
  source 1..75: mol_type = other DNA
tgggatcaccattaacgtcgtccagccaggccaattgataccgacgctaatcccgccaacgggccaatgcgcgat

SEQ ID NO: 817504 - DNA, 75 bp, synthetic construct
  source 1..75: mol_type = other DNA
tctgccctgcaaggcatggcgcgcgggctggcccgtgattttggaccgcgagggatcaccattaacgtcgtccag

SEQ ID NO: 817505 - DNA, 75 bp, synthetic construct
  source 1..75: mol_type = other DNA
acatcgccatgccgacacagaagacaccgtgctggaaattcagcggctggctgccgtctgccgcgacaccctgaa

SEQ ID NO: 817506 - DNA, 75 bp, synthetic construct
  source 1..75: mol_type = other DNA
atgctggaagatctgcgcgccaacagctggagtttacgcccgtgctgcatggtacttgcctatcgcgtcgctcat

SEQ ID NO: 817507 - DNA, 75 bp, synthetic construct
  source 1..75: mol_type = other DNA
aaggcagatgagccatatggaacgcaattcggtgagggcggcgtatatccataaagcggaacatctggatgagcg

SEQ ID NO: 817508 - DNA, 75 bp, synthetic construct
  source 1..75: mol_type = other DNA
gaaagttaaaacagttttgtaatgcatgttacataataaatcaaggagtccttataggcgcttttacaggtaaga

SEQ ID NO: 817509 - DNA, 75 bp, synthetic construct
  source 1..75: mol_type = other DNA
gcttcaggatgatattcaggccacagtgttaaacctgctgacttttggggatgtggggttgctcaaattgcgtaa

SEQ ID NO: 817510 - DNA, 75 bp, synthetic construct
  source 1..75: mol_type = other DNA
ggaggcattcaatccgcaatgctgaatagtgacgctaccctgtttcgccgcaaatactaccgcaacggcgcgcat

SEQ ID NO: 817511 - DNA, 75 bp, synthetic construct
  source 1..75: mol_type = other DNA
ctactgacggcaaaacaaagttattattgcgcgacggcgaatataaagaatatgcaccacaagacattattttta

SEQ ID NO: 817512 - DNA, 75 bp, synthetic construct
  source 1..75: mol_type = other DNA
cgaggcggaattccgtaaaaagatagaggcgtcaaaaggggcgggcaattttaaatccatgtttatcaatatacc

SEQ ID NO: 817513 - DNA, 75 bp, synthetic construct
  source 1..75: mol_type = other DNA
gaggcgtcaaaaggggcgggcaattttaaatccatgtttatcaatataccgggcggagacaaagaaggcgttaag

SEQ ID NO: 817514 - DNA, 75 bp, synthetic construct
  source 1..75: mol_type = other DNA
aaccatcagtgcccaggatcagctcgttgcgcaccgtttcccacccggacttgccggcatcattcccgcaaatac

SEQ ID NO: 817515 - DNA, 75 bp, synthetic construct
  source 1..75: mol_type = other DNA
atgctggaagatctgcgcgccaatagctggagtctccgcccgtgctgcatggttctcgcctatcgcgttgcccat

SEQ ID NO: 817516 - DNA, 75 bp, synthetic construct
  source 1..75: mol_type = other DNA
aaacaaaactgattaaccagaaacgcattgcaccgctgaatcttctgagtgttgaccctaacaatcagagccaga

SEQ ID NO: 817517 - DNA, 75 bp, synthetic construct
  source 1..75: mol_type = other DNA
tactggctacatacggtgacgggggaatagttaaaacggatgaacccggtcttaaggtgccttcctcactacgag

SEQ ID NO: 817518 - DNA, 75 bp, synthetic construct
  source 1..75: mol_type = other DNA
gattatgttcctgcatcagcagataactccataacgggtactcaaaggacagcggaggataattttaccggggca

SEQ ID NO: 817519 - DNA, 75 bp, synthetic construct
  source 1..75: mol_type = other DNA
aacaaactgaacagcgtggctgattcactggcaaaacgtgccggtatcagtacgtctgaagcggttacggaggta

SEQ ID NO: 817520 - DNA, 75 bp, synthetic construct
  source 1..75: mol_type = other DNA
cgctgactaatttgagtggaaaggatgtagctggtcttctcgcataccttggtttgggagaaggttcggcattac

SEQ ID NO: 817521 - DNA, 75 bp, synthetic construct
  source 1..75: mol_type = other DNA
acacgctgaacgaactggctgcggcgctgggcaatgacccgaattttgcgaccaccatgactaacgcgcttgcgg

SEQ ID NO: 817522 - DNA, 75 bp, synthetic construct
  source 1..75: mol_type = other DNA
accgaacttttacaggaagatattttactcgtaggcccaaaaaagttaagaaaaaaaataaagctcaagaaaggc

SEQ ID NO: 817523 - DNA, 75 bp, synthetic construct
  source 1..75: mol_type = other DNA
gaactgaaaaaagtcattgctgacatctatcccggtcagacacaattttatgtgattgaatttaaatgtctttaa

SEQ ID NO: 817524 - DNA, 75 bp, synthetic construct
  source 1..75: mol_type = other DNA
atgaccctgactgatctgaaaaaggtcattgccgatatctatcccggccagacacagttttatgtgattgaattt

SEQ ID NO: 817525 - DNA, 75 bp, synthetic construct
  source 1..75: mol_type = other DNA
ctggaactaaaagcgtcactgtcaagtccggcacttaccgggacgccaacagcgccgactgcggcacagtcggtc

SEQ ID NO: 817526 - DNA, 75 bp, synthetic construct
  source 1..75: mol_type = other DNA
tcaacgcgggtatttacaaccctcaagggattggcggcacccacgtgatgtatgtacttcatcacgcggatcaac

SEQ ID NO: 817527 - DNA, 75 bp, synthetic construct
  source 1..75: mol_type = other DNA
atggctatgcaatcacaagatattattcaacgctctgcgacgaacaaaatcactccgccgcctcagacacgggat

SEQ ID NO: 817528 - DNA, 75 bp, synthetic construct
  source 1..75: mol_type = other DNA
cgggttacattatccgatctatggaaaatatcgacccggctctggcggacaaagccgtgggttatttgcgcgcat

SEQ ID NO: 817529 - DNA, 75 bp, synthetic construct
  source 1..75: mol_type = other DNA
tctgctggctgagcctgaccagctcgacccgcagtttgccgaactggtgggcaacgggcgcttcaagaaggtctc

SEQ ID NO: 817530 - DNA, 75 bp, synthetic construct
  source 1..75: mol_type = other DNA
gaagcagctaaggccgatggcgacacatctttagccacttggattaaacgcgttctccgcaaagaattacagcaa

SEQ ID NO: 817531 - DNA, 75 bp, synthetic construct
  source 1..75: mol_type = other DNA
gtgcgaacgccggctcgaaaggggaccgcggtgcgtctgcatcggccagttatgcgtttgatgccattcagacca

SEQ ID NO: 817532 - DNA, 75 bp, synthetic construct
  source 1..75: mol_type = other DNA
ccggtggcgacaagccggtagagtttgctgagggggaaagccgcacgccgctggccaccgccttccgttcattgc

SEQ ID NO: 817533 - DNA, 75 bp, synthetic construct
  source 1..75: mol_type = other DNA
gaatggcagctcaacagtctgcgcgaagaggcgtaccgcgacacactgtcgcaggatgcagcaggtgcacaattc

SEQ ID NO: 817534 - DNA, 75 bp, synthetic construct
  source 1..75: mol_type = other DNA
gatggtagagaaaaaagtgaaccgattagtacaagtgagctcagcttgtatatgtctcgtggttatgaaggtgat

SEQ ID NO: 817535 - DNA, 75 bp, synthetic construct
  source 1..75: mol_type = other DNA
atggacagatacgacattgattttgaaattgttggtaaagccgcctggctttggggatgttcttcacttcataaa

SEQ ID NO: 817536 - DNA, 75 bp, synthetic construct
  source 1..75: mol_type = other DNA
gtcgccatcaggtgcctggaattcagataaagatgaagagaatatgcaacgtctgagggatgctgcaaagtggaa

SEQ ID NO: 817537 - DNA, 75 bp, synthetic construct
  source 1..75: mol_type = other DNA
gaaattccgtgcggttggccagggttatgctggtggactggcttccgtgtgcgctcagtacggcatcaacgcgtc

SEQ ID NO: 817538 - DNA, 75 bp, synthetic construct
  source 1..75: mol_type = other DNA
taagatgcgggataacgttaacgctcttgattttgttccgtttgagcaaagatatgctgcattaaattttgaagt

SEQ ID NO: 817539 - DNA, 75 bp, synthetic construct
  source 1..75: mol_type = other DNA
acctgacgatgctgatccagcaatgttttgggtggttcagacgtgcattgatgaaaccatctttgcttgcaaaat

SEQ ID NO: 817540 - DNA, 75 bp, synthetic construct
  source 1..75: mol_type = other DNA
agcgtgaatactggggacggaaaacagtgccgtttctccatggcaggactgaaagcaaacactaacaaagttcag

SEQ ID NO: 817541 - DNA, 75 bp, synthetic construct
  source 1..75: mol_type = other DNA
agcaggacgcaaatccagcaattacaagctgaaagaaccttttgcagacggtgagtcaggaatgttctggatggg

SEQ ID NO: 817542 - DNA, 75 bp, synthetic construct
  source 1..75: mol_type = other DNA
actttgtcgctgagcacttcagcttttgattctgtatctgtgttcctgaacggttcatataaccgctacgcaaat

SEQ ID NO: 817543 - DNA, 75 bp, synthetic construct
  source 1..75: mol_type = other DNA
ggtattgtcagtattccgggtattgagggggtttctgttaacggctccatgccgacgaacagcgacggtaacacg

SEQ ID NO: 817544 - DNA, 75 bp, synthetic construct
  source 1..75: mol_type = other DNA
tacgccaaaagcttctcagacaaaacggacctgcagttactgacgtaccgttaccagagtaaagggtatgtggag

SEQ ID NO: 817545 - DNA, 75 bp, synthetic construct
  source 1..75: mol_type = other DNA
gcgtattctgttgacgtgactgttaatggtgaacgcgctgggcggacaaatatctttatcagtaatgaagaggaa

SEQ ID NO: 817546 - DNA, 75 bp, synthetic construct
  source 1..75: mol_type = other DNA
aacagcagtgtgggatataaccgttacggcggaacaacatttaactccggactttctgcaagcgtgacagatcgt

SEQ ID NO: 817547 - DNA, 75 bp, synthetic construct
  source 1..75: mol_type = other DNA
gggatgagcgcctccttcaagtacgccaagacgctgggcgagcgcacggagctgcagctgctgacctaccgctac

SEQ ID NO: 817548 - DNA, 75 bp, synthetic construct
  source 1..75: mol_type = other DNA
ctgaatggctggataacgccggggtgatgatgaaacaggacgcttatgatgatgtctttgacaaggaaaaacagt

SEQ ID NO: 817549 - DNA, 75 bp, synthetic construct
  source 1..75: mol_type = other DNA
aacggactccgccctgcctgcgggtcagtacgttgttgatgtactcgtcaacaatgaacgaaccgggcgtgcaaa

SEQ ID NO: 817550 - DNA, 75 bp, synthetic construct
  source 1..75: mol_type = other DNA
gttcggttttgaaaacgtacaacgttacattctgcgtataagaggaccagaagggaattatctgaccggtggaga

SEQ ID NO: 817551 - DNA, 75 bp, synthetic construct
  source 1..75: mol_type = other DNA
tttgatctgggcattaacgtaggacgctggatactttccagtaatatgaacgtctctcgttcagataatgaaaca

SEQ ID NO: 817552 - DNA, 75 bp, synthetic construct
  source 1..75: mol_type = other DNA
ctcaggcttatatgctgaagcatacagatccttcgctctgggattatggtgttaatgctggaaggttaaaatatt

SEQ ID NO: 817553 - DNA, 75 bp, synthetic construct
  source 1..75: mol_type = other DNA
aaagtgatgtcagtatattgggttccccttttttttatcagcgctatgttatgtgcaacagcttttggtaaatat

SEQ ID NO: 817554 - DNA, 75 bp, synthetic construct
  source 1..75: mol_type = other DNA
cggctggcagcaccgacgcggttaacggctctcagctgaaaaccactaacgatgccgtggcagccaacaccacca

SEQ ID NO: 817555 - DNA, 75 bp, synthetic construct
  source 1..75: mol_type = other DNA
agtgaagacggtcaacgtcagatcaccaacgtcgcggctggttcggctgataccgatgcggttaacgtgggtcag

SEQ ID NO: 817556 - DNA, 75 bp, synthetic construct
  source 1..75: mol_type = other DNA
tacttccacgccaactcaacggctgaagactcactggctgtcggggaagactcgctggcgatgggcgcgaaaact

SEQ ID NO: 817557 - DNA, 75 bp, synthetic construct
  source 1..75: mol_type = other DNA
cgtacagccactgatgaaagacggcgcggcgctgggttactcgcacggtttcaacatcgtcgaagtgggcgagca

SEQ ID NO: 817558 - DNA, 75 bp, synthetic construct
  source 1..75: mol_type = other DNA
ggaaggggagaaagaggcgatgatgcagcacaggaaggacgtgttaaagctggcagggaatacgggcatgatgtt

SEQ ID NO: 817559 - DNA, 75 bp, synthetic construct
  source 1..75: mol_type = other DNA
accaacgacaacggcttagcgttcaacgatgccagcgcttcaggtattggcgctacggctgtgggttataacgct

SEQ ID NO: 817560 - DNA, 75 bp, synthetic construct
  source 1..75: mol_type = other DNA
cggcttagcgttcaacgatgccagcgcttcaggtattggcgctacggctgtgggttataacgctgtcgcctcagg

SEQ ID NO: 817561 - DNA, 75 bp, synthetic construct
  source 1..75: mol_type = other DNA
tggcaatggtgcatttagcgccgctcacggaaaagataaaacagccagtgtaatcactaacgtcgctaacggtgc

SEQ ID NO: 817562 - DNA, 75 bp, synthetic construct
  source 1..75: mol_type = other DNA
tagcactgacgctattaatggctcacaactttatggcttagctgattcatttacgtcataccttggcggtggtgc

SEQ ID NO: 817563 - DNA, 75 bp, synthetic construct
  source 1..75: mol_type = other DNA
caaaccatgcaaacagcattgctatgggtaatggctcacagacgactcgtggtgctcaaactggctacaccgcct

SEQ ID NO: 817564 - DNA, 75 bp, synthetic construct
  source 1..75: mol_type = other DNA
cagaagtcaacgctgatggttctattactgcgccgacttacaccattgcaaataccgattacaacaacgttggtg

SEQ ID NO: 817565 - DNA, 75 bp, synthetic construct
  source 1..75: mol_type = other DNA
aggcggcgttcgttacgacaccaaagctgatggctctgtagactacagcaacatcactctcggtggtggtaatgg

SEQ ID NO: 817566 - DNA, 75 bp, synthetic construct
  source 1..75: mol_type = other DNA
atgggccgcgatgaattcgccgatggcgcgagctaccttcagggtaaaaaagtagtcatcgtcggctgtggcgca

SEQ ID NO: 817567 - DNA, 75 bp, synthetic construct
  source 1..75: mol_type = other DNA
ctctctccccgatcacccataaccagattcctgttatcactaccgagttactggcacagctttaccgtaccgaga

SEQ ID NO: 817568 - DNA, 75 bp, synthetic construct
  source 1..75: mol_type = other DNA
cgctgggcttcctgctggtgcaaatcatcaacaccatcctcagctatttcgtgatgatcaaaccggtgctggggc

SEQ ID NO: 817569 - DNA, 75 bp, synthetic construct
  source 1..75: mol_type = other DNA
gggcgttgagctggcgttcgaaacgatggtggcttccggcatcatcgaagagtcggcttactacgaatcactgca

SEQ ID NO: 817570 - DNA, 75 bp, synthetic construct
  source 1..75: mol_type = other DNA
acgcaagggcattaatgatctcaaagaacaacttaatcaatggatggagatctttgatcagaatttgaatccagc

SEQ ID NO: 817571 - DNA, 75 bp, synthetic construct
  source 1..75: mol_type = other DNA
aaatagcgaaggagcaaatacatattcttttgatgatattaaagaatggagctacaacatcacacatggtggtga

SEQ ID NO: 817572 - DNA, 75 bp, synthetic construct
  source 1..75: mol_type = other DNA
cggtgcgtattcgccagaatcatcatgagaacaaagtacgcttcgttgaagggaaacactttttcaaagttgttg

SEQ ID NO: 817573 - DNA, 75 bp, synthetic construct
  source 1..75: mol_type = other DNA
agcatgggcggcggcaaccggtggtcatcgtgcgggcgtgctggaatcctctttcgttgcggaagtgaaatctga

SEQ ID NO: 817574 - DNA, 75 bp, synthetic construct
  source 1..75: mol_type = other DNA
cttgtcgttaacctgacgccagacaaacagcactccgacgtagtgcgttctgttcagccgctgatgaaagatggc

SEQ ID NO: 817575 - DNA, 75 bp, synthetic construct
  source 1..75: mol_type = other DNA
gcgcgagctaccttcagggtaaaaaagtagtcatcgtcggctgtggcgcacagggtctgaaccagggcctgaaca

SEQ ID NO: 817576 - DNA, 75 bp, synthetic construct
  source 1..75: mol_type = other DNA
gaaagagatcatggcaccgctgttccagaaacatatggacgacatcatctctggcgaattctcctccggcatgat

SEQ ID NO: 817577 - DNA, 75 bp, synthetic construct
  source 1..75: mol_type = other DNA
tgctgtgcttcgacaagctcgtggaagaaggcaccgatccggcatatgccgaaaaactgattcagttcggttggg

SEQ ID NO: 817578 - DNA, 75 bp, synthetic construct
  source 1..75: mol_type = other DNA
cctgatgggcgagcaaaccatcctgtgcggtatgttgcaggctggctctctgctgtgcttcgacaagctggtgga

SEQ ID NO: 817579 - DNA, 75 bp, synthetic construct
  source 1..75: mol_type = other DNA
tgaggattttcaacgaagcctttggtctgatttttcgtcgttcggaagagtgtctgcacctcattcctacccggg

SEQ ID NO: 817580 - DNA, 75 bp, synthetic construct
  source 1..75: mol_type = other DNA
ctgaaaatccgtggtgttaatgcactgaggattttcaacgaagcctttggtctgatttttcgtcgttcggaagag

SEQ ID NO: 817581 - DNA, 75 bp, synthetic construct
  source 1..75: mol_type = other DNA
aggaaacagcaaaagcgggtgaaagctattacagaatttcccccgatacattccagaaagcgacagatagagtta

SEQ ID NO: 817582 - DNA, 75 bp, synthetic construct
  source 1..75: mol_type = other DNA
gatcagcgacagaggtacgcttatcgcgtacggacgttatccggacacctttttaccagaccagacggattccgt

SEQ ID NO: 817583 - DNA, 75 bp, synthetic construct
  source 1..75: mol_type = other DNA
ccggcgcagcagaaattgaagcagcatatcagaacgggcaaaccgtgaccgtccggcatgttctgcttggtgacg

SEQ ID NO: 817584 - DNA, 75 bp, synthetic construct
  source 1..75: mol_type = other DNA
tttcgggaaaaacaggataaatactgatgctgctcaggcgcttctgcgtcaggatcatgcagacagaaagtattt

SEQ ID NO: 817585 - DNA, 75 bp, synthetic construct
  source 1..75: mol_type = other DNA
gtgttgataatttgtggaatatgctttcagtaacgttaaatgattttaagaataatgagttagatactctggagt

SEQ ID NO: 817586 - DNA, 75 bp, synthetic construct
  source 1..75: mol_type = other DNA
agttagtaacaaccattgttgaatccacagcggcgacgaacgccgctaaagtcgcacaagcaatatctcctacat

SEQ ID NO: 817587 - DNA, 75 bp, synthetic construct
  source 1..75: mol_type = other DNA
agggtctgatctatcgaatgcattaacaggtactggagatgtagcaaccagcgttgatgggctatgggaaaagtt

SEQ ID NO: 817588 - DNA, 75 bp, synthetic construct
  source 1..75: mol_type = other DNA
gtactgttacaacactagttgaatcaggggcagccagtaacgcagcaaaaattgcaaatgcaatatcacctgtat

SEQ ID NO: 817589 - DNA, 75 bp, synthetic construct
  source 1..75: mol_type = other DNA
ctgttgataacttatgggatactctatctacgagtttaaatgactttaagaagacaaatcttgaaattcttgcat

SEQ ID NO: 817590 - DNA, 75 bp, synthetic construct
  source 1..75: mol_type = other DNA
cgcccctttacgcttaatctcaggaccggtcgcataactatgggacacggtctgaatgttacagaagatgtattt

SEQ ID NO: 817591 - DNA, 75 bp, synthetic construct
  source 1..75: mol_type = other DNA
gcaacgaatccatctatctgaactatggtacaggtacgctgggcggcaccatgacccgctcctggccaccgggaa

SEQ ID NO: 817592 - DNA, 75 bp, synthetic construct
  source 1..75: mol_type = other DNA
ccgatccagaccagcatttcgatgtttatgtggaccgatgccattgaacgtggcccggaaatgacggcgctgcgt

SEQ ID NO: 817593 - DNA, 75 bp, synthetic construct
  source 1..75: mol_type = other DNA
ctcatccgcgaaatatgctgacatcctgttgccggattgcaccgcttccgaacagatggactttgcactggatgc

SEQ ID NO: 817594 - DNA, 75 bp, synthetic construct
  source 1..75: mol_type = other DNA
gggcatcacgttgcttataaagccttccgggaagatccgcaggcaaatccattgaccacgccatcgggcaaaatt

SEQ ID NO: 817595 - DNA, 75 bp, synthetic construct
  source 1..75: mol_type = other DNA
accgcctgaaatatccgatgaaacgagtcggggcgcgcggtgaaggcaaattcgagcgcattagctgggaagaag

SEQ ID NO: 817596 - DNA, 75 bp, synthetic construct
  source 1..75: mol_type = other DNA
gatcattatcgatccgcgctatacagacaccggtgccgggcgcgaagatgaatggatcccgatccgtccgggaac

SEQ ID NO: 817597 - DNA, 75 bp, synthetic construct
  source 1..75: mol_type = other DNA
gctatcgatagtcatcgcattacgccagacgatattgtcaccgtggggcgtgatgcgtgggcgaaagataatccg

SEQ ID NO: 817598 - DNA, 75 bp, synthetic construct
  source 1..75: mol_type = other DNA
tgcttctgctgttgtttacttcacagaatcaggctcaagtataaccgtccgtgaatcttacgaagacataatagc

SEQ ID NO: 817599 - DNA, 75 bp, synthetic construct
  source 1..75: mol_type = other DNA
tcaggatactggccgtaactctgcagacaatatcggtggcgtgtattacaaacaggctcagatttatattaatgg

SEQ ID NO: 817600 - DNA, 75 bp, synthetic construct
  source 1..75: mol_type = other DNA
agatgctgcattggtaaatggtctggcatacgtcatgatcactgaaaatctggtcgatcaggaattcctcgataa

SEQ ID NO: 817601 - DNA, 75 bp, synthetic construct
  source 1..75: mol_type = other DNA
tcttacgtgattttcaacgatcaggtgattaaaccgcgctttgaatgtaaaaccatctatgaaatgaccagcgaa

SEQ ID NO: 817602 - DNA, 75 bp, synthetic construct
  source 1..75: mol_type = other DNA
ggcgtggctaaaacaccgcaatgggcctcgcaaatcaccggtatcccggcagagaaaatcattcaactggcacgg

SEQ ID NO: 817603 - DNA, 75 bp, synthetic construct
  source 1..75: mol_type = other DNA
atacgccagcgatcgtttcgaccgacgcggacgaaatgagcacccagatggcgaaactgttcgctgcggcgggcc

SEQ ID NO: 817604 - DNA, 75 bp, synthetic construct
  source 1..75: mol_type = other DNA
ggaaatccgtcactgcgggcggagcgggaacaactggcgcaggcatttgtggatgagaaactgaaaccccagctg

SEQ ID NO: 817605 - DNA, 75 bp, synthetic construct
  source 1..75: mol_type = other DNA
atgcctgccgcgcggctatgcttcatgggaaaggaaagtgatatggctaactcattacttgaaacctgcaacaac

SEQ ID NO: 817606 - DNA, 75 bp, synthetic construct
  source 1..75: mol_type = other DNA
gctggcgatgaccgcgatcctcggttatctggtcaatagtgcggtgagaacgctgctatttggctactttggccg

SEQ ID NO: 817607 - DNA, 75 bp, synthetic construct
  source 1..75: mol_type = other DNA
gttgtttccggcgtttgccaaaattcaggacgacaccgaaaagctgcgcgtcaacttctacaagctgctgtcggt

SEQ ID NO: 817608 - DNA, 75 bp, synthetic construct
  source 1..75: mol_type = other DNA
ttcagtcagaagtgaagcagcttctgcacctgatgatccattctctctattccaataaagaaatcttcctgcgtg

SEQ ID NO: 817609 - DNA, 75 bp, synthetic construct
  source 1..75: mol_type = other DNA
gaactcaccacgctgtactggctgaacgtcgggctggggcttgtggtgtgcgtggcggtgtttttgttgagtgat

SEQ ID NO: 817610 - DNA, 75 bp, synthetic construct
  source 1..75: mol_type = other DNA
gcgccatccgctggtggtggaagtgaagcgtcagttttgtcgcagcgaaaaaatgaaaatgcttttacgggcggg

SEQ ID NO: 817611 - DNA, 75 bp, synthetic construct
  source 1..75: mol_type = other DNA
tttttgattctgtgtctctgttcctgaacggctctcactcaaaatacgcctggacggataaatcggattactccg

SEQ ID NO: 817612 - DNA, 75 bp, synthetic construct
  source 1..75: mol_type = other DNA
atttggttttgagaacgtacttcgttacatcctgcgtgtgaaggataagcagggtaaataccttacaggtggtga

SEQ ID NO: 817613 - DNA, 75 bp, synthetic construct
  source 1..75: mol_type = other DNA
tcaacgtattcaaaacctttctgtttattccggcgattgttattggtgggcagatggcgggcgcaatcggcgtca

SEQ ID NO: 817614 - DNA, 75 bp, synthetic construct
  source 1..75: mol_type = other DNA
gctggcgatgaccgcgatcctcggttatctggtcaatagtgcggtaagaacgctgctgtttggctactttggccg

SEQ ID NO: 817615 - DNA, 75 bp, synthetic construct
  source 1..75: mol_type = other DNA
ggccgacagcatcatcaactatgtccacaccaacctttccacgctggtgctggcgcgcattctgggggcgagcgt

SEQ ID NO: 817616 - DNA, 75 bp, synthetic construct
  source 1..75: mol_type = other DNA
gacagcatcatcaactatctcaataccaacctttcaacgctggtgctggcgcgtattctcggcgcgggcgtggca

SEQ ID NO: 817617 - DNA, 75 bp, synthetic construct
  source 1..75: mol_type = other DNA
cggatctggcgccgttgattaaaacattgtcgctggcgtttgtggtgatcccccacgggcaacagttccgcgcgt

SEQ ID NO: 817618 - DNA, 75 bp, synthetic construct
  source 1..75: mol_type = other DNA
ttctcgctggcgtctgttgcaccgaacttacgctttggtgcctggctgacggcggacagcatcatcaactatctc

SEQ ID NO: 817619 - DNA, 75 bp, synthetic construct
  source 1..75: mol_type = other DNA
tcagcggaaagaaatcagtcaccttgaactcaccacgctgtactggctgaacgttgggctggggatcgtggtgtg

SEQ ID NO: 817620 - DNA, 75 bp, synthetic construct
  source 1..75: mol_type = other DNA
gtgctgcaattgctgtgtattgtgggtctgctgcgctccgtgggtaacccgattggttcgctgctgatggcgaaa

SEQ ID NO: 817621 - DNA, 75 bp, synthetic construct
  source 1..75: mol_type = other DNA
ctgctcgggctgatggtggtgtcgaataactttgtaccgctggtctttggtgagaagtggaacagcattattccg

SEQ ID NO: 817622 - DNA, 75 bp, synthetic construct
  source 1..75: mol_type = other DNA
acagacgcagggtaaaattctgcgcaatcatggacgcgctaaatatatccaccgtcaaaatcaagacagtggcga

SEQ ID NO: 817623 - DNA, 75 bp, synthetic construct
  source 1..75: mol_type = other DNA
cagatggcgggcgcaatcggcgtcacgcttggtttcctgctggtgcagattatcaacaccattctgagctatttc

SEQ ID NO: 817624 - DNA, 75 bp, synthetic construct
  source 1..75: mol_type = other DNA
cgcttggcttcctgctggtgcagattatcaacaccattctgagttacttcgtgatgattaaaccggtgctcggtt

SEQ ID NO: 817625 - DNA, 75 bp, synthetic construct
  source 1..75: mol_type = other DNA
atcgcgctggcagatacgctttctgactttggtatcgctaactcgattattcagcgaaaagaaatcagtcacctg

SEQ ID NO: 817626 - DNA, 75 bp, synthetic construct
  source 1..75: mol_type = other DNA
ataactttgtaccgctggtatttggcgaaaagtggaacagcattattccggtgctgcaattgctgtgtattgtgg

SEQ ID NO: 817627 - DNA, 75 bp, synthetic construct
  source 1..75: mol_type = other DNA
atgacgcgggcggttatgaatgatggggtgaaaaatatgaaagcggcacgccagcaagcgatagtcgacctgctg

SEQ ID NO: 817628 - DNA, 75 bp, synthetic construct
  source 1..75: mol_type = other DNA
gctgccacgaaatgcgtaacacggtgtatcaggagtatatggaaaccgttcactacaacaaccgcagtggtgtgc

SEQ ID NO: 817629 - DNA, 75 bp, synthetic construct
  source 1..75: mol_type = other DNA
agaccacgactgtggagcgccgaacagccacattgttatcgtgcggtcgtttcactgtggcatgaagatacacta

SEQ ID NO: 817630 - DNA, 75 bp, synthetic construct
  source 1..75: mol_type = other DNA
gccatacagcacggaacaactgatgacgaccgaccactggcatcgcatgacgccggaaaaaggcgtctggataac

SEQ ID NO: 817631 - DNA, 75 bp, synthetic construct
  source 1..75: mol_type = other DNA
gctggcgaaagtgtttccttcgctggtattacctgaagcccgcggtgatttcattcgtatctgggatgatgggcg

SEQ ID NO: 817632 - DNA, 75 bp, synthetic construct
  source 1..75: mol_type = other DNA
ccgggcaccatcaagcctcacaccaagttcgaatctgaagtgtacattctgtccaaagatgaaggcggccgtcat

SEQ ID NO: 817633 - DNA, 75 bp, synthetic construct
  source 1..75: mol_type = other DNA
agcggatgccttaactatgtcagaaattacggtcgatggtgttagcgttgagaaggtcagcggctgcgccagaga

SEQ ID NO: 817634 - DNA, 75 bp, synthetic construct
  source 1..75: mol_type = other DNA
aaaccggtatgttgtttggtgccaccctgatggccaacaccacggatgtggtggcgcagaacagtgacctggcga

SEQ ID NO: 817635 - DNA, 75 bp, synthetic construct
  source 1..75: mol_type = other DNA
gaggtggtagatcgcaatctgaaaccggaaggtattttcctgttacatactatcggctcgaaaaaaaccgatctg

SEQ ID NO: 817636 - DNA, 75 bp, synthetic construct
  source 1..75: mol_type = other DNA
agcagcagccagcgaacaactgatgtggaggctggagcagataaaacagcaaaacatccagcggcaggatacggg

SEQ ID NO: 817637 - DNA, 75 bp, synthetic construct
  source 1..75: mol_type = other DNA
tgcctctgattaccctgtgctggcgaaagtgtttccttcgctggtattacctgaagcccgcggtgatttcattcg

SEQ ID NO: 817638 - DNA, 75 bp, synthetic construct
  source 1..75: mol_type = other DNA
tggatacagggcgcgatctgctttcacggcaggatggtacaagtttttctcattacggaggtaatttcgacattg

SEQ ID NO: 817639 - DNA, 75 bp, synthetic construct
  source 1..75: mol_type = other DNA
tggaaggcgacgcagagtgggaagcgaaaatactggaactggctggcttcctggattcttacattccggaaccag

SEQ ID NO: 817640 - DNA, 75 bp, synthetic construct
  source 1..75: mol_type = other DNA
caaaaccgcacgttaacgtcggtactatcggccacgttgaccaaggtaaaacaaccctgaccgctgcaatcacta

SEQ ID NO: 817641 - DNA, 75 bp, synthetic construct
  source 1..75: mol_type = other DNA
cggcagacagcggtatggcggatatcgtgcacatcatccaaaagtcacgtaacatgctaatatctggcggatttc

SEQ ID NO: 817642 - DNA, 75 bp, synthetic construct
  source 1..75: mol_type = other DNA
aatatttactattttattaaatgccattatatacatcacactaattcgaattatgtacaaagaaatatttatgac

SEQ ID NO: 817643 - DNA, 75 bp, synthetic construct
  source 1..75: mol_type = other DNA
gccgttctctggtgcgcgatcacgtctgcttttttgctggtcgtatccgcatggaggtggcacatgattaaaacc

SEQ ID NO: 817644 - DNA, 75 bp, synthetic construct
  source 1..75: mol_type = other DNA
tatcggccacgttgaccacggtaaaacgactctgaccgctgcaatcacaaccgtactggctaaaacctacggcgg

SEQ ID NO: 817645 - DNA, 75 bp, synthetic construct
  source 1..75: mol_type = other DNA
tatcggccacgttgaccacggtaaaacaactctgaccgctgcaatcacgaccgtactggctaaaacctacggcgg

SEQ ID NO: 817646 - DNA, 75 bp, synthetic construct
  source 1..75: mol_type = other DNA
tatcggccacgttgaccatggtaaaaccacactgaccgctgcaatcaccaccgtactggctaaaacctacggcgg

SEQ ID NO: 817647 - DNA, 75 bp, synthetic construct
  source 1..75: mol_type = other DNA
tatcggccacgttgaccatggtaaaacaaccctgaccgctgcaatcacgaccgtactggctaaaacctacggcgg

SEQ ID NO: 817648 - DNA, 75 bp, synthetic construct
  source 1..75: mol_type = other DNA
caaaaccgcacgttaacgtgggtactatcggccacgttgaccaaggtaaaacaactctgaccgctgcaatcacaa

SEQ ID NO: 817649 - DNA, 75 bp, synthetic construct
  source 1..75: mol_type = other DNA
actggctaagccgggcaccatcaagccgcacatcaagttcgaatctgaagtgtacattctgtccaaagatgaagg

SEQ ID NO: 817650 - DNA, 75 bp, synthetic construct
  source 1..75: mol_type = other DNA
atattattcagagagtaacttatccacttttttgtaatatttataatggcaaagggaaaatagatgatgcttatt

SEQ ID NO: 817651 - DNA, 75 bp, synthetic construct
  source 1..75: mol_type = other DNA
tatcggccacgttgaccatggtaaaacgaccctgaccgctgcaatcacaaccgtactggctaaaacctacggcgg

SEQ ID NO: 817652 - DNA, 75 bp, synthetic construct
  source 1..75: mol_type = other DNA
accagaccacacgtaaaccatcacggcgcataccgtggcagcacatgacaaagcggcagcgaaaaaaccgcagga

SEQ ID NO: 817653 - DNA, 75 bp, synthetic construct
  source 1..75: mol_type = other DNA
tggttttgcagcccggatgcggcattaagcaccaaccactatcataagctcccaactccgggagcttttttgtgt

SEQ ID NO: 817654 - DNA, 75 bp, synthetic construct
  source 1..75: mol_type = other DNA
ctggcccgtgaagggatcaccattgctgacgcggtgaaacgcgtactgcatctgccgaccgtggcggagaaaact

SEQ ID NO: 817655 - DNA, 75 bp, synthetic construct
  source 1..75: mol_type = other DNA
tgaagcgttaaccaacatcgccgctacgcagattggcgatatcaaacgcatcaaactttccgccaactggatggc

SEQ ID NO: 817656 - DNA, 75 bp, synthetic construct
  source 1..75: mol_type = other DNA
cggcattacggcggtcacgactgaaagcggtcgtgtcaccatcatgatgccgcacccggaacgtgttttccgcac

SEQ ID NO: 817657 - DNA, 75 bp, synthetic construct
  source 1..75: mol_type = other DNA
ttttgataatcagccgatttatctaccgctggacgtactgcttggcaaaacgccgaagatgacccgcgatgtaca

SEQ ID NO: 817658 - DNA, 75 bp, synthetic construct
  source 1..75: mol_type = other DNA
tgattttatttccacgcaaacggtttcgtcagcgcatcagattctttataatgacgcccgtttccccccccttgg

SEQ ID NO: 817659 - DNA, 75 bp, synthetic construct
  source 1..75: mol_type = other DNA
ctgctccattacgtcccggatctgcgtcgcaagatgctgctggccacactgtggaacaccggtgcgcgcattaat

SEQ ID NO: 817660 - DNA, 75 bp, synthetic construct
  source 1..75: mol_type = other DNA
cggttgccgccgctgctgctgacggtgtgacgttctctgttccggtcacaccacatacgttccgccattcctatg

SEQ ID NO: 817661 - DNA, 75 bp, synthetic construct
  source 1..75: mol_type = other DNA
aacaacggaccgaaaaagctgccaggacggcggggagaatgcccgccggtcagcagactcaccggctggttccgc

SEQ ID NO: 817662 - DNA, 75 bp, synthetic construct
  source 1..75: mol_type = other DNA
gcaatgctggcgaattctatactccacgcgccgtcactcgctttatggtggatcgcgttgatccgaaactcggcg

SEQ ID NO: 817663 - DNA, 75 bp, synthetic construct
  source 1..75: mol_type = other DNA
gttgccgccgctgccgctgatggagtgacgttctctgtcccggtcacgcacatacgttccgccattcctatgcga

SEQ ID NO: 817664 - DNA, 75 bp, synthetic construct
  source 1..75: mol_type = other DNA
gtttgtgcagctggccactctgaagcagcggaccgaaaaagccgccaggacggcaggaaggatgcccgccggtca

SEQ ID NO: 817665 - DNA, 75 bp, synthetic construct
  source 1..75: mol_type = other DNA
cgccgaagatgacccgcgatgtacaaacgctgaaagcgaagggcgatgcgctggtccgtgaagggatcaccattg

SEQ ID NO: 817666 - DNA, 75 bp, synthetic construct
  source 1..75: mol_type = other DNA
caggaacagcaggaggcagaaacgcggctgatggcactgaatgagaagcgtaaacgccggacagcaaaggagaag

SEQ ID NO: 817667 - DNA, 75 bp, synthetic construct
  source 1..75: mol_type = other DNA
cgctattaccgcgccttaatggctggtggggtacgctacgacctgaaaggccagccgtgcggcgaggtgacacca

SEQ ID NO: 817668 - DNA, 75 bp, synthetic construct
  source 1..75: mol_type = other DNA
atgacggcaacaatgatggggcagagcatgacaaaactgaccattaacagaaaaccgaaaggtatttacggcacg

SEQ ID NO: 817669 - DNA, 75 bp, synthetic construct
  source 1..75: mol_type = other DNA
actggttacgcatctgaaatttttatcctggcgtattcttgaacatgcatcgattaacgatagtgatgaatcatt

SEQ ID NO: 817670 - DNA, 75 bp, synthetic construct
  source 1..75: mol_type = other DNA
cagtatttatatctcgctaactgaccattgccagtttgcgattaaacgctttcagcaaaacgtgttactgcccaa

SEQ ID NO: 817671 - DNA, 75 bp, synthetic construct
  source 1..75: mol_type = other DNA
ggcgattaagcgaactcttaagtcatatgcctcttgaggtgatggcaacctgtgatcgtattatctctctggcgc

SEQ ID NO: 817672 - DNA, 75 bp, synthetic construct
  source 1..75: mol_type = other DNA
cactgaacggctacttccgtacttatgaagaaaaagtgaacagccacaacggcgaagagctgcgcggttatcaca

SEQ ID NO: 817673 - DNA, 75 bp, synthetic construct
  source 1..75: mol_type = other DNA
agggctggtggcactgcgctatgtcgataacttcggcaaagtcactgaaacctacccggctaacccgaacggttc

SEQ ID NO: 817674 - DNA, 75 bp, synthetic construct
  source 1..75: mol_type = other DNA
acccaaagcccgtcgctgctgttgcaggggatggtgggctcgcaaatgccgattgctgtctctcatggtgaaggg

SEQ ID NO: 817675 - DNA, 75 bp, synthetic construct
  source 1..75: mol_type = other DNA
cacgtacaaaaaggcgagatcaacgttggtgcgaagctggtcgttctcggcggcccggcaatgaacatcggtctt

SEQ ID NO: 817676 - DNA, 75 bp, synthetic construct
  source 1..75: mol_type = other DNA
tgacgcgattcaggcgctggttgcacagcgtaagctgctggcgtatcacgaccgctctgatggcggcctgctggt

SEQ ID NO: 817677 - DNA, 75 bp, synthetic construct
  source 1..75: mol_type = other DNA
ccgaacgacatcgaactgtatatgtttgctcaggcgaactctgagcactgccgccacaaaatttttaacgccgac

SEQ ID NO: 817678 - DNA, 75 bp, synthetic construct
  source 1..75: mol_type = other DNA
actggctaagccgggcaccatcaagccgcacaccaagttcgaatccgaagtgtacattctgtccaaagatgaagg

SEQ ID NO: 817679 - DNA, 75 bp, synthetic construct
  source 1..75: mol_type = other DNA
gtaatgccgggcgacaacgttaaaatggttgttaccctgatccacccgattgcgatggacgacggtctgcgtttc

SEQ ID NO: 817680 - DNA, 75 bp, synthetic construct
  source 1..75: mol_type = other DNA
accatcaagccgcacaccaagttcgaatctgaagtgtacattctgtccaaagatgaaggcggccgtcatactccg

SEQ ID NO: 817681 - DNA, 75 bp, synthetic construct
  source 1..75: mol_type = other DNA
aaaacctacggcggtgctgctcgtgcattcgaccagatcgataacgcgccggaagaaaaagctcgtggtatcacc

SEQ ID NO: 817682 - DNA, 75 bp, synthetic construct
  source 1..75: mol_type = other DNA
agccgcacaccaagttcgaatctgaagtgtacattctgtccaaagatgaaggcggtcgtcatactccgttcttca

SEQ ID NO: 817683 - DNA, 75 bp, synthetic construct
  source 1..75: mol_type = other DNA
attctcgaagttgaagacgtgccgtttaccgatatgcacgatattttcgagaaagcgttggttcagtaccgtgat

SEQ ID NO: 817684 - DNA, 75 bp, synthetic construct
  source 1..75: mol_type = other DNA
tccgcgaaatcgcccagcagaccgagcaggaagtggtggaagtggaaaccgtcaatggcttcggcccgaacgacg

SEQ ID NO: 817685 - DNA, 75 bp, synthetic construct
  source 1..75: mol_type = other DNA
tccatctccggtcgtggtaccgttgttaccggtcgtgtagaacgcggtatcatcaaagttggtagaagaagttga

SEQ ID NO: 817686 - DNA, 75 bp, synthetic construct
  source 1..75: mol_type = other DNA
gtggaaggcgtcgacgtggtttccttgccgttctacaaattgagcaccaaatttggcgatcttgaccagagcaaa

SEQ ID NO: 817687 - DNA, 75 bp, synthetic construct
  source 1..75: mol_type = other DNA
tttccggtggtttcgactccggcgtttccagttatatgttgatgcgtcgcggctgccgcgtgcattactgcttct

SEQ ID NO: 817688 - DNA, 75 bp, synthetic construct
  source 1..75: mol_type = other DNA
tatcggccacgttgaccacggtaaaactaccctgaccgctgcaatcaccaccgtactggctaaaacctacggcgg

SEQ ID NO: 817689 - DNA, 75 bp, synthetic construct
  source 1..75: mol_type = other DNA
tatcggccacgttgaccacggtaaaactacactgaccgctgcaatcacaaccgtactggctaaaacctacggcgg

SEQ ID NO: 817690 - DNA, 75 bp, synthetic construct
  source 1..75: mol_type = other DNA
caaaaccgcacgttaacgtgggtactatcggccacgttgaccatggtaaaacgacactgaccgctgcaatcacga

SEQ ID NO: 817691 - DNA, 75 bp, synthetic construct
  source 1..75: mol_type = other DNA
acaacgctgaccgctgcaatcactaccgtactggctaaaacctacggcggtgcagctcgcgcattcgaccagatc

SEQ ID NO: 817692 - DNA, 75 bp, synthetic construct
  source 1..75: mol_type = other DNA
tggtaatgccgggcgacaacatcaaaatggttgttaccctgatccacccgatcgcgatggacgacggtctgcgtt

SEQ ID NO: 817693 - DNA, 75 bp, synthetic construct
  source 1..75: mol_type = other DNA
caaaaccgcacgttaacgtcggtactatcggccacgttgatcatggtaaaacaacgctgaccgctgcaatcacta

SEQ ID NO: 817694 - DNA, 75 bp, synthetic construct
  source 1..75: mol_type = other DNA
agggctatgtggtgtacgaagggcgcatccgggcagaagatcctgcccaggcgtaccgtgattctttggcctggt

SEQ ID NO: 817695 - DNA, 75 bp, synthetic construct
  source 1..75: mol_type = other DNA
caacgagagcaactcgacgcgctgctggagcgtcgtcgcgccggtgaacccgttgctcatttaaccggtgtgcgt

SEQ ID NO: 817696 - DNA, 75 bp, synthetic construct
  source 1..75: mol_type = other DNA
cgttggtgaccttcaggctgatgccctgctctggaacgaaactaaaaaggcattcagtgcagctcacggccagga

SEQ ID NO: 817697 - DNA, 75 bp, synthetic construct
  source 1..75: mol_type = other DNA
taattcaacggaagaagattcactggcagtgggaactgactcgctggcaatgggtgcgaaaaccatcgtgaatgg

SEQ ID NO: 817698 - DNA, 75 bp, synthetic construct
  source 1..75: mol_type = other DNA
ggtgacgcaagcgtgatcactgatgtcgcagatggtgaaatttcagactccagttctgacgcagtaaacggctca

SEQ ID NO: 817699 - DNA, 75 bp, synthetic construct
  source 1..75: mol_type = other DNA
caaaaccgcacgttaacgtaggtactatcggccacgttgaccaaggtaaaaccaccctgaccgctgcaatcacta

SEQ ID NO: 817700 - DNA, 75 bp, synthetic construct
  source 1..75: mol_type = other DNA
tattgctcatttaaccggtgtgcgtgaattttggtcgttgccgttatttgtttcgccagcgaccttaattccccg

SEQ ID NO: 817701 - DNA, 75 bp, synthetic construct
  source 1..75: mol_type = other DNA
tggtaccatcgaactgccggaaggtgtagagatggtaatgccgggcgacaacatcaaaatggttgttaccctgat

SEQ ID NO: 817702 - DNA, 75 bp, synthetic construct
  source 1..75: mol_type = other DNA
agtcttgccgtattctcgatctcggtacgggcaccggggcaattgcgctggcgctggccagcgagcgtccagatt

SEQ ID NO: 817703 - DNA, 75 bp, synthetic construct
  source 1..75: mol_type = other DNA
aaatcctggaactggctggcttcctggattcttatattccggaaccagagcgcgcgattgacaagccgttcctgc

SEQ ID NO: 817704 - DNA, 75 bp, synthetic construct
  source 1..75: mol_type = other DNA
gagtgggaagcgaaaatcctggaactggctggcttcctggattccttacattccggaaccagagcgtgcgattga

SEQ ID NO: 817705 - DNA, 72 bp, synthetic construct
  source 1..72: mol_type = other DNA
ggtctgcgtttcgcaatccgtgaaggcggccgtaccgttggcgcgggcgttgtagctaaagttctgggctaa

SEQ ID NO: 817706 - DNA, 75 bp, synthetic construct
  source 1..75: mol_type = other DNA
gataacgcgccggaagaaaaagctcgtggtatcaccatcaaccgggcgacaacatcaaaatggttgttaccctga

SEQ ID NO: 817707 - DNA, 75 bp, synthetic construct
  source 1..75: mol_type = other DNA
atgagaccgaaggctttgacgatctgatcaaaaactgccgcgagcaacatgaagcgctgaaagcacagctggaac

SEQ ID NO: 817708 - DNA, 75 bp, synthetic construct
  source 1..75: mol_type = other DNA
gaccgccattgagagcaaccgtcagcaggtaatggaaagcctggatcaggcaggttggcgtctggatgccctgcg

SEQ ID NO: 817709 - DNA, 75 bp, synthetic construct
  source 1..75: mol_type = other DNA
ctaacctggaatgctttgtgcgataggttagtcagggttattgggaaaagaccatcaagacaatccttaagtagt

SEQ ID NO: 817710 - DNA, 75 bp, synthetic construct
  source 1..75: mol_type = other DNA
ccgcaaactgctggacgaaggccgtgctggtgagaacgtaggtgttctgttgcgtggtatcaaacgtgaagaaat

SEQ ID NO: 817711 - DNA, 75 bp, synthetic construct
  source 1..75: mol_type = other DNA
gcgaccaccacttttgccgagcgcgggctgggcgatgtactgattagctttgaatcggaagtgaacaacattcgc

SEQ ID NO: 817712 - DNA, 75 bp, synthetic construct
  source 1..75: mol_type = other DNA
tatcggccacgttgaccaaggtaaaacgacactgaccgctgcaatcactaccgtactggctaaaacctacggcgg

SEQ ID NO: 817713 - DNA, 75 bp, synthetic construct
  source 1..75: mol_type = other DNA
caaaaccgcacgttaacgtgggtactatcggccacgttgaccagggtaaaaccacgctgaccgctgcaatcacta

SEQ ID NO: 817714 - DNA, 75 bp, synthetic construct
  source 1..75: mol_type = other DNA
caaaaccgcacgttaacgtcggtactatcggccacgttgaccaaggtaaaaccacactgaccgctgcaatcacta

SEQ ID NO: 817715 - DNA, 75 bp, synthetic construct
  source 1..75: mol_type = other DNA
acgacgctgaccgctgcaatcactaccgtactggctaaaacctacggcggtgctgctcgtgcattcgaccagatc

SEQ ID NO: 817716 - DNA, 75 bp, synthetic construct
  source 1..75: mol_type = other DNA
actacgctgaccgctgcaatcacaaccgtactggctaaaacctacggcggtgctgctcgtgcattcgaccagatc

SEQ ID NO: 817717 - DNA, 75 bp, synthetic construct
  source 1..75: mol_type = other DNA
acaactctgaccgctgcaatcaccaccgtactggctaaaacctacggcggtgctgctcgtgcattcgaccagatc

SEQ ID NO: 817718 - DNA, 75 bp, synthetic construct
  source 1..75: mol_type = other DNA
aggatggttttgaaattatagcgccatcatatttcagaccactcttgtcatctccgactatccgcaagtcattat

SEQ ID NO: 817719 - DNA, 75 bp, synthetic construct
  source 1..75: mol_type = other DNA
cacactgaatttggccacctgaacagaggtgatatgctcacctcagaacaacacaggtgctccaatgaaaaaaag

SEQ ID NO: 817720 - DNA, 75 bp, synthetic construct
  source 1..75: mol_type = other DNA
atggaaaaacgcacaccacatacacgtttgagtcaggttaaaaaacttgtcaatgccgggcaagttcgtacaaca

SEQ ID NO: 817721 - DNA, 75 bp, synthetic construct
  source 1..75: mol_type = other DNA
gttttaaaaatatgctcgattatgcctggccacgtgacaggtacacattgacgtacttccagggtcttcgttaca

SEQ ID NO: 817722 - DNA, 75 bp, synthetic construct
  source 1..75: mol_type = other DNA
cctcatctggtgaagaggtgattatcgaaacactccagataaacatcggtagtgaagtttattatttatgtaagg

SEQ ID NO: 817723 - DNA, 75 bp, synthetic construct
  source 1..75: mol_type = other DNA
ccagcagcgggccggaggtgatcattgagacgctgcagatcaccattggttctgacgtccattatctgtgccagg

SEQ ID NO: 817724 - DNA, 75 bp, synthetic construct
  source 1..75: mol_type = other DNA
atgcattctgatttccggtcacgatctcaaagatctctacaacctgctggaacagaccgaaggcacgggcgttaa

SEQ ID NO: 817725 - DNA, 75 bp, synthetic construct
  source 1..75: mol_type = other DNA
gcatcgttggctggccgggcgttcgccatctggatggcgaggatttctcgccggtcatcgcccaggcgcaacaaa

SEQ ID NO: 817726 - DNA, 75 bp, synthetic construct
  source 1..75: mol_type = other DNA
gcggtcattgcccaggcgcaacaaatggcgggcttcccgtacagcgaaattccgcacctgatcaccgtgggcttt

SEQ ID NO: 817727 - DNA, 75 bp, synthetic construct
  source 1..75: mol_type = other DNA
ctccaggaaacccggggcggttcacagtttcttgtgcacagcatcccccttttcgataacagaatgtgttgtatg

SEQ ID NO: 817728 - DNA, 75 bp, synthetic construct
  source 1..75: mol_type = other DNA
cgtctggtagatgcaggtcaatgtaacgatgcttactcagcaattattctggctgtcactctggcagagaaactg

SEQ ID NO: 817729 - DNA, 75 bp, synthetic construct
  source 1..75: mol_type = other DNA
tgtttacacccacggcgaaatgctgcctgcgcatggctacccggagctgcgtaaattcaagcatctggtcggtaa

SEQ ID NO: 817730 - DNA, 75 bp, synthetic construct
  source 1..75: mol_type = other DNA
cctggcctggcaatgcctcatgcgccctattcttcgattattggtatcccattggtggaacccgttatacgtcga

SEQ ID NO: 817731 - DNA, 75 bp, synthetic construct
  source 1..75: mol_type = other DNA
tgaagatgcacaattaaaaaataatactcaacttccttttaaagaagttaaaagtggttttacttactttgaaaa

SEQ ID NO: 817732 - DNA, 75 bp, synthetic construct
  source 1..75: mol_type = other DNA
actccagtacaaagtatgtgcctaaaaattctgtattagtcggattggcaggacaaggaaagactcgagggactg

SEQ ID NO: 817733 - DNA, 75 bp, synthetic construct
  source 1..75: mol_type = other DNA
ttcttttacaaatagatagagagaatttttctccatcactaatactccaaatcttattatcagagcgttttcaat

SEQ ID NO: 817734 - DNA, 75 bp, synthetic construct
  source 1..75: mol_type = other DNA
gtactgatggctgacaacatcatcccgtcaccaaagcgccgccataccggtattgcagcggcacgacgagcagca

SEQ ID NO: 817735 - DNA, 75 bp, synthetic construct
  source 1..75: mol_type = other DNA
ctacctcgtgaaacaatttatcggattgggttacgacggtaccgttaagatttgttgcattaataattatagcgc

SEQ ID NO: 817736 - DNA, 75 bp, synthetic construct
  source 1..75: mol_type = other DNA
aaactgaaaaatgaagggcacatgttcagtcgcttgttgctggaagagcggatgcgtgttgctgtcaatatgtta

SEQ ID NO: 817737 - DNA, 75 bp, synthetic construct
  source 1..75: mol_type = other DNA
ggcaaacctgagtaatgcgttgttcgatgcgggcgtgatgccctattacctgcatgtgctcgataaagtgcaggg

SEQ ID NO: 817738 - DNA, 75 bp, synthetic construct
  source 1..75: mol_type = other DNA
gtgcctggtttgttgcataaataccacaaccgggcgcttttgctggtcaaaggcggctgcgcggtaaattgccgc

SEQ ID NO: 817739 - DNA, 75 bp, synthetic construct
  source 1..75: mol_type = other DNA
tcaacgttgagcgttttggggaaagccaaactgtacgacctgatggttctggataatgaagaacttgatgaattg

SEQ ID NO: 817740 - DNA, 75 bp, synthetic construct
  source 1..75: mol_type = other DNA
ccactatcaatcagataactaacaaagatatgttgggctttaaaatcccattacctgaaaatacagaagaacaag

SEQ ID NO: 817741 - DNA, 75 bp, synthetic construct
  source 1..75: mol_type = other DNA
gcggccagcgggaacgtggccagcctggtgaatatggcggaccagtcatcgaacagtaaaatgcgtcttagctgg

SEQ ID NO: 817742 - DNA, 75 bp, synthetic construct
  source 1..75: mol_type = other DNA
gtacttacctcgcaagatgagtttgtcgtcgcgcccggattctccaccgacccgctggaagaacagcacagcgta

SEQ ID NO: 817743 - DNA, 75 bp, synthetic construct
  source 1..75: mol_type = other DNA
attgagatgtacaaaccaaatgtgcgcatcgtggaagttaatgtgccacgcgtcgctggcattcgcatcaaagga

SEQ ID NO: 817744 - DNA, 75 bp, synthetic construct
  source 1..75: mol_type = other DNA
gggttactatctctatttaggtgataacagcgatgtcctggatgtttctgcaccttttaatattgagagttataa

SEQ ID NO: 817745 - DNA, 75 bp, synthetic construct
  source 1..75: mol_type = other DNA
ggtgtaaccagtagcatgttaaaaattagctgtccgaaagaagttgctggtgtaaaactctcgttgattaccaac

SEQ ID NO: 817746 - DNA, 75 bp, synthetic construct
  source 1..75: mol_type = other DNA
cggcttctgcaattacatcaaatcagttccgcggtttttcaagcatagcgactgctgcaaacgctgtatttggtc

SEQ ID NO: 817747 - DNA, 75 bp, synthetic construct
  source 1..75: mol_type = other DNA
ggatgttgccggtcttctcgcataccttggttttggagaaggtgctaactgggttatgttacctggaggaatgat

SEQ ID NO: 817748 - DNA, 75 bp, synthetic construct
  source 1..75: mol_type = other DNA
cagcactgtttctggccgggtgcagccatcataaagctccgccgccaaatgccagactttctgactcgattaccg

SEQ ID NO: 817749 - DNA, 75 bp, synthetic construct
  source 1..75: mol_type = other DNA
atgcgtttctgccttattttaatcacagcactgtttctggttgggtgtagccatcacaaagcgccgccgccaaat

SEQ ID NO: 817750 - DNA, 75 bp, synthetic construct
  source 1..75: mol_type = other DNA
gtgttcaaagtcgacaaaccactgaatgcagcctttccttcagataccagcgtctcagcattaatcattggacgg

SEQ ID NO: 817751 - DNA, 75 bp, synthetic construct
  source 1..75: mol_type = other DNA
aggcgttttaatgtccacaactgcatcaccatcactacaatttccatcgatacaacgtgacgtaaatgacctgac

SEQ ID NO: 817752 - DNA, 75 bp, synthetic construct
  source 1..75: mol_type = other DNA
cctgtttgatgaaaccggcgcgctgattgctgtgggaaactgcccggagagctacaagccgaagctggcggaggg

SEQ ID NO: 817753 - DNA, 75 bp, synthetic construct
  source 1..75: mol_type = other DNA
atcggtggtactggcgacccgtaaatacgtggatgatgaagtcctggaattaaagctgtatgtggatgaccagat

SEQ ID NO: 817754 - DNA, 75 bp, synthetic construct
  source 1..75: mol_type = other DNA
ggaaacccggtgaaacttatgttgcagtggggaacggtggcaacacaaaagggagctgatgctggatatgcctta

SEQ ID NO: 817755 - DNA, 75 bp, synthetic construct
  source 1..75: mol_type = other DNA
aaaaagccgctggactcggcggggcaaacttatcatggcgatcatgcgtcagtgttctaccaaatcccggagaat

SEQ ID NO: 817756 - DNA, 75 bp, synthetic construct
  source 1..75: mol_type = other DNA
agatggtggtcgcgaattattaagctggcaggcagctacaaacttttctcagtttgccgggaatataggcggagg

SEQ ID NO: 817757 - DNA, 75 bp, synthetic construct
  source 1..75: mol_type = other DNA
ccgctaaaaattacccatatggcggtcggcgatggcggcggagtattgccaacgccagacgcaaagcagactgca

SEQ ID NO: 817758 - DNA, 75 bp, synthetic construct
  source 1..75: mol_type = other DNA
gatgaatgtttatggggcggacactaacggaactacaggtaatttccctattgcatttccttcaggcgcactggc

SEQ ID NO: 817759 - DNA, 75 bp, synthetic construct
  source 1..75: mol_type = other DNA
aagctattacgctgaaaatcgacccatcggtggtactggcgacccgtaaatacgtggatgatgaagtcctggaat

SEQ ID NO: 817760 - DNA, 75 bp, synthetic construct
  source 1..75: mol_type = other DNA
agttcacagataaaacactctctaggaaccccggggcggttcattctcgcttgccttctgtatttcaaaaagcat

SEQ ID NO: 817761 - DNA, 75 bp, synthetic construct
  source 1..75: mol_type = other DNA
tacaggcctggcgtcgttaccagcgtcatcgtactcgcatgatgaagattcaggcctattatgaaagctgcctga

SEQ ID NO: 817762 - DNA, 75 bp, synthetic construct
  source 1..75: mol_type = other DNA
ccgaaggtatcgtcacaaaaatcttcactgacgccaatggtacgcagcatattggccttcatccgatcccggatc

SEQ ID NO: 817763 - DNA, 75 bp, synthetic construct
  source 1..75: mol_type = other DNA
ctggtaaatgagaaacgccgcgctgcgctgaatatgctctatatcgacccgcagaacagcagccagattattgcc

SEQ ID NO: 817764 - DNA, 75 bp, synthetic construct
  source 1..75: mol_type = other DNA
atcaagaacgcgattcactgtgacgtatacgacacccaatctcggcgaaacaccgacactgcattttgaagcaat

SEQ ID NO: 817765 - DNA, 75 bp, synthetic construct
  source 1..75: mol_type = other DNA
atgttgccggtcttctcgcataccttggtttgggagaaggttctccagctattggcgttccgttcttctggccgt

SEQ ID NO: 817766 - DNA, 75 bp, synthetic construct
  source 1..75: mol_type = other DNA
cactctcactgggtttattgcgaagtcaaccgcagctaacacggatgcttttaactatttagcgattgggtactg

SEQ ID NO: 817767 - DNA, 75 bp, synthetic construct
  source 1..75: mol_type = other DNA
agcacctactgcggcacagtcggtcaacaatacacagattgccaccacggcttttgtgaaatcggcgattgcagc

SEQ ID NO: 817768 - DNA, 75 bp, synthetic construct
  source 1..75: mol_type = other DNA
atagttaaaacggacgaacccggtcttaaggtgccttcctcactacgagctcttagctctcgtagtgttaaacgt

SEQ ID NO: 817769 - DNA, 75 bp, synthetic construct
  source 1..75: mol_type = other DNA
caacctggataacccggatgaaggttgcgatctggatttcgtaccgcatgaagcacgtcaggtcagcggaatgga

SEQ ID NO: 817770 - DNA, 75 bp, synthetic construct
  source 1..75: mol_type = other DNA
cctgatgggacacaagtcactgagctcgacggaagtctatacgaaggtattcgcacttgatgttgctgcgcggca

SEQ ID NO: 817771 - DNA, 75 bp, synthetic construct
  source 1..75: mol_type = other DNA
atatccgttcgtgcaactggccacgctcaagcagcgcaccgagaaagcggcaaggacggcaggtcgtgcccccgc

SEQ ID NO: 817772 - DNA, 75 bp, synthetic construct
  source 1..75: mol_type = other DNA
gagctgccgctgttcaaagggattccgattcacgtctttattgcgggtcgctgcatccgtgatgcggcatctccg

SEQ ID NO: 817773 - DNA, 75 bp, synthetic construct
  source 1..75: mol_type = other DNA
tttatcatcgcagccgcgatgcgcaggcggcaggtgtgggttggggcgaggcggatattacggctattaagcgtc

SEQ ID NO: 817774 - DNA, 75 bp, synthetic construct
  source 1..75: mol_type = other DNA
tgcttcgaagccaacgctgactgggtgacggtaatttgctgtgcggatatcaacaccgccaaaggcgcgctggac

SEQ ID NO: 817775 - DNA, 75 bp, synthetic construct
  source 1..75: mol_type = other DNA
cacggacgcccggcgcgcacgtttccggtgcaatttcctctactacgactggacaggatctacgtcaaaaatgcc

SEQ ID NO: 817776 - DNA, 75 bp, synthetic construct
  source 1..75: mol_type = other DNA
cgttcaaggtgctcaccatcaacattcacaaaggctttaccgcgtttaaccgacgcttcattttgccggaacttc

SEQ ID NO: 817777 - DNA, 75 bp, synthetic construct
  source 1..75: mol_type = other DNA
tccctcgaagaaaaaaagccgggccgacattctggaaatggaaaatctggtgaaaatcatccgtgcctcttttca

SEQ ID NO: 817778 - DNA, 75 bp, synthetic construct
  source 1..75: mol_type = other DNA
ctccgccagatgtcgatggttcatgatgaactgcccaaatacctgctggcccctgaagtgagcgccctgctccat

SEQ ID NO: 817779 - DNA, 75 bp, synthetic construct
  source 1..75: mol_type = other DNA
cgttctcagtacctgtgaccccccatacgttccgtcactcctacgcgatgcacatgctgtacgccggcataccac

SEQ ID NO: 817780 - DNA, 75 bp, synthetic construct
  source 1..75: mol_type = other DNA
ttcaaaatcagcagttgggcaatcagtaacgattgcgccgagctattataaacgagttcaaaatggaaaaattat

SEQ ID NO: 817781 - DNA, 75 bp, synthetic construct
  source 1..75: mol_type = other DNA
ctgcatccgtgatgcggcatctccggtcgaagccgcacgtcagttcaaacgctccatcgctgaattgtggggcta

SEQ ID NO: 817782 - DNA, 75 bp, synthetic construct
  source 1..75: mol_type = other DNA
atggggcataagtccatcagctcaacggaggtctacacgaaggtgtttgcactggatgtggctgcacggcaccgg

SEQ ID NO: 817783 - DNA, 75 bp, synthetic construct
  source 1..75: mol_type = other DNA
gcggttgaagcggcagcggctgacggggtgacgttctccgtgccggtgacaccgcatacattccgtcacagctat

SEQ ID NO: 817784 - DNA, 75 bp, synthetic construct
  source 1..75: mol_type = other DNA
tcagatccatcgtctggttcccctttccgatcaccactatgtcagccagctgcagatgatggtggcgaccctgaa

SEQ ID NO: 817785 - DNA, 75 bp, synthetic construct
  source 1..75: mol_type = other DNA
tctccgactcctggtacgtcagtcagctgcagacgatggtggcaacactgaaaattcctctggaacggcgtaata

SEQ ID NO: 817786 - DNA, 75 bp, synthetic construct
  source 1..75: mol_type = other DNA
gaggtctatacgaaggtgtttgcgctcgatgtcgcagcgcgccatcgtgtgcagttcgccatgccggaagctgaa

SEQ ID NO: 817787 - DNA, 75 bp, synthetic construct
  source 1..75: mol_type = other DNA
actcgcagcagccggcgcaaatgccggtggccattgactatcccgccgcgctggccctgcgccagatggcgctcg

SEQ ID NO: 817788 - DNA, 75 bp, synthetic construct
  source 1..75: mol_type = other DNA
ttaccgtgatggatcgcatctattacgtggaagggttgccgggcgagagcggtaaatatgtggcgaacaattatc

SEQ ID NO: 817789 - DNA, 75 bp, synthetic construct
  source 1..75: mol_type = other DNA
tctccgacacctggtacgtcagccagctgcaaacgatggtggcaacactgaaaattcctctggaacggcgtaata

SEQ ID NO: 817790 - DNA, 75 bp, synthetic construct
  source 1..75: mol_type = other DNA
tacctgctcgcccctgaagtgagtgccctgctccattacgtcccggatctgcgccgcaagatgctgctggccact

SEQ ID NO: 817791 - DNA, 75 bp, synthetic construct
  source 1..75: mol_type = other DNA
atgtcaggctccgttatacgcagccagtctgctgccatggtaccggcagtgtattctgccggacaacctgcacaa

SEQ ID NO: 817792 - DNA, 75 bp, synthetic construct
  source 1..75: mol_type = other DNA
cggccttcaaagttgatgtggtagataccacaggtgcgggtgatgtttttcacggcgctttggcggtggcgctgg

SEQ ID NO: 817793 - DNA, 75 bp, synthetic construct
  source 1..75: mol_type = other DNA
tgcacacgtcccggtggacgagccgggatccatgactgtgatcaaacccgatcttttttgtcactttttgtataa

SEQ ID NO: 817794 - DNA, 75 bp, synthetic construct
  source 1..75: mol_type = other DNA
tggggctgtttatggtgtcattgaacccgacatccgtgaacattcagaccatcgtcctgggcaatattctggcaa

SEQ ID NO: 817795 - DNA, 75 bp, synthetic construct
  source 1..75: mol_type = other DNA
ccgctgttgcttgattacgccaccagcgccatcgcatttggcaaaacccgcgtcgcctggcataaaggcgtcccc

SEQ ID NO: 817796 - DNA, 75 bp, synthetic construct
  source 1..75: mol_type = other DNA
attatcaacccggaactgttcggcgcgccggattgtagtgcgcagaccgaagcctttgccgagtgggtgaaagcc

SEQ ID NO: 817797 - DNA, 75 bp, synthetic construct
  source 1..75: mol_type = other DNA
gcggctgcggcggcaaaagacgttaacgttccggatatcggcagcgacgaagttgaagtgaccgaaatcctggtg

SEQ ID NO: 817798 - DNA, 75 bp, synthetic construct
  source 1..75: mol_type = other DNA
atggaaagtggtcatcgctttgatgctcagacgctgcacagttttattcaggctgtatttcgtcagatgggtagt

SEQ ID NO: 817799 - DNA, 75 bp, synthetic construct
  source 1..75: mol_type = other DNA
atgcgggaagctggcaggccatttgtgatgcggcgcggcagattggtatgccggaagagacgttgcaggctttct

SEQ ID NO: 817800 - DNA, 75 bp, synthetic construct
  source 1..75: mol_type = other DNA
ggcatgatcccgagctatgtgcagtcctggcgactgggttctttgcaaatcaaccatcacgctaaaattgtcaaa

SEQ ID NO: 817801 - DNA, 75 bp, synthetic construct
  source 1..75: mol_type = other DNA
gagcgccagctcaggcggctaaacaggaagcggctccggcagcaggcccatgcatcagcggctggcgtgaaagaa

SEQ ID NO: 817802 - DNA, 75 bp, synthetic construct
  source 1..75: mol_type = other DNA
gagcgccagctcaggcggctaaacagaaagcggctccggcagcaggcccgtgcatcagcggctggcgtgaaagaa

SEQ ID NO: 817803 - DNA, 75 bp, synthetic construct
  source 1..75: mol_type = other DNA
tctctgttggcgataaaacccagaccggcgcactgattatgattttcgattccgccgatggtgcagcagacgctg

SEQ ID NO: 817804 - DNA, 75 bp, synthetic construct
  source 1..75: mol_type = other DNA
gggcgccagctcaggcggctaaacagaaagcggctccggcagcaggcccatgcatcagcggctggcgtgaaagaa

SEQ ID NO: 817805 - DNA, 75 bp, synthetic construct
  source 1..75: mol_type = other DNA
gcgcgccagctcaggcggctaaacagcaagcggctccggcagcaggcccctgcatcagcggctggcgtgaaagaa

SEQ ID NO: 817806 - DNA, 75 bp, synthetic construct
  source 1..75: mol_type = other DNA
gtgcgccagctcaggcggctaaacagaaagcggctccggcagcaggcccttgcatcagcggctggcgtgaaagaa

SEQ ID NO: 817807 - DNA, 75 bp, synthetic construct
  source 1..75: mol_type = other DNA
tatacacaatagaaattcccgtggtcagtatgatggaattaacgaacgttatagtgaagagggtaagttactgtc

SEQ ID NO: 817808 - DNA, 75 bp, synthetic construct
  source 1..75: mol_type = other DNA
tgctggggcttccgttttctctgggagccttcttttccggcggactggctgcgggcagcatgctgtttcttaacc

SEQ ID NO: 817809 - DNA, 75 bp, synthetic construct
  source 1..75: mol_type = other DNA
atgggcgcgcacgaagttcatccgctgcatgtggaaaactggcccgatacctcgcactacgagtttctcgccgac

SEQ ID NO: 817810 - DNA, 75 bp, synthetic construct
  source 1..75: mol_type = other DNA
tttatcaccgcagccgtgacgcgcaggccgcaggcgtggcatggggcgaagcggatatcaccgcgatcaaacgtc

SEQ ID NO: 817811 - DNA, 75 bp, synthetic construct
  source 1..75: mol_type = other DNA
ttgtcggggagatgattaaccataatccggactctctgtacccgaaaagacgtcagctggacccgtattctgatc

SEQ ID NO: 817812 - DNA, 75 bp, synthetic construct
  source 1..75: mol_type = other DNA
accgggtgtttatctcgtactgttctccttcgaagaaaaaagccgggccgacattctggaaatggaaaacctggt

SEQ ID NO: 817813 - DNA, 75 bp, synthetic construct
  source 1..75: mol_type = other DNA
ttttttctttgcttgctttctgttagattccgccgcaaatctatactgaataaaacggctaaaagacgaaccatt

SEQ ID NO: 817814 - DNA, 75 bp, synthetic construct
  source 1..75: mol_type = other DNA
tccccgcctgctcatgattgctgtaactattggcagtgtgaccagtttcctcggcgcgtgggtcagttactttct

SEQ ID NO: 817815 - DNA, 75 bp, synthetic construct
  source 1..75: mol_type = other DNA
gtaaactaaccaaagaaaccctgtacgtcaatggtatcagacagggagtggaaaaagagtttaacgatcgcacag

SEQ ID NO: 817816 - DNA, 75 bp, synthetic construct
  source 1..75: mol_type = other DNA
atatacagacacagataacttctccgattctaaatttatttcttcatttaaatcctggtttgaaagtggaaagat

SEQ ID NO: 817817 - DNA, 75 bp, synthetic construct
  source 1..75: mol_type = other DNA
gcgggcagcatgctgtttcttaaccaacgcactcgcttaaaagaagatgccatcatcggcctgatcttctcgtcc

SEQ ID NO: 817818 - DNA, 75 bp, synthetic construct
  source 1..75: mol_type = other DNA
tattggattgcatccgggcagattaaaaatcctcttcttcaccctgctgtcagtttcgaccgttgcggcgctgca

SEQ ID NO: 817819 - DNA, 75 bp, synthetic construct
  source 1..75: mol_type = other DNA
gtacccggagtagctggcgcttttatgctgggactgcccttctcggtgggtgcgtttgtttctggcgggctggca

SEQ ID NO: 817820 - DNA, 75 bp, synthetic construct
  source 1..75: mol_type = other DNA
atcgtgttaaacgaaagtcatcagaaaatggtcgtaagtcagctttcgctcacaaagtcaaaaatggtggaaaga

SEQ ID NO: 817821 - DNA, 75 bp, synthetic construct
  source 1..75: mol_type = other DNA
ccggcggacacaccgtacattctggtcgtgtcatcggcttttgattttgccgatatcgcaaccatgataaatgcc

SEQ ID NO: 817822 - DNA, 75 bp, synthetic construct
  source 1..75: mol_type = other DNA
gacagtaatgcggacagtcatgcattcagtggtaaaacaaaatcagtgggtggtggtctgtatgcatctgcgctc

SEQ ID NO: 817823 - DNA, 75 bp, synthetic construct
  source 1..75: mol_type = other DNA
gaaatgtgacgctggaaaacaaatcatccctgaaaatcatggagaaattcaccggtggtattgaggcttatgaca

SEQ ID NO: 817824 - DNA, 75 bp, synthetic construct
  source 1..75: mol_type = other DNA
tccgtacgcgccggatatcagctgactggcgttattctgcaacgcgacgatggcgtactggtcaataaccgcctg

SEQ ID NO: 817825 - DNA, 75 bp, synthetic construct
  source 1..75: mol_type = other DNA
ggtatttgcccgcgtttgtgtggtgaaacccgacgaactggtgcccattcccggtgatataacgctggaaaaagt

SEQ ID NO: 817826 - DNA, 75 bp, synthetic construct
  source 1..75: mol_type = other DNA
gaaatttttattcaggatttattggcgatagatacctcagttcccgtcagcgttaccggtggtctggcaggcgaa

SEQ ID NO: 817827 - DNA, 75 bp, synthetic construct
  source 1..75: mol_type = other DNA
ccgccatttgctgcgcttctcgcaaaaagggcaattcgttctgcctcctgctcgttatgtgcgttcctatgcacc

SEQ ID NO: 817828 - DNA, 75 bp, synthetic construct
  source 1..75: mol_type = other DNA
aaggcaaagcgtatttcacgttcctgatgcctgattcgttaacccgctggcgcatcaccgcgcgtgggatgaacg

SEQ ID NO: 817829 - DNA, 75 bp, synthetic construct
  source 1..75: mol_type = other DNA
ctcgttatgtgcgttcctatgcacctgcacagcaaagtgttgcggcagggagtgaatggaccgggatgcaggtga

SEQ ID NO: 817830 - DNA, 75 bp, synthetic construct
  source 1..75: mol_type = other DNA
tggtggttacagcgataactacactcacgttcagattggtgccgacagaaagcatgagctggacggtgtggattt

SEQ ID NO: 817831 - DNA, 75 bp, synthetic construct
  source 1..75: mol_type = other DNA
taaaggataaaaatggaaatcttacaccggtatatacaaatggtggtttcctaaccggaggtactatcagtgctt

SEQ ID NO: 817832 - DNA, 75 bp, synthetic construct
  source 1..75: mol_type = other DNA
caacacgcccaggcgtttgaactggctcgccaggaatttgattatctttctgcggaagagattgctgaagaaata

SEQ ID NO: 817833 - DNA, 75 bp, synthetic construct
  source 1..75: mol_type = other DNA
cgattggtcgccggacgggggaatatccgtggtagtgaaggcccgcgcaatgcggtagctaccgggctactgatt

SEQ ID NO: 817834 - DNA, 75 bp, synthetic construct
  source 1..75: mol_type = other DNA
gactcttgatggttctgttaatctgcctgaaggggtgataacgaaaaagtcaggtactctgatattccaggggca

SEQ ID NO: 817835 - DNA, 75 bp, synthetic construct
  source 1..75: mol_type = other DNA
agagctgaaagccaacgactcccaaatagagttaggtggaagagggcattttgcaaaactgcgggtaaaagagct

SEQ ID NO: 817836 - DNA, 75 bp, synthetic construct
  source 1..75: mol_type = other DNA
tgataatcggtatacgttgaattttgcctccctgggggaaagaagctataccacccattctttgtatgctggagc

SEQ ID NO: 817837 - DNA, 75 bp, synthetic construct
  source 1..75: mol_type = other DNA
tttacctcacgggctgcaggtggagttgccggacataccgaccaccaccaccgtgcagaccgtccagctatggga

SEQ ID NO: 817838 - DNA, 75 bp, synthetic construct
  source 1..75: mol_type = other DNA
tgatttgtcagaaattgagggcaaacaacaacgtattaatatttcattgcctgatgtattgattcgtcgtattga

SEQ ID NO: 817839 - DNA, 75 bp, synthetic construct
  source 1..75: mol_type = other DNA
cttgatttaaatggaaataatgtaaactttactcgtcttcaggctgcagattatggtgctattatttctaacaat

SEQ ID NO: 817840 - DNA, 75 bp, synthetic construct
  source 1..75: mol_type = other DNA
gagccgcagcgggtgatgagcgcggtgcgcaaagtgctttctgcgccgcagcaaacccatcttattctggagtag

SEQ ID NO: 817841 - DNA, 75 bp, synthetic construct
  source 1..75: mol_type = other DNA
gctgggaacggagaatcgtttagcggatgaggatatccgccgggcggatgttgctctgttgattacggatatcga

SEQ ID NO: 817842 - DNA, 75 bp, synthetic construct
  source 1..75: mol_type = other DNA
gagcgtgtcttcgtaactaatgccctgcgcgcgctacgtcaggtaagccctgccggaaatattcgcgacattccg

SEQ ID NO: 817843 - DNA, 75 bp, synthetic construct
  source 1..75: mol_type = other DNA
caaactgcagggcagcaacaatactattcttgttgacttttttaacaaagcagccaatggtacaaatgtgacgtt

SEQ ID NO: 817844 - DNA, 75 bp, synthetic construct
  source 1..75: mol_type = other DNA
cctcccattctttgtatgctggagctgaaatcgggtatcgttatcacatgtcagaaaatacatgggtggaaccac

SEQ ID NO: 817845 - DNA, 75 bp, synthetic construct
  source 1..75: mol_type = other DNA
agggggaggggtgtatgcatcaggtctctttgagtctggagcttattttgacctgattggtaaatatctccatca

SEQ ID NO: 817846 - DNA, 75 bp, synthetic construct
  source 1..75: mol_type = other DNA
ggatgggttaccagcgcctgggcgaagaaacatcacccgcgctggtaccgtgaggtccgcaagacaacggaaaag

SEQ ID NO: 817847 - DNA, 75 bp, synthetic construct
  source 1..75: mol_type = other DNA
gcgcacagacggaaagccgctttcgtggcatcggtcgttatagtatcgcaatcgccagaggcataatcagaaata

SEQ ID NO: 817848 - DNA, 75 bp, synthetic construct
  source 1..75: mol_type = other DNA
tactggaaggtgaagctgaccatcgggatcagtattttagcgatgaagagcgtgccagccagcaaagtatgttga

SEQ ID NO: 817849 - DNA, 75 bp, synthetic construct
  source 1..75: mol_type = other DNA
cgcgccaaccgtctgcgcgtgggcgatccgaccgatccgaatacccaggttggggcgcttatcagccagcaacac

SEQ ID NO: 817850 - DNA, 75 bp, synthetic construct
  source 1..75: mol_type = other DNA
gaactttatcaaatcgacgataaatcgctgaactggcgtgtggaaggcccattcgatagctcatatagtctggcg

SEQ ID NO: 817851 - DNA, 75 bp, synthetic construct
  source 1..75: mol_type = other DNA
ttattcgacccgtattctgtctcttccatgagggataagatcgcgcaatgtttgactgatgataccttcctcgcg

SEQ ID NO: 817852 - DNA, 75 bp, synthetic construct
  source 1..75: mol_type = other DNA
ttccatcggtgatcgtcagtatctggaatcccttgcgtcaggtaatggtttacagcagggcgaactggtactcac

SEQ ID NO: 817853 - DNA, 75 bp, synthetic construct
  source 1..75: mol_type = other DNA
gatccatcagaccaaaaatgtgttgatcccacgcgcttcccacaactttgaatttttcgcggaagtctgccagca

SEQ ID NO: 817854 - DNA, 75 bp, synthetic construct
  source 1..75: mol_type = other DNA
atgaagaggcgctgcattgcgactggtcggtggggacgggcgatatggtctgcggaaatgacctgcagacggcca

SEQ ID NO: 817855 - DNA, 75 bp, synthetic construct
  source 1..75: mol_type = other DNA
ccgggaggcgctgcagtggctgaaggatgacggcgtggtggcctcgctggatgtggaagcgtggatagtgccgcc

SEQ ID NO: 817856 - DNA, 75 bp, synthetic construct
  source 1..75: mol_type = other DNA
gcttatcagccagcagcactgggaaaaagtctccggctatatccgtctcggcattgaagaaggcgcaaccctgct

SEQ ID NO: 817857 - DNA, 75 bp, synthetic construct
  source 1..75: mol_type = other DNA
cctgctggcgggcggcccggataaaccgtctgacctgcctgcgcacctgaaaggcggcaacttcctgcgcccaac

SEQ ID NO: 817858 - DNA, 75 bp, synthetic construct
  source 1..75: mol_type = other DNA
gacgacaagatgctcaactacacgctggtgcagccggtgggcgtttgtgcgctggtatcgccgtggaacgtaccg

SEQ ID NO: 817859 - DNA, 75 bp, synthetic construct
  source 1..75: mol_type = other DNA
atatgaaccgccttaaagatttaggcttaactgcgaatgttgctttattcccgcacggcgttatcaactactccg

SEQ ID NO: 817860 - DNA, 75 bp, synthetic construct
  source 1..75: mol_type = other DNA
tgtcttttgtggataacagctggcccgttgaacagcagaaaaacgtcatgctcgccggtggcgataacgcgctga

SEQ ID NO: 817861 - DNA, 75 bp, synthetic construct
  source 1..75: mol_type = other DNA
tttcgtgatatcgccgggcgagtgaatcagcaactggccgctgcggcagatgaagtatggctggtggtttcgggt

SEQ ID NO: 817862 - DNA, 75 bp, synthetic construct
  source 1..75: mol_type = other DNA
cacggagcgggaagagtcgccacgcagaggcgcttattggggactcttcacaggttctgtatatcgccacctcgc

SEQ ID NO: 817863 - DNA, 75 bp, synthetic construct
  source 1..75: mol_type = other DNA
gctttttgttcccgtccttcaactggttgatgcaaatcatgggcacaccgcagctggcgcgaattctgcacccgt

SEQ ID NO: 817864 - DNA, 75 bp, synthetic construct
  source 1..75: mol_type = other DNA
gctcatgaagaaagcgcaactaacctccattgtcatgccgcaggttcagaatgatgcgtggcagaaagcggcgaa

SEQ ID NO: 817865 - DNA, 75 bp, synthetic construct
  source 1..75: mol_type = other DNA
actggcaggccagccaggcgatcggcgtaacgcaacaaccggaatactggcagcatatgctcgacagctacgcgg

SEQ ID NO: 817866 - DNA, 75 bp, synthetic construct
  source 1..75: mol_type = other DNA
agcgaccgttttcaatctcactgctgaagaaacaaaaaatattgtcccgatggcgcgtgcactgatcggtaaccg

SEQ ID NO: 817867 - DNA, 75 bp, synthetic construct
  source 1..75: mol_type = other DNA
tccgcggtacggaaggaccacgcaatgccgttgcgacaggactgatcctctcgtggcagaaggagttcgcccatg

SEQ ID NO: 817868 - DNA, 75 bp, synthetic construct
  source 1..75: mol_type = other DNA
ctgcaggacatcccatccccgcttaagcacctgcttccggattaccaggtgatcgaagctcgcgtggatgcagcc

SEQ ID NO: 817869 - DNA, 75 bp, synthetic construct
  source 1..75: mol_type = other DNA
atcgcctttgtggtgctggtgggcggctcatcgctggactttgagatcccgcagcttatcacggaagccttgtcg

SEQ ID NO: 817870 - DNA, 75 bp, synthetic construct
  source 1..75: mol_type = other DNA
gtcaacgcggaggggcagataacggcggtccatctcgccggggcggggaatatggtcagcctgttgattaaaacc

SEQ ID NO: 817871 - DNA, 75 bp, synthetic construct
  source 1..75: mol_type = other DNA
gcgcaaggtgcagggcgggatggccggcgagtgcgccatggaaaatgccgtcgggatggcggcgatggtgaaagc

SEQ ID NO: 817872 - DNA, 75 bp, synthetic construct
  source 1..75: mol_type = other DNA
tgcgctggtgtgattgatttcgctgatgcggtgcgtctggttgagatgcgcggcaagttcatgcaagaagccgta

SEQ ID NO: 817873 - DNA, 75 bp, synthetic construct
  source 1..75: mol_type = other DNA
gggccagctgaagaactgaataaaacctggcaaacccagccagcgctgttgactgcatctgttgcgctgtatcgc

SEQ ID NO: 817874 - DNA, 75 bp, synthetic construct
  source 1..75: mol_type = other DNA
atgacgcaatttgcatttgtgttccctggacagggttctcaaaccgttggaatgctggctgatatggcggcgagc

SEQ ID NO: 817875 - DNA, 75 bp, synthetic construct
  source 1..75: mol_type = other DNA
catcacagcgacattggcggttacaccaccctgtttgagatgaagcgcagcaaagagctgctgctgcgctggtgc

SEQ ID NO: 817876 - DNA, 75 bp, synthetic construct
  source 1..75: mol_type = other DNA
ctcacgtattaagcagtggaacaaagagggcgttcagttcctggcctatatcaacccatatgtcgccagcgataa

SEQ ID NO: 817877 - DNA, 75 bp, synthetic construct
  source 1..75: mol_type = other DNA
gtgggaagacaaagcaacgctgcgttttgaatgtgctgatacatacatctctctgctagaaaaattaaccacgct

SEQ ID NO: 817878 - DNA, 75 bp, synthetic construct
  source 1..75: mol_type = other DNA
aagcgcctgcaagtcgccgccacctgtgcaaagtcaacgaccggagccagcggcatgggcgatggagaaagccca

SEQ ID NO: 817879 - DNA, 75 bp, synthetic construct
  source 1..75: mol_type = other DNA
cggcatgggcgatggagaaagcccaggacttacagcagatgctgaactcaattattaccgtctccgaagtggaat

SEQ ID NO: 817880 - DNA, 75 bp, synthetic construct
  source 1..75: mol_type = other DNA
atgaagaaaataagtttaaccacgatgattcttttggcgctggtacttggaatgattatcgctccgttagtggtc

SEQ ID NO: 817881 - DNA, 75 bp, synthetic construct
  source 1..75: mol_type = other DNA
atgaatgaacatcacactgtggcagcaacagatgattcaggtcttcaggtcagtggtgacaattctgtcacggtg

SEQ ID NO: 817882 - DNA, 75 bp, synthetic construct
  source 1..75: mol_type = other DNA
tttagccgaagccgaagccgaagccgaagccgaagccgaagccgaagccgaagccgaagccgaagccgaagccga

SEQ ID NO: 817883 - DNA, 75 bp, synthetic construct
  source 1..75: mol_type = other DNA
atggagaaagcccaggacttacagcagatgctgaactcaattattaccgtctccgaagtggaatcgacaagataa

SEQ ID NO: 817884 - DNA, 75 bp, synthetic construct
  source 1..75: mol_type = other DNA
cctgaaaccttatctgaaagaggccgtcgcgctgaatgcgaagtccggtctgccggtcatgcgcccgctgttcct

SEQ ID NO: 817885 - DNA, 75 bp, synthetic construct
  source 1..75: mol_type = other DNA
gtcaggtgaagtcatcgatagcgcctggcaggctgctcgtcagtcccccctgttggttggcatagcctgcgaccg

SEQ ID NO: 817886 - DNA, 75 bp, synthetic construct
  source 1..75: mol_type = other DNA
ccatgcccggcgcagcatcggcaataacgctgcccgcctggtaaaaggcattcctttccgggaaggccactcata

SEQ ID NO: 817887 - DNA, 75 bp, synthetic construct
  source 1..75: mol_type = other DNA
catcacagtgatattggcggctacaccacgctatttgaaatgaaacgcagcaaagaactgctgctgcgctggtgt

SEQ ID NO: 817888 - DNA, 75 bp, synthetic construct
  source 1..75: mol_type = other DNA
ggaggtcgcgcccgctgggtgattttgtcgcgcggcgagcgccaggcgcgggaagcgatggaagaaggcgtgatc

SEQ ID NO: 817889 - DNA, 75 bp, synthetic construct
  source 1..75: mol_type = other DNA
taggctttaacgccgccgagatcatgatcaaacaggccaaagacaacccagaaaaagcagaagagcgctgggcgt

SEQ ID NO: 817890 - DNA, 75 bp, synthetic construct
  source 1..75: mol_type = other DNA
ccatgtccggcgcagcattggctctaacgcagcccgcctggtaaaagggattcccttccgggaattccacacata

SEQ ID NO: 817891 - DNA, 75 bp, synthetic construct
  source 1..75: mol_type = other DNA
aaagaacatgattgaactcggctgcggcggctggatggctgacttcggcgagtatctgcccaccgacacgtacct

SEQ ID NO: 817892 - DNA, 75 bp, synthetic construct
  source 1..75: mol_type = other DNA
agtggaacagcgaaaactacccgcaactggattcacgcattaagcagtggaatcaggagggcgtgcagttcctgg

SEQ ID NO: 817893 - DNA, 75 bp, synthetic construct
  source 1..75: mol_type = other DNA
tggaaaaattaaccgccctgctgggacgccagccagaactgcccgactggatttatgacggagtaacgctcggca

SEQ ID NO: 817894 - DNA, 75 bp, synthetic construct
  source 1..75: mol_type = other DNA
aacaaagctatgttacctggcaggccgattgcaaagagaacgccggaggtgactactactggaccttcttcccac

SEQ ID NO: 817895 - DNA, 75 bp, synthetic construct
  source 1..75: mol_type = other DNA
ctggttacgtcttgccgcgcagccagaagaccatatctacggctgcggcgagcaattctcgtactttgatctgcg

SEQ ID NO: 817896 - DNA, 75 bp, synthetic construct
  source 1..75: mol_type = other DNA
ccggatggctggttaatccatttcagccgcggttctgacattagcgccacattgcgtatctccgccgacgatcag

SEQ ID NO: 817897 - DNA, 75 bp, synthetic construct
  source 1..75: mol_type = other DNA
ctgtgggactccaagtcctctactggtttcactgttggtacgctccagcaagacgctctgaacatctgtgagaat

SEQ ID NO: 817898 - DNA, 75 bp, synthetic construct
  source 1..75: mol_type = other DNA
tatgttgagttgcttgaccgtatgccgagtacagaggtgttcactggatacctgctgaatgctcttttaatacgc

SEQ ID NO: 817899 - DNA, 75 bp, synthetic construct
  source 1..75: mol_type = other DNA
ctttacgaggcaatgcagcggcttgaaacaaaaatcggtcagtttatcgctgatggggttgatgaacatcaacta

SEQ ID NO: 817900 - DNA, 75 bp, synthetic construct
  source 1..75: mol_type = other DNA
gatgggatcgggttggttggctgatcttatgctcccctggctgggcgttttgttagtctcagtagtcggaggtga

SEQ ID NO: 817901 - DNA, 75 bp, synthetic construct
  source 1..75: mol_type = other DNA
atggacgcttacatcatcgccggattaattggtatttctgtatttctggtgagttttgttattgccgtactgata

SEQ ID NO: 817902 - DNA, 75 bp, synthetic construct
  source 1..75: mol_type = other DNA
gttttaccaaaaaacaaatcgccgaggcaaaaatcctcgacaataacggaacatactttatcaacggctccatcc

SEQ ID NO: 817903 - DNA, 75 bp, synthetic construct
  source 1..75: mol_type = other DNA
gaaaaaggcaagccgagcgaacacctcattaaagacttattcgccgacggcgttcttgttgctgttaatccgatt

SEQ ID NO: 817904 - DNA, 75 bp, synthetic construct
  source 1..75: mol_type = other DNA
gtcacgtgtccagtatcggtcgggcgatttatgatcagagcgttgaaagtgactcaagccttattccggatgtga

SEQ ID NO: 817905 - DNA, 75 bp, synthetic construct
  source 1..75: mol_type = other DNA
gcccaacgcgttcccgtccgctttgcgctggataaagttccaggcgatgtcacgctggtgtcgggcaccacctgt

SEQ ID NO: 817906 - DNA, 75 bp, synthetic construct
  source 1..75: mol_type = other DNA
tctcaacaatcattgtagcgatagttgcggttcttgccggatggtggctgtggaattattacatgcaatctccgt

SEQ ID NO: 817907 - DNA, 75 bp, synthetic construct
  source 1..75: mol_type = other DNA
ttccagatcgccgagctgaatgcccgggcacaactggcaaaagcgcaatctgatctcgccaaagccaataacgaa

SEQ ID NO: 817908 - DNA, 75 bp, synthetic construct
  source 1..75: mol_type = other DNA
gtgtctggacgtattgttgcgatgaatataaaagacaaccagttggttaatgctggtgatattttactcaccatc

SEQ ID NO: 817909 - DNA, 75 bp, synthetic construct
  source 1..75: mol_type = other DNA
ccgcatcggcgattacgctgacaccgggaaaccgctgtttgcccttgtcgacagccactcgttttacgtcattgg

SEQ ID NO: 817910 - DNA, 75 bp, synthetic construct
  source 1..75: mol_type = other DNA
agacgctggctgtcagagataacggagacgtttgactttgaggcagagtcactgtgttttgtggcctggtggtaa

SEQ ID NO: 817911 - DNA, 75 bp, synthetic construct
  source 1..75: mol_type = other DNA
tgctgacagaaaggtgacctttgtccccgcacagggagcgacgtccctgtctgaaacggcgttgctgacgcactg

SEQ ID NO: 817912 - DNA, 75 bp, synthetic construct
  source 1..75: mol_type = other DNA
tggccactcattctgccctggtgtgatgctcatcgctgggtattttttgccgcggcagatacagctcgcaccacg

SEQ ID NO: 817913 - DNA, 75 bp, synthetic construct
  source 1..75: mol_type = other DNA
ttatctgttacacaaagtcaaggtgttgttcccagagagtgggtagaaaacagaatggttatgccatctggcaat

SEQ ID NO: 817914 - DNA, 75 bp, synthetic construct
  source 1..75: mol_type = other DNA
tctgaggtgtctgactacggtattatcgctcatgagagccaactgaaagcactgtcccgtctggctgctaagcaa

SEQ ID NO: 817915 - DNA, 75 bp, synthetic construct
  source 1..75: mol_type = other DNA
tggccgatcattctgccctggtgcgatgctcatcgctgggtattttttgccgcggcagaaacggatcgcaccacg

SEQ ID NO: 817916 - DNA, 75 bp, synthetic construct
  source 1..75: mol_type = other DNA
gaaaacctgggccaccggcgtgatgcttattggcgaagtcgacctgctcaacgcgttaccagaacgcctaaaaac

SEQ ID NO: 817917 - DNA, 75 bp, synthetic construct
  source 1..75: mol_type = other DNA
ctctgaggctattgttgaagtttcatttggttttccttcgttgattggcttcacttttatgtcaggaatgctcag

SEQ ID NO: 817918 - DNA, 75 bp, synthetic construct
  source 1..75: mol_type = other DNA
cgcgccctgttgttacgaccacaacttcttctgctggatgaacccacctcggcgttggatatgtcggtacaagcg

SEQ ID NO: 817919 - DNA, 75 bp, synthetic construct
  source 1..75: mol_type = other DNA
acacaatgagtatttattttgcattctaaatagtgatgttttcaaaatgttatcagggacatttcttacatcaac

SEQ ID NO: 817920 - DNA, 75 bp, synthetic construct
  source 1..75: mol_type = other DNA
taaagaatataaaaccaccctgatcaacagcgccgtgacaggaaaaatcaagatcaccccagaaatggttgagca

SEQ ID NO: 817921 - DNA, 75 bp, synthetic construct
  source 1..75: mol_type = other DNA
tttgcgacatgtgcaaaagccagttggatctggtgcatatcgttattgaagtggtcaacaaaaactggccaccgc

SEQ ID NO: 817922 - DNA, 75 bp, synthetic construct
  source 1..75: mol_type = other DNA
ggcggataaatcctctccgaaggtgattttcctgcacatgatggggtctcatccgaacccgtgtgaccggcttca

SEQ ID NO: 817923 - DNA, 75 bp, synthetic construct
  source 1..75: mol_type = other DNA
cacgattgttatcgttactggtgagagtgtgcgcagggattatatgtcggtatatggttatcccgtgccaaccac

SEQ ID NO: 817924 - DNA, 75 bp, synthetic construct
  source 1..75: mol_type = other DNA
atccttcgccggcattcccgtcatttcgccatgctttacttttctgacaatgggatgtcggtcagcgatagtgct

SEQ ID NO: 817925 - DNA, 75 bp, synthetic construct
  source 1..75: mol_type = other DNA
agaatatgcctggcagcaggttcttaaagaacttagccagcaatatcagcagcttgatgatgaatatttgcaagc

SEQ ID NO: 817926 - DNA, 75 bp, synthetic construct
  source 1..75: mol_type = other DNA
aactgggtttaccgtcatccgacagtgaaatctctgacatatgccctccgcacgatgaagaggctcgttctctgg

SEQ ID NO: 817927 - DNA, 75 bp, synthetic construct
  source 1..75: mol_type = other DNA
acaacagttttattgtcgcgttgttgcagaccacaactgatgaggcagcggagtttaccgggatgattcctgttt

SEQ ID NO: 817928 - DNA, 75 bp, synthetic construct
  source 1..75: mol_type = other DNA
agtccgtcagcaggaaaatcagtgcccgtaatttcgcaggcatttttcagtggctgaccggtattcgtaccgaaa

SEQ ID NO: 817929 - DNA, 75 bp, synthetic construct
  source 1..75: mol_type = other DNA
atgacaactgcggcaagatgctggtcgccacgtccgatctcgaaatggaacggatgcgcgccttatgggaacgca

SEQ ID NO: 817930 - DNA, 75 bp, synthetic construct
  source 1..75: mol_type = other DNA
gagcataaaaacggcgtggtgatacgtccccgtcagggcgacgaatatgaagcatcgacgctgattagctgttcc

SEQ ID NO: 817931 - DNA, 75 bp, synthetic construct
  source 1..75: mol_type = other DNA
gaagataatgaacccattatggtttttaacggagacaagaatgtaccgacagacagccttgagtcacagcctctg

SEQ ID NO: 817932 - DNA, 75 bp, synthetic construct
  source 1..75: mol_type = other DNA
tcagtcagcgacagtgctaatcctgttcatcatgatggccatatacaaggaggctacagcgttcccctgattatt

SEQ ID NO: 817933 - DNA, 75 bp, synthetic construct
  source 1..75: mol_type = other DNA
tcctgccgggtgtaccgttgtatgacacgattgttatcgtcactggtgagagtgtgcgcagggattatatgtcgg

SEQ ID NO: 817934 - DNA, 75 bp, synthetic construct
  source 1..75: mol_type = other DNA
catgcgctggaagccaaacgtgaacaactgggtttaccgtcctccgacactgaaatctctgactcatgtcctgcg

SEQ ID NO: 817935 - DNA, 75 bp, synthetic construct
  source 1..75: mol_type = other DNA
gacgggccacaacagcggcgtgatccatgccggggtttattacacgcccggtagcctgaaggcgcagttttgcct

SEQ ID NO: 817936 - DNA, 75 bp, synthetic construct
  source 1..75: mol_type = other DNA
tattatctgcccgttccgtggcgagtatttccgccttgcgccggagcataaccagattgttaaccacctgattta

SEQ ID NO: 817937 - DNA, 75 bp, synthetic construct
  source 1..75: mol_type = other DNA
atcagttttgctaatccagctcagattgatctggcttccgaagtcacccaatcatttgctcttgataatggtgca

SEQ ID NO: 817938 - DNA, 75 bp, synthetic construct
  source 1..75: mol_type = other DNA
aaacgattctgaatgtgaacgaagagtttgctcctctgtctgatttaccttcgttatctgtcaataatgacgcgg

SEQ ID NO: 817939 - DNA, 75 bp, synthetic construct
  source 1..75: mol_type = other DNA
gttgtaagtattggtagaagtgatgagtttgtgcctattgatactgaagcagtatcaaaagaagatgaagaaaaa

SEQ ID NO: 817940 - DNA, 75 bp, synthetic construct
  source 1..75: mol_type = other DNA
cggatgcgcgccttatgggaacgcacagcggcgaacggtatcgagcgcgaatggctaaacgccgacgaactgcgc

SEQ ID NO: 817941 - DNA, 75 bp, synthetic construct
  source 1..75: mol_type = other DNA
gggcaatggcaggtctgcctgaccggtgactccgactggttcgataatgctcctgctgcaagtctgtactatggc

SEQ ID NO: 817942 - DNA, 75 bp, synthetic construct
  source 1..75: mol_type = other DNA
atgaagaagcctctggttattatcagtgcctgtcagttcaccaggctggcactggagtctctcatcccagcggac

SEQ ID NO: 817943 - DNA, 75 bp, synthetic construct
  source 1..75: mol_type = other DNA
gattacgccaggccattgacttcacgttattagatctgatgacgttaacagcgaaagcagaagccagcgggcttg

SEQ ID NO: 817944 - DNA, 75 bp, synthetic construct
  source 1..75: mol_type = other DNA
gcctattaaggctagtaaagatgtagctttaaaagttgcagagttttcatttctcaggactttgagagaacttcc

SEQ ID NO: 817945 - DNA, 75 bp, synthetic construct
  source 1..75: mol_type = other DNA
gagtgtgcgcagggattatatgtcggtatatggctatcccgggccaaccacaccgtggctgaatactgctcccgg

SEQ ID NO: 817946 - DNA, 75 bp, synthetic construct
  source 1..75: mol_type = other DNA
gcttaagattctgatgcagggcatgagtttcagtgagattgcccgttatgaactggatttgcccctatatttcca

SEQ ID NO: 817947 - DNA, 75 bp, synthetic construct
  source 1..75: mol_type = other DNA
catgccggggtctattacacacccggcagcctgaaagcgcagttttgcctggcggggaaccgcgccaccaaagcc

SEQ ID NO: 817948 - DNA, 75 bp, synthetic construct
  source 1..75: mol_type = other DNA
tcagataaatggagaagtcgttcaaacaacggcttggattattaaaaatagacggttggaaaactataagccaac

SEQ ID NO: 817949 - DNA, 75 bp, synthetic construct
  source 1..75: mol_type = other DNA
ttaaggttaactacggcaaatttggcgatctgctggcggatgtcaaggcgatcaccggcagtgcgccacaggagg

SEQ ID NO: 817950 - DNA, 75 bp, synthetic construct
  source 1..75: mol_type = other DNA
ctgcaggaaaacctcgaatttatcgccgaaagtctttgtttatacgcgatcaagccgaaaaaaggcgaatctgcg

SEQ ID NO: 817951 - DNA, 75 bp, synthetic construct
  source 1..75: mol_type = other DNA
attttttgagtcagcttatgtcccaatttgtgcttttagcatttcaaataccccattaagctggaatgcaaaatt

SEQ ID NO: 817952 - DNA, 75 bp, synthetic construct
  source 1..75: mol_type = other DNA
atattccgtcaatcgcgaaggtttggtctacgcccatgaaggtaacaaaggtttttccgaattggtcactgaagg

SEQ ID NO: 817953 - DNA, 75 bp, synthetic construct
  source 1..75: mol_type = other DNA
aaaatgtaaaaatagagttattccttaaggagttatataaaaattgtagtgattgggtacgtttatctcaagaaa

SEQ ID NO: 817954 - DNA, 75 bp, synthetic construct
  source 1..75: mol_type = other DNA
ctggagacgattcgccgctatttatcaacccagttctacaaagatcatctgaagacttacaaaaaacggcctatt

SEQ ID NO: 817955 - DNA, 75 bp, synthetic construct
  source 1..75: mol_type = other DNA
atctgtaaactcgatagttaattcatatgaagataaactgtctaccgcgacaattttagaaaaagagataaataa

SEQ ID NO: 817956 - DNA, 75 bp, synthetic construct
  source 1..75: mol_type = other DNA
ccatcggctgccaaatgggccgctactccctcgatcgcgaaggccttgtctacgcccatgaaggtaacaaaggtt

SEQ ID NO: 817957 - DNA, 75 bp, synthetic construct
  source 1..75: mol_type = other DNA
gcatataacattaacaaaaatgactatcaggaaattagcgaaagagaactaacattatttattaacccatattat

SEQ ID NO: 817958 - DNA, 75 bp, synthetic construct
  source 1..75: mol_type = other DNA
tgggtcgccagtggctgcaaacctatccggactccaacctgaaaggcaaaatgccgtactacattgagccagcgg

SEQ ID NO: 817959 - DNA, 75 bp, synthetic construct
  source 1..75: mol_type = other DNA
tcagttctatatttccgagaaaaaagatgccgtgatcggcaaggtggtgaagagcgaagatattcctgctgctac

SEQ ID NO: 817960 - DNA, 75 bp, synthetic construct
  source 1..75: mol_type = other DNA
acgacacttgggatcgctgcagataaaaaaggcaatttgcagattgccgaggccgaaaccattggcgagaccgtg

SEQ ID NO: 817961 - DNA, 75 bp, synthetic construct
  source 1..75: mol_type = other DNA
ctgatagagcaagaaattattacatcgcttgtgcagcttgaatattcaggctttgacggtgcaactgtgccaatt

SEQ ID NO: 817962 - DNA, 75 bp, synthetic construct
  source 1..75: mol_type = other DNA
gataaaaacagataaaggaggttcttttcgaaaatggtttggaaatgatgaattcataatgaattgggaaaataa

SEQ ID NO: 817963 - DNA, 75 bp, synthetic construct
  source 1..75: mol_type = other DNA
gtacaaaacgataaaatatatctaaatgcaattgatagaaagagcgcgttaagctctcagaaaaagtggttccca

SEQ ID NO: 817964 - DNA, 75 bp, synthetic construct
  source 1..75: mol_type = other DNA
accaaaggcagcatgaagggtgcggaattcggcagcgccgatggcctgagctttgatcaccgcggcgtgctatgg

SEQ ID NO: 817965 - DNA, 75 bp, synthetic construct
  source 1..75: mol_type = other DNA
cgtcatcgttcgcacgccgcatcaccgttaacacgccgatgaaaatcaccggtccggcgctgcataacccactga

SEQ ID NO: 817966 - DNA, 75 bp, synthetic construct
  source 1..75: mol_type = other DNA
caactttacaaaccgttgcatccgggagtgctacatggaagacgcagaaaactggctggattccttgccagaaaa

SEQ ID NO: 817967 - DNA, 75 bp, synthetic construct
  source 1..75: mol_type = other DNA
caaaaaattcagcgaactgcgtagctatgacgaccgcctgcgtcactatgctgatatgagaatcagtattgatct

SEQ ID NO: 817968 - DNA, 75 bp, synthetic construct
  source 1..75: mol_type = other DNA
ttaatgaatcctacgttaaatttccaggtgggtaatgtttctaatctaccagttccttctcaaatgaatgaatca

SEQ ID NO: 817969 - DNA, 75 bp, synthetic construct
  source 1..75: mol_type = other DNA
gtgctagatactccgatacccatgctattttcgatgtagctggatcatctgcgtttccaggaaaagattgcattt

SEQ ID NO: 817970 - DNA, 75 bp, synthetic construct
  source 1..75: mol_type = other DNA
tacaaaaagcggccaatctactggctattcagctccggcaaagagaaagcctttgagtgtctgatgtatctgcat

SEQ ID NO: 817971 - DNA, 75 bp, synthetic construct
  source 1..75: mol_type = other DNA
tagagcgcgaaaacaataaatattttattgaaaagtacaatttacataactcaatcagtagttctgtagatctaa

SEQ ID NO: 817972 - DNA, 75 bp, synthetic construct
  source 1..75: mol_type = other DNA
cacggttatcttgatcacggcttccgtatgttgtctcacccggagaccccggccgcgtttgaggtgctggatcat

SEQ ID NO: 817973 - DNA, 75 bp, synthetic construct
  source 1..75: mol_type = other DNA
gtcatcagctcggggtttggattcaccggcttgatggacaagctcggcatcgagcgccgggctatcacttccgga

SEQ ID NO: 817974 - DNA, 75 bp, synthetic construct
  source 1..75: mol_type = other DNA
gcaattaatactggcaatgaaatggaaaacgctggtgaggctctggtgtggctggtcgactactacaaggagcgt

SEQ ID NO: 817975 - DNA, 75 bp, synthetic construct
  source 1..75: mol_type = other DNA
tcgataccgacaaacgagagaaaaccgaacgtgtgggtgcggaacatcagaccatgcgcttcaaagtaactttcg

SEQ ID NO: 817976 - DNA, 75 bp, synthetic construct
  source 1..75: mol_type = other DNA
gaagaaatgccggatttatataacctaattaggcagaaatatcaaaccttacagcctatccaagttcaacagcaa

SEQ ID NO: 817977 - DNA, 75 bp, synthetic construct
  source 1..75: mol_type = other DNA
tgcaaccctgcggcgttcccgtcattccgggcgctattccttttctgacatcgttcagccaggcgcaggataaag

SEQ ID NO: 817978 - DNA, 75 bp, synthetic construct
  source 1..75: mol_type = other DNA
atgaccgctgttatcgcgctggctaacgggaaaggtggggtgaaaaagtcctcgatgtcacgggctatcgccacc

SEQ ID NO: 817979 - DNA, 75 bp, synthetic construct
  source 1..75: mol_type = other DNA
gtttttattcttcccgggcatgtgtgtaataaccactgccgcatgcggatacactgagaagaatgccaccgggaa

SEQ ID NO: 817980 - DNA, 75 bp, synthetic construct
  source 1..75: mol_type = other DNA
gtttttattcttttttgtcgtttctgcaataaccacaattgcatgcggatacactgagaagaatgccaccgggaa

SEQ ID NO: 817981 - DNA, 75 bp, synthetic construct
  source 1..75: mol_type = other DNA
tgaacccattatggtttttaacggagagaggaatgtaccggcagacagtctgaaaccgcagcctctgattcttcc

SEQ ID NO: 817982 - DNA, 75 bp, synthetic construct
  source 1..75: mol_type = other DNA
ccaattctggcgcgagagctggacggcggcatttttgaaattctcggtggcgaacatcgctggcgtgccgcgatg

SEQ ID NO: 817983 - DNA, 75 bp, synthetic construct
  source 1..75: mol_type = other DNA
cattttgccgatgacgttatcgcccagcgcggcgtgcggcacgggcatttgcagtgcttgccgaaggaagattaa

SEQ ID NO: 817984 - DNA, 75 bp, synthetic construct
  source 1..75: mol_type = other DNA
cgccagcatcagtaaactggataactttctcggtcagcttgatggtatccttcgccggcattcccgtcattttgc

SEQ ID NO: 817985 - DNA, 75 bp, synthetic construct
  source 1..75: mol_type = other DNA
cataggcagtaaggctgtaaaagtaaaacctagaaaagatattaaaaaaagagggcgaaaagaggaatacactac

SEQ ID NO: 817986 - DNA, 75 bp, synthetic construct
  source 1..75: mol_type = other DNA
tatctcgggcagaaaccgacaacggttattgatctcaccgatgatacgccagtcgtattgcgtgaaggtgtaggt

SEQ ID NO: 817987 - DNA, 75 bp, synthetic construct
  source 1..75: mol_type = other DNA
gccgtctgttgcaggaaaaacgcaaaaccatcggtatgcgtgtgccttctaacccgattgcgcaggcgctgcttg

SEQ ID NO: 817988 - DNA, 75 bp, synthetic construct
  source 1..75: mol_type = other DNA
tatctcgggcagaaaccaacaacggttatcgatcttactgatgatacgccggtcgtattgcgtgaaggcgtaggt

SEQ ID NO: 817989 - DNA, 75 bp, synthetic construct
  source 1..75: mol_type = other DNA
taaatcctaatgcacaaattattgctgcaacccattctcctgaagttgcatctaaatataaaaacgccattttca

SEQ ID NO: 817990 - DNA, 75 bp, synthetic construct
  source 1..75: mol_type = other DNA
attatcagatcctttgaagatcgtaggctgcctatatatatgaggagaaaatatcaggaagacgttgaaaaactt

SEQ ID NO: 817991 - DNA, 75 bp, synthetic construct
  source 1..75: mol_type = other DNA
cccgagcgggctcaggccggactattcagctggtcagcgagctggcggggacacccggtccggcaaaagcctggg

SEQ ID NO: 817992 - DNA, 75 bp, synthetic construct
  source 1..75: mol_type = other DNA
acgcctaataacctgtttgcgctaattccctcggccagaaagcatctgtttatcgcgggcggtattggtatcacc

SEQ ID NO: 817993 - DNA, 75 bp, synthetic construct
  source 1..75: mol_type = other DNA
cagtcatcatcgtggtgcatccggtggcagcggctggcgactggctccacgtaataacttcatggtggaaacgct

SEQ ID NO: 817994 - DNA, 75 bp, synthetic construct
  source 1..75: mol_type = other DNA
ggtgattaaacgcgggcgttccggctcgggagagaacccggggtatcagaccgggcgtctggcccgctccattgg

SEQ ID NO: 817995 - DNA, 75 bp, synthetic construct
  source 1..75: mol_type = other DNA
gatatgagggagaaacttcagtctgcttctgcaggcgaactgctcaacagtatgaagagcagagctgcatccgtt

SEQ ID NO: 817996 - DNA, 75 bp, synthetic construct
  source 1..75: mol_type = other DNA
cgcaacattgcgcctcaccggaacctttccggcttgccgctgattttacgattgctttttaccgtcagcacccgg

SEQ ID NO: 817997 - DNA, 75 bp, synthetic construct
  source 1..75: mol_type = other DNA
gagcgtatttgtcgtattcgccagctgccggacggtcacaactttaccctgatgtgtcgcgatctttctgagctc

SEQ ID NO: 817998 - DNA, 75 bp, synthetic construct
  source 1..75: mol_type = other DNA
atcattttctggtcagtgccgcgattctggtattcatggtgattttctggcgaacacaccaccgcggtcaccgta

SEQ ID NO: 817999 - DNA, 75 bp, synthetic construct
  source 1..75: mol_type = other DNA
ataccagtctttgcaggagaaaattccagcaattatggtgacaggaagccatattccgtttgatcgaaatggtct

SEQ ID NO: 818000 - DNA, 75 bp, synthetic construct
  source 1..75: mol_type = other DNA
aaacatatcggcatatatgagcattcgagtgcaggtcgtgatatttatgcagaactcttatgtatgctaggtgca

SEQ ID NO: 818001 - DNA, 75 bp, synthetic construct
  source 1..75: mol_type = other DNA
ttgatattggataacagtgatattattcatttgcggccatcaggaaacgcgcctgaattacgttgttatgctgaa

SEQ ID NO: 818002 - DNA, 75 bp, synthetic construct
  source 1..75: mol_type = other DNA
gagattttgggctcgtcggggattcgccgggtgctgcaaaaccatctacgctcaggactgggcgagatgaaaaac

SEQ ID NO: 818003 - DNA, 75 bp, synthetic construct
  source 1..75: mol_type = other DNA
tttagtttttctcatgtggctttagctattgataatagaccaagcagttattctatagtgcaatattgcgcttca

SEQ ID NO: 818004 - DNA, 75 bp, synthetic construct
  source 1..75: mol_type = other DNA
atgacaaacatgatctcatatcagggacttgttcgcaccttccttaaaggagcgcggattggtatttatgaacac

SEQ ID NO: 818005 - DNA, 75 bp, synthetic construct
  source 1..75: mol_type = other DNA
ctgatatggtcgctggaatcgcaaactgtgcccgttgcttttacagccaagcggcggcggattgtgcgtcagtgg

SEQ ID NO: 818006 - DNA, 75 bp, synthetic construct
  source 1..75: mol_type = other DNA
gcttccacctgccggtgtggaacgttacatctcaacgaagagtttgttcacattgaaccgcaatggctggatgag

SEQ ID NO: 818007 - DNA, 75 bp, synthetic construct
  source 1..75: mol_type = other DNA
ttatcaggcgacagaaggctttctcgcttccacctgccggtgtggaacgttacatctcaacgaagagtttgttca

SEQ ID NO: 818008 - DNA, 75 bp, synthetic construct
  source 1..75: mol_type = other DNA
tagaaagatcaaagccttacctacacgagatgcattactccctatattagttttactttctgcaaataaaaaaat

SEQ ID NO: 818009 - DNA, 75 bp, synthetic construct
  source 1..75: mol_type = other DNA
gtgataaacaactatctaatttgtaatgaaataattacaactaatcgcatttcgttcggaactagtggcgctcgc

SEQ ID NO: 818010 - DNA, 75 bp, synthetic construct
  source 1..75: mol_type = other DNA
gcgttggctattccagtgagttgtaatacagcaattgaacaatctcataaatttgcaaatatacaacggactaaa

SEQ ID NO: 818011 - DNA, 75 bp, synthetic construct
  source 1..75: mol_type = other DNA
gagcgcgaaccgaatatcaccgggcttggcggtatttttgtgccgtccagcggcattgtcagctaccgcgaagtc

SEQ ID NO: 818012 - DNA, 75 bp, synthetic construct
  source 1..75: mol_type = other DNA
cggcgaaggtgaagataatctcctgacgttatcccttccggcatctgcctgttctccttttgccgttgaacgcat

SEQ ID NO: 818013 - DNA, 75 bp, synthetic construct
  source 1..75: mol_type = other DNA
acttcggaggcgtatcaaaaaccgcaagtgttcttggtatttcccacccggcagtttgccgatggggtgaagtca

SEQ ID NO: 818014 - DNA, 75 bp, synthetic construct
  source 1..75: mol_type = other DNA
atgacgtacggtaaaatcaacaacagtcttattgtcgcgttgttgcagaccacaactgatgaggcagcggagttt

SEQ ID NO: 818015 - DNA, 75 bp, synthetic construct
  source 1..75: mol_type = other DNA
ttacgccagcgtccccccgcctgcatacgaccaatcaaccaggtcgataacttatttattctgccgatagcggag

SEQ ID NO: 818016 - DNA, 75 bp, synthetic construct
  source 1..75: mol_type = other DNA
tgccgttgaacgcatggcggcgcttttgcaacaaacagacgaccccgtgagcctggtttctggctttgtcagttt

SEQ ID NO: 818017 - DNA, 75 bp, synthetic construct
  source 1..75: mol_type = other DNA
ctgaaagttcatgatttaaatgaagatgcggaatttgatgagaacggagttgaggttttgacgaaaaggccttag

SEQ ID NO: 818018 - DNA, 75 bp, synthetic construct
  source 1..75: mol_type = other DNA
atggcaaaaatcttccaggccagaggcggcgagattattcataacgccgaagtcagcgccctcagtgagcataaa

SEQ ID NO: 818019 - DNA, 75 bp, synthetic construct
  source 1..75: mol_type = other DNA
aaatgctcggactcgaaccgggctttatcatctgccgttccgtggcgagtatttccgccttgcgccggagcataa

SEQ ID NO: 818020 - DNA, 75 bp, synthetic construct
  source 1..75: mol_type = other DNA
acactgagaagaatgccacaggaaatgtgctgcttctgtttctccttcttctccttgcacacagaaataccctca

SEQ ID NO: 818021 - DNA, 75 bp, synthetic construct
  source 1..75: mol_type = other DNA
cggacaacacaccccggattttattgtttttattcttttttgttgtttctgtcataaccacaattgcatgcggat

SEQ ID NO: 818022 - DNA, 75 bp, synthetic construct
  source 1..75: mol_type = other DNA
atgaatatcagaaaactgttttgtccgggcaatacaccccggattttattgtttttattcttttttgttgtttct

SEQ ID NO: 818023 - DNA, 75 bp, synthetic construct
  source 1..75: mol_type = other DNA
ggccaaccggtgtaccgcgttttgtggccgagagcgacagcagcggtcatgcggatcagacatgggcttgttttc

SEQ ID NO: 818024 - DNA, 75 bp, synthetic construct
  source 1..75: mol_type = other DNA
gagcggtatcgcactgttagtggttggcgtggtcattgcggtcagagcaaaaccggaaaaacccttaattgaacc

SEQ ID NO: 818025 - DNA, 75 bp, synthetic construct
  source 1..75: mol_type = other DNA
gttagacaccaccggcggtacaggtacggctattgtagttcaggctgcaggtaaaaacgtttctttcgatggcac

SEQ ID NO: 818026 - DNA, 75 bp, synthetic construct
  source 1..75: mol_type = other DNA
tttccagcactacccaacgatggcatcgcaacggcttttattttgtctggagcataacgttcaaagcacattgca

SEQ ID NO: 818027 - DNA, 75 bp, synthetic construct
  source 1..75: mol_type = other DNA
gtaacgatggtcgccccagcgcaaccgcaccgaaaggtacggcgatccggatgacggtgattgtgcgggatagcg

SEQ ID NO: 818028 - DNA, 75 bp, synthetic construct
  source 1..75: mol_type = other DNA
atgttccctttattctcaagcgagagggttcaacgaatcgtcaaaatgtcacgatgataaataagtcgattacgg

SEQ ID NO: 818029 - DNA, 75 bp, synthetic construct
  source 1..75: mol_type = other DNA
gctggcccgtttcgaagccctatatctcgaataccgtcgcagatgcattcactcaactctttaagtttgatgtcg

SEQ ID NO: 818030 - DNA, 75 bp, synthetic construct
  source 1..75: mol_type = other DNA
tccctcaggctgatgaaaactggactgtcgaaaccggttcgccggcgaccagttccgcgccttatcgggtttaca

SEQ ID NO: 818031 - DNA, 75 bp, synthetic construct
  source 1..75: mol_type = other DNA
tctgtataacctgccgaccactggtctgcgtttctttaccgtgtatggcccgtggggacgtccggacatggcgct

SEQ ID NO: 818032 - DNA, 75 bp, synthetic construct
  source 1..75: mol_type = other DNA
acattggcaacagctcgccggtggaactgatggactacatcacctctctggaagaggcgctggggatggaagcaa

SEQ ID NO: 818033 - DNA, 75 bp, synthetic construct
  source 1..75: mol_type = other DNA
gatcccattcagttaacccaaggcttactgcggacacctcgattttgtgtggcgctcgataacgcaacgctctgg

SEQ ID NO: 818034 - DNA, 75 bp, synthetic construct
  source 1..75: mol_type = other DNA
ttgttatcgacccgcatggcaaacgtgtgaagtttgatggtcggacctctaccggggtttcaaatctgattaatg

SEQ ID NO: 818035 - DNA, 75 bp, synthetic construct
  source 1..75: mol_type = other DNA
gcgtgtatatcaccggtggcggttgcagcggcttccagtatggtttcacctttgatgatctggtgaacgaaggcg

SEQ ID NO: 818036 - DNA, 75 bp, synthetic construct
  source 1..75: mol_type = other DNA
ttggatcgtgcaaaatacagtgtcgatagttcggctgatgatctgaccctcgtgcctgtcacacctgctggcgta

SEQ ID NO: 818037 - DNA, 75 bp, synthetic construct
  source 1..75: mol_type = other DNA
aacacgaaagattacctccaaatgtatacccaaataaatatagttatgtatggaaaccaacatccagagaatctg

SEQ ID NO: 818038 - DNA, 75 bp, synthetic construct
  source 1..75: mol_type = other DNA
atatgagcgtgggtatgtgaagaataacccatgcaaaggagtcagaaaattctctcttaaagcccgcactgttta

SEQ ID NO: 818039 - DNA, 75 bp, synthetic construct
  source 1..75: mol_type = other DNA
ggaaaagtgcttgctgataatgtaaaaattgagcaggtaagaattttcatggataagcggggacttgagagtaag

SEQ ID NO: 818040 - DNA, 75 bp, synthetic construct
  source 1..75: mol_type = other DNA
tcagagggcgttactggcagtcttcggaaaagtactggctgataatgtaaaaattgagcaggtaagaattttcat

SEQ ID NO: 818041 - DNA, 75 bp, synthetic construct
  source 1..75: mol_type = other DNA
ggaagcagtcgcgacaaacagattttcagtggacataaaacagaaaatcaggtgttgatttatgatcgtaaaaca

SEQ ID NO: 818042 - DNA, 75 bp, synthetic construct
  source 1..75: mol_type = other DNA
gcgacacctgcagttaaagccgcgatggaaattgcgtatctttgcgctgcaagggtatctgatgttcttaaaatg

SEQ ID NO: 818043 - DNA, 75 bp, synthetic construct
  source 1..75: mol_type = other DNA
aaactttactgttcgtcaggacaatacgccgggttataaaatgccgctgacggtaacgctggataaatacccaac

SEQ ID NO: 818044 - DNA, 75 bp, synthetic construct
  source 1..75: mol_type = other DNA
attcgctcactaaagtgaatataaataatgaaagctggcctgcgccatatattacccagcgatatttgccggagc

SEQ ID NO: 818045 - DNA, 75 bp, synthetic construct
  source 1..75: mol_type = other DNA
atggtgcgctggaaactgatttggggctgcctcttaacgcaggtaattactggtgggcgtacgaccaaactgttt

SEQ ID NO: 818046 - DNA, 75 bp, synthetic construct
  source 1..75: mol_type = other DNA
tcgcaatggaaattgcctatctgtgtgcagcgagggtttccgatgtgttatcactgaaatgggagcagattggaa

SEQ ID NO: 818047 - DNA, 75 bp, synthetic construct
  source 1..75: mol_type = other DNA
aaagttgcttgccgtattcggtaaggtaccagcggatgccataaaaccagaacacatccgtcgatacatggacaa

SEQ ID NO: 818048 - DNA, 75 bp, synthetic construct
  source 1..75: mol_type = other DNA
ttggtgacttacctgctcctgttggaactgatattcgtaatgaacttcctccgctgaacttacattttgggcgta

SEQ ID NO: 818049 - DNA, 75 bp, synthetic construct
  source 1..75: mol_type = other DNA
agaagaatatgatgccgatccagccgggcgatgtgctggacaccagcgcagacacccaaccgctgtatgacctgg

SEQ ID NO: 818050 - DNA, 75 bp, synthetic construct
  source 1..75: mol_type = other DNA
cccgctttttgcatcagcaggtaaaagtgggcgatcggttaacgatttcaacgcctaataacctgtttgcgctaa

SEQ ID NO: 818051 - DNA, 75 bp, synthetic construct
  source 1..75: mol_type = other DNA
ggtctgctgggcgtggtatgccctgcgcaacgcccgctggttgcgggaaaatcccgacaaacatccgatgatgtg

SEQ ID NO: 818052 - DNA, 75 bp, synthetic construct
  source 1..75: mol_type = other DNA
ggtctgctgggcgtggtatgccttgcgcaacgcccgttggctgcgggaaaacccagacaaacatccgatgatgtg

SEQ ID NO: 818053 - DNA, 75 bp, synthetic construct
  source 1..75: mol_type = other DNA
cgcccaaccagggtgaaagcattccttagcgcggcgcattcggcatcaccattggcagaaatggttcagaggttg

SEQ ID NO: 818054 - DNA, 75 bp, synthetic construct
  source 1..75: mol_type = other DNA
ggccgttagtaaagctgatgatgcccgtggaattctgaaggcatttaaggcattgcaaagtcgggttaataaaca

SEQ ID NO: 818055 - DNA, 75 bp, synthetic construct
  source 1..75: mol_type = other DNA
gagccattattctgtctccgtatatatgcagcggagctgttatctctagggaagggcaggcatactcagtgcata

SEQ ID NO: 818056 - DNA, 75 bp, synthetic construct
  source 1..75: mol_type = other DNA
ggctggcttcggtattcgtggtggcgcgctgttctccaaacgtgtttgcgaacaactgggtacactgaactgggt

SEQ ID NO: 818057 - DNA, 75 bp, synthetic construct
  source 1..75: mol_type = other DNA
catgacatcacccccgacgacgttgagcacgttccctatggccaaccgctcgccggcaatcagtattacatctgc

SEQ ID NO: 818058 - DNA, 75 bp, synthetic construct
  source 1..75: mol_type = other DNA
ggctcgtggcgcagggcggcgattatataaaacccgctacgctccggcgtttgcgggcgctttgtcccgcgccgc

SEQ ID NO: 818059 - DNA, 75 bp, synthetic construct
  source 1..75: mol_type = other DNA
atggcggttcagcagccaggtaaagaaatcgccgtaaaaacagaagaacagcagtcggtactggttctgcaccgt

SEQ ID NO: 818060 - DNA, 75 bp, synthetic construct
  source 1..75: mol_type = other DNA
taaccggacaaagtgccagcgagcgaccatcatattatctctatacctcgggcacaacgggtaaacccaagtgcg

SEQ ID NO: 818061 - DNA, 75 bp, synthetic construct
  source 1..75: mol_type = other DNA
cattatcgcacgcctgttcgatgatcaacctctggagccactagtgtcccaccaacctgaccaggaatcgccggg

SEQ ID NO: 818062 - DNA, 75 bp, synthetic construct
  source 1..75: mol_type = other DNA
atatgcaaatcttaatggtgttgttgctgtcaatttgaacgatgaaaatgcaagtgctactgtggcacgagctgg

SEQ ID NO: 818063 - DNA, 75 bp, synthetic construct
  source 1..75: mol_type = other DNA
ctccgtttgtatacctgctgcttgacgccggtatcgacgagttgaactgcgccaagaaatttgttcgcatcaaag

SEQ ID NO: 818064 - DNA, 75 bp, synthetic construct
  source 1..75: mol_type = other DNA
aacttctccgctgatgcgtttatgcgccagatcagccgtgcgcgtacgttcggtttcatgcgtgatatcgaatat

SEQ ID NO: 818065 - DNA, 75 bp, synthetic construct
  source 1..75: mol_type = other DNA
tgggaatatgtgaccttccaggaggacgcagaactgccgttggccttcaaagcgccttcagctgtactggcataa

SEQ ID NO: 818066 - DNA, 75 bp, synthetic construct
  source 1..75: mol_type = other DNA
ataccatgctctgtacgtgtcttgtcaacgagcatgatgtgcggatttcaaccgtagagcacctcaatgctgctc

SEQ ID NO: 818067 - DNA, 75 bp, synthetic construct
  source 1..75: mol_type = other DNA
gtgtcggtttacataccggcaagaaagtcacccctgacgttacgccctgcgccggccaacaccggggtcatctat

SEQ ID NO: 818068 - DNA, 75 bp, synthetic construct
  source 1..75: mol_type = other DNA
ataccatgctctgtacgtgtctggtcaatgagcatgatgtacggatttcaaccgtagagcacctcaatgctgctc

SEQ ID NO: 818069 - DNA, 75 bp, synthetic construct
  source 1..75: mol_type = other DNA
ggacatctttatattaactcaaacatctttgccaaaggtatgagtcatcaacttgatgaaaagcgtaaagagcat

SEQ ID NO: 818070 - DNA, 75 bp, synthetic construct
  source 1..75: mol_type = other DNA
ggccgttagtaaagctgatgatgcccgtggaattctgagggcatttaaggcattgcaaagtcaggttaataaaca

SEQ ID NO: 818071 - DNA, 75 bp, synthetic construct
  source 1..75: mol_type = other DNA
cagtgaagaagaacttgagcagcttgaccaactacttaagcgattctcatataacccgcagacacgctggcaaat

SEQ ID NO: 818072 - DNA, 75 bp, synthetic construct
  source 1..75: mol_type = other DNA
atgaatacaaacgacgctgacctattacacttatttgaatcattaactacagaacaaaagattgatatcgcaaga

SEQ ID NO: 818073 - DNA, 75 bp, synthetic construct
  source 1..75: mol_type = other DNA
aaaagtatataaaagaacaaaggaaaatgaggaagcaagaagaaacgctgttgacgcagactctcatatgcagaa

SEQ ID NO: 818074 - DNA, 75 bp, synthetic construct
  source 1..75: mol_type = other DNA
cagggtatataaacgaacaaaagaaaatgaagcaaatagacaagatttagttaatatcactaaccacttaaaagc

SEQ ID NO: 818075 - DNA, 75 bp, synthetic construct
  source 1..75: mol_type = other DNA
gatgatagtgacgatgattttacttttacaccaaaaaagaaaactcacaccgagccaaagaaagaaaaagttaaa

SEQ ID NO: 818076 - DNA, 75 bp, synthetic construct
  source 1..75: mol_type = other DNA
tggacttaatgatgatattaaagaagatgactttctttctttggatgaattaaatgattttctctctatgaatga

SEQ ID NO: 818077 - DNA, 75 bp, synthetic construct
  source 1..75: mol_type = other DNA
acttttctttcacaccaaagaagaaagtagttagtgaaaataagaagcaaaggattaagcctaaaatgtactatg

SEQ ID NO: 818078 - DNA, 75 bp, synthetic construct
  source 1..75: mol_type = other DNA
ttacgtgatgaaggtttccagccgttctttgcctgtcagagtcgggttcgtgatttgggacgccgcgaatacagt

SEQ ID NO: 818079 - DNA, 75 bp, synthetic construct
  source 1..75: mol_type = other DNA
agtattgaccatctcgcttatatggctggcgtatcaaagagaacagcaataagagccattgagacacttgagaaa

SEQ ID NO: 818080 - DNA, 75 bp, synthetic construct
  source 1..75: mol_type = other DNA
aatcacgtattgcaatggcaaaacaaaagaacaaggttagtgacctcgatgactttgatgatggtgacgatgatt

SEQ ID NO: 818081 - DNA, 75 bp, synthetic construct
  source 1..75: mol_type = other DNA
tgcgcccgaaaaacgcgtcaagatgatatgcttggaagcacacaaaaatcccgccagtgatgggcgggatatcta

SEQ ID NO: 818082 - DNA, 75 bp, synthetic construct
  source 1..75: mol_type = other DNA
agttcaccggaatattacagttcgccggaatattacgcttacaacgtatgtcaacaggccggtgtcgttacgggg

SEQ ID NO: 818083 - DNA, 75 bp, synthetic construct
  source 1..75: mol_type = other DNA
actttcgtaaacacccggaactgatcgagacacaccttgaggattttgttgaatattcagacagacaagcgattc

SEQ ID NO: 818084 - DNA, 75 bp, synthetic construct
  source 1..75: mol_type = other DNA
gtgactgttattagtgaccagaaagatacacagtgccacgccgctggtgatgatgaactggaactcttcgatgat

SEQ ID NO: 818085 - DNA, 75 bp, synthetic construct
  source 1..75: mol_type = other DNA
gattattatctttcaccgaaaaagaaacaaacccaggatgacaagaagcaaaggattaaaccgaagatgtatttt

SEQ ID NO: 818086 - DNA, 75 bp, synthetic construct
  source 1..75: mol_type = other DNA
gattattatctttcaccgaaaaagaaacaaacccaggatgacaagaagcaaaaaattaaaccgaagatgtatttt

SEQ ID NO: 818087 - DNA, 75 bp, synthetic construct
  source 1..75: mol_type = other DNA
cgaaaatgacggttgggggcagtatcacgttaacggtcaccaccaaagattgcgtcggtaatgttgtggggaata

SEQ ID NO: 818088 - DNA, 75 bp, synthetic construct
  source 1..75: mol_type = other DNA
atggcgtcctggggtgtcgatgctccaggtgaagttcgtcatacccatgaacttccttcgcgctcagcattgctg

SEQ ID NO: 818089 - DNA, 75 bp, synthetic construct
  source 1..75: mol_type = other DNA
gatgtcgtgttattagggccgcagattgcttatatgttgcccgaaatccagcgtttgttacccaacaaaccggtt

SEQ ID NO: 818090 - DNA, 75 bp, synthetic construct
  source 1..75: mol_type = other DNA
ccaataatcccaatcaatggcaactgccgtattataggggttgtggtcgacgcaaaaatcaccaaccttccgtaa

SEQ ID NO: 818091 - DNA, 75 bp, synthetic construct
  source 1..75: mol_type = other DNA
tgtctttgcctctggcggacaacctgcgcaacgtggcgcgggcgttaggtaaaccgctggacaagctgcgcatgg

SEQ ID NO: 818092 - DNA, 75 bp, synthetic construct
  source 1..75: mol_type = other DNA
atgagccaatatctgatttttcagcttcatgggccgatggcgtcctggggtgtcgatgctccaggtgaagttcgt

SEQ ID NO: 818093 - DNA, 75 bp, synthetic construct
  source 1..75: mol_type = other DNA
cgaaaaagtcatccgctggcattaccacttgcgccgttactgctcgaaggcaacgcgtctgatgttttacgtaac

SEQ ID NO: 818094 - DNA, 75 bp, synthetic construct
  source 1..75: mol_type = other DNA
gctaattacgcttccgcgacagacacgctggatgctatttttacggtgccaaccagcccaaatgtttcatcggcg

SEQ ID NO: 818095 - DNA, 75 bp, synthetic construct
  source 1..75: mol_type = other DNA
taataccattagtggcatgacaggcgcggatgggacggcaagttttacgctccgccaggataatacccctggtta

SEQ ID NO: 818096 - DNA, 75 bp, synthetic construct
  source 1..75: mol_type = other DNA
ggctataagcacatcctctaatggttgtggtagtgaatatgttccctctcaggccgggctggagtcattgtatga

SEQ ID NO: 818097 - DNA, 75 bp, synthetic construct
  source 1..75: mol_type = other DNA
tcagaggggattcgatgacatcgccagctgggcttagcattcctgaaggcatggttatactggtcgatcctcagg

SEQ ID NO: 818098 - DNA, 75 bp, synthetic construct
  source 1..75: mol_type = other DNA
gcgcgttttgcccgccgctggaaaaacaactggcgatgcgctggcggatgggcgtgcgtaacagtgcacataccc

SEQ ID NO: 818099 - DNA, 75 bp, synthetic construct
  source 1..75: mol_type = other DNA
tgccaatatgctcccacgccgttcccagcttaacgcgctctatgatgctaacagcggtaacgccgttcaaacggt

SEQ ID NO: 818100 - DNA, 75 bp, synthetic construct
  source 1..75: mol_type = other DNA
tacaacaggttgatgctcacacctatgaaggcatgaccgatgtcaacggtcaggcttcgctaaccctgagccagc

SEQ ID NO: 818101 - DNA, 75 bp, synthetic construct
  source 1..75: mol_type = other DNA
gagtttaccctcacgcgtgaaacgacgctggatcgctcgaaagcacctgctaactcgagtgcgggcgacctttcc

SEQ ID NO: 818102 - DNA, 75 bp, synthetic construct
  source 1..75: mol_type = other DNA
gataatacgccaggatataaaacgccgttgacggtgacgctgacggataacgccacaataacggcgacgctggac

SEQ ID NO: 818103 - DNA, 75 bp, synthetic construct
  source 1..75: mol_type = other DNA
agtctgttcaaacgcccattacttgcggatgaaactgagcatgaactgggatcggtgcgggaaaataacgaagac

SEQ ID NO: 818104 - DNA, 75 bp, synthetic construct
  source 1..75: mol_type = other DNA
actggcgacggtgattccctccacggtacagactgtccttggctggccgatgcaggatgattattactggacatc

SEQ ID NO: 818105 - DNA, 75 bp, synthetic construct
  source 1..75: mol_type = other DNA
taaaccggaggtatacatcagcgacagcgagtgcaggtgcgctgaccgtagccgatgcctggggaaatacgcgga

SEQ ID NO: 818106 - DNA, 75 bp, synthetic construct
  source 1..75: mol_type = other DNA
agcggacggtacggcaagctttaccgttcgtcaggataatacgccaggatataaaacgccgttgacggtgacgct

SEQ ID NO: 818107 - DNA, 75 bp, synthetic construct
  source 1..75: mol_type = other DNA
ggttaaggggattgaaacccgcgattctgtaaaccagaaccagcaagaatcggaacagaacgaccagaaagcgga

SEQ ID NO: 818108 - DNA, 75 bp, synthetic construct
  source 1..75: mol_type = other DNA
ggcagcctgagttcacagataaaacactctccaggaaacccggggcggttcagcttgcagtatcacgtggtgaat

SEQ ID NO: 818109 - DNA, 75 bp, synthetic construct
  source 1..75: mol_type = other DNA
tcgcaatggaaattgcctatctgtgtgcagcgagggtttccgatgtgttatcgctgaaatgggaacagattggaa

SEQ ID NO: 818110 - DNA, 75 bp, synthetic construct
  source 1..75: mol_type = other DNA
cagatgcgccgtctcggcaactccgtggactgggagcgtgaacgcttcacgatggacgaaggcctgtccaatgcg

SEQ ID NO: 818111 - DNA, 75 bp, synthetic construct
  source 1..75: mol_type = other DNA
ttgcatatgggtcacgccttccagcaaaccatcatggataccatgatccgctatcagcgcatgcagggcaaaaac

SEQ ID NO: 818112 - DNA, 75 bp, synthetic construct
  source 1..75: mol_type = other DNA
ctggccgattctgtaaaaccagagcacatcagacgatacatggacaaaagaggcgagcagagtaaaacgcaggca

SEQ ID NO: 818113 - DNA, 75 bp, synthetic construct
  source 1..75: mol_type = other DNA
caaagtgggtgacaccatcgtaatgaccgtgcgtacgattaacgcgctaaataattccccggtaccctttagcgc

SEQ ID NO: 818114 - DNA, 75 bp, synthetic construct
  source 1..75: mol_type = other DNA
cgtcagggggcggtgaataatactgcgcctgtgatactggatagcaccgagttaacgacgacggataccgaatat

SEQ ID NO: 818115 - DNA, 75 bp, synthetic construct
  source 1..75: mol_type = other DNA
gcgacgctgtatggcgatgtggatgcgatggacgatttgactgtgcaaccttcatccggtgcggcagtcacgttg

SEQ ID NO: 818116 - DNA, 75 bp, synthetic construct
  source 1..75: mol_type = other DNA
aagcggtgacgctcaaacgtgattcagcgttgagccgttcaggaacaatcgtggggacgccagcgaatgaaataa

SEQ ID NO: 818117 - DNA, 75 bp, synthetic construct
  source 1..75: mol_type = other DNA
ggggcagacagccattgcaccgtgctgccgggcatgcgccatttcggcgcactggcgaccgttattcccaccacg

SEQ ID NO: 818118 - DNA, 75 bp, synthetic construct
  source 1..75: mol_type = other DNA
cacagatgccaaagatgtgatttttaccgtgatcactagcccggacagcgacaaagcgcggatgtggggccatat

SEQ ID NO: 818119 - DNA, 75 bp, synthetic construct
  source 1..75: mol_type = other DNA
tgcgctggttgcgccggtggtagtcaatggcgggctggcagatgaaaccacgttgaacgacactgcaacggtgta

SEQ ID NO: 818120 - DNA, 75 bp, synthetic construct
  source 1..75: mol_type = other DNA
taccgtgaagtcattgatacccgtgaacagcgacgctgggctgacggcaaatgggtcaaaagtgctcagaacaac

SEQ ID NO: 818121 - DNA, 75 bp, synthetic construct
  source 1..75: mol_type = other DNA
ccgcagggcgtcgggctaagaacggcgctgagcgtaacgccggtaaattcctacctgccgaataccgttaactac

SEQ ID NO: 818122 - DNA, 75 bp, synthetic construct
  source 1..75: mol_type = other DNA
cggccagcaatggtggtcgaccgagcgccgtggcgaagaaaggtgagacgattccgctgacggtgaccgtacgtg

SEQ ID NO: 818123 - DNA, 75 bp, synthetic construct
  source 1..75: mol_type = other DNA
gccgttgacggctgccagccagattacgctggaggccgcggatcctgcgcaatttgtcagcattgacagcacgct

SEQ ID NO: 818124 - DNA, 75 bp, synthetic construct
  source 1..75: mol_type = other DNA
acacgctgacgactcaaatcggctggtctacgaagtatgcatggtgggcactggataacaggcaggggaatgccc

SEQ ID NO: 818125 - DNA, 75 bp, synthetic construct
  source 1..75: mol_type = other DNA
accagtaacggctgcggcactagctatgttcccactcaggcagggttgttgtcgttgtttgataatcacgctggc

SEQ ID NO: 818126 - DNA, 75 bp, synthetic construct
  source 1..75: mol_type = other DNA
aaagtgaacatcaccacaagcccaaagaacatcttcttagcatcttgtacaccaacgtcattacagctttggaaa

SEQ ID NO: 818127 - DNA, 75 bp, synthetic construct
  source 1..75: mol_type = other DNA
catgcgataacgtctttgccatcgaaagccgctggtaccgcgataatccgctggtgatccgtgggcctggcgctg

SEQ ID NO: 818128 - DNA, 75 bp, synthetic construct
  source 1..75: mol_type = other DNA
cgcaacatggcaaacgttaagccagattcgggctgcgcgtgagcttattgctaatgatattgagcaatatctcga

SEQ ID NO: 818129 - DNA, 75 bp, synthetic construct
  source 1..75: mol_type = other DNA
cgtcttccggcaatccgtatttaaaattcattgataatatcgataaaataaaaaaacttgcaaaagataaaactg

SEQ ID NO: 818130 - DNA, 75 bp, synthetic construct
  source 1..75: mol_type = other DNA
cgaacctggcaattatgctctacaacagtttaaatgtagcaacgaataaaaccaccattttgcaaccagatgaca

SEQ ID NO: 818131 - DNA, 75 bp, synthetic construct
  source 1..75: mol_type = other DNA
atagttgcgcaattgatacaagggagcgttacatcgtgaaaattgttttcgaggttaatggaaagaaagttccac

SEQ ID NO: 818132 - DNA, 75 bp, synthetic construct
  source 1..75: mol_type = other DNA
ccggagttaaccctttcccgtccgtatgcggctcgcgcgatggaagccattggtaaaccttttgagaaagccgga

SEQ ID NO: 818133 - DNA, 75 bp, synthetic construct
  source 1..75: mol_type = other DNA
gaagagagcaatttaatgcccgcaatggggtatctccatattgatggtaaaggagagctggcaagtagtggaagt

SEQ ID NO: 818134 - DNA, 75 bp, synthetic construct
  source 1..75: mol_type = other DNA
tcgtttctgcggtgcggaaggtcttaacaacgtcatcaccctttccactttccgtaatagcgaatttctgcaagc

SEQ ID NO: 818135 - DNA, 75 bp, synthetic construct
  source 1..75: mol_type = other DNA
ttcatcccctgaaaaggtcattgaactcctgcatggtcagttggcagcaaaatccgagcaattgaaaagactgaa

SEQ ID NO: 818136 - DNA, 75 bp, synthetic construct
  source 1..75: mol_type = other DNA
ggcccggaaatcgtcaacaacctgggctgcgctgactgccataacaccgcttcgccagagttcgccaaaggcaaa

SEQ ID NO: 818137 - DNA, 75 bp, synthetic construct
  source 1..75: mol_type = other DNA
cccggaatatgaaacctggacagcgggcattcacggcaaaaacaacgtgacctgtatcgattgccatatgccaaa

SEQ ID NO: 818138 - DNA, 75 bp, synthetic construct
  source 1..75: mol_type = other DNA
gttactttgacgtagaaataaaagaagagtttgaccccgatattatcggaacaaataataccggcaaagatgtta

SEQ ID NO: 818139 - DNA, 75 bp, synthetic construct
  source 1..75: mol_type = other DNA
ttgtcaggataagccaaactctgtcactttaaaattattagatataaatcgattaaattctgacgtatccgctcc

SEQ ID NO: 818140 - DNA, 75 bp, synthetic construct
  source 1..75: mol_type = other DNA
aacatttttccgagtattgatacaggtgtttgcgccacatcagtacgtaagtttaaccaactggcaacaaaaatc

SEQ ID NO: 818141 - DNA, 75 bp, synthetic construct
  source 1..75: mol_type = other DNA
cttctttaatgatgaagccgtcgaacaggatgaagagtcgctgttcctgtggatgcgtgcccatccgtatgatga

SEQ ID NO: 818142 - DNA, 75 bp, synthetic construct
  source 1..75: mol_type = other DNA
ggcaggcaaaatctggcgggtattgatgcggatggtctcagaatgcgcattgctcccatgatggaggaatacggt

SEQ ID NO: 818143 - DNA, 75 bp, synthetic construct
  source 1..75: mol_type = other DNA
gtcgcgtcaaccgtcgccaaactggcaacgattattgatggtgaagaagacagcgcccggcgcatgggattcgaa

SEQ ID NO: 818144 - DNA, 75 bp, synthetic construct
  source 1..75: mol_type = other DNA
atatctatcgtcaggattgtgcgcatgtggatattatctctccaggggcgtttgaaaaaattgggccgattattc

SEQ ID NO: 818145 - DNA, 75 bp, synthetic construct
  source 1..75: mol_type = other DNA
cctgaacggctggtttaaccgcatggaaaagctgaccgacgcctgtctggaaatcatcgatacccctttaggcat

SEQ ID NO: 818146 - DNA, 75 bp, synthetic construct
  source 1..75: mol_type = other DNA
tattacgcagggattatcaaatccagtgcctcgcaggggaaatatctgaatggctggtttaaccgtctggatctg

SEQ ID NO: 818147 - DNA, 75 bp, synthetic construct
  source 1..75: mol_type = other DNA
gcaataaagggattgatatctcagctccacggggtacacctatttacgccgcgggtgcaggaaaggtggtgtatg

SEQ ID NO: 818148 - DNA, 75 bp, synthetic construct
  source 1..75: mol_type = other DNA
cgctggtatcgcgataatccgctggtgatccgtgggcctggcgcggggcgcgacgtcaccgcaggggcgattcag

SEQ ID NO: 818149 - DNA, 75 bp, synthetic construct
  source 1..75: mol_type = other DNA
tctcctggctgttcctgcaattcgacggtagcgtgccgtttaccgagctggtggatcaggcgtggcagcagggct

SEQ ID NO: 818150 - DNA, 75 bp, synthetic construct
  source 1..75: mol_type = other DNA
cggcaggacttgatccgctggcgatggttgagccgtcaacaggctggcaggtacgctcctatttacgcgcggcgc

SEQ ID NO: 818151 - DNA, 75 bp, synthetic construct
  source 1..75: mol_type = other DNA
aaagagcgtaaggatttaaaaacctccgggaccaaaatctacacacttcatggtgtggagcaacatgataatttc

SEQ ID NO: 818152 - DNA, 75 bp, synthetic construct
  source 1..75: mol_type = other DNA
ggtgtagtgaatatcatcaccaaaaaaatcggtcagaaatggtcgggcaccgctaccgtcgataccaccgttcag

SEQ ID NO: 818153 - DNA, 75 bp, synthetic construct
  source 1..75: mol_type = other DNA
acccagttacggctatccgtttatgctggcttcgcaggttgtttattcgctcaatgcacgcacgggtctttccgt

SEQ ID NO: 818154 - DNA, 75 bp, synthetic construct
  source 1..75: mol_type = other DNA
ggtgtagtgaatatcatcaccaaaaaaatcggtcagaaatggtcgggtaccgttaccgtcgataccaccattcag

SEQ ID NO: 818155 - DNA, 75 bp, synthetic construct
  source 1..75: mol_type = other DNA
cgcccctggtttgaagaacagcacgaagttctcaaggcattgcgtgataatacagagctccaggaaatctttaac

SEQ ID NO: 818156 - DNA, 75 bp, synthetic construct
  source 1..75: mol_type = other DNA
atcatcagtactatcgtattttatccggagaatcctgcccattccctgtagtatacgaggctgtttccgaacagc

SEQ ID NO: 818157 - DNA, 75 bp, synthetic construct
  source 1..75: mol_type = other DNA
tcctttgcagctacggagaatgccgtgatggccgtgggagccgttccggtcttcgctaatattgacagttctttc

SEQ ID NO: 818158 - DNA, 75 bp, synthetic construct
  source 1..75: mol_type = other DNA
accatgcttgaggtggagttacccggtggctcccgtatcacggccctgccggcaaatcccgacacggcacgtggg

SEQ ID NO: 818159 - DNA, 75 bp, synthetic construct
  source 1..75: mol_type = other DNA
cctaccagcaggcgtggtttctggatcgtgcccgtttcaagattggtatgtttgcccgccagacgggcaagacgt

SEQ ID NO: 818160 - DNA, 75 bp, synthetic construct
  source 1..75: mol_type = other DNA
tgtaagcctgacatcctcccctgaattgcgaatctatgcttttgatactcagtccaaagtatcgcaatttatcct

SEQ ID NO: 818161 - DNA, 75 bp, synthetic construct
  source 1..75: mol_type = other DNA
ggagtactatcccaaactggccgcgcaaacgcacattccgattgcggcaggtgaacgcatgttctcgcgcttcga

SEQ ID NO: 818162 - DNA, 75 bp, synthetic construct
  source 1..75: mol_type = other DNA
accgtttacccccgcgctggatgtttttaaaaatcgaaaccgatgaaggcattgtcggctggggagaaccggtca

SEQ ID NO: 818163 - DNA, 75 bp, synthetic construct
  source 1..75: mol_type = other DNA
gcaggcgactcaggcgcgccagagcctgacgctggaagagctttatcagatgtttcgcgatggtgtggacggcgt

SEQ ID NO: 818164 - DNA, 75 bp, synthetic construct
  source 1..75: mol_type = other DNA
agagaacgactatcgataatcggatgtacagaattcgtaaaaaatatgttttcagtcgccagtcagcgtgaaata

SEQ ID NO: 818165 - DNA, 75 bp, synthetic construct
  source 1..75: mol_type = other DNA
aaaaaatacagaccttacggaatggctatccccttttaaagaggaacataaaatattcagggattgtccggagca

SEQ ID NO: 818166 - DNA, 75 bp, synthetic construct
  source 1..75: mol_type = other DNA
tcttcggtgaagggcatattccgtgtgctgacttctctggtttcctgggttgtatcgtttattccgcgccgcccg

SEQ ID NO: 818167 - DNA, 75 bp, synthetic construct
  source 1..75: mol_type = other DNA
gtatatcgcaccaccgacgctggtggcgctgattaacccgcacaaaggcaaatttaacgtcaccgccaaaggtgg

SEQ ID NO: 818168 - DNA, 75 bp, synthetic construct
  source 1..75: mol_type = other DNA
cactactaagttcgccactcgacacctcttgttatcagattgccgttcggctggaagagaactcgcgcggcggtt

SEQ ID NO: 818169 - DNA, 75 bp, synthetic construct
  source 1..75: mol_type = other DNA
tggtgtggagcagcatgataatttcctgaatcagacatttgaaaataccagtaaacacatcacgatagtttctcc

SEQ ID NO: 818170 - DNA, 75 bp, synthetic construct
  source 1..75: mol_type = other DNA
cctccctcatctccgcggggattactggcaaaatatctctttgagtcagagaagaatgcgctcacttttgattat

SEQ ID NO: 818171 - DNA, 75 bp, synthetic construct
  source 1..75: mol_type = other DNA
tgatgagtgagcgtggcgttcagcaaaaatcactggcggccacacttgaagaattacagcggatttgcgacagcc

SEQ ID NO: 818172 - DNA, 75 bp, synthetic construct
  source 1..75: mol_type = other DNA
tgacaaacatgatctcatatcagggacttgttcgcaccttccttagaaaacaattgctaacaatcgggcgtacag

SEQ ID NO: 818173 - DNA, 75 bp, synthetic construct
  source 1..75: mol_type = other DNA
atggtaactcggacaatgcaacaaaagtatcagtatgatcgtgttttatccggcgaactccacccattccctggc

SEQ ID NO: 818174 - DNA, 75 bp, synthetic construct
  source 1..75: mol_type = other DNA
tcttccttgttctgctcaacctggtgggcgttgcggtaggcatctggcgctacttctatggcccgccaaccgaga

SEQ ID NO: 818175 - DNA, 75 bp, synthetic construct
  source 1..75: mol_type = other DNA
atgccggtgccaatgctttaacgctggcagcaattagctgcgtactctactccgccgtcgcggcaccgtttaagt

SEQ ID NO: 818176 - DNA, 75 bp, synthetic construct
  source 1..75: mol_type = other DNA
ttgcccaccatcatcaacccgctgcccgtgagctggcggcgattgtctggcgtctgtactgctcgctttcgcaac

SEQ ID NO: 818177 - DNA, 75 bp, synthetic construct
  source 1..75: mol_type = other DNA
cacctcagacagagagccaggaacaaaaacagtgtgccggagcaaaggaccgggagcttaccggcaattcaacag

SEQ ID NO: 818178 - DNA, 75 bp, synthetic construct
  source 1..75: mol_type = other DNA
gcatatcagcaaaaacaattaggagcggttactaccgaaacacctgttgtagactataaagcggcgtttgatcag

SEQ ID NO: 818179 - DNA, 75 bp, synthetic construct
  source 1..75: mol_type = other DNA
aactggcgcgcctggcggctcccgttcttcacgcccgtactttacagccggtttctggcagcgaaatcgacctgc

SEQ ID NO: 818180 - DNA, 75 bp, synthetic construct
  source 1..75: mol_type = other DNA
acgcccataatgcgggcggttgcccggcatccgacgccattcatggccatagcaatgattttctggtgcgtaccg

SEQ ID NO: 818181 - DNA, 75 bp, synthetic construct
  source 1..75: mol_type = other DNA
aacacaaccagcaataacaaaaatagatagcgtgggtaatgagcaactttatcagattggcaaaatctaccataa

SEQ ID NO: 818182 - DNA, 75 bp, synthetic construct
  source 1..75: mol_type = other DNA
atgctcaacatctcgcatctttcgctgaagaattttatataaaagagcaaaaatcacattctgaaagtgaaatga

SEQ ID NO: 818183 - DNA, 75 bp, synthetic construct
  source 1..75: mol_type = other DNA
atgaacgtggtgatccttgatactggctgcgccaatttgaactcggtgaagtctgccattgcgcgccacggttat

SEQ ID NO: 818184 - DNA, 75 bp, synthetic construct
  source 1..75: mol_type = other DNA
acaaaaagataacttctatggcgtgcagttccacccggagcgttctggtgccgctggcgctaagttgctgaaaaa

SEQ ID NO: 818185 - DNA, 75 bp, synthetic construct
  source 1..75: mol_type = other DNA
ctggaaataatatcaacaggaattgatggatgcaaaaactttgaatatttcttacccgtagagagaagtggcatt

SEQ ID NO: 818186 - DNA, 75 bp, synthetic construct
  source 1..75: mol_type = other DNA
tgaagaagccgatagcctcattagcgcttttgtcagcgatctggaacgcctggcggcgctgctcgacagcggtat

SEQ ID NO: 818187 - DNA, 75 bp, synthetic construct
  source 1..75: mol_type = other DNA
cgggttacgacatcgaaccggatcaggtgcgcgtggaatcgctggtgcctgcccattgcgaaggcggcagcatcg

SEQ ID NO: 818188 - DNA, 75 bp, synthetic construct
  source 1..75: mol_type = other DNA
tgtatccgttacggcgatgttcatcagtcaatacgctggaaaaaattattcataaaaacagagacagtttatcaa

SEQ ID NO: 818189 - DNA, 75 bp, synthetic construct
  source 1..75: mol_type = other DNA
gctggcctttagcgggggtaaaagtcacccaacgtggtgttgatggacgtttgcaggccattttgcaggcgcatg

SEQ ID NO: 818190 - DNA, 75 bp, synthetic construct
  source 1..75: mol_type = other DNA
tgtcagccggaacggcggaagggccgtttgccggtcgcaggcagggaaccgccacgcatctgtttgtggcggtgc

SEQ ID NO: 818191 - DNA, 75 bp, synthetic construct
  source 1..75: mol_type = other DNA
tggccaccagcagcggatacaacggtgttgcgccatataccagcttgctattacatcgggcatccggcatcaaag

SEQ ID NO: 818192 - DNA, 75 bp, synthetic construct
  source 1..75: mol_type = other DNA
cggcctcctgggtcggcaggcaatcgccccaggcgttgggcggcgttgccgctcacttatacgccgaatttgacg

SEQ ID NO: 818193 - DNA, 75 bp, synthetic construct
  source 1..75: mol_type = other DNA
tccagcgaactggttagcgccgttaatccgaaacaattcgccatgtccggggcatttagtggtgcactgccgtta

SEQ ID NO: 818194 - DNA, 75 bp, synthetic construct
  source 1..75: mol_type = other DNA
gcatggctggagcagaacgcgcgtctgccgggaaatgactgtccgcaaggaaaagagtgtgaggataaacaatga

SEQ ID NO: 818195 - DNA, 75 bp, synthetic construct
  source 1..75: mol_type = other DNA
ctttcgctcatatcttaatgaacaattaactctgctgtaccaggattatggtgcacatatttccgtgcaaccatc

SEQ ID NO: 818196 - DNA, 75 bp, synthetic construct
  source 1..75: mol_type = other DNA
gtggtgaccaaaaccctgggcgaaggcttgtggagccggctgtacgccgccgtgcgcgatggcgagcagcgtcag

SEQ ID NO: 818197 - DNA, 75 bp, synthetic construct
  source 1..75: mol_type = other DNA
ggaaatcgacgaagctaaagttattgagttcagtaaaaatgccccggactggcgtaatccgctctggcgtcatga

SEQ ID NO: 818198 - DNA, 75 bp, synthetic construct
  source 1..75: mol_type = other DNA
gcggcaggccgggtgaggaagttaaacagcggctacgtactggcactgtggtaactactgatgacaggaactggg

SEQ ID NO: 818199 - DNA, 75 bp, synthetic construct
  source 1..75: mol_type = other DNA
cgatcgatttgctgcgcgcagaaggcgaccgactgcattcacgtaaattacgaacctttaatgagccgccgttcc

SEQ ID NO: 818200 - DNA, 75 bp, synthetic construct
  source 1..75: mol_type = other DNA
aacagaagcccctgaagaggcgatttctgacctcgcatggaaaaaacaccagatgccagcatggcatttaatcac

SEQ ID NO: 818201 - DNA, 75 bp, synthetic construct
  source 1..75: mol_type = other DNA
cgatgccaacggcaaagcgcgtgttggtgtggaagcggtgcgggaagatcacccgctggcatcactgctgccatg

SEQ ID NO: 818202 - DNA, 75 bp, synthetic construct
  source 1..75: mol_type = other DNA
accgtcggtgcaggtctggctgaattaacctttcagggctgtcatttagttattccacataaacccgaagagatg

SEQ ID NO: 818203 - DNA, 75 bp, synthetic construct
  source 1..75: mol_type = other DNA
caaaaatagccgcgacaaaaatagaccatacctttaaaaccgctaatgatctgtgggaaataaccattacccatc

SEQ ID NO: 818204 - DNA, 75 bp, synthetic construct
  source 1..75: mol_type = other DNA
acggttggcgcaggtctggctgaattaacttttcagggctgccatttagttattccgcataaacccgaagagatg

SEQ ID NO: 818205 - DNA, 75 bp, synthetic construct
  source 1..75: mol_type = other DNA
gtgccattgatgcagatttactactggcatgggatattgaccgtactatcaaggatgttaaaacattgggcttgg

SEQ ID NO: 818206 - DNA, 75 bp, synthetic construct
  source 1..75: mol_type = other DNA
acgagtacgcggatactatcgacaagacaagttctacccatatgtagataccgaagggtacgctacagtgggata

SEQ ID NO: 818207 - DNA, 75 bp, synthetic construct
  source 1..75: mol_type = other DNA
tcaacaagggctgtcagcggcctggcttgatgcccgcgagtttttacgcgctgaacgcgctgcgcaaccgcaggt

SEQ ID NO: 818208 - DNA, 75 bp, synthetic construct
  source 1..75: mol_type = other DNA
atgcacttctgcgcccggcatctgtccgccataaacgacacgctgaaaacgtatcagtttggcgtgcgttccggc

SEQ ID NO: 818209 - DNA, 75 bp, synthetic construct
  source 1..75: mol_type = other DNA
cagtatgaagaggctggttaatcagcttgccacggaacggcagacgcaggtgtttattgccacacacagtagcca

SEQ ID NO: 818210 - DNA, 75 bp, synthetic construct
  source 1..75: mol_type = other DNA
tcttcatgaaagcaccggataataacgtgctggaatttgcgctggccagacgcgtgctgctcgtggagggggatg

SEQ ID NO: 818211 - DNA, 75 bp, synthetic construct
  source 1..75: mol_type = other DNA
cgctattctttaccacagtaactctcgccgccccccttaccgagcgcgaagagctaaccctgtccctcaaccagc

SEQ ID NO: 818212 - DNA, 75 bp, synthetic construct
  source 1..75: mol_type = other DNA
tacgcaggaaatgagacgattgtttgaggggatgaatattcatcatgttgctcatcgttatactgtaccacgtgg

SEQ ID NO: 818213 - DNA, 75 bp, synthetic construct
  source 1..75: mol_type = other DNA
tatcggcggaacgagtttccgtcgttatcttgaactggcccgtcttctggaaaatcgtgtcgcggcccttcgcga

SEQ ID NO: 818214 - DNA, 75 bp, synthetic construct
  source 1..75: mol_type = other DNA
tttcggtatcattatcgtgtcgttcatatttaccggcgtgagtggttacctgattggcggaggcaataactacgc

SEQ ID NO: 818215 - DNA, 75 bp, synthetic construct
  source 1..75: mol_type = other DNA
atgattatctgtgccgatatgatcaaaccgcggttgaatgaaacgctggatgatatttgcgaagcattgagttat

SEQ ID NO: 818216 - DNA, 75 bp, synthetic construct
  source 1..75: mol_type = other DNA
atagagagggcgatactgaaagggaacgtggtttctataagtggttagctgattttataggttggagtttgccaa

SEQ ID NO: 818217 - DNA, 75 bp, synthetic construct
  source 1..75: mol_type = other DNA
aaaattaatgaacgaataaccaaatttgtactatcacgccagccgatcaattcggctgcatacggcttcattaaa

SEQ ID NO: 818218 - DNA, 75 bp, synthetic construct
  source 1..75: mol_type = other DNA
gctcattgcgaaggcggcagcatcgaccatttctttgaaaatggcgatgagctgaacgagcagatggtacaacgg

SEQ ID NO: 818219 - DNA, 75 bp, synthetic construct
  source 1..75: mol_type = other DNA
aagcctgattcaggggctgcatcagtccgtcttccgcgcagaaaaacgcatcggcctggtattgttcggtaaggg

SEQ ID NO: 818220 - DNA, 75 bp, synthetic construct
  source 1..75: mol_type = other DNA
tgatgccaacggcaaagcgcgtgttggtgtggaagccgtgcgtgaagaccatccgctggcatcactgctgccatg

SEQ ID NO: 818221 - DNA, 75 bp, synthetic construct
  source 1..75: mol_type = other DNA
agctcactacccagcagctgattaacggcgttgcgggcaccgattttatgctgaaaggtgaaaccgacgagctgg

SEQ ID NO: 818222 - DNA, 75 bp, synthetic construct
  source 1..75: mol_type = other DNA
aagctgccggcgttaaagccactcagacgggttggtttagcaaagataacctgccggaagagttgaacttcaagc

SEQ ID NO: 818223 - DNA, 75 bp, synthetic construct
  source 1..75: mol_type = other DNA
ggtaggtgaaaacggcgcgccgggcatcaactctgacatcatcaccgtagatggcgaccgcgcattcgtgctgcg

SEQ ID NO: 818224 - DNA, 75 bp, synthetic construct
  source 1..75: mol_type = other DNA
gttgaacttggcagcctgataaatcagaagggaattaaaataaaagaaacgggattaagtagttttattcctgtg

SEQ ID NO: 818225 - DNA, 75 bp, synthetic construct
  source 1..75: mol_type = other DNA
ctgactgggatcagatctacagtgatgcagattctggtttaggggaggctgttgaacttggcagcctgataaatc

SEQ ID NO: 818226 - DNA, 75 bp, synthetic construct
  source 1..75: mol_type = other DNA
gcgtgacgatatcgcggcgaaagtgaaacacgaaaaagccctcgatgcgtattacgcgctgcagcagaaagtgag

SEQ ID NO: 818227 - DNA, 75 bp, synthetic construct
  source 1..75: mol_type = other DNA
cggtgtgctgtgtgtggttctgctggcgatcctcgcggatcagtcgacgatcaatagtgaagcgctcatcaacag

SEQ ID NO: 818228 - DNA, 75 bp, synthetic construct
  source 1..75: mol_type = other DNA
aatggctgcgtatgtgcgcccgtctgccgtggctgctcgccattccccacgtggcttttgccaccagcgcccttc

SEQ ID NO: 818229 - DNA, 75 bp, synthetic construct
  source 1..75: mol_type = other DNA
ccacaggcgctacttgcgacgctggtttcaacgtctattgcggcagtgggcgccttgcttattgccctgctggtg

SEQ ID NO: 818230 - DNA, 75 bp, synthetic construct
  source 1..75: mol_type = other DNA
ttatccttgggccaggtaatccaccgactctggcagtaattagctggcagtggttaactcagggcgatacagatc

SEQ ID NO: 818231 - DNA, 75 bp, synthetic construct
  source 1..75: mol_type = other DNA
cctgctgctgatgctgttactcgccgtctacgttttgctgggctatttactttggcgcgcctggcagtgcaccat

SEQ ID NO: 818232 - DNA, 75 bp, synthetic construct
  source 1..75: mol_type = other DNA
gacgctggcggtaattagctggcagtggttaacccaaggcgacgccgatcaacagatgaaaggcgcactcgccag

SEQ ID NO: 818233 - DNA, 75 bp, synthetic construct
  source 1..75: mol_type = other DNA
tggaagataaattgaagatcaacatggagcgccagtggcctgaaccaaaagatggtgagcctcgcttgcacatta

SEQ ID NO: 818234 - DNA, 75 bp, synthetic construct
  source 1..75: mol_type = other DNA
tgtcacagcaaaaacttgttcacagagatgtgctgccgttctcgcttccggtaactccggatggttggataagct

SEQ ID NO: 818235 - DNA, 75 bp, synthetic construct
  source 1..75: mol_type = other DNA
ctggaacgcgaacagattcgccacgagcatgccaaatggtctgactccacatttggctgcgttggccccattggt

SEQ ID NO: 818236 - DNA, 75 bp, synthetic construct
  source 1..75: mol_type = other DNA
gacgctggcagtaattagctggcagtggttaactcagggcgacgccgatcaacaaacgaaaggcgcactcgccag

SEQ ID NO: 818237 - DNA, 75 bp, synthetic construct
  source 1..75: mol_type = other DNA
ttaccgcttattatttttgccctgaccgcgttagtcgcaaaatgggtaggttatgtcagacaaggactccgctaa

SEQ ID NO: 818238 - DNA, 75 bp, synthetic construct
  source 1..75: mol_type = other DNA
tgggtggataattcctggtgcgtcgtggaaaccgtcacactggatgccgctaccagagccgccgcaggaggcgaa

SEQ ID NO: 818239 - DNA, 75 bp, synthetic construct
  source 1..75: mol_type = other DNA
ggcaactgctgttaccgcttattatttttgccctgaccgccctgcttgcaaaatgggtaggttatgtcagacaag

SEQ ID NO: 818240 - DNA, 75 bp, synthetic construct
  source 1..75: mol_type = other DNA
ttccgtcactcgcagcgaactcattgaagcagagattatcacgccggataataaaaagacgaccgtgctcctgga

SEQ ID NO: 818241 - DNA, 75 bp, synthetic construct
  source 1..75: mol_type = other DNA
acttatacggtgccaaaagatctaaaatgtaaaattaatgatatggtaagcgccataaagccacaatatgccgca

SEQ ID NO: 818242 - DNA, 75 bp, synthetic construct
  source 1..75: mol_type = other DNA
atttcttattctcgtcgtgacgggttctatatagccgcattggagtacgacgacgatgagccaattggcggtgta

SEQ ID NO: 818243 - DNA, 75 bp, synthetic construct
  source 1..75: mol_type = other DNA
cagaaatgcagaaacaatataagcatctgtttgcccatggtgagtatattaaaagtataacttcattaattaagt

SEQ ID NO: 818244 - DNA, 75 bp, synthetic construct
  source 1..75: mol_type = other DNA
acccggcgcgtgaattgctgggctttacggaaagcgatcttgactggctggcggatactatcgtcagttttctgc

SEQ ID NO: 818245 - DNA, 75 bp, synthetic construct
  source 1..75: mol_type = other DNA
gtggcaccgggtgcccgtacccgttacccggcgcgtgaattgctgggctttacggaaagcgatcttgactggctg

SEQ ID NO: 818246 - DNA, 75 bp, synthetic construct
  source 1..75: mol_type = other DNA
tacttcaacctctggggactgcaaaatacctccgacgatctgattgtgaatatcattatgggcgtgatgttcctg

SEQ ID NO: 818247 - DNA, 75 bp, synthetic construct
  source 1..75: mol_type = other DNA
atgagcactatcactaaagaacgtatcgaattgttcattaaatccccgcttgaaaacggacttactcgtggcgaa

SEQ ID NO: 818248 - DNA, 75 bp, synthetic construct
  source 1..75: mol_type = other DNA
aagggtggcttggtgatgatatcagcatccctgaatgcgatgtaatcaattggatgccactaccggaaccgccgc

SEQ ID NO: 818249 - DNA, 75 bp, synthetic construct
  source 1..75: mol_type = other DNA
ggtgaaactgaatctggagggtttagagcacattgcagcctttatgcagcgtatggctgaaagaccggcggtgaa

SEQ ID NO: 818250 - DNA, 75 bp, synthetic construct
  source 1..75: mol_type = other DNA
accagaagagttcaaaccgattgcgcgcgcacaactggagaaaaaactgcagtatgttaacgacgcgctgaaaga

SEQ ID NO: 818251 - DNA, 75 bp, synthetic construct
  source 1..75: mol_type = other DNA
taaaaccatcgaatggctgaattacatcgccaccgagctgcataaaggtttcacacctctgtttcgccctgatac

SEQ ID NO: 818252 - DNA, 75 bp, synthetic construct
  source 1..75: mol_type = other DNA
agcatgccaaatggtctgactccacatttggctgcgttggccccattggtccactgaaacacctctcaaaagagg

SEQ ID NO: 818253 - DNA, 75 bp, synthetic construct
  source 1..75: mol_type = other DNA
gaagaataccagggggaatacttatttctgtaaatgccccggggcattttatgaggctggcgatagaaaaaggtt

SEQ ID NO: 818254 - DNA, 75 bp, synthetic construct
  source 1..75: mol_type = other DNA
caacatcttgttgtacgcgatgtaagtttacaaggcagtacgctggcacttcccggttcatcggctgaaggtctg

SEQ ID NO: 818255 - DNA, 75 bp, synthetic construct
  source 1..75: mol_type = other DNA
accagcggctacctgccggaagcagaaatcgtctttcttgatgagatctggaaagccgggccagcgattcttaat

SEQ ID NO: 818256 - DNA, 75 bp, synthetic construct
  source 1..75: mol_type = other DNA
tgcacagggaatgatcgagaaatttaaggaagaacagaaggccactgaagagaaagccgcagccacaaagcggtt

SEQ ID NO: 818257 - DNA, 75 bp, synthetic construct
  source 1..75: mol_type = other DNA
ctgacaaaagttgggcgggatattcttgcgaaatcgaccgttgccgccgttatcgaatacctcggtttacgagaa

SEQ ID NO: 818258 - DNA, 75 bp, synthetic construct
  source 1..75: mol_type = other DNA
gtaatagttcttattacagcggtttttatcatactgatgtattaattccaggagaattaactaaggatgaaagat

SEQ ID NO: 818259 - DNA, 75 bp, synthetic construct
  source 1..75: mol_type = other DNA
tacgaattgtaaggatgtacccccaagaactgcagcaggataatgttgtcgctttacccgcagagatggagcaat

SEQ ID NO: 818260 - DNA, 75 bp, synthetic construct
  source 1..75: mol_type = other DNA
ggcggaaggggtagaaacccaggagcaggcggatttaatgatcggcaaaggcgttcactttttgcagggctattt

SEQ ID NO: 818261 - DNA, 75 bp, synthetic construct
  source 1..75: mol_type = other DNA
atggttgtgtccgctattgccagtacacctcagatgcagggaatgtctgtaacagaaatatcacagtacagaaat

SEQ ID NO: 818262 - DNA, 75 bp, synthetic construct
  source 1..75: mol_type = other DNA
ccaacatcttgttgtacgcgatgtaagtttacaaggcagtacgctggcacttcccggttcatcggctgaaggtct

SEQ ID NO: 818263 - DNA, 75 bp, synthetic construct
  source 1..75: mol_type = other DNA
accctgctcaccgccattaacgagcgccagttccgcaacggcgcactcgtagaaaaaatcccgatgcgtctgctg

SEQ ID NO: 818264 - DNA, 75 bp, synthetic construct
  source 1..75: mol_type = other DNA
agccacgccatccgcttgtgtttattagcggcattaagtggtgaaagtgtgttcctccttggcccgccaggtatt

SEQ ID NO: 818265 - DNA, 75 bp, synthetic construct
  source 1..75: mol_type = other DNA
tggcaaccctaacagaagtcgggcgggatattcttgcgaaatcgaccgttgccgctgttatcgaatacctcggtt

SEQ ID NO: 818266 - DNA, 75 bp, synthetic construct
  source 1..75: mol_type = other DNA
gatgctgaaattaccgctgctatggaagataaattgaagatcaacatggagcgccagtggcctgagccaaaagat

SEQ ID NO: 818267 - DNA, 75 bp, synthetic construct
  source 1..75: mol_type = other DNA
agggcggctgggcattagaacaactgtggttcttctgggtggtgccaattgtcggcggcattatcggtggtctga

SEQ ID NO: 818268 - DNA, 75 bp, synthetic construct
  source 1..75: mol_type = other DNA
gcattagaacaactgtggttcttctgggtggtgccaattgtcggcggcattatcggtggtctgatttaccggacc

SEQ ID NO: 818269 - DNA, 75 bp, synthetic construct
  source 1..75: mol_type = other DNA
gtgagcctcgcttgcacattaaagaacccggcaactctccggtaactccggatggttggataagctgtagtgagc

SEQ ID NO: 818270 - DNA, 75 bp, synthetic construct
  source 1..75: mol_type = other DNA
gtgagcctcgcttgcacattaaagaacccggcaactctccggtaactccggatggttgggttatggtgccgaagg

SEQ ID NO: 818271 - DNA, 75 bp, synthetic construct
  source 1..75: mol_type = other DNA
gcttatttcggtgaatttcgatagctctctggttgaaccgctaatatgctccgcacgctataccggaagcacctt

SEQ ID NO: 818272 - DNA, 75 bp, synthetic construct
  source 1..75: mol_type = other DNA
atgaccactattaccaaagaacgtattgaattgttcattaaaaatccgcttgaaaacggacttacccgtggcgaa

SEQ ID NO: 818273 - DNA, 75 bp, synthetic construct
  source 1..75: mol_type = other DNA
cgcattattgcggagctgcttattcctcctgaaacgggcggattctggatccgggaaattggtgtgtttgatgag

SEQ ID NO: 818274 - DNA, 75 bp, synthetic construct
  source 1..75: mol_type = other DNA
ggcttgctactgcggcagacaggtttccgtattttacggggaatgatgttgccagtctggcaaccctgacaaaag

SEQ ID NO: 818275 - DNA, 75 bp, synthetic construct
  source 1..75: mol_type = other DNA
gcattagaacaactgtggttcttctgggtggtgccaattgtcggcggtattatcggtggtctgatttaccggact

SEQ ID NO: 818276 - DNA, 75 bp, synthetic construct
  source 1..75: mol_type = other DNA
actggcatttagtcaaggtgaaatcgtggccgcatattggaactgggttgtaaatccaattgattacaaaaaata

SEQ ID NO: 818277 - DNA, 75 bp, synthetic construct
  source 1..75: mol_type = other DNA
ctggcacgaattgcactggcatcactggaacgcgaacagattcgccacgagcatgccaaatggtctgactccaca

SEQ ID NO: 818278 - DNA, 75 bp, synthetic construct
  source 1..75: mol_type = other DNA
cggtggtggaatcggtcctgacggaaggggccattggttacagggagtttgaagttctgaaaggtagccgtctgt

SEQ ID NO: 818279 - DNA, 75 bp, synthetic construct
  source 1..75: mol_type = other DNA
cacctcagtggacctgaacaggctgccggaagacatggaagccacccgctcggtggtggaatcggtcctgacgga

SEQ ID NO: 818280 - DNA, 75 bp, synthetic construct
  source 1..75: mol_type = other DNA
cggtggtggagtcggttctgacggaaggggccattggttatcgtgagttcgaagttctgaaaggtagccgtctgt

SEQ ID NO: 818281 - DNA, 75 bp, synthetic construct
  source 1..75: mol_type = other DNA
tgaaccgttacttcgatgccttcgggtttaaaaacatttccctggggctgtccgcatcccgttcgaaataccaga

SEQ ID NO: 818282 - DNA, 75 bp, synthetic construct
  source 1..75: mol_type = other DNA
ctcactctgggtgagaactatatcaattctgagatttttagctcctggcgctataccggtgccagtctggcaagt

SEQ ID NO: 818283 - DNA, 75 bp, synthetic construct
  source 1..75: mol_type = other DNA
caggggacggacagtcagttcacctggagccgtttctacatgtaccgcgccatcccgcgctggcgcgccaacctc

SEQ ID NO: 818284 - DNA, 75 bp, synthetic construct
  source 1..75: mol_type = other DNA
gttattccgctgattaccggttatctgtcgaacatcggcctgcaatatatcattgttctcgattttactttcgcg

SEQ ID NO: 818285 - DNA, 75 bp, synthetic construct
  source 1..75: mol_type = other DNA
aatgttctacccaatgctggtgagctatatgttgctcaataatatctggtacggctatgggctgattattccggg

SEQ ID NO: 818286 - DNA, 75 bp, synthetic construct
  source 1..75: mol_type = other DNA
cgggttcagccgtaatattggttaaggcgatgatatcgttcggacaaatgctctatccgatgctggtgagttata

SEQ ID NO: 818287 - DNA, 75 bp, synthetic construct
  source 1..75: mol_type = other DNA
ccggttatctgtcaaatatcggcctgcaatatatcatcgttctcgattttactttcgcgctgctggccctgatta

SEQ ID NO: 818288 - DNA, 75 bp, synthetic construct
  source 1..75: mol_type = other DNA
ccgcgattattgttttcattcgctattaccgtgtctttattattcctgaaaaagatttacggttaggcgaacact

SEQ ID NO: 818289 - DNA, 75 bp, synthetic construct
  source 1..75: mol_type = other DNA
ctaatggaatgctttccgaaagcctccggttcggcagtcatactggttaaagcaatggtgtcatttggacaaatg

SEQ ID NO: 818290 - DNA, 75 bp, synthetic construct
  source 1..75: mol_type = other DNA
tacatgacgatggaccagtacctcaatgcccgttaccggaatgatttctccggaagggagaaggaaatgtacacc

SEQ ID NO: 818291 - DNA, 75 bp, synthetic construct
  source 1..75: mol_type = other DNA
ccggtgattataatgcactggcagccggtgccggctgggacctgggtgtgccggggaccctttccgctgatatca

SEQ ID NO: 818292 - DNA, 75 bp, synthetic construct
  source 1..75: mol_type = other DNA
gcgcgtggcggtggcccgtgcgttactaaatccctgttcgctattactgttggatgaaccgctgccagccttgat

SEQ ID NO: 818293 - DNA, 75 bp, synthetic construct
  source 1..75: mol_type = other DNA
ctggcagagcacgggggctggaaggcatttttgtggaagccaccctatgcataccggcagataaaggtgacctgt

SEQ ID NO: 818294 - DNA, 75 bp, synthetic construct
  source 1..75: mol_type = other DNA
tgcgtgaagtgcgttttggtgacgggtactcacagcgtatggcggcagggctgaatgctgacctgaaaacataca

SEQ ID NO: 818295 - DNA, 75 bp, synthetic construct
  source 1..75: mol_type = other DNA
gtgacaaatcgctggggaacgggcgtggtgactgacatcagcagttattaccggaatacaacctctgttgacctg

SEQ ID NO: 818296 - DNA, 75 bp, synthetic construct
  source 1..75: mol_type = other DNA
cattcggtatgagcgcatccggtggtgcaacgataaccgcgaaaggcgcggccctgcatgcagggggcatgaacg

SEQ ID NO: 818297 - DNA, 75 bp, synthetic construct
  source 1..75: mol_type = other DNA
ggagccgtttctacatgtaccgcgccatcccgcgctggcgcgccaacctcacactgggtgagaactacatcaatt

SEQ ID NO: 818298 - DNA, 75 bp, synthetic construct
  source 1..75: mol_type = other DNA
gggacggccggacacagtgtgtggtggatatcccggcaaaactggacccggcacagcaactgctgctgccctgcc

SEQ ID NO: 818299 - DNA, 75 bp, synthetic construct
  source 1..75: mol_type = other DNA
cttaaatgaggacgacgacgcgctgatgctggaagtggctgcagaagccacacgcaacccacgggtgatggcaat

SEQ ID NO: 818300 - DNA, 75 bp, synthetic construct
  source 1..75: mol_type = other DNA
tacagtgtcaggtaaatgtaccggagacagcaatatctgaccagcagttattgcttccctgtacgcctcagaaat

SEQ ID NO: 818301 - DNA, 75 bp, synthetic construct
  source 1..75: mol_type = other DNA
aaagggaaacgtctgtttgcaatactgcgtcttgctgatggctctcagcccccgtttggtgccagtgtaaccagt

SEQ ID NO: 818302 - DNA, 75 bp, synthetic construct
  source 1..75: mol_type = other DNA
cggtaataaatggtctctctatggcggcagcattttttcggaagattataacgccctggctgttggtctcggccg

SEQ ID NO: 818303 - DNA, 75 bp, synthetic construct
  source 1..75: mol_type = other DNA
tttctgttccccatacggtgaatgacttcatttccagaagtgctttattttttaatcgcagtggaagtgaccaga

SEQ ID NO: 818304 - DNA, 75 bp, synthetic construct
  source 1..75: mol_type = other DNA
ttcattttgtcgcaggtcatctggggggcgggcgtctatattggcctgtccctggccggggataaatccctgaac

SEQ ID NO: 818305 - DNA, 75 bp, synthetic construct
  source 1..75: mol_type = other DNA
tagaggtgagaaaaaatcaggcagtttagaagattatggtatcagaggctcaaatatttcttacgtacagtatga

SEQ ID NO: 818306 - DNA, 75 bp, synthetic construct
  source 1..75: mol_type = other DNA
ttgttgccagaaaaaccagaagtagctcatgaaattgccagacgactttgcgggcaaaaagggttatatgcactg

SEQ ID NO: 818307 - DNA, 75 bp, synthetic construct
  source 1..75: mol_type = other DNA
cttatcgactcccccattcataccacgctgccgccacaggttctggcggtattggttgctctggaacaaggtttc

SEQ ID NO: 818308 - DNA, 75 bp, synthetic construct
  source 1..75: mol_type = other DNA
gaggcacaaactatggcattttcggatacctttctgctaatcagtggtctgttactcatcgcatttatgttgact

SEQ ID NO: 818309 - DNA, 75 bp, synthetic construct
  source 1..75: mol_type = other DNA
actgttgcagaaatgcagaaacaatataagcatctgtttgcccatggtgagtatattaaaggtataacttcatta

SEQ ID NO: 818310 - DNA, 75 bp, synthetic construct
  source 1..75: mol_type = other DNA
atctacctcgcgaaggattttgatactatttataccctgaaaaacgaacttcatgatcgtagtcatcgaaagtat

SEQ ID NO: 818311 - DNA, 75 bp, synthetic construct
  source 1..75: mol_type = other DNA
gcgctatattgaaatcaatctcaaccagtccaagcagaaccgcaccagaaaggatccgatgttccgcaagctgcg

SEQ ID NO: 818312 - DNA, 75 bp, synthetic construct
  source 1..75: mol_type = other DNA
catacatattcacggcaattgtagttacgatgacgatctcatacttggtcatagttttagggtggatgatcctac

SEQ ID NO: 818313 - DNA, 75 bp, synthetic construct
  source 1..75: mol_type = other DNA
gaaaaaggcaattaccttgattctggcggtgctgctgggcggcatggttggcgcggggattgtgttggggcgtaa

SEQ ID NO: 818314 - DNA, 75 bp, synthetic construct
  source 1..75: mol_type = other DNA
actgcattctcagcattagcggaaacgctggataaccaggaagaagcagaaaagctgaccattgagcctaccgtc

SEQ ID NO: 818315 - DNA, 75 bp, synthetic construct
  source 1..75: mol_type = other DNA
gttaggccgcgcggtgatccctgatctcaccgtgccggatctggtgatcccaacgttgatggtaaaagtgttgcc

SEQ ID NO: 818316 - DNA, 75 bp, synthetic construct
  source 1..75: mol_type = other DNA
cgcgattcaggatgcagaagaagtcgatacaatcgttaatcaacttttgaaggttggcgacgattcgttaaccgc

SEQ ID NO: 818317 - DNA, 75 bp, synthetic construct
  source 1..75: mol_type = other DNA
gtttgcgggatcaaggcttctatccggccaataacttcgatgttcaagagcagaatggctctggacgcaaacttg

SEQ ID NO: 818318 - DNA, 75 bp, synthetic construct
  source 1..75: mol_type = other DNA
taatacctgtgtttttggggcgggttcgcggattaaatgccgaagagataggttttgccgtttgcacaacaggta

SEQ ID NO: 818319 - DNA, 75 bp, synthetic construct
  source 1..75: mol_type = other DNA
agcgtatggcggcggggctgaatgctgacctgaaaacataccgtgtgacgctttctgttccccgttgggaggcca

SEQ ID NO: 818320 - DNA, 75 bp, synthetic construct
  source 1..75: mol_type = other DNA
tactcacggatcgtgtttcaggtgaaatgaactacgtaatagtaattggcaggcacgaaggactcctgcaaagcg

SEQ ID NO: 818321 - DNA, 75 bp, synthetic construct
  source 1..75: mol_type = other DNA
gcttaagcaacgcagtagagacgctacaatccattgatccgcaactggtaacaccacaaggcgctgatgatattc

SEQ ID NO: 818322 - DNA, 75 bp, synthetic construct
  source 1..75: mol_type = other DNA
ctcaccgtaccggatctggtgatcccaacgttgatggtaaaagtgctgccgccatttgctgccgggatcttcctt

SEQ ID NO: 818323 - DNA, 75 bp, synthetic construct
  source 1..75: mol_type = other DNA
gcaaaccatcgatccgcaactggttacgccacaaggcgctgacgatattctgtcacctgcgtttatgacgtcgtt

SEQ ID NO: 818324 - DNA, 75 bp, synthetic construct
  source 1..75: mol_type = other DNA
ttcaacccttccagcttctcaggcaaaaagatggaccaatgagcagccaaggattgatatctatattgatcagat

SEQ ID NO: 818325 - DNA, 75 bp, synthetic construct
  source 1..75: mol_type = other DNA
atgtctatgccattaagcaatgcccttcagagtcaaattattacagatgctcacttccttcatcacccaatagtc

SEQ ID NO: 818326 - DNA, 75 bp, synthetic construct
  source 1..75: mol_type = other DNA
atggatacggaaaatatctatcttccgcctcttgctcgtggcaataaccataattacgatggaaaaagcgttgtc

SEQ ID NO: 818327 - DNA, 75 bp, synthetic construct
  source 1..75: mol_type = other DNA
cggcaggatcgaaaccaagctttcctgatggaatgttaatcttggttgaccctgaacaacctgttgatcctggtg

SEQ ID NO: 818328 - DNA, 75 bp, synthetic construct
  source 1..75: mol_type = other DNA
agacattctcttactgatcagcaaaacgctcagtctttcaggtaatgactccaacttattgatagtgttttatgt

SEQ ID NO: 818329 - DNA, 75 bp, synthetic construct
  source 1..75: mol_type = other DNA
tgatggctaaagcgcacatcctgccattttccgggcaggcacaatggctgactgaaaagctgtttggagttatca

SEQ ID NO: 818330 - DNA, 75 bp, synthetic construct
  source 1..75: mol_type = other DNA
aaatgtttgttgctggtatgggaaccagcgttattgccggaaattttatcgctttttcgattgcggctcttatca

SEQ ID NO: 818331 - DNA, 75 bp, synthetic construct
  source 1..75: mol_type = other DNA
gaggatggcgatttttgcgtggcccgaatgaacggcgatgaattcaccttcaaacgattcattcgtgagagcggt

SEQ ID NO: 818332 - DNA, 75 bp, synthetic construct
  source 1..75: mol_type = other DNA
tgacgagtttaccttcaagaaactgatcagggatagcggtcaggtgttcctacaaccactaaacccgcaatatcc

SEQ ID NO: 818333 - DNA, 75 bp, synthetic construct
  source 1..75: mol_type = other DNA
tcgccctggcgataccattaagttgcatattgccgcgccaacggcgggtaaaggttatgcgatggtcgagtccag

SEQ ID NO: 818334 - DNA, 75 bp, synthetic construct
  source 1..75: mol_type = other DNA
cggatatggctgggtgattacggtagtccactgcgcgacaacgcgttgatgctctccttgctggaagagaacaaa

SEQ ID NO: 818335 - DNA, 75 bp, synthetic construct
  source 1..75: mol_type = other DNA
tgcgtgtggatgccagcggttatccgcaatccgcacctttaccggcgaacaatgtgctgcaaatcgagcgtcata

SEQ ID NO: 818336 - DNA, 75 bp, synthetic construct
  source 1..75: mol_type = other DNA
ttctgttgggctattaaccttacgtttctggctacgttatcaggagcatcctcaggcatttgctcgctggacgcg

SEQ ID NO: 818337 - DNA, 75 bp, synthetic construct
  source 1..75: mol_type = other DNA
gacactacatgcaagggacaggggcaccccacagggaggcgttatcagccctctgttggctaacctattccttca

SEQ ID NO: 818338 - DNA, 75 bp, synthetic construct
  source 1..75: mol_type = other DNA
agaatctggcgaacggtagcgccagcctggagcaaagcggtagcgaagtgcggaacttgctcaatcagatgcagc

SEQ ID NO: 818339 - DNA, 75 bp, synthetic construct
  source 1..75: mol_type = other DNA
atggagaatgcctgtgtcctgttgatgggggtcctgagcacttttctggtcagctggctgggaaaagatgcgatg

SEQ ID NO: 818340 - DNA, 75 bp, synthetic construct
  source 1..75: mol_type = other DNA
gggtatgtaccggacgcgctggctttacctccgggctttaaaaatgtcccgcctgtgctgtgtcttggcgcggat

SEQ ID NO: 818341 - DNA, 75 bp, synthetic construct
  source 1..75: mol_type = other DNA
actcaacacgcctgccgcgccgattgtgctgatggataaaaaatacgttcctgaattgtgtgacgatatcgctcc

SEQ ID NO: 818342 - DNA, 75 bp, synthetic construct
  source 1..75: mol_type = other DNA
gtgctggtggataaaaaatacgttcctgagctttgtgatgatatcgcccctgaccttaacgaagtcggggtaatg

SEQ ID NO: 818343 - DNA, 75 bp, synthetic construct
  source 1..75: mol_type = other DNA
acggcgctttgtggggcggcgagtgcctgcgggtgaactatcgtgaatgcgagcgcctgggcggcttgcctgcag

SEQ ID NO: 818344 - DNA, 75 bp, synthetic construct
  source 1..75: mol_type = other DNA
gccctgcctgtcttgccgaaatgaataccccaggcgagcggcgttatcgttatccgtttatcaactgtactcact

SEQ ID NO: 818345 - DNA, 75 bp, synthetic construct
  source 1..75: mol_type = other DNA
gtggcccacatcttgaatggctaagtcatggtgaacatgcgaaacaagaggcggcattacaggcggctatcgctc

SEQ ID NO: 818346 - DNA, 75 bp, synthetic construct
  source 1..75: mol_type = other DNA
aacccaaatgttcgttgccgggatggggaccagcgttattgccggaaattttatcgcgttttcaattgcggctct

SEQ ID NO: 818347 - DNA, 75 bp, synthetic construct
  source 1..75: mol_type = other DNA
tggttactggacgttggctgtggaaataccctagatctgagccgcaaaagtgtgaaaaaaagccagttgtgttga

SEQ ID NO: 818348 - DNA, 75 bp, synthetic construct
  source 1..75: mol_type = other DNA
agcatttagccttggcaagcgtgaccgccgcagagccagagtagcaacgaggcaatcactggtcatcatgacgct

SEQ ID NO: 818349 - DNA, 75 bp, synthetic construct
  source 1..75: mol_type = other DNA
ataataagggtatgaaaatgaaatggtatgaactggctagatccagaatgaaagagctcggcataactcaagaga

SEQ ID NO: 818350 - DNA, 75 bp, synthetic construct
  source 1..75: mol_type = other DNA
ctacgacgaagaaagcctgtcgctatgcggcgttgaggattttctgcaggtggtggcggcttaccgtaatttcgt

SEQ ID NO: 818351 - DNA, 75 bp, synthetic construct
  source 1..75: mol_type = other DNA
tcactgcgtagcggcgatcttgtactggtctggttacagataaaagccagtaacagcgtgccggatgcgctggtt

SEQ ID NO: 818352 - DNA, 75 bp, synthetic construct
  source 1..75: mol_type = other DNA
ttaaagcttatggaacaaaatcctagtgtcagtgcaacacatgcgttgcgtgaatttcgtgactcgggaaattca

SEQ ID NO: 818353 - DNA, 75 bp, synthetic construct
  source 1..75: mol_type = other DNA
gttatacaaaaggaaaaagatatagaagcaacgactttagatacagaagaaatcaacctcgcgaacatcgatgac

SEQ ID NO: 818354 - DNA, 75 bp, synthetic construct
  source 1..75: mol_type = other DNA
tggtgataacgttgtcccataccaagcgacttttgctgtaggccataatgactctataccattattctctaagtc

SEQ ID NO: 818355 - DNA, 75 bp, synthetic construct
  source 1..75: mol_type = other DNA
tcaaagttcactcatgattactatgatcatcagaaaattgcagagatattaggaagtgagcctcggagggagcgt

SEQ ID NO: 818356 - DNA, 75 bp, synthetic construct
  source 1..75: mol_type = other DNA
ataaattaatccgtacacttgatggttatgagttactggatgtgacggatgcttatgtatatcaccctaagcctg

SEQ ID NO: 818357 - DNA, 75 bp, synthetic construct
  source 1..75: mol_type = other DNA
ttgagtctgagtcaattttcatcaggccgaaccccttcaaatgtgctcgtgaattcttggtgcaatgctctgaat

SEQ ID NO: 818358 - DNA, 75 bp, synthetic construct
  source 1..75: mol_type = other DNA
gaccgctgcgacctcgtgttctgcgaaagccattttagcgccaggattgcggtattttactacggtgcccaggga

SEQ ID NO: 818359 - DNA, 75 bp, synthetic construct
  source 1..75: mol_type = other DNA
agaaaacagttatcctcaatgaaggcgactatgtcgtgttctatccgggtgaagtacacaagccactgtgcgcag

SEQ ID NO: 818360 - DNA, 75 bp, synthetic construct
  source 1..75: mol_type = other DNA
agaacatcctcacgttcatgttgtttttcgtatccgagataatgacggtaaacgcgctgacatcaggaaaaaaga

SEQ ID NO: 818361 - DNA, 75 bp, synthetic construct
  source 1..75: mol_type = other DNA
gctgggcataccttgcctgttgagaaattgtataaaggtggacactgggcgacagcaatatctattcacgagata

SEQ ID NO: 818362 - DNA, 75 bp, synthetic construct
  source 1..75: mol_type = other DNA
ttaaccagatcccttgcctgccaggtttatatcaagccctatagcgacaggatggacagtgtcaccttccagtca

SEQ ID NO: 818363 - DNA, 75 bp, synthetic construct
  source 1..75: mol_type = other DNA
ctgaattgcgtaagagtgacgtttttatcgttacgcatcccgaaagccttggattaactgttcttgaggcggcaa

SEQ ID NO: 818364 - DNA, 75 bp, synthetic construct
  source 1..75: mol_type = other DNA
agattatcaaaggaaagagcgattgaggaaggaaaaccaatttcggacgctactctcgatatccaagaaataagt

SEQ ID NO: 818365 - DNA, 75 bp, synthetic construct
  source 1..75: mol_type = other DNA
aagccagcaataaaaagggcgagacgccaaaacaggtgaatgtgctggtgtccgcggttgatagcggcgtattga

SEQ ID NO: 818366 - DNA, 75 bp, synthetic construct
  source 1..75: mol_type = other DNA
tggaagggcaattgttgttgagcggcaagccacctctgaacattgcacgttatatcaaagagttaaaagcatatc

SEQ ID NO: 818367 - DNA, 75 bp, synthetic construct
  source 1..75: mol_type = other DNA
gacatgggcgattccggcggatggattgcaaaacttctcgcctgttacgctggaagggcaattgttgttgagcgg

SEQ ID NO: 818368 - DNA, 75 bp, synthetic construct
  source 1..75: mol_type = other DNA
tctgggagcgccgcgctgatgccacatctggtttgccgctgttgcaactgggtatcgcgctgaaaaccatgggcg

SEQ ID NO: 818369 - DNA, 75 bp, synthetic construct
  source 1..75: mol_type = other DNA
tgacagtgatgataaacgtcgcgccgccgttgatattggcatttctcgcttactgcaaatgcaacgtgataatgg

SEQ ID NO: 818370 - DNA, 75 bp, synthetic construct
  source 1..75: mol_type = other DNA
tggacggcagatgacttcggtagcaacgaaagcaaagtgatagttgccgcaccggtgattgctgaactgaacatg

SEQ ID NO: 818371 - DNA, 75 bp, synthetic construct
  source 1..75: mol_type = other DNA
ttcccggataccggcgtctatgcagcggccgtcagtgaaacccgtgtgctcgatgcctggctttgttggccatgc

SEQ ID NO: 818372 - DNA, 75 bp, synthetic construct
  source 1..75: mol_type = other DNA
aatgcgtctcgccttcatacgaagtattccgggggtatcgtacccgccacaccctggatgaatttctggagctgg

SEQ ID NO: 818373 - DNA, 75 bp, synthetic construct
  source 1..75: mol_type = other DNA
ccactaaactgtactaatttttcatatttagtaaaaggagtgaaaaaatataagtctaacggtcaatatttcagt

SEQ ID NO: 818374 - DNA, 75 bp, synthetic construct
  source 1..75: mol_type = other DNA
ggtcaaagcgctcaataacgcaacctttagtaaagatgacgaaaaaactataactacccgcgatatccaacccag

SEQ ID NO: 818375 - DNA, 75 bp, synthetic construct
  source 1..75: mol_type = other DNA
ctgctgcctggtaaagtcgttgaagggctgccggtaatggcgctcaacgttaataatgtcgatgttaacttcttc

SEQ ID NO: 818376 - DNA, 75 bp, synthetic construct
  source 1..75: mol_type = other DNA
ataaatctcgctccgcgacgccaaaacgcgcagttggcgtgttgcatttgccgcttggcgatgaaaaccgtcgtc

SEQ ID NO: 818377 - DNA, 75 bp, synthetic construct
  source 1..75: mol_type = other DNA
cgccgaagggacagtcgctgcgtgaacatattgatggactttggccggtattaacccgcacaacggaaagcaccg

SEQ ID NO: 818378 - DNA, 75 bp, synthetic construct
  source 1..75: mol_type = other DNA
gtgcaaaacgccaaactttttcctgatcaaaaaacttttgccgatgccattcctaacagcgatccattaatgatc

SEQ ID NO: 818379 - DNA, 75 bp, synthetic construct
  source 1..75: mol_type = other DNA
aaaaatgggactctctgctgccgttgccgaaaccctatgtcgtgccgggggggcgtttccgggaagtatattact

SEQ ID NO: 818380 - DNA, 75 bp, synthetic construct
  source 1..75: mol_type = other DNA
tattgatcatctgtgccagtcggtgcgggacattctgctgacaccgcagggtagccgcattgcccgccgggaata

SEQ ID NO: 818381 - DNA, 75 bp, synthetic construct
  source 1..75: mol_type = other DNA
ccattacaggatggctttggctggaccaatggcgtgacgctgaaaatgctggatttgatctgcccgaaagagcaa

SEQ ID NO: 818382 - DNA, 75 bp, synthetic construct
  source 1..75: mol_type = other DNA
ctgaaaatgttggatttgatctgcccgaaagaaaaaccgtgtgacaacgttccggcaacgcgcccgaccagtgct

SEQ ID NO: 818383 - DNA, 75 bp, synthetic construct
  source 1..75: mol_type = other DNA
atcggggatattctgcgcacgcccgtcggctcccgcgtcatgcgtcgtgaatacggttcgctgttgtcgcagatg

SEQ ID NO: 818384 - DNA, 75 bp, synthetic construct
  source 1..75: mol_type = other DNA
ggtggtggagctttccgggcagcgcaacgatggcgccgcagtttctctttccatatcgacaggagctgaaaatgg

SEQ ID NO: 818385 - DNA, 75 bp, synthetic construct
  source 1..75: mol_type = other DNA
agaccaacggaaaagcgatcacggatacggaccatttgcgccaatcggtgcgggatattttgctgacgccgcagg

SEQ ID NO: 818386 - DNA, 75 bp, synthetic construct
  source 1..75: mol_type = other DNA
ttttggctggaccaacggtgtgacgctgaaaatgctggatttgatctgcccaaaagagcaaccgtgtgacaatgt

SEQ ID NO: 818387 - DNA, 75 bp, synthetic construct
  source 1..75: mol_type = other DNA
attagctggcgttttctgagcaatgttcagcacacttatgatcgggagaaaaaactggtggagaaatatgatgtc

SEQ ID NO: 818388 - DNA, 75 bp, synthetic construct
  source 1..75: mol_type = other DNA
tccggcgacgcgtccgaccgttaagtcagcaacgacgcaaccctcaaccaaagaggcacaacccacaccttactc

SEQ ID NO: 818389 - DNA, 75 bp, synthetic construct
  source 1..75: mol_type = other DNA
gaccagccgcagaacccggcgctacgcctgcaggtcatgtctgcggtctatgtggccctgagtcgctgggagcca

SEQ ID NO: 818390 - DNA, 75 bp, synthetic construct
  source 1..75: mol_type = other DNA
aagtgggcctgtggggatttggctatgatttcgacaacatgaaagcgcgctgttggtacgaacaccatttcccgc

SEQ ID NO: 818391 - DNA, 75 bp, synthetic construct
  source 1..75: mol_type = other DNA
tttttgctgggactactacaaaccagcttcgcgccaaaagatcatcgtcgttgggatgatatctgggaagacgga

SEQ ID NO: 818392 - DNA, 75 bp, synthetic construct
  source 1..75: mol_type = other DNA
aaaattatggtgcgaattatgccatgtggcagcatcccttaacgccttaccgtgtaccacttaaagagggcggtg

SEQ ID NO: 818393 - DNA, 75 bp, synthetic construct
  source 1..75: mol_type = other DNA
tccgaaaaagaacggcttttactcaagctgctaatggagggaatgtcggttacagaaatctcacagtacagaaat

SEQ ID NO: 818394 - DNA, 75 bp, synthetic construct
  source 1..75: mol_type = other DNA
tcggcaaatggcaaaaggaaatttggttattcgcgcgtcaggattttgacgagcgtgtattcaccaatccatatg

SEQ ID NO: 818395 - DNA, 75 bp, synthetic construct
  source 1..75: mol_type = other DNA
agcccgttgatttgaaacgcgtcatgaccgcgcgcaagaaatattttacaacatcggcggagaagcaaaatgcta

SEQ ID NO: 818396 - DNA, 75 bp, synthetic construct
  source 1..75: mol_type = other DNA
ataccagcggcaaagccattactgatattgaccatctgcggcagtcggtgcgggacattctgctgacgccgcagg

SEQ ID NO: 818397 - DNA, 75 bp, synthetic construct
  source 1..75: mol_type = other DNA
ataccagcggcaaagtcattaatgatattgaccatctgcgccagtcggtgcgggacattttgctgacgccgcagg

SEQ ID NO: 818398 - DNA, 75 bp, synthetic construct
  source 1..75: mol_type = other DNA
atgacgctttatatcgggatgaacaataccagcggtaaagccattactgatattgaccatctgcgccagtcggtg

SEQ ID NO: 818399 - DNA, 75 bp, synthetic construct
  source 1..75: mol_type = other DNA
gtgtcgttgcggcatatggtatcgcactgggaatgaaccacaatgccagtgacgtaggtctgcagcgttactatg

SEQ ID NO: 818400 - DNA, 75 bp, synthetic construct
  source 1..75: mol_type = other DNA
gaaatggtcgatgaaatatttcagttaattgtaatcgcggggcgggtttgtgatgagcacggatatgtcacgaag

SEQ ID NO: 818401 - DNA, 75 bp, synthetic construct
  source 1..75: mol_type = other DNA
ttaagacaacctcaataggtaactgcgacatttgcggtaggcagagcgatgctcttttgggcttgatgtcactca

SEQ ID NO: 818402 - DNA, 75 bp, synthetic construct
  source 1..75: mol_type = other DNA
attgatatgccgcaaaacccggcactcaggctgcaaattatggtggcgtgctattcggctatccagaagtgggag

SEQ ID NO: 818403 - DNA, 75 bp, synthetic construct
  source 1..75: mol_type = other DNA
acatcctcgttcgcaatcaaaatattgtcggtttaactaccgctgcggatatttgggtaacggcagccatcggta

SEQ ID NO: 818404 - DNA, 75 bp, synthetic construct
  source 1..75: mol_type = other DNA
tcgataaaagtcatatttgcgtacatacctacccggaaagccatcctgaaggcggtttatgtaccttccgcgccg

SEQ ID NO: 818405 - DNA, 75 bp, synthetic construct
  source 1..75: mol_type = other DNA
atcctgtcagaaacctgttccattatcggggctaatattcttaacatagcccgccaggattacgaaccacagggt

SEQ ID NO: 818406 - DNA, 75 bp, synthetic construct
  source 1..75: mol_type = other DNA
gacgtggattaaccgcaatccgcatgaggtggttgcccgttcgtccgacatcaaaattccggtggacattgaaca

SEQ ID NO: 818407 - DNA, 75 bp, synthetic construct
  source 1..75: mol_type = other DNA
ggttggatggcacaagcggcacaggatgagtgggaatataaaaaagcccgactggatcgccagtcaggattttat

SEQ ID NO: 818408 - DNA, 75 bp, synthetic construct
  source 1..75: mol_type = other DNA
aaatatggttttgctgacgtgctgtctttaggtcacgtcggactggaccccagccgtattgctgctcaggtggtg

SEQ ID NO: 818409 - DNA, 75 bp, synthetic construct
  source 1..75: mol_type = other DNA
gtttaccagacgctgcccgtcagttgcttaccacgcccgccgcgccgattgtgctggtggataaaaaatacgtac

SEQ ID NO: 818410 - DNA, 75 bp, synthetic construct
  source 1..75: mol_type = other DNA
ggtgatggtggattatctctggggcagggggttattgctgcggctcgctggctggcggaagaagtccagaacgga

SEQ ID NO: 818411 - DNA, 75 bp, synthetic construct
  source 1..75: mol_type = other DNA
atcgtgcgggcgtttgttcgatgccgtggcggcggcgctgagctgtgcgccagccacgttaagttatgaagggga

SEQ ID NO: 818412 - DNA, 75 bp, synthetic construct
  source 1..75: mol_type = other DNA
agctgaaaaaagaactcgaatcccagcaagtattgatgctgcgcgcctgccttgaagcatttaaccagctgccaa

SEQ ID NO: 818413 - DNA, 75 bp, synthetic construct
  source 1..75: mol_type = other DNA
aggatcgaaacttcaccaccgcaatgtggatagctatgcagatcctgtgtaccccaagatgcgctatttttgcgg

SEQ ID NO: 818414 - DNA, 75 bp, synthetic construct
  source 1..75: mol_type = other DNA
cgttagatttagacgcggaaggcaaacacgtacctctggacgcacttgaacgtattcatcgtcataaaacaggtg

SEQ ID NO: 818415 - DNA, 75 bp, synthetic construct
  source 1..75: mol_type = other DNA
gaaccgcgcacagacacctgacctgacgaagtttgtgccggtggaaacccacaatctggcactgaaccgtgccga

SEQ ID NO: 818416 - DNA, 75 bp, synthetic construct
  source 1..75: mol_type = other DNA
ggtaacggacataacctacatcaggacccacgaaggctggctgtatcttgccgttgttgttgatctgttctcacg

SEQ ID NO: 818417 - DNA, 75 bp, synthetic construct
  source 1..75: mol_type = other DNA
cagcgacagttcaatccggatgctcctgatgagcgttgggtaacggacataacctacatcaggacccacgaaggc

SEQ ID NO: 818418 - DNA, 75 bp, synthetic construct
  source 1..75: mol_type = other DNA
ggatcacttttcatccgtcgttgacaatccgtgacaacacctgttgctggcctgttcgcctgctctgtcgggtgc

SEQ ID NO: 818419 - DNA, 75 bp, synthetic construct
  source 1..75: mol_type = other DNA
cagaaatgccattatcatgtcgcgattgccgcgaacccggaatacagctcgctgaacctggcgatggcggttcag

SEQ ID NO: 818420 - DNA, 75 bp, synthetic construct
  source 1..75: mol_type = other DNA
tctcacgcaaaattatcggctggtccatgcaatcccggatgacaaaagacattgtcctgaacgcactgctgatgg

SEQ ID NO: 818421 - DNA, 75 bp, synthetic construct
  source 1..75: mol_type = other DNA
aacccacgaaggctggctgtatctggccgtggtggttgacctgttctcccgaaaagttatcggctggtcaatgca

SEQ ID NO: 818422 - DNA, 75 bp, synthetic construct
  source 1..75: mol_type = other DNA
tggtcgaagttgaacataccgccacgagccgattgtgtgacgtacaaagtaacaatgctcaatttactccaattc

SEQ ID NO: 818423 - DNA, 75 bp, synthetic construct
  source 1..75: mol_type = other DNA
agcaaaaaatcagcaccccgcctggatactccttgccactcgccgtgctccacttgtattgagttgcctgaacac

SEQ ID NO: 818424 - DNA, 75 bp, synthetic construct
  source 1..75: mol_type = other DNA
ggcaaaacctgcaacgcgatacgtttaatgaatttacgttacaggttgccaataattcctatgtcagcagttttg

SEQ ID NO: 818425 - DNA, 75 bp, synthetic construct
  source 1..75: mol_type = other DNA
ttgggtaacggacataacctacataaggacccacgaaggctggctgtatcttgtcgtggttgttgatctgttctc

SEQ ID NO: 818426 - DNA, 75 bp, synthetic construct
  source 1..75: mol_type = other DNA
aataactgtctcaggggtagcaaattcttccggattcgcccttgccgcattacttaatgctaatattgagatggg

SEQ ID NO: 818427 - DNA, 75 bp, synthetic construct
  source 1..75: mol_type = other DNA
agacccaccttacactaaaaggcaatatgcaagctattatcatattttagagacaatttcttttggtgatgaacc

SEQ ID NO: 818428 - DNA, 75 bp, synthetic construct
  source 1..75: mol_type = other DNA
ggcttccgtgcaggcgacaacgcgccgatggcttacatcgagctggttgatcgttcagagaaagcagaagctgct

SEQ ID NO: 818429 - DNA, 75 bp, synthetic construct
  source 1..75: mol_type = other DNA
tcggcctgctcgcttttctgctgccttgcgcactggcattgagcacaacggcccatgccgaaactaacaaactgg

SEQ ID NO: 818430 - DNA, 75 bp, synthetic construct
  source 1..75: mol_type = other DNA
aacatcaatgcctactgggagccaaatactttgcgctgcctggaccgtcgaactggccgcgttattaccccctaa

SEQ ID NO: 818431 - DNA, 75 bp, synthetic construct
  source 1..75: mol_type = other DNA
catgagtgaaaacactatcaacaacgcgcttcgtaaaatgggctatgacaccaaaacagaagtttgtggacatgg

SEQ ID NO: 818432 - DNA, 75 bp, synthetic construct
  source 1..75: mol_type = other DNA
tttttaaaaactacgtttcaaaaaaaattcaatgatgaaacttttttattaaatggttgggagttgaaagattta

SEQ ID NO: 818433 - DNA, 75 bp, synthetic construct
  source 1..75: mol_type = other DNA
gggatgtagcacctgcaattccaattaaaaatgttaatttggacgaagatgaactggtttggcagttaaatcttg

SEQ ID NO: 818434 - DNA, 75 bp, synthetic construct
  source 1..75: mol_type = other DNA
taatggaaatccgaactatgttggccgtacggctgtattcaagtcatatattgaacctgtgtatcataacgatca

SEQ ID NO: 818435 - DNA, 75 bp, synthetic construct
  source 1..75: mol_type = other DNA
ttaaagaacccggcaactctccggtaactccggatggttggataagctgtagtgagcgaatgcctgaaaagggcc

SEQ ID NO: 818436 - DNA, 75 bp, synthetic construct
  source 1..75: mol_type = other DNA
atcagcgatgctgaaattaccgctgctatggaagataaattgaagatcaacatggagcgccagtggcctgagcca

SEQ ID NO: 818437 - DNA, 75 bp, synthetic construct
  source 1..75: mol_type = other DNA
gattaagcagggtaatggtattgagcaagcaactcactggatgccgctaccggaaccgccgcaggaggtgaaatg

SEQ ID NO: 818438 - DNA, 75 bp, synthetic construct
  source 1..75: mol_type = other DNA
gcatttttaagtgagcttaagagaataagttcaactgtttcagaaaaagaaaataaacgtgaatttgtcattcaa

SEQ ID NO: 818439 - DNA, 75 bp, synthetic construct
  source 1..75: mol_type = other DNA
caaactggggcgaagttcacgatggctacagagtgaagtggaagcctggctacaggcgagaatccacgaatcacg

SEQ ID NO: 818440 - DNA, 75 bp, synthetic construct
  source 1..75: mol_type = other DNA
cgcaatccccccgtttatctccggacagccgcattcccgattattttttacgtttctccccggttgttatgccgg

SEQ ID NO: 818441 - DNA, 75 bp, synthetic construct
  source 1..75: mol_type = other DNA
cgaatcctgatccgcgcgtacgtcagtttctggacgggatagctgacgggcctgttccgttccgctatcctgccg

SEQ ID NO: 818442 - DNA, 75 bp, synthetic construct
  source 1..75: mol_type = other DNA
aaaagataatagcatcaccacatatatcagaagaaaatattttggattcatctttcaggattctctgattaatgt

SEQ ID NO: 818443 - DNA, 75 bp, synthetic construct
  source 1..75: mol_type = other DNA
taatagccgcaagggaaaggattaatgatatcttgctgtctgtcgggttgtccaatattaataataatgtatcat

SEQ ID NO: 818444 - DNA, 75 bp, synthetic construct
  source 1..75: mol_type = other DNA
gaatatcagtctgattttttatgttatttaattaactcaccttttagtagaaaattaatcgcacagcagattaaa

SEQ ID NO: 818445 - DNA, 75 bp, synthetic construct
  source 1..75: mol_type = other DNA
aaaacaaaatgttttaagaaatctcctcagttcagttgattatcaaaatatcaaaaatgcgaggagaaaagctaa

SEQ ID NO: 818446 - DNA, 75 bp, synthetic construct
  source 1..75: mol_type = other DNA
taataaccgcaagggaaaggattaatgatatcttggtgtctgttggattgtccaatattaatgataatgtatctt

SEQ ID NO: 818447 - DNA, 75 bp, synthetic construct
  source 1..75: mol_type = other DNA
atgattagaataaaaatacataaaaaacctatagaaaacagaacaatcctgaacaatagaactattgagataaaa

SEQ ID NO: 818448 - DNA, 75 bp, synthetic construct
  source 1..75: mol_type = other DNA
tagctttcttgaaggatacagtttccgcgacagcgcccgttttgcggtagcctgcgcggcaatttcgcgcgccag

SEQ ID NO: 818449 - DNA, 75 bp, synthetic construct
  source 1..75: mol_type = other DNA
caactactgaacgggtcgcgcgatttacttcgtcatgcgggcgtggtactggctgattgcaacctgacagccgag

SEQ ID NO: 818450 - DNA, 75 bp, synthetic construct
  source 1..75: mol_type = other DNA
cgatgacttttatggcgaaatgctcctggaagaaacgcgccgcgccggcgtgaatgtctccggctgcgttcgttt

SEQ ID NO: 818451 - DNA, 75 bp, synthetic construct
  source 1..75: mol_type = other DNA
cgtgacagcgcccgttttgcgatggcctgcgcggcaatttcacgcgccagcggcagcttaaataaccctaccctg

SEQ ID NO: 818452 - DNA, 75 bp, synthetic construct
  source 1..75: mol_type = other DNA
tacttcgtcatgcgggcgtagtactggcagattgcaacctgactgccgaggcgctggagtgggtctttaccctcg

SEQ ID NO: 818453 - DNA, 75 bp, synthetic construct
  source 1..75: mol_type = other DNA
ctggcaattgccaatcaagacgaacaaaccgtattggcgattaatgatactcatctgctggaacagttaacgccg

SEQ ID NO: 818454 - DNA, 75 bp, synthetic construct
  source 1..75: mol_type = other DNA
aggcagaatacaaatcagcgctggctgcttcacttttcgaaaccattctggaaaaagcctgtgctgagtgttcgg

SEQ ID NO: 818455 - DNA, 75 bp, synthetic construct
  source 1..75: mol_type = other DNA
atgaatagcatcgagacacaatgttcctcatctgaagttatgaactatgacccaaatctgacgttatgcggacgc

SEQ ID NO: 818456 - DNA, 75 bp, synthetic construct
  source 1..75: mol_type = other DNA
agtgtgttctgctgataaacggatatccacatggtgtatttgattttgaggggaagaacggctactgtcgaagtg

SEQ ID NO: 818457 - DNA, 75 bp, synthetic construct
  source 1..75: mol_type = other DNA
gaagaggtcgctccaaaagttaccgcagacatgatgattgagtttatcgatcaggatggggctaaaacgtgtgag

SEQ ID NO: 818458 - DNA, 75 bp, synthetic construct
  source 1..75: mol_type = other DNA
tgaactatcgcaaggaagatagtatctctcagggaacaccggcaaaagataataagaatataacggcaacgctcc

SEQ ID NO: 818459 - DNA, 75 bp, synthetic construct
  source 1..75: mol_type = other DNA
gtggcgcctctattatgtatggtaacagggacctgaaaccggagaccagtgtaaccgaagagatcggtattattt

SEQ ID NO: 818460 - DNA, 75 bp, synthetic construct
  source 1..75: mol_type = other DNA
tctggcgctggtgaaaacgttgagcgacgccggatgtcgggtgattgccgaagggcgttacaacacgcctgctca

SEQ ID NO: 818461 - DNA, 75 bp, synthetic construct
  source 1..75: mol_type = other DNA
tttgaattattagaggtggttgcaagccgattaggtctaccaatggatatcttactaaaggacacctatgaaagt

SEQ ID NO: 818462 - DNA, 75 bp, synthetic construct
  source 1..75: mol_type = other DNA
cacattggccaaaatatatcgcacctcctccccccgtagaacagctatgttcacagagagcggttaatgatactg

SEQ ID NO: 818463 - DNA, 75 bp, synthetic construct
  source 1..75: mol_type = other DNA
caccggaagagcaggcagcactggacaaatcgatggaaaaagagcgcgcagagatggagaaaattctgggaccaa

SEQ ID NO: 818464 - DNA, 75 bp, synthetic construct
  source 1..75: mol_type = other DNA
tcccggcagaccgctacaaagcaaaagaggtggcagagctttactattcacgatgggaaatcgaagtcgggtcca

SEQ ID NO: 818465 - DNA, 75 bp, synthetic construct
  source 1..75: mol_type = other DNA
aaaaaaagtacagttacttactattctttcaggactacaacctcgtgcagataaccaacccccatcagaaaataa

SEQ ID NO: 818466 - DNA, 75 bp, synthetic construct
  source 1..75: mol_type = other DNA
ctggctatcctgtcaggattacagccccgccgggacaaccagcgcccgtcaggaaacaagctagccattcagtat

SEQ ID NO: 818467 - DNA, 75 bp, synthetic construct
  source 1..75: mol_type = other DNA
gaaattgctgtttatcaggagaaagttattcgtgagattaaatcaggtaaaaaagataaatataatcattgggat

SEQ ID NO: 818468 - DNA, 75 bp, synthetic construct
  source 1..75: mol_type = other DNA
cgtggcgaaaccgggcaactaccgccgccgattcaaaatatggatcagttctggtcaccgtctgagcagtatggc

SEQ ID NO: 818469 - DNA, 75 bp, synthetic construct
  source 1..75: mol_type = other DNA
tcgctactggctggcggaacaccacaatatgaccggcattgccagtgctgcaacatcggtattgattggctatct

SEQ ID NO: 818470 - DNA, 75 bp, synthetic construct
  source 1..75: mol_type = other DNA
cgaacagttcggcacgctcaatacgctctatccggggcgaatcgatttggggctgggtcgtgctccgggtagtga

SEQ ID NO: 818471 - DNA, 75 bp, synthetic construct
  source 1..75: mol_type = other DNA
gcagattcagcacgccagctggaaacaaaaattgaagggctgaaaaatgcgcagccaaatgaaatacgcagcgaa

SEQ ID NO: 818472 - DNA, 75 bp, synthetic construct
  source 1..75: mol_type = other DNA
gtctgccgttcgcgtttgcctcacacttcgcaccggatatgctgttccaggcgctgcatctttatcgcagtaact

SEQ ID NO: 818473 - DNA, 75 bp, synthetic construct
  source 1..75: mol_type = other DNA
ttaacgggcaaattttcgatcaccaggcgcgcctgcattcgtttgaactggcaatggacgtgaaggaagagctac

SEQ ID NO: 818474 - DNA, 75 bp, synthetic construct
  source 1..75: mol_type = other DNA
gttattaggctccagcctttacagtgcacaactggcggcgcagcttggtctgccgtttgcgtttgcctcacactt

SEQ ID NO: 818475 - DNA, 75 bp, synthetic construct
  source 1..75: mol_type = other DNA
gaatccgggcggagactggaagacaaactggaggctttgaaaaatgcgccaccgcgcgagatccgcacggaagtg

SEQ ID NO: 818476 - DNA, 75 bp, synthetic construct
  source 1..75: mol_type = other DNA
agccggctggaaaacggccggctggcagcgggacagtattgatctgactgtctcaaaagcggtcaccgcgaccgg

SEQ ID NO: 818477 - DNA, 75 bp, synthetic construct
  source 1..75: mol_type = other DNA
ctggtcgccgtccgaacagtatggtgtgcagcaggcgctgagtatgtcgttggtaggtgataaagcgaaagtgcg

SEQ ID NO: 818478 - DNA, 75 bp, synthetic construct
  source 1..75: mol_type = other DNA
ttaacggacagattttcgaccaccaggcgcggctgcattcgtttgaactggcgatggatgtgaaggaagatttac

SEQ ID NO: 818479 - DNA, 75 bp, synthetic construct
  source 1..75: mol_type = other DNA
cccaatccgcatgtgcgcccggtaccaggctatggcgagaaaatccccgtgtggttgttaggctccagcctttac

SEQ ID NO: 818480 - DNA, 75 bp, synthetic construct
  source 1..75: mol_type = other DNA
ggttcgattaatggttactcctggatgaacgaacgcaatcttcagacctggcatgaatccgtcgcagcaggcaaa

SEQ ID NO: 818481 - DNA, 75 bp, synthetic construct
  source 1..75: mol_type = other DNA
ccgccgaacgtaatgcgcagtggcgtcacactttgcagtcgggtattgaaaccgcgcgtgtaccgctggatgaac

SEQ ID NO: 818482 - DNA, 75 bp, synthetic construct
  source 1..75: mol_type = other DNA
tgaatgagcgcaacctgcagagctggcatgaatccgtcgcggcaggccaaaaaccgttgatgatgatgatgcgcg

SEQ ID NO: 818483 - DNA, 75 bp, synthetic construct
  source 1..75: mol_type = other DNA
gacagcgtattgcatcagtctgcccccatccacgcggtctatttcggtggcggtacgccttccgcgctttcagca

SEQ ID NO: 818484 - DNA, 75 bp, synthetic construct
  source 1..75: mol_type = other DNA
atgatgccgtttcgtggggccattccggttgccaaagagcaactggcacagacctggcaagagatgatcaatcaa

SEQ ID NO: 818485 - DNA, 75 bp, synthetic construct
  source 1..75: mol_type = other DNA
acagcgcgtgtaccgctggatgaacttacaccacatgccgaaaaactcgcgccgttactggctcaatggcaccaa

SEQ ID NO: 818486 - DNA, 75 bp, synthetic construct
  source 1..75: mol_type = other DNA
atttaacgaccgtgggtgccagtaaaagtgacgccgtgcgtgacatttatattggcacgctggacgcgtttccgg

SEQ ID NO: 818487 - DNA, 75 bp, synthetic construct
  source 1..75: mol_type = other DNA
ggggcttaacggtattgaaaaacagcagcatttgctggcggctattactgattattatcaacaacattatgccga

SEQ ID NO: 818488 - DNA, 75 bp, synthetic construct
  source 1..75: mol_type = other DNA
gtggtactggcaggaaaccatgactcggtcgccacgctgaatgaatcgcgcgatatcatggcgttcctcaatact

SEQ ID NO: 818489 - DNA, 75 bp, synthetic construct
  source 1..75: mol_type = other DNA
ttaggcaaaccgcctgttagtgaacagaagttaattgatgaagccatcgacgaagcggcgcgttgtactgaaatg

SEQ ID NO: 818490 - DNA, 75 bp, synthetic construct
  source 1..75: mol_type = other DNA
aatattggcgaactgacatgccaggatgaagacctgtccggagagctctggcttgccgggatgcttatctcagca

SEQ ID NO: 818491 - DNA, 75 bp, synthetic construct
  source 1..75: mol_type = other DNA
tcgggggtaaaaatgtcgcctggctgcagtctgaaatcacagcgtggatggcagaacgtgtcgcgcaccgcaacc

SEQ ID NO: 818492 - DNA, 75 bp, synthetic construct
  source 1..75: mol_type = other DNA
acctggggagaagatctggctattgcccgcgatatcggtctcgacggcgtcgatctctatgcgctcaatgtcctg

SEQ ID NO: 818493 - DNA, 75 bp, synthetic construct
  source 1..75: mol_type = other DNA
gaatcagcgctggagacgatccgccgttatttatcgacgcagttctataaagatcacctgaagacttacaaaaaa

SEQ ID NO: 818494 - DNA, 75 bp, synthetic construct
  source 1..75: mol_type = other DNA
gcagcatgcgttttctttgctcaaagagaatggttttaatgcgcaagtgaatatgcagtcgtggatgttcctgtc

SEQ ID NO: 818495 - DNA, 75 bp, synthetic construct
  source 1..75: mol_type = other DNA
ggtgatattcagcaaaaagaggctgcggtagagctgatcccatatatccagcaggcgtggattctggcgcagcgc

SEQ ID NO: 818496 - DNA, 75 bp, synthetic construct
  source 1..75: mol_type = other DNA
tattcagcaggcgtggattctggcgcagcgatatgatgcggtgatagcgaatccgccgtatatgggaagtaaggg

SEQ ID NO: 818497 - DNA, 75 bp, synthetic construct
  source 1..75: mol_type = other DNA
tttggtcttgatatcgacgaccgcgcagcacagctttccggttttgcattattaatgatggcacgtcaggatgac

SEQ ID NO: 818498 - DNA, 75 bp, synthetic construct
  source 1..75: mol_type = other DNA
tttgcgaagaaaaactatccaaatagcaaatctgacttgtttgctatttttatggagcgagcatttaaattgctt

SEQ ID NO: 818499 - DNA, 75 bp, synthetic construct
  source 1..75: mol_type = other DNA
aaacgagggctttgcggaactggtttcaaccggagcttataaaacctccccagccgatgaagatggcatcatccc

SEQ ID NO: 818500 - DNA, 75 bp, synthetic construct
  source 1..75: mol_type = other DNA
ccagttctacatttctgaaaagaaagatcaggtaatgggcaaggtggtcaaaagtgaagacatccctgccgccac

SEQ ID NO: 818501 - DNA, 75 bp, synthetic construct
  source 1..75: mol_type = other DNA
ttggacgatgaaactgagcttctgctaccagataacctaacacgtaccgactcaattctgcgtggattggtagac

SEQ ID NO: 818502 - DNA, 75 bp, synthetic construct
  source 1..75: mol_type = other DNA
tccggactccagcctgaaaggcaaaatgccgtactacattgagccagcggaacaaacgccggaagtgcaggcaca

SEQ ID NO: 818503 - DNA, 75 bp, synthetic construct
  source 1..75: mol_type = other DNA
atccgccgtatatgggcggcaagggaatgaatggtgagctgaaagagtttgccaaaaataatttcccggatagta

SEQ ID NO: 818504 - DNA, 75 bp, synthetic construct
  source 1..75: mol_type = other DNA
gcttaacggcgccgccctgctcacagggatcaatgacgacacgttaaaacaacaaatcaaggctctgttaaccca

SEQ ID NO: 818505 - DNA, 75 bp, synthetic construct
  source 1..75: mol_type = other DNA
atatgttaaaagtaatgaatgaaaaaggaaaagttgctttccagccagcatggttccctgagaacgataatcatg

SEQ ID NO: 818506 - DNA, 75 bp, synthetic construct
  source 1..75: mol_type = other DNA
atatcttaactgctcacgcgaatttctcacccgcaactttattcccggcacttatcgcgcctatggcgattcagt

SEQ ID NO: 818507 - DNA, 75 bp, synthetic construct
  source 1..75: mol_type = other DNA
caaattatggtggggcgtgcaggggcatcgcaagatgcgccgggttctatgttgaccggttacgccaaccctgta

SEQ ID NO: 818508 - DNA, 75 bp, synthetic construct
  source 1..75: mol_type = other DNA
cgagttacccttggaggcgaagatgtccgcctgttagtcccgactacatttatgaatctcagcggcaaagccgtt

SEQ ID NO: 818509 - DNA, 75 bp, synthetic construct
  source 1..75: mol_type = other DNA
tgtttcgtcgtgattttgttgagtgtgaagcgccaccagcatattgattctgcaattccgggacgttacactgtt

SEQ ID NO: 818510 - DNA, 75 bp, synthetic construct
  source 1..75: mol_type = other DNA
atgagcattgctacgcccaaattatggtggggcgtgcaggggcatcgcaagatgcgccgggttctatgttgaccg

SEQ ID NO: 818511 - DNA, 75 bp, synthetic construct
  source 1..75: mol_type = other DNA
agaacatcgtcgacaaaatcgagtatctgaactgctcacgcgaattttttacccgcaatttcataccgggtactt

SEQ ID NO: 818512 - DNA, 75 bp, synthetic construct
  source 1..75: mol_type = other DNA
aaacaataaaatcttggaattgtgctaactttgtacaagttagcaatactcttggaaattatatacgaaataaaa

SEQ ID NO: 818513 - DNA, 75 bp, synthetic construct
  source 1..75: mol_type = other DNA
ggaagcgtggcaaaaacgggcttttgctcacatttcaaatggttataaacatatttatatagcgattaattcacc

SEQ ID NO: 818514 - DNA, 75 bp, synthetic construct
  source 1..75: mol_type = other DNA
agacacattcgttattttagaaggaattatctctctgcgtagagaagaaaatgtgcttgtcggtattacacaggc

SEQ ID NO: 818515 - DNA, 75 bp, synthetic construct
  source 1..75: mol_type = other DNA
tggcgaaccccggcgctgaatacgccgcaacgcgacacaatgctggcgcctggttcgttgacttactggcggagc

SEQ ID NO: 818516 - DNA, 75 bp, synthetic construct
  source 1..75: mol_type = other DNA
aatgcgaacaaagcaccaacatcaatgcctactgggaaccgaatactttgcgctgtctggatcgtcgtaccggac

SEQ ID NO: 818517 - DNA, 75 bp, synthetic construct
  source 1..75: mol_type = other DNA
caacggcaaagctgttattttctccctgcatgttgcctgccactttaagcgcatgcaccagaacatcgtcgacaa

SEQ ID NO: 818518 - DNA, 75 bp, synthetic construct
  source 1..75: mol_type = other DNA
agctgtattgacgcactccatgaggttgaaaccgtccagggtcactccgcgttccgtcgtaatcaacgggaggta

SEQ ID NO: 818519 - DNA, 75 bp, synthetic construct
  source 1..75: mol_type = other DNA
cttgaacgtctgaacttccagattgtttacccgaacgaccgtgacgacttattaaaactgatcgaaaacaatgcg

SEQ ID NO: 818520 - DNA, 75 bp, synthetic construct
  source 1..75: mol_type = other DNA
attagaatcatatgagcgttctgtggcgaatctttttgatttgaccacttttatttcatccgtagaccgtgacta

SEQ ID NO: 818521 - DNA, 75 bp, synthetic construct
  source 1..75: mol_type = other DNA
tggttacgcaaaaaccgttgcaaattgcttattatcaatcggacacgtttaagaataaatacaataaattaatta

SEQ ID NO: 818522 - DNA, 75 bp, synthetic construct
  source 1..75: mol_type = other DNA
accagattggttccctgagtgaaacctttgatgcggtacaactttgccatgacaacaactggggcacctttatct

SEQ ID NO: 818523 - DNA, 75 bp, synthetic construct
  source 1..75: mol_type = other DNA
ggccaatcagcgggaatcctgttaattctaatgtacggatgacaacgagttacaactcaaatgggtcatccgtta

SEQ ID NO: 818524 - DNA, 75 bp, synthetic construct
  source 1..75: mol_type = other DNA
ggtggccgtgtagaagggaaagtgcgaaacccagtccactcacaaactgctggcgacgttctctcaggcttccat

SEQ ID NO: 818525 - DNA, 75 bp, synthetic construct
  source 1..75: mol_type = other DNA
gcggagaacatttatccctccgcagtactgcaactggatccggcggttgtaaaaggtatctgccttagcgccgga

SEQ ID NO: 818526 - DNA, 75 bp, synthetic construct
  source 1..75: mol_type = other DNA
ttatttggtgcttattttcagtttttctttgatggcaacaagcgtaccagtcgccatatgatgaacggctggtta

SEQ ID NO: 818527 - DNA, 75 bp, synthetic construct
  source 1..75: mol_type = other DNA
cccaaacgaaagaagaactcccgcagtttaactcgccaactattctactggcggagaacatttatccctccacag

SEQ ID NO: 818528 - DNA, 75 bp, synthetic construct
  source 1..75: mol_type = other DNA
acattataaaaataaattaaagcatataatagatgattatgatgcaacgttgtcacatcttattagagttggtga

SEQ ID NO: 818529 - DNA, 75 bp, synthetic construct
  source 1..75: mol_type = other DNA
taatgctcgcacttttgttgaaacacatttttcttgggaggctaaactcaatccattaattaatgacttaaattt

SEQ ID NO: 818530 - DNA, 75 bp, synthetic construct
  source 1..75: mol_type = other DNA
ttaactggctcactcgttgtggcgatattttcaacaccgagagcgagtatcttaccggactggatcgcgagattg

SEQ ID NO: 818531 - DNA, 75 bp, synthetic construct
  source 1..75: mol_type = other DNA
gaggcgctgcacggtttgctggcattagcccgtcatcaactggcctgtcagccgacatttatcgccggtttcagc

SEQ ID NO: 818532 - DNA, 75 bp, synthetic construct
  source 1..75: mol_type = other DNA
aggcgctacaagccgcacgtcgtattcaggcacaaacttacttcatcgatttgccttgctgggcgcagagtgaag

SEQ ID NO: 818533 - DNA, 75 bp, synthetic construct
  source 1..75: mol_type = other DNA
cgaagatgaaagccagcaaactgcattaccctctgcgctggcgcactattttgcccaactgcggggcgattcccc

SEQ ID NO: 818534 - DNA, 75 bp, synthetic construct
  source 1..75: mol_type = other DNA
ttgccttgctgggcgcagagtgaagaagaggacgattcgcctgatacgcaagatgaaagccaggccttactgctg

SEQ ID NO: 818535 - DNA, 75 bp, synthetic construct
  source 1..75: mol_type = other DNA
ttgcacaactgcggggcgacgcctccggcgatgcactcaatcgtcagcgcgaagcctttatggcccgctggattg

SEQ ID NO: 818536 - DNA, 75 bp, synthetic construct
  source 1..75: mol_type = other DNA
cggcgatgcactcaatcgtcagcgcgaagcctttatggcccgctggattgcatgggcgatgcagcaaaataatgg

SEQ ID NO: 818537 - DNA, 75 bp, synthetic construct
  source 1..75: mol_type = other DNA
cacacagtaacggtgaatatgtccccgtcagcaaagcagcatggaaaacaggtttatctgattcaacatgccgga

SEQ ID NO: 818538 - DNA, 75 bp, synthetic construct
  source 1..75: mol_type = other DNA
ggattgctcgttaagctcccagcgatcgaacaagcagctcaaaagctgttaaacgaatcgacaccgccgaaaggt

SEQ ID NO: 818539 - DNA, 75 bp, synthetic construct
  source 1..75: mol_type = other DNA
gcccaatgacgaaaccggagactgccagctgtttacccagaatctggcgcggatggcggagcaggcgggggttaa

SEQ ID NO: 818540 - DNA, 75 bp, synthetic construct
  source 1..75: mol_type = other DNA
ggcgtgaaagattatttcgtgctttgcgtgagttatttagcctgtttgagtatgctccgacgatattaacatcgg

SEQ ID NO: 818541 - DNA, 75 bp, synthetic construct
  source 1..75: mol_type = other DNA
atgtccgaaagaactttaacactagcaggcactggtaagcaaccgatgatgggcagccggaaaattgcagaagtc

SEQ ID NO: 818542 - DNA, 75 bp, synthetic construct
  source 1..75: mol_type = other DNA
cgtcgaacgtgaacgactggtatgtgcaattgatgaattgcgcggggcattctcaaaacgccgtcaggttggcgc

SEQ ID NO: 818543 - DNA, 75 bp, synthetic construct
  source 1..75: mol_type = other DNA
ggtatgcctgccccggtctggcaaaactggtgctggcagtggggcttacagcaggcgggagaacaactgctaaaa

SEQ ID NO: 818544 - DNA, 75 bp, synthetic construct
  source 1..75: mol_type = other DNA
gctggcgtgacaagcaaaccggcgagatgaaagagcagactgaatggcatcgcgtagtattattcggcaagctgg

SEQ ID NO: 818545 - DNA, 75 bp, synthetic construct
  source 1..75: mol_type = other DNA
attattataatcagatgatggaacgtgaacggctaacggtttgcttccatgcgcagttaaaacaacgtcacgcaa

SEQ ID NO: 818546 - DNA, 75 bp, synthetic construct
  source 1..75: mol_type = other DNA
gcacagttaaaacagcgccacgcaacgatgcgtctcgaagaaatgaatgatgtagaccgggagcgtctggtgtgc

SEQ ID NO: 818547 - DNA, 75 bp, synthetic construct
  source 1..75: mol_type = other DNA
gtttacgggtacatcgattatctggcaatgaatatgctgcctgacctgtgcgatgagtcctggctggcgcgacat

SEQ ID NO: 818548 - DNA, 75 bp, synthetic construct
  source 1..75: mol_type = other DNA
atggatggcaagtgtaacccggtttattgtcgctcacggaatgggctctccgcatcttcatggttatcatcgcct

SEQ ID NO: 818549 - DNA, 75 bp, synthetic construct
  source 1..75: mol_type = other DNA
tttgacgatcgcgatctctaccacaccctgatatggctgtgctggtatgatctgatgtgcgcccgctccatgcag

SEQ ID NO: 818550 - DNA, 75 bp, synthetic construct
  source 1..75: mol_type = other DNA
ccgccgcgagaacgcggagcgctggcgcatcaggtgcttgagcattaccagctcgctcacctccctgcttcgacg

SEQ ID NO: 818551 - DNA, 75 bp, synthetic construct
  source 1..75: mol_type = other DNA
actcacattattaatcgcccaggaaaatcaatttgccgaaatgggccaggcgctggaagtgctatatgccttatg

SEQ ID NO: 818552 - DNA, 75 bp, synthetic construct
  source 1..75: mol_type = other DNA
tattcaggcacaaacttactttattgatttgccttgctgggcgcagagtgaagaagaggacgagtcacccggtac

SEQ ID NO: 818553 - DNA, 75 bp, synthetic construct
  source 1..75: mol_type = other DNA
tatttatgcatgccggattgactgaaaaagaattcaaccagccatactggcgaattaatgaagaatcatgttact

SEQ ID NO: 818554 - DNA, 75 bp, synthetic construct
  source 1..75: mol_type = other DNA
atgacagtgatgacgctcaatctagtcgaaaaacagccagcaactatgcgccggataattggtaagcatctggcc

SEQ ID NO: 818555 - DNA, 75 bp, synthetic construct
  source 1..75: mol_type = other DNA
gatcaatgacggtgcccacatttatgtctgcggcgacgctaatcgcatggcgaaagacgttgagcaggcacttct

SEQ ID NO: 818556 - DNA, 75 bp, synthetic construct
  source 1..75: mol_type = other DNA
aaacgaatcgacaccgccgaaaggtaaccgcaagcgctggacacatccgcagtttggcaacttcacctactacgc

SEQ ID NO: 818557 - DNA, 75 bp, synthetic construct
  source 1..75: mol_type = other DNA
atgaaaaccttccgctggaaagtgaaaccgggtatggatgtggcttcggctccttccgtcagggaggtgcgcttt

SEQ ID NO: 818558 - DNA, 75 bp, synthetic construct
  source 1..75: mol_type = other DNA
tgacctgtgccgcctggtcatcacgggttcgcatgctgggggttgaattcagtgctgagtttaagcaggtggtga

SEQ ID NO: 818559 - DNA, 75 bp, synthetic construct
  source 1..75: mol_type = other DNA
cagcactggctatgttaatcgctgcgctcagtgcgccagtgtactcgaccggcatcccatccattgatgccgcca

SEQ ID NO: 818560 - DNA, 75 bp, synthetic construct
  source 1..75: mol_type = other DNA
ccccgttgggaggccgcggcgctggagtcgtttctggctgagcacgggggctggaaggcctttctgtggacgccg

SEQ ID NO: 818561 - DNA, 75 bp, synthetic construct
  source 1..75: mol_type = other DNA
atggatgtgacatcggccccttccgtcagggaggtgcgctttggtgatggctattcccagcgtgtgcctgccggg

SEQ ID NO: 818562 - DNA, 75 bp, synthetic construct
  source 1..75: mol_type = other DNA
agccggatatggaggtgaactcgcagccatcggtgcgtgaagtgcgtttgggtgacgggtattcgcagcgtatgg

SEQ ID NO: 818563 - DNA, 75 bp, synthetic construct
  source 1..75: mol_type = other DNA
tgacctgtgccgcctggtcatcacgggttcgcatgctgtgggttgaattcagtgcagagtttaagcaggtggtga

SEQ ID NO: 818564 - DNA, 75 bp, synthetic construct
  source 1..75: mol_type = other DNA
tgacctgtgccgcctggtcatcacgggttcgcatgctgagggttgaattcagggccgagtttaagcaggtggtga

SEQ ID NO: 818565 - DNA, 75 bp, synthetic construct
  source 1..75: mol_type = other DNA
tgacctgtgccgcctggtcatcacgggttcgcatgctgagggttgaattcagcgcggagtttaagcaggtggtga

SEQ ID NO: 818566 - DNA, 75 bp, synthetic construct
  source 1..75: mol_type = other DNA
gacgcgggtctggagctcagctatgagctcgatttttttggcaaacttaagaacatgagtgaggctgatcgccag

SEQ ID NO: 818567 - DNA, 75 bp, synthetic construct
  source 1..75: mol_type = other DNA
cagggcgctgggaagggagagtcaggagaatgcggacaggatgtccggatattttgaacggctgtcccggctggg

SEQ ID NO: 818568 - DNA, 75 bp, synthetic construct
  source 1..75: mol_type = other DNA
tgcgcttttactgagagcctcagaggctgcaggactgctggcaggtaacgcagagcaggcggcggccagcgtgtc

SEQ ID NO: 818569 - DNA, 75 bp, synthetic construct
  source 1..75: mol_type = other DNA
cccctgaactgcgggcgcattttgcggcgctggagaagcagtacaacctgccggaaaacacgctgtacggtctgg

SEQ ID NO: 818570 - DNA, 75 bp, synthetic construct
  source 1..75: mol_type = other DNA
tggagaaacagcctgcagctctgcgcggtctgattggtaaatatctggccgcgcctcgctggcaggatagttgcg

SEQ ID NO: 818571 - DNA, 75 bp, synthetic construct
  source 1..75: mol_type = other DNA
tggcggctttgttgtttggtttttttcactattcaggtggtgctttacttgtattatttgccacgttatctggtg

SEQ ID NO: 818572 - DNA, 75 bp, synthetic construct
  source 1..75: mol_type = other DNA
tctgttgctctctgttcctcttatactgtttttggctgttttttttggtgggttaaagccagagattcattttcc

SEQ ID NO: 818573 - DNA, 75 bp, synthetic construct
  source 1..75: mol_type = other DNA
cctgcaactggtgcttggaacgtaccgcgcagttccgtcagaaaaagggatgaaaggtggggagatcgcaccagt

SEQ ID NO: 818574 - DNA, 75 bp, synthetic construct
  source 1..75: mol_type = other DNA
gagcgttctttatttgcaacccgacaaactttactcgacctgaattatgcccgtcaggttaacgaaatttctttg

SEQ ID NO: 818575 - DNA, 75 bp, synthetic construct
  source 1..75: mol_type = other DNA
attaccggcgggcttgtcgtcgcaaatcttattgcagcgcccggatattatggaagctgaacacgcgttaatggc

SEQ ID NO: 818576 - DNA, 75 bp, synthetic construct
  source 1..75: mol_type = other DNA
cggctggacattaacgtcaccaacacgaccacggggcagacaacccgccggacggtgaagggaggcgcggtgtcc

SEQ ID NO: 818577 - DNA, 75 bp, synthetic construct
  source 1..75: mol_type = other DNA
catcggcctcgatgagcaccagcgtgtatcagcggttcatatcgacaccgataacctgcatgtgcatgtggccat

SEQ ID NO: 818578 - DNA, 75 bp, synthetic construct
  source 1..75: mol_type = other DNA
ggccgtgggcgaccgcgtgcgtgtcaatcacatgggcagcgagagcgtgacgctaccggacggccggacggtgga

SEQ ID NO: 818579 - DNA, 75 bp, synthetic construct
  source 1..75: mol_type = other DNA
aagaagaagcggcgaaaatcggtcgtgcactggtgcagcacgttaacgcctggtgggcagaaacgttgcaacagc

SEQ ID NO: 818580 - DNA, 75 bp, synthetic construct
  source 1..75: mol_type = other DNA
ctatcaccatccgggacagggacaatcagaagcagaatctggcgaacctgagccgtgaccctgcgcacgctaatg

SEQ ID NO: 818581 - DNA, 75 bp, synthetic construct
  source 1..75: mol_type = other DNA
acgtgaccagttttatcagggggttaatccagcaatagctgtgccactgagagaaatacttaacaggtacaaaac

SEQ ID NO: 818582 - DNA, 75 bp, synthetic construct
  source 1..75: mol_type = other DNA
tcgatcatccgcacctttctgattgatcccgtcgggctggtggaaggcatggcgcagcctgatccagagcacagt

SEQ ID NO: 818583 - DNA, 75 bp, synthetic construct
  source 1..75: mol_type = other DNA
cctgcgctggcaacttataacctgaaagattgcgagctggtgacgcagatcttccataaaactgaaatcatgcca

SEQ ID NO: 818584 - DNA, 75 bp, synthetic construct
  source 1..75: mol_type = other DNA
cgaaaccatcgacaaactgatggcgggtgaactggatgcgcggctggtttaccgtaaacgccttcgccgtccgct

SEQ ID NO: 818585 - DNA, 75 bp, synthetic construct
  source 1..75: mol_type = other DNA
gcagatggcgaggtggagttttcttctcgcgtactgaaagaccagctgacacctattgctgcccgcgcaggctca

SEQ ID NO: 818586 - DNA, 75 bp, synthetic construct
  source 1..75: mol_type = other DNA
aggttatcagtgcgtctgaaaacaactggcctcatgtgctggactgcctgaacataaatgtccctgactctccgc

SEQ ID NO: 818587 - DNA, 75 bp, synthetic construct
  source 1..75: mol_type = other DNA
cctttgatatctatctggacggtgacctgatccacattgaaaaaatttcgctggatattaccgataacagcgccg

SEQ ID NO: 818588 - DNA, 75 bp, synthetic construct
  source 1..75: mol_type = other DNA
gcgttaatcaccgaaaagatgtgctacgtgaccagttttatcagggggttaatccagcaatagctgtgccactga

SEQ ID NO: 818589 - DNA, 75 bp, synthetic construct
  source 1..75: mol_type = other DNA
agaaatgaaagtggaatcgttcggtaacaaactccagctgagtaatctgctggatatcgatccaaagggcggcgg

SEQ ID NO: 818590 - DNA, 75 bp, synthetic construct
  source 1..75: mol_type = other DNA
gcagagggagaaattgaagtcagttccaaagtgctgggcgtactgacggctaaagcccgcgccgcaggttcgtgg

SEQ ID NO: 818591 - DNA, 75 bp, synthetic construct
  source 1..75: mol_type = other DNA
gttaccgtctacgaggccgatgtgcgcccgcctgaacgctatctgatggaacggtttattaccgctccggtgtgg

SEQ ID NO: 818592 - DNA, 75 bp, synthetic construct
  source 1..75: mol_type = other DNA
accaacattcagtacgaaggacggcagggcggaacgctgcaactgtttcgtactgaacaacagtatgaaaatgcc

SEQ ID NO: 818593 - DNA, 75 bp, synthetic construct
  source 1..75: mol_type = other DNA
actatggcttcaccgttctcaatctttataagctgtatctgatcgtcgataaagagaacgaaaaagcaattcaca

SEQ ID NO: 818594 - DNA, 75 bp, synthetic construct
  source 1..75: mol_type = other DNA
gctttatctcctccgagtggcagcgcgagattgtgcgcaatatcgatgacctctcccaggtggtctattttatgg

SEQ ID NO: 818595 - DNA, 75 bp, synthetic construct
  source 1..75: mol_type = other DNA
gaatgccgggcaaatctcccccggctatgccgcgccgtgggcagcaccaggcgtgcctttaaaagcgattaaatg

SEQ ID NO: 818596 - DNA, 75 bp, synthetic construct
  source 1..75: mol_type = other DNA
gttacgtaactgtgacaccagccactatatggaaaacaaagggcggatggtgcgcctggcggaatacagccgtga

SEQ ID NO: 818597 - DNA, 75 bp, synthetic construct
  source 1..75: mol_type = other DNA
cagctctttacccagaatttagcgcggatggctgagctggcgggggttaaattccgctttaatacgtctgtggag

SEQ ID NO: 818598 - DNA, 75 bp, synthetic construct
  source 1..75: mol_type = other DNA
catccggcatcacacagactctgaaaccgtggggggggggggccccccccccccacaaaaacccccccccccccc

SEQ ID NO: 818599 - DNA, 75 bp, synthetic construct
  source 1..75: mol_type = other DNA
tctcgcgggaaaaacattgcctgccggagattgtgactaacatctggcacgggcgcgatgaagccaaacgtcagg

SEQ ID NO: 818600 - DNA, 75 bp, synthetic construct
  source 1..75: mol_type = other DNA
aaaaacatgccgagcgttaccgtattccgctgcggctggggcgcgataacagcgagctggagtggcgcgagcacg

SEQ ID NO: 818601 - DNA, 75 bp, synthetic construct
  source 1..75: mol_type = other DNA
aattgcgcgcaacatcgacgatctctcacaggtggtctacttcatggatgacgatctgtttgacccgtccgcgtt

SEQ ID NO: 818602 - DNA, 75 bp, synthetic construct
  source 1..75: mol_type = other DNA
tggcgcgtaaaacaatagttaaacgcgccagcaaatactggcctaaagcccagcgactggataatgccattcacc

SEQ ID NO: 818603 - DNA, 75 bp, synthetic construct
  source 1..75: mol_type = other DNA
agttacaggttcagccctttgacgagaaagtggctcgccataaagccagaaagtatggccgcgtagataacgtgg

SEQ ID NO: 818604 - DNA, 75 bp, synthetic construct
  source 1..75: mol_type = other DNA
aagcttaaagagccagcagccagatcactactgggtaaatcacttgcacaaatggggctggtgaagcatggaaga

SEQ ID NO: 818605 - DNA, 75 bp, synthetic construct
  source 1..75: mol_type = other DNA
atgccggatagccgcaaagccagacgcattgccgacccaggactgcagccggagcgcacatcactggcgtggttt

SEQ ID NO: 818606 - DNA, 75 bp, synthetic construct
  source 1..75: mol_type = other DNA
ctggcgcagtcagcctgcgttgcgtgaatcacatttctgaaccggacaccgaaattccgccgggtttcagggggt

SEQ ID NO: 818607 - DNA, 75 bp, synthetic construct
  source 1..75: mol_type = other DNA
ggcttaccagcggaaaaaagatgtgccaatcagcgtgtgcatgcaaccagcttgggttatttctggtgccgggag

SEQ ID NO: 818608 - DNA, 75 bp, synthetic construct
  source 1..75: mol_type = other DNA
gaagaggtaattgattcaattttgcagacgatgcaggggcgggtacttgatggtgatttaatcactggatgggaa

SEQ ID NO: 818609 - DNA, 75 bp, synthetic construct
  source 1..75: mol_type = other DNA
ttgttcagcgagcgacgacgttttttggaccggaccggaattttgaaaacccctggttgctcccggtaagcggca

SEQ ID NO: 818610 - DNA, 75 bp, synthetic construct
  source 1..75: mol_type = other DNA
ttcacgtagtccgtgacaaatttttgatctccctcgcggtgttatctctcgcaatactgggtgatgctgccaact

SEQ ID NO: 818611 - DNA, 75 bp, synthetic construct
  source 1..75: mol_type = other DNA
ctggatgaagccttcccgcattttgtcgcacatctggagctgatgctgctctcctgtgagctgaatcccaggtac

SEQ ID NO: 818612 - DNA, 75 bp, synthetic construct
  source 1..75: mol_type = other DNA
taaaacgtattgaaaaaaacagtaatttcaattcaaaaagacaacgtccaccgacacacaccaataacgatccag

SEQ ID NO: 818613 - DNA, 75 bp, synthetic construct
  source 1..75: mol_type = other DNA
atgggaagaaagaaaaagaacaacttaaaacgtattgaaaaaaacagtaatttcaattcaacaagacaacgtcca

SEQ ID NO: 818614 - DNA, 75 bp, synthetic construct
  source 1..75: mol_type = other DNA
gcaacaacaccaaccgcagcagcctgaagccgattccgcgatgagcgggaagccgattgggttaacccgggcgat

SEQ ID NO: 818615 - DNA, 75 bp, synthetic construct
  source 1..75: mol_type = other DNA
tcacaatgggctcacttgcgaagccgacacgcttggcagttgcggttacgtatacatcgccatttatcccactca

SEQ ID NO: 818616 - DNA, 75 bp, synthetic construct
  source 1..75: mol_type = other DNA
atatactctccaggcatctgattgctaatactgaatttagttatttggcatttcccgataactacaaccgtctgt

SEQ ID NO: 818617 - DNA, 75 bp, synthetic construct
  source 1..75: mol_type = other DNA
aacaggaacaggaaagagataaaacccttctggtccatggcgaaaaaatcgccacggacccactggtggattctt

SEQ ID NO: 818618 - DNA, 75 bp, synthetic construct
  source 1..75: mol_type = other DNA
gaaaatgatccggcagaaagacatccgggttatggcggtgaatgtgccgacgacatggattaattctggtatgag

SEQ ID NO: 818619 - DNA, 75 bp, synthetic construct
  source 1..75: mol_type = other DNA
ttgtccgggcttatttacgcgcctcaacatctgaacaagacgcttctcgcgcactcgctgcgatcgatagctttg

SEQ ID NO: 818620 - DNA, 75 bp, synthetic construct
  source 1..75: mol_type = other DNA
ggttctaagcttgaacgccctgagttgttccggctcctgaaagattgtcagcaaaacgatatcttgctggtagag

SEQ ID NO: 818621 - DNA, 75 bp, synthetic construct
  source 1..75: mol_type = other DNA
ggaagaactacaagccaggaggcgtaggattttatccagtaccagacaaatgccctgacgatgtttttaatctgt

SEQ ID NO: 818622 - DNA, 75 bp, synthetic construct
  source 1..75: mol_type = other DNA
aaagccttctcaaaccggcggtgtatcgcacgttttcgaggatttatcacaatttcagcattattttcatcataa

SEQ ID NO: 818623 - DNA, 75 bp, synthetic construct
  source 1..75: mol_type = other DNA
gatttttactgctgtcttagctatcggggtgatgtgctacgctgcaatgggagtgttaggcttagttaataatcc

SEQ ID NO: 818624 - DNA, 75 bp, synthetic construct
  source 1..75: mol_type = other DNA
gttcctggacacaggtacagaaggtacttggatgcagccgtggcacaataagctgtgcgctaaaacgtaaatccc

SEQ ID NO: 818625 - DNA, 75 bp, synthetic construct
  source 1..75: mol_type = other DNA
gaggtcacattgatgtcacgacagaagatttggcaagtgcgctcgacgtgacagaagaggtaattgattcaattt

SEQ ID NO: 818626 - DNA, 75 bp, synthetic construct
  source 1..75: mol_type = other DNA
gcgagagagggaaagaaagcgggaacaaaatggcgattgtcacggcgcatcacgaaatgtcacgcacatgtcacg

SEQ ID NO: 818627 - DNA, 75 bp, synthetic construct
  source 1..75: mol_type = other DNA
ggcaatgttgctttccggagtgagtcatccctgggttttagttttaacagcaacaatgggtaatagccttggagg

SEQ ID NO: 818628 - DNA, 75 bp, synthetic construct
  source 1..75: mol_type = other DNA
ggctcccgtcttgaccgcccggaactcttccgtcttctgagagattgccagcaaaatgacattttgcttatcgag

SEQ ID NO: 818629 - DNA, 75 bp, synthetic construct
  source 1..75: mol_type = other DNA
tgagtttgacagccgattgtttgcagccattaacgatatgctgctggatatgctggccgctgttgccagaaggga

SEQ ID NO: 818630 - DNA, 75 bp, synthetic construct
  source 1..75: mol_type = other DNA
caaatagccccggctctcgcacacattgggcaagactcaacaaccttgcaccactcagaccagaaaactggctga

SEQ ID NO: 818631 - DNA, 75 bp, synthetic construct
  source 1..75: mol_type = other DNA
acgctggcggcgttaaatccgaatcggttatgggtgcggaagttgttgaaaggtaaagcggttaaggcggggtaa

SEQ ID NO: 818632 - DNA, 75 bp, synthetic construct
  source 1..75: mol_type = other DNA
ccctgctccacgccgtggtttaaccgcacgggcagcagcaaacgggaagcggcgattatcggcggtggtattgcc

SEQ ID NO: 818633 - DNA, 75 bp, synthetic construct
  source 1..75: mol_type = other DNA
ccaacctcgaatttaatgctgagggcacacctgtttcccgagattttgacgatgtctatttttccaacgataacg

SEQ ID NO: 818634 - DNA, 75 bp, synthetic construct
  source 1..75: mol_type = other DNA
atggtaggcaacgtgcctgattatgacgctacactcgtgaaatatgcgtcgctggcggagaagaaagatgaagcg

SEQ ID NO: 818635 - DNA, 75 bp, synthetic construct
  source 1..75: mol_type = other DNA
gttgttgaattttgcaggagatcagcaagcaacacacagcgtagtggtactcgcgaacgggcatcaaatcagccg

SEQ ID NO: 818636 - DNA, 75 bp, synthetic construct
  source 1..75: mol_type = other DNA
gtaagcgcgccaatttatgacgatctttttatgttagctgctttaggttctcgcggtttgtgctctgccccgttg

SEQ ID NO: 818637 - DNA, 75 bp, synthetic construct
  source 1..75: mol_type = other DNA
tggtgccagttatcatcgcggcagcgaagagacggcgtacagtgatgaagatcagcagcagaatcgccagcggtt

SEQ ID NO: 818638 - DNA, 75 bp, synthetic construct
  source 1..75: mol_type = other DNA
tggcgaacgggcatcaaatcagcggtttcagccaaacgtcgtctctgccagtgtattcggttgccggacaggtca

SEQ ID NO: 818639 - DNA, 75 bp, synthetic construct
  source 1..75: mol_type = other DNA
gagcggaactgagcgaaagcgagaagagaatcagcgccgccatcctcgaccacgacaggaagctgtccgctgcca

SEQ ID NO: 818640 - DNA, 75 bp, synthetic construct
  source 1..75: mol_type = other DNA
caagcgacgcatagtgtggtggtactggcgaacgggcatcaaatcagccgtttcagccaaacgtcatctctgcca

SEQ ID NO: 818641 - DNA, 75 bp, synthetic construct
  source 1..75: mol_type = other DNA
tatgacggttatctcacgccacaaaatccggcgaatcagcatcattgtattggtgccagttatcatcgcggcagc

SEQ ID NO: 818642 - DNA, 75 bp, synthetic construct
  source 1..75: mol_type = other DNA
ttgtgccactcgcgatcatctgccaatggtaggtaatgttcccgattatgaggcaacactcgtggaatatgcgtc

SEQ ID NO: 818643 - DNA, 75 bp, synthetic construct
  source 1..75: mol_type = other DNA
gctggcggagcagaaagatgaggcggtaagcgcgccggtttatgacgatctctttatgcttgctgctttgggttc

SEQ ID NO: 818644 - DNA, 75 bp, synthetic construct
  source 1..75: mol_type = other DNA
tctcatcactgcataacgacagtaagcgtcacggcacccagggcgaaaaactggatctggcattgctggtggatg

SEQ ID NO: 818645 - DNA, 75 bp, synthetic construct
  source 1..75: mol_type = other DNA
gatattaataaccttaaccagcgtgaagttgaaaatctgccgctgaacggcattggtctggtggatctcactttt

SEQ ID NO: 818646 - DNA, 75 bp, synthetic construct
  source 1..75: mol_type = other DNA
cgtcacgtttgatggcgatcgcgaagacgcctttgccggagaagcgatcaccctggtgctgacggatgagatcga

SEQ ID NO: 818647 - DNA, 75 bp, synthetic construct
  source 1..75: mol_type = other DNA
aagaaatctgaaaatggctggttacaactcaattcagccaaaacggataacgatgggcgaattaaagcgctgtgg

SEQ ID NO: 818648 - DNA, 75 bp, synthetic construct
  source 1..75: mol_type = other DNA
caggtaacactcaagacacgtcatgccgacggcagagctgcgatcatcgtagggatggaaagatacagagagcta

SEQ ID NO: 818649 - DNA, 75 bp, synthetic construct
  source 1..75: mol_type = other DNA
atcagaaaattaatttattctatttcagtggctattcagattgttctttattttctttcagtatcgcgtacagga

SEQ ID NO: 818650 - DNA, 75 bp, synthetic construct
  source 1..75: mol_type = other DNA
acagggaactgacctcaaacgaatctttaatcaggaacgctatcaacgaccatacagcagccctgaaagaacttc

SEQ ID NO: 818651 - DNA, 75 bp, synthetic construct
  source 1..75: mol_type = other DNA
agaggcgatgatgcagcacaggaaggacgtgttaaagctggcagggaatacgggcatgaggttgctggggatagt

SEQ ID NO: 818652 - DNA, 75 bp, synthetic construct
  source 1..75: mol_type = other DNA
atgattgttaaatttcatgccagggggaaaggtggtggcagtggtccggttgattaccttctgggaagggagcgt

SEQ ID NO: 818653 - DNA, 75 bp, synthetic construct
  source 1..75: mol_type = other DNA
cgctttgtgccgctctccgcgctggaaggagataatgttgcttcgcaaagtgaaagtatgctgtggtacagcggc

SEQ ID NO: 818654 - DNA, 75 bp, synthetic construct
  source 1..75: mol_type = other DNA
attggcatcctcaaagaatcttgggggaagtcagagccagagaaggaagtatgagggcgctggcacgtaaagctg

SEQ ID NO: 818655 - DNA, 75 bp, synthetic construct
  source 1..75: mol_type = other DNA
gacaattacacgcatcttcgtcagcaggaagataccctggcgaaaatgaccgcccggacgtggggagtgcgctat

SEQ ID NO: 818656 - DNA, 75 bp, synthetic construct
  source 1..75: mol_type = other DNA
ccgactatatggaagcccgaagcatcattaatctgtctcctaaaggggccgctgcactccttcgtctttgccttc

SEQ ID NO: 818657 - DNA, 75 bp, synthetic construct
  source 1..75: mol_type = other DNA
agtaaaattgacctctgaacgccgcgaagaggcaccacgcctgtttacgcacattaatctgcatttggtaatggt

SEQ ID NO: 818658 - DNA, 75 bp, synthetic construct
  source 1..75: mol_type = other DNA
ggcggcgggtggttgcagtgccatcgatgtggtttcgatcctgcaaaaagggcgtcaggatgtggtcgattgtga

SEQ ID NO: 818659 - DNA, 75 bp, synthetic construct
  source 1..75: mol_type = other DNA
cgcctctggtcaccagattttaatggacggcaactcaggcgataaagcaccaagtccgatggaaatggtgttgat

SEQ ID NO: 818660 - DNA, 75 bp, synthetic construct
  source 1..75: mol_type = other DNA
atcaacagtgaagttgatcgcctctgcaaacgttgcgacccaataagcgaaatgcttcgctcatataaaccagat

SEQ ID NO: 818661 - DNA, 75 bp, synthetic construct
  source 1..75: mol_type = other DNA
atgcgcgtaaagctatctccgtcaccgagcgtcagcgctacattctgcgcattcgcaccctgaccaaagcagtgg

SEQ ID NO: 818662 - DNA, 75 bp, synthetic construct
  source 1..75: mol_type = other DNA
gctagccggtactgcgatcaactggtggtaatggcaaacggacatgttatggcgcaaggcacaccagaagaggtg

SEQ ID NO: 818663 - DNA, 75 bp, synthetic construct
  source 1..75: mol_type = other DNA
agctctcatgacgacgggacggaaataacggtcgtcatggataacagtcagtatccgttaccgtcattcctcggc

SEQ ID NO: 818664 - DNA, 75 bp, synthetic construct
  source 1..75: mol_type = other DNA
aacaataacaaagttggctcctttagtccgggcttggaaaatacgcaaaaagagctgtctgacctcagtgagtgc

SEQ ID NO: 818665 - DNA, 75 bp, synthetic construct
  source 1..75: mol_type = other DNA
gttgtatcaattgccgggtagtgaactgctgttagtgctgagcggccggaaacggaagggcgactccagcatatg

SEQ ID NO: 818666 - DNA, 75 bp, synthetic construct
  source 1..75: mol_type = other DNA
catcaggttgaactgatgcgcctgatggttgaactcaaaaggcaggggaaaaccgtagtgacggtactccacgat

SEQ ID NO: 818667 - DNA, 75 bp, synthetic construct
  source 1..75: mol_type = other DNA
cggcagaagcacagcgccagtcactgattaatgcagcaatggcttccattagtctgattcagctgaaattacagg

SEQ ID NO: 818668 - DNA, 75 bp, synthetic construct
  source 1..75: mol_type = other DNA
gtcaacgataaaaaagtcggcaccttcagtccggggctgaagaatacgcaaaaagagctgtctgacctcagtgag

SEQ ID NO: 818669 - DNA, 75 bp, synthetic construct
  source 1..75: mol_type = other DNA
ggatggaagtcgcggaagtggaagcgttgtaccgtaaaaatcagatcccgtggattaacagtaccaattattcgg

SEQ ID NO: 818670 - DNA, 75 bp, synthetic construct
  source 1..75: mol_type = other DNA
ccggcgataccatttcgctgattggcaccacctctttacgtattgattacaatgagatcgacgacaacagagtga

SEQ ID NO: 818671 - DNA, 75 bp, synthetic construct
  source 1..75: mol_type = other DNA
gcatggtctctttaagctgctgaacattattgtcactgagcagattactcgaccgaaagaagtcgaagccatgtt

SEQ ID NO: 818672 - DNA, 75 bp, synthetic construct
  source 1..75: mol_type = other DNA
attaagtcccttgtagctaaagggctgtctccactggtccagcgagctgctgacatctgtcgtattgttggcaat

SEQ ID NO: 818673 - DNA, 75 bp, synthetic construct
  source 1..75: mol_type = other DNA
cgacataaaagttactggtttgagggaaggttaatcattcctgctgcaagtggagtggagttgcctaaccctgat

SEQ ID NO: 818674 - DNA, 75 bp, synthetic construct
  source 1..75: mol_type = other DNA
ccgggatctgggggcaacacattgccgaatatgccgatctgcgcattcgcatgttcccggcgaaaggatcgctgc

SEQ ID NO: 818675 - DNA, 75 bp, synthetic construct
  source 1..75: mol_type = other DNA
attgcgcgaaagcgagtttacccgttgggtttatcagggactttgtggtctggagaaggagcagaaagatgcgct

SEQ ID NO: 818676 - DNA, 75 bp, synthetic construct
  source 1..75: mol_type = other DNA
atgaaactggatccaacgccgattgctcatcgtacccatggccttaaccctaataatctcaataaatatgatgcg

SEQ ID NO: 818677 - DNA, 75 bp, synthetic construct
  source 1..75: mol_type = other DNA
tggatcaacagtaccaattattcggtagaagagattgccaccaaaatccttgatatcatgggacttagtcggaga

SEQ ID NO: 818678 - DNA, 75 bp, synthetic construct
  source 1..75: mol_type = other DNA
tgtcgaaaatgagagccgtgcacgggcggtgaaagatcagatcgacgcgatttaccagcagacgagcgtgcgccc

SEQ ID NO: 818679 - DNA, 75 bp, synthetic construct
  source 1..75: mol_type = other DNA
gtcgatgaccgtattacgagaccaaaagagatcgaggcgatgttccagagtatgcctgatggaccacggcagggc

SEQ ID NO: 818680 - DNA, 75 bp, synthetic construct
  source 1..75: mol_type = other DNA
tacctgtacgcattcagcaggcagcagacatctgtcgtatcgttggcaatcaggcggtccatccaggagagatta

SEQ ID NO: 818681 - DNA, 75 bp, synthetic construct
  source 1..75: mol_type = other DNA
attcgcgccatcatcttgcaaagtgaaggcttttgccaggatatcgttcaggcgctggttgccccgctacaacaa

SEQ ID NO: 818682 - DNA, 75 bp, synthetic construct
  source 1..75: mol_type = other DNA
atcaatattttgatgagcgcaaagcggcactagcacagtggactgatttgctggtgaatttagaaaacatgatat

SEQ ID NO: 818683 - DNA, 75 bp, synthetic construct
  source 1..75: mol_type = other DNA
tctcgtgccatgcttattggttcatattctgaattatcgttatcaaaagcgagggaacgggcaaaagaactttcc

SEQ ID NO: 818684 - DNA, 75 bp, synthetic construct
  source 1..75: mol_type = other DNA
ttagccgcgcttggtgttgatccggtagtcgctgaaagatgcctcaatcaccgcatcaagggagtcgagggcata

SEQ ID NO: 818685 - DNA, 75 bp, synthetic construct
  source 1..75: mol_type = other DNA
tcatgtaatagcgcatgggtgcttccggccaggaagatgcaaaacagaatgatcccacatattcaggaaagcact

SEQ ID NO: 818686 - DNA, 75 bp, synthetic construct
  source 1..75: mol_type = other DNA
agcgtaaagcggcgctggcgcagtggtgtgatttgctggtggcactggagcgcggcgaagaatacaacgtgacgc

SEQ ID NO: 818687 - DNA, 75 bp, synthetic construct
  source 1..75: mol_type = other DNA
gccgcatagacaaagatatcaaccctcagattggcagcctgaaagtcgaagacgttaaaccgcgccatattgacg

SEQ ID NO: 818688 - DNA, 75 bp, synthetic construct
  source 1..75: mol_type = other DNA
gataacggaacgcggttattccgtcgccgaagtatctgagcgtctgggtgtttctgcacacagcctctacaagtg

SEQ ID NO: 818689 - DNA, 75 bp, synthetic construct
  source 1..75: mol_type = other DNA
aatttaaggaagaagccgtccgtcagatcacggaacgcggctattccgttgccaaagtatttgaccgtctgggcg

SEQ ID NO: 818690 - DNA, 75 bp, synthetic construct
  source 1..75: mol_type = other DNA
cagcttaaacgtactgaggaagaacgggatattctgaaaaaggcagcgcggtactttgcaagggagcccgactga

SEQ ID NO: 818691 - DNA, 75 bp, synthetic construct
  source 1..75: mol_type = other DNA
cgatggacgcgccgcatattcgactacgggataaaacgtcatgtgctggagattaacccgtgctcggcgtttgaa

SEQ ID NO: 818692 - DNA, 75 bp, synthetic construct
  source 1..75: mol_type = other DNA
cgttttgacaaactcgcctttgaaccgggcgtgatcccggagctgctgaagctgcaaaaagcgggctacaagctg

SEQ ID NO: 818693 - DNA, 75 bp, synthetic construct
  source 1..75: mol_type = other DNA
tccgcgcatggataaaggcgggagacagatttgatggcaaggcagacggcaacggcctttatatttgctacccaa

SEQ ID NO: 818694 - DNA, 75 bp, synthetic construct
  source 1..75: mol_type = other DNA
tacggcctgccgcagtttggtatcgaattagatcccattccgtcagcaatgattggtctgtcgctgaacactgcc

SEQ ID NO: 818695 - DNA, 75 bp, synthetic construct
  source 1..75: mol_type = other DNA
agcgtaaagcagcactggcacagtgggctgatctgctagtggcactggaaagcggaaaagactacaacgtaacgc

SEQ ID NO: 818696 - DNA, 75 bp, synthetic construct
  source 1..75: mol_type = other DNA
caccccgatatactccgccgccgtatcgacaaagatataaacccctgcattggcagcatgaaggtagaggacgtg

SEQ ID NO: 818697 - DNA, 75 bp, synthetic construct
  source 1..75: mol_type = other DNA
tgcgttaacacagtgggcgggcttgctggtggcactggaacgcggcgaagaatacaacgttacaccgctgagaaa

SEQ ID NO: 818698 - DNA, 75 bp, synthetic construct
  source 1..75: mol_type = other DNA
aacttgcagctgaatactttgaacgccagattctcaatcggtggaagcatccagacatcctgcgtcgtcgcattg

SEQ ID NO: 818699 - DNA, 75 bp, synthetic construct
  source 1..75: mol_type = other DNA
aatcccgtgaacgttggctgaccagagaagaactgattaagttctttcaagccatgcgtgttactcaaggattct

SEQ ID NO: 818700 - DNA, 75 bp, synthetic construct
  source 1..75: mol_type = other DNA
cgctggacacgccgcatatttgactacggcattaagcggcacgcactggagattaacccgtgttcagcctttgag

SEQ ID NO: 818701 - DNA, 75 bp, synthetic construct
  source 1..75: mol_type = other DNA
aacagctttatcagcctggtaaaagatacgtcgctggccgcgacaatccaggtgccggagctgttccgtcaggcg

SEQ ID NO: 818702 - DNA, 75 bp, synthetic construct
  source 1..75: mol_type = other DNA
gattggtctgtcgctcaacactgccgcctatactgccgaaacgcttcgcgccgccatttcttctattgataaagg

SEQ ID NO: 818703 - DNA, 75 bp, synthetic construct
  source 1..75: mol_type = other DNA
gtcgcgcgattttgccacaggcggcgcgggtggcgttgccgccgctgtcgaacagctttatcagtctggtaaaag

SEQ ID NO: 818704 - DNA, 75 bp, synthetic construct
  source 1..75: mol_type = other DNA
ctggcgttatcgctaccggatggccgggaaacaacgcacgatgcacatcggctcatattccgacctgtcactaag

SEQ ID NO: 818705 - DNA, 75 bp, synthetic construct
  source 1..75: mol_type = other DNA
aacccgtgatgaactcattcatttttttcaggccatgcgcacagctaaaggattcagccgtgagaatgaactcac

SEQ ID NO: 818706 - DNA, 75 bp, synthetic construct
  source 1..75: mol_type = other DNA
gccgcgagaatgaactcacatttaagctattgctggcgctttgtgtcaggaagatggagttgtgcgccgccagat

SEQ ID NO: 818707 - DNA, 75 bp, synthetic construct
  source 1..75: mol_type = other DNA
tcatgcttattcttctgatcgttggtgcgttaattctctggattgggtgctccggatttattgatcctgcaatag

SEQ ID NO: 818708 - DNA, 75 bp, synthetic construct
  source 1..75: mol_type = other DNA
atgacgcagacactgaatccggtcatcactgtcaccgtgtccggtcctgtgggcagcggtaaaagttacgtactg

SEQ ID NO: 818709 - DNA, 75 bp, synthetic construct
  source 1..75: mol_type = other DNA
aatcaacagcccccacaaaacacgaggtagtcagttttttacgctcgcgtggcgcatcgaaaaatctggctgaaa

SEQ ID NO: 818710 - DNA, 75 bp, synthetic construct
  source 1..75: mol_type = other DNA
tcgatgagtatcggcgtcaccattgccgggcttctgctggggctttttggttcacagcatgtcagcgtcgacagc

SEQ ID NO: 818711 - DNA, 75 bp, synthetic construct
  source 1..75: mol_type = other DNA
acgccggatacgccagaaatcatcgccaccattcacggtgaaggttatcgcttctgcggtgatctggaagattaa

SEQ ID NO: 818712 - DNA, 75 bp, synthetic construct
  source 1..75: mol_type = other DNA
gtgaaacaggaattcggaaacagcgtcattgtcgacgccgcagacgtggacggtgagcgccgtatgagtggggat

SEQ ID NO: 818713 - DNA, 75 bp, synthetic construct
  source 1..75: mol_type = other DNA
ggaattacttcccctcgcactggctatcgggattatgcagacagcggataaacctcacttacgttcattaaacac

SEQ ID NO: 818714 - DNA, 75 bp, synthetic construct
  source 1..75: mol_type = other DNA
taagcatcaggaagtgaccagcgcaagcgcagttccgccatcgctaaccgggcagcggatcagtgataacgaggt

SEQ ID NO: 818715 - DNA, 75 bp, synthetic construct
  source 1..75: mol_type = other DNA
tcaaaaagctaaagcaggaaatacccaaccaaaatcgctggccgggcaagtaattgatgaagatacggtgatact

SEQ ID NO: 818716 - DNA, 75 bp, synthetic construct
  source 1..75: mol_type = other DNA
tctaccgggtgaactggcaggatatcaggccggaacatattctgatgatcctgtgttgctacgcgaccgtatacc

SEQ ID NO: 818717 - DNA, 75 bp, synthetic construct
  source 1..75: mol_type = other DNA
cggcttctttatgcagtcgctggacaccaccatcgtaaacaccgcccttccctcaatggcgcaaagcctcgggga

SEQ ID NO: 818718 - DNA, 75 bp, synthetic construct
  source 1..75: mol_type = other DNA
ggtgctggttgcatagttacaagagatgttccggctaatagcgtattaattcaaaaacgtcattcgacttacata

SEQ ID NO: 818719 - DNA, 75 bp, synthetic construct
  source 1..75: mol_type = other DNA
aaatattccataggcattgaggttttcaatgctcaagaaataccgataccaattgacacaaaactgtactccaac

SEQ ID NO: 818720 - DNA, 75 bp, synthetic construct
  source 1..75: mol_type = other DNA
ctattttttaaagaaaacaactctgtttttatgaatatcgatggttcatcatttgaagttataaaaaacaacaaa

SEQ ID NO: 818721 - DNA, 75 bp, synthetic construct
  source 1..75: mol_type = other DNA
attcataacgtgcgtagcgaaaattccagttctgctctgggttggtactgggcggtatattcagtagggatcggt

SEQ ID NO: 818722 - DNA, 75 bp, synthetic construct
  source 1..75: mol_type = other DNA
ttgattctgacgcccaaagaatatgctctgctgtcgcgcctgatgcttaaagcaggcagcccggtgcatcgggaa

SEQ ID NO: 818723 - DNA, 75 bp, synthetic construct
  source 1..75: mol_type = other DNA
ccgccataataatcaaggcgagagcgagctgaatgtaggcaacctgacgctaaatatgggacgccgtcaggtatg

SEQ ID NO: 818724 - DNA, 75 bp, synthetic construct
  source 1..75: mol_type = other DNA
tgctcatttggttctgcaaaactggtgcgagacgcctgcgcaagcggtgcaagaaaatgagcgccgcctgttttt

SEQ ID NO: 818725 - DNA, 75 bp, synthetic construct
  source 1..75: mol_type = other DNA
gtaaataaacataaaaaactgttgcagccagcctcgccattttatctcagtgatgtagtgacttctgtcccacaa

SEQ ID NO: 818726 - DNA, 75 bp, synthetic construct
  source 1..75: mol_type = other DNA
aatattttgctttccagtattgttcgcattatcaacaccttatctttattcggattcgccgtaattatgccgatg

SEQ ID NO: 818727 - DNA, 75 bp, synthetic construct
  source 1..75: mol_type = other DNA
gcataactactggatggcaatggtgcccgccgttgcgctggggatctttgttgcagcgttcgtgccgatggcggc

SEQ ID NO: 818728 - DNA, 75 bp, synthetic construct
  source 1..75: mol_type = other DNA
ctaaaccgctgcggcgggtgtatatcccgaagtcgaacggcaagttgcgtccgctcgggataccgaccatgagag

SEQ ID NO: 818729 - DNA, 75 bp, synthetic construct
  source 1..75: mol_type = other DNA
aattaatgggtataaagccgcagcatctttttatagtggtttaaatcttccatgcttacttattttctttggaac

SEQ ID NO: 818730 - DNA, 75 bp, synthetic construct
  source 1..75: mol_type = other DNA
gccttttgcgctggaagagttacacgcccgtatccgcgccctgctacgacgccataataatcagggcgaaagtga

SEQ ID NO: 818731 - DNA, 75 bp, synthetic construct
  source 1..75: mol_type = other DNA
atgatttaataaatggattaagtgaagactttaaaaaacgtacggttatacttatcgatcagataccagagaagc

SEQ ID NO: 818732 - DNA, 75 bp, synthetic construct
  source 1..75: mol_type = other DNA
tcagaaaaaagagaaggactatacgtggtatatatataaagataaagaacttaataagcgtaaattagctcttga

SEQ ID NO: 818733 - DNA, 75 bp, synthetic construct
  source 1..75: mol_type = other DNA
cctcaccggcgaaacccaggcacttcatgcgcctgtcgtggttaatgccgccgggatctgggggcaacatattgc

SEQ ID NO: 818734 - DNA, 75 bp, synthetic construct
  source 1..75: mol_type = other DNA
gaactggctgcaaggttacgcctggtgaaaccgaaacggcgtagagactacaaacagcgaattacagaccatcaa

SEQ ID NO: 818735 - DNA, 75 bp, synthetic construct
  source 1..75: mol_type = other DNA
acagggtgacaaaaaagcaagtacgccgatactggatgacccgcgccttgatgccatcctggctgccgctgatgc

SEQ ID NO: 818736 - DNA, 75 bp, synthetic construct
  source 1..75: mol_type = other DNA
acgcgcaaattttcgcgcctcgcgtgccgacctgcatgattttcattcccagcatcaacgggatcagccataacc

SEQ ID NO: 818737 - DNA, 75 bp, synthetic construct
  source 1..75: mol_type = other DNA
actgcgcgaaagcgaatttacccgctgggtttatcagggattgtgtggtctggagaaggagcagaaagatgcgct

SEQ ID NO: 818738 - DNA, 75 bp, synthetic construct
  source 1..75: mol_type = other DNA
gtgagtgcgaagcggtaactgcgggtgaagtgcagtacgcagtagaaaatttaaacgttaacagcctgctggatt

SEQ ID NO: 818739 - DNA, 75 bp, synthetic construct
  source 1..75: mol_type = other DNA
tgctggctggtcaggcggtaaggcaaaagggggacaaaaaagcaggtgcgccggtactggataacccgcgccttg

SEQ ID NO: 818740 - DNA, 75 bp, synthetic construct
  source 1..75: mol_type = other DNA
gtgaagtggaaaatggttcgtaaggccgttgacgttcaggaggcggctgccgaccagggcgcttgcgccccttgg

SEQ ID NO: 818741 - DNA, 75 bp, synthetic construct
  source 1..75: mol_type = other DNA
caaacagcgaattacagaccatcaacgacagcagctcgtctatgaactgaaatccagaggatttgatggcagcga

SEQ ID NO: 818742 - DNA, 75 bp, synthetic construct
  source 1..75: mol_type = other DNA
ggtggcagtattccgtcaggagcaggcctgcgtatcttctatcggaaccagcgtctgcaggaggatgataagtgg

SEQ ID NO: 818743 - DNA, 75 bp, synthetic construct
  source 1..75: mol_type = other DNA
cgacagcagctcgtgtatgaactgaagtccaggggatttgatggcagcgagaaagaggtcgatttactgcttcgc

SEQ ID NO: 818744 - DNA, 75 bp, synthetic construct
  source 1..75: mol_type = other DNA
cctgtgttaaaggcctggagcttatcgcggaaatgcgtggtgactgcgccgttttttacactatcacctgtccgt

SEQ ID NO: 818745 - DNA, 75 bp, synthetic construct
  source 1..75: mol_type = other DNA
cgcgaaacagaacggcatcgtcgcgcacattatcagcgtgatttcgaccaccttcaccccagtgatcccggctat

SEQ ID NO: 818746 - DNA, 75 bp, synthetic construct
  source 1..75: mol_type = other DNA
cgttcaggcgctggttgccccgctacaacaagagatgaaactggatccaacgccgattgctcatcgtacccatgg

SEQ ID NO: 818747 - DNA, 75 bp, synthetic construct
  source 1..75: mol_type = other DNA
agcagctggcagaagcgcaggcgatgcttcagtcgctggatctgcccccgaaaaaacgccgtcgcctgttatggc

SEQ ID NO: 818748 - DNA, 75 bp, synthetic construct
  source 1..75: mol_type = other DNA
catacggcaagacggggatttatccggctgggaaaacgtctgggctttgagcgaatgccggatgatgaggatggc

SEQ ID NO: 818749 - DNA, 75 bp, synthetic construct
  source 1..75: mol_type = other DNA
ttctggcggacgtcagcgcccagccttcccacatcagcaagccgctgatgcaacgtatcgaatatttcagcagcc

SEQ ID NO: 818750 - DNA, 75 bp, synthetic construct
  source 1..75: mol_type = other DNA
gcagcaaaatatcgctctggatgaaatcatcgcctttggcgataacgataatgatgcggggatgttgcagatggt

SEQ ID NO: 818751 - DNA, 75 bp, synthetic construct
  source 1..75: mol_type = other DNA
aaaaataggtccgaggtgtgtcgcttttgttgaaagtgagattgatgaatggattgaagctactattcggaactc

SEQ ID NO: 818752 - DNA, 75 bp, synthetic construct
  source 1..75: mol_type = other DNA
taaaaccttcctgcaattgattaagcgcatttcgtttattccgttcgccatttatcgctttattgtggcggctgc

SEQ ID NO: 818753 - DNA, 75 bp, synthetic construct
  source 1..75: mol_type = other DNA
ctcagcccgctgcgcggtcaggtgatggcgctgaacgaagtaaatgatgatgtcttttccggtggtctgctggga

SEQ ID NO: 818754 - DNA, 75 bp, synthetic construct
  source 1..75: mol_type = other DNA
ttcatacggcaaggcggggatttatccggctgggaaaacgtctgggctttgagcgaatgccggatgatgaggatg

SEQ ID NO: 818755 - DNA, 75 bp, synthetic construct
  source 1..75: mol_type = other DNA
tatggggcggcgcgaccgcggcaaaccaggttgaaggcgcttatctggaagacgggaagggattaaccacttctg

SEQ ID NO: 818756 - DNA, 75 bp, synthetic construct
  source 1..75: mol_type = other DNA
tgctggctgctcaggcggcaaggcaacagggtgacaaaaaagcaggtgcgccggtactggataacccgcgccttg

SEQ ID NO: 818757 - DNA, 75 bp, synthetic construct
  source 1..75: mol_type = other DNA
ctggaggggctgctggttctgcccgaaatgaatcaggatcaggtcaaacgtctttccacgctggttgcggcacac

SEQ ID NO: 818758 - DNA, 75 bp, synthetic construct
  source 1..75: mol_type = other DNA
tgggacgcccgaaagcgtattcccgctacctgcgcgaaactatcagaccgtgtattgaacggctggagtgcgtgc

SEQ ID NO: 818759 - DNA, 75 bp, synthetic construct
  source 1..75: mol_type = other DNA
ccgggctgcgctggtatggcgttcgcgttgcagagccgcaccatgacggcaccgtgcactggcatcttctgtgct

SEQ ID NO: 818760 - DNA, 75 bp, synthetic construct
  source 1..75: mol_type = other DNA
cagcgttttaatccagacatggtcattctggcggacgtcaacgcccagccttcccatatcagcaagccgctgatg

SEQ ID NO: 818761 - DNA, 75 bp, synthetic construct
  source 1..75: mol_type = other DNA
gatgctccaggcgcatacaaagctggttatgcaatctgccgttctgcagattttaagtcatgggaatatgtgcca

SEQ ID NO: 818762 - DNA, 75 bp, synthetic construct
  source 1..75: mol_type = other DNA
agtctgagctgataaacccgcgcaaaggaacgccgactagctacatcgtgaaatacatcagtaagaacattgacg

SEQ ID NO: 818763 - DNA, 75 bp, synthetic construct
  source 1..75: mol_type = other DNA
acttcaattcgcaaatcgctcaggaatacaaggctatagaaaaaatcgctcagcaaaaactggtcgatatggttc

SEQ ID NO: 818764 - DNA, 75 bp, synthetic construct
  source 1..75: mol_type = other DNA
gccggaaataatgaattcttgctggcaaaaacgcgactggaagcgacgcttgaagcgcgccgcagccaggagatg

SEQ ID NO: 818765 - DNA, 75 bp, synthetic construct
  source 1..75: mol_type = other DNA
cggaagagctgcgggatatctttgcgccgttaattgacgagcatgcatatagcgatgaagaaaaatcgctggtga

SEQ ID NO: 818766 - DNA, 75 bp, synthetic construct
  source 1..75: mol_type = other DNA
cgcaaccctcaacaacggcagacctaatccgaagtggaccagtgccacagtccggcagagcagtgactatctggt

SEQ ID NO: 818767 - DNA, 75 bp, synthetic construct
  source 1..75: mol_type = other DNA
tggagcgaattaaatacttccatagcctgggcagggctaaagcttattcccgctatctgcgcgaaacaatcagac

SEQ ID NO: 818768 - DNA, 75 bp, synthetic construct
  source 1..75: mol_type = other DNA
tgaaatggagcaggatcggctgattagccatgccaaaatggcccgcgaacagcagcgcgttaatcccgatttggt

SEQ ID NO: 818769 - DNA, 75 bp, synthetic construct
  source 1..75: mol_type = other DNA
agtcaagaggatttgatggcagcgagaaagaggtcgatttgctccttcgcggtggcagtattccgtcaggagcag

SEQ ID NO: 818770 - DNA, 75 bp, synthetic construct
  source 1..75: mol_type = other DNA
gtggtgatttgtatgccaccgatgacattaagccagaagaaatccgcaaaacatgggaaaaggtggcagcggaaa

SEQ ID NO: 818771 - DNA, 75 bp, synthetic construct
  source 1..75: mol_type = other DNA
gcatgagcagcagcgttttaattcagacatggtcattctggcggacgtcaacgcccagccttcccatatcagcaa

SEQ ID NO: 818772 - DNA, 75 bp, synthetic construct
  source 1..75: mol_type = other DNA
ccagaggatttgatggcagcgagaaagaggtcgatttactccttcgcggcggcagtattccgtcaggagcaggcc

SEQ ID NO: 818773 - DNA, 75 bp, synthetic construct
  source 1..75: mol_type = other DNA
tttatggcatctggtcacccattgtacagggcaagatttgcactcatgcagtgaagtggaaaatggttcgtaagg

SEQ ID NO: 818774 - DNA, 75 bp, synthetic construct
  source 1..75: mol_type = other DNA
ctgaaaatttgccccaacaagggaaagacaaatcagctgatggggataccagaacggatatcacccgtatgaatg

SEQ ID NO: 818775 - DNA, 75 bp, synthetic construct
  source 1..75: mol_type = other DNA
cacgtttccattccacgctaaataacggcaggcccaacccgacctggacaaatgcgacggtaagacaaagcagtg

SEQ ID NO: 818776 - DNA, 75 bp, synthetic construct
  source 1..75: mol_type = other DNA
cagtatgaacaaaaaagagcgccgggaactggctgcaaggttacgtctggtgaaaccgaaacggcgtagagacta

SEQ ID NO: 818777 - DNA, 75 bp, synthetic construct
  source 1..75: mol_type = other DNA
cgacagcagctcgtctatgaactgaaatccagaggatttgatggcagcgagaaagaggtcgatttactccttcgc

SEQ ID NO: 818778 - DNA, 75 bp, synthetic construct
  source 1..75: mol_type = other DNA
tacagaggagaggtagggcaaaccgcccctaatgttctccaaagagatttcaaggctacgcggccaaacgagaag

SEQ ID NO: 818779 - DNA, 75 bp, synthetic construct
  source 1..75: mol_type = other DNA
gcgacacgctggatatggaagacgtggtaaacgccagcagcaaccctgcacatcgccgcaatgagatgatggcct

SEQ ID NO: 818780 - DNA, 75 bp, synthetic construct
  source 1..75: mol_type = other DNA
tctcatgaactggtgaacgaagacggcgacacgctggatatggaagacgtggtaaacgccagcagcaaccctgca

SEQ ID NO: 818781 - DNA, 75 bp, synthetic construct
  source 1..75: mol_type = other DNA
tccccttgctgaaaatttgaaccaacaggagaaagataaatcagctgatggggaccccagaacggacattaccag

SEQ ID NO: 818782 - DNA, 75 bp, synthetic construct
  source 1..75: mol_type = other DNA
tggagactccttaagaagacaaacaaacctcattgatgctttctacgctaaacacaaagatgattattaccttct

SEQ ID NO: 818783 - DNA, 75 bp, synthetic construct
  source 1..75: mol_type = other DNA
ttgaatcaaatataaaaaaactaattttttcgcaaaatatacgaggtatttgtgctttttgttgtgcagatactg

SEQ ID NO: 818784 - DNA, 75 bp, synthetic construct
  source 1..75: mol_type = other DNA
atcaaaaacgaacttcggcgtcgcattcggcacaacaagtattgggtcaacgaagcaaacaagtacggcattgaa

SEQ ID NO: 818785 - DNA, 75 bp, synthetic construct
  source 1..75: mol_type = other DNA
tgggcgatggcggcggagcattgccgacgccggacgcaaagcagacggcattggtaaatgagaaacgccgggctg

SEQ ID NO: 818786 - DNA, 75 bp, synthetic construct
  source 1..75: mol_type = other DNA
ggaagggagtctctatactgactctgggagatggtgaactctacgacaagtcagccttaacagaccctgtgaagt

SEQ ID NO: 818787 - DNA, 75 bp, synthetic construct
  source 1..75: mol_type = other DNA
ggggctattccagaaggttccctgattgttgtagagaactttgaccgcttcagtagggctgatattgatacagct

SEQ ID NO: 818788 - DNA, 75 bp, synthetic construct
  source 1..75: mol_type = other DNA
ggaaatacaaaagcagtttgatacttctgtttttgcagaagggctcacttacgccctggaccagataaggtcaga

SEQ ID NO: 818789 - DNA, 75 bp, synthetic construct
  source 1..75: mol_type = other DNA
ggaaatacaaaagcagttcgatacttctgtttttgcagaagggatcacttatgccctggaccagataaggtcaga

SEQ ID NO: 818790 - DNA, 75 bp, synthetic construct
  source 1..75: mol_type = other DNA
gattacgccggtggtatgcgtgacggtctgaaattcaaagcctggcagccaggcggcgcggggactgacttcctg

SEQ ID NO: 818791 - DNA, 75 bp, synthetic construct
  source 1..75: mol_type = other DNA
gtgatgatgggccgctatgggcatatgggtatgttgcgtatagccaaaaagagggatcgtcagattgtcaccgat

SEQ ID NO: 818792 - DNA, 75 bp, synthetic construct
  source 1..75: mol_type = other DNA
ttaacggctcggaagaaagcattattactgacgatgaacgcccttttgtggcacatcgaccgtcagcggtgcaga

SEQ ID NO: 818793 - DNA, 75 bp, synthetic construct
  source 1..75: mol_type = other DNA
atgatgcaatctgcgggcattgtcgttaatgatgttactgtcacctggcgtaacgggcacacagcactgcgcgat

SEQ ID NO: 818794 - DNA, 75 bp, synthetic construct
  source 1..75: mol_type = other DNA
caatccggcactgtttgttcagaatctgggattgaaaacgactgttgataaagctgcatcagcgattcagccagg

SEQ ID NO: 818795 - DNA, 75 bp, synthetic construct
  source 1..75: mol_type = other DNA
tgctcaataacaccgaaattaccggggggccgaacggtatcagtcagatcccgaaacccactttcttcggtcttg

SEQ ID NO: 818796 - DNA, 75 bp, synthetic construct
  source 1..75: mol_type = other DNA
attacggcctgggcttctggacctgtctgccgattgccgggttaatggcagcggcggcgggcttcctgctcggct

SEQ ID NO: 818797 - DNA, 75 bp, synthetic construct
  source 1..75: mol_type = other DNA
agggctttgtcagcccggaatccttcacctttgccgaatcagcctttgtactggcgatagtggtgctcggcggta

SEQ ID NO: 818798 - DNA, 75 bp, synthetic construct
  source 1..75: mol_type = other DNA
atccgctcaatttgccgtacgctgctgccgttgatgcaggaaacgaaaagttgtatcaattgccgggtagtgaac

SEQ ID NO: 818799 - DNA, 75 bp, synthetic construct
  source 1..75: mol_type = other DNA
ttggctggcgtggtgttgttcctgttttatgcgggatgttttgcactaatctgtggaattttcatctctcatttt

SEQ ID NO: 818800 - DNA, 75 bp, synthetic construct
  source 1..75: mol_type = other DNA
gcgatgcggatgccattttcacggtcgttgatttgctaagccttttcaccgctgtgctgatttacaacatgcttt

SEQ ID NO: 818801 - DNA, 75 bp, synthetic construct
  source 1..75: mol_type = other DNA
ctggcgatagtggtgctcggcggtatgggctcgcaatttgcagtgattctggcggcaattttgctggtggtatcg

SEQ ID NO: 818802 - DNA, 75 bp, synthetic construct
  source 1..75: mol_type = other DNA
tgtcctggcgggcgtctttatgggcgtacaactggagctggatggcaccaaactggtggtcgacacggcttcaga

SEQ ID NO: 818803 - DNA, 75 bp, synthetic construct
  source 1..75: mol_type = other DNA
ggtgaattttccgacaccatttgcccgtcagtgctggtacgtgatccccgttttccgttcgccacacggtgggag

SEQ ID NO: 818804 - DNA, 75 bp, synthetic construct
  source 1..75: mol_type = other DNA
gctttgtcagcccggaatccttcacctttgccgaatcggcgtttgtgctggcgatagtggtgctcggtggtatgg

SEQ ID NO: 818805 - DNA, 75 bp, synthetic construct
  source 1..75: mol_type = other DNA
gttgcgtgaagatgaaatcgcttgtcgttcgctgggcttaagcccgcgtcgtatcaagctgaccgcctttaccat

SEQ ID NO: 818806 - DNA, 75 bp, synthetic construct
  source 1..75: mol_type = other DNA
tcctctacctggtggcgttgctgctggtggtgctaagcctgtttgtcattaaccgcctgctgcggatgccgctgg

SEQ ID NO: 818807 - DNA, 75 bp, synthetic construct
  source 1..75: mol_type = other DNA
tccgttacctgctgtgtaacgcggatgaaatggagccgggtacctataaagaccgcctgttgatggagcaactgc

SEQ ID NO: 818808 - DNA, 75 bp, synthetic construct
  source 1..75: mol_type = other DNA
ctgcgtccggtattccgttttattgcagcttctggcgtgcgggaagtgttcaccgccgcgacgctgctgttggtg

SEQ ID NO: 818809 - DNA, 75 bp, synthetic construct
  source 1..75: mol_type = other DNA
acgtggcggcagcattccgtcaggtgccgggctgcgtattttttaccgcaaacaccggctgcaggaagatgacaa

SEQ ID NO: 818810 - DNA, 75 bp, synthetic construct
  source 1..75: mol_type = other DNA
acaaggagttgcacgattacctgcacagtatgagcaaaaaagagcgccgggaactggcagcaagattacgcctgg

SEQ ID NO: 818811 - DNA, 75 bp, synthetic construct
  source 1..75: mol_type = other DNA
tgttaacggatttgctgttcattgcgctgattcagcaggatctggaactggcaccagaacgtattcgtcatagtg

SEQ ID NO: 818812 - DNA, 75 bp, synthetic construct
  source 1..75: mol_type = other DNA
cttacagatttgctgttcattgcgctaatccagcaggatctcgaactggcccctgagcgcattcgtcacagcgag

SEQ ID NO: 818813 - DNA, 75 bp, synthetic construct
  source 1..75: mol_type = other DNA
tacatttattgcgggcgtgctgctggcggaaagtgaatatcgccatgaactggaaacggctatcgatcccttcaa

SEQ ID NO: 818814 - DNA, 75 bp, synthetic construct
  source 1..75: mol_type = other DNA
agcattttcatggaacggcccgaaaaaggccattaacccttatctggacccggcggaagttgcgccggagtctgc

SEQ ID NO: 818815 - DNA, 75 bp, synthetic construct
  source 1..75: mol_type = other DNA
ttcccatatcagcaagccgctcatgcaacgtattaaatacttcagcaacctgggcaggccaaaggcttattcccg

SEQ ID NO: 818816 - DNA, 75 bp, synthetic construct
  source 1..75: mol_type = other DNA
cagcgttttaatccggacatggtcattctggcggatgtcaacgctcagccttcccatatcagcaagccgctcatg

SEQ ID NO: 818817 - DNA, 75 bp, synthetic construct
  source 1..75: mol_type = other DNA
gcagcggctttaacgaggtcgccgtagcattctcatggaacagcccgaaaaaggccattaacccttgtctggacc

SEQ ID NO: 818818 - DNA, 75 bp, synthetic construct
  source 1..75: mol_type = other DNA
ccctgcgtctggatgttatcccgcctgcgtttgagaaactccgtcggaaaagaaaccgccgcaaacccgtgccct

SEQ ID NO: 818819 - DNA, 75 bp, synthetic construct
  source 1..75: mol_type = other DNA
tggttgttttgccacctacatcgtgaagcagggcggcgtactggttccccgtaaatatcacctcatcagaaccgc

SEQ ID NO: 818820 - DNA, 75 bp, synthetic construct
  source 1..75: mol_type = other DNA
gtcgtgaagttcgcgcaaaaactcggctataaaggttttccggcacttaagttggcgttgagtgaagcgctggca

SEQ ID NO: 818821 - DNA, 75 bp, synthetic construct
  source 1..75: mol_type = other DNA
gttacgaaggcgcgcgtaaggcgctgaccgggttgtctcctgacgaaatcgttaatcaggttaaagactctggcc

SEQ ID NO: 818822 - DNA, 75 bp, synthetic construct
  source 1..75: mol_type = other DNA
aacgtcgatgacgcgctgaaaaatccgaacgtcaccagcattgaacatgtggttgtactgaagcgtactggcggg

SEQ ID NO: 818823 - DNA, 75 bp, synthetic construct
  source 1..75: mol_type = other DNA
atcgattctaactcacggttggtgatcacttccgacgaaggcgtgcgcgccgggcgtagtattccgctgaagaaa

SEQ ID NO: 818824 - DNA, 75 bp, synthetic construct
  source 1..75: mol_type = other DNA
taccgtggctacatcttcctgcgtggcgaatatatcgaagcggcagtgaatctgcgccgtgccattgccgaagcc

SEQ ID NO: 818825 - DNA, 75 bp, synthetic construct
  source 1..75: mol_type = other DNA
gcgtcgcgctaacccgcgctcgaagccgccattcccggcaacctccggtgcatggggtaaaccgacctgcgtcaa

SEQ ID NO: 818826 - DNA, 75 bp, synthetic construct
  source 1..75: mol_type = other DNA
gaccgtctgctgatggagcaactaccgcacctgctggtggaaggtatgctcatttctgcgtttgcgctgaaagcg

SEQ ID NO: 818827 - DNA, 75 bp, synthetic construct
  source 1..75: mol_type = other DNA
tttggccgcccgttgcagcacgaaggagaaagcaaaggtcgtttaacgctgatccacattttgctggggatgatt

SEQ ID NO: 818828 - DNA, 75 bp, synthetic construct
  source 1..75: mol_type = other DNA
gaagaaagcattattactgacgatgaactcccttttgtggcacatcgaccgtcagcggtgcagagggaagaaaga

SEQ ID NO: 818829 - DNA, 75 bp, synthetic construct
  source 1..75: mol_type = other DNA
attgatacgaatgttattatacctactgagttcaaataccagtatcgtttaaaccctgtatttttcagttatctt

SEQ ID NO: 818830 - DNA, 75 bp, synthetic construct
  source 1..75: mol_type = other DNA
aaattatgcgccgtattctgcgcaaaattgcggcgggcgataccagcaacctgggcgatacctcgacgcttgccg

SEQ ID NO: 818831 - DNA, 75 bp, synthetic construct
  source 1..75: mol_type = other DNA
aggcgataaagcgattgaaggcaccgaccgctcgtcgctgcgtattctcggttccgtgggcgagcccattaaccc

SEQ ID NO: 818832 - DNA, 75 bp, synthetic construct
  source 1..75: mol_type = other DNA
gaagaaagcattattactgacgatgaacgcccttttgtggctcatcgaccgtcagcggtgcagagggaagaaaga

SEQ ID NO: 818833 - DNA, 75 bp, synthetic construct
  source 1..75: mol_type = other DNA
ccagattctcaatcggtggaagcatccagacatcctgcgtcgtcgcattgataaggacattaatccggcaatcgg

SEQ ID NO: 818834 - DNA, 75 bp, synthetic construct
  source 1..75: mol_type = other DNA
acgccgtgtatatctgcaacggacagctgtcgccggcgtcccacgttatggtctggatggtcaccccaaagggca

SEQ ID NO: 818835 - DNA, 75 bp, synthetic construct
  source 1..75: mol_type = other DNA
agggaagaatggcagcgcattagcgataagttgctgcggggtggtgtagattgtctgctgatttcacctgaacgg

SEQ ID NO: 818836 - DNA, 75 bp, synthetic construct
  source 1..75: mol_type = other DNA
gtcgcgacgacggcgctgggaatgggctttgacaaaccggatttggggtttgttattcattaccagatgccgggg

SEQ ID NO: 818837 - DNA, 75 bp, synthetic construct
  source 1..75: mol_type = other DNA
gatcccatcgctcgatacgccagtcagcaaaaccaccggcggcttgctggtcttacccaactctcattcactgat

SEQ ID NO: 818838 - DNA, 75 bp, synthetic construct
  source 1..75: mol_type = other DNA
gttacgccagcacatcggtgccagcgcaattgcgtgtgtacaaaaaggcgatcgcgtcgttcatgggcaatgtgt

SEQ ID NO: 818839 - DNA, 75 bp, synthetic construct
  source 1..75: mol_type = other DNA
tcaacccgcaataagcacactcaccccattgcttccgccaaatatccgcctgcatattttgcccgacatttatcc

SEQ ID NO: 818840 - DNA, 75 bp, synthetic construct
  source 1..75: mol_type = other DNA
cataattgttatttgttcatatcaaataatgcccacgaagtgaaaatatctaaatcagcatgtcaggctgttttt

SEQ ID NO: 818841 - DNA, 75 bp, synthetic construct
  source 1..75: mol_type = other DNA
tggataagtacgcggacagttttgaaaaagtcgaagtatccgaggatagcgaacgtccggtgacaacggtgcagt

SEQ ID NO: 818842 - DNA, 75 bp, synthetic construct
  source 1..75: mol_type = other DNA
atgtggtgatgacgatgttacacagccatctgcatcgacaatgtttactgttgaaaccgatagtccggtagtgaa

SEQ ID NO: 818843 - DNA, 75 bp, synthetic construct
  source 1..75: mol_type = other DNA
ttttattgatgccattgaaaaagtcgtggacaatccaccgcagaaaatgcagcaaaaccgttttcaccagtgtca

SEQ ID NO: 818844 - DNA, 75 bp, synthetic construct
  source 1..75: mol_type = other DNA
ttatccctcagttttccaaatcgggaattgtttataccctgactactcgcgatgctgaacttgtcgccgagtggt

SEQ ID NO: 818845 - DNA, 75 bp, synthetic construct
  source 1..75: mol_type = other DNA
catgtgcggaaatggttcgccaacgctggaatccgcatcctgaaccaacctgggtatgctgcgttccttcattaa

SEQ ID NO: 818846 - DNA, 75 bp, synthetic construct
  source 1..75: mol_type = other DNA
tcttgaggcgcaacattttgcttttcctgaggtgacgttgccgccgccagaagtggcggcggtgcccgttgttaa

SEQ ID NO: 818847 - DNA, 75 bp, synthetic construct
  source 1..75: mol_type = other DNA
tcagcaaagcagccgaaacgaaaaactcggagaacgcggtggtgatctggaacatgcctaagcttgctgaatcat

SEQ ID NO: 818848 - DNA, 75 bp, synthetic construct
  source 1..75: mol_type = other DNA
cgttgcggccatgaactacattgtcaacagcggtattcctttgcgtacagacagtgattttcctattcagcatga

SEQ ID NO: 818849 - DNA, 75 bp, synthetic construct
  source 1..75: mol_type = other DNA
aaaactgtcggcgctgatgccttctgaagatgcaaacaaacgccgcgatgagcagtttgcggcgttttacgatga

SEQ ID NO: 818850 - DNA, 75 bp, synthetic construct
  source 1..75: mol_type = other DNA
tcgaagcggcgctggcagccggtaagaccttccatatctgggccaagccgatgctggactcctttattttcctcg

SEQ ID NO: 818851 - DNA, 75 bp, synthetic construct
  source 1..75: mol_type = other DNA
gggattattgcctgggcgctgaatacctggggcactaacttccatcagattattatggataccatttcgacgccg

SEQ ID NO: 818852 - DNA, 75 bp, synthetic construct
  source 1..75: mol_type = other DNA
actttctctttaaagcggcactggttgccgccgtactttacggggcttcggccccgtctctttttgctgcatcgg

SEQ ID NO: 818853 - DNA, 75 bp, synthetic construct
  source 1..75: mol_type = other DNA
ggccagtggtgctgataaggatgcaattgtgcgggaggctcttcttcgtgattttaatactccaccctttaaaaa

SEQ ID NO: 818854 - DNA, 75 bp, synthetic construct
  source 1..75: mol_type = other DNA
gtgatttcaatactccaccctttaagactgagccagatgattggatccagccggggctgaattatctcaaagggc

SEQ ID NO: 818855 - DNA, 75 bp, synthetic construct
  source 1..75: mol_type = other DNA
tgcgtttgacgattattgtcggaaagtgatgagcagaaatctcgcagagtgtttcagtattcataatgataattg

SEQ ID NO: 818856 - DNA, 75 bp, synthetic construct
  source 1..75: mol_type = other DNA
gacagggatactgcggtgcgggaggtccttcttcgtgatttcaatactccgccctttaagaaagagcctgatggc

SEQ ID NO: 818857 - DNA, 75 bp, synthetic construct
  source 1..75: mol_type = other DNA
ccggcttactggtttcatcccggactgacttatctgaaagggcggtttggggagaggttatctgaacttaagcga

SEQ ID NO: 818858 - DNA, 75 bp, synthetic construct
  source 1..75: mol_type = other DNA
cattgattacatgaagaacaataaaaagcaggggctgatgcagcgcattggtcgctgcatgggatatctgcagct

SEQ ID NO: 818859 - DNA, 75 bp, synthetic construct
  source 1..75: mol_type = other DNA
tggcgaaaactgtctgtgagcagtgccgattgtgtaccgatctctgtccgcgtcacttaattggtcacgaattat

SEQ ID NO: 818860 - DNA, 75 bp, synthetic construct
  source 1..75: mol_type = other DNA
agtacgtacttcaaccttaattttaaaacatcaattagtgacattctccaaaaaatatcgcaatcatttaaaaaa

SEQ ID NO: 818861 - DNA, 75 bp, synthetic construct
  source 1..75: mol_type = other DNA
cgacactaacccggtaaaagaagatatcgagtacgtagagtcgatcaaaaacgacgttgaatggttaggttttca

SEQ ID NO: 818862 - DNA, 75 bp, synthetic construct
  source 1..75: mol_type = other DNA
cctatgcgatcgaactgatcaataaaggcctggcgtatgttgatgaactgacgccggaacagatccgcgaatacc

SEQ ID NO: 818863 - DNA, 75 bp, synthetic construct
  source 1..75: mol_type = other DNA
gtggtacggcgtttaacttccctgcggccagaatttgaagcggcggcaatctacgaatatcccgaacatttacgt

SEQ ID NO: 818864 - DNA, 75 bp, synthetic construct
  source 1..75: mol_type = other DNA
ccattcgccgcgatggatgcaatgctggcacgccagtaaaaatcacgttttgccggtgggaaagtgcaaatttcg

SEQ ID NO: 818865 - DNA, 75 bp, synthetic construct
  source 1..75: mol_type = other DNA
gctgacgttacatatggcaccagcctggtctgaacctgaaaacaaacaaaaggaacttaatgatgacgacaaaac

SEQ ID NO: 818866 - DNA, 75 bp, synthetic construct
  source 1..75: mol_type = other DNA
tggctaacgaactggccaaaaatctcaaaacccctgaagatctcagtcagttcgatcgcctgctcaagaaaataa

SEQ ID NO: 818867 - DNA, 75 bp, synthetic construct
  source 1..75: mol_type = other DNA
cggtgccctttggagcaacggcaacgctaatcaccgataaacaaaacgaggtgagcagtatcgttggtgaagaag

SEQ ID NO: 818868 - DNA, 75 bp, synthetic construct
  source 1..75: mol_type = other DNA
aataattacaatgcgtttgcattagggatagggaaaaactttggttatatcggggcgatttccatcgatgtgaca

SEQ ID NO: 818869 - DNA, 75 bp, synthetic construct
  source 1..75: mol_type = other DNA
gggtgagcgcggcacatgcgctgccggttgaaatccgtttgtatgaccgtctgttcagcgtgccgaacccaggtg

SEQ ID NO: 818870 - DNA, 75 bp, synthetic construct
  source 1..75: mol_type = other DNA
ctgggttctggacaacatcaccattcctgttcatccgcgccagtacgaattttcgcgtctgaatctggaatacac

SEQ ID NO: 818871 - DNA, 75 bp, synthetic construct
  source 1..75: mol_type = other DNA
ccgcattaagtttgctgaacaccaccagaccggtaacaagtggtgtatctacccgatgtacgacttcacccactg

SEQ ID NO: 818872 - DNA, 75 bp, synthetic construct
  source 1..75: mol_type = other DNA
ttagggcaaaacgttgaattacaggaagcgtttcagaaagtcgttccaacgcgtggggcgatagtccgttcccgc

SEQ ID NO: 818873 - DNA, 75 bp, synthetic construct
  source 1..75: mol_type = other DNA
aaaagctgaatgcgctgggtattaacacagcactgcagctggcgcaggctaacacggcattcatccggaaaaact

SEQ ID NO: 818874 - DNA, 75 bp, synthetic construct
  source 1..75: mol_type = other DNA
gcaaggcagtgtggcagcatagaaaatacaccgacatacaatgaattagagttgttgcatactgtttttaattca

SEQ ID NO: 818875 - DNA, 75 bp, synthetic construct
  source 1..75: mol_type = other DNA
ttgaacgcccgaaattgtggagtgaactgacatcgacttctggcgtcggcaagatcaataacaataatgaagact

SEQ ID NO: 818876 - DNA, 75 bp, synthetic construct
  source 1..75: mol_type = other DNA
caacttttactcagcgccttgacctgttcagaatgtaatgtctgcgccagcatagcctgcccggttggaatctca

SEQ ID NO: 818877 - DNA, 75 bp, synthetic construct
  source 1..75: mol_type = other DNA
ctggtcaggttctgcgtgacgagctactgcgtcgcggctggatccaccaattacgtcaacgcagcgacggtcccg

SEQ ID NO: 818878 - DNA, 75 bp, synthetic construct
  source 1..75: mol_type = other DNA
tgatgttaatcatcaccagctcgacacctttctgaactggatccagcatcgccctatccagctgcgtttcatcga

SEQ ID NO: 818879 - DNA, 75 bp, synthetic construct
  source 1..75: mol_type = other DNA
gaatacagaaaaaatagattttactatcacaaataaaggcgatgaggctgaaggactttctctggaagtgcttga

SEQ ID NO: 818880 - DNA, 75 bp, synthetic construct
  source 1..75: mol_type = other DNA
taacgatctctatgcaacctccggcagcggcgatctgacggtgatcattaaagaagccaacggaagtgaacaacg

SEQ ID NO: 818881 - DNA, 75 bp, synthetic construct
  source 1..75: mol_type = other DNA
aagcgttccagaaagtcgtgcctactcgtggtgcagttgtgcgttcccgctttgatacccgcgtcggttaccgtg

SEQ ID NO: 818882 - DNA, 75 bp, synthetic construct
  source 1..75: mol_type = other DNA
aagccttacgctgtcatcgactgcctatgatgagggccgaactgccagcaatggtggtacccccacgtcatctgt

SEQ ID NO: 818883 - DNA, 75 bp, synthetic construct
  source 1..75: mol_type = other DNA
accagtcctaatgtcgccacggcgtatttctggggtcatatggcggataccgccacggtaagtggcaagatgctg

SEQ ID NO: 818884 - DNA, 75 bp, synthetic construct
  source 1..75: mol_type = other DNA
tggtctcgaaatggaagtcgcggcgggggggttggtgaaaatattgttacagcgattggtgtttttaaagtaaat

SEQ ID NO: 818885 - DNA, 75 bp, synthetic construct
  source 1..75: mol_type = other DNA
tgctgggtaatgaggcgaacagtaaagtcgcgtttgatcaatcgttgcaagaagtatctattgatttgccacagg

SEQ ID NO: 818886 - DNA, 75 bp, synthetic construct
  source 1..75: mol_type = other DNA
cgaacaccacggcgacgcgatggaagtcgcgcagtgccagcaatcgcccaatgaacgcacccagctggcgacact

SEQ ID NO: 818887 - DNA, 75 bp, synthetic construct
  source 1..75: mol_type = other DNA
attatggccggtactgggtttattgttttttccacgctgccggtgattgctgaagtggcgaaagagtccggtatc

SEQ ID NO: 818888 - DNA, 75 bp, synthetic construct
  source 1..75: mol_type = other DNA
cgaccactttgtcggtctggctatcgacgaagaccgtcagccggaactgaccgctgaacgtgtagaaaaatgggt

SEQ ID NO: 818889 - DNA, 75 bp, synthetic construct
  source 1..75: mol_type = other DNA
atgacattgcaaaaagcagcaaagaagatctggaagcgtatgacattctgctgctgggcattccaacctggtact

SEQ ID NO: 818890 - DNA, 75 bp, synthetic construct
  source 1..75: mol_type = other DNA
ggttccatgcctggcgataaaaaaggacgtgcggtcataccgttaacggcttataacaataataccatcacggtc

SEQ ID NO: 818891 - DNA, 75 bp, synthetic construct
  source 1..75: mol_type = other DNA
atgactgcaaaaactaaattcaaaagtcctgcatttgaggccattcacagcgcggctgctggattgtccagcgtt

SEQ ID NO: 818892 - DNA, 75 bp, synthetic construct
  source 1..75: mol_type = other DNA
cgctggttaaaccgaagtccagtgatgtaaaagcactgctgggtcaccgtagtcgtagcgcagcagagttgcgcg

SEQ ID NO: 818893 - DNA, 75 bp, synthetic construct
  source 1..75: mol_type = other DNA
cggtgatgccaacgactatgttggtaaaggcatggcgggcggcttaatcgccattcgtcctccggttggttccgc

SEQ ID NO: 818894 - DNA, 75 bp, synthetic construct
  source 1..75: mol_type = other DNA
gatctggcaggtgcgatgatcgccagccagcaggcgtcgctctctttctccgcgctggtgcaggtgcgcaacaaa

SEQ ID NO: 818895 - DNA, 75 bp, synthetic construct
  source 1..75: mol_type = other DNA
gcgctcggtcacgttgaccagttccagcaggtggcggagcagcagcaaacggctatcgacatgggcaaaagcgat

SEQ ID NO: 818896 - DNA, 75 bp, synthetic construct
  source 1..75: mol_type = other DNA
taatgactggaatgaggatggccgctggctgggtgaatactgctgcgccagctgcgggcaatacatacaggtatt

SEQ ID NO: 818897 - DNA, 75 bp, synthetic construct
  source 1..75: mol_type = other DNA
tgtaacgacagaccgaactatgaaattcaggcgttattcacggccccgccagccccggtgacatcagaaggacta

SEQ ID NO: 818898 - DNA, 75 bp, synthetic construct
  source 1..75: mol_type = other DNA
tacagataccgtggtggacgtatgggtattgcgtaaacacccggaaaccttcctggagatgatccccgacacgga

SEQ ID NO: 818899 - DNA, 75 bp, synthetic construct
  source 1..75: mol_type = other DNA
gcgttaagaaagtcgatggtgtcagcattcaaaaaacacggcgggcagcaaacaacgccgcagtagagcttctta

SEQ ID NO: 818900 - DNA, 75 bp, synthetic construct
  source 1..75: mol_type = other DNA
aaagaaagttttcttacctgtttgtcttacgcaatggtgaactggttcaccatgaggtcaacaaatcagagcttc

SEQ ID NO: 818901 - DNA, 75 bp, synthetic construct
  source 1..75: mol_type = other DNA
gatgaaggcaatatcactcgcgggaaaccggatgatttcattttctctatcattcgcgacatggataaggtcgct

SEQ ID NO: 818902 - DNA, 75 bp, synthetic construct
  source 1..75: mol_type = other DNA
ccgcgacttgataacgacggcaatccgatcacccgtaatgttgttaaagaatccgccagtgccgttatcgctcaa

SEQ ID NO: 818903 - DNA, 75 bp, synthetic construct
  source 1..75: mol_type = other DNA
cattatgcgcggtgcgctgatcgggcaacttatcaataaagcgctggataagcgtaaccttggtgaaaacgtcga

SEQ ID NO: 818904 - DNA, 75 bp, synthetic construct
  source 1..75: mol_type = other DNA
gttaccgatgttactgaatttgcagtcaatgggcgcaagctgtatttgtctccagtaatagatccgtatgagaag

SEQ ID NO: 818905 - DNA, 75 bp, synthetic construct
  source 1..75: mol_type = other DNA
cgatggtggctgaagtgtgttcaagtcagcagatttttcgcttcaaagcgcggtatgattatcctaataaaaagt

SEQ ID NO: 818906 - DNA, 75 bp, synthetic construct
  source 1..75: mol_type = other DNA
agtcgaaaccggagcatggaaagacgctgttgagtgggttatcgaagaggcttgtctggctgtaaaagcatcatc

SEQ ID NO: 818907 - DNA, 75 bp, synthetic construct
  source 1..75: mol_type = other DNA
cgagagttattgattataaaatggggggagtgtcggttgatattcctccattccctgaatggaacagtggccatt

SEQ ID NO: 818908 - DNA, 75 bp, synthetic construct
  source 1..75: mol_type = other DNA
acagctgaatcgtcttcctgactgcgactgggtacacctggtcttcaccctgccggacacgctgtggccggtgtt

SEQ ID NO: 818909 - DNA, 75 bp, synthetic construct
  source 1..75: mol_type = other DNA
gctgggtcaggtgagctacgccgacaacaggccgatccagtcgattgaataccgctccagtggcgttatcctcga

SEQ ID NO: 818910 - DNA, 75 bp, synthetic construct
  source 1..75: mol_type = other DNA
gccgacgtcattcagataaaagtcgcccagggcgcgaagccgggtgaaggtggtcagttaccgggtgataaagtc

SEQ ID NO: 818911 - DNA, 75 bp, synthetic construct
  source 1..75: mol_type = other DNA
caagcgttatccggctcagcaagagcatcagtaaacactctttgcgttcatttttgcactgtgcagaatgtgtct

SEQ ID NO: 818912 - DNA, 75 bp, synthetic construct
  source 1..75: mol_type = other DNA
gacaactggcagctgacatttggcgcaacgcgctatattgcagaggataacgaaggaaacgccgttaatcctaat

SEQ ID NO: 818913 - DNA, 75 bp, synthetic construct
  source 1..75: mol_type = other DNA
atgctttcaacacaatttaacagggataatcaacatcaaaccacctccaaaccgtcactacttgccgcctgcata

SEQ ID NO: 818914 - DNA, 75 bp, synthetic construct
  source 1..75: mol_type = other DNA
catatgaaatcgttatatgctgccactcgtgtcacccttgtgtcaacgccacgatgtttgaccgttatttgccat

SEQ ID NO: 818915 - DNA, 75 bp, synthetic construct
  source 1..75: mol_type = other DNA
tgcacgcagtaccgcacctgactgggcgtacaacgataaagagatcaacaaagtctttatgtccttgaagcagcg

SEQ ID NO: 818916 - DNA, 75 bp, synthetic construct
  source 1..75: mol_type = other DNA
gtttgacatcaatgacaactggtcgacctacgccagctatacctctattttccagccgcaaaatgatcgtgacag

SEQ ID NO: 818917 - DNA, 75 bp, synthetic construct
  source 1..75: mol_type = other DNA
taacagcgaatcaatgcagcgtgtgctggctttttaccggggtaattttcaggagttgttccgtgagcagatggt

SEQ ID NO: 818918 - DNA, 75 bp, synthetic construct
  source 1..75: mol_type = other DNA
aatgttggtcgccagcggtaacgtggtgcacaacctgcgtacggtgaagtggcacggtgatagttcaccgtatcc

SEQ ID NO: 818919 - DNA, 75 bp, synthetic construct
  source 1..75: mol_type = other DNA
attatcatgaacccggtaatgtttatcccgttcgttctggtgcaaccgattctggctgcaatcactctggcggcg

SEQ ID NO: 818920 - DNA, 75 bp, synthetic construct
  source 1..75: mol_type = other DNA
gttaatgctttttttcagggatggggatggcctccgtgttcaaaaattttaaatacttggtattcccgaaatgaa

SEQ ID NO: 818921 - DNA, 75 bp, synthetic construct
  source 1..75: mol_type = other DNA
ctggctaagtgggagcatgttgacccggttaaacgcaccctgtggctccctgaaaccaagaatggctatggacgg

SEQ ID NO: 818922 - DNA, 75 bp, synthetic construct
  source 1..75: mol_type = other DNA
cactgaccctaagcaggagcgtgaaaacaagagaatggagctgacgttcgatgaactctttaatcagcattatct

SEQ ID NO: 818923 - DNA, 75 bp, synthetic construct
  source 1..75: mol_type = other DNA
tgttcgctgacggtagttatgaattgtttggtcgtcagcacaatctaatgtttggtgctgatgaatcccctaatg

SEQ ID NO: 818924 - DNA, 75 bp, synthetic construct
  source 1..75: mol_type = other DNA
gcttatctgctgacttacggtgtctcacagctgttttatggcccgatatccgaccgcgtgggtcgccgaccagtg

SEQ ID NO: 818925 - DNA, 75 bp, synthetic construct
  source 1..75: mol_type = other DNA
attggcggcctactggataccatgtggaactggcgagcctgctatctgtttttactggtgctttgtgctggagtg

SEQ ID NO: 818926 - DNA, 75 bp, synthetic construct
  source 1..75: mol_type = other DNA
ataaagatatcatctggaggaacccctaaaactggcgtatcagaattttatgatggcgacattccttggttgaga

SEQ ID NO: 818927 - DNA, 75 bp, synthetic construct
  source 1..75: mol_type = other DNA
ggcataacggcaactgttggtacgtagaagagactcaacaaatcagtgatgaagatgccgaacatcttgagcgta

SEQ ID NO: 818928 - DNA, 75 bp, synthetic construct
  source 1..75: mol_type = other DNA
cggctggcgcgctggtcggcggtctgcaaaacattggtgctggcgtcgctctctgcgatgttgccgcaaaccggt

SEQ ID NO: 818929 - DNA, 75 bp, synthetic construct
  source 1..75: mol_type = other DNA
gttgatgaccttaatggggttattgattgtgctttgctggctgccgctggcaacgcggatatcacaccaggggca

SEQ ID NO: 818930 - DNA, 75 bp, synthetic construct
  source 1..75: mol_type = other DNA
ctcagtcggtcactattgttagccagcagcggatggaagatcagcagttgcaaacgctgggcgaagtgatggaaa

SEQ ID NO: 818931 - DNA, 75 bp, synthetic construct
  source 1..75: mol_type = other DNA
attacagcgtaacgtctacctctgtaggtactaaaatgcagatgacccaacgtgatattccacagtcggtcacta

SEQ ID NO: 818932 - DNA, 75 bp, synthetic construct
  source 1..75: mol_type = other DNA
ataatcaatatcaagccatcaccaaaccgtcactccttgccggttgcattgtactggcactattaccttctgccg

SEQ ID NO: 818933 - DNA, 75 bp, synthetic construct
  source 1..75: mol_type = other DNA
gaatggtgatataccttggttcagaatggatgacatacgtgaaaatggtagaattctagggaattcacttcaaaa

SEQ ID NO: 818934 - DNA, 75 bp, synthetic construct
  source 1..75: mol_type = other DNA
ggagaacctgttaatgaaaatggggctctcctgaccttcgactggacgatagtaaaagaagctgtagatttaatg

SEQ ID NO: 818935 - DNA, 75 bp, synthetic construct
  source 1..75: mol_type = other DNA
ttctgatcgctggaagtatctccaaaaatacagaaaaactttatattgatcgagcacatagtttcgttcgagcat

SEQ ID NO: 818936 - DNA, 75 bp, synthetic construct
  source 1..75: mol_type = other DNA
attcggggctggatatcggcgacagcgccatcaccgaaacctacggtattggcggatttgctatggcgaccgcgc

SEQ ID NO: 818937 - DNA, 75 bp, synthetic construct
  source 1..75: mol_type = other DNA
ccgggccagagttacgacatcaaaattgccggtaagaagacgcgtgctcgtgttgatggcattcgttatcaggtt

SEQ ID NO: 818938 - DNA, 75 bp, synthetic construct
  source 1..75: mol_type = other DNA
ccgtggagatccagcgagtggtggatgctcagccaatgcgcttcccggtgcagtacgttaaccgcccgaatctcg

SEQ ID NO: 818939 - DNA, 75 bp, synthetic construct
  source 1..75: mol_type = other DNA
ggttactggttggcgcggcgaattattgcttccgctatttgccgctgcgcctgcgtgtgggtaatgcccgcccaa

SEQ ID NO: 818940 - DNA, 75 bp, synthetic construct
  source 1..75: mol_type = other DNA
ggcttcgcggtactgggtgccagtttctataaaacacgcagcattatcatcccaacactgcttagtgcgctggcc

SEQ ID NO: 818941 - DNA, 75 bp, synthetic construct
  source 1..75: mol_type = other DNA
tctataaaacacgcagcattatcgtccctacactgctaagtgcgctggcctacgggctcgcctggaaagtgatgg

SEQ ID NO: 818942 - DNA, 75 bp, synthetic construct
  source 1..75: mol_type = other DNA
gaagacgcaggctttgaaagcgttgactattacaacctgacggcaggtgttgtggcgctgcatcgtggttataag

SEQ ID NO: 818943 - DNA, 75 bp, synthetic construct
  source 1..75: mol_type = other DNA
accacagtacacacccgtttcccgccggagccgaatggctatctgcatattggccatgcgaaatctatctgcctg

SEQ ID NO: 818944 - DNA, 75 bp, synthetic construct
  source 1..75: mol_type = other DNA
ctatcgtacgccctgacgcccacttcacactactggatagcctcggtaaacgcgtgcgtttcctgcgtcaggttc

SEQ ID NO: 818945 - DNA, 75 bp, synthetic construct
  source 1..75: mol_type = other DNA
cgatcttactgatcgatgcccgtaaaggcgtgctcgatcaaacccgtcgtcacagttttatctccacactgttgg

SEQ ID NO: 818946 - DNA, 75 bp, synthetic construct
  source 1..75: mol_type = other DNA
tgcacgagccagttagccaggcaactgctgcgccatctgaattcagtgcattcgaactggaattgaatgccctgg

SEQ ID NO: 818947 - DNA, 75 bp, synthetic construct
  source 1..75: mol_type = other DNA
tttccatatcctttctctttatgatcacctgcttgtttgcaagaaggatgtgccgctcttcaatcgcttcgcctc

SEQ ID NO: 818948 - DNA, 75 bp, synthetic construct
  source 1..75: mol_type = other DNA
ggttactggttggcgcggttaattactgctttcgctatttgccgctgcgcctgcgtgtgggtaatgcccgcccga

SEQ ID NO: 818949 - DNA, 75 bp, synthetic construct
  source 1..75: mol_type = other DNA
ggtgcgctgtgtattcaggctgatttttcgaccaacgacggtgtgatggcgtttgccgatgaagtgctaaaaagc

SEQ ID NO: 818950 - DNA, 75 bp, synthetic construct
  source 1..75: mol_type = other DNA
tattaattactggaggcggccgtcgcatcggcctcgccctcgcttggcatttcattaatcaaaagcaaccggtga

SEQ ID NO: 818951 - DNA, 75 bp, synthetic construct
  source 1..75: mol_type = other DNA
caggcatccagttgccagagaaggcgaagccgacagcattcaagcgtcaggtgctcgcctctgcagatcaatctc

SEQ ID NO: 818952 - DNA, 75 bp, synthetic construct
  source 1..75: mol_type = other DNA
gaaaacgccattcagctgatcgaagatggcctgcgcgaagtgtcgtgtggctatgacgcggaatataaacaggct

SEQ ID NO: 818953 - DNA, 75 bp, synthetic construct
  source 1..75: mol_type = other DNA
gatcgtcggtgatgcggatatccgcaaattgccgaaacaatcggtcgacatggcgtttaatgccgtgtctgagat

SEQ ID NO: 818954 - DNA, 75 bp, synthetic construct
  source 1..75: mol_type = other DNA
gcgagaaagaagtgatcgacctggtcgattacttacttaccagctgctttgtcaccggacgcagtttccctcttg

SEQ ID NO: 818955 - DNA, 75 bp, synthetic construct
  source 1..75: mol_type = other DNA
gtggaggagtgtatttttcgccagatgcccgccacgcagcgcgttctgtttctctggcgcaatgccgacacggta

SEQ ID NO: 818956 - DNA, 75 bp, synthetic construct
  source 1..75: mol_type = other DNA
gtatgacgaacaaggcgatcttatcgcacgttctggcgaaagcgtcgaagtgcgcgaccggctggcgctcgacgg

SEQ ID NO: 818957 - DNA, 75 bp, synthetic construct
  source 1..75: mol_type = other DNA
atcatcgacaacatcaacggcgacaactttcgtcaggacgtgccttacaccatcagttgcgatcctgatgtgcgc

SEQ ID NO: 818958 - DNA, 75 bp, synthetic construct
  source 1..75: mol_type = other DNA
cgttgtgcaataggggattctatgccaagcactactaaaaactggtttacccggctcctgaaggcccgtaaaacc

SEQ ID NO: 818959 - DNA, 75 bp, synthetic construct
  source 1..75: mol_type = other DNA
ggcgatggtgaggaagaaattcctgcatggggtaaggcgctgattgaggcggtggccaaactcacgcctgcggca

SEQ ID NO: 818960 - DNA, 75 bp, synthetic construct
  source 1..75: mol_type = other DNA
ggctggcagcgctctattgcacgctcattccttcaatggcttcctccacgccgaccggcattctgcgtgcggtag

SEQ ID NO: 818961 - DNA, 75 bp, synthetic construct
  source 1..75: mol_type = other DNA
ctattgtgcgtcctgaggcccacttcacgttgctggatagcctcggtaaacgcgtgcgcttccttcgtcaggtgc

SEQ ID NO: 818962 - DNA, 75 bp, synthetic construct
  source 1..75: mol_type = other DNA
tcaggaatttcaggatctgccagacggtgctgagacgacgcttacatctgaacgggaaacaacaaagaaccagat

SEQ ID NO: 818963 - DNA, 75 bp, synthetic construct
  source 1..75: mol_type = other DNA
atggcagtatctgaccagacccgctgcggcgaccttgccgaaacattcaaatctgaacgggaaacaacaaagaac

SEQ ID NO: 818964 - DNA, 75 bp, synthetic construct
  source 1..75: mol_type = other DNA
gtgaaccgctgacgctaccggaagacaccatgatcattgaagcggaagaaaaaatgcaaaaacaccgtgtctcaa

SEQ ID NO: 818965 - DNA, 75 bp, synthetic construct
  source 1..75: mol_type = other DNA
taagcggcaacctggtaagaggcgttctgtactttggtaggcgacccgtacagatgaactcatacggccccagtt

SEQ ID NO: 818966 - DNA, 75 bp, synthetic construct
  source 1..75: mol_type = other DNA
ggcttcaccgccgagagtgaaggccggaacctgccagccgcgcagacgcagacgttcagagaggtcatacagggt

SEQ ID NO: 818967 - DNA, 75 bp, synthetic construct
  source 1..75: mol_type = other DNA
tgagtttttcggttcgctgaaatcgaacaacaaaaccattgatgatagtcacacccataacgacgtacagccagg

SEQ ID NO: 818968 - DNA, 75 bp, synthetic construct
  source 1..75: mol_type = other DNA
accaacagtcgctaacgatgtgctcagatggactcgccgtatcttcgattacggaataagacggcatatgctaga

SEQ ID NO: 818969 - DNA, 75 bp, synthetic construct
  source 1..75: mol_type = other DNA
tgcaaaaaatcgtccagcgtggcgcaccaacagtcgctaacgatgtgctcagatggactcgccgtatcttcgatt

SEQ ID NO: 818970 - DNA, 75 bp, synthetic construct
  source 1..75: mol_type = other DNA
gccagagttatgctgatcggctactactccagtatttcgctcgcaaaagcgcgggaaattgctaaagagctttcc

SEQ ID NO: 818971 - DNA, 75 bp, synthetic construct
  source 1..75: mol_type = other DNA
gcgctggcgattgcgttaattcacaaacgccatttcaaacctgatgactttgcccgctaccatccgggcggttca

SEQ ID NO: 818972 - DNA, 75 bp, synthetic construct
  source 1..75: mol_type = other DNA
ttccacgctacagcgtattgttaacccggaagtgactgataaaaaccatgatgaatcgagtaattccgctccctg

SEQ ID NO: 818973 - DNA, 75 bp, synthetic construct
  source 1..75: mol_type = other DNA
atcagtactttgatgagaggaggcaagctcttgagctttgggctgacttgctcgtatctctggaaagaggtgaag

SEQ ID NO: 818974 - DNA, 75 bp, synthetic construct
  source 1..75: mol_type = other DNA
gcattgtgcgtgggctggcgcattcggtggtgctggaaatgaccgatgcggtgatgtttagtgatattttacgcc

SEQ ID NO: 818975 - DNA, 75 bp, synthetic construct
  source 1..75: mol_type = other DNA
cgaagatctcggctgtcatatggatgatgttaacgtgaaagccactactacggaaaaactgggatttaccggacg

SEQ ID NO: 818976 - DNA, 75 bp, synthetic construct
  source 1..75: mol_type = other DNA
cggaaaaacttggatttaccggacgtggggaagggattgcctgtgaagcggtggcgctactcattaaggcaacaa

SEQ ID NO: 818977 - DNA, 75 bp, synthetic construct
  source 1..75: mol_type = other DNA
attctgatggcgacgtggcgctccatgcgttgaccgatgcattgcttggcgcggcggcgctgggagatatcggca

SEQ ID NO: 818978 - DNA, 75 bp, synthetic construct
  source 1..75: mol_type = other DNA
cacgctgctggatagtctcggtaaacgcgtgcgtttccttcgtcaggttcaacatgaacttaagctggagaatat

SEQ ID NO: 818979 - DNA, 75 bp, synthetic construct
  source 1..75: mol_type = other DNA
gcctttggcggtgaaggcccaattatcattggtggcgtacgcattccttacgaaaaaggattgctggcgcattct

SEQ ID NO: 818980 - DNA, 75 bp, synthetic construct
  source 1..75: mol_type = other DNA
gcagcggcgttgggggatatcggcaagctgttcccggataccgatccatcatttaaaggggccgacagccgcgaa

SEQ ID NO: 818981 - DNA, 75 bp, synthetic construct
  source 1..75: mol_type = other DNA
gatggcaaagggatcacgacctcagatttacagcctcatggcgtaatgggaaaaatggaaccgcgcatcctgggg

SEQ ID NO: 818982 - DNA, 75 bp, synthetic construct
  source 1..75: mol_type = other DNA
ggttgaaattcgcctgtacgaccgtctgttcagtgtaccgaacccaggtgctgcggatgattttctgtcggtgat

SEQ ID NO: 818983 - DNA, 75 bp, synthetic construct
  source 1..75: mol_type = other DNA
ctaactttattcgtcagatcatcgatgaagatctggcaagtggtaagcacaccacagtacatacccgtttcccgc

SEQ ID NO: 818984 - DNA, 75 bp, synthetic construct
  source 1..75: mol_type = other DNA
tcagatggaaggcgcctggcaggaagatggcaaagggatcacgacctcagatttacagcctcatggcgtaatggg

SEQ ID NO: 818985 - DNA, 75 bp, synthetic construct
  source 1..75: mol_type = other DNA
aaagcattaataaaaatgcgcagggcaacatactgaatatgatccccaatccgcatctgaaaagttcagagtggg

SEQ ID NO: 818986 - DNA, 75 bp, synthetic construct
  source 1..75: mol_type = other DNA
caacatactgaatatgatccccaatccgcatctgaaaagttcagagtgggggtggcaaattgatccggttggatt

SEQ ID NO: 818987 - DNA, 75 bp, synthetic construct
  source 1..75: mol_type = other DNA
caacctggtagtattgtcggtgaagagggtcaattatacatcagcgggatgcctgaagaggggcaagtgaaggtt

SEQ ID NO: 818988 - DNA, 75 bp, synthetic construct
  source 1..75: mol_type = other DNA
ggtgcccggggggcgaaagtattaaataatagtggtgtgagtgttgactggcaaggtaatgcggtcgttccttat

SEQ ID NO: 818989 - DNA, 75 bp, synthetic construct
  source 1..75: mol_type = other DNA
tggcactctgttagaagatcgcaatcttagctataacgttcaggaagggtattccagtaatggtgttggtaatag

SEQ ID NO: 818990 - DNA, 75 bp, synthetic construct
  source 1..75: mol_type = other DNA
attctggaacgtggcattttggttgattatgactggaatcgtcgccatcacactctatcttcttgatgcgcaaag

SEQ ID NO: 818991 - DNA, 75 bp, synthetic construct
  source 1..75: mol_type = other DNA
agggtttatcgcagggatcgcctgttcagtggctgtcgcctcagcattgtggtggtggcaggtctatccggtgca

SEQ ID NO: 818992 - DNA, 75 bp, synthetic construct
  source 1..75: mol_type = other DNA
atgtcatggatggtcgtttcgcgcacttacacttctttttttcccttttctttatctgtattggcgcttacggtt

SEQ ID NO: 818993 - DNA, 75 bp, synthetic construct
  source 1..75: mol_type = other DNA
gctggtggacgactaccgcgttatacggatgcccgtcgtcaggggcggcaggctggagctgaccatcaccgaact

SEQ ID NO: 818994 - DNA, 75 bp, synthetic construct
  source 1..75: mol_type = other DNA
gtgaatacttactacatcacaatcccctggcccccgagcaataaccgctagtaccgccataatcgcgggcgcaca

SEQ ID NO: 818995 - DNA, 75 bp, synthetic construct
  source 1..75: mol_type = other DNA
gtgaatacttacaacatcacaattccctggcccccgagcaataaccgctagtaccgccataatcgcgggcgcacg

SEQ ID NO: 818996 - DNA, 75 bp, synthetic construct
  source 1..75: mol_type = other DNA
cctggcctccgagcaataatcgctattaccgccataatcgcggacgcacgcacatcagcgcagaggggcaggcat

SEQ ID NO: 818997 - DNA, 75 bp, synthetic construct
  source 1..75: mol_type = other DNA
aagcaggtttctggctggatgatgagctggtcgttgattaccgcgttgtgaagatgcctgttaccaaaggtggga

SEQ ID NO: 818998 - DNA, 75 bp, synthetic construct
  source 1..75: mol_type = other DNA
cgcatcgtgctggctgaaaagggtgtaagtttcgagatcgaacacgtggaaaaggacaatccgcctcaggatctg

SEQ ID NO: 818999 - DNA, 75 bp, synthetic construct
  source 1..75: mol_type = other DNA
gacgctagtaccattattcattctcttttttggacttaaaaaaggtgtggcatgggccagtaactggaatattcg

SEQ ID NO: 819000 - DNA, 75 bp, synthetic construct
  source 1..75: mol_type = other DNA
ttgatctgatctacggtttaccgtgggggatgacggcctacggcggcgtattaatctctaataattacaatgcat

SEQ ID NO: 819001 - DNA, 75 bp, synthetic construct
  source 1..75: mol_type = other DNA
tgggataatatcggtacgtctttaagtagggccatcgtccctttcaaagcgcaattaacgatgggagatacggca

SEQ ID NO: 819002 - DNA, 75 bp, synthetic construct
  source 1..75: mol_type = other DNA
aagcccgctgcatatgcacatggtcattgtctcttatgtgctgaccgtggcggtgatgctgcccgccagcggctg

SEQ ID NO: 819003 - DNA, 75 bp, synthetic construct
  source 1..75: mol_type = other DNA
acggcggtgtgcaggtcgactggatgggtaacgcggttgtgccttacgccacgccttatcgtgaaaacgaaatct

SEQ ID NO: 819004 - DNA, 75 bp, synthetic construct
  source 1..75: mol_type = other DNA
ttttctgcacatgccggaaagtttaaccccaaattcctggaggacgttcagggtgtgggccagcatgtcgattta

SEQ ID NO: 819005 - DNA, 75 bp, synthetic construct
  source 1..75: mol_type = other DNA
gcgcgcaatgcccgcgtggtgaataacggcggcgttcaggttgactggatgggtaacgcgatcgtgccttacgcc

SEQ ID NO: 819006 - DNA, 75 bp, synthetic construct
  source 1..75: mol_type = other DNA
ggcagcggtatgttgccctttatgacgccggttttcctgcaaatcggcctcggtttttcgccgttccatgccgga

SEQ ID NO: 819007 - DNA, 75 bp, synthetic construct
  source 1..75: mol_type = other DNA
ggtcggcaggctaacggtgatgaaaattgttccgcgcgagcaatatatggcggcgatgacctttgtcacgctgcc

SEQ ID NO: 819008 - DNA, 75 bp, synthetic construct
  source 1..75: mol_type = other DNA
gctggcggttggcatggcggtattaaccctggcgctggacggcagtaaaggtacaggtttatcgccgctggcgat

SEQ ID NO: 819009 - DNA, 75 bp, synthetic construct
  source 1..75: mol_type = other DNA
aatacgcatcgtggcactggatctttttgatcaacattccggtagggattatcggtgcgatcgctacactgatgt

SEQ ID NO: 819010 - DNA, 75 bp, synthetic construct
  source 1..75: mol_type = other DNA
acacctggcttagcatggcgtttatcatcgcccttccggcgtttgtctttgccagagtgccaaacgatacgcatc

SEQ ID NO: 819011 - DNA, 75 bp, synthetic construct
  source 1..75: mol_type = other DNA
cctgctgtcgatgattatgcaattgtcgatgagtatcggtgtgaccatcgccgggctgctgctgggtctttttgg

SEQ ID NO: 819012 - DNA, 75 bp, synthetic construct
  source 1..75: mol_type = other DNA
gtgaatacttacaacatcacaataccctggcccccgagcaataaccgctagtaccgccataatcgcgggcgcact

SEQ ID NO: 819013 - DNA, 75 bp, synthetic construct
  source 1..75: mol_type = other DNA
cacaatccacgcgggtctggacaatacctggatgcaggcgctatcacagtttggctggcgcggtctgcttcctga

SEQ ID NO: 819014 - DNA, 75 bp, synthetic construct
  source 1..75: mol_type = other DNA
taaagagactgcgattcattgaggataatgcagcacaattagaagaaacgtggatgtcagtggcacgttttcctg

SEQ ID NO: 819015 - DNA, 75 bp, synthetic construct
  source 1..75: mol_type = other DNA
tagcctcgttgtaccgggtagctatgccatattgattattctgctgctctattttttcctgcgctactatcttgg

SEQ ID NO: 819016 - DNA, 75 bp, synthetic construct
  source 1..75: mol_type = other DNA
ggagaactggcaattgcgccgggtgccaatcccgcaggaacaacagaaccggctgggggtcagtgaactgaccgg

SEQ ID NO: 819017 - DNA, 75 bp, synthetic construct
  source 1..75: mol_type = other DNA
ccagtctccgctacccggttattacctggatcggatggcgcgggaatccgcacagaatgaagaagggctgaaagc

SEQ ID NO: 819018 - DNA, 75 bp, synthetic construct
  source 1..75: mol_type = other DNA
cggtggaaatgccagtcgcaaccggacgttacccgaccacgcgctacggcctggtggaactggagccgaaaaccg

SEQ ID NO: 819019 - DNA, 75 bp, synthetic construct
  source 1..75: mol_type = other DNA
tctgagccgtaagatgaaaccgaccgcgttcaaacgcgaggttctggcttccgctgacaaaacgctggttcgcca

SEQ ID NO: 819020 - DNA, 75 bp, synthetic construct
  source 1..75: mol_type = other DNA
agctctatggtgctgatgacctgccaaaactgaaacccgataagttcggtgaaatagtcgtcacgcgttctcctg

SEQ ID NO: 819021 - DNA, 75 bp, synthetic construct
  source 1..75: mol_type = other DNA
gcgttcaaacgtgaggttctggcttctgctgacaaaacgctggttcgccagatagtcggtgatgcggatatccgc

SEQ ID NO: 819022 - DNA, 75 bp, synthetic construct
  source 1..75: mol_type = other DNA
aaattgccgaaacaatcggtcaacatggcgtttaatgccgtgtcagagattgccaaagggcgaaacacccgcagc

SEQ ID NO: 819023 - DNA, 75 bp, synthetic construct
  source 1..75: mol_type = other DNA
atggcctgcgcgaagtgtcgtgcggctatgacgcggagtatgagcagaccgagccaggtaaagccgggcaggtcg

SEQ ID NO: 819024 - DNA, 75 bp, synthetic construct
  source 1..75: mol_type = other DNA
tggcgtttaatgccgtgtctgaaattgccaaagggcgaaacacccgcgccactaccggcgatgcacagcgcctaa

SEQ ID NO: 819025 - DNA, 75 bp, synthetic construct
  source 1..75: mol_type = other DNA
ttaacagaacgggacagctgttagacgcggcggcgcaggtctgccggattattgacggcatccggcagtgttcac

SEQ ID NO: 819026 - DNA, 75 bp, synthetic construct
  source 1..75: mol_type = other DNA
gcgtaaggcattatccttgctggaaggcgaaggaattattcacagaaagcatggttcaggaacatacattcaaaa

SEQ ID NO: 819027 - DNA, 75 bp, synthetic construct
  source 1..75: mol_type = other DNA
gtgatttttcaaaagattgcccgcttacttaaatccgagatcaatggcaattcatggcatgttggtgatttgttg

SEQ ID NO: 819028 - DNA, 75 bp, synthetic construct
  source 1..75: mol_type = other DNA
caactggcaggggatcgttgagtcgctgacgctgccgaaattcccccgcaaatatgagaagtatcgcggcggcgg

SEQ ID NO: 819029 - DNA, 75 bp, synthetic construct
  source 1..75: mol_type = other DNA
cacgtcagcgcagaggggcaggcataccgcgataacgtcgcccgaatcattaaaaacgcaatgctggatatcggc

SEQ ID NO: 819030 - DNA, 75 bp, synthetic construct
  source 1..75: mol_type = other DNA
acctgaatatgttcaacgatggcctcagctatatgggcgttgttgaatccgtcaccctgccaaaattgacccgca

SEQ ID NO: 819031 - DNA, 75 bp, synthetic construct
  source 1..75: mol_type = other DNA
gcaggtttattacataaagagactgcgattcattgaggataatgcagcacaattagaagaaacgtggatgtcagt

SEQ ID NO: 819032 - DNA, 75 bp, synthetic construct
  source 1..75: mol_type = other DNA
atgcttatcaggcacctcattaaaacgggtgccgggattggaaccccggataatgtcaaaggcgacacagacgcc

SEQ ID NO: 819033 - DNA, 75 bp, synthetic construct
  source 1..75: mol_type = other DNA
ctgttgctgtctcaccagaaagtcatcaactgttagcaaaagcggtttctatcgcccgtccggtaaatgggcgca

SEQ ID NO: 819034 - DNA, 75 bp, synthetic construct
  source 1..75: mol_type = other DNA
acatattctgaaaatttgccaacagcataaatttgatttggtgatttgcggtaatcataaccacagcttcttttc

SEQ ID NO: 819035 - DNA, 75 bp, synthetic construct
  source 1..75: mol_type = other DNA
gggtgttgctgacgccattaagtgatcgattaatcacctttttgacaaatcactaccaggaaaaaacaaacattt

SEQ ID NO: 819036 - DNA, 75 bp, synthetic construct
  source 1..75: mol_type = other DNA
gattatcggtctcgtcatgctgttaaccgcagtggtattaaaccagttgggccaggcattaattccggtaaagcg

SEQ ID NO: 819037 - DNA, 75 bp, synthetic construct
  source 1..75: mol_type = other DNA
acttttttatggctggtcgcattgaccaataatcgcgcttttgacggctgttcactgctggcaatgggactgctg

SEQ ID NO: 819038 - DNA, 75 bp, synthetic construct
  source 1..75: mol_type = other DNA
tcagcacagcaggaaattcggctgatgggctactcatttacgtctccggaggtggttagtgcgcttgtcagggca

SEQ ID NO: 819039 - DNA, 75 bp, synthetic construct
  source 1..75: mol_type = other DNA
cagcctgtctttgtttgcaccagttccggccgtgtatgccgccagcatcgagacggggtattcgccggaaggaac

SEQ ID NO: 819040 - DNA, 75 bp, synthetic construct
  source 1..75: mol_type = other DNA
gggatgttccagtcgttgctcaacgctatctgcagcactggtcgacccgctggtcgcagggaacggactggaaac

SEQ ID NO: 819041 - DNA, 75 bp, synthetic construct
  source 1..75: mol_type = other DNA
aggcttgttaaatctacagtcgatgatgatggattggggatgacaatctcttgttataatttcaaaatgtatagt

SEQ ID NO: 819042 - DNA, 75 bp, synthetic construct
  source 1..75: mol_type = other DNA
gttacacaatcctactacactgcaacgaaaggtaagtcaccgttcgttgctgatatcgtggttgcattgggtggg

SEQ ID NO: 819043 - DNA, 75 bp, synthetic construct
  source 1..75: mol_type = other DNA
cctcgctctgtttaaaaaccgacgaaaagctgccaacagatgaagtaacaaaacacgctgaaaatttgatggggt

SEQ ID NO: 819044 - DNA, 75 bp, synthetic construct
  source 1..75: mol_type = other DNA
gcgcagtatgcgccctataacgggcaggaacacgcgttttctctgacgtatctgcttaatttattttttcttcat

SEQ ID NO: 819045 - DNA, 75 bp, synthetic construct
  source 1..75: mol_type = other DNA
atttcagggatgagtggcttgatgatttttttgaattttcaataccacacaaaaagataccttctgatattcaga

SEQ ID NO: 819046 - DNA, 75 bp, synthetic construct
  source 1..75: mol_type = other DNA
cgaaaagaacggtatcaagcccactcctgattatttagaatgtgtgttgaatgttattgcttactcgacgtaccg

SEQ ID NO: 819047 - DNA, 75 bp, synthetic construct
  source 1..75: mol_type = other DNA
tgtcagacaggttcagcgttatcaggctatatctgggaacaacttttttatgcacctgggcggctgttttttttt

SEQ ID NO: 819048 - DNA, 75 bp, synthetic construct
  source 1..75: mol_type = other DNA
atttttggcagtagttttcttaattggaactatagttacggttaggagagtatattatagagtaagattaaatag

SEQ ID NO: 819049 - DNA, 75 bp, synthetic construct
  source 1..75: mol_type = other DNA
tttatttagcggtttgtcctttacgctgaatgcaggagagtgggtacaaattaccggcagcaatggtgcggggaa

SEQ ID NO: 819050 - DNA, 75 bp, synthetic construct
  source 1..75: mol_type = other DNA
atgaaagagacgaaaaacatcgataccgaaaacacggtcgttgctgacactgtgaaagaaaccagtgagcgtggc

SEQ ID NO: 819051 - DNA, 75 bp, synthetic construct
  source 1..75: mol_type = other DNA
ttgccgatccgcaggcgctggtggccctgtttcgccagttcttaagcgaacaggaaaagcatcaacgcactccgg

SEQ ID NO: 819052 - DNA, 75 bp, synthetic construct
  source 1..75: mol_type = other DNA
ttgcctggaaagcgcagaaactgatccgcacgcaatatcatcgcccgctttctacggcgcttctggcccgcgagc

SEQ ID NO: 819053 - DNA, 75 bp, synthetic construct
  source 1..75: mol_type = other DNA
cgtcttgatgaacaggccgatgccgcaggtaccacgcttgcctggaaagcgcagaaactgatccgcacgcaatat

SEQ ID NO: 819054 - DNA, 75 bp, synthetic construct
  source 1..75: mol_type = other DNA
caggcgctgcacgctctgctcgataaactggcgaaaagcgtcactttgtatctgaatgcgcagattaaagccggt

SEQ ID NO: 819055 - DNA, 75 bp, synthetic construct
  source 1..75: mol_type = other DNA
aacaaaagcactgcaaaatgccgggctgacaacagtgaacccggatctcaacgccatgccggtgaaggttgatga

SEQ ID NO: 819056 - DNA, 75 bp, synthetic construct
  source 1..75: mol_type = other DNA
gtacgggtaatatatgccgctctcctataggtgaacggtatttacaaaaactgcttcctaataaaaggatagaat

SEQ ID NO: 819057 - DNA, 75 bp, synthetic construct
  source 1..75: mol_type = other DNA
acacatttgaaatgcatgcgaccatagtgaaaaataaaatcacgcaaagagacaactataaagggatcatgtctg

SEQ ID NO: 819058 - DNA, 75 bp, synthetic construct
  source 1..75: mol_type = other DNA
ttgcccgacatttaccaaaagagactatgtcaggtctgaacgatgtatataaggtcgcaaaggctatcaaagacg

SEQ ID NO: 819059 - DNA, 75 bp, synthetic construct
  source 1..75: mol_type = other DNA
agctttaccttggtgagattggttattcaccactgttaacggccgaagaagaagtttatttgcgcgtcgcgcact

SEQ ID NO: 819060 - DNA, 75 bp, synthetic construct
  source 1..75: mol_type = other DNA
gtcttgttactgacacttacgttgatagccattttttcggcaattgatcagctgggtatttcagaaatgggtcgc

SEQ ID NO: 819061 - DNA, 75 bp, synthetic construct
  source 1..75: mol_type = other DNA
gcaattgatcagctgggtatttcagaaatgggtcgcattgcaagagatcttacacatttcattatcaatagtttg

SEQ ID NO: 819062 - DNA, 75 bp, synthetic construct
  source 1..75: mol_type = other DNA
tagccattttttcggcgattgatcagctgggtatttcagaaatgggtcgcattgcaagagatattacacatttca

SEQ ID NO: 819063 - DNA, 75 bp, synthetic construct
  source 1..75: mol_type = other DNA
taaggtcagaaagcaccgcaaccgcgtagttcatttctaccaccccactttcaccgaggctgaacaacgtcaaat

SEQ ID NO: 819064 - DNA, 75 bp, synthetic construct
  source 1..75: mol_type = other DNA
atggctagagatgatccgcactttaacttccgtatgcctttggaagtaagagaaaaattgaaattaagagccgag

SEQ ID NO: 819065 - DNA, 75 bp, synthetic construct
  source 1..75: mol_type = other DNA
ggttatcgcaacgaagctgagaaaattgctgatgagcagtctgaaattgtaaaaaaaatggtattcgatacactg

SEQ ID NO: 819066 - DNA, 75 bp, synthetic construct
  source 1..75: mol_type = other DNA
aaggcaaccttcacgcaaattgacaataaatataatacgttcaccactatgtattctgacaaagcagaagtcgaa

SEQ ID NO: 819067 - DNA, 75 bp, synthetic construct
  source 1..75: mol_type = other DNA
gcgctaccggttcgacagagcaggtttgacagcaagttcgctcaacatgcagctcttggcaaaagaaacctttta

SEQ ID NO: 819068 - DNA, 75 bp, synthetic construct
  source 1..75: mol_type = other DNA
ttgatgagttagaacgttcagcaagtatcattaaacgtggtgctacggtgatcaagctcgaagaagctcgttcat

SEQ ID NO: 819069 - DNA, 75 bp, synthetic construct
  source 1..75: mol_type = other DNA
gcgaagatgaataacaggtcgctgaactcagagataattgcagcgattgaagaatcattggctattgaagaactg

SEQ ID NO: 819070 - DNA, 75 bp, synthetic construct
  source 1..75: mol_type = other DNA
ttctcatcctatggaacgagtggctcgaaatggtctatgacgcaacgaaacagcttcctcctgagcgtaaagatt

SEQ ID NO: 819071 - DNA, 75 bp, synthetic construct
  source 1..75: mol_type = other DNA
tgtttaagatcccagaccccatcaccgtcgatgagttttcccgccgcacaggtaagaccgaatcagccgtaagaa

SEQ ID NO: 819072 - DNA, 75 bp, synthetic construct
  source 1..75: mol_type = other DNA
catgcgttttgatgatatcgatttactgcgcctctccgcacgagaacggcgcaagctggttgggcacaacgtgtc

SEQ ID NO: 819073 - DNA, 75 bp, synthetic construct
  source 1..75: mol_type = other DNA
gacgtctgtcggagctgacacagatctggtgggatttaaagggtaaacacgaagagcatgggaaatctaatcttg

SEQ ID NO: 819074 - DNA, 75 bp, synthetic construct
  source 1..75: mol_type = other DNA
atggcgcttggctggattatctggtgtcaccgcgccgccatgcttcagggaggccaacctgtaaaccaaacttac

SEQ ID NO: 819075 - DNA, 75 bp, synthetic construct
  source 1..75: mol_type = other DNA
acggacgtggggtctggttgcgggatggtgaatccatcaatgcggatggtagtcgttatggtgatccccgacgct

SEQ ID NO: 819076 - DNA, 75 bp, synthetic construct
  source 1..75: mol_type = other DNA
gtcattaatacagcgtttaaagaattacaagatttttacgccatcgaccttcaagaccttaaaaataaaaatcag

SEQ ID NO: 819077 - DNA, 75 bp, synthetic construct
  source 1..75: mol_type = other DNA
agatcaatgaaatgttgcagcacataaagatacgtcgaccgtcgaaaaagcgcagaaacagtgaatggcaagaca

SEQ ID NO: 819078 - DNA, 75 bp, synthetic construct
  source 1..75: mol_type = other DNA
ccaaagatttcttcaagccacatgagatggacgatctgcgagactttgctcagcgcaagcaaggcaggatgccat

SEQ ID NO: 819079 - DNA, 75 bp, synthetic construct
  source 1..75: mol_type = other DNA
atagttatatcatccaagatcgccggaaagtccgaaatgcaaagaaaaatgactacctctttgtcacttataagc

SEQ ID NO: 819080 - DNA, 75 bp, synthetic construct
  source 1..75: mol_type = other DNA
aagccaataaaaaagcaggcttacctagccggtgattttcagtcggtgacctacgaagaaacccgtgaaaggctt

SEQ ID NO: 819081 - DNA, 75 bp, synthetic construct
  source 1..75: mol_type = other DNA
acgcccggcggatgcgctggcaccggaatcggtacgccagcaactggcagacctggaagcgcgcggcgcactgcc

SEQ ID NO: 819082 - DNA, 75 bp, synthetic construct
  source 1..75: mol_type = other DNA
acctggaagcacgcggcgcactgccgctggacgcatttcgccaggccgccgagatcactgagcgactgcaacacc

SEQ ID NO: 819083 - DNA, 75 bp, synthetic construct
  source 1..75: mol_type = other DNA
gatgcctacatcggtcgtaatgaggaatctctgagaagtctggcgcagtttggtaaagacctgggcaagcttgat

SEQ ID NO: 819084 - DNA, 75 bp, synthetic construct
  source 1..75: mol_type = other DNA
aatttgatgctaaatgctgttgatgagagagcgaggaagatttctgaatcattaagtgctgatggtaaaactcta

SEQ ID NO: 819085 - DNA, 75 bp, synthetic construct
  source 1..75: mol_type = other DNA
atgcgatatcgctttaccagagctggattgagtacgatctcgctgaacatgcagcgcttatcgaaagaagtatcc

SEQ ID NO: 819086 - DNA, 75 bp, synthetic construct
  source 1..75: mol_type = other DNA
gtttctaacaactcaaatccgcaatagagaggatgctttttcaacgatgttggcggcggctaacaacctggttat

SEQ ID NO: 819087 - DNA, 75 bp, synthetic construct
  source 1..75: mol_type = other DNA
acgaccggtaatgaaaaccgtaagcttgaagttacgcggtgtaaggtttgcaccagtgctgtaaggcaaattacc

SEQ ID NO: 819088 - DNA, 75 bp, synthetic construct
  source 1..75: mol_type = other DNA
ggtggtttcctggactggccaggaggtgaaagtacagcgcggtgtggtgctgtgcgccgatgaaaaaatggagga

SEQ ID NO: 819089 - DNA, 75 bp, synthetic construct
  source 1..75: mol_type = other DNA
acaatattttcttctcgccggaattcctgcgcgaaggccgtgcgctgtacgacaacctgcatccgtcgcgtatcg

SEQ ID NO: 819090 - DNA, 75 bp, synthetic construct
  source 1..75: mol_type = other DNA
attatttctaaccgcatgacgtcagaattagctgatgttgccgataaagtgtatacccgtggtttgtttggtagt

SEQ ID NO: 819091 - DNA, 75 bp, synthetic construct
  source 1..75: mol_type = other DNA
ttatgaagcgtattaaagccaagggggtacctgttattatttatgaacccgtcatggtagaggatgagtttttcc

SEQ ID NO: 819092 - DNA, 75 bp, synthetic construct
  source 1..75: mol_type = other DNA
attcgcgatgtcacagagatcaacccgaatgcggtgatgatcattaaatcgaccatccctgtggggttcacccgc

SEQ ID NO: 819093 - DNA, 75 bp, synthetic construct
  source 1..75: mol_type = other DNA
tgaacgttttgcagcgttattacaggaaggcgccattaagcaagacataccaacattgtttactgactcaaccga

SEQ ID NO: 819094 - DNA, 75 bp, synthetic construct
  source 1..75: mol_type = other DNA
tttgcgtgaaggtaaagcactttatgataacttacacccatcacgcattgtgattggcgagcagtctgaacgtgc

SEQ ID NO: 819095 - DNA, 75 bp, synthetic construct
  source 1..75: mol_type = other DNA
cctatttcaacgaactcgacagctatgctgaaagccaggggttgaacagcaagcagattatcgaaggggtatgcc

SEQ ID NO: 819096 - DNA, 75 bp, synthetic construct
  source 1..75: mol_type = other DNA
cgatacctcaagcgtagagtcggttatccgggatgtcatcgagctgaactccgatgcggttatggtcatcaagtc

SEQ ID NO: 819097 - DNA, 75 bp, synthetic construct
  source 1..75: mol_type = other DNA
gtcaccaatttttgatgaggatatacaatattatctggttaataaaaagttaaaattatatgcaactcaggataa

SEQ ID NO: 819098 - DNA, 75 bp, synthetic construct
  source 1..75: mol_type = other DNA
accgcgacgcggactacgttatcatcgcgacaccgactgattacgatccgaaaactaactactttaacacctcga

SEQ ID NO: 819099 - DNA, 75 bp, synthetic construct
  source 1..75: mol_type = other DNA
aagcggatgtcatcatttctaaccgaatggcggaagaattggctgatgtgaaagagaaggtgtatacccgcgatc

SEQ ID NO: 819100 - DNA, 75 bp, synthetic construct
  source 1..75: mol_type = other DNA
cgccaaatcatcgaaggtgtttgtctggaccctcgcatcggtaatcactacaacaacccttcatttggttacggt

SEQ ID NO: 819101 - DNA, 75 bp, synthetic construct
  source 1..75: mol_type = other DNA
cgctgaaactctaggcctgaattcactacagataattgaaggggtatgcttggatccgcgaataggaaaccacta

SEQ ID NO: 819102 - DNA, 75 bp, synthetic construct
  source 1..75: mol_type = other DNA
gtgatgacgccggggggaatacgcgtgcgccctggcattctggccgttgaggcactgaacttaatgcagtcccgc

SEQ ID NO: 819103 - DNA, 75 bp, synthetic construct
  source 1..75: mol_type = other DNA
tcaatcagaatttcacgcttgcctgtgaaaagatgttctggtgtaaagggaaagttgtcgtcatggggatgggga

SEQ ID NO: 819104 - DNA, 75 bp, synthetic construct
  source 1..75: mol_type = other DNA
gttgtgatgttatcatagcaaatcgtatggtttctgatctcaatgatgtaaccgacaaggtttacactagagatc

SEQ ID NO: 819105 - DNA, 75 bp, synthetic construct
  source 1..75: mol_type = other DNA
ttagcgacgtgatactttgcaacagaatggcgagcgagttaggtgacgtagcggataaagtctatacgagagatc

SEQ ID NO: 819106 - DNA, 75 bp, synthetic construct
  source 1..75: mol_type = other DNA
aaccattccggtaggtttcactaaatccatcaaagaagagttgggcatcgataacgtcttcttctcgccagagtt

SEQ ID NO: 819107 - DNA, 75 bp, synthetic construct
  source 1..75: mol_type = other DNA
cctactttaacgagctggatagctatgcagaaagtcttggcttgaactcacggcagattattgaaggtgtgtgcc

SEQ ID NO: 819108 - DNA, 75 bp, synthetic construct
  source 1..75: mol_type = other DNA
ttcattcttcaactctcggctggaacgtgatctcgccactttcaaacaacaagccgacgtcattatttccaaccg

SEQ ID NO: 819109 - DNA, 75 bp, synthetic construct
  source 1..75: mol_type = other DNA
aaaatgtgatcttttcgcctgagtttttacgcgaaggaaaagcactttatgataacttgcacccatcacgcattg

SEQ ID NO: 819110 - DNA, 75 bp, synthetic construct
  source 1..75: mol_type = other DNA
tgattggcgagcagtctgaacgcgctgaacgttttgcagcgttattacaggaaggcgccattaagcaagacatac

SEQ ID NO: 819111 - DNA, 75 bp, synthetic construct
  source 1..75: mol_type = other DNA
aaggcgaaaggcgttgaagtcattatctatgaacctgttatgacggaagaactattttttaactcccgcctggag

SEQ ID NO: 819112 - DNA, 75 bp, synthetic construct
  source 1..75: mol_type = other DNA
aggctgatgtcattatctcaaatcgcatggcgagcgaactgctcgatgttgaagataaggtctatacacgcgatc

SEQ ID NO: 819113 - DNA, 75 bp, synthetic construct
  source 1..75: mol_type = other DNA
ttcattcttcaactctcgcctggaacgagatctcgccaccttcaaacaacaagccgacgtcattatttccaaccg

SEQ ID NO: 819114 - DNA, 75 bp, synthetic construct
  source 1..75: mol_type = other DNA
gtagtgataactttagagcaagtagtattcaaggtgtaatgaaacgactcaaagccaaaggaattgagatagttg

SEQ ID NO: 819115 - DNA, 75 bp, synthetic construct
  source 1..75: mol_type = other DNA
gagcgttatcggcatttccgctgactacacgctctattacctcaccgagcggatggtgcacggcaatgacgtttc

SEQ ID NO: 819116 - DNA, 75 bp, synthetic construct
  source 1..75: mol_type = other DNA
gtactggaaatatttgtcgttcacctatgggcgagagaatattacagtctttgttacccgaaaaaataatcaaat

SEQ ID NO: 819117 - DNA, 75 bp, synthetic construct
  source 1..75: mol_type = other DNA
cgcaatgccctgctgctggcgctgctcaccaccgtggcggcatatctgattatgatgctcgcccccttccccggc

SEQ ID NO: 819118 - DNA, 75 bp, synthetic construct
  source 1..75: mol_type = other DNA
acggctttatgcagcgtcttgaccgccaactggtgtggctggtcagccccggtaaagaggctaatcctttggtcg

SEQ ID NO: 819119 - DNA, 75 bp, synthetic construct
  source 1..75: mol_type = other DNA
ggagaaagccattaccgccctgaccggacaaagcgtcgatcaaaaatggtttgtggtttacggcgattcgccaca

SEQ ID NO: 819120 - DNA, 75 bp, synthetic construct
  source 1..75: mol_type = other DNA
ggctggcgtctgctgtggctgacgctggaaaacggcgcaagcggcgtgctggtgccggttgaaggggttaaaagt

SEQ ID NO: 819121 - DNA, 75 bp, synthetic construct
  source 1..75: mol_type = other DNA
ggtcacggcattcatcaggatgtgccgccagaacatgctggcgtgtttgtggaggcagtgcatcgcttgtctgaa

SEQ ID NO: 819122 - DNA, 75 bp, synthetic construct
  source 1..75: mol_type = other DNA
gcagcagcaaagcgttcaccgtgatcaaaaaaatgatgtatgccgatccacaggcgctgcacgcgctgctcgata

SEQ ID NO: 819123 - DNA, 75 bp, synthetic construct
  source 1..75: mol_type = other DNA
gtagtagcaaagctttcaccgtgatcaaaaaaatgatgtatgccgatccgcaagcgctgcatgcgctactcgata

SEQ ID NO: 819124 - DNA, 75 bp, synthetic construct
  source 1..75: mol_type = other DNA
ggagaaagccattaccgccctgaccggacaaagcgtcgatcaaaagtggtttgtggtttacggtgactccccaca

SEQ ID NO: 819125 - DNA, 75 bp, synthetic construct
  source 1..75: mol_type = other DNA
acctgatgacgctggtgatgagcatgagcgttatcggcatttccgctgactacacgctctattacctcaccgaac

SEQ ID NO: 819126 - DNA, 75 bp, synthetic construct
  source 1..75: mol_type = other DNA
cctggggcggcgtgcttaccgggcgcgactaccaacaattctcgctctattacatgcataaaattgttgatggtt

SEQ ID NO: 819127 - DNA, 75 bp, synthetic construct
  source 1..75: mol_type = other DNA
gctgcgtaagctgatgcgctttgccgcccgcagcaaggttgcgccgactaccgaattgttcccgatgtcgaaaat

SEQ ID NO: 819128 - DNA, 75 bp, synthetic construct
  source 1..75: mol_type = other DNA
ctgaaatggtggcatggcacaatgtgacgggattctctgaacatggaaattacgttattactcgaccggacgtag

SEQ ID NO: 819129 - DNA, 75 bp, synthetic construct
  source 1..75: mol_type = other DNA
gcgtatgcaggcgctgatcaggctgaaggagagtgtgaaggaagagcggttgtcactgattgcggagggtaagtg

SEQ ID NO: 819130 - DNA, 75 bp, synthetic construct
  source 1..75: mol_type = other DNA
ttcaggaggcaggggcagtaccagcttctgcaacgttgactgagcgagaatttagcactcccggtattccgatga

SEQ ID NO: 819131 - DNA, 75 bp, synthetic construct
  source 1..75: mol_type = other DNA
attgctttcacaaaaacacgatgttattgctctagatatagatcttgagaaagttaagttaattaataaaaggct

SEQ ID NO: 819132 - DNA, 75 bp, synthetic construct
  source 1..75: mol_type = other DNA
gtgaaaattacaatctccggtgttggttatgtaggtatgtcaattgccacattgctttcacaaaaacacgatgtt

SEQ ID NO: 819133 - DNA, 75 bp, synthetic construct
  source 1..75: mol_type = other DNA
gatgatgattggaaagatgacttgcgtcgatacggtatatccgagggcgcgattgcgaacattcagaaggtactt

SEQ ID NO: 819134 - DNA, 75 bp, synthetic construct
  source 1..75: mol_type = other DNA
atcattcccactccggccagaacagacataaatgccatgtctgagatcgagctcaatctttacgacgccatccgt

SEQ ID NO: 819135 - DNA, 75 bp, synthetic construct
  source 1..75: mol_type = other DNA
agaagtcctggcgattgaacgtgaatgcctggcggagcttgatcaatacatcaatcagaatttcacgcttgcctg

SEQ ID NO: 819136 - DNA, 75 bp, synthetic construct
  source 1..75: mol_type = other DNA
ctgtcggggcagtttgatctcattatcaatactgtgaacgtcagcctcgactggcagccttattttgaggcgctg

SEQ ID NO: 819137 - DNA, 75 bp, synthetic construct
  source 1..75: mol_type = other DNA
atgcaggcggcctatctgatcgtcgcttgccgtgcgctgggactggataccggcccgatgtcgggttttgaccgt

SEQ ID NO: 819138 - DNA, 75 bp, synthetic construct
  source 1..75: mol_type = other DNA
aagttctggggctgcacagcgtatcccgattgcaaaggcactatgcccttcaaaaagtcggactttatggattga

SEQ ID NO: 819139 - DNA, 75 bp, synthetic construct
  source 1..75: mol_type = other DNA
tgtcttcatgaaacagatttcgacatggatctgccaaatggttgaacagctcaaagtggcggcaccagttctgac

SEQ ID NO: 819140 - DNA, 75 bp, synthetic construct
  source 1..75: mol_type = other DNA
caaagtggaagcgtacggtgatgtaccacgctgtacggatgtttggtaagggacggtatgcgcagaatagaaccc

SEQ ID NO: 819141 - DNA, 75 bp, synthetic construct
  source 1..75: mol_type = other DNA
tggaactgctgccgaagtacgccgcctgggcagagggtgtcctgggtgccggaggcgcgcaacaggatgacgtgc

SEQ ID NO: 819142 - DNA, 75 bp, synthetic construct
  source 1..75: mol_type = other DNA
cagctcgatccccgctgtggcgtgaaaaaagacaaacagcagctggagcgcagattgcgcaatgacagtcgctga

SEQ ID NO: 819143 - DNA, 75 bp, synthetic construct
  source 1..75: mol_type = other DNA
ctttgatgccgctctgttgctgcagacgctggagatgacagacggtctggatatgccggatcagtcacgggcgcg

SEQ ID NO: 819144 - DNA, 75 bp, synthetic construct
  source 1..75: mol_type = other DNA
agagcgcaatgcttgccactaccggctttgatgccgatctgttactgcagacgctggaactgacagacggtctgg

SEQ ID NO: 819145 - DNA, 75 bp, synthetic construct
  source 1..75: mol_type = other DNA
ttctggagatgcttgacgattaccgctggcggctggttgagccgtttgaattctggctgacggataacccggatg

SEQ ID NO: 819146 - DNA, 75 bp, synthetic construct
  source 1..75: mol_type = other DNA
cgtattctgtggtccgtatttccgccacacgggcgttatgccaaagcggcgataatacatgactggctgtacgac

SEQ ID NO: 819147 - DNA, 75 bp, synthetic construct
  source 1..75: mol_type = other DNA
gaaacgcagcagaattattttcagggatacggcacattgctattactcttttgacgaatgagcaggtattcgagg

SEQ ID NO: 819148 - DNA, 75 bp, synthetic construct
  source 1..75: mol_type = other DNA
actggcacgtggagaataagctgcactggcgtctggacgtggtaatgaatgaagacgactgcaaaataagaagag

SEQ ID NO: 819149 - DNA, 75 bp, synthetic construct
  source 1..75: mol_type = other DNA
tctgcataaagcgattggcgtggtcctgagtgaaactaatccggcttccgcccttaatcatctcaaccatgcgtt

SEQ ID NO: 819150 - DNA, 75 bp, synthetic construct
  source 1..75: mol_type = other DNA
tctgcataaagcgattggcgcggtcctgagtgaaagcaatccggcgtccgcccttaaccatctcaaccatgcgtt

SEQ ID NO: 819151 - DNA, 75 bp, synthetic construct
  source 1..75: mol_type = other DNA
acgagcactaagacactcaaaacggacacgtcgttcggccccttacagtcggcgctgtacccggccttgcctgag

SEQ ID NO: 819152 - DNA, 75 bp, synthetic construct
  source 1..75: mol_type = other DNA
actgcataaagccattggtgcggtcctgagcgaaagcaacccggcctccgccctgaaccaccttacccatgcgct

SEQ ID NO: 819153 - DNA, 75 bp, synthetic construct
  source 1..75: mol_type = other DNA
atgatgtctaacaaaatgactggtttagtgaaatggtttaaccctgaaaaaggttttggtttcatcacgccgaaa

SEQ ID NO: 819154 - DNA, 75 bp, synthetic construct
  source 1..75: mol_type = other DNA
caccatccttatacccaggcgctgatccgcgcgataccagacttcggcagcgcgatgccgcataaaagtcgcctc

SEQ ID NO: 819155 - DNA, 75 bp, synthetic construct
  source 1..75: mol_type = other DNA
gagccgtgaggttcagtcagagcgtgttgcaccacatgatgtagcgattctgatcagaatgcgggcagatcaggt

SEQ ID NO: 819156 - DNA, 75 bp, synthetic construct
  source 1..75: mol_type = other DNA
ttaccgttgaccgcgaagactggcactgggatcaggtgcccgatcacctgaaaattactttccgcgtggtggacg

SEQ ID NO: 819157 - DNA, 75 bp, synthetic construct
  source 1..75: mol_type = other DNA
aagttatcagtttgaaccaggtgcggacgctgatggcgtgaccgtgcatattccgctgccgttgctcaaccaggt

SEQ ID NO: 819158 - DNA, 75 bp, synthetic construct
  source 1..75: mol_type = other DNA
cacttgtagaaggtgactggcagacacgtcacgctttcttccgtgaaaacctgaaactgcgggcagaagtggaag

SEQ ID NO: 819159 - DNA, 75 bp, synthetic construct
  source 1..75: mol_type = other DNA
cgccatgcgtcgggttatgacctgatgctgctgcaactggcagaagatcgccgcaggcttaaaggcatccagtcc

SEQ ID NO: 819160 - DNA, 75 bp, synthetic construct
  source 1..75: mol_type = other DNA
cctgcataaagccatcggcgctgtgctgagcgaaagccacccggcatctgccctgaatcacctcacccatgcgct

SEQ ID NO: 819161 - DNA, 75 bp, synthetic construct
  source 1..75: mol_type = other DNA
atgagcctgagtcccgcacggcagcaccgcctgcgcattcaggctgaacaggccgcccgtgagggcggcagtgtt

SEQ ID NO: 819162 - DNA, 75 bp, synthetic construct
  source 1..75: mol_type = other DNA
aagatatatgtaaaaggtggggaaaaccattgcatcctaactactactttaaatatatatgcattgagagaggct

SEQ ID NO: 819163 - DNA, 75 bp, synthetic construct
  source 1..75: mol_type = other DNA
atctttgttggttcaatgctagatgacaagttttctgattcggtttatggaaatagaatatcaaaagtaataaaa

SEQ ID NO: 819164 - DNA, 75 bp, synthetic construct
  source 1..75: mol_type = other DNA
acggtcaaaaaagcggaaatcaaggtagagctgctgccgaagtacgccgcctgggcggagggtgtcctggctgcc

SEQ ID NO: 819165 - DNA, 75 bp, synthetic construct
  source 1..75: mol_type = other DNA
ccgggttaagacgtaagatgagaaaagccgctatgggcagagactacctcgcgtcagtccttgcggggtgcgggc

SEQ ID NO: 819166 - DNA, 75 bp, synthetic construct
  source 1..75: mol_type = other DNA
ttctggtgcagaaggttgggaagatatagaggattttggggaaacacatctcgattttttgaagcaatatggtga

SEQ ID NO: 819167 - DNA, 75 bp, synthetic construct
  source 1..75: mol_type = other DNA
ttgtcagatattctactgttgactatttgtgccgtcatttctggtgcagaaggctgggaagatatagaggattta

SEQ ID NO: 819168 - DNA, 75 bp, synthetic construct
  source 1..75: mol_type = other DNA
caaaatttcatgagtgctttattaactggatgcgtgactgccattcttcagatgataaagacgtcattgcaattg

SEQ ID NO: 819169 - DNA, 75 bp, synthetic construct
  source 1..75: mol_type = other DNA
tattttgacgaatgagaaggtattcaaggcagggttaagacgtaagatgcgaaaagcagcctacctggcgtcagt

SEQ ID NO: 819170 - DNA, 75 bp, synthetic construct
  source 1..75: mol_type = other DNA
acaactgatgcgatgggttgccagaaagatattgcagagaagatacaaaaacagggaggtgattatttattcgcg

SEQ ID NO: 819171 - DNA, 75 bp, synthetic construct
  source 1..75: mol_type = other DNA
tccgctgaaagaattaaataatccagagcatgacagttacgcaatgagtgaaaagagtcacggcagagaagaaat

SEQ ID NO: 819172 - DNA, 75 bp, synthetic construct
  source 1..75: mol_type = other DNA
gaaattatgcgtggcagtctcctttcggtcaataatagcagaacaaaagaaagagccagaaatgacggtcagata

SEQ ID NO: 819173 - DNA, 75 bp, synthetic construct
  source 1..75: mol_type = other DNA
gaggaaaaattcccactgaaagaattaaataatccagagcatgacagttacgcaatgagtgaaaagagtcacggc

SEQ ID NO: 819174 - DNA, 75 bp, synthetic construct
  source 1..75: mol_type = other DNA
tccagagcatgacagttacgcaatgagtgaaaagagtcaccggcagagaagaaatccgtcttcatattgtttgcg

SEQ ID NO: 819175 - DNA, 75 bp, synthetic construct
  source 1..75: mol_type = other DNA
ttgactatttttgcagttatttctggtgcagaaagttgggaagatatagaggatttcggggaaacacatctcgat

SEQ ID NO: 819176 - DNA, 75 bp, synthetic construct
  source 1..75: mol_type = other DNA
tgacaagagtcgccgcaggggagcgattcatgtcatttctcgcgtcagtccttgcggggagcaggctttcgtaat

SEQ ID NO: 819177 - DNA, 75 bp, synthetic construct
  source 1..75: mol_type = other DNA
tcttcatattgtttgcgatgtccctgatgaacttattgattttacatttgaatggaaaggactgaaaaattatac

SEQ ID NO: 819178 - DNA, 75 bp, synthetic construct
  source 1..75: mol_type = other DNA
ttacagctatccctgaacttcttaacatgctggatattaaaggaaaaatcatcacaactgatgcgatgggttgcc

SEQ ID NO: 819179 - DNA, 75 bp, synthetic construct
  source 1..75: mol_type = other DNA
accacggatgaacaggccagcgcctataaactgacgccgctcgggcgtcagctttcgcaactgccggtcgatcct

SEQ ID NO: 819180 - DNA, 75 bp, synthetic construct
  source 1..75: mol_type = other DNA
gaaaatctgtatggagctggggcgcgggattaaaggactgatcggccatacccagccgcgtcgtctggcggcaag

SEQ ID NO: 819181 - DNA, 75 bp, synthetic construct
  source 1..75: mol_type = other DNA
tcgggatgaaagatgccgataaacaggaatttaccggcgcacgcaacgcgcgtttctccatcttccccggctccg

SEQ ID NO: 819182 - DNA, 75 bp, synthetic construct
  source 1..75: mol_type = other DNA
ccctacgttaacgacgttgacgatcctgaactgttattgggaaccggttcgattattaaagtcggcgatacctgg

SEQ ID NO: 819183 - DNA, 75 bp, synthetic construct
  source 1..75: mol_type = other DNA
ctggagatcgggcatcacgccctgcgtcatggctgggtgatgccgttaggtaaccgcaacgtgcagaccgtgctg

SEQ ID NO: 819184 - DNA, 75 bp, synthetic construct
  source 1..75: mol_type = other DNA
tgatgtacgtgatgctgtggcgcattgatgccggagattatgccggggcgctggagatcgggcatcacgccctgc

SEQ ID NO: 819185 - DNA, 75 bp, synthetic construct
  source 1..75: mol_type = other DNA
attcgcgataaaaggaaaccaggggcggctaaataaagcctttgaggaaaaatttccgctgaaagaattaaataa

SEQ ID NO: 819186 - DNA, 75 bp, synthetic construct
  source 1..75: mol_type = other DNA
gggagcgattcatgtcattagtgcgttctcaacaatgcacagtctggtcatcggacagatcaagacggataagaa

SEQ ID NO: 819187 - DNA, 75 bp, synthetic construct
  source 1..75: mol_type = other DNA
gaagacgactacaaaataagaagaggaaacgcagcagaattattttcagggatacggcacattgctattaatatt

SEQ ID NO: 819188 - DNA, 75 bp, synthetic construct
  source 1..75: mol_type = other DNA
atcaacaaacgtctgaaagggcgggtggatatgaccatggcgctggggctttctgacattaaagcgcagatgggc

SEQ ID NO: 819189 - DNA, 75 bp, synthetic construct
  source 1..75: mol_type = other DNA
ctacagccagatcgatccggcgttatgtcgtgaactctttattcgccacgctctggtggaaggtgactggcagac

SEQ ID NO: 819190 - DNA, 75 bp, synthetic construct
  source 1..75: mol_type = other DNA
gagctttggtctgaccgacgacagagtcagtgatgcgatgctgaacgttgtgttcaataagagcaaaggaaaagt

SEQ ID NO: 819191 - DNA, 75 bp, synthetic construct
  source 1..75: mol_type = other DNA
attgacgaaaagcttatggcgcttcacaagtggttttgggaacaaagtgaagccgagcgctccgctggcattcgc

SEQ ID NO: 819192 - DNA, 75 bp, synthetic construct
  source 1..75: mol_type = other DNA
acgccgactttgttcaggctatcgaacatgcctggcgccagattacgcaatttggcgctcatcaggcactgttaa

SEQ ID NO: 819193 - DNA, 75 bp, synthetic construct
  source 1..75: mol_type = other DNA
agcaagcgccgacactacaaattaaagatgtcgatttaacacaatatgcgggtgatgctgccaacttactgattt

SEQ ID NO: 819194 - DNA, 75 bp, synthetic construct
  source 1..75: mol_type = other DNA
ttatcgtttgctggcagaggggaaagatttacccgcgtggcatccattacttaccggttcaaaagcagccatgca

SEQ ID NO: 819195 - DNA, 75 bp, synthetic construct
  source 1..75: mol_type = other DNA
gtaaaacccttgatgaaatgagcgatgcagaatgggagtcgttgtgtgatggttgtggtcagtgctgcctgcata

SEQ ID NO: 819196 - DNA, 75 bp, synthetic construct
  source 1..75: mol_type = other DNA
tggtgagcgaatctccgtacgtcatatcgcggtgaaagaatcagaagtgatcgactggcaggatcatatactcaa

SEQ ID NO: 819197 - DNA, 75 bp, synthetic construct
  source 1..75: mol_type = other DNA
cgcgcacagaaccatttatataccgtgctggagaaaggggcggacggcaatcaggcgataattgtcggtgccgtt

SEQ ID NO: 819198 - DNA, 75 bp, synthetic construct
  source 1..75: mol_type = other DNA
caaccgacgaatcactggcagaaatcagccagcatctgggggtaaatgatccctgcgcgattagctgcgaaccgt

SEQ ID NO: 819199 - DNA, 75 bp, synthetic construct
  source 1..75: mol_type = other DNA
tattgtcggtgccgttcacgaatgcctgaatgcaaaactggattcattagcagcgattattgagaaattttgcga

SEQ ID NO: 819200 - DNA, 75 bp, synthetic construct
  source 1..75: mol_type = other DNA
cggaaatgccattgatgttcgcgatccgcttgcgataaaattcgcgaacttgttgcgggcagcagcagtgaacaa

SEQ ID NO: 819201 - DNA, 75 bp, synthetic construct
  source 1..75: mol_type = other DNA
ggcgttgcaggctggatgcgttacgtcagcggcgttgatgatgccggaaaggccattgatgttcgcgatccgctt

SEQ ID NO: 819202 - DNA, 75 bp, synthetic construct
  source 1..75: mol_type = other DNA
gatccctgcgcgattagctgcgaaccgtttatccagtgggtggtggaagataacttcgtcgctgggcgtcctgcc

SEQ ID NO: 819203 - DNA, 75 bp, synthetic construct
  source 1..75: mol_type = other DNA
gtgagcaagattgattatcaggcactgcgtgaaaaggcagagaaagcaacgtgtggtgtatggtcgatcgaatat

SEQ ID NO: 819204 - DNA, 75 bp, synthetic construct
  source 1..75: mol_type = other DNA
gagcttgcaccactggtggagatggtagtttccgctcacagcttgcctgcacgggctaaaatgatgcataccgac

SEQ ID NO: 819205 - DNA, 75 bp, synthetic construct
  source 1..75: mol_type = other DNA
atgaattaaaaacgccgctggcgagtatgcgcgaaggtactgaattacttgctgatcaggttgttgggccgctca

SEQ ID NO: 819206 - DNA, 75 bp, synthetic construct
  source 1..75: mol_type = other DNA
cgcaagcgttacagtgaaatgcttgatgcccacgcaggcgtgttgccggacgataaactctatcaggcattgcgt

SEQ ID NO: 819207 - DNA, 75 bp, synthetic construct
  source 1..75: mol_type = other DNA
gcgatgcgcagttttccctatgagttgaccgaaggtgaatgtcaaaaagtgatgatagccattgcactggcgaat

SEQ ID NO: 819208 - DNA, 75 bp, synthetic construct
  source 1..75: mol_type = other DNA
ccaacgccgatctttcggttactacctgcctggccgagccgatgctgctgctgagcgtgctggataatctttact

SEQ ID NO: 819209 - DNA, 75 bp, synthetic construct
  source 1..75: mol_type = other DNA
ttgcctggcggagccaatgctgctgatgagcgtactggataatctttactccaatgcggtgcactacggggctga

SEQ ID NO: 819210 - DNA, 75 bp, synthetic construct
  source 1..75: mol_type = other DNA
ctgttatccatgcttgatggtgatgaattaaatgcgactctggtctgcctttctactggtggacgctggagtgaa

SEQ ID NO: 819211 - DNA, 75 bp, synthetic construct
  source 1..75: mol_type = other DNA
tgttactggcatttagtcaaggtgaaatcgtggccgcatattggaactgggttgtaaatccaattgattacaaaa

SEQ ID NO: 819212 - DNA, 75 bp, synthetic construct
  source 1..75: mol_type = other DNA
tcgatgaagatttccaaatggaacagcaggccaatgctgaattcatcgccgcagccaatccggctaccgtgctga

SEQ ID NO: 819213 - DNA, 75 bp, synthetic construct
  source 1..75: mol_type = other DNA
attcattacgacaactggtaacgctggcattcctgctgatcctgctgcccttgttagtgttggcatggcaagcct

SEQ ID NO: 819214 - DNA, 75 bp, synthetic construct
  source 1..75: mol_type = other DNA
atcatctactcaaaaccatcagcggcataggtgatataccagtgagccggatgagcaaaagggctttgatggatt

SEQ ID NO: 819215 - DNA, 75 bp, synthetic construct
  source 1..75: mol_type = other DNA
atttatggacgaaaaacagttacaggctctggctaacgaactggccaaaaacctcaaaacccctgaagacctcag

SEQ ID NO: 819216 - DNA, 75 bp, synthetic construct
  source 1..75: mol_type = other DNA
ggtattcaaggcagggttaagacgtaagatgcagggaaagatcatcagaagttcactttttgtactaaataattc

SEQ ID NO: 819217 - DNA, 75 bp, synthetic construct
  source 1..75: mol_type = other DNA
acatacctataatgttcagtcatgagatatcaagaataaatgctacgcctggtaacgttcttctacagagcgcct

SEQ ID NO: 819218 - DNA, 75 bp, synthetic construct
  source 1..75: mol_type = other DNA
tttcaaaacgttaactgagaatcaggaagtcgaatttggtattgagaacggacctaaaggccctgcagctgttca

SEQ ID NO: 819219 - DNA, 75 bp, synthetic construct
  source 1..75: mol_type = other DNA
taaaggctgatgccgaagcgctggccgtattgctgaccgatgcaaaaaaagaggagcgtaaagaccgtgctctcg

SEQ ID NO: 819220 - DNA, 75 bp, synthetic construct
  source 1..75: mol_type = other DNA
tcgcgtggtggcgctcgggagcgccgcgcaggataaaggtttgcaggtcggtcagcgtgtcgggattggctggac

SEQ ID NO: 819221 - DNA, 75 bp, synthetic construct
  source 1..75: mol_type = other DNA
ccgaattgttcccgatgtcgaaaattaacgacgccatccagcatgtgcgcgacggtaaggcgcgttaccgcgtgg

SEQ ID NO: 819222 - DNA, 75 bp, synthetic construct
  source 1..75: mol_type = other DNA
gcctgtattagcggtaatcagatcaactgcgagcaaggtgcggtgccgacgattttgaatcgcggcggttttgcc

SEQ ID NO: 819223 - DNA, 75 bp, synthetic construct
  source 1..75: mol_type = other DNA
cgatggacaagcagcaggcatcggacgaaaaacatcgtcgcttccacgacaaagaatccgacttcctcgcgtttg

SEQ ID NO: 819224 - DNA, 75 bp, synthetic construct
  source 1..75: mol_type = other DNA
gcaaaagagattgacctggcagcagggaaagtcctgctgcgtgaagcggcgcgtccggagattacttatccggaa

SEQ ID NO: 819225 - DNA, 75 bp, synthetic construct
  source 1..75: mol_type = other DNA
tctcgaagcgattcgtgaccaccaggtcgtcatcgttgccggggaaacggggtcaggtaaaaccactcagttacc

SEQ ID NO: 819226 - DNA, 75 bp, synthetic construct
  source 1..75: mol_type = other DNA
ttctgcgtaccaacctggcgtcggttatcttacagatgaccgccctggggctgggcgatatcgctgcgtttccgt

SEQ ID NO: 819227 - DNA, 75 bp, synthetic construct
  source 1..75: mol_type = other DNA
atatcaaagcgcagatgggcgggctggtatatcgcggttttgtcaccggtaacggtttcaaacgtctgggtgaca

SEQ ID NO: 819228 - DNA, 75 bp, synthetic construct
  source 1..75: mol_type = other DNA
caggaaacgctgtccgcagtggcggatgacggtatcgagcagagcggcctgcatatctggagctttggtcaactg

SEQ ID NO: 819229 - DNA, 75 bp, synthetic construct
  source 1..75: mol_type = other DNA
caacgctcacagaaagaaatccagcagttcaatcagctacagcgcaccatcaccattcttgataacgatctcctg

SEQ ID NO: 819230 - DNA, 75 bp, synthetic construct
  source 1..75: mol_type = other DNA
gaggaaaaacctttaacgggcttatttcttatttattaaaacctgcttcgcaccacaagtcagatccgtatgtag

SEQ ID NO: 819231 - DNA, 75 bp, synthetic construct
  source 1..75: mol_type = other DNA
acgtatcccatttctgaaagcgttcaatggtccaactaagttcttttccatgtccatgattcacctgtccctgag

SEQ ID NO: 819232 - DNA, 75 bp, synthetic construct
  source 1..75: mol_type = other DNA
gaatttgatagcaccaaacagcttcgtcctgacgtgcaaaaggctgtttggcacaactcgcttcgtttgccgaag

SEQ ID NO: 819233 - DNA, 75 bp, synthetic construct
  source 1..75: mol_type = other DNA
ccgccatgcttcatggtaaatccgaacaaccacaaaacgcacaacaaaatattccggaaaatattcccggtggca

SEQ ID NO: 819234 - DNA, 75 bp, synthetic construct
  source 1..75: mol_type = other DNA
tgcgtgccaaggcagaaaaagcaacgtgtggtgtatggtcgctcgaatatggagagggccgatttgatggtgatg

SEQ ID NO: 819235 - DNA, 75 bp, synthetic construct
  source 1..75: mol_type = other DNA
atagcaattgcttgtatctttgctggggaacatattttgaaggagatgaaccaggctacattcctgcttatttct

SEQ ID NO: 819236 - DNA, 75 bp, synthetic construct
  source 1..75: mol_type = other DNA
agtacaaaggcaaaaacactccaggcttagtggctggattccatttttaagaaggttcatagagcttctcagaag

SEQ ID NO: 819237 - DNA, 75 bp, synthetic construct
  source 1..75: mol_type = other DNA
gatagcaccaagcatcttcgccaggatgtcgcaaaaccagtttggcacaactcgcttcgcttacccaacggtgaa

SEQ ID NO: 819238 - DNA, 75 bp, synthetic construct
  source 1..75: mol_type = other DNA
tgcacctattagaacccattcctttcacagccggtcattcccttcaggaacaatcagttagtaataaccagcacc

SEQ ID NO: 819239 - DNA, 75 bp, synthetic construct
  source 1..75: mol_type = other DNA
gcaggagagtgggtacaaatcaccggtagcaacggcgcggggaagacaacgcttctccgtttgctgacggggttg

SEQ ID NO: 819240 - DNA, 75 bp, synthetic construct
  source 1..75: mol_type = other DNA
gataaccgagctgctggtcaggacgaattcactaacgctttagccaaacagcttcacttagaaccaggtgctggt

SEQ ID NO: 819241 - DNA, 75 bp, synthetic construct
  source 1..75: mol_type = other DNA
atgaatatttagatacgaaaacaataacagctaccaatagttatataaatatcgctatgagatggatagaagcaa

SEQ ID NO: 819242 - DNA, 75 bp, synthetic construct
  source 1..75: mol_type = other DNA
cgctcagtcgcatgagttagacagccgtcagattatcgaaggcattggtctggacccgcgtattggcacgcacta

SEQ ID NO: 819243 - DNA, 75 bp, synthetic construct
  source 1..75: mol_type = other DNA
atggtgatttcaggtccacgctggatgacgttgacgttttttgggctgataagttttctggcattgaaagaatat

SEQ ID NO: 819244 - DNA, 75 bp, synthetic construct
  source 1..75: mol_type = other DNA
ctgcgctttacgctgacagaagtaaatgatcaacccgtccggcaaacgccgatgtttacgctgctgcgtgatgag

SEQ ID NO: 819245 - DNA, 75 bp, synthetic construct
  source 1..75: mol_type = other DNA
tagcgacgtttttattgcccgctcacaccacggctccgtctctaaagaacaacgagcaatcaccgaacaggcgct

SEQ ID NO: 819246 - DNA, 75 bp, synthetic construct
  source 1..75: mol_type = other DNA
atgagtggtgcaataggcatagaacaattaaaaaaattgccaagatttatttctgttagaagaaaaaatgcagag

SEQ ID NO: 819247 - DNA, 75 bp, synthetic construct
  source 1..75: mol_type = other DNA
ggttaagcagttgatttcaaaggttcgttatttttttgaaactgggaaccccctgttcaaattgaacaagtcccc

SEQ ID NO: 819248 - DNA, 75 bp, synthetic construct
  source 1..75: mol_type = other DNA
atggctgaactcactgaattgcctgatggaccgtttacgcgccagcaagcagaggcggtttcgtctcaatattcc

SEQ ID NO: 819249 - DNA, 75 bp, synthetic construct
  source 1..75: mol_type = other DNA
atcactctatctgatgctgacctcccgcgcgcgcgaaacgctacgcggcgtcgaaacggtaattattgatgaagt

SEQ ID NO: 819250 - DNA, 75 bp, synthetic construct
  source 1..75: mol_type = other DNA
ccatccgcagatacggattgtcgtaccggtcgccaatatggatgatgtctcatcggtcgccagcggcaccggcga

SEQ ID NO: 819251 - DNA, 75 bp, synthetic construct
  source 1..75: mol_type = other DNA
ttcgccgcccgttttcgcgaatgcgccgcgcgggcattattaatgccgggccgcacgccgggccatcgcaccccg

SEQ ID NO: 819252 - DNA, 75 bp, synthetic construct
  source 1..75: mol_type = other DNA
cccgaacccggcgtgacttagtcgattccgcagtcattgtagagtgtatgttcgcaggcaggctggaaaacctga

SEQ ID NO: 819253 - DNA, 75 bp, synthetic construct
  source 1..75: mol_type = other DNA
gcggcaaacaccaatatttacgttgttgcggggagcgggattttccagttcgccacaggggctggactggggata

SEQ ID NO: 819254 - DNA, 75 bp, synthetic construct
  source 1..75: mol_type = other DNA
attgccattgtcgaagagcaacttcagcaactgcgcgaacaggggctggtgatgaatctgcaacaagacatctgg

SEQ ID NO: 819255 - DNA, 75 bp, synthetic construct
  source 1..75: mol_type = other DNA
tttgacaatattgaactgaaggcccgaaatgttcgcgttaagccgttccgggcttatgctgaaaaccactggcgg

SEQ ID NO: 819256 - DNA, 75 bp, synthetic construct
  source 1..75: mol_type = other DNA
aagaccagaacagcacctggcatgcagaatccactgacaactatttcatcgtcacggaacgctacagcgacaaca

SEQ ID NO: 819257 - DNA, 75 bp, synthetic construct
  source 1..75: mol_type = other DNA
atggctgttgtgattcttactgtacctctgctttcatttgctaagggtattggttatggaaatactcaatgggac

SEQ ID NO: 819258 - DNA, 75 bp, synthetic construct
  source 1..75: mol_type = other DNA
tggcgaattaccaaaattaagacctttgataatcgtccattgtacgtaccgaactcgctgttttcgtcgatcagc

SEQ ID NO: 819259 - DNA, 75 bp, synthetic construct
  source 1..75: mol_type = other DNA
gcctcaatccgtcaacaacttgctgaagatatacaatccgcactgaaacgttacacccagccaagtaacgccccg

SEQ ID NO: 819260 - DNA, 75 bp, synthetic construct
  source 1..75: mol_type = other DNA
atcgactcggattgattttaactcgcctgaacaatggtgaatcactagccgtccgggagctatctgaggaattta

SEQ ID NO: 819261 - DNA, 75 bp, synthetic construct
  source 1..75: mol_type = other DNA
taatgcctttaatgaaatactggataccggatgtcgaagtaatacaaccggcctcaatccgtcaacaacttgctg

SEQ ID NO: 819262 - DNA, 75 bp, synthetic construct
  source 1..75: mol_type = other DNA
agcagtcgcaacggttatggcaaaccgccagccaggcgcgggattatttgctctatttgcgtgaggatgccaact

SEQ ID NO: 819263 - DNA, 75 bp, synthetic construct
  source 1..75: mol_type = other DNA
atgaaaacacaacgtggttatacgctgattgaaacgctggtcgcgatgctgattctggtcatgctaagcgcaagt

SEQ ID NO: 819264 - DNA, 75 bp, synthetic construct
  source 1..75: mol_type = other DNA
tcgtgatgaccctggattggttgtactgaacaagatgtgcaacgatcttgagcgcccgctattggttaaatatct

SEQ ID NO: 819265 - DNA, 75 bp, synthetic construct
  source 1..75: mol_type = other DNA
gccgccaacgttgagttgattggctatgaaaacgtcggctctggcctagtcaccgcgatggtaaaaggcgacgtt

SEQ ID NO: 819266 - DNA, 75 bp, synthetic construct
  source 1..75: mol_type = other DNA
atttttacacccgcccacaccgtcatatctttactgaaatggcgcgtttgcaggaaagcggtagccccattgacc

SEQ ID NO: 819267 - DNA, 75 bp, synthetic construct
  source 1..75: mol_type = other DNA
agactgggcgcgcatttccggcacgatgggcattttgctggaaaaacgtaatatctatattgatgattcctccgg

SEQ ID NO: 819268 - DNA, 75 bp, synthetic construct
  source 1..75: mol_type = other DNA
tgccgggcgaatacatgccctatggggcgctgacgcgtcggtggtcgccagtgatgacggcattgttgcacgtat

SEQ ID NO: 819269 - DNA, 75 bp, synthetic construct
  source 1..75: mol_type = other DNA
gggctgatgtggtgatctggcagatgccaggctggtggatgggcgcgccgtggacagtgaaaaaatatattgatg

SEQ ID NO: 819270 - DNA, 75 bp, synthetic construct
  source 1..75: mol_type = other DNA
cgcaatgacattcttgcaggtatcttcgagccagccacgatcgacattgatctggctatcttgctgacaaaagca

SEQ ID NO: 819271 - DNA, 75 bp, synthetic construct
  source 1..75: mol_type = other DNA
ggatgtcgctgccgactgggcaataaaacgcctacctgcccagtatcagcccgtcttacttgaagctaagcaagc

SEQ ID NO: 819272 - DNA, 75 bp, synthetic construct
  source 1..75: mol_type = other DNA
tgccgtcggtgttgaaactgcgcgcaaggtaacagaagcgtcagacatcatttttattatggtgccggatacgcc

SEQ ID NO: 819273 - DNA, 75 bp, synthetic construct
  source 1..75: mol_type = other DNA
ttgaggttaaaaaatgagcaacaccctgattatcaacggcgcgaaaaattcgcccactccaatggtcaactgaac

SEQ ID NO: 819274 - DNA, 75 bp, synthetic construct
  source 1..75: mol_type = other DNA
gttctggcggtctggtacaaggtaaaaaatatatgctttccctgacctggaacgcaccaatggaagctttcaccg

SEQ ID NO: 819275 - DNA, 75 bp, synthetic construct
  source 1..75: mol_type = other DNA
cgacaacacggctaatcgcaagctgctcgactcaaaacgagtatcgaccttagaagctgaaaacattgagctaaa

SEQ ID NO: 819276 - DNA, 75 bp, synthetic construct
  source 1..75: mol_type = other DNA
agcaaaacctcgaagcatttgaagtatggcaagccactcaaactgatgatgactttaagcaaatcgcctttaaag

SEQ ID NO: 819277 - DNA, 75 bp, synthetic construct
  source 1..75: mol_type = other DNA
tggacagtgaaaaaatacattgatgatgtattcaccgaaggtcacgggacgctgtatgccagcgatggtcgtacc

SEQ ID NO: 819278 - DNA, 75 bp, synthetic construct
  source 1..75: mol_type = other DNA
ttatgcattgctgcgtgcgtgcatgtcggcagaagaattcagcttatatttgaatacccccggcctgcaactggc

SEQ ID NO: 819279 - DNA, 75 bp, synthetic construct
  source 1..75: mol_type = other DNA
aaacgcctcgtgatggaagcggcctgtctgtttgcccaacgtttgcaggtagagcagattattgccgtcagcaat

SEQ ID NO: 819280 - DNA, 75 bp, synthetic construct
  source 1..75: mol_type = other DNA
tttaagcgttgagtggatgaacgaactttcccactggcctaatctcaatgtgttgttaacgcgccaaccgcgact

SEQ ID NO: 819281 - DNA, 75 bp, synthetic construct
  source 1..75: mol_type = other DNA
gccaaacaccgcgacctgccaggagttatttaatacctgtgcggcaaacggtggcagccagttggatcactctgc

SEQ ID NO: 819282 - DNA, 75 bp, synthetic construct
  source 1..75: mol_type = other DNA
aaatgctgaatgaaatgattgagcaggcgcaccgggatttggaggcaaccaggcagaacagccagaacgattcca

SEQ ID NO: 819283 - DNA, 75 bp, synthetic construct
  source 1..75: mol_type = other DNA
tccccttaccccggagcagaaatactggttcgcctgcgccacgtttgataactgggaaggctggaatgagcaaca

SEQ ID NO: 819284 - DNA, 75 bp, synthetic construct
  source 1..75: mol_type = other DNA
agactgccagactgcaacgccagaaacgggtggatcaggcgatgaagtccatcgacctcatcaacctcaaactgc

SEQ ID NO: 819285 - DNA, 75 bp, synthetic construct
  source 1..75: mol_type = other DNA
cgctgaaactgtccggaaaaatccacaaacagcttgaaagtattgcccgaagtcgtggcgaccccccacccaaaa

SEQ ID NO: 819286 - DNA, 75 bp, synthetic construct
  source 1..75: mol_type = other DNA
ccctgaaactgtccggaaaaatccacaaacagcctgaaagtattgcccgaagtcgtggcgacccccctcccaaaa

SEQ ID NO: 819287 - DNA, 75 bp, synthetic construct
  source 1..75: mol_type = other DNA
ctctgaaactgtccggaaaaatccacaaacagcgtgaaagtattgcccgaagtcgtggcgaccccccacccaaaa

SEQ ID NO: 819288 - DNA, 75 bp, synthetic construct
  source 1..75: mol_type = other DNA
tcgctatggatattgatatcagctttgcgccagtgctggatgtcgggcatatcagcgcggcgattggcgagcgtt

SEQ ID NO: 819289 - DNA, 75 bp, synthetic construct
  source 1..75: mol_type = other DNA
tgccgtcagtgttgaaactgcgcgccaggtaacggaagcatcggacatcatttttattatggtgccggatacacc

SEQ ID NO: 819290 - DNA, 75 bp, synthetic construct
  source 1..75: mol_type = other DNA
cgccaggcgctgatgggcggctttgcttcctcacgtattctggaagttcatggcgagcgtatgattaaacgcacc

SEQ ID NO: 819291 - DNA, 75 bp, synthetic construct
  source 1..75: mol_type = other DNA
tctgaaaaaagcaatatctatgtttctggttggtttataaatgaaaattatgaaaggaataatatagaatggctg

SEQ ID NO: 819292 - DNA, 75 bp, synthetic construct
  source 1..75: mol_type = other DNA
tatgaaaccaatattcattccatttgttaatttattagggcgaattattactaactttcatccgaaatacaaaaa

SEQ ID NO: 819293 - DNA, 75 bp, synthetic construct
  source 1..75: mol_type = other DNA
ggaactgatggactcggctcgctggaaagcgatcagcgcccgtctgaatcagttacatgaacgctggcaggaaga

SEQ ID NO: 819294 - DNA, 75 bp, synthetic construct
  source 1..75: mol_type = other DNA
cggcgaaatctgggactggcagagtgcgcaacaatgcatggcgatcagcggctgcgacgcaggattggtcgcggg

SEQ ID NO: 819295 - DNA, 75 bp, synthetic construct
  source 1..75: mol_type = other DNA
gaaagaagataactgtctgcaaccacgctgagcactttaatccgctgaccggaggcgctaccatagcgcctcatt

SEQ ID NO: 819296 - DNA, 75 bp, synthetic construct
  source 1..75: mol_type = other DNA
cgtggatgttgtggtagaagcggttgttgaaaacccgaaagtgaaaaaagccgtactggcagaaaccgaacaaaa

SEQ ID NO: 819297 - DNA, 75 bp, synthetic construct
  source 1..75: mol_type = other DNA
gaagcaacggaattatttcagcatgttcgggtgttgaataattcccctgatattgcaagggctattcaggcaatt

SEQ ID NO: 819298 - DNA, 75 bp, synthetic construct
  source 1..75: mol_type = other DNA
atgatgaagcaacggatttatttcatcatgttcgggtgttgaataattcccctgatattgcaagggctattcagg

SEQ ID NO: 819299 - DNA, 75 bp, synthetic construct
  source 1..75: mol_type = other DNA
acttatctatcagggtgcaaaagcgatgcgcgaagctgtaccggcgcatttacccgtcagtgtgaaagtgcggct

SEQ ID NO: 819300 - DNA, 75 bp, synthetic construct
  source 1..75: mol_type = other DNA
cgatggtcaacgaagtggtgcgttgtctggaggaaggcattatcgccactccggcagaagccgatatggcactgg

SEQ ID NO: 819301 - DNA, 75 bp, synthetic construct
  source 1..75: mol_type = other DNA
caagatcgatggtctgaaactggctggcgtgatctccacaatccacccaacgctcgactacgccgggtttgaccg

SEQ ID NO: 819302 - DNA, 75 bp, synthetic construct
  source 1..75: mol_type = other DNA
ggtatcggtgttcttccggttgatacgtacggcccgccgtcagcgttttgaggggcgggaaccatgtcaaagctg

SEQ ID NO: 819303 - DNA, 75 bp, synthetic construct
  source 1..75: mol_type = other DNA
acgttgaaaccccgaaacaggccgccgtgctgggcgcaggcattatgggcggcggtatcgcttaccagtccgcgt

SEQ ID NO: 819304 - DNA, 75 bp, synthetic construct
  source 1..75: mol_type = other DNA
gggcatcatgccgggctttggcggctccgtgcgtatgccacgtatgctgggcgctgacagtgcgctggaaatcat

SEQ ID NO: 819305 - DNA, 75 bp, synthetic construct
  source 1..75: mol_type = other DNA
accttgactggctggaagatggcattgccgaactggtatttgatgccccaggctcagttaataaactcgacactg

SEQ ID NO: 819306 - DNA, 75 bp, synthetic construct
  source 1..75: mol_type = other DNA
gcatgggcggacaaaagagcaggggtatcgcgtggagcatatcgactggcaggcgattggcgagattcgccagcg

SEQ ID NO: 819307 - DNA, 75 bp, synthetic construct
  source 1..75: mol_type = other DNA
ttttctggttgcgtgcggcgaaccttaccgctgctgaaaatattggccgctggcagactgagcttgaaatagctg

SEQ ID NO: 819308 - DNA, 75 bp, synthetic construct
  source 1..75: mol_type = other DNA
agcgccgccgagaaagcaatgatgcgcaatacagttcgtattgagtccatcgttggcacgcttgcgacggtagga

SEQ ID NO: 819309 - DNA, 75 bp, synthetic construct
  source 1..75: mol_type = other DNA
ggagtggacaaggtcgtcggccttctgttattgcagaagcaataaaagccggaggttctcttgatgattttctta

SEQ ID NO: 819310 - DNA, 75 bp, synthetic construct
  source 1..75: mol_type = other DNA
acagtcgcacggtgcggactttgctttcccaagccagacactgtatatggagaataatacgccaccagatcagac

SEQ ID NO: 819311 - DNA, 75 bp, synthetic construct
  source 1..75: mol_type = other DNA
gtagaaaacccaggacgaatgaccaaccgccgcattaccacgaccattggtttacgttatgaggatgcggcaaaa

SEQ ID NO: 819312 - DNA, 75 bp, synthetic construct
  source 1..75: mol_type = other DNA
gaccgtccctttagcatcggtgactggatccgttccccggacagaaatatcgaaggtacggtatcggaaattggc

SEQ ID NO: 819313 - DNA, 75 bp, synthetic construct
  source 1..75: mol_type = other DNA
atcgaacgcgcggatcacttcggtctggcgcagctgcaccagttgcgcggtcgcgtcgggcgttcgcaccaccag

SEQ ID NO: 819314 - DNA, 75 bp, synthetic construct
  source 1..75: mol_type = other DNA
ataaacttggcggcgatgcgtggtcacgcgcgcggcagaaagcggcggaaaaagtgcgtgatgtggcggcggaat

SEQ ID NO: 819315 - DNA, 75 bp, synthetic construct
  source 1..75: mol_type = other DNA
agggaaaatcgatattttgatcggcacgcacaaactgctgcaaaacgacgtcaagtttaaagatttgggcttgct

SEQ ID NO: 819316 - DNA, 75 bp, synthetic construct
  source 1..75: mol_type = other DNA
atcgatacagtacgtcatctggcgctgatttgtgaaagcgatctgctcggtgaacgtgttgcccgtcgtcgtcag

SEQ ID NO: 819317 - DNA, 75 bp, synthetic construct
  source 1..75: mol_type = other DNA
tcacgcgcgcggcagaaagcggcggaaaaagtgcgtgatgtggcggcggaattgctggatatctacgcgcaacgc

SEQ ID NO: 819318 - DNA, 75 bp, synthetic construct
  source 1..75: mol_type = other DNA
gcaaaaacgtctcgaagcgattgcgtctctggaagaccttggcgcgggctttgcgctggcaacgcacgatctgga

SEQ ID NO: 819319 - DNA, 75 bp, synthetic construct
  source 1..75: mol_type = other DNA
tttttaccgcgctgatttatctcgtggcgtcgctgttcttccggctgatatgtacggcctgccgtcagcgtcttg

SEQ ID NO: 819320 - DNA, 75 bp, synthetic construct
  source 1..75: mol_type = other DNA
ccgtcgaatcatccggtggcgggaataacggtgaatttcaccatgccacaggacgtggcggcaaactttaccctc

SEQ ID NO: 819321 - DNA, 75 bp, synthetic construct
  source 1..75: mol_type = other DNA
tgaactttactgcggatacgctcactgcgcaggttaatcttaacgttaccgaggacaattttatcgccaataaca

SEQ ID NO: 819322 - DNA, 75 bp, synthetic construct
  source 1..75: mol_type = other DNA
taacgctatatatacgaccaatcacgacggcaatttttacgcaagctttaccgctacaaaagccggggtttatca

SEQ ID NO: 819323 - DNA, 75 bp, synthetic construct
  source 1..75: mol_type = other DNA
gctcacagcgcaggttaatcttaacgttaccgaggacaactttatcgctaataacgtcgggatgaccaggctgca

SEQ ID NO: 819324 - DNA, 75 bp, synthetic construct
  source 1..75: mol_type = other DNA
atggctacacacttccccgtgcagatcatttaaaccatagtcgttcccgaggcatcgggtcactgtacagtgaat

SEQ ID NO: 819325 - DNA, 75 bp, synthetic construct
  source 1..75: mol_type = other DNA
gtaccacaatacaattcactcgcgcagaagacaaaataatgagcggtacagtgtcagtcaatggtactgacctac

SEQ ID NO: 819326 - DNA, 75 bp, synthetic construct
  source 1..75: mol_type = other DNA
ttcgcgtcttggcaacattatgcgtgccgatgcgctggggggaaccgttgggctgtcaggcgattgtcgggcttt

SEQ ID NO: 819327 - DNA, 75 bp, synthetic construct
  source 1..75: mol_type = other DNA
ggctaagagcgaaccatacgctcagcgaaggcgcagagatccatctccctgcggacagtcgcctgacgccctctg

SEQ ID NO: 819328 - DNA, 75 bp, synthetic construct
  source 1..75: mol_type = other DNA
ggtagcctgcccggtcggctgtatctcgctgcaaaaagcagaaaccaaagacggtcgctggtatccggaattttt

SEQ ID NO: 819329 - DNA, 75 bp, synthetic construct
  source 1..75: mol_type = other DNA
ctcccgtgatgattaaattcactgtacagatgttgctggaaaaagggctgcagccggaacaaatctgggtggatt

SEQ ID NO: 819330 - DNA, 75 bp, synthetic construct
  source 1..75: mol_type = other DNA
caatctcattctgaccctggatgaaggcgaggcggatgaacgttaccgtaccgggcgggtcactgaccatctggc

SEQ ID NO: 819331 - DNA, 75 bp, synthetic construct
  source 1..75: mol_type = other DNA
gttattgcggcagggcaaacttattttgctatccagacccgacggcaggagctggcgctttcaggcaacttcgtg

SEQ ID NO: 819332 - DNA, 75 bp, synthetic construct
  source 1..75: mol_type = other DNA
cgccacaatcgttgataataatggctttccggtaaaaggtgtgactgtgagctttaccagcagaacaaaatctgc

SEQ ID NO: 819333 - DNA, 75 bp, synthetic construct
  source 1..75: mol_type = other DNA
tttttaccgcgctgatttatctcgtggcatcggtgttcttccggctgatacgtacggcctgccgtcagcgttttg

SEQ ID NO: 819334 - DNA, 75 bp, synthetic construct
  source 1..75: mol_type = other DNA
tttacaaccatgcacagtatctcgataagcgcagagaaatgatgcagtggtgggcggactggcttgatggtttaa

SEQ ID NO: 819335 - DNA, 75 bp, synthetic construct
  source 1..75: mol_type = other DNA
tttacaaccatgctcagtatctcgataaacgcagagaaatgatgcagtggtgggcggactggattgatgaaaagg

SEQ ID NO: 819336 - DNA, 75 bp, synthetic construct
  source 1..75: mol_type = other DNA
ggcatcggtgttcttccggctgatacgtacggcctgctgtcagcgttttgaggggcgggaaccatgtcaaggctg

SEQ ID NO: 819337 - DNA, 75 bp, synthetic construct
  source 1..75: mol_type = other DNA
cagcacgattatgaacgagcacgaatggcctgctgacgctattgaagtgcaactggcacatgccaacggcggatc

SEQ ID NO: 819338 - DNA, 75 bp, synthetic construct
  source 1..75: mol_type = other DNA
tttttactgcgctgatttatctcgtggcgtcgctgtttttccggctgatacgcacggcctgccgtcagcgtcttg

SEQ ID NO: 819339 - DNA, 75 bp, synthetic construct
  source 1..75: mol_type = other DNA
gtgaaagatccgtcgaatcatccggtggcggggataacggtcaacttcaccatgccacaggacgttgcggcaaac

SEQ ID NO: 819340 - DNA, 75 bp, synthetic construct
  source 1..75: mol_type = other DNA
ttttgtcggcgactcgagtaccgcgcaggttgatctgcagaagtcgaaaaatgaagtggtcgctgacggcaatga

SEQ ID NO: 819341 - DNA, 75 bp, synthetic construct
  source 1..75: mol_type = other DNA
catacaagtcgacgttgatgcgtctacggcacatctcacctcgctatatacactttatgacacacaattggcagg

SEQ ID NO: 819342 - DNA, 75 bp, synthetic construct
  source 1..75: mol_type = other DNA
attaacgtcattaacagcggtgaccgatcaaaacggaatcgcgacaacaagcgtgaaaggagcgatgacaggtag

SEQ ID NO: 819343 - DNA, 75 bp, synthetic construct
  source 1..75: mol_type = other DNA
actgatgctgaaggcaaagcgaaagtcacgctgaaaggtacaaaagcaggcgctcatactgttacagcatcgatg

SEQ ID NO: 819344 - DNA, 75 bp, synthetic construct
  source 1..75: mol_type = other DNA
cgaacagggtaaggctaccgtcacttataccaatacccgctcctcgatagaatcaggagcgagaccggataccgt

SEQ ID NO: 819345 - DNA, 75 bp, synthetic construct
  source 1..75: mol_type = other DNA
gcactgggtagtcgtgggcgcgtgctgctgcgtaaatccggtaccgagccgttaattcgcgtaatggtagaaggc

SEQ ID NO: 819346 - DNA, 75 bp, synthetic construct
  source 1..75: mol_type = other DNA
ttgaatgccgggcaggtttttgctgttcgtctggcacgttttattggttgcacgcaaaagcggaatattgatgga

SEQ ID NO: 819347 - DNA, 75 bp, synthetic construct
  source 1..75: mol_type = other DNA
agtgaagtctttacgtatgcaaccgtgtattaacggtatttactttgaaaaaaactggccagactttttaaatgg

SEQ ID NO: 819348 - DNA, 75 bp, synthetic construct
  source 1..75: mol_type = other DNA
gtgcgacttatcacatcgcgccgaacgtgctgcgtgaactgggggcgaacgttatcgctatcggttgtgagccga

SEQ ID NO: 819349 - DNA, 75 bp, synthetic construct
  source 1..75: mol_type = other DNA
ccgtaagatcattatcggcaaagatacccgtatttctggctatatgttggagtcggcgctggaagccggcctggc

SEQ ID NO: 819350 - DNA, 75 bp, synthetic construct
  source 1..75: mol_type = other DNA
gttaattcgcgtaatggtagaaggcgaagacgaagcgcaggtgactgaatttgcgcatcgtatcgcagatgcagt

SEQ ID NO: 819351 - DNA, 75 bp, synthetic construct
  source 1..75: mol_type = other DNA
aaatacaacgttagacgcgtactaattaatccaggtcaaaaatctcaacgcaaacacacaaccatagatcagagc

SEQ ID NO: 819352 - DNA, 75 bp, synthetic construct
  source 1..75: mol_type = other DNA
aagcctgatatttatcgtgcgcaagaatttttaaaaacaggtgaatattattggaacagtggtatgttcctattt

SEQ ID NO: 819353 - DNA, 75 bp, synthetic construct
  source 1..75: mol_type = other DNA
cgcatgctcatgctggcaagcttgtaacatttggtataatacctacaacacctgaaactggttatggatatattc

SEQ ID NO: 819354 - DNA, 75 bp, synthetic construct
  source 1..75: mol_type = other DNA
aaacgtaatattgatggagatatagcacagctggtagctcaggcactggcttctataagagagatcattactcag

SEQ ID NO: 819355 - DNA, 75 bp, synthetic construct
  source 1..75: mol_type = other DNA
tgcccggttgttttgccgtgggggaagttgctggcacacacggcgtcactcgccctggtggtgcggcattgaatg

SEQ ID NO: 819356 - DNA, 75 bp, synthetic construct
  source 1..75: mol_type = other DNA
aattattctcaaaatattgtcatttgcaacgaagagcatcgttttcttgttgctgaacagctccgagaaagtaat

SEQ ID NO: 819357 - DNA, 75 bp, synthetic construct
  source 1..75: mol_type = other DNA
gggggcaactgatgttcgtgcgctacaggcacgcgtattggctgaaaaagcagatctcggcattgcctttgacgg

SEQ ID NO: 819358 - DNA, 75 bp, synthetic construct
  source 1..75: mol_type = other DNA
cgcaggaaaatacacacaccgtctcaggctcaagaagcaattacccgctggactgccacttgttgcgatccgcca

SEQ ID NO: 819359 - DNA, 75 bp, synthetic construct
  source 1..75: mol_type = other DNA
cgcagcaaaatacacacaccgtctcaggctcaagaagcaattacccgctggtctgccacttgttgcgatccgtca

SEQ ID NO: 819360 - DNA, 75 bp, synthetic construct
  source 1..75: mol_type = other DNA
cgcagaaaaatacacacaccgtctcaggctcaagaagcaattacccgctgggctgccacttgttgcgatccggca

SEQ ID NO: 819361 - DNA, 75 bp, synthetic construct
  source 1..75: mol_type = other DNA
acgggtaatcgccgcagtaaaatacacacaccgactcaggctcaagaagcaattgcccgctggactgccacttgt

SEQ ID NO: 819362 - DNA, 75 bp, synthetic construct
  source 1..75: mol_type = other DNA
acgggtaatcgccgcagaaaaatacacacaccgtctcaggctcaagaagcaattgcccgctggactgccacttgt

SEQ ID NO: 819363 - DNA, 75 bp, synthetic construct
  source 1..75: mol_type = other DNA
cgcaggaaaatacacacaccgtctcaggctcaagaagcaattacccgctggcctgccacttgttgcgatccgaca

SEQ ID NO: 819364 - DNA, 75 bp, synthetic construct
  source 1..75: mol_type = other DNA
actgacgtttgtggtgtttgcgctgaacttcctgacgttctggtgggagctggcgcggtggcttgacagctggat

SEQ ID NO: 819365 - DNA, 75 bp, synthetic construct
  source 1..75: mol_type = other DNA
gcatcgcataacccgttctacgataacggcattaaattcttttctattgacggtactaagctgccggatgcagtt

SEQ ID NO: 819366 - DNA, 75 bp, synthetic construct
  source 1..75: mol_type = other DNA
tttgctcgcgcaaaagtgggcgaccgttatgtactggaaaaaatgcaggagaaaggctggcgcatcggcgcggag

SEQ ID NO: 819367 - DNA, 75 bp, synthetic construct
  source 1..75: mol_type = other DNA
gtatttcgtatatacatacctcgctggtcagtattagcatagctaccctgttgaggctgccaaatggcccccgaa

SEQ ID NO: 819368 - DNA, 75 bp, synthetic construct
  source 1..75: mol_type = other DNA
ttgtcagttaccgtacaagccaggacggacgacgggagtttgaaactagtgaactgatccgggcatacggcgaat

SEQ ID NO: 819369 - DNA, 75 bp, synthetic construct
  source 1..75: mol_type = other DNA
ggggcggacgaaggcaacaaggggatgctctcgttacccagcatcgagaatgcattgtatggtgcgttttttgtg

SEQ ID NO: 819370 - DNA, 75 bp, synthetic construct
  source 1..75: mol_type = other DNA
cattggattatacttgccgggacagcaaaagtaacatcaaataatcaagttcaattcctcactgaaaatcaatca

SEQ ID NO: 819371 - DNA, 75 bp, synthetic construct
  source 1..75: mol_type = other DNA
caccttccctgtgattattctctttttcctcctgttctgactctgattactgctctgactctgattactgctgct

SEQ ID NO: 819372 - DNA, 75 bp, synthetic construct
  source 1..75: mol_type = other DNA
atgacctgtcagaaatcacatcaccttcccttttttgattattctctttttcctcctgttctgactctgattact

SEQ ID NO: 819373 - DNA, 75 bp, synthetic construct
  source 1..75: mol_type = other DNA
tcgcaaaagccgggaaacgtttgcagcggtgtacacattacttgaccggtctgcccgccagtgggcgcaggcatt

SEQ ID NO: 819374 - DNA, 75 bp, synthetic construct
  source 1..75: mol_type = other DNA
caatattgctgcatcagacgtagagcaacttgctataccccagaaactctggcgcgtaattgaggaaacgacagg

SEQ ID NO: 819375 - DNA, 75 bp, synthetic construct
  source 1..75: mol_type = other DNA
agaaacttattatcgtcgacgcgttcaggacatcgggctggtcattactggctgtacacatgttcaggaaaacgg

SEQ ID NO: 819376 - DNA, 75 bp, synthetic construct
  source 1..75: mol_type = other DNA
tcgacccacgtattggcaaccattacaacaatccgtcgtttggttatggtggttattgtttgccgaaagatacca

SEQ ID NO: 819377 - DNA, 75 bp, synthetic construct
  source 1..75: mol_type = other DNA
cccctaaccagcgcaacgggaaggggaaccggatgatctctggtgacttctatccgacgtttctgttttttggtg

SEQ ID NO: 819378 - DNA, 75 bp, synthetic construct
  source 1..75: mol_type = other DNA
gagggggctatcaaacaagatattccggtattgctaacgagtagctcggaggcggaagcgatcaagctttttgcc

SEQ ID NO: 819379 - DNA, 75 bp, synthetic construct
  source 1..75: mol_type = other DNA
atccatcgcctggtgatgaaggctggctcagataatttccgctcttctgcgatacagggagtcatgaagcgtatt

SEQ ID NO: 819380 - DNA, 75 bp, synthetic construct
  source 1..75: mol_type = other DNA
tgaaagaactggaagaccgtggcatccccgttcgtgagcgtctgctgctgtctgaagcatgtccgctgatccttg

SEQ ID NO: 819381 - DNA, 75 bp, synthetic construct
  source 1..75: mol_type = other DNA
aaccgcagctggacacgctattttctggcgcgggaattgcgtaaatcactgaagccggagcgacgacgcagatga

SEQ ID NO: 819382 - DNA, 75 bp, synthetic construct
  source 1..75: mol_type = other DNA
tcggacgagctttcagaatcactgaaagataaattgtctggatatgataatagcattacacctgaattttgtatt

SEQ ID NO: 819383 - DNA, 75 bp, synthetic construct
  source 1..75: mol_type = other DNA
catctctccggtgatgccccgcgcagggcggggcggttatcacattcagcccgatcagaacgggatatcgtctga

SEQ ID NO: 819384 - DNA, 75 bp, synthetic construct
  source 1..75: mol_type = other DNA
catccagatacgaagggagtgaccggagtgtcctattaaactctaaagcaatcatcatcccacctcaccaaagct

SEQ ID NO: 819385 - DNA, 75 bp, synthetic construct
  source 1..75: mol_type = other DNA
tttgctggctgtgttgtgttgttgcccatagcgaaatgctgaatgtcgaacagtcggggctgtttcgcgcctggt

SEQ ID NO: 819386 - DNA, 75 bp, synthetic construct
  source 1..75: mol_type = other DNA
cctgctttgatcatttgtaatgaatcacatcgtttcattgttgctgaacaattacgtaaagttggtttaaagcat

SEQ ID NO: 819387 - DNA, 75 bp, synthetic construct
  source 1..75: mol_type = other DNA
cagatatgcgcataacgcctttctttcatcttctcagacaatgtctgtttaatcagaagcgttgtgttcacccac

SEQ ID NO: 819388 - DNA, 75 bp, synthetic construct
  source 1..75: mol_type = other DNA
gcaatctggcagtccgtgcctgcattgtttccattgacggttctttgcgacactgctttgagttccgtgaaggct

SEQ ID NO: 819389 - DNA, 75 bp, synthetic construct
  source 1..75: mol_type = other DNA
caggttccaacccgattaaggatgcagtggacattttacctgaggggatcagaaaaatcgttctcggcaggctga

SEQ ID NO: 819390 - DNA, 75 bp, synthetic construct
  source 1..75: mol_type = other DNA
accaaaatcggtggcagtcgtggtgaaagcggtgaaatctgccgttgtcggtggtttaaagaaagcctggaattt

SEQ ID NO: 819391 - DNA, 75 bp, synthetic construct
  source 1..75: mol_type = other DNA
aaagcggctgctgaaaaggctgcagctgataagaaagcggcagccgacaaaaaagcagcagaaaaagcggctgct

SEQ ID NO: 819392 - DNA, 75 bp, synthetic construct
  source 1..75: mol_type = other DNA
aaaaggcgcatgagatcggtgagatcggcgcaggtatccagttggggccaaatgcgttttcggcgttggatagtc

SEQ ID NO: 819393 - DNA, 75 bp, synthetic construct
  source 1..75: mol_type = other DNA
gcgggataaggagtatgaagatttataccgcaatttgcttccctccctggatctcatcctgtgggtaataaaagg

SEQ ID NO: 819394 - DNA, 75 bp, synthetic construct
  source 1..75: mol_type = other DNA
tgtgggtaataaaaggtgacgatcgggccttttctgcggatgagcatttctacaacaatgttctgctccctgctg

SEQ ID NO: 819395 - DNA, 75 bp, synthetic construct
  source 1..75: mol_type = other DNA
agtaccggcttacgccgggcttcggcggttttactcctgtatcatatgaaacaacagagtgccgccttccatgcc

SEQ ID NO: 819396 - DNA, 75 bp, synthetic construct
  source 1..75: mol_type = other DNA
gcggccctgacggcccgctaacgcggagatacgccccgacttcgggtaaaccctcgtcgggaccactccgaccgc

SEQ ID NO: 819397 - DNA, 75 bp, synthetic construct
  source 1..75: mol_type = other DNA
tgaaagaactggaagaccgtggcatccctgttcgtgagcgtctgctgctgtccgaagcatgtccgctgatccttg

SEQ ID NO: 819398 - DNA, 75 bp, synthetic construct
  source 1..75: mol_type = other DNA
gcctgtaacggcacagtgcgcaaagtaccggccctggcgggagaacgtccatcgctgtggagcgttgtcgggttt

SEQ ID NO: 819399 - DNA, 75 bp, synthetic construct
  source 1..75: mol_type = other DNA
aaagaaaaacctaccgagttggtaatggcattgtggggcagtcgaatatctggaacgaaatgatcatgagacgga

SEQ ID NO: 819400 - DNA, 75 bp, synthetic construct
  source 1..75: mol_type = other DNA
gaattacgatggtgaacctctgtatatcttggtttctctttggtgtaaattgcaggagaaatggatttctcgcaa

SEQ ID NO: 819401 - DNA, 75 bp, synthetic construct
  source 1..75: mol_type = other DNA
taagcacattccgatgaataaatatttcctcaagcaacagctggcctgggtgccatttcttggcctggcgtgctg

SEQ ID NO: 819402 - DNA, 75 bp, synthetic construct
  source 1..75: mol_type = other DNA
cccggcaggtcgaggctttctttgccgcacatccgcagctcaccgagcgcgcccgggccctgatcccgattattc

SEQ ID NO: 819403 - DNA, 75 bp, synthetic construct
  source 1..75: mol_type = other DNA
tttcgggttgtccggcctgatacatcagagcaatacattgcgttaaaaacggctgttcagtctctgatgccacgg

SEQ ID NO: 819404 - DNA, 75 bp, synthetic construct
  source 1..75: mol_type = other DNA
tctccggccgcgctgatgaaagagatgaaagaactggaagaccgtggcatccccgttcgtgagcgtctgctgctg

SEQ ID NO: 819405 - DNA, 75 bp, synthetic construct
  source 1..75: mol_type = other DNA
gatcttgatcggcgagttgcacatctgccggatactaagaatggtaatgcccgcgatgtccctttatcaacgaaa

SEQ ID NO: 819406 - DNA, 75 bp, synthetic construct
  source 1..75: mol_type = other DNA
ccgcgatgtccccttatcaacgaaagcaataaaaatgctctccaatctcaaggaacacgctaaacttgggactga

SEQ ID NO: 819407 - DNA, 75 bp, synthetic construct
  source 1..75: mol_type = other DNA
tggcctgttgattcatagccattacggttttgccgcactggctcaccacaatggtattacccttactggcgtggg

SEQ ID NO: 819408 - DNA, 75 bp, synthetic construct
  source 1..75: mol_type = other DNA
gtggacagtgaaaaatacattgatgatgtattcaccgaaggtcacgggacgctgtatgccagcgatggtcgtacc

SEQ ID NO: 819409 - DNA, 75 bp, synthetic construct
  source 1..75: mol_type = other DNA
aactgcccggttttaacaagaaaaaagaagtaacggactcttcaactacttttgaagagaaaaatgtattgatgc

SEQ ID NO: 819410 - DNA, 75 bp, synthetic construct
  source 1..75: mol_type = other DNA
attgtgttgcgattgaatatagtggcgaaatttacgatattgataatttaaggagggcacacctcatttgcatga

SEQ ID NO: 819411 - DNA, 75 bp, synthetic construct
  source 1..75: mol_type = other DNA
atgggcgcgccgtggacagtgaaaaaatacattgatgatgtattcaccgaaggtcacgggacgctgtatgccagc

SEQ ID NO: 819412 - DNA, 75 bp, synthetic construct
  source 1..75: mol_type = other DNA
atgtgttcaccgaaggtcacgggacgctgtatgccagcgatggacgtactcgtaaagatccgtcgaaaaaatacg

SEQ ID NO: 819413 - DNA, 75 bp, synthetic construct
  source 1..75: mol_type = other DNA
cgaaaaaatacggttccggcggcctggtacagggcaaaaaatatatgctttctctgacctggaacgcaccaatgg

SEQ ID NO: 819414 - DNA, 75 bp, synthetic construct
  source 1..75: mol_type = other DNA
cgaacgcagtcccccccattaaaaatgtgtttccgcttttgtttttcgttcttgtcttaattactaattataata

SEQ ID NO: 819415 - DNA, 75 bp, synthetic construct
  source 1..75: mol_type = other DNA
agttcgcttagcgaagaggcgctgattcaggcgatggtggataatccgaagctgatggagcgcccgattgtggtc

SEQ ID NO: 819416 - DNA, 75 bp, synthetic construct
  source 1..75: mol_type = other DNA
gcgcaaaattaatcgctcctgttcatgaaacagaagaagaactacatcaggcatatatcgacgataaaaaaaact

SEQ ID NO: 819417 - DNA, 75 bp, synthetic construct
  source 1..75: mol_type = other DNA
gagttgatagcgcagttttcaactggtaaccaaacacgtataaaacaaggattaatcgcaaaagcgcctcttgaa

SEQ ID NO: 819418 - DNA, 75 bp, synthetic construct
  source 1..75: mol_type = other DNA
ctcttgaaggttggcattatggctctaaggaaattgttaaagaattccatatatatcatagtgttgcgattgaat

SEQ ID NO: 819419 - DNA, 75 bp, synthetic construct
  source 1..75: mol_type = other DNA
atgaaattaaagaaggataaagatagcacaattactaaaaacgacactgttttccctgttaacagtttctttgtc

SEQ ID NO: 819420 - DNA, 75 bp, synthetic construct
  source 1..75: mol_type = other DNA
atgctggggatgaatagcgctcgtgaattgatgcgccaaaaagaggatctttataaagaactgaacctggctgac

SEQ ID NO: 819421 - DNA, 75 bp, synthetic construct
  source 1..75: mol_type = other DNA
cagcgatgaagctgattaataaaaactcgaaagagtttgaggaggccattgtccgccggctggtgagtccgacga

SEQ ID NO: 819422 - DNA, 75 bp, synthetic construct
  source 1..75: mol_type = other DNA
gctactcgctggcgatgtaccagtggaaacagcgtgaccagggtatgacgaaggacagaaaggtgctgtcggata

SEQ ID NO: 819423 - DNA, 75 bp, synthetic construct
  source 1..75: mol_type = other DNA
atgtttctcgtattaccggcggtgtggctgggggcattatcctgggctggagttaatatcggacaggctatttct

SEQ ID NO: 819424 - DNA, 75 bp, synthetic construct
  source 1..75: mol_type = other DNA
atccgtcgtctggtcagcccggaaagcctgacggtctcacagaatggtcacgtgtatgccggctatggcggcaac

SEQ ID NO: 819425 - DNA, 75 bp, synthetic construct
  source 1..75: mol_type = other DNA
gttactcacgtgccctgtatgactggaaagcgaaagatcagggaaaaacacaggatgaaaaaacgttacaggata

SEQ ID NO: 819426 - DNA, 75 bp, synthetic construct
  source 1..75: mol_type = other DNA
caacacaagcaggagaacaaggtggtgaagttgctaaaaatgctggcactgcttttatgaagggagtaaatggaa

SEQ ID NO: 819427 - DNA, 75 bp, synthetic construct
  source 1..75: mol_type = other DNA
aataaaattacgtaatcgtatcgttatggcgcctatgacgacctggtctgcgaatcctgatggaaccatctctga

SEQ ID NO: 819428 - DNA, 75 bp, synthetic construct
  source 1..75: mol_type = other DNA
acgggtaatcgccgcaggaaaatacacacaccgtctcaggctcaagaagcaattacccgctggactgccacttgt

SEQ ID NO: 819429 - DNA, 75 bp, synthetic construct
  source 1..75: mol_type = other DNA
acgggtaatcgccgcagtaaaatacacacaccggctcaggctcaagaagcaattacccgctggactgccacttgt

SEQ ID NO: 819430 - DNA, 75 bp, synthetic construct
  source 1..75: mol_type = other DNA
gagggtattaatagaacagggcatattacacaacaagcggggcagcatgccggaagccttgttaaaagaataaaa

SEQ ID NO: 819431 - DNA, 75 bp, synthetic construct
  source 1..75: mol_type = other DNA
gtgccgttgatcctggcttttgcggcctatgaatttaagacggtgattacccagacgtttgtcatttttgctgtt

SEQ ID NO: 819432 - DNA, 75 bp, synthetic construct
  source 1..75: mol_type = other DNA
agtgaacgcaatatgcaggtatcgcagaatgggcgcgtttatcccggctatggtggcaatgtcgatggcaccgtc

SEQ ID NO: 819433 - DNA, 75 bp, synthetic construct
  source 1..75: mol_type = other DNA
cgtcagattatcgaaggtgtttgtctcgatccgcgtattggcaaccattacaacaatccgtcgtttggttatggt

SEQ ID NO: 819434 - DNA, 75 bp, synthetic construct
  source 1..75: mol_type = other DNA
tgatcgcgtcaacgcctggaacatcagctactgggataccaaagttttcgaagccacccttaaaaatgcccgggg

SEQ ID NO: 819435 - DNA, 75 bp, synthetic construct
  source 1..75: mol_type = other DNA
ttaagcctgacgatatcatccaggtgcaggacgccactaccggatcatgggtctcctatcagtctggcatgaccg

SEQ ID NO: 819436 - DNA, 75 bp, synthetic construct
  source 1..75: mol_type = other DNA
ttcaaacaacaagccgacgtcattatctccaaccgtatggcagaagagcttaaggatgtggcagacaaagtctac

SEQ ID NO: 819437 - DNA, 75 bp, synthetic construct
  source 1..75: mol_type = other DNA
gggagaaggtaagctggatagtctcggcggtttcgcctatctggcagaactgtcaaaaaatacgcccagtgcggc

SEQ ID NO: 819438 - DNA, 75 bp, synthetic construct
  source 1..75: mol_type = other DNA
cgactaccttcagttgatgcgtgtaccgtcgttatctgacaacagaactctggaaattgctgaaatctcccgatc

SEQ ID NO: 819439 - DNA, 75 bp, synthetic construct
  source 1..75: mol_type = other DNA
ccgaaacaggtgagacaaagcaaacagctgaatacagcttaaaaacccctccgcaatcgatagaagcggaacagt

SEQ ID NO: 819440 - DNA, 75 bp, synthetic construct
  source 1..75: mol_type = other DNA
gtcaccgattgttgataaggagattgaagagtatctggcgactaaagatctcaatttccgcgctacgacagataa

SEQ ID NO: 819441 - DNA, 75 bp, synthetic construct
  source 1..75: mol_type = other DNA
aagccgatatcatcatctccaaccgtatggcagaagagcttaaagatgtcgcggataaggtctacacccgagatc

SEQ ID NO: 819442 - DNA, 75 bp, synthetic construct
  source 1..75: mol_type = other DNA
tcatcggtgagcgttcagaacgcgcagaacgttttgcggcgttgttacaggaaggcgcgattaagcaaaatatcc

SEQ ID NO: 819443 - DNA, 75 bp, synthetic construct
  source 1..75: mol_type = other DNA
tggttatggtggttattgtctgccgaaagataccaagcagttactggcgaactaccagtctgtgccgaataacct

SEQ ID NO: 819444 - DNA, 75 bp, synthetic construct
  source 1..75: mol_type = other DNA
caaccctgtttaccgactctactgaagcagaagcgattaaactttttgcaaatacctacctggcgatgcgcgtgg

SEQ ID NO: 819445 - DNA, 75 bp, synthetic construct
  source 1..75: mol_type = other DNA
cattcaggggattatgaagcgtatcaaggcgaaaggcgttgaagtgatcatatacgagccagtgatgaaagaaga

SEQ ID NO: 819446 - DNA, 75 bp, synthetic construct
  source 1..75: mol_type = other DNA
cagcaaacttgcccaatatgaggattatctctcagctaaaaatgatgctggccttgagggcatggaaggtattgc

SEQ ID NO: 819447 - DNA, 75 bp, synthetic construct
  source 1..75: mol_type = other DNA
acctggccactttctgccagacctgggacgacgagaaagtccataaattgatggatttatcaataaagaaaaact

SEQ ID NO: 819448 - DNA, 75 bp, synthetic construct
  source 1..75: mol_type = other DNA
ttcacggcatggcagagcagggtagcgcgccgaaaattttcagcaaaacctcgcgtcgcggtattccgtgggtca

SEQ ID NO: 819449 - DNA, 75 bp, synthetic construct
  source 1..75: mol_type = other DNA
tcgcgttatgcgcaggaaaacctcggcccgctggcaggttacattaccggctggacctactgctttgaaatcctt

SEQ ID NO: 819450 - DNA, 75 bp, synthetic construct
  source 1..75: mol_type = other DNA
gcacagtactatgaattcctgcgcctcggtcgtgaaggctatacaaaagtacagaacgcatcccagcgcacgttc

SEQ ID NO: 819451 - DNA, 75 bp, synthetic construct
  source 1..75: mol_type = other DNA
acctggccactttctgccagacctgggacgacgagaacgtccataaattgatggatttttctataaagaaaaact

SEQ ID NO: 819452 - DNA, 75 bp, synthetic construct
  source 1..75: mol_type = other DNA
acctggccactttctgccagacctgggacgacgagaatgtccataaattgatggatttttccataaagaaaaact

SEQ ID NO: 819453 - DNA, 75 bp, synthetic construct
  source 1..75: mol_type = other DNA
agtactctgctgcgtctgctggcggggctggaaacaccaaccgcaggtgatgtactggcgggtataacaccgctg

SEQ ID NO: 819454 - DNA, 75 bp, synthetic construct
  source 1..75: mol_type = other DNA
gggtcggtgcgattagcggagctggaatcggaagtgttgcaaagggtgatgcagcgtggtgaatctgaaattcgc

SEQ ID NO: 819455 - DNA, 75 bp, synthetic construct
  source 1..75: mol_type = other DNA
tcttccgaggcctgtatgctcggcgggatggcgatgaaatggcgttggcgcaagcgtatggaagccgcaggtaag

SEQ ID NO: 819456 - DNA, 75 bp, synthetic construct
  source 1..75: mol_type = other DNA
gcattcttaacttcgttgtgttgactgcctcactgtcggcaatcaatagtgacgtatttggcgtaggtcgtatgt

SEQ ID NO: 819457 - DNA, 75 bp, synthetic construct
  source 1..75: mol_type = other DNA
gcggtccggtacaaatctgctggcataaattcgcccgctactgggatgtggagttgcgtgagatcccaatgcgcc

SEQ ID NO: 819458 - DNA, 75 bp, synthetic construct
  source 1..75: mol_type = other DNA
ctggcgggcagaaacagcgtgtggcgctggcaagagcgttgattcatcgaccgggtttattgttgcttgatgaac

SEQ ID NO: 819459 - DNA, 75 bp, synthetic construct
  source 1..75: mol_type = other DNA
gcacagtactatgaattcctgcgcctcggtcgtgaaggctatacaaaagtacagaacgcctccaagcgcacgttc

SEQ ID NO: 819460 - DNA, 75 bp, synthetic construct
  source 1..75: mol_type = other DNA
aacaccattggttcttccgaggcctgtatgctcggcgggatggcgatgaaatggcgttggcgcaagcgtatggaa

SEQ ID NO: 819461 - DNA, 75 bp, synthetic construct
  source 1..75: mol_type = other DNA
tacagaacgcctcttaccaggttgccgcttatctggcggatgaaatcgccaaactggggccgtatgagttcatct

SEQ ID NO: 819462 - DNA, 75 bp, synthetic construct
  source 1..75: mol_type = other DNA
ggtccgaactactcgattcacgttttggcgcgaagccgatttcgactatcgcagaatcaaaacgctttccgctgc

SEQ ID NO: 819463 - DNA, 75 bp, synthetic construct
  source 1..75: mol_type = other DNA
ggatggcgatgaaatggcgttggcgcaagcgtatggaagccgcaggcaaacccacggataaaccaaacctggtgt

SEQ ID NO: 819464 - DNA, 75 bp, synthetic construct
  source 1..75: mol_type = other DNA
atcgcagaatcaaaacgttttccgctgcacgaaatgcgtgatgatgtcgcattccagattatcaatgatgaatta

SEQ ID NO: 819465 - DNA, 75 bp, synthetic construct
  source 1..75: mol_type = other DNA
gctgaactgttgctggaagactacaaagcctccctgaaatatctcagcgaccacccgaaactgcaggatattgcc

SEQ ID NO: 819466 - DNA, 75 bp, synthetic construct
  source 1..75: mol_type = other DNA
gatccgaactactcgattcacgttttggcgccaagccgatttcgactatcgcagaatcaaaacgatttccgctgc

SEQ ID NO: 819467 - DNA, 75 bp, synthetic construct
  source 1..75: mol_type = other DNA
gatccgaactactcgattcacgttttggcgcaaagccgatttcgactatcgcagaatcaaaacgctttccgctgc

SEQ ID NO: 819468 - DNA, 75 bp, synthetic construct
  source 1..75: mol_type = other DNA
gcacagtactatgaattcctgcgcctcggtcgtgaaggctatacaaaagtacagaacgcgtccgaacgcacgttc

SEQ ID NO: 819469 - DNA, 75 bp, synthetic construct
  source 1..75: mol_type = other DNA
ggtccgaactactcgattcacgttttggcgccaagccgatttcgactatcgcagaatcaaaacggtttccgctgc

SEQ ID NO: 819470 - DNA, 75 bp, synthetic construct
  source 1..75: mol_type = other DNA
gctccgaactactcgattcacgttttggcgccaagccgatttcgactatcgcagaatcaaaacgctttccgctgc

SEQ ID NO: 819471 - DNA, 75 bp, synthetic construct
  source 1..75: mol_type = other DNA
gttccgaactactcgattcacgttttggcgccaagccgatttcgactatcgcagaatcaaaacgttttccgctgc

SEQ ID NO: 819472 - DNA, 75 bp, synthetic construct
  source 1..75: mol_type = other DNA
cttaccaggttgccgcttatctggcggatgaaatcgccaaactggggccgtatgagttcatctgtacgggtcgcc

SEQ ID NO: 819473 - DNA, 75 bp, synthetic construct
  source 1..75: mol_type = other DNA
ttgctggcgctgcgtgaagagctgaaagatgagctggaaatcgtaatgcgcgtctattttgaaaagccgcgcacc

SEQ ID NO: 819474 - DNA, 75 bp, synthetic construct
  source 1..75: mol_type = other DNA
caaaaactacaacagaatgatccaagataccctgtacttaaaggttttctggaaagaacgctacaactaatcgat

SEQ ID NO: 819475 - DNA, 75 bp, synthetic construct
  source 1..75: mol_type = other DNA
ggaatttggcgaatccgaccctgaaaggataaaatcctgcacaaacatcacacaaaaaaacatattaccaaatac

SEQ ID NO: 819476 - DNA, 75 bp, synthetic construct
  source 1..75: mol_type = other DNA
accaaagtacagaacgcctcttaccaggttgccgcttatctggcggatgaaatcgccaaactggggccgtatgag

SEQ ID NO: 819477 - DNA, 75 bp, synthetic construct
  source 1..75: mol_type = other DNA
tcaaaacgttttccgctgcacgaaatgcgtgatgatgtcgcattccagattatcaatgatgaattatatcttgat

SEQ ID NO: 819478 - DNA, 75 bp, synthetic construct
  source 1..75: mol_type = other DNA
ttcgcggcgaaatggagcgcggctggtatgacactggcgatattgtgcgttttgacgagcagggctttgtgcaga

SEQ ID NO: 819479 - DNA, 75 bp, synthetic construct
  source 1..75: mol_type = other DNA
atcgacaaagaagaatatccgcaatctgcagccatcgacctgcgttgcgtaaacatggttgccgatctgtggcat

SEQ ID NO: 819480 - DNA, 75 bp, synthetic construct
  source 1..75: mol_type = other DNA
caggggcttgcgaacggtgaactggtgcgcctgtttgcaccgtggagcggcatacccagattgttgtatgcctta

SEQ ID NO: 819481 - DNA, 75 bp, synthetic construct
  source 1..75: mol_type = other DNA
gggcgtcggcgtacagttgacgcgcaacggtacgattattccagcgaataacacggtatcgttaggagcagtagg

SEQ ID NO: 819482 - DNA, 75 bp, synthetic construct
  source 1..75: mol_type = other DNA
gcccggacgaaggcatcccggcggtttgcttcaaactcaaagatggtgaagatccgggatacaccctgtacgacc

SEQ ID NO: 819483 - DNA, 75 bp, synthetic construct
  source 1..75: mol_type = other DNA
gtctgcgtctgcgcggctggcaggttccggcattcactctcggcggtgaagccactgacatcgtggtgatgcgca

SEQ ID NO: 819484 - DNA, 75 bp, synthetic construct
  source 1..75: mol_type = other DNA
gtcagattgggactttcgccatcaacttctcccgtccggcgggccaggtgattgcacaatactatgagtttctgc

SEQ ID NO: 819485 - DNA, 75 bp, synthetic construct
  source 1..75: mol_type = other DNA
gattaaagtggctatcgatgccattaatgccgccggtgcgccgcactgcttcctgtccgtaacgaaatgggggca

SEQ ID NO: 819486 - DNA, 75 bp, synthetic construct
  source 1..75: mol_type = other DNA
cgcgaactgcaatttgccgatctccagtcccgtctggaaaaaggcgaggatctggaagccaccatccgtctgcgt

SEQ ID NO: 819487 - DNA, 75 bp, synthetic construct
  source 1..75: mol_type = other DNA
ggcggcgcaatgtctctgggtcgtaccgcatcgttcctcgatatctacattgagcgcgactttaaagccggcgtg

SEQ ID NO: 819488 - DNA, 75 bp, synthetic construct
  source 1..75: mol_type = other DNA
tcgcaccgggcgctaacccgatgcacggtcgtgaccgcaaaggtgcggtagcctcgctgacgtcggtggcgaaac

SEQ ID NO: 819489 - DNA, 75 bp, synthetic construct
  source 1..75: mol_type = other DNA
cgcacgtttgagcgggtggcaaacacctggcgactgcatgagcaggtgacggccaaatggttcaagtttgccggt

SEQ ID NO: 819490 - DNA, 75 bp, synthetic construct
  source 1..75: mol_type = other DNA
ccggaaaaatatcctaacctgacaatccgtgtctctggctacgccgtgcgcttcaacgcactgacccgtgaacag

SEQ ID NO: 819491 - DNA, 75 bp, synthetic construct
  source 1..75: mol_type = other DNA
aattaaagctttgccaacctatcgcaatgctgtgccgacccaatcgattctgactatcacctctaacgtggtgta

SEQ ID NO: 819492 - DNA, 75 bp, synthetic construct
  source 1..75: mol_type = other DNA
ccggtcagttgtttatggacccgaaacgcatgattgaagcctgcgacgaaaacccatcggcgtggtgccgacttt

SEQ ID NO: 819493 - DNA, 75 bp, synthetic construct
  source 1..75: mol_type = other DNA
cgtacgctggaaaacgtgacgcagcactggaatgtgtatgaggtcattaaggccaaatacctgaagtttgccggt

SEQ ID NO: 819494 - DNA, 75 bp, synthetic construct
  source 1..75: mol_type = other DNA
gtggaaagtcatctggtggaaggcaatcagagcctcgagagcggggagccgctggcctacggtaagagcatcacc

SEQ ID NO: 819495 - DNA, 75 bp, synthetic construct
  source 1..75: mol_type = other DNA
agtctcgtctggaaaaaggcgaagatctggaagccactatccgtctgcgtgaagaactggcagaacatcgtcgtg

SEQ ID NO: 819496 - DNA, 75 bp, synthetic construct
  source 1..75: mol_type = other DNA
acagcaccgctgatggacgacgtgctggattacgacaaagtgatggacagcctcgatcacttcatggactggctg

SEQ ID NO: 819497 - DNA, 75 bp, synthetic construct
  source 1..75: mol_type = other DNA
ataagctgtacgccgacgcatggcttggctttaaaggtacggactggaaaaacgaaattaatgtccgcgatttta

SEQ ID NO: 819498 - DNA, 75 bp, synthetic construct
  source 1..75: mol_type = other DNA
gtgctattacggcggctgaaatcaaaaccatcttcacttcccgccagtttctcgataaaggcaaactctggcatc

SEQ ID NO: 819499 - DNA, 75 bp, synthetic construct
  source 1..75: mol_type = other DNA
cagtttattctggggagcgggtgtcacgctgcgtttcctgttggtgctgtgggtaccggtggcgctgggcattac

SEQ ID NO: 819500 - DNA, 75 bp, synthetic construct
  source 1..75: mol_type = other DNA
gtgattttccctgaaggacgaatcaccaccactggctcgctgatgaaaatctacgatggcgcgggttttgtcgcg

SEQ ID NO: 819501 - DNA, 75 bp, synthetic construct
  source 1..75: mol_type = other DNA
ccgcgcaggttttggcggactgatcccgattcttctgatgttggtattggcataccccatcgcgttttattgcca

SEQ ID NO: 819502 - DNA, 75 bp, synthetic construct
  source 1..75: mol_type = other DNA
tcaccgtctggctggggatttctatcatggtcttctccttcaacttctcgccaatcgtctcttctttcgtggttt

SEQ ID NO: 819503 - DNA, 75 bp, synthetic construct
  source 1..75: mol_type = other DNA
agcaaaggtgaggcgctggtgcttttcaccacggacagtgaactggcgcgcgataaactgcaacagtatgcccgc

SEQ ID NO: 819504 - DNA, 75 bp, synthetic construct
  source 1..75: mol_type = other DNA
gatgatcattccgcttatgttcgtctgtttatttatcaatatgccggtatggctggcgatgttttgcggcattct

SEQ ID NO: 819505 - DNA, 75 bp, synthetic construct
  source 1..75: mol_type = other DNA
gattaattgccacaacgcaaacgccgtcgctgctggcaatcccattttttatcttattaggcaccttaatgagct

SEQ ID NO: 819506 - DNA, 75 bp, synthetic construct
  source 1..75: mol_type = other DNA
gtaacatcacgcaagtttcggtgggaaatttctttaaacaatccctgcctctactggcggctctactattaatgc

SEQ ID NO: 819507 - DNA, 75 bp, synthetic construct
  source 1..75: mol_type = other DNA
cctctatcagccagcagtggtatatgcgttggctgaaatcatttatcgacttcgttcctctcgacccgacgcaac

SEQ ID NO: 819508 - DNA, 75 bp, synthetic construct
  source 1..75: mol_type = other DNA
gctatttctctgttctcgctattattccaaccgctgtttggtctgctttctgacaaactcgggctgcgcaaatac

SEQ ID NO: 819509 - DNA, 75 bp, synthetic construct
  source 1..75: mol_type = other DNA
cctgttaaagaattgttcaattttccagaaaacaataatattacctataatcctgtaaaaggcattaatgggaaa

SEQ ID NO: 819510 - DNA, 75 bp, synthetic construct
  source 1..75: mol_type = other DNA
ttcgtaaagcgccgtctctggcgaaataccgtggtcgtctggataacgtgtttgtcaccgtgattggtctgctga

SEQ ID NO: 819511 - DNA, 75 bp, synthetic construct
  source 1..75: mol_type = other DNA
gacgcgctggcgagcaaacatctggcgggggcggcaatcgacgtattcccgacggaaccggcgaccaatagcgat

SEQ ID NO: 819512 - DNA, 75 bp, synthetic construct
  source 1..75: mol_type = other DNA
tacgcgctggcaagcaagcacctggctggagcggcaatcgacgtattcccgacggaaccggcgaccaacagcgat

SEQ ID NO: 819513 - DNA, 75 bp, synthetic construct
  source 1..75: mol_type = other DNA
aattgtataagaatggtgaatatcataaatcattgctattatttgaaaaagcaagcgaaatatatgatgctagtt

SEQ ID NO: 819514 - DNA, 75 bp, synthetic construct
  source 1..75: mol_type = other DNA
cagttatcacgccgatgctggccagtgatgagaagccagaagaagtggaaaagaaagtgcaaaaggttgttgaag

SEQ ID NO: 819515 - DNA, 75 bp, synthetic construct
  source 1..75: mol_type = other DNA
gtatggggatggattctgctgcaaccaattctttcgccaaggcatttcctggcgcaactaaactgaaacggagct

SEQ ID NO: 819516 - DNA, 75 bp, synthetic construct
  source 1..75: mol_type = other DNA
aagccgacgaagacgttgccgaaaaagcgttgcaggcaatgaaagttattccggggactatccgcgcccgtctgc

SEQ ID NO: 819517 - DNA, 75 bp, synthetic construct
  source 1..75: mol_type = other DNA
taatacatggatgatttcactttcgcaggaggattttaatacaaccaaaattttaacatcgttaagtctagatgc

SEQ ID NO: 819518 - DNA, 75 bp, synthetic construct
  source 1..75: mol_type = other DNA
atgaagtctgaaggtttaacgcaggcacaactggcagagcgtaatgctaactatgtgacagaaattaccctgcat

SEQ ID NO: 819519 - DNA, 75 bp, synthetic construct
  source 1..75: mol_type = other DNA
tccgtaaagcgccgtctctggcgaaataccgtggtcgtctggataacgtatttgttaccgtgattggtctgctga

SEQ ID NO: 819520 - DNA, 75 bp, synthetic construct
  source 1..75: mol_type = other DNA
gtataaaatcatattgttttaagcctgtaaatagtgatgattcaagcaggaaatattcaattatgaaagttagca

SEQ ID NO: 819521 - DNA, 75 bp, synthetic construct
  source 1..75: mol_type = other DNA
gatttctggttaaccccgaacggccgctatctcagccaggctgagtacagcagtccggcagatacgcttcagaaa

SEQ ID NO: 819522 - DNA, 75 bp, synthetic construct
  source 1..75: mol_type = other DNA
gttctttaacagtagagcaatatggctggaatttgggggtttttaatcattcaaccccatttacatcacacttta

SEQ ID NO: 819523 - DNA, 75 bp, synthetic construct
  source 1..75: mol_type = other DNA
ttgcgtcgaaagactctcgtagtgcctggcgcaagacagacaccatgtggatgctgggcctttacggcacggcaa

SEQ ID NO: 819524 - DNA, 75 bp, synthetic construct
  source 1..75: mol_type = other DNA
aaacactgacacccatacagctgctggcgctcggcgctatcatcgccgcttcaatggggtcttgtattatccctc

SEQ ID NO: 819525 - DNA, 75 bp, synthetic construct
  source 1..75: mol_type = other DNA
gttgggctatttacattttaagtgggcaacgcgcaggagcggaacatggccctgcgacggtggcaattggttcgt

SEQ ID NO: 819526 - DNA, 75 bp, synthetic construct
  source 1..75: mol_type = other DNA
tgacccgcgtggcagtcatgatcatgcaagcattaggattacaggttgcgatgcctgaactgcaaccggacgctt

SEQ ID NO: 819527 - DNA, 75 bp, synthetic construct
  source 1..75: mol_type = other DNA
ggcttcgaaatggactttgctgaactgttgctggaagactacaaagcctccctgaaatatctcagcgaccacccg

SEQ ID NO: 819528 - DNA, 75 bp, synthetic construct
  source 1..75: mol_type = other DNA
ctggctccgctgggctgcggctgggttatctggcgtgacgaagaagcgctgccgcaggaactggtgttcaacgtt

SEQ ID NO: 819529 - DNA, 75 bp, synthetic construct
  source 1..75: mol_type = other DNA
tcgtcgcggcttcgaaatggactttgctgaactgttgctggaagactacaaagcctccctgaaatatctcagcga

SEQ ID NO: 819530 - DNA, 75 bp, synthetic construct
  source 1..75: mol_type = other DNA
tatttcaattggtccgtggcaggatctcgatgaaccgcatggacgagatgttcgcttcggttaaaaaaaggcacc

SEQ ID NO: 819531 - DNA, 75 bp, synthetic construct
  source 1..75: mol_type = other DNA
cgtttgatgcgctgggtgcgaaagctggagattactacccaccagccctgcaaccgaaaattgacgaacttaacg

SEQ ID NO: 819532 - DNA, 75 bp, synthetic construct
  source 1..75: mol_type = other DNA
aaaaccattaacccgacgggaattatttcgattggcccgtggcaggatctcgatgaaccacacgggcgagacgtt

SEQ ID NO: 819533 - DNA, 75 bp, synthetic construct
  source 1..75: mol_type = other DNA
tgacccgcgtggcggtaatgattatgcaagcgttgggtctacaagtggctatgccagaattgcaaccagacgcct

SEQ ID NO: 819534 - DNA, 75 bp, synthetic construct
  source 1..75: mol_type = other DNA
cccggcggtttgcttcaaactgaaagatggtgaagatccgggatacaccctgtacgacctctctgaacgtctgcg

SEQ ID NO: 819535 - DNA, 75 bp, synthetic construct
  source 1..75: mol_type = other DNA
ctcggtcgtgaaggctataccaaagtacagaacgcctcttaccaggttgccgcttatctggcggatgaaatcgcc

SEQ ID NO: 819536 - DNA, 75 bp, synthetic construct
  source 1..75: mol_type = other DNA
ccgaggcctgtatgctcggcgggatggcgatgaaatggcgttggcgcaagcgtatggaagccgcaggcaaaccaa

SEQ ID NO: 819537 - DNA, 75 bp, synthetic construct
  source 1..75: mol_type = other DNA
tgcaaaaccgtaaagtggtcgcttgggctaaacagcacggcattcatattacttcctatatgacgctggcttatg

SEQ ID NO: 819538 - DNA, 75 bp, synthetic construct
  source 1..75: mol_type = other DNA
agataaaaaagcgatcgctgcactggattgcaacgaccgcctggtaagcccggaaggtctggctcctgaatggga

SEQ ID NO: 819539 - DNA, 75 bp, synthetic construct
  source 1..75: mol_type = other DNA
gtactttccgtctcaaagacgacgttgttattgcatctgtgaaaacggcgcttgaacttggctatcgcgcaattg

SEQ ID NO: 819540 - DNA, 75 bp, synthetic construct
  source 1..75: mol_type = other DNA
cggtgaagccaccgacatcgtggtgatgcgcattatgtgtcgtcgcggattcgaaatggactttgctgaactgtt

SEQ ID NO: 819541 - DNA, 75 bp, synthetic construct
  source 1..75: mol_type = other DNA
tgcgcctcggtcgtgaaggctataccaaagtacagaacgcctcttaccaggttgccgcttatctggcggatgaaa

SEQ ID NO: 819542 - DNA, 75 bp, synthetic construct
  source 1..75: mol_type = other DNA
caatccgcagccatcgacctgcgttgcgtaaatatggttgccgatctgtggcatgcgcctgcgccgaaaaatggt

SEQ ID NO: 819543 - DNA, 75 bp, synthetic construct
  source 1..75: mol_type = other DNA
tgttggcgctgaaaacatcgctactaactgtcaacgacggatgaaaagtgatccacttatatctccaccaacggc

SEQ ID NO: 819544 - DNA, 75 bp, synthetic construct
  source 1..75: mol_type = other DNA
caggaactggtgttcaacgttgactacctcggcggtcagattggtactttcgccatcaacttctcccgcccggcg

SEQ ID NO: 819545 - DNA, 75 bp, synthetic construct
  source 1..75: mol_type = other DNA
ggtaattgcacagtactatgaattcctgcgcctcggtcgtgaaggctacaccaaagtacagaacgcctcttacca

SEQ ID NO: 819546 - DNA, 75 bp, synthetic construct
  source 1..75: mol_type = other DNA
tgttggcgctgaaaacatcgccaccaaccagattgaactctctccttatctgcaaaaccgtaaagtggtcgattg

SEQ ID NO: 819547 - DNA, 75 bp, synthetic construct
  source 1..75: mol_type = other DNA
acagtctgaaagagagcctgcaaaaattgcgtaccgattatgttgatctgacgctaatccactggccgtcaccaa

SEQ ID NO: 819548 - DNA, 75 bp, synthetic construct
  source 1..75: mol_type = other DNA
atggctatccctgcatttggtttaggtactttccgtctgaaggatgacgttgttattgcatcagtaaaaaccgcg

SEQ ID NO: 819549 - DNA, 75 bp, synthetic construct
  source 1..75: mol_type = other DNA
cgacgcctggatgtatgaaaccgaatcagtgatcacgatggtacttggcctgtggatggtaaatgtggtcttctc

SEQ ID NO: 819550 - DNA, 75 bp, synthetic construct
  source 1..75: mol_type = other DNA
tgctgcaatacgtcaaagggaaagcggaaagttggcctgggctgtcattgtatgacaaatataatacgttggcct

SEQ ID NO: 819551 - DNA, 75 bp, synthetic construct
  source 1..75: mol_type = other DNA
atggcgcagataacgacgaccgatgccaatgaattcagcagcagtgctgaattcacccctatgcgcggctttagc

SEQ ID NO: 819552 - DNA, 75 bp, synthetic construct
  source 1..75: mol_type = other DNA
gctgattctggccgtgggcggtgaactcgacacggcgttcgttctgccggggatttattccggcgataacccctc

SEQ ID NO: 819553 - DNA, 75 bp, synthetic construct
  source 1..75: mol_type = other DNA
ctgtactgctgatgggctggtcggtaaatgcctggtcattcgcctgtaaaaccgccaatggcaccgctatcccta

SEQ ID NO: 819554 - DNA, 75 bp, synthetic construct
  source 1..75: mol_type = other DNA
tgataaaacgaataaaaaattctcgatggtaaaactatcggtgatttttttgtgcctcggcatcggttatgcggt

SEQ ID NO: 819555 - DNA, 75 bp, synthetic construct
  source 1..75: mol_type = other DNA
agtggttgagatgtacacccaaaacggcattaccgactggcagaccgtatggctgattttcgcaggttactccgt

SEQ ID NO: 819556 - DNA, 75 bp, synthetic construct
  source 1..75: mol_type = other DNA
agtttatagttcactgggtatcgccgcggtctttatgcctgcgctgctggggattgtggccgacaaatggttaag

SEQ ID NO: 819557 - DNA, 75 bp, synthetic construct
  source 1..75: mol_type = other DNA
ggttctggccttcgcgttcatggcgatgtttaaatacaaacacgttcgtgtccctgcgggcacacagactgttag

SEQ ID NO: 819558 - DNA, 75 bp, synthetic construct
  source 1..75: mol_type = other DNA
cgttacttgctgaacttgttaaaagccaatgctgcgcgcaaactggcggcctaccccggaacgctgccgattaat

SEQ ID NO: 819559 - DNA, 75 bp, synthetic construct
  source 1..75: mol_type = other DNA
gtagttttccacggtctcgaaggcagccttaatagtccttatgcccacggtctgatcgaggcagcgcaaaagcgc

SEQ ID NO: 819560 - DNA, 75 bp, synthetic construct
  source 1..75: mol_type = other DNA
cggtacgtcgcatccgtgaatttgacgatctcatcaccgccagaattcacggctacgctgacgctatcgactatt

SEQ ID NO: 819561 - DNA, 75 bp, synthetic construct
  source 1..75: mol_type = other DNA
cagcggcgtcgcctacgaaaccatgaaagcagacgatatggtggtggtcgatatgagcggtaaggtggtggaagg

SEQ ID NO: 819562 - DNA, 75 bp, synthetic construct
  source 1..75: mol_type = other DNA
atgcgcggaaacatcgaacacaccgacggtacgtttaaatccaacggcgttcaggtcgacagccacggtcacggc

SEQ ID NO: 819563 - DNA, 75 bp, synthetic construct
  source 1..75: mol_type = other DNA
gctgctggcaatcggtggcgagcttgataccgctttcgtgttgcctggtattttctccgacgataaccccgcccc

SEQ ID NO: 819564 - DNA, 75 bp, synthetic construct
  source 1..75: mol_type = other DNA
gcgtacaaagcggtgggatccagactacatggctgaactggctgactacccgagctggacgctcgcgcacatggt

SEQ ID NO: 819565 - DNA, 75 bp, synthetic construct
  source 1..75: mol_type = other DNA
aacggcgttcaggtcgacagccacggtcacggcggtgtgcaaagaggtggagcctggacggagggcacgaaatga

SEQ ID NO: 819566 - DNA, 75 bp, synthetic construct
  source 1..75: mol_type = other DNA
gccgtctgcgtcggcggatgccctgcatatccgtttccctgacggggcggtgattgagtatgaacccgaaactag

SEQ ID NO: 819567 - DNA, 75 bp, synthetic construct
  source 1..75: mol_type = other DNA
cgtgccgggcgttcgcgcacatggtgggcaccttccgtgggggagcaggtgctgattctggccgtgggcggtgaa

SEQ ID NO: 819568 - DNA, 75 bp, synthetic construct
  source 1..75: mol_type = other DNA
ttgaagccaacatggatctgccgcgttacggactggtgacctttacctggggcaacgtcagcgccattgatcgcg

SEQ ID NO: 819569 - DNA, 75 bp, synthetic construct
  source 1..75: mol_type = other DNA
ccacaactcaatcacatcgacagcttcctgatgaataaacacttcatgcgtaagcacggtcccaacgcttattac

SEQ ID NO: 819570 - DNA, 75 bp, synthetic construct
  source 1..75: mol_type = other DNA
caccggcaaagtgattatcgaaacgctgggcaacgccgagccgctgcatacgccgggaattgtggtgtatcagca

SEQ ID NO: 819571 - DNA, 75 bp, synthetic construct
  source 1..75: mol_type = other DNA
aattagcgcgcgcgattcgcaacctcatccgctcaggtgtggtgactgaggtcgatatcgtgcaggggctgtgcc

SEQ ID NO: 819572 - DNA, 75 bp, synthetic construct
  source 1..75: mol_type = other DNA
gataccgtgcaggggctgtgccgcgtacaaagcggcgggatccagactacatggctgaactggctgaccacccga

SEQ ID NO: 819573 - DNA, 75 bp, synthetic construct
  source 1..75: mol_type = other DNA
gcgggaaatttacctcaaatggcgtgcaggtcgatgaccacgatcatggtggcgtggagccaggcggaaactgga

SEQ ID NO: 819574 - DNA, 75 bp, synthetic construct
  source 1..75: mol_type = other DNA
caatccgtatctggggcaccatcggctttatcatggcaatgtgggtggtgagcctgtctggcttcgaattaagcc

SEQ ID NO: 819575 - DNA, 75 bp, synthetic construct
  source 1..75: mol_type = other DNA
gtatgctatacgaagatactggttgtctggagattcagggggccagtctacctggggggtgggttgactaacatt

SEQ ID NO: 819576 - DNA, 75 bp, synthetic construct
  source 1..75: mol_type = other DNA
tgggattaggaagttttcttgctttccggctattttcaaaacacccagacagaattgattattctcctgatgtcc

SEQ ID NO: 819577 - DNA, 75 bp, synthetic construct
  source 1..75: mol_type = other DNA
gaatatgtcgattcaagaggtttttatcgctttcccagtccggttacaggaaaccctgcgccaggatttggtcct

SEQ ID NO: 819578 - DNA, 75 bp, synthetic construct
  source 1..75: mol_type = other DNA
ttgaagccaacatggatctgccgcgctacgggctggtgacctttacctggggcaacgtcagcgccattgaccgcg

SEQ ID NO: 819579 - DNA, 75 bp, synthetic construct
  source 1..75: mol_type = other DNA
cagcggcgtcgcctacgaaaccatgaaagcagacgatatggtggtggttgatatgagcggcaaggtggtggaagg

SEQ ID NO: 819580 - DNA, 75 bp, synthetic construct
  source 1..75: mol_type = other DNA
cgggccgtttgcctgggggaaagatgcccacgatgcggtgcataacgcggtggtgatggaagaagtggcgaaaat

SEQ ID NO: 819581 - DNA, 75 bp, synthetic construct
  source 1..75: mol_type = other DNA
gggttgtacggttacgacgataacggcaaaccgctggataaacagaaattccgcattttcgatcactggggcaat

SEQ ID NO: 819582 - DNA, 75 bp, synthetic construct
  source 1..75: mol_type = other DNA
tgttgcgcagccagtggccggaactggcagaactcgcatgtatggcagagcgctatgttcactccgatccggaaa

SEQ ID NO: 819583 - DNA, 75 bp, synthetic construct
  source 1..75: mol_type = other DNA
gcaaaatccggtgctgaagaaaatccgcaacggcgagcctgtgacgcaaagcgagctggatgaactggctaaact

SEQ ID NO: 819584 - DNA, 75 bp, synthetic construct
  source 1..75: mol_type = other DNA
atatattccaacactggaaaggttcttggattaggaagttttctggtatccaggctatttgcaaagcacccagat

SEQ ID NO: 819585 - DNA, 75 bp, synthetic construct
  source 1..75: mol_type = other DNA
tggaaggatgcgcagagcggaacgttcgctcacggtggtcatgatattaatgtcgacagcaacggcaaggtcagt

SEQ ID NO: 819586 - DNA, 75 bp, synthetic construct
  source 1..75: mol_type = other DNA
agcaaacacctggtcaggtggaaaaccgcgccttatatccctgccctgaaggacggggttttacggcgcaccgga

SEQ ID NO: 819587 - DNA, 75 bp, synthetic construct
  source 1..75: mol_type = other DNA
agtatggtctaagcgaattacgtcttgagcaaaggaaaacaaaatctcacaatacaattgaagttaataatatgg

SEQ ID NO: 819588 - DNA, 75 bp, synthetic construct
  source 1..75: mol_type = other DNA
cgagtggggcaatggttatgtatggagatgtatccgcaaacatattatggcaatatgacgtttaagtttttaaat

SEQ ID NO: 819589 - DNA, 75 bp, synthetic construct
  source 1..75: mol_type = other DNA
ggcgatcagtagcgtattgttgctgggggcagcacgatttctgcctgcattacagcgtgaaagtttgacgagcac

SEQ ID NO: 819590 - DNA, 75 bp, synthetic construct
  source 1..75: mol_type = other DNA
aaagattaaatatatggactgcgaaaatttataaaatgcttgagttttcttcggcaatgtcgcatcctgatggta

SEQ ID NO: 819591 - DNA, 75 bp, synthetic construct
  source 1..75: mol_type = other DNA
ctttatacattccttgtccatttacggtagatgattcgttctggtatccagaatttggagtatctagattaaaca

SEQ ID NO: 819592 - DNA, 75 bp, synthetic construct
  source 1..75: mol_type = other DNA
tatagatgactttatttgtggtactttccaaactgcgatttcatacttgcatttccatcctgacattagtttaga

SEQ ID NO: 819593 - DNA, 75 bp, synthetic construct
  source 1..75: mol_type = other DNA
cacggcatcaacccattgaacagacgttttttacgcggcccggtcattaaagattccagtttcgcgacacaggtt

SEQ ID NO: 819594 - DNA, 75 bp, synthetic construct
  source 1..75: mol_type = other DNA
gtcaggctgaataacgagcaacggtcagcagtacgcgaacgtctctctgagcgcggagcaaggcgacaggaaagg

SEQ ID NO: 819595 - DNA, 75 bp, synthetic construct
  source 1..75: mol_type = other DNA
tatccccgccctgaaggacggggttttacggcgcaccggataaagaaacagtcaaaatcactcagcaaaacaggc

SEQ ID NO: 819596 - DNA, 75 bp, synthetic construct
  source 1..75: mol_type = other DNA
tacagcgtgaaagtttaacgagcacccgtaagctggcgctggaagatgaaatctggctgcgggtatttaccgtcg

SEQ ID NO: 819597 - DNA, 75 bp, synthetic construct
  source 1..75: mol_type = other DNA
aaacagtaacggtatttgggagcgtgagccggtaaaagagtctgaccagaccgcatttcgtctgaaagacaacgt

SEQ ID NO: 819598 - DNA, 75 bp, synthetic construct
  source 1..75: mol_type = other DNA
cgaagcatctccagagggcgggttattgtcatggcagctgtaccggcgaagggctggaaattgtcggacagggtg

SEQ ID NO: 819599 - DNA, 75 bp, synthetic construct
  source 1..75: mol_type = other DNA
aaaagggatattaatggcttccgttcttcaaacggaaattgcttcaatccttgcaataatcctgaatatgcgtgg

SEQ ID NO: 819600 - DNA, 75 bp, synthetic construct
  source 1..75: mol_type = other DNA
aagagactttctggtacaaccctgcaaagatgcctgtacctgctcaatgggttacagtcaaacgagtccgagtga

SEQ ID NO: 819601 - DNA, 75 bp, synthetic construct
  source 1..75: mol_type = other DNA
gcggcgtagtcacgccacagcataacgttgcgcaatatgtggatttactggtcggcgtggtgcctatcgttaacc

SEQ ID NO: 819602 - DNA, 75 bp, synthetic construct
  source 1..75: mol_type = other DNA
aaatattcctggctactgcttctgcggtgaatctccactccgcgccgccatgattgtatttctcatgatgcagga

SEQ ID NO: 819603 - DNA, 75 bp, synthetic construct
  source 1..75: mol_type = other DNA
gtccgcattgatgcagaacaaaatgagcaactacaactgtatgctctgggtgcgctcgaacaattcagcatgctg

SEQ ID NO: 819604 - DNA, 75 bp, synthetic construct
  source 1..75: mol_type = other DNA
caggaaaacaaggtaaccgggcctggagtgatgaagaagccgcccgcgcgctgctgaaagaccagttccgttata

SEQ ID NO: 819605 - DNA, 75 bp, synthetic construct
  source 1..75: mol_type = other DNA
gcaaacgccgctttggctttttgatgcactggatattgagtttggattctggctggattcagctgcgagcgacaa

SEQ ID NO: 819606 - DNA, 75 bp, synthetic construct
  source 1..75: mol_type = other DNA
ggtggtggagaaactcgacaaactgatcgattatccccgtgcgattggtattgatgacgaggcgctgcgcaccat

SEQ ID NO: 819607 - DNA, 75 bp, synthetic construct
  source 1..75: mol_type = other DNA
gtttccgtattgatcgcgtactgctggcgggcgatgccgcgcacatcatgccggtatggcaggggcagggctata

SEQ ID NO: 819608 - DNA, 75 bp, synthetic construct
  source 1..75: mol_type = other DNA
gaccaccaccaccagcctcgagtttcgtaaaatattcgcgcagttaaatctgcatgcatccgaggtggaaggcga

SEQ ID NO: 819609 - DNA, 75 bp, synthetic construct
  source 1..75: mol_type = other DNA
cccctggctgttggcgatgctgcaaggctcgttcatttcccacatcaatacattagtggtgccgggcggcaaaat

SEQ ID NO: 819610 - DNA, 75 bp, synthetic construct
  source 1..75: mol_type = other DNA
agtgcatacaacagcgacagacggtagtgatgcttgtgccagaggatatcgtctgtcggatggttcagcaaggct

SEQ ID NO: 819611 - DNA, 75 bp, synthetic construct
  source 1..75: mol_type = other DNA
caaggacaacaatgaaacggcgctggaagtggagcaggacattctgaacagctttcgtaaaaacggttttgagct

SEQ ID NO: 819612 - DNA, 75 bp, synthetic construct
  source 1..75: mol_type = other DNA
atgaatactgctcgtctgaaccagggcacgccattgttgctcaatgcagtaagcaagcattacgcggaaaatatc

SEQ ID NO: 819613 - DNA, 75 bp, synthetic construct
  source 1..75: mol_type = other DNA
gcgaggcctgtcgcggattaaaaagcctttatcagtgcgtcatatgaatgttgtcagcgccagtgatataagacg

SEQ ID NO: 819614 - DNA, 75 bp, synthetic construct
  source 1..75: mol_type = other DNA
catcgggcattatctgaacataaaacactatcaataagttggagtcattaccgtgttttgccagatatatttggt

SEQ ID NO: 819615 - DNA, 75 bp, synthetic construct
  source 1..75: mol_type = other DNA
actataacagcgatgatttccagtttgtgtggaatatttacgccaataatgatgtggtggtgcccactggcggct

SEQ ID NO: 819616 - DNA, 75 bp, synthetic construct
  source 1..75: mol_type = other DNA
acaagtcatgggtagaaaaggcattggtaaattagcaatgttttcattagctaacaaaatccaagtattttctca

SEQ ID NO: 819617 - DNA, 75 bp, synthetic construct
  source 1..75: mol_type = other DNA
aacgctgtataaaaagcagtaaacaatatgttgcaaatattattaatgttccgaaagactttagtatagggacga

SEQ ID NO: 819618 - DNA, 75 bp, synthetic construct
  source 1..75: mol_type = other DNA
ggattggtgactgggtgtcgcgcaataaaaaatggattgcgaaaactgaccagacgtccattctgttggtggttt

SEQ ID NO: 819619 - DNA, 75 bp, synthetic construct
  source 1..75: mol_type = other DNA
cactgctggttgcggtgatgttcagccttatcatttacatcgagaaccggatgtaccgcacgccgcgtaccctca

SEQ ID NO: 819620 - DNA, 75 bp, synthetic construct
  source 1..75: mol_type = other DNA
cgtttgcgaacatcactgatattgaccagtcagcggagcgtgtccgtgaccagttgtcggtgatggccagcccca

SEQ ID NO: 819621 - DNA, 75 bp, synthetic construct
  source 1..75: mol_type = other DNA
aaaaatgcaaggaacatgtaatttttccctgttagaagaaaaataccgagatttcggcaaagaagctaatgacac

SEQ ID NO: 819622 - DNA, 75 bp, synthetic construct
  source 1..75: mol_type = other DNA
cagatccaattgatggtctgtgcggtgctggcgcgtcgatacaaacgccagaccgaacagttacaggcgcagcag

SEQ ID NO: 819623 - DNA, 75 bp, synthetic construct
  source 1..75: mol_type = other DNA
ggtgctgccattgatgattttccatcagatccaactgatggtctgcgcggtgctggcgcgtcgttataagcgcca

SEQ ID NO: 819624 - DNA, 75 bp, synthetic construct
  source 1..75: mol_type = other DNA
caaaatatgcgcaagctgttaagcaaagtgctgcctaatccggacaatgttgaattgattcgccagcgtgtctac

SEQ ID NO: 819625 - DNA, 75 bp, synthetic construct
  source 1..75: mol_type = other DNA
gattcatgcaaagtatgaagtagaagtatttattgaaagtatcagagcacatattccaagaaacagttcattgaa

SEQ ID NO: 819626 - DNA, 75 bp, synthetic construct
  source 1..75: mol_type = other DNA
cggactttgttcggcaggttataaatgacgaaacaaaaactgatctggtccttaataccattgagggggctattg

SEQ ID NO: 819627 - DNA, 75 bp, synthetic construct
  source 1..75: mol_type = other DNA
cattcatggtaattctggcattggtgtgtcttcagttacgaaagctgcaatgagtgcattgcgcatggcatccag

SEQ ID NO: 819628 - DNA, 75 bp, synthetic construct
  source 1..75: mol_type = other DNA
cgctggttaatgggcaaacagctaaagaaaaagcacaaatactgtggcgggattatttgtgccagaggatgcagc

SEQ ID NO: 819629 - DNA, 75 bp, synthetic construct
  source 1..75: mol_type = other DNA
tatgtcacactgcaacgaggttcggcttatggcggcgtgttatctaatttttccgggaccgtaaaatatagtggc

SEQ ID NO: 819630 - DNA, 75 bp, synthetic construct
  source 1..75: mol_type = other DNA
atgaacactctcgcaaatattcaggaactcgcgcgcgcactgcgcaacatgattcgtactggccttgtcgtagaa

SEQ ID NO: 819631 - DNA, 75 bp, synthetic construct
  source 1..75: mol_type = other DNA
gacggggcggtgattgagtatgaacccgaaaccagtgcactcacggtaagcggaattaaaacggccagcgtgacg

SEQ ID NO: 819632 - DNA, 75 bp, synthetic construct
  source 1..75: mol_type = other DNA
catatccgtttccctgacggggcggtgattgagtatgaacccgaaaccagtgcactcacggtaaagtgtcaggct

SEQ ID NO: 819633 - DNA, 75 bp, synthetic construct
  source 1..75: mol_type = other DNA
cgggccgggcgctcgcgcacctggtgggctccctccattggtgagcaggtgatgattctggccgtgggcggtgaa

SEQ ID NO: 819634 - DNA, 75 bp, synthetic construct
  source 1..75: mol_type = other DNA
ggaaccagtcttgatgttggtcttatcgttggtcagttcgactcagtcagtgcaattcacggaaatgcagaaatt

SEQ ID NO: 819635 - DNA, 75 bp, synthetic construct
  source 1..75: mol_type = other DNA
tgaggtctctaaactaaatctggtgctggataccattgatacagcgataaataaactgggcgagctagttgttga

SEQ ID NO: 819636 - DNA, 75 bp, synthetic construct
  source 1..75: mol_type = other DNA
taacattgagagaaaaattcgcaacctgatgcgagaagtcaccctgaacaaagggggaacttttaccattaaaag

SEQ ID NO: 819637 - DNA, 75 bp, synthetic construct
  source 1..75: mol_type = other DNA
gcggcggggaaagcggagattacccgcgaaactcttgtcgcagaatcgccagcgatacagtgcctgcgactggca

SEQ ID NO: 819638 - DNA, 75 bp, synthetic construct
  source 1..75: mol_type = other DNA
cccttttccagctcgatccagagcgcgcacatgagtttacttttcagcaattacgccgcattaccggaacgccgt

SEQ ID NO: 819639 - DNA, 75 bp, synthetic construct
  source 1..75: mol_type = other DNA
tgcaatatggcgaagcgctggatgatctcttaaccgcgattaaaaataagcaaaatgatttgcaagcgatgcacc

SEQ ID NO: 819640 - DNA, 75 bp, synthetic construct
  source 1..75: mol_type = other DNA
tttcgtttggttgatgccgaaggtttgatcaaccgtatgggctttaataatctcggcgttgataacctcgttgag

SEQ ID NO: 819641 - DNA, 75 bp, synthetic construct
  source 1..75: mol_type = other DNA
tcactggtgcaaatttattctggttttatttttaaaggcccgccgctgattaaagaaatcgttacccatatctaa

SEQ ID NO: 819642 - DNA, 75 bp, synthetic construct
  source 1..75: mol_type = other DNA
ccctttttcagctcgatcctgagcgcgctcatgagtttacttttcagcaattacgtcgcattaccggaacgccgt

SEQ ID NO: 819643 - DNA, 75 bp, synthetic construct
  source 1..75: mol_type = other DNA
atgcgggatatatcgccatcaatatttcatcgccgaataccccaggattacgcacgctgcaatatggtgaagcgc

SEQ ID NO: 819644 - DNA, 75 bp, synthetic construct
  source 1..75: mol_type = other DNA
gctttgcgtcggaatttgtcgctcgccatattgccgaatggcagcgtcagaatccgctggatctgataattaccg

SEQ ID NO: 819645 - DNA, 75 bp, synthetic construct
  source 1..75: mol_type = other DNA
ctgaaccggatgccggaatgttagcggaaaaagagtggcagggggcggctcaggggcatagtgggccggatgttt

SEQ ID NO: 819646 - DNA, 75 bp, synthetic construct
  source 1..75: mol_type = other DNA
cgcttcttgatgggccaacggtagcagaaaaagcgcaaaaactgtggcgggattatttgtgccagaggatgcagc

SEQ ID NO: 819647 - DNA, 75 bp, synthetic construct
  source 1..75: mol_type = other DNA
cagcgggggcttcactggtgcaaatttattctggttttatttttaaaggaccaccgctgattaaagaaatcgtta

SEQ ID NO: 819648 - DNA, 75 bp, synthetic construct
  source 1..75: mol_type = other DNA
accaggaaacgacaaaccccgtctttttcgcctggttgatgctgaaggtttaataaaccgtatgggctttaataa

SEQ ID NO: 819649 - DNA, 75 bp, synthetic construct
  source 1..75: mol_type = other DNA
ggtagtgatgcttgtgccagaggatatgtcagtcggatggttcagcaaggctctggagagtgtcgacgaagttcg

SEQ ID NO: 819650 - DNA, 75 bp, synthetic construct
  source 1..75: mol_type = other DNA
cggtgtccaggcacacttgtggtggctggtgggtgccgtggttgtcggttcggcaatcggcctctactactacct

SEQ ID NO: 819651 - DNA, 75 bp, synthetic construct
  source 1..75: mol_type = other DNA
atggataagaagcaagtaacggatttaaggtcggaactactcgattcacgttttggagctaagtccatttcgact

SEQ ID NO: 819652 - DNA, 75 bp, synthetic construct
  source 1..75: mol_type = other DNA
ggtcagattggtactttcgccatcaacttctcccgcccggcgggtcaggtaattgcacagtactatgaattcctg

SEQ ID NO: 819653 - DNA, 75 bp, synthetic construct
  source 1..75: mol_type = other DNA
atacacttttagggataagtaaacgtggagataaaaatctgcgacggttactcgttcagtgcgcaagatccttta

SEQ ID NO: 819654 - DNA, 75 bp, synthetic construct
  source 1..75: mol_type = other DNA
cggtaaaacagacagtcacggctcccgtcataccatccaataccgtttcaactgccaaccctgtcattacagagc

SEQ ID NO: 819655 - DNA, 75 bp, synthetic construct
  source 1..75: mol_type = other DNA
cgcgcgtgaaatcgatcagtgcttcaggccataaattcggtctggctccgctcggctgcggctgggttatctggc

SEQ ID NO: 819656 - DNA, 75 bp, synthetic construct
  source 1..75: mol_type = other DNA
atggataagaagcaagtaacggatttaaggtcggaactactcgattcacgttttggggctaagtccatttcaact

SEQ ID NO: 819657 - DNA, 75 bp, synthetic construct
  source 1..75: mol_type = other DNA
tttcttgctggaatttggaatcagtctgccgacaggggatgccgcaataaaacggttgtctctggtgttggctga

SEQ ID NO: 819658 - DNA, 75 bp, synthetic construct
  source 1..75: mol_type = other DNA
gtagcgagctaaaaggtattgttttttggataaagaacgtatcctgtatctgctggaagaaatctggcaggcagc

SEQ ID NO: 819659 - DNA, 75 bp, synthetic construct
  source 1..75: mol_type = other DNA
aattgatgctcaaacaaaaaaaattgacattataagaaaacacaaaaaaggccttatgcaacaacttttccccgt

SEQ ID NO: 819660 - DNA, 75 bp, synthetic construct
  source 1..75: mol_type = other DNA
cgatgcagaagccatatgcgaagcggcatctcgtccctccatgcgatttgtgcaaccacgaacagaagctcagca

SEQ ID NO: 819661 - DNA, 75 bp, synthetic construct
  source 1..75: mol_type = other DNA
aacagaactggaatcagagttaaaccagtcaatcaaagctgacgctactgcgcaacgcattatgacaatacccgg

SEQ ID NO: 819662 - DNA, 75 bp, synthetic construct
  source 1..75: mol_type = other DNA
tgaaaacaaccaaccagatccacggtttcttgctggaatttggaatcagcctgccgataggtgatgctgtaataa

SEQ ID NO: 819663 - DNA, 75 bp, synthetic construct
  source 1..75: mol_type = other DNA
cgtcaggcagcggcacagcggtttaatgaagctgaacactatgggagctatgacgacttccgcgacttcagccgt

SEQ ID NO: 819664 - DNA, 75 bp, synthetic construct
  source 1..75: mol_type = other DNA
ccggatggcgtaaatccggtattggcggcgcagatggtaaacatggcctgcatgaatatctgcagacccaggtgg

SEQ ID NO: 819665 - DNA, 75 bp, synthetic construct
  source 1..75: mol_type = other DNA
cccagcaacaaaaggacgccgctcgtcagcgttatcagtcggcttctcctgagcagcgccaggcagtccgcgaga

SEQ ID NO: 819666 - DNA, 75 bp, synthetic construct
  source 1..75: mol_type = other DNA
gcagactaacccgcagaaccagcagcgaagagacgcagcgcgtgagcgtattcagtccgcatcaccagagcagcg

SEQ ID NO: 819667 - DNA, 75 bp, synthetic construct
  source 1..75: mol_type = other DNA
agtttatcctggataggtcagaacaggatgcccgttacgcctgttttatctataccgaaaggattatatttgctg

SEQ ID NO: 819668 - DNA, 75 bp, synthetic construct
  source 1..75: mol_type = other DNA
ggttggaaaagggtacgactttgacagcgtcaatggcaaggtgcatgttcgcgaacataagcgacacctccgtcg

SEQ ID NO: 819669 - DNA, 75 bp, synthetic construct
  source 1..75: mol_type = other DNA
agccggaggtgaagtactttactccggtgatgccaacctgactgatgaacagatcgctaaattgccatttgcttt

SEQ ID NO: 819670 - DNA, 75 bp, synthetic construct
  source 1..75: mol_type = other DNA
gtctaaacgacagtaaccgtactgcccgattgaataacgagcaacggtcagcagtacgtgaacgtctctctgagc

SEQ ID NO: 819671 - DNA, 75 bp, synthetic construct
  source 1..75: mol_type = other DNA
acttaaacaaggcgatgctgctattcaggcggtatctgaccagccgtgggacgccagcgtcaaatcactggtagc

SEQ ID NO: 819672 - DNA, 75 bp, synthetic construct
  source 1..75: mol_type = other DNA
agtttcagcaacgaacacacgccgcccccgtcattacacgagatacccaacgtcaggcagcggcacagcggttta

SEQ ID NO: 819673 - DNA, 75 bp, synthetic construct
  source 1..75: mol_type = other DNA
ccgatgtcaacggcggaatgagcgccacgcaattacctgccccaacgcgcgacagccagcgtcaggcggcagcaa

SEQ ID NO: 819674 - DNA, 75 bp, synthetic construct
  source 1..75: mol_type = other DNA
gcagcacgtcagcgtatccagtctgcctcgcctgagcagcgtcaggtttttcgagagaaagttcaggagagccgc

SEQ ID NO: 819675 - DNA, 75 bp, synthetic construct
  source 1..75: mol_type = other DNA
catcacctgaacaacgtcaggtttttcgggagaaagttcaggagagccgcccacaacgtctaaacgacagtaacc

SEQ ID NO: 819676 - DNA, 75 bp, synthetic construct
  source 1..75: mol_type = other DNA
atggcgatcgtagcgctgtgtgttgcagctatcgggtttattgccgtgcagccagtgttctggacgatgccgaca

SEQ ID NO: 819677 - DNA, 75 bp, synthetic construct
  source 1..75: mol_type = other DNA
gaaaacatctgtatttttggtgttgtcactcacgtgatcacaggacgcgggagttacgctgatgtttgcactggc

SEQ ID NO: 819678 - DNA, 75 bp, synthetic construct
  source 1..75: mol_type = other DNA
cgtcgtttcggcacatgttttcgaacaaggtgtggatgccgttcgtcaagagctggctcgcttacagcaagaggg

SEQ ID NO: 819679 - DNA, 75 bp, synthetic construct
  source 1..75: mol_type = other DNA
ctccggcattcagtattgtgtcatgggtagctcttgctggtggtatcgttacctatctgttggggctatggaatg

SEQ ID NO: 819680 - DNA, 75 bp, synthetic construct
  source 1..75: mol_type = other DNA
cagcggttgcgtggcagtgcgttcgcgcaacggcaaggtatttctctggcgttacggttgttaccttcgcactgc

SEQ ID NO: 819681 - DNA, 75 bp, synthetic construct
  source 1..75: mol_type = other DNA
cggggttgcgggccgcattgcgggaagatcctgatgtgattttgctcggagagctacgtgacagtgagacaatcc

SEQ ID NO: 819682 - DNA, 75 bp, synthetic construct
  source 1..75: mol_type = other DNA
ttttgccgtgtcgctggcggaaaaccagcggttgcgtggcagtgcgttcgcgcaacggcaaggtatttctctggc

SEQ ID NO: 819683 - DNA, 75 bp, synthetic construct
  source 1..75: mol_type = other DNA
atggaaatggcatcagcttttactcttaatgttcgtctggacaacattgcagtcatcaccatcgacgttcccggt

SEQ ID NO: 819684 - DNA, 75 bp, synthetic construct
  source 1..75: mol_type = other DNA
tcaggggattaatcatgcgctgaaatacagttgggatcagctggagagtaaagtgcgccgtcgtcatctcaaagc

SEQ ID NO: 819685 - DNA, 75 bp, synthetic construct
  source 1..75: mol_type = other DNA
ggagttggcgctggcgtgccacggtcgcgtgtgtactgatgatcctaaaacggtgctcggtttgcctgaagtaca

SEQ ID NO: 819686 - DNA, 75 bp, synthetic construct
  source 1..75: mol_type = other DNA
atggacaacaaaatatcaacctattctccggcatttagtattgtttcatgggtagcccttattggcggtattgtt

SEQ ID NO: 819687 - DNA, 75 bp, synthetic construct
  source 1..75: mol_type = other DNA
aggcatacctaccacccccatttattatatgacttgcctgacggtctttattatctctgttgcgttattgctggt

SEQ ID NO: 819688 - DNA, 75 bp, synthetic construct
  source 1..75: mol_type = other DNA
gttttaggagcagcaggagtagatgttgccttcattcttacgggtatgagcacagatggtgaggtggaaattcag

SEQ ID NO: 819689 - DNA, 75 bp, synthetic construct
  source 1..75: mol_type = other DNA
ggtttgcactgtatgacgttcgcatcgggattgcgggctgcattgcgggaagatcctgatgtgattttgctcgga

SEQ ID NO: 819690 - DNA, 75 bp, synthetic construct
  source 1..75: mol_type = other DNA
tgccgatgaatcccgcctaccccactctttatccggaagaactgcagatattcggcgtggtgatggcattcatac

SEQ ID NO: 819691 - DNA, 75 bp, synthetic construct
  source 1..75: mol_type = other DNA
cagagccagcactgtccaccgcaccacttttcacagagcgctgtccggctggttttccgtcaccggccgcggact

SEQ ID NO: 819692 - DNA, 75 bp, synthetic construct
  source 1..75: mol_type = other DNA
tgatgccgctgaatccggcttttccgccaatcaggtttgatccggaggcgctgcagatatggggtgtggttacgt

SEQ ID NO: 819693 - DNA, 75 bp, synthetic construct
  source 1..75: mol_type = other DNA
ctttacggcgtatcacacaaacagttttacgcttgaacaacaagcgcatctggcggagatcgccgaaggtctggt

SEQ ID NO: 819694 - DNA, 75 bp, synthetic construct
  source 1..75: mol_type = other DNA
tttcccggaagcagagttgtatcacttcgctgaaaaagcgcagaatgcctttttctattgtgagtcttacgccga

SEQ ID NO: 819695 - DNA, 75 bp, synthetic construct
  source 1..75: mol_type = other DNA
ccatacaaccgccgtgaagatgcgaaatatcgcaaccagcagggcgcggtagccagccgaatcgataaagactaa

SEQ ID NO: 819696 - DNA, 75 bp, synthetic construct
  source 1..75: mol_type = other DNA
tgaaatgatcctgccgaaaggccacgctttcctgccggtagcagagttcttaggtgacccggtaatggcaacgct

SEQ ID NO: 819697 - DNA, 75 bp, synthetic construct
  source 1..75: mol_type = other DNA
gccgtgctgattgcgatgttcacctttggtctgaaccgtggtcgttcaatggatcagattaacgacacgctggtt

SEQ ID NO: 819698 - DNA, 75 bp, synthetic construct
  source 1..75: mol_type = other DNA
agatcccgatgtgatattgctcggagagctgcgtgacagcgagacaatacgtctggcgctgacggcggcagaaac

SEQ ID NO: 819699 - DNA, 75 bp, synthetic construct
  source 1..75: mol_type = other DNA
tatcgccaccacgctgattgccaaatttggtaaaaaacacatccagtgggcggtggtactgaccggttttaccgt

SEQ ID NO: 819700 - DNA, 75 bp, synthetic construct
  source 1..75: mol_type = other DNA
gataagccgatcccggaaggtctgtacagcgcgaaaacctttagcgaagaagagatgccgagctttggcgtcagc

SEQ ID NO: 819701 - DNA, 75 bp, synthetic construct
  source 1..75: mol_type = other DNA
gattgctgccgtactgcgtatcgcgctgggttccgcaaccgttgcggcaatcactgcgggtggtatcgcggcacc

SEQ ID NO: 819702 - DNA, 75 bp, synthetic construct
  source 1..75: mol_type = other DNA
gttcggaactactcgattcacgttttggtgcgaaggccatttcgactatcgcagaatcaaaacgctttccgctgc

SEQ ID NO: 819703 - DNA, 75 bp, synthetic construct
  source 1..75: mol_type = other DNA
gatctgaactactcgattcacgttttggtgcgaaggccatttcgactatcgcagaatcaaaacgctttccgctgc

SEQ ID NO: 819704 - DNA, 75 bp, synthetic construct
  source 1..75: mol_type = other DNA
acctggccactttctgccagacctgggacgacgagaaggtccataaattgatggatttatcgatcaaaaaaaact

SEQ ID NO: 819705 - DNA, 75 bp, synthetic construct
  source 1..75: mol_type = other DNA
tccgctcagaactactcgattcacgttttggtgccaagtctatttcaactatcgctgactcaaaacgatttccgc

SEQ ID NO: 819706 - DNA, 75 bp, synthetic construct
  source 1..75: mol_type = other DNA
tccgctcagaactactcgattcacgttttggtgccaagactatttctactatcgctgactcaaaacgatttccgc

SEQ ID NO: 819707 - DNA, 75 bp, synthetic construct
  source 1..75: mol_type = other DNA
gctcagaactactcgattcacgttttggtgctaaggccatttcgactatcgcagaatcaaaacgctttccgctgc

SEQ ID NO: 819708 - DNA, 75 bp, synthetic construct
  source 1..75: mol_type = other DNA
ccgaccgataaccctggcattgctgactctggcagcctttacgctactgacgccaataatacgcaaaattatgcg

SEQ ID NO: 819709 - DNA, 75 bp, synthetic construct
  source 1..75: mol_type = other DNA
gccctggcaaacactacgccgcatcgcattaaccattttgcgctcatcaggattaggggtttttatcggcatgat

SEQ ID NO: 819710 - DNA, 75 bp, synthetic construct
  source 1..75: mol_type = other DNA
atgcagaaactggccgcactgcagacggcaacaaagcgggcgctgtacgaagctattctgtatcccggcgtggat

SEQ ID NO: 819711 - DNA, 75 bp, synthetic construct
  source 1..75: mol_type = other DNA
acctggccactttctgccagacctgggacgacgagaacgtccataaattgatggatttctcgataaaaaaaaact

SEQ ID NO: 819712 - DNA, 75 bp, synthetic construct
  source 1..75: mol_type = other DNA
acctggccactttctgccagacctgggacgacgagaaagtccataaattgatggatttgtcgatcaaaaaaaact

SEQ ID NO: 819713 - DNA, 75 bp, synthetic construct
  source 1..75: mol_type = other DNA
cgtctgggacgcggtacaggccatgcgttgccatccttatcgcagactggaaacgtgggagtgggaaacggcgca

SEQ ID NO: 819714 - DNA, 75 bp, synthetic construct
  source 1..75: mol_type = other DNA
tccgctcagaactactcgattcacgttttggtgccaagccaatttcgactatcgctgactcaaaacgatttccgc

SEQ ID NO: 819715 - DNA, 75 bp, synthetic construct
  source 1..75: mol_type = other DNA
acacatgtgcataaacatcatatggtgtatcgcctcgatgccattgatgcttacaatcagaaactggtgaaacaa

SEQ ID NO: 819716 - DNA, 75 bp, synthetic construct
  source 1..75: mol_type = other DNA
gacgatctggataagcccattgatttaatccgtgctacacgtccaattattattgtcgatgaaccgcaaagtgtt

SEQ ID NO: 819717 - DNA, 75 bp, synthetic construct
  source 1..75: mol_type = other DNA
atgaaactacattttgaatctgaccttacctatcagcaaaacgccataacatcagtttgcgatctgtttgaaggt

SEQ ID NO: 819718 - DNA, 75 bp, synthetic construct
  source 1..75: mol_type = other DNA
gttgccagtgaaaattacgaagcctacgctgaacgattacagtctgaaattgagagcgaaacgggtatccgtttt

SEQ ID NO: 819719 - DNA, 75 bp, synthetic construct
  source 1..75: mol_type = other DNA
tgaacgagaacgtcgtcaaacattagggcgtggtcttcgcctgtgtgttaaccaagaaggtgaacgtgttcgtga

SEQ ID NO: 819720 - DNA, 75 bp, synthetic construct
  source 1..75: mol_type = other DNA
ttgttgatggtattaaatattatccactgaaaggcgaggtatatgcgcaaagcctgtttatggataaagaactga

SEQ ID NO: 819721 - DNA, 75 bp, synthetic construct
  source 1..75: mol_type = other DNA
atggataagaagcaagtaacggatttaaggtcggaactactcgattcacgttttggcgccaagtcaatttctact

SEQ ID NO: 819722 - DNA, 75 bp, synthetic construct
  source 1..75: mol_type = other DNA
atggataagaagcaagtaacggatttaaggtcggaactactcgattcacgttttggcgcaaagtctatttcaact

SEQ ID NO: 819723 - DNA, 75 bp, synthetic construct
  source 1..75: mol_type = other DNA
tccgctcagaactactcgattcacgttttggtgccaaggcaatttccactatcgctgactcaaaacgatttccgc

SEQ ID NO: 819724 - DNA, 75 bp, synthetic construct
  source 1..75: mol_type = other DNA
ttatctggggagcgattctcggagaagaggtgggagaatttcatcaggctgtcctccatgatcgttttggtggta

SEQ ID NO: 819725 - DNA, 75 bp, synthetic construct
  source 1..75: mol_type = other DNA
atattcgaacgtcatcttgataaaggaacgcgcccgggggtttacccacgcctttcggctttgttgaataaatca

SEQ ID NO: 819726 - DNA, 75 bp, synthetic construct
  source 1..75: mol_type = other DNA
acgcctttctggaataaacaaactgcacctgccggaatattcgaacgtcatcttgataaaggaacgcgcccgggg

SEQ ID NO: 819727 - DNA, 75 bp, synthetic construct
  source 1..75: mol_type = other DNA
cgttttatcccagaaaatgaacgagtcataaaaattgttgccggtgtgggcggtgacaaacttaaagtaacaatg

SEQ ID NO: 819728 - DNA, 75 bp, synthetic construct
  source 1..75: mol_type = other DNA
gtttgacgtgggcgatctggataaggcgctggactgggctgacattgcaatcagccagcagcaggcaaccccgga

SEQ ID NO: 819729 - DNA, 75 bp, synthetic construct
  source 1..75: mol_type = other DNA
aggctgccggacgttttgaggaaaacgaagagctggttaatggcgctgctcgccacctggctgatctgctggtag

SEQ ID NO: 819730 - DNA, 75 bp, synthetic construct
  source 1..75: mol_type = other DNA
gtttaaagcctataaagcgggtaatgtatcggaatatctggtccaaccagaagaacataaaccggaaaacgtcga

SEQ ID NO: 819731 - DNA, 75 bp, synthetic construct
  source 1..75: mol_type = other DNA
gaatggtaccggaatctctgcggggagtgataaaacgggggaggtggcccagagcggcgcgcgcgcgatcggcgg

SEQ ID NO: 819732 - DNA, 75 bp, synthetic construct
  source 1..75: mol_type = other DNA
ggaggcgattagttctactcgtttgcagttacaccggaccatgcaggcatttgtccgggcattgaaccagaagct

SEQ ID NO: 819733 - DNA, 75 bp, synthetic construct
  source 1..75: mol_type = other DNA
aatgacgtaaaagcgtgggtcagcgatacgctgaggacgtttgattttgaacgttgttcactggtgatgctggcg

SEQ ID NO: 819734 - DNA, 75 bp, synthetic construct
  source 1..75: mol_type = other DNA
aacaccgaaaacctcgacaagctgaaaacctccgcaccggagaagctcaaagaactgaaggtgatctggaaatcg

SEQ ID NO: 819735 - DNA, 75 bp, synthetic construct
  source 1..75: mol_type = other DNA
gggctgggcgccgttccgcgcctccagcgacctgcaactggtgccgattcgccagctcgcgctgtttaaagagat

SEQ ID NO: 819736 - DNA, 75 bp, synthetic construct
  source 1..75: mol_type = other DNA
ccttgtgtctgatttggccgcacaagagctggtggtaagcccggtggctatagacaagtccactgaggtggagaa

SEQ ID NO: 819737 - DNA, 75 bp, synthetic construct
  source 1..75: mol_type = other DNA
agccaataacagtaccgataaacaagccaataacagtaccgataaacaagccaataacagtaccgataaacaagc

SEQ ID NO: 819738 - DNA, 75 bp, synthetic construct
  source 1..75: mol_type = other DNA
aatgtcaattttaatggcagcattcttagaaatgcggatttctccggtacgatctgtgaaggcgtggattttacc

SEQ ID NO: 819739 - DNA, 75 bp, synthetic construct
  source 1..75: mol_type = other DNA
taagttgatgatgttaactttccttacctttctcgctatattatctagttctgtgctcaaatatccatcttttta

SEQ ID NO: 819740 - DNA, 75 bp, synthetic construct
  source 1..75: mol_type = other DNA
agctcttcgcctgaaccagaagtctctgtaggtgcatatcgatatgccctgcaaatgcgtccggcggcccctggc

SEQ ID NO: 819741 - DNA, 75 bp, synthetic construct
  source 1..75: mol_type = other DNA
agactttaaaaaacgtacggttatacttatcgatcagataccagagaagcaaaagagtcgctatcatatcaacga

SEQ ID NO: 819742 - DNA, 75 bp, synthetic construct
  source 1..75: mol_type = other DNA
aaaacatgcctgcaaaagttcaaattcatttgaagtgaaattagatgccactcatcaatatcaacacctgaataa

SEQ ID NO: 819743 - DNA, 75 bp, synthetic construct
  source 1..75: mol_type = other DNA
ctccgcgaccagcgtcagcaccgtaagctcggcggtgggtgtcgcgctcgcggcaaccggtggcggtgatggttc

SEQ ID NO: 819744 - DNA, 75 bp, synthetic construct
  source 1..75: mol_type = other DNA
gtggtttactgagttttgattggtacgtgccaataaatctcggaatcctgatactggttatgttgatttttttta

SEQ ID NO: 819745 - DNA, 75 bp, synthetic construct
  source 1..75: mol_type = other DNA
ccctcgtgagcaggcgctggcgtgggatcgcgcaatgctcgactaccttgatgccaatcactttgatgatgtgta

SEQ ID NO: 819746 - DNA, 75 bp, synthetic construct
  source 1..75: mol_type = other DNA
ccacagatgcgaaagcggctatccgagagatgaaagctgcgctgcgggaacagctcggtgatgtgcaacaggttt

SEQ ID NO: 819747 - DNA, 75 bp, synthetic construct
  source 1..75: mol_type = other DNA
tcgctcgtgccagacagcctctatgagtaggtattcctatgaagtgaatgcaacagcccctcattcctctaaaaa

SEQ ID NO: 819748 - DNA, 75 bp, synthetic construct
  source 1..75: mol_type = other DNA
ggtgaatggcttcgcatggcatcacttcaaaagcttcctccgaccattcctacaatcaatttagaagtttggcaa

SEQ ID NO: 819749 - DNA, 75 bp, synthetic construct
  source 1..75: mol_type = other DNA
tgttgatgaaataacccaactacaggctgacagtgaccagaaagaggatgccatgagcgacctcgcggatcaggt

SEQ ID NO: 819750 - DNA, 75 bp, synthetic construct
  source 1..75: mol_type = other DNA
ctgacacgctggcatcaaaacgatctcgccggccagttattaaaactggcagaagaaggcggggaacgctggcgc

SEQ ID NO: 819751 - DNA, 75 bp, synthetic construct
  source 1..75: mol_type = other DNA
aaataccttcaggacgcagtttggcgggaggtatcaacaaaaccgaactatgggaaccagttgatgccaaaggcg

SEQ ID NO: 819752 - DNA, 75 bp, synthetic construct
  source 1..75: mol_type = other DNA
agtgccgcagacagtcccggttagctctattattttgatctctattgataataaaaatccggcaatcacagaggg

SEQ ID NO: 819753 - DNA, 75 bp, synthetic construct
  source 1..75: mol_type = other DNA
agtagtgaatggtggcggcgcatatttaggtagttcaatcaagcatgaggatccaaccgcatcagtagcaggctc

SEQ ID NO: 819754 - DNA, 75 bp, synthetic construct
  source 1..75: mol_type = other DNA
tttggattagcaagatatagtgattggactatttgtaatcccgagtgtgaggtaatcccacaggatgatttaata

SEQ ID NO: 819755 - DNA, 75 bp, synthetic construct
  source 1..75: mol_type = other DNA
gctggtggtggcggcatggttgttatgttacggacactgtaaaaccgttgatgaagcgattagttatattcgagc

SEQ ID NO: 819756 - DNA, 75 bp, synthetic construct
  source 1..75: mol_type = other DNA
tcgaactggcgaaagaggggctggtatccaaatgcccccacgagagccgcattggtcaagccgtctggcgtctgg

SEQ ID NO: 819757 - DNA, 75 bp, synthetic construct
  source 1..75: mol_type = other DNA
ccacatcaagatcgtgtccggttattcagcaacaatactgtcgatggctgctttcgcgtcagactgcgctttcgc

SEQ ID NO: 819758 - DNA, 75 bp, synthetic construct
  source 1..75: mol_type = other DNA
tggagattgctaaagacggaacagtatctaaagataaccatgccagccggattggtcaggcggtatggagactgg

SEQ ID NO: 819759 - DNA, 75 bp, synthetic construct
  source 1..75: mol_type = other DNA
tattgcgatagccaatattttgctgctcaccattgtcacgccgctgacggcgtcgctggcgacattgtggataga

SEQ ID NO: 819760 - DNA, 75 bp, synthetic construct
  source 1..75: mol_type = other DNA
cgtattgaagatttacgcgcggcagcggaaatcgccaaaggccggaaagtcgcgccaggcgtacaagcgctggtg

SEQ ID NO: 819761 - DNA, 75 bp, synthetic construct
  source 1..75: mol_type = other DNA
gcatctggttagcccggcaatggcggccgccgctgccgtcaccggtcatttcgctgacattcgcaacattaaata

SEQ ID NO: 819762 - DNA, 75 bp, synthetic construct
  source 1..75: mol_type = other DNA
tcgcaacttgaactgtttgatctgccttataaccagtctccttcgctgcatattgttctctgctggctactttgg

SEQ ID NO: 819763 - DNA, 75 bp, synthetic construct
  source 1..75: mol_type = other DNA
gaagctccagcgcggcagggcgggggaaatgaacgccttgctgctgggcagcgtggatgaaaacctcaattatgt

SEQ ID NO: 819764 - DNA, 75 bp, synthetic construct
  source 1..75: mol_type = other DNA
gcgtgtggcgcgacgacggggggccgcgtctggagagtgggtgcatgagtgatgttcagtcgaatgtgaaacctc

SEQ ID NO: 819765 - DNA, 75 bp, synthetic construct
  source 1..75: mol_type = other DNA
gcgtatgtctccagggacgctggcacatcatgtccagcgcaaagagttacttactatgcggcgggataccttgtt

SEQ ID NO: 819766 - DNA, 75 bp, synthetic construct
  source 1..75: mol_type = other DNA
tgctgattaatgcttcgcgcggtactgtggtggatattccggcgctgtgtgatgcgctggcgagcaaacatctgg

SEQ ID NO: 819767 - DNA, 75 bp, synthetic construct
  source 1..75: mol_type = other DNA
cagtgagccagattctggatgagatgcgcgagcgccctatccctctgggtgtttccagtcgtcatattcatcttt

SEQ ID NO: 819768 - DNA, 75 bp, synthetic construct
  source 1..75: mol_type = other DNA
aatcgcattgtggcgattattggtgttgcttccaacctgttctatgggactgggattcctgcgtgtattttggtg

SEQ ID NO: 819769 - DNA, 75 bp, synthetic construct
  source 1..75: mol_type = other DNA
tatgtttacttctatgatattgaaaacaaactgccgctgggcaatgccactcaggtacaacatctttctgacctg

SEQ ID NO: 819770 - DNA, 75 bp, synthetic construct
  source 1..75: mol_type = other DNA
cacaccgtggcgtgtggaataaactggcggcgggatcttttgaagcgcgcggtaaaaagttgggtatcatcggct

SEQ ID NO: 819771 - DNA, 75 bp, synthetic construct
  source 1..75: mol_type = other DNA
gcaggtgcaacatctttccgacctgctgaatatgagtgacgtggtgagcctgcatgtgcctgaaaacccgtccac

SEQ ID NO: 819772 - DNA, 75 bp, synthetic construct
  source 1..75: mol_type = other DNA
atgaacaccaaccgtattttgcgtaaaaaagaggtacttcatctgacggggaactcgtcagcgacgttgtaccga

SEQ ID NO: 819773 - DNA, 75 bp, synthetic construct
  source 1..75: mol_type = other DNA
ccccatctgccgtagagcaacattatcaatacacatcgaactatgaagagcgtatgtctccagggacgctggcac

SEQ ID NO: 819774 - DNA, 75 bp, synthetic construct
  source 1..75: mol_type = other DNA
ccgaatgtctcctgcgaatgtcgtttctacattagatatcctcaaacatctgtggaataaaaaactagagcatgg

SEQ ID NO: 819775 - DNA, 75 bp, synthetic construct
  source 1..75: mol_type = other DNA
tccctatggccgtaagcaatatggcctggcgcctaaaacaaatggtgattttgcctgggtgcagcatatgtttgc

SEQ ID NO: 819776 - DNA, 75 bp, synthetic construct
  source 1..75: mol_type = other DNA
attaccggcgttcgcccgcaaggcccatggggaaaactggtcgatttgatgttcctgatcgccactgtcggcgca

SEQ ID NO: 819777 - DNA, 75 bp, synthetic construct
  source 1..75: mol_type = other DNA
gtacaccgatgccagacaaattggcctgacggcgccactccgcctgtcaggtgatctgacaggaagtgcctctgt

SEQ ID NO: 819778 - DNA, 75 bp, synthetic construct
  source 1..75: mol_type = other DNA
gtttggcgtcgagctgtatgacctgaatcacccgtatcaggggatcgtccacgtgatgggcccagaacaaggtgt

SEQ ID NO: 819779 - DNA, 75 bp, synthetic construct
  source 1..75: mol_type = other DNA
ggcttcggcgactttacggtgcgtgcgggcatcattcgcccggtgctcgatccggcgcgcgatttgtgggattaa

SEQ ID NO: 819780 - DNA, 75 bp, synthetic construct
  source 1..75: mol_type = other DNA
cgtggcgtgacaggacgaacggtgatcgcagaagtcatctccccggatgcccgttttttccagttgtaccgggaa

SEQ ID NO: 819781 - DNA, 75 bp, synthetic construct
  source 1..75: mol_type = other DNA
tcaacaacaccggcggtattcttcttccccgtcgcaggctgttcaccatcgaatccccgccggaagggcgtattc

SEQ ID NO: 819782 - DNA, 75 bp, synthetic construct
  source 1..75: mol_type = other DNA
actggcaccgggagctgggcggcatgacacgaaatcagcatctgctgggaaaaatcaacagcggacaggttgatc

SEQ ID NO: 819783 - DNA, 75 bp, synthetic construct
  source 1..75: mol_type = other DNA
cggcgcctggtggaaagcgtctgcaacccggaccaggtatatctgcgaaatcatgaaggctgcccgcactgctgg

SEQ ID NO: 819784 - DNA, 75 bp, synthetic construct
  source 1..75: mol_type = other DNA
catcaggggcgtgtgggagactttgagttcaccaccctggatgtgatagcccgcctcagacaggacaccacaacc

SEQ ID NO: 819785 - DNA, 75 bp, synthetic construct
  source 1..75: mol_type = other DNA
tctctgcactgctggttctggtgctgggtgtatggccgcaaccgctgattagcattgtgcgtttggcaatgccga

SEQ ID NO: 819786 - DNA, 75 bp, synthetic construct
  source 1..75: mol_type = other DNA
tgttctcttaccgtggtctgttctggcatcgcccgatactcgcggcagtgatgacggtgatgatgctgtcgctgg

SEQ ID NO: 819787 - DNA, 75 bp, synthetic construct
  source 1..75: mol_type = other DNA
tacgcaccggtgggtgacagtgaagcgattcgcgtagtgctggcgattatcgcctttgcctccatcatcttcggt

SEQ ID NO: 819788 - DNA, 75 bp, synthetic construct
  source 1..75: mol_type = other DNA
gctacgtcttgaccctgacgggatactgaacggagaaatccgtgaccatgattccgcaattacagcaataaaagc

SEQ ID NO: 819789 - DNA, 75 bp, synthetic construct
  source 1..75: mol_type = other DNA
cccggaccaggtatatctgcgaaatcatgaaggctgcccgcactgctggcgtggcgtgacaggacgaacagtgat

SEQ ID NO: 819790 - DNA, 75 bp, synthetic construct
  source 1..75: mol_type = other DNA
ggcgacggcgagcaaaatcgctatcttcggtgtggtgatgcgtttgttcctctacgtaccggtgggtgacagcga

SEQ ID NO: 819791 - DNA, 75 bp, synthetic construct
  source 1..75: mol_type = other DNA
ctgaaactggccggtctgtttggtgcacgctactcccactatccctgcgtgggcggcctctatgctgtgctccgt

SEQ ID NO: 819792 - DNA, 75 bp, synthetic construct
  source 1..75: mol_type = other DNA
ttaaaccgaatgtcgcctgccaatgttgtctcaacattagatattttcaagcatctctggaataaacagctatag

SEQ ID NO: 819793 - DNA, 75 bp, synthetic construct
  source 1..75: mol_type = other DNA
acgtatgcctcccggcacgctggtacatcacgtgcaacgcaaagagttgctcactatgcggcgtgaaacattatt

SEQ ID NO: 819794 - DNA, 75 bp, synthetic construct
  source 1..75: mol_type = other DNA
ggatgcgttagccaccgccaacgacatgaaccgtaacgtgctgtgcacctcgaacccgttcgagtcgcagctgca

SEQ ID NO: 819795 - DNA, 75 bp, synthetic construct
  source 1..75: mol_type = other DNA
cagcgcaggcggcaccgggcatgtggtggaattttgcggcgaagcgatccgcaatttgagcatggaaggtcgtat

SEQ ID NO: 819796 - DNA, 75 bp, synthetic construct
  source 1..75: mol_type = other DNA
taaccccggtcaggtgatctccgtgaacgacaacattcccgatccggcttcgtttgccgatccggttgaacgcgc

SEQ ID NO: 819797 - DNA, 75 bp, synthetic construct
  source 1..75: mol_type = other DNA
tagccccacaggtgacctggggaactaacccaggacaggtgatctccgttaacgagaatatccctgatcccgctt

SEQ ID NO: 819798 - DNA, 75 bp, synthetic construct
  source 1..75: mol_type = other DNA
acatgaactttgtggctatcgcggaaaacggcaagctggtgggcttcaacctgctggtgggtggcggcctttcta

SEQ ID NO: 819799 - DNA, 75 bp, synthetic construct
  source 1..75: mol_type = other DNA
acggtagcattcgcctgaccaaccgtcagaccttccagttccacggtattctgaaaaagaacgtcaaacctgcac

SEQ ID NO: 819800 - DNA, 75 bp, synthetic construct
  source 1..75: mol_type = other DNA
aaccacggtagtgctcccgccgcagaacgatatcgatctgcatgccaacgacatgaacttcgtggcaatcgccga

SEQ ID NO: 819801 - DNA, 75 bp, synthetic construct
  source 1..75: mol_type = other DNA
cagcgatgagcatatcgtgatgcgtgtaacaggctgcccgaacggttgtggtcgcgcgatgctggcggaagtggg

SEQ ID NO: 819802 - DNA, 75 bp, synthetic construct
  source 1..75: mol_type = other DNA
cgaacgtgctgaacagaagctggaaccgcgtcatgcgatgctgctgcgctgccgcctgccgggtggggtaatcac

SEQ ID NO: 819803 - DNA, 75 bp, synthetic construct
  source 1..75: mol_type = other DNA
tattgctatcaaagacagaattgatacaagcgcgcccgtaataggtgaaatttatacacacctgatggctatatt

SEQ ID NO: 819804 - DNA, 75 bp, synthetic construct
  source 1..75: mol_type = other DNA
aacgtcattcacatcaccgctaccactgagcgcgaagcccgtgagcaatcaccggctggctgcgtgatggtattc

SEQ ID NO: 819805 - DNA, 75 bp, synthetic construct
  source 1..75: mol_type = other DNA
gccgaatggccaggtctggtcaccgcagaacgatgatcgtcgttatagcgaaagtggcagggtgatgctggtaga

SEQ ID NO: 819806 - DNA, 75 bp, synthetic construct
  source 1..75: mol_type = other DNA
tcagagcggcgacaacgaaatccgcggcttcccgctggcgagcttgtattactttggtcgcccggtagaagaatt

SEQ ID NO: 819807 - DNA, 75 bp, synthetic construct
  source 1..75: mol_type = other DNA
gtgtggggcgaaaacaccgtgcatggcatcttcccgaaagggcagaaggctggcatccagatggaagataaaggc

SEQ ID NO: 819808 - DNA, 75 bp, synthetic construct
  source 1..75: mol_type = other DNA
acagaaggcgaatggtggacagcacttcgtggtgtgccgattcgcgaaactgacgcacttctggaaacagaagcc

SEQ ID NO: 819809 - DNA, 75 bp, synthetic construct
  source 1..75: mol_type = other DNA
cggctggataatggcggaaacgatgaagggtttggccccataagcgctaacttaagggttgaaccatctgaagaa

SEQ ID NO: 819810 - DNA, 75 bp, synthetic construct
  source 1..75: mol_type = other DNA
ccattttcaaatatcatccgcaaccactggaaacaggtgcatttaagcaggataaaatcgtagagtgcaattgct

SEQ ID NO: 819811 - DNA, 75 bp, synthetic construct
  source 1..75: mol_type = other DNA
gtattagaaattctgatctagctaaatgcctgcaaaagggtggtgattgtcagggttatctcggtgatgctgcca

SEQ ID NO: 819812 - DNA, 75 bp, synthetic construct
  source 1..75: mol_type = other DNA
atgatctggcagcctgagttcacagataaaacactctccaggaaacccggggcggttcaaggtgttgaatttgag

SEQ ID NO: 819813 - DNA, 75 bp, synthetic construct
  source 1..75: mol_type = other DNA
gctgacgcaacagttggttaaaaacctgttcctctccagcgagcgttcttactggcgtaaagcgaacgaagccta

SEQ ID NO: 819814 - DNA, 75 bp, synthetic construct
  source 1..75: mol_type = other DNA
gatcatggagagtaactctccaacaggtcataaaaccactgtacgcaccgggcttccagatgcgacgtggcgtct

SEQ ID NO: 819815 - DNA, 75 bp, synthetic construct
  source 1..75: mol_type = other DNA
tggtctgcaaatgcaagatctcggtgagcagactctgcgtgatgctgctggtggtcaatatcagggctatcgcac

SEQ ID NO: 819816 - DNA, 75 bp, synthetic construct
  source 1..75: mol_type = other DNA
caatctttcagaaccttcctctgccgcaaatattgctaagttgatggttaaagcactgcatcgcattccaaaccg

SEQ ID NO: 819817 - DNA, 75 bp, synthetic construct
  source 1..75: mol_type = other DNA
ggcgcgacgcaggatgcaattgttgagatcactgctactgacggcatgaccactcattacggtcaaattacttat

SEQ ID NO: 819818 - DNA, 75 bp, synthetic construct
  source 1..75: mol_type = other DNA
ttgtctgatgagctcgagcgcaagatcattcgcctgttcgcgctggggatgagctaccaggatatcagccgggag

SEQ ID NO: 819819 - DNA, 75 bp, synthetic construct
  source 1..75: mol_type = other DNA
gtttccctcatccatctgcaactgggaatcaccctcctgcttatgcccgtgcaaattgtcatatttcatggcatt

SEQ ID NO: 819820 - DNA, 75 bp, synthetic construct
  source 1..75: mol_type = other DNA
caattgtcgtgcgtgacaaagccgggttttacgtcaatcgcatcttagcgccttacattaatgaagctatccgca

SEQ ID NO: 819821 - DNA, 75 bp, synthetic construct
  source 1..75: mol_type = other DNA
aatatccgcaaggtgatctacacaaccaacgcgatagaatcagtccaccgcaagttcaggaaactgaccaaaacc

SEQ ID NO: 819822 - DNA, 75 bp, synthetic construct
  source 1..75: mol_type = other DNA
gtggaatgcggttattcttggtttaggtatgggggaacggttatccgtccccaaagaaatcaaaaatatcatgcg

SEQ ID NO: 819823 - DNA, 75 bp, synthetic construct
  source 1..75: mol_type = other DNA
agtgatggcctgctgggcaggctgatgcgctgtatgttccaggggcgtcattttctgcaactggatgcggagttg

SEQ ID NO: 819824 - DNA, 75 bp, synthetic construct
  source 1..75: mol_type = other DNA
ggtattaacacaaagacggtgaatacctttctgtatacgggaatggcaaaaaacggactgtatggtgtgagtgtc

SEQ ID NO: 819825 - DNA, 75 bp, synthetic construct
  source 1..75: mol_type = other DNA
cggagaaccgccgttatatcccggactttgacgaatcctggctgataatcagtgatggcctgctgggcaggctga

SEQ ID NO: 819826 - DNA, 75 bp, synthetic construct
  source 1..75: mol_type = other DNA
cactcattacggtcaaattacttatctacaaggtcgacgtatattccctgcgccaggcctcgtactgtatggcga

SEQ ID NO: 819827 - DNA, 75 bp, synthetic construct
  source 1..75: mol_type = other DNA
ggtatgggggaacggttatccgtccccaaagaaatcaaaaatatcatgcgtgatactggaacggcgcatttaatg

SEQ ID NO: 819828 - DNA, 75 bp, synthetic construct
  source 1..75: mol_type = other DNA
tgtggcgatttctgtgcttttatcggctatgtgggctggaatgatataaaagatcgcctcgatgaatttgccaac

SEQ ID NO: 819829 - DNA, 75 bp, synthetic construct
  source 1..75: mol_type = other DNA
tgcgcaggcgaaagaagaccgcaaagccgaagaagaaaaagttcgtcagcactacgaacaggagaaagcgaccaa

SEQ ID NO: 819830 - DNA, 75 bp, synthetic construct
  source 1..75: mol_type = other DNA
ctcgagcgaaaccgacaactggcagagtacgctgatcgggcagccgaagcaggaagagtctgtgaaaagcagtac

SEQ ID NO: 819831 - DNA, 75 bp, synthetic construct
  source 1..75: mol_type = other DNA
tttcgagccttcaggacagtgaccgttacgacagcagacagaacagcgtggccgcaggtggaagcttcacgtttg

SEQ ID NO: 819832 - DNA, 75 bp, synthetic construct
  source 1..75: mol_type = other DNA
agggctgacatcactggtaacgctgctggctcccggaacacaggcccgtgtctggcatcatgaccgacgacggat

SEQ ID NO: 819833 - DNA, 75 bp, synthetic construct
  source 1..75: mol_type = other DNA
ctggggcgttatcagcgggttcaggaacattatcaacgtaaggaggctcaggaaaatggcgattatcgctggtaa

SEQ ID NO: 819834 - DNA, 75 bp, synthetic construct
  source 1..75: mol_type = other DNA
gtgctgtcttacttaatggcaattcactttgttttatttggaaactctactgatttaaaaaacttctggaaatat

SEQ ID NO: 819835 - DNA, 75 bp, synthetic construct
  source 1..75: mol_type = other DNA
ggtaatgccagtaaggataccgggaatgataatagctgggataccggtggtggttgtgaaggctcacgggaacag

SEQ ID NO: 819836 - DNA, 75 bp, synthetic construct
  source 1..75: mol_type = other DNA
aatatattgtcggtgtgtcgtcagctctttttttgattttttcgctaatttctctttttgaaactattcagaatg

SEQ ID NO: 819837 - DNA, 75 bp, synthetic construct
  source 1..75: mol_type = other DNA
catccatgaaaaccgtccgggcgtgctgactgcgctgaacaaaatatttgccgagcagggcgttaacattgccgc

SEQ ID NO: 819838 - DNA, 75 bp, synthetic construct
  source 1..75: mol_type = other DNA
tcagagtgccagcaccatcggctccactgccggtaatgtcagtattactgcgggcaaacaggctcatatcagcgg

SEQ ID NO: 819839 - DNA, 75 bp, synthetic construct
  source 1..75: mol_type = other DNA
acaggcaggcaggaactcggttgagaataattatcttagcgtgtctgaaaagacagagcttgagatagcaaaaca

SEQ ID NO: 819840 - DNA, 75 bp, synthetic construct
  source 1..75: mol_type = other DNA
gctgcatgtgccaaaaaaggtacatcgatcacagatgtggtgaaccagcttgtagataaatggctcaaagagaac

SEQ ID NO: 819841 - DNA, 75 bp, synthetic construct
  source 1..75: mol_type = other DNA
gtgttatcttacttaatagcaattcattttgttttacttgggaattcttctgatttaaaaagcttttggaaatct

SEQ ID NO: 819842 - DNA, 75 bp, synthetic construct
  source 1..75: mol_type = other DNA
agcaccttccgcaattccccgggattgccggttgtataaagtggcagaggttcaacctgctgaccgtcatgccga

SEQ ID NO: 819843 - DNA, 75 bp, synthetic construct
  source 1..75: mol_type = other DNA
atgctgcagcgcttgattttatcgaatcacgccatggtactggtggcatagtgtttgtcgacggctggacgggaa

SEQ ID NO: 819844 - DNA, 75 bp, synthetic construct
  source 1..75: mol_type = other DNA
atgaaaaatgaaacaattaagtgcccgttctgctttcaggagagtccgtttggtgtccgtgtctgcaccggttgt

SEQ ID NO: 819845 - DNA, 75 bp, synthetic construct
  source 1..75: mol_type = other DNA
ctctgatgaaaaatcgtctttctccctggaatctgggagccacgctatacatgcctgcaacacgggaagatattg

SEQ ID NO: 819846 - DNA, 75 bp, synthetic construct
  source 1..75: mol_type = other DNA
ttgccggtggtgattgcaggcgatctcagttggtcaggctttcgcccggatatgattaatcgcttgcatcctgca

SEQ ID NO: 819847 - DNA, 75 bp, synthetic construct
  source 1..75: mol_type = other DNA
ttgccggtagtgattgctggcgatcttagctggtctggtttccgtccggacatgattaaccgtctgcatccagcg

SEQ ID NO: 819848 - DNA, 75 bp, synthetic construct
  source 1..75: mol_type = other DNA
aacctggtgtcagcttgatcttgatgatggacgcacagtaaacgccattgtgtttattatggacccgcgacatcc

SEQ ID NO: 819849 - DNA, 75 bp, synthetic construct
  source 1..75: mol_type = other DNA
ttttgcattagtaattttaatgaaattatatattcgcaagaaatttgcacacagagcagttttcatacataaaag

SEQ ID NO: 819850 - DNA, 75 bp, synthetic construct
  source 1..75: mol_type = other DNA
caagagtaaaaattggtagtaacgttgatatcggagctaattgttgcatcattggattatcacgtaaaattgggg

SEQ ID NO: 819851 - DNA, 75 bp, synthetic construct
  source 1..75: mol_type = other DNA
ggttatggatcgttgatgtggaatccggcgctggagtttaccgagtcctgtaccggtacacttgttgggtggcat

SEQ ID NO: 819852 - DNA, 75 bp, synthetic construct
  source 1..75: mol_type = other DNA
atgccgattgtaaaacggcatttggcgccattgaagactcacttttatggtcggcagaacaacgggcggcctcgc

SEQ ID NO: 819853 - DNA, 75 bp, synthetic construct
  source 1..75: mol_type = other DNA
aggacgatgggctgaatgatttgctggtatcggtaaaaaaactgctggcggagaattttccggatggtgtgttac

SEQ ID NO: 819854 - DNA, 75 bp, synthetic construct
  source 1..75: mol_type = other DNA
tttttaccttgcctataaccctgctggagttgattattttgagttagatccacttccagatctctctaatgacga

SEQ ID NO: 819855 - DNA, 75 bp, synthetic construct
  source 1..75: mol_type = other DNA
atgaaaatcaggctactgatcctcagcctgctggtttctgtgcctgcctttgcctggcagccgcaaactggcgac

SEQ ID NO: 819856 - DNA, 75 bp, synthetic construct
  source 1..75: mol_type = other DNA
ttgccgggctcagccgggacccggaaaacgccaacggcagcattgcaccgatatttgacaaggagaaagaacaga

SEQ ID NO: 819857 - DNA, 75 bp, synthetic construct
  source 1..75: mol_type = other DNA
gctggttatgttcttctcaccgctggtggcgatggttcctccttacgcaaccgccggagcgttaatctttgttgg

SEQ ID NO: 819858 - DNA, 75 bp, synthetic construct
  source 1..75: mol_type = other DNA
cgtgctgatgacttcgagcctggcgcgcgttaactgggatgattttaccgaatcggtgcccgcatttattaccac

SEQ ID NO: 819859 - DNA, 75 bp, synthetic construct
  source 1..75: mol_type = other DNA
taatgggattaaaaaatactggcgttattgtcgccaataaagacaccctggtgatgattggcgatttaagttctc

SEQ ID NO: 819860 - DNA, 75 bp, synthetic construct
  source 1..75: mol_type = other DNA
agcatcggtaatctgacttctcacagcgtgctgctggggatcctcggtttcttcatcatcgccattctggcctcg

SEQ ID NO: 819861 - DNA, 75 bp, synthetic construct
  source 1..75: mol_type = other DNA
gatgatgccgttcagcttttcgattaccgaaggtattgagctgggctttatctcctactgcgtgatgaagattgg

SEQ ID NO: 819862 - DNA, 75 bp, synthetic construct
  source 1..75: mol_type = other DNA
atgcagcaaaattcagtgatttcagattctgcgggggcaattactcgttactttgcaaaagctaacttgcctact

SEQ ID NO: 819863 - DNA, 75 bp, synthetic construct
  source 1..75: mol_type = other DNA
cggggggacttgcaggcaacagtacggcgtctgccggtacgggtgcacaggcaggaactcggctgaaaacaatat

SEQ ID NO: 819864 - DNA, 75 bp, synthetic construct
  source 1..75: mol_type = other DNA
atgaggggatctctcagagctctgacatttgtcatggctgcaatgtatgcggctcatgaactgggagcgcttggt

SEQ ID NO: 819865 - DNA, 75 bp, synthetic construct
  source 1..75: mol_type = other DNA
tataatggcatcgtttctgcgccgccgagcgtaatgactgtcgtgggtcatgtagatttagccgggtcgtttaac

SEQ ID NO: 819866 - DNA, 75 bp, synthetic construct
  source 1..75: mol_type = other DNA
atgtgtaaccgcttttccaaaaaccttggtttgggagaaggttcggcattacccgttggtgtgcctgtcccgtgg

SEQ ID NO: 819867 - DNA, 75 bp, synthetic construct
  source 1..75: mol_type = other DNA
attttgccgcttatcgtgacgagttaatcatctccaccaaagctggctacgatatgtggcccggcccgtatggct

SEQ ID NO: 819868 - DNA, 75 bp, synthetic construct
  source 1..75: mol_type = other DNA
atgaccctaacattatgaatcatattggagctttcgctgtgaaagactcagatgttaataattatattaccaggt

SEQ ID NO: 819869 - DNA, 75 bp, synthetic construct
  source 1..75: mol_type = other DNA
caggtgcaggaaaaacccaccgcattgttagtgaggctattcaagccattgacaaaggagaacgtattttaatca

SEQ ID NO: 819870 - DNA, 75 bp, synthetic construct
  source 1..75: mol_type = other DNA
agtttaaacgcgaatccgctcaactggtagttgaccagacatacacggtggcagatgccgccaaagctatggatg

SEQ ID NO: 819871 - DNA, 75 bp, synthetic construct
  source 1..75: mol_type = other DNA
tctgacatttagcgccgaagaactggcgcagattgaccagcatatcgccgatggcgaactgaatctgtggcaggc

SEQ ID NO: 819872 - DNA, 75 bp, synthetic construct
  source 1..75: mol_type = other DNA
tgatcgagtgacgtcggtattgattggtgccagccgtccggagcaactggaggagaacgtacaggcgctaaataa

SEQ ID NO: 819873 - DNA, 75 bp, synthetic construct
  source 1..75: mol_type = other DNA
caaaagatgaatgggaactggctacgattttcaaaaagacatacacacaaggacggggacttgatgccgcaaata

SEQ ID NO: 819874 - DNA, 75 bp, synthetic construct
  source 1..75: mol_type = other DNA
tggtgagtttattcgtggctgggatgacgggcgcggtattgatgcaggacgtgttttattgagcattcagacagg

SEQ ID NO: 819875 - DNA, 75 bp, synthetic construct
  source 1..75: mol_type = other DNA
cttccgccactccgccgacaggctggctgaaatgcaacggagcagctttttctgctgaagaatacccggaactgg

SEQ ID NO: 819876 - DNA, 75 bp, synthetic construct
  source 1..75: mol_type = other DNA
tgcaaccagaaaatgccggagttgcagtgaatgaacgcggggccatcgtcgttgacaaccgattacataccaccg

SEQ ID NO: 819877 - DNA, 75 bp, synthetic construct
  source 1..75: mol_type = other DNA
aaattcagtgggcgaaggacggcagcttgacgccggaagaagtcgattatgtcattgcactggcgcataagctga

SEQ ID NO: 819878 - DNA, 75 bp, synthetic construct
  source 1..75: mol_type = other DNA
tgattatcatgctcttagccccgggtgtgcaggcacacaatttcgtcactggcaaaacggttacccccgtttata

SEQ ID NO: 819879 - DNA, 75 bp, synthetic construct
  source 1..75: mol_type = other DNA
taatctgagtcgaaagtcgctttgtgccaaacttctttgccgactggggaagaggaacagaaacattataatgca

SEQ ID NO: 819880 - DNA, 75 bp, synthetic construct
  source 1..75: mol_type = other DNA
agtgaagataactggcaacaggcagtatcagaagaacgtgctatccgttgtgccaaaagattaattcaatgtaaa

SEQ ID NO: 819881 - DNA, 75 bp, synthetic construct
  source 1..75: mol_type = other DNA
gctggcaaatctcctgcgtgagcgtggcgttaaaccgggcgacagcgtagcggtggcgctaccgcgctcggtctt

SEQ ID NO: 819882 - DNA, 75 bp, synthetic construct
  source 1..75: mol_type = other DNA
gtatgggaatttttctggccgtttatcgctggggcaaaactggtaatggcagagccggaagcgcaccgcgatccg

SEQ ID NO: 819883 - DNA, 75 bp, synthetic construct
  source 1..75: mol_type = other DNA
aacgaatatacttaaccgtgagggaatttttgcctttaatggctgtgagcgcagattcagacaacctgtaagtga

SEQ ID NO: 819884 - DNA, 75 bp, synthetic construct
  source 1..75: mol_type = other DNA
agataactggcaacatacagtatcggaagaacgcgctatccgttgtgccaaaagattaattcaatgtaaaggata

SEQ ID NO: 819885 - DNA, 75 bp, synthetic construct
  source 1..75: mol_type = other DNA
gacgaagatcgcgctgggtcaccatcgtgacgatatcctgcaaacgctgttcttaaatatgttctacggtggcaa

SEQ ID NO: 819886 - DNA, 75 bp, synthetic construct
  source 1..75: mol_type = other DNA
taatctatatggcccgacggaagcggcggtagatgtcagctggtatccggcttttggcgaggaactggcacaggt

SEQ ID NO: 819887 - DNA, 75 bp, synthetic construct
  source 1..75: mol_type = other DNA
cggacgatcgcctgaaaatgatgctggaagatgcgcgtccgtcgctgttaattaccaccgacgatcaactgccgc

SEQ ID NO: 819888 - DNA, 75 bp, synthetic construct
  source 1..75: mol_type = other DNA
gtggcagataaccgctggtactggtatcagcgttatcaccatttgctggtcgatggcttcagtttcccggccatt

SEQ ID NO: 819889 - DNA, 75 bp, synthetic construct
  source 1..75: mol_type = other DNA
acgctgaacgcctgaaaatgctgattgcgcagttcgctgcggatccggcgctgttgtgcggcgatgtcgatatta

SEQ ID NO: 819890 - DNA, 75 bp, synthetic construct
  source 1..75: mol_type = other DNA
acagcggacgtgcggcgggagaggaaccgcttttcggcccggtactcaatatcaaggtatttgattatcaactgg

SEQ ID NO: 819891 - DNA, 75 bp, synthetic construct
  source 1..75: mol_type = other DNA
tgacggctaccggacccgtgctcaacgttttgccgttgggtattcatattgcggcgcaagaaacgctgccggaac

SEQ ID NO: 819892 - DNA, 75 bp, synthetic construct
  source 1..75: mol_type = other DNA
tatggtcacccacatcgacgagagcggttttctgcgtttcaccaccattggtggctggtggaatcagtcgatgct

SEQ ID NO: 819893 - DNA, 75 bp, synthetic construct
  source 1..75: mol_type = other DNA
gaagggcgtgatatggatgtgacggttaaacctgctgcccatccggtgggaacgacgctggaagtgttggatctg

SEQ ID NO: 819894 - DNA, 75 bp, synthetic construct
  source 1..75: mol_type = other DNA
ggagatcgacccgcatcaggtggacgtcaacgtgcaccccgccaaacacgaagtgcgtttccatcagtcgcgtct

SEQ ID NO: 819895 - DNA, 75 bp, synthetic construct
  source 1..75: mol_type = other DNA
ctctcgtgctgctgcacgcaagaattcagagaatgtcgttgtgctcaagaatatgcgtaagcgtcaacggagcac

SEQ ID NO: 819896 - DNA, 75 bp, synthetic construct
  source 1..75: mol_type = other DNA
gtcaacgtgcaccctgccaaacacgaagtgcgtttccatcagtcgcgtctggtgcatgactttatctatcagggc

SEQ ID NO: 819897 - DNA, 75 bp, synthetic construct
  source 1..75: mol_type = other DNA
tgagatcgacccgcatcaggtggatgttaacgtgcaccctgccaaacacgaagtgcgttttcatcagtcgcgcct

SEQ ID NO: 819898 - DNA, 75 bp, synthetic construct
  source 1..75: mol_type = other DNA
gggataagtttgtttttcaccggcttatcaggaacggtatgcagaggcagagaggttttcttctgtggtggcgcc

SEQ ID NO: 819899 - DNA, 75 bp, synthetic construct
  source 1..75: mol_type = other DNA
ataaaaaatccgatttcttatttccatattggcacatttttattatcaggaaaaaaacgtcatcttctggaatac

SEQ ID NO: 819900 - DNA, 75 bp, synthetic construct
  source 1..75: mol_type = other DNA
atgtctgaccgttacttttctgtatcactgtatcaccagtctctctgtgctttttcatggctactgtcatattta

SEQ ID NO: 819901 - DNA, 75 bp, synthetic construct
  source 1..75: mol_type = other DNA
aaccgcttacgcctctgagacacaaaaaacgaccaaagagcaaccttcacatctggcacaatccattcgcgttgc

SEQ ID NO: 819902 - DNA, 75 bp, synthetic construct
  source 1..75: mol_type = other DNA
ataaaacccagcgtatattaggggcatcactgttgtgtgttgactcccacgaaataatcaatattgtgaaaatgg

SEQ ID NO: 819903 - DNA, 75 bp, synthetic construct
  source 1..75: mol_type = other DNA
attatggaagatgtacctgataactgtacttatgtcaccaggaaggaatccagagtgataattcgcgaacagtaa

SEQ ID NO: 819904 - DNA, 75 bp, synthetic construct
  source 1..75: mol_type = other DNA
cggcagcgtggaagaagaagttgggctacgcggggcacaaacctcggcggaacacattaaaccggatgtggtgat

SEQ ID NO: 819905 - DNA, 75 bp, synthetic construct
  source 1..75: mol_type = other DNA
ctgccagtgcgttcaacaccgacaagctgctgtggctgaaccatcactacattaacgcgctgccgccggagtatg

SEQ ID NO: 819906 - DNA, 75 bp, synthetic construct
  source 1..75: mol_type = other DNA
aacggcttacgcttcagaaacgcaaaaagtcaccaaagagaaacctgcacatctggcgcaatccattcgcgttgc

SEQ ID NO: 819907 - DNA, 75 bp, synthetic construct
  source 1..75: mol_type = other DNA
tcgcaaaaccaaattgatattgagtgttggtgcaccttcttcaccagtcatatccaatttctgtatgtatgagtt

SEQ ID NO: 819908 - DNA, 75 bp, synthetic construct
  source 1..75: mol_type = other DNA
atggcaactgatactttgacgcacgcgactgtccacgcgcacgaacacgggcaccacgatgcaggcggaaccaaa

SEQ ID NO: 819909 - DNA, 75 bp, synthetic construct
  source 1..75: mol_type = other DNA
gttaacggaaaagcaaaagcaacagccgctgtcatttgatgagatgttcattgatattggcgcgaacagtcgcga

SEQ ID NO: 819910 - DNA, 75 bp, synthetic construct
  source 1..75: mol_type = other DNA
tgactcaggagcaggcgaatacgctggtgatcaacgccgacgaaaatattctgcaaggctggctggatttgcagc

SEQ ID NO: 819911 - DNA, 75 bp, synthetic construct
  source 1..75: mol_type = other DNA
tgaaagccgcgcgttgtctgcctgttgttttggcagccctgattttcgccggttgtggcacccatactcccgatc

SEQ ID NO: 819912 - DNA, 75 bp, synthetic construct
  source 1..75: mol_type = other DNA
tgttagccagacggcggcaagcccgccgccgcgaacggttacgcgccgaaggtgttagcgtgacagtcacgctaa

SEQ ID NO: 819913 - DNA, 75 bp, synthetic construct
  source 1..75: mol_type = other DNA
aacagcttacgcctcagaaatgcaaaaagtgaccaaagaaaaacctgcacatctggcgcaatccattcgcgttgc

SEQ ID NO: 819914 - DNA, 75 bp, synthetic construct
  source 1..75: mol_type = other DNA
tgcaatgggccaaagacggggcgctcacaccggaagaggtgcagcaagtgatggacctgctgcaaaagttgctca

SEQ ID NO: 819915 - DNA, 75 bp, synthetic construct
  source 1..75: mol_type = other DNA
gagagtgcctgctggctgataatatgcaggatggtgtccggattgcccgtgataatcctgacagcggtgtggtgg

SEQ ID NO: 819916 - DNA, 75 bp, synthetic construct
  source 1..75: mol_type = other DNA
gttttgaatgctacgggatttccgatatcccgtagttctccctatgcaacggttagtggttctgataagaaattt

SEQ ID NO: 819917 - DNA, 75 bp, synthetic construct
  source 1..75: mol_type = other DNA
caattgatcgcttagtcgaagcctacggctttagcacccgacaagccctagcaaaccatttgcaggtttcaaaaa

SEQ ID NO: 819918 - DNA, 75 bp, synthetic construct
  source 1..75: mol_type = other DNA
taaaaatttcagacaatgatttatcatttgaatgtaaaatttcagatattgatgttattgcaaaatgcaaattta

SEQ ID NO: 819919 - DNA, 75 bp, synthetic construct
  source 1..75: mol_type = other DNA
atggtaagtggatcgttgatattgatggcgaggttgctatcaggaatctgacaagactgccgggacgtcgcctaa

SEQ ID NO: 819920 - DNA, 75 bp, synthetic construct
  source 1..75: mol_type = other DNA
tccgtatggtcaggtggagatgggcaaacgttacgtgaaagcgctgggcggttctgcccgtgtcatcaacctggc

SEQ ID NO: 819921 - DNA, 75 bp, synthetic construct
  source 1..75: mol_type = other DNA
tcgtccgcaaaaaccgattgttgctgtgatttacacccacagccacgccgaccattatggcggtgtgaaaggcat

SEQ ID NO: 819922 - DNA, 75 bp, synthetic construct
  source 1..75: mol_type = other DNA
tgagcaggattgttattgcgttcactgccgccagcggcatgatgataaataccgcttacgcaacagatgaagcga

SEQ ID NO: 819923 - DNA, 75 bp, synthetic construct
  source 1..75: mol_type = other DNA
cggcctacgaatggcgcggaaatctgtaggcctgataagcgtggcgcttcaggcattggccaccacagccggatg

SEQ ID NO: 819924 - DNA, 75 bp, synthetic construct
  source 1..75: mol_type = other DNA
ttggctggtgcgaacgttacggcgtctgacctgcatgttcatgccggatgcggcgtgaacgccttatccggccta

SEQ ID NO: 819925 - DNA, 75 bp, synthetic construct
  source 1..75: mol_type = other DNA
ggggatgatcggcctgggcttctccatcacttatggcgtgggtaaaacgctggtttcttactacgccgacggcaa

SEQ ID NO: 819926 - DNA, 75 bp, synthetic construct
  source 1..75: mol_type = other DNA
gaagtctcctgtgcgcctgaagaaataccggtcttaccggggaaatatgggactcgctgcagaaaatatccttca

SEQ ID NO: 819927 - DNA, 75 bp, synthetic construct
  source 1..75: mol_type = other DNA
tgatggatgccggactgccttatagcgtattacgcgatcagatttttactcacccgtcgatgagcgaatcgctca

SEQ ID NO: 819928 - DNA, 75 bp, synthetic construct
  source 1..75: mol_type = other DNA
cggcctacgagtggcgcaagaatctgtaggcctgataagcgtagcgcatcaggcattggtcaccacagccggatg

SEQ ID NO: 819929 - DNA, 75 bp, synthetic construct
  source 1..75: mol_type = other DNA
gtcatggcatcagctatctccatctgctctctgtggtcatcccatccactctgttggcggttttggtgatgtcct

SEQ ID NO: 819930 - DNA, 75 bp, synthetic construct
  source 1..75: mol_type = other DNA
aggtttaccagaacgcgctgggaatgcgcgtgggcgaacagcagaagttgaaagagtttgatctcagcaacccgc

SEQ ID NO: 819931 - DNA, 75 bp, synthetic construct
  source 1..75: mol_type = other DNA
cagggctgcggagataccgcgcagtacgttttattatcatctaaaggctctcagcaagcctgacaagtatgcgga

SEQ ID NO: 819932 - DNA, 75 bp, synthetic construct
  source 1..75: mol_type = other DNA
gtatggaaactctctgcacgatgctgacagctactacctcatacgggcttttgaaagtgaagaacagatgaaaag

SEQ ID NO: 819933 - DNA, 75 bp, synthetic construct
  source 1..75: mol_type = other DNA
atgaaagatttaacactcaaatttgccgacagggccgacttttcggcctttatggagagtactggctattatgat

SEQ ID NO: 819934 - DNA, 75 bp, synthetic construct
  source 1..75: mol_type = other DNA
gaaacggtagtttcaccacaagccgttttcgatgcgccacaactcactacggtcgccaaagaatggccgctgttt

SEQ ID NO: 819935 - DNA, 75 bp, synthetic construct
  source 1..75: mol_type = other DNA
gcctgctggtttctgtgcctgcctttgcctggcagccgcaaactggcgacatcatctttcaaatctctcgctcat

SEQ ID NO: 819936 - DNA, 75 bp, synthetic construct
  source 1..75: mol_type = other DNA
agtttaaacgcgaatccgctcaactggtggttgaccagagatacacagtggcagatgccgccaaagctatggatg

SEQ ID NO: 819937 - DNA, 75 bp, synthetic construct
  source 1..75: mol_type = other DNA
agtttaaacgcgaatccgctcaactggtcgttgaccagaaatacacggtggcagatgccgccaaagctatggatg

SEQ ID NO: 819938 - DNA, 75 bp, synthetic construct
  source 1..75: mol_type = other DNA
agtttaaacgcgaatccgctcaactggttgttgaccagatatacaccgtggcagatgccgccaaagctatggatg

SEQ ID NO: 819939 - DNA, 75 bp, synthetic construct
  source 1..75: mol_type = other DNA
gccgggataaacaacttttctctggtcacaagaccgaaggacaggtattaatctatgacaggaaggtgaagatct

SEQ ID NO: 819940 - DNA, 75 bp, synthetic construct
  source 1..75: mol_type = other DNA
gcctctgaatggggagcgctggagaaagaattcatgcgtttcagggcagatttaccgctgaattacgtccgccgg

SEQ ID NO: 819941 - DNA, 75 bp, synthetic construct
  source 1..75: mol_type = other DNA
aagaatttatgcggtttaaggcggatttaccgctgaactacgtccgccgcgaggattacatccgtgggcagacgg

SEQ ID NO: 819942 - DNA, 75 bp, synthetic construct
  source 1..75: mol_type = other DNA
ttattgacgtgataggtaacgtgtacaaagaaaccggagaacttaccgaagatggcgagccggtatgtgttaagg

SEQ ID NO: 819943 - DNA, 75 bp, synthetic construct
  source 1..75: mol_type = other DNA
gacagggccgacttttcggcctttatggaaagtaatggctattatgatgacgagtcgatgcaggatgatattctt

SEQ ID NO: 819944 - DNA, 75 bp, synthetic construct
  source 1..75: mol_type = other DNA
atgaaagatttaacactcaaatttgccgacagggccgatttttcggcctttatgggaagtattggctattataat

SEQ ID NO: 819945 - DNA, 75 bp, synthetic construct
  source 1..75: mol_type = other DNA
aatcaatttttcgctggtggctgttaacctcgatcaaaagcaaccgggcttcccggaacacgttctgcccgagta

SEQ ID NO: 819946 - DNA, 75 bp, synthetic construct
  source 1..75: mol_type = other DNA
ttttgctggcgatctttttgggcgccagattagggggaattggtattggttttgcaggtggattgggggtgctgg

SEQ ID NO: 819947 - DNA, 75 bp, synthetic construct
  source 1..75: mol_type = other DNA
gacagggccgacttttcggcctttatggacagaattggctattatgatgacgagtcgatgcaggatgatattctt

SEQ ID NO: 819948 - DNA, 75 bp, synthetic construct
  source 1..75: mol_type = other DNA
gacagggccgacttttcggcctttatggataggaatggctattatgatgacgagtcgatgcaggatgatattctt

SEQ ID NO: 819949 - DNA, 75 bp, synthetic construct
  source 1..75: mol_type = other DNA
ctgctcatccgtactttcgcgcttctgatgcaggggaaattgttaatcagaaccgagcgcgccgttttaatgaaa

SEQ ID NO: 819950 - DNA, 75 bp, synthetic construct
  source 1..75: mol_type = other DNA
ggctgctgcaattactgtttatgctgcgcctaatgccgtggtatctctcacagccgtttaatgcctcattctgga

SEQ ID NO: 819951 - DNA, 75 bp, synthetic construct
  source 1..75: mol_type = other DNA
cagacagggccgacttttcggcctttatggagaggattggctattatgatgacgagtcgatgcaggatgatattc

SEQ ID NO: 819952 - DNA, 75 bp, synthetic construct
  source 1..75: mol_type = other DNA
atatgattgaagaaggcgatcgcatcatggtttgcctctccgggggtaaagacagctataccatgctggagattc

SEQ ID NO: 819953 - DNA, 75 bp, synthetic construct
  source 1..75: mol_type = other DNA
cctgtggtgcgttaggttacactgatgccggtctggtttttttaggcgctggcgtcttctcctggttgagtcttg

SEQ ID NO: 819954 - DNA, 75 bp, synthetic construct
  source 1..75: mol_type = other DNA
cggtgccgctgtttatctttaccaattttattattgcattattgctcatccgtactttcgcgcttctgatgcagg

SEQ ID NO: 819955 - DNA, 75 bp, synthetic construct
  source 1..75: mol_type = other DNA
gacacgggctggcatctgcctactggaattctgcaggaaactggcacgcttaatttattcctgaaaaccaccgac

SEQ ID NO: 819956 - DNA, 75 bp, synthetic construct
  source 1..75: mol_type = other DNA
gcgggctattgtttgccagcattttcaggggcctgttccgccaccttcaatgcttaaaaagtatgatcaactggt

SEQ ID NO: 819957 - DNA, 75 bp, synthetic construct
  source 1..75: mol_type = other DNA
tctgctgtactctcaggctgcaaccgcaaaagcactgatgccgatggctctggcactgaacgtttcaccgctgac

SEQ ID NO: 819958 - DNA, 75 bp, synthetic construct
  source 1..75: mol_type = other DNA
aaaaggcttcatcgaaaggggccggcgtggtggccgttgcccgggcagaaaatgaagcgtgtcgtctcggcctgc

SEQ ID NO: 819959 - DNA, 75 bp, synthetic construct
  source 1..75: mol_type = other DNA
aaagcggactgctccgctgctgtgtgaaccggactcacaaaaacgggcgaccggatggcatcagctgtattccgc

SEQ ID NO: 819960 - DNA, 75 bp, synthetic construct
  source 1..75: mol_type = other DNA
tgtcaataaccaggctttccgccagttcggttttggcggtaccccatgggtgttatccgataccggctggcacct

SEQ ID NO: 819961 - DNA, 75 bp, synthetic construct
  source 1..75: mol_type = other DNA
atgttctgatgctgaaagacagcgatgatttatctatcgatctgttcggcctcaaccatatggtgttcattaagg

SEQ ID NO: 819962 - DNA, 75 bp, synthetic construct
  source 1..75: mol_type = other DNA
gcgtaaaaaacattttcgatctgccgtttagcgaaggcttaattcgttcgctgaatctgttgccatgttcttatc

SEQ ID NO: 819963 - DNA, 75 bp, synthetic construct
  source 1..75: mol_type = other DNA
taaggcggtgctagctcatccagggcggtacaatcttagtgctaaatggctgaaaagattggttgcgcattttgc

SEQ ID NO: 819964 - DNA, 75 bp, synthetic construct
  source 1..75: mol_type = other DNA
atgttttagccttgaatgagaacgatgatttatctatcgatctgttcggcctgaaccacatggtgtttattaagg

SEQ ID NO: 819965 - DNA, 75 bp, synthetic construct
  source 1..75: mol_type = other DNA
gttgcccgcccgtgaactggatgaacgaattccattaagtcatggttatcttgggcaggaaactaacggtgctgg

SEQ ID NO: 819966 - DNA, 75 bp, synthetic construct
  source 1..75: mol_type = other DNA
ctgaattatggctggtggatgtcgaagggggtaaggcaaaactggatattatctttgatctctgccagcgaatga

SEQ ID NO: 819967 - DNA, 75 bp, synthetic construct
  source 1..75: mol_type = other DNA
gccatgaaatccgtattcttcatcgtgcagttaaataccttccaccagcagggcataacgggcttactattaggt

SEQ ID NO: 819968 - DNA, 75 bp, synthetic construct
  source 1..75: mol_type = other DNA
gaccaggtgagcacaaaggtgatcgtcgttcgcgtggctgaacacaaagaagaagacgaaaagacgcaggatcaa

SEQ ID NO: 819969 - DNA, 75 bp, synthetic construct
  source 1..75: mol_type = other DNA
caatgagcagggctggcacaagtcactttctaacgttgcggttaaaaacgtcctaggtatctctaaagacgtttt

SEQ ID NO: 819970 - DNA, 75 bp, synthetic construct
  source 1..75: mol_type = other DNA
tcccccgctggaagacatggagctttaccagtcgtttactgatgaattctttggtcccgcatttgcggtgctggg

SEQ ID NO: 819971 - DNA, 75 bp, synthetic construct
  source 1..75: mol_type = other DNA
tccgttagtgctctgttagccgaagcccttgtgctcaaactacgcaaacagccaatagccgcaacgttgaaagat

SEQ ID NO: 819972 - DNA, 75 bp, synthetic construct
  source 1..75: mol_type = other DNA
ccaggcgctggacgacggcgagctggagttccttgaaggtcgctggttaagtattcatgtgcgtgatattgatct

SEQ ID NO: 819973 - DNA, 75 bp, synthetic construct
  source 1..75: mol_type = other DNA
gtgttggataaactgcgttcccgtattgtgcatttggggccatctctgttgagtgtaccggtaaaactgacgcca

SEQ ID NO: 819974 - DNA, 75 bp, synthetic construct
  source 1..75: mol_type = other DNA
gaaaacatcatgggggttctgattactggaggactccatttttattattcaagaacttacaccgtgaatttattt

SEQ ID NO: 819975 - DNA, 75 bp, synthetic construct
  source 1..75: mol_type = other DNA
caccgtttccaagtgcagtcgttgtttttaaaaagggaccacgcaggcatgaaattacacatacggtttgctgtg

SEQ ID NO: 819976 - DNA, 75 bp, synthetic construct
  source 1..75: mol_type = other DNA
agacccaccatttacccacctgagacgctcgacagcttcataaaactatacaggcaaggcaaacccattaagtgc

SEQ ID NO: 819977 - DNA, 75 bp, synthetic construct
  source 1..75: mol_type = other DNA
cccgtgttacggaaaataccgacctggtaacagcgattaacgatgttgattccagcgttatcggtatcgtggcaa

SEQ ID NO: 819978 - DNA, 75 bp, synthetic construct
  source 1..75: mol_type = other DNA
cggggtttctgctgcatataccatcgataaaacatttaccattaatgcaacattcactgcccccagttgtgatat

SEQ ID NO: 819979 - DNA, 75 bp, synthetic construct
  source 1..75: mol_type = other DNA
acaccggtaacggaagtccataacacagatcagtttggtcctgttaaggctgcagtgacatttgaagttatatat

SEQ ID NO: 819980 - DNA, 75 bp, synthetic construct
  source 1..75: mol_type = other DNA
gaaaagtgtgctgctgagttatgtcatttgcttaacattccacatgctagctatgatttggcgcgatacaatggt

SEQ ID NO: 819981 - DNA, 75 bp, synthetic construct
  source 1..75: mol_type = other DNA
ccagctggagaaatatctggagccgatccccaaagcggactgggagcaggtgaaagcgtattattctgccatgta

SEQ ID NO: 819982 - DNA, 75 bp, synthetic construct
  source 1..75: mol_type = other DNA
tggttttcttgacctggagaaaagtcgtcgccgcttgcgtcgcgataaagcgattaatcatgacttccgccagct

SEQ ID NO: 819983 - DNA, 75 bp, synthetic construct
  source 1..75: mol_type = other DNA
cgaagatcgtttttggtgaagcggtgaaaattgagggtgaatggcgagcgttgctggtgactgaagatatggcgg

SEQ ID NO: 819984 - DNA, 75 bp, synthetic construct
  source 1..75: mol_type = other DNA
gcttggtcgcgaattaccgcgcagcgggactattgcggaactggaatcaatcgtcgccggcgctgagtcagagct

SEQ ID NO: 819985 - DNA, 75 bp, synthetic construct
  source 1..75: mol_type = other DNA
cgcgcattgacgatttgagcgcccagctcggtcgcgaattgccgcgcagcgggactattgctgaactggaatcaa

SEQ ID NO: 819986 - DNA, 75 bp, synthetic construct
  source 1..75: mol_type = other DNA
tcatgacgaaatatgggtattcaggccgagctatgaaggcggtgaaatatccggtgtaggttttgctgccagctt

SEQ ID NO: 819987 - DNA, 75 bp, synthetic construct
  source 1..75: mol_type = other DNA
tgatggcgtgataggccaaaaaatcgggcgagcatcggatatagcacctgagcgatggatatatcctgatggcaa

SEQ ID NO: 819988 - DNA, 75 bp, synthetic construct
  source 1..75: mol_type = other DNA
ggatgatgtggtcaaggcgttcgatggctggatggcagggcgcgatctctccgggcgttcacttgaaaaagtgac

SEQ ID NO: 819989 - DNA, 75 bp, synthetic construct
  source 1..75: mol_type = other DNA
caaatcattatctgtaacaagaaagccgaagtaggtatcaacctgcatattggaacgaccgatattcaccacctg

SEQ ID NO: 819990 - DNA, 75 bp, synthetic construct
  source 1..75: mol_type = other DNA
cgtattacgcgatcagatcttcactcatccgtcgatgagtgaatcactcaacgacctgttttcattagtcaaata

SEQ ID NO: 819991 - DNA, 75 bp, synthetic construct
  source 1..75: mol_type = other DNA
agagcagcagcaagagcgcttaacagaatggacaaacgcgctggcagaacggttaaaccaacgctttcagactta

SEQ ID NO: 819992 - DNA, 75 bp, synthetic construct
  source 1..75: mol_type = other DNA
attgatgaaaaagcccagcaccagaagctgcgccgtattatcgccagtgcactgcaaatgccggagcaggagatt

SEQ ID NO: 819993 - DNA, 75 bp, synthetic construct
  source 1..75: mol_type = other DNA
tttgtcgtaaaatttaccccgttcctacaaaaaaccacataccagaagccgtcgttggtggctttattgttgcaa

SEQ ID NO: 819994 - DNA, 75 bp, synthetic construct
  source 1..75: mol_type = other DNA
aagcgagttacaaaatcaggcgagctatttacaaagtgtttctcaactgatgtccgattcagcacgggtaaatag

SEQ ID NO: 819995 - DNA, 75 bp, synthetic construct
  source 1..75: mol_type = other DNA
tctttggtggactgtctatggctgcaagtattctgacagccggcgttggcggggtgtcttcactgatgtctaaat

SEQ ID NO: 819996 - DNA, 75 bp, synthetic construct
  source 1..75: mol_type = other DNA
ctggagaataaaacgctggagtataaaaaacagcttgaagaacaacagaaagccgaagagaaatcacaaaaaagt

SEQ ID NO: 819997 - DNA, 75 bp, synthetic construct
  source 1..75: mol_type = other DNA
ctgaaagacgccattaaacaaatggacaaacatcttgcagagataaccagccaatcaaatagcataaaacctgat

SEQ ID NO: 819998 - DNA, 75 bp, synthetic construct
  source 1..75: mol_type = other DNA
gtatgccgattacgatgggaggatctcgatcaggaacaaaaatccatactcgtaagagacaggaaagtgaaccgc

SEQ ID NO: 819999 - DNA, 75 bp, synthetic construct
  source 1..75: mol_type = other DNA
acagcgcagcacacagagtccaagaggcgactatccgtatctttctcaggtgaataccgttgaccctcagcaaat

SEQ ID NO: 820000 - DNA, 75 bp, synthetic construct
  source 1..75: mol_type = other DNA
cggcggcagtgtgtttcccgcgaagacctggcctgctggaaagttgaccgtttcagcacagaagccctgctgacg

SEQ ID NO: 820001 - DNA, 75 bp, synthetic construct
  source 1..75: mol_type = other DNA
tgacctctggagaacacctgattggctgttttctgccattcaacgttatcttggagtgacatttgatgttgacgt

SEQ ID NO: 820002 - DNA, 75 bp, synthetic construct
  source 1..75: mol_type = other DNA
aacccgccttactccaaaatcaccccctggatagaagcggccattcgcgagcagacgcgtggagtgacgacgatc

SEQ ID NO: 820003 - DNA, 75 bp, synthetic construct
  source 1..75: mol_type = other DNA
gttacccatttccgtcccgtcttccagggcgtgcgcgttccggttgattacatcctcaacggtttccagcaattg

SEQ ID NO: 820004 - DNA, 75 bp, synthetic construct
  source 1..75: mol_type = other DNA
gttacccatttccgtccccttttccagggcgtgcgtgttccggtggattacatcctcaacggtttccagcaactg

SEQ ID NO: 820005 - DNA, 75 bp, synthetic construct
  source 1..75: mol_type = other DNA
attctcgatccgttccataaaacgctgatcccgctcgacagttgggtcactgaagggatcgactgggtcgttacc

SEQ ID NO: 820006 - DNA, 75 bp, synthetic construct
  source 1..75: mol_type = other DNA
tccaaccacctctctgtgcctgcaatggctcgacagcctcgatttaaccggtaaaacagtcatcgactttggctg

SEQ ID NO: 820007 - DNA, 75 bp, synthetic construct
  source 1..75: mol_type = other DNA
cgcataaaatcgaacaactagaagataaagactgggagcgcgaatggatggataatttccacccgatgcgctttg

SEQ ID NO: 820008 - DNA, 75 bp, synthetic construct
  source 1..75: mol_type = other DNA
cgggtgcgggggaatatctatgctcagcacgatgagcccctgacgttcagcgatgcggaaatgctcgacccccgc

SEQ ID NO: 820009 - DNA, 75 bp, synthetic construct
  source 1..75: mol_type = other DNA
tccggtgattatggtcagcgcctcgctgcctggggcgtcgccagagacaatggcgtcttccgttgccacgccgct

SEQ ID NO: 820010 - DNA, 75 bp, synthetic construct
  source 1..75: mol_type = other DNA
tggcgtcttccgtagccacaccgctggaacgctcgctggggcgcattgccggggttagtgaaatgacgtccagca

SEQ ID NO: 820011 - DNA, 75 bp, synthetic construct
  source 1..75: mol_type = other DNA
gcgctgaaactgggtgcagcaaaagccattggtattgatatcgatccgcaggcgattcaggccagccgcgacaac

SEQ ID NO: 820012 - DNA, 75 bp, synthetic construct
  source 1..75: mol_type = other DNA
gtatgagccggaaccggaccataagtcagacggcccgggatattctgtgcgaaataaaaaatgatccgggaatgc

SEQ ID NO: 820013 - DNA, 75 bp, synthetic construct
  source 1..75: mol_type = other DNA
tcacctgggtggcttacatcatggcaacggattcgtgggggtactcccgcgacgtgcgctgtgaagtcctgaccg

SEQ ID NO: 820014 - DNA, 75 bp, synthetic construct
  source 1..75: mol_type = other DNA
attacgttgaaacacgaatctccctcgatcagcagttaatcagccagcccgcagcgacttatttcatgcgtgcat

SEQ ID NO: 820015 - DNA, 75 bp, synthetic construct
  source 1..75: mol_type = other DNA
cggctggatgctggcggtgatgaaaaaagcccgggaagggactttcaggcccgttaagcaaccgcaatcggttca

SEQ ID NO: 820016 - DNA, 75 bp, synthetic construct
  source 1..75: mol_type = other DNA
actgcgcaatcagtttcatcggggaaacgtacggaaccgatttcagcagaacgtctgagtggcattgtggctgga

SEQ ID NO: 820017 - DNA, 75 bp, synthetic construct
  source 1..75: mol_type = other DNA
agttcggaaaccgaaccattacgtacgtaatatcacacacagtgtgattaaaaacacgtacgtattgcctgaagc

SEQ ID NO: 820018 - DNA, 75 bp, synthetic construct
  source 1..75: mol_type = other DNA
attatcgaccgtctgcgcgtgaagctggcgaaagaaccgggggcgaatctgttcctgatggcggtacaggatatt

SEQ ID NO: 820019 - DNA, 75 bp, synthetic construct
  source 1..75: mol_type = other DNA
aaagcaatgcaccgctcatcattctgatttgtttaatgatcgctttttccgcctatgttaaatcatggtcattgt

SEQ ID NO: 820020 - DNA, 75 bp, synthetic construct
  source 1..75: mol_type = other DNA
catccactgacgattctctccaccctaccctcggcgggcgtcggagcgctgttggcgctggagctgttcaatgcc

SEQ ID NO: 820021 - DNA, 75 bp, synthetic construct
  source 1..75: mol_type = other DNA
catccgctgacgattctctccaccctgccctcggcgggcgttggggcgctgctggcgctggagctgttcaatgcc

SEQ ID NO: 820022 - DNA, 75 bp, synthetic construct
  source 1..75: mol_type = other DNA
agggcagtgcgccgctgcaactttcacaaccgcaccacacggcttatatcatctttacctctggttccaccggca

SEQ ID NO: 820023 - DNA, 75 bp, synthetic construct
  source 1..75: mol_type = other DNA
ctcgctatgcagcaattctttgccgaatatggcgtaacgaccacgcactttgtgccgtcgatgctggcggcattt

SEQ ID NO: 820024 - DNA, 75 bp, synthetic construct
  source 1..75: mol_type = other DNA
aagagaaaatgactaaaatgccaaacggtgctgtggatgcgctaccacaaaaagatagtattgcaattatattca

SEQ ID NO: 820025 - DNA, 75 bp, synthetic construct
  source 1..75: mol_type = other DNA
ttggcaccattgcgctgaatatctggctgtatatctcgatcccgaaaaccttcttcccggagcaggacactggcg

SEQ ID NO: 820026 - DNA, 75 bp, synthetic construct
  source 1..75: mol_type = other DNA
tacacgttgttatccgacgacctggcggcactgcgcgaatgggagccgaaaatccgcaaaaaactggcgacgttg

SEQ ID NO: 820027 - DNA, 75 bp, synthetic construct
  source 1..75: mol_type = other DNA
gaagaaaaacgccatcatgatggtcgattttgcgctcgaagctcaaaggaatggaaatctgacgccgcaggaagc

SEQ ID NO: 820028 - DNA, 75 bp, synthetic construct
  source 1..75: mol_type = other DNA
acgccggtggtatatctctttttcgaccgtctgcgactgcgtttttcgcgtaaacctaaagaaacggtaaccgaa

SEQ ID NO: 820029 - DNA, 75 bp, synthetic construct
  source 1..75: mol_type = other DNA
ctggacgacgtacgcactgccatcagcaatgccaacgtgcgtaaaccgcagggcgcactggaagatggcacccac

SEQ ID NO: 820030 - DNA, 75 bp, synthetic construct
  source 1..75: mol_type = other DNA
agctaaaaaccgccgccgaatatcagccgctgattattcattacaacaacggcggcgcggttcgtctgggcgatg

SEQ ID NO: 820031 - DNA, 75 bp, synthetic construct
  source 1..75: mol_type = other DNA
gcggaggtgctggttcgcctgggaaaggcggagtacatcacggtgcgacgtccggcaggtcagaaaaagaaacgt

SEQ ID NO: 820032 - DNA, 75 bp, synthetic construct
  source 1..75: mol_type = other DNA
aacgggacttgatgtactgaatatcgccgccgattatgcggaatatgtggcagaggcgcgttacagaagaaaatt

SEQ ID NO: 820033 - DNA, 75 bp, synthetic construct
  source 1..75: mol_type = other DNA
tcctcattcactggctgtaatgcaacttagtgctgatatggcactgaatgaggccagcaaaattatcatggctga

SEQ ID NO: 820034 - DNA, 75 bp, synthetic construct
  source 1..75: mol_type = other DNA
gaccaggtgagcacaaaggtgatcgtcgttcgcgtggctgaacacaaagaagaagacggaaaaacgcaggatcaa

SEQ ID NO: 820035 - DNA, 75 bp, synthetic construct
  source 1..75: mol_type = other DNA
aattaaaggtgaggaaccatcgcagcttcacggggacggttcgcaagagcgaaatggactcaagggattactaga

SEQ ID NO: 820036 - DNA, 75 bp, synthetic construct
  source 1..75: mol_type = other DNA
gagtcctggtgtgtctggaggagaaagatatgttacagaagataagttacgcgcaaatcgatcatgacgatgatt

SEQ ID NO: 820037 - DNA, 75 bp, synthetic construct
  source 1..75: mol_type = other DNA
gcagcaaaacttgccgaagaatctcatgatgttaccgagaagcatcaacctgaagtgacaaagttaaagaaatct

SEQ ID NO: 820038 - DNA, 75 bp, synthetic construct
  source 1..75: mol_type = other DNA
tgctatggcagaaagcgattcgctggcatattcccgtcagcttcttagtgacgctggcgctatgcgcaacgctgg

SEQ ID NO: 820039 - DNA, 75 bp, synthetic construct
  source 1..75: mol_type = other DNA
caccagtggcaatgatatgaacacactacgcttaggtattgatggcataagtcaggcaacaccgctggatacatt

SEQ ID NO: 820040 - DNA, 75 bp, synthetic construct
  source 1..75: mol_type = other DNA
caatctacagaggtatgctggcgggcgctggctggcaatgggtaaacctcgcctggctggttggcggcgtctggt

SEQ ID NO: 820041 - DNA, 75 bp, synthetic construct
  source 1..75: mol_type = other DNA
cccgtgttacggaaagtaccgacctggtaacagcgattaatgatgttgattccagtgttatcggtatcgtggcaa

SEQ ID NO: 820042 - DNA, 75 bp, synthetic construct
  source 1..75: mol_type = other DNA
atgtgctgggaatgtccaggcatgtggtatggtcgttgcaggccgaagacaggcagggcaacaaccctcaaaaaa

SEQ ID NO: 820043 - DNA, 75 bp, synthetic construct
  source 1..75: mol_type = other DNA
cgtgtgcgtattcgctacaaatatacgcctgttcccccgctggaagacatggagctttaccagacgtttactgat

SEQ ID NO: 820044 - DNA, 75 bp, synthetic construct
  source 1..75: mol_type = other DNA
atagcctggatggcgttgagttcggcagggctggtggggtgacagtgactgatgacgacaatttatttaaacaga

SEQ ID NO: 820045 - DNA, 75 bp, synthetic construct
  source 1..75: mol_type = other DNA
gttatctggaactgctgcgcaaatgcgccgggcaaatatcatatgggctgggatacagaaacgaaaatgaatatt

SEQ ID NO: 820046 - DNA, 75 bp, synthetic construct
  source 1..75: mol_type = other DNA
gctgtcgctgaaaagcggcttggtctgccatctgggggcaatggagagctattcagctctctatctcgacaaggt

SEQ ID NO: 820047 - DNA, 75 bp, synthetic construct
  source 1..75: mol_type = other DNA
ggaaagaactcccgccacaggcccatccgttgtttgcagacctggccagctgcggttttcccagccctgcagctg

SEQ ID NO: 820048 - DNA, 75 bp, synthetic construct
  source 1..75: mol_type = other DNA
gccaattctgcaaacttgagagcgaagatgcgcagtggctggaagaaacgctgatccatctggggttatcgattc

SEQ ID NO: 820049 - DNA, 75 bp, synthetic construct
  source 1..75: mol_type = other DNA
actggagagtgccgcaatattaagcctggtaaatgccgaatcagtgcaaaaacaatggcggcagcgcccgttccg

SEQ ID NO: 820050 - DNA, 75 bp, synthetic construct
  source 1..75: mol_type = other DNA
acagacattacgttatctcaaccggctctcggggccctttctcgaccgcttcgatctctcactggagatcccatt

SEQ ID NO: 820051 - DNA, 75 bp, synthetic construct
  source 1..75: mol_type = other DNA
ctcagctttgaattattgcttcctgcaagcagcaatagtcagtgggtattgccgttccagtacagcctgcaacgg

SEQ ID NO: 820052 - DNA, 75 bp, synthetic construct
  source 1..75: mol_type = other DNA
aatataccttcagtaatttcttcatataaccctgtgatgacaaaggtgatggatatctacggtaagagcgcacca

SEQ ID NO: 820053 - DNA, 75 bp, synthetic construct
  source 1..75: mol_type = other DNA
tccctgcgcgcgaaccacactaatacgctggccaagatcagcactttcaatgagactggcggcctcagtggcatt

SEQ ID NO: 820054 - DNA, 75 bp, synthetic construct
  source 1..75: mol_type = other DNA
agcgcgacttactacctgcgtgccagcggtgacagcatgtccgacggcagtctttacaatggcgatctgcttgtt

SEQ ID NO: 820055 - DNA, 75 bp, synthetic construct
  source 1..75: mol_type = other DNA
gtgctgaagggtcagcaacgcgttaatgccacaacgggtcagacactcagctttgaattattgcttcccgcaagc

SEQ ID NO: 820056 - DNA, 75 bp, synthetic construct
  source 1..75: mol_type = other DNA
ccgcatgcgcaatcgcgactatgacatgatgccgcgcgtatggcgggcgatgccgtggcccagttccgatttaca

SEQ ID NO: 820057 - DNA, 75 bp, synthetic construct
  source 1..75: mol_type = other DNA
ttcgcctcgatagcgaaaaagccgccgggaagaacatcagcctgaacttcaatatgagtaacggcgataacctca

SEQ ID NO: 820058 - DNA, 75 bp, synthetic construct
  source 1..75: mol_type = other DNA
gagataaaagtggagacgggaatctgcacggagacggtagaaggggatattactagactggccccctggatctcc

SEQ ID NO: 820059 - DNA, 75 bp, synthetic construct
  source 1..75: mol_type = other DNA
ctctccgtaaaactggctcaaaccatcaatatcgggacaacataccgactggatgttggcgatcaatttaccctt

SEQ ID NO: 820060 - DNA, 75 bp, synthetic construct
  source 1..75: mol_type = other DNA
cgctgcggcaatgcagcgcttgtattacacaaggatggctcgattgagttttgtggaaaacaacttttactgcac

SEQ ID NO: 820061 - DNA, 75 bp, synthetic construct
  source 1..75: mol_type = other DNA
acagctcctgctggatccgcgtcagctacccgtgggcggggaaaggattcgggatgatccagatcccgcgcatcg

SEQ ID NO: 820062 - DNA, 75 bp, synthetic construct
  source 1..75: mol_type = other DNA
aaacggcgacccggatttaccgatcattgtagggcgcacctataaccaggacaccatgccgccgtggggattgcc

SEQ ID NO: 820063 - DNA, 75 bp, synthetic construct
  source 1..75: mol_type = other DNA
aacccgcgtgaaaccggccacgccacctacgagcattacgaatggccgggggattacttcgacaagggcgaaggc

SEQ ID NO: 820064 - DNA, 75 bp, synthetic construct
  source 1..75: mol_type = other DNA
cgatgataaaacgggtgcggaagaggtgaagttccatgcggaaaaagacctcaataccacggtaaaaaacaatga

SEQ ID NO: 820065 - DNA, 75 bp, synthetic construct
  source 1..75: mol_type = other DNA
tggcaggtgcagtatggtgaaaccgattttgatttcatccagcgcctgatgcaggaatggggtatctactggtgg

SEQ ID NO: 820066 - DNA, 75 bp, synthetic construct
  source 1..75: mol_type = other DNA
tggctggtgcagctcaggatgcggcggcatcgcttgctgccgctggtccgggggcgcataacgtcacagtaagtg

SEQ ID NO: 820067 - DNA, 75 bp, synthetic construct
  source 1..75: mol_type = other DNA
gcagcggatctgtttggtgcgctgccggaaccatcgggactggtgaaagcggcggtagccgcagcgcaggccgcc

SEQ ID NO: 820068 - DNA, 75 bp, synthetic construct
  source 1..75: mol_type = other DNA
atgagttttgtatctacgggtaataaaccagttggaaacggtggacccgtcatcaccacaccaccaatagctggc

SEQ ID NO: 820069 - DNA, 75 bp, synthetic construct
  source 1..75: mol_type = other DNA
gaagggcttggaaacctgttttcctacacagtacagcttaaaaccccggacaccctgaacctcggatatgtctcc

SEQ ID NO: 820070 - DNA, 75 bp, synthetic construct
  source 1..75: mol_type = other DNA
gaatgataacgataaagagcgttttggaaatatattcggtgttgatgatgaggcagccaggaataaaattttaaa

SEQ ID NO: 820071 - DNA, 75 bp, synthetic construct
  source 1..75: mol_type = other DNA
ggcgcaatcactttgctgaaccggcagttcgtgagccggtagctccgcgttacactcctgcgcccgcctcaggca

SEQ ID NO: 820072 - DNA, 75 bp, synthetic construct
  source 1..75: mol_type = other DNA
ttatgacatatgggattcagtccaccagctacgattaaaagacggtgaccccaataacttaaaggccaccaatat

SEQ ID NO: 820073 - DNA, 75 bp, synthetic construct
  source 1..75: mol_type = other DNA
tcacaacaatgcgtgtcgcaaccgctacagaattcctcgatcctttccttactccctatattgctgatttaatat

SEQ ID NO: 820074 - DNA, 75 bp, synthetic construct
  source 1..75: mol_type = other DNA
tgctcattccattgcggttaaaagtctctggtgaagaaaaatcggcattagaaaaagcgcagtcggcgctggcag

SEQ ID NO: 820075 - DNA, 75 bp, synthetic construct
  source 1..75: mol_type = other DNA
tggaacggttatgtccgcaacttgtgaaaacgccgttagccattgagctgcgtaaaattttaccagtagagttga

SEQ ID NO: 820076 - DNA, 75 bp, synthetic construct
  source 1..75: mol_type = other DNA
agtggattgcacgaaatctgatgagcgaacatgcgcagtggtcaatggcacaggccataaccctgctggcggacg

SEQ ID NO: 820077 - DNA, 75 bp, synthetic construct
  source 1..75: mol_type = other DNA
atggtgggcaaagatctgtgcgtcaatatcgaattggatggcggcggaaaacgttatatcagcgggctggtgacg

SEQ ID NO: 820078 - DNA, 75 bp, synthetic construct
  source 1..75: mol_type = other DNA
acttctcttactcaaccagctttgagttgcatcccaccaatgaagtttaccgtccgcagcgaactctgagcaaac

SEQ ID NO: 820079 - DNA, 75 bp, synthetic construct
  source 1..75: mol_type = other DNA
ctggctacatgccgaaaaagatcagcggattgaagtaaataataatgaaagccactgggtggggaataatcgcct

SEQ ID NO: 820080 - DNA, 75 bp, synthetic construct
  source 1..75: mol_type = other DNA
gctgccgggcaggtgggggttgattatctgattaaccgtgactggttggttaacatgtcagtgtggtacatggat

SEQ ID NO: 820081 - DNA, 75 bp, synthetic construct
  source 1..75: mol_type = other DNA
caaccgtacgtccaacagaaggtgctggtggtacgttaggaagtctgggtggattcagcgtgaccaataacacgc

SEQ ID NO: 820082 - DNA, 75 bp, synthetic construct
  source 1..75: mol_type = other DNA
gttggggtgctattggtgccagaaccactgaatcacaaacgcatcgtcaacttgcgtctggtttacattgtagtt

SEQ ID NO: 820083 - DNA, 75 bp, synthetic construct
  source 1..75: mol_type = other DNA
ccggggaaatttacagcatcggaacatacattattgccgcactaggcccgtatataaccgacatcggcagaacct

SEQ ID NO: 820084 - DNA, 75 bp, synthetic construct
  source 1..75: mol_type = other DNA
aacggtaaagccgacgatgcgctgttggatacctaccagcaggaacgccgcgaccacgccaaagcgatgatcgac

SEQ ID NO: 820085 - DNA, 75 bp, synthetic construct
  source 1..75: mol_type = other DNA
acagccgaacctgaatacctggacggcctgagcgaaccgatcgggaaattttcgatgaccactgtctggcagccg

SEQ ID NO: 820086 - DNA, 75 bp, synthetic construct
  source 1..75: mol_type = other DNA
atgaaaatcgaagaattacgtgaaatttttagtgaagatggcctctatactgtgcgcgttgagaatggcgctatt

SEQ ID NO: 820087 - DNA, 75 bp, synthetic construct
  source 1..75: mol_type = other DNA
ttgtcttaactgggataacatttgcattatcggcagtgtattcattgagctatgcacgagatgaatttaaccttc

SEQ ID NO: 820088 - DNA, 75 bp, synthetic construct
  source 1..75: mol_type = other DNA
caccaaaatactggaatgatggcgatagtgctgcctggttaagttattatgccagtggttctcaacaaaatagtg

SEQ ID NO: 820089 - DNA, 75 bp, synthetic construct
  source 1..75: mol_type = other DNA
tcctgcgttaaaagtaatgaatgatgatactgaggttggagatattgcacagattattgatggcgcacgttatga

SEQ ID NO: 820090 - DNA, 75 bp, synthetic construct
  source 1..75: mol_type = other DNA
aaatgatggtgaattgccagccgtgccagttgagccagtacatatttacggacggagcaacgacaatgaagccta

SEQ ID NO: 820091 - DNA, 75 bp, synthetic construct
  source 1..75: mol_type = other DNA
ggcgacggaacagattatttcaccggagcagtggcagactcagtttaatccggcctccattgtggcttatccctg

SEQ ID NO: 820092 - DNA, 75 bp, synthetic construct
  source 1..75: mol_type = other DNA
cagagtcagtttaacccgatgtccattgtggcttattcctggcgtggtgactatatcggttgttacacaaaaccg

SEQ ID NO: 820093 - DNA, 75 bp, synthetic construct
  source 1..75: mol_type = other DNA
cttttcaatatcacgcaatgccaatgttgaaggaaatatatcagcaaataaatcagctatcacaatcggcgataa

SEQ ID NO: 820094 - DNA, 75 bp, synthetic construct
  source 1..75: mol_type = other DNA
atacattttgtaatgctatttgctatcctctctccattcataggacgatttttagcaaaaattagcaatgagaaa

SEQ ID NO: 820095 - DNA, 75 bp, synthetic construct
  source 1..75: mol_type = other DNA
aaatgaaggcgaattgccagccatccctattaagcctgtcaaaatttacaagcggggtgatgatcatgaaaataa

SEQ ID NO: 820096 - DNA, 75 bp, synthetic construct
  source 1..75: mol_type = other DNA
aactgctctgcaagataataaccttagttataatttacaacaaacttatgccgataataacgtgggttatggtgc

SEQ ID NO: 820097 - DNA, 75 bp, synthetic construct
  source 1..75: mol_type = other DNA
tagtcaccacggtggcgcaggggcagccgggggaaaccggcagttacagttttgatgtggagccggggtggtacc

SEQ ID NO: 820098 - DNA, 75 bp, synthetic construct
  source 1..75: mol_type = other DNA
atcgacggtaagcgtgtcggggacagagagtatgcggaggtgctgatagctattacggagtatcaccgggcccta

SEQ ID NO: 820099 - DNA, 75 bp, synthetic construct
  source 1..75: mol_type = other DNA
gtgtttgaacatgatgtcaacacaaaggcaactaataaagatacagataaagatctaaaaacagatcccccccta

SEQ ID NO: 820100 - DNA, 75 bp, synthetic construct
  source 1..75: mol_type = other DNA
ggcaggaatggtaatgtatccacagaaaaatatgcggttggctctttcttatttggttcgatatcgggtgatgct

SEQ ID NO: 820101 - DNA, 75 bp, synthetic construct
  source 1..75: mol_type = other DNA
atctgatgccagaaggaatgcaaggaggaaagaactcgatgtttaactttattactcttttccagcggatagcgt

SEQ ID NO: 820102 - DNA, 75 bp, synthetic construct
  source 1..75: mol_type = other DNA
aatatgcggttggttcttatgtttttggcgtgtcctctgtctatgctgacggcgaaggcttattttcatcaggga

SEQ ID NO: 820103 - DNA, 75 bp, synthetic construct
  source 1..75: mol_type = other DNA
ctagatgaagtaggggtaatggcttcaaaattacataaaccaaaccatactcatgctatattttcaaatgaaaat

SEQ ID NO: 820104 - DNA, 75 bp, synthetic construct
  source 1..75: mol_type = other DNA
aataaattgaatgaaataaatgtggctgcttcgaaactacataggccaaaccattatcattcacttctatcgcaa

SEQ ID NO: 820105 - DNA, 75 bp, synthetic construct
  source 1..75: mol_type = other DNA
ggagtcgatcagcaccagtttgcaacgcgatatcaaagcattaagaagccagatggaagtcgggcagacgttcac

SEQ ID NO: 820106 - DNA, 75 bp, synthetic construct
  source 1..75: mol_type = other DNA
atggaaaacacagatccacaattagtgaatttgctgtttgatactggtcatatttatgtttctgatggagatgtg

SEQ ID NO: 820107 - DNA, 75 bp, synthetic construct
  source 1..75: mol_type = other DNA
gatattttgattccgtaattacaaaaattcctgggctcgatgttccaaaatttgatgctgtagcttccccatcat

SEQ ID NO: 820108 - DNA, 75 bp, synthetic construct
  source 1..75: mol_type = other DNA
cggttagattgaaagagatttctaaattagcaaaagagaatggcttaaaattaattgaggattgtgcccatgccc

SEQ ID NO: 820109 - DNA, 75 bp, synthetic construct
  source 1..75: mol_type = other DNA
tatcgacagcgcaccagctccgacgattgtcgtcttattcgcggttgtgttcatcatgacgtttaccgttaccag

SEQ ID NO: 820110 - DNA, 75 bp, synthetic construct
  source 1..75: mol_type = other DNA
tgactggtgtctggctgtccttttttatcgacagcgcgccagctccgacaattgttgtcttattcgcggtcatgt

SEQ ID NO: 820111 - DNA, 75 bp, synthetic construct
  source 1..75: mol_type = other DNA
gacatgctcgggataaccatcggcgatataatccagacggtgattattgccggactggttacacttgttattagc

SEQ ID NO: 820112 - DNA, 75 bp, synthetic construct
  source 1..75: mol_type = other DNA
atggctaccaaactgcaggacgggaatacaccttatctggcagctacaccttctgaaccacgtcccaccgtgctg

SEQ ID NO: 820113 - DNA, 75 bp, synthetic construct
  source 1..75: mol_type = other DNA
atgccagttaacagctatccgtatggcgtgttcggtttgcgaataaaacctgggacctacgtgcgcccgcaccga

SEQ ID NO: 820114 - DNA, 75 bp, synthetic construct
  source 1..75: mol_type = other DNA
tgcagcaacagagcgcagcggctgtgcaatcgcctcggctccgcgcgcaccgtaatttccatccagaattaagcg

SEQ ID NO: 820115 - DNA, 75 bp, synthetic construct
  source 1..75: mol_type = other DNA
tattgttgagcgagtggtggaaattgtcaccgcagtgcaagaacgttatccccttgcgctggctgtggttgcttg

SEQ ID NO: 820116 - DNA, 75 bp, synthetic construct
  source 1..75: mol_type = other DNA
ggtgagcaaaaggtggttggtctggaaatcaatgctaatcatgttcgctcggcacgagaagggcgggtacgcggc

SEQ ID NO: 820117 - DNA, 75 bp, synthetic construct
  source 1..75: mol_type = other DNA
tggaagcactgaatgccatgggtgaaggaaacatggtggggttgctggatattcgctttgaacatattggtgatg

SEQ ID NO: 820118 - DNA, 75 bp, synthetic construct
  source 1..75: mol_type = other DNA
tgctgaaacaggctggggtgcaggtgctggcgtttgaggcgaattcactgcgggcgttaacgcagcgcgtacagc

SEQ ID NO: 820119 - DNA, 75 bp, synthetic construct
  source 1..75: mol_type = other DNA
accagcgaagaggcgctgcaatttttgtggctggcgaaaacgctttatcctgcgcgatttgctgatgtggatata

SEQ ID NO: 820120 - DNA, 75 bp, synthetic construct
  source 1..75: mol_type = other DNA
catacgagatggctgcattatgggctgctgtgcatggtctccctgaccattgtggcgacgctgaaagcggtaggt

SEQ ID NO: 820121 - DNA, 75 bp, synthetic construct
  source 1..75: mol_type = other DNA
gaacggcctggttgttagaacatgaagccccggatgcaaaatctgccgatgcgaatattgccttttgtatggcaa

SEQ ID NO: 820122 - DNA, 75 bp, synthetic construct
  source 1..75: mol_type = other DNA
gccagcagaagaaaaaattccggtttatcaactggctgattatcttcctactgaatgtagtgacatctgggcgct

SEQ ID NO: 820123 - DNA, 75 bp, synthetic construct
  source 1..75: mol_type = other DNA
tctgggcactgcaaggtaagtcaaccgaaaccaatccgctttactggctgcgggcgatggattgtgctgatcgtt

SEQ ID NO: 820124 - DNA, 75 bp, synthetic construct
  source 1..75: mol_type = other DNA
ttgatgcgttaagtaccgagatcccggcgcaagtgcgcccgttgtatcaactctggcgtgacggtcaggcgctgc

SEQ ID NO: 820125 - DNA, 75 bp, synthetic construct
  source 1..75: mol_type = other DNA
gttttctttccgaacattcctgggaagtttgatgtcgtttttgagcaacaatttacatcaaacattaactattgc

SEQ ID NO: 820126 - DNA, 75 bp, synthetic construct
  source 1..75: mol_type = other DNA
atctgttgagtggcagttttattttctgctccccatcctatgtttaattttatacaaatactttaatctcaaata

SEQ ID NO: 820127 - DNA, 75 bp, synthetic construct
  source 1..75: mol_type = other DNA
gacattccattagtgattgtaaatagaacatctgtgtatgcttttggtcagcacaacatcaaagaacagatgaac

SEQ ID NO: 820128 - DNA, 75 bp, synthetic construct
  source 1..75: mol_type = other DNA
ttgctgcttttttagtcgttgcagaggagcgaagttttacccgtgcagctgctcgtctgtctacttctcaaccct

SEQ ID NO: 820129 - DNA, 75 bp, synthetic construct
  source 1..75: mol_type = other DNA
aatgaaagagccgccagataccgttgtattggggtgtacccatttccctctactacaagaagaactgttacaggt

SEQ ID NO: 820130 - DNA, 75 bp, synthetic construct
  source 1..75: mol_type = other DNA
tgctcggatcggcagagatggttgagctggctgaagcgaaactgcatggcgacgaagtttctctggatgcgctaa

SEQ ID NO: 820131 - DNA, 75 bp, synthetic construct
  source 1..75: mol_type = other DNA
gcaaaccatgttgatctgtacgacaacgttgcgggtaagatcccatttgccaaatttgagcaatttttcaaggca

SEQ ID NO: 820132 - DNA, 75 bp, synthetic construct
  source 1..75: mol_type = other DNA
cgattgaagagacgcttgaagccctgaacgacgtcgtaaaagccggaaaagcgcgttatatcggcgcgtcatcaa

SEQ ID NO: 820133 - DNA, 75 bp, synthetic construct
  source 1..75: mol_type = other DNA
catggattatgtcgatatcctgcaaattcatcgctgggattacaacacgccgatcgaagagacgctggaagccct

SEQ ID NO: 820134 - DNA, 75 bp, synthetic construct
  source 1..75: mol_type = other DNA
aaggctatatcagacgctttcgcctggctgaattgctgggcgttagtgtatccaccatcgaccgtaaagtaagaa

SEQ ID NO: 820135 - DNA, 75 bp, synthetic construct
  source 1..75: mol_type = other DNA
agcgtcggcacccacgacattctgttttgtgccatcgaagcgattcatcgtcacgccaccccctacgggctggtg

SEQ ID NO: 820136 - DNA, 75 bp, synthetic construct
  source 1..75: mol_type = other DNA
tttttggcggcaaaacgcccatggaacaccgctttgccgccgcccgctggcagacaggtgtgaccggatgcccgc

SEQ ID NO: 820137 - DNA, 75 bp, synthetic construct
  source 1..75: mol_type = other DNA
tttgcgccatcgaagcgattcatcgtcacgctactccctacggactggtgtggtttgatcgcagttatcacgcgc

SEQ ID NO: 820138 - DNA, 75 bp, synthetic construct
  source 1..75: mol_type = other DNA
gcgcagccgtccttttcctggtcatgagcctggcggccggcgccggcctcctgcttcatggccatgaatatacga

SEQ ID NO: 820139 - DNA, 75 bp, synthetic construct
  source 1..75: mol_type = other DNA
cgacgtcttcaggcgctgggtggatggtcgcttgaccgtattgccgaacgtgagggaaaaagtaataccacaatt

SEQ ID NO: 820140 - DNA, 75 bp, synthetic construct
  source 1..75: mol_type = other DNA
atgaaagtccagattttaaacaataactgtgaagtcgtttggtcatacgacatagccgcccctgtagatcagagc

SEQ ID NO: 820141 - DNA, 75 bp, synthetic construct
  source 1..75: mol_type = other DNA
cttatgcagctggtgctcgtcagggtactcgtgctcagaagactcgtgctgaagtaactggttccggtaaaaaac

SEQ ID NO: 820142 - DNA, 75 bp, synthetic construct
  source 1..75: mol_type = other DNA
tgaatttaagcttcatatggttgaactggcttcgaaaccaaatgccaatgttgcacaactggcccgggaacatgg

SEQ ID NO: 820143 - DNA, 75 bp, synthetic construct
  source 1..75: mol_type = other DNA
cggcagataacctggctgcgtggttgggaaggggttcactggcttgacagtgaaaaaccagaacaggcgcgtgac

SEQ ID NO: 820144 - DNA, 75 bp, synthetic construct
  source 1..75: mol_type = other DNA
caatcttttccggcctctccgactctggttccagtggaacttatcgaccccccgcgctgtgctacagatgctcct

SEQ ID NO: 820145 - DNA, 75 bp, synthetic construct
  source 1..75: mol_type = other DNA
aagcttaagcctcacgagcatcctattctgcactctgaccagggatggcagtatcgtatgagaaggtatcaaaac

SEQ ID NO: 820146 - DNA, 75 bp, synthetic construct
  source 1..75: mol_type = other DNA
atgtggaattccattacggtaaaatgacgctggaaaatccttcaccagagctgctcacggtgttgatccgtgaac

SEQ ID NO: 820147 - DNA, 75 bp, synthetic construct
  source 1..75: mol_type = other DNA
gtaagtgaccagaaagcatgggctatccacccttcagtaattcaggtcacgccaggcttcaactcccgcgaaatg

SEQ ID NO: 820148 - DNA, 75 bp, synthetic construct
  source 1..75: mol_type = other DNA
ccgcatacctcgacggactgatgaagccatacctgtcccgcctgctggaagaactgggccaggtagaaaaagcag

SEQ ID NO: 820149 - DNA, 75 bp, synthetic construct
  source 1..75: mol_type = other DNA
atggtcaggcaaaagtgtagcggtattaggcgcagctatttaggacaggtttttgaattattaaaagatcgccgc

SEQ ID NO: 820150 - DNA, 75 bp, synthetic construct
  source 1..75: mol_type = other DNA
acaaactcattgaggattatgaaaaaatccttattggcatggcagacaataacaaagataaaaccatgtataaaa

SEQ ID NO: 820151 - DNA, 75 bp, synthetic construct
  source 1..75: mol_type = other DNA
tgattctcacattccctgtaggggatgataatttcacattctatgagcaaaatgcgaatgtcattgcaaaactaa

SEQ ID NO: 820152 - DNA, 75 bp, synthetic construct
  source 1..75: mol_type = other DNA
aagccggaaactaataatatagatgattatacatcgcacaatacaacaagattaaatgtggaagaaattaaagat

SEQ ID NO: 820153 - DNA, 75 bp, synthetic construct
  source 1..75: mol_type = other DNA
atgtaaacgccatcagtcgtcatgcgccagatctcggtagaatgatgaaagagttcggtgtactcgctaaagcca

SEQ ID NO: 820154 - DNA, 75 bp, synthetic construct
  source 1..75: mol_type = other DNA
agcttcttcagttgccaacgctccacgtgctgaacgtgcggccacaaaggtggctagtatgttggcagaaaacct

SEQ ID NO: 820155 - DNA, 75 bp, synthetic construct
  source 1..75: mol_type = other DNA
ggtgactatgtagaccctatccgagtacgtgtcattgatggggtaccttttgttcgccaggggcactgccgttta

SEQ ID NO: 820156 - DNA, 75 bp, synthetic construct
  source 1..75: mol_type = other DNA
gtttttgaattattaaaagatcgccgcgcctcggtcatgtattttgccgaccacggcctggaacgtgaccctacg

SEQ ID NO: 820157 - DNA, 75 bp, synthetic construct
  source 1..75: mol_type = other DNA
atccgtgctttgtgcatataaaaagaatcaattacaataagtatatacatagcgaacataaaggagttgacggtt

SEQ ID NO: 820158 - DNA, 75 bp, synthetic construct
  source 1..75: mol_type = other DNA
agcaattaaacgcttttcaggtcccgactacgcgatttttgcacgttggatagatctactggctattatgttcaa

SEQ ID NO: 820159 - DNA, 75 bp, synthetic construct
  source 1..75: mol_type = other DNA
tgtgcagattaatgacagcggtgcggcgctgggatattacgtcagcgaggacgggtattgccagcatggctttta

SEQ ID NO: 820160 - DNA, 75 bp, synthetic construct
  source 1..75: mol_type = other DNA
cagaaactgagtcagaaaaggaacgaacacgcgcattattattcacggtgctatcccgttttctcgacagtaaaa

SEQ ID NO: 820161 - DNA, 75 bp, synthetic construct
  source 1..75: mol_type = other DNA
atcacgacacgttgggtgaagagaacagggcgcaggcatttgaaaaaatgcaaagctttattagtcgtttatatg

SEQ ID NO: 820162 - DNA, 75 bp, synthetic construct
  source 1..75: mol_type = other DNA
cccatcgaacattagctcctcgtcttagagcaatgcaagtaaaagaactggaatcagcattggaagaaatcatct

SEQ ID NO: 820163 - DNA, 75 bp, synthetic construct
  source 1..75: mol_type = other DNA
tgtctgtggcggaggaaagctggtaacaagagccattgattacttaaacgcccatcgaacattagctcctcgtct

SEQ ID NO: 820164 - DNA, 75 bp, synthetic construct
  source 1..75: mol_type = other DNA
gatcacattgtcgggcatatgtttctgatcagctaccgtccgaactggcgctggctggggatgcgggagaccgcg

SEQ ID NO: 820165 - DNA, 75 bp, synthetic construct
  source 1..75: mol_type = other DNA
acttcaatgacaccggtgaaggtcttggattatccgatcttagtctgaaggattcatggggagtggcggggcaag

SEQ ID NO: 820166 - DNA, 75 bp, synthetic construct
  source 1..75: mol_type = other DNA
agatattgcgacagtccaccatttaccgccaacattgatggcgcagtggtattttggtgatgccagcagtaaatt

SEQ ID NO: 820167 - DNA, 75 bp, synthetic construct
  source 1..75: mol_type = other DNA
atggcatttgctacaccaaacgaggtgataacccaggtgccttcgtctgttgatgctcccagaaagccagatatt

SEQ ID NO: 820168 - DNA, 75 bp, synthetic construct
  source 1..75: mol_type = other DNA
ccagtgctaacgagtcctgggcgtactttatggggcgccgcaaatttgttgcctcccgccaggcctgtcagatgt

SEQ ID NO: 820169 - DNA, 75 bp, synthetic construct
  source 1..75: mol_type = other DNA
tcccgtggtaacgcgcgcgctgacgatctggtccgcaataacggctatgcggcaaacgcggtacagctccatcag

SEQ ID NO: 820170 - DNA, 75 bp, synthetic construct
  source 1..75: mol_type = other DNA
acgccgcagcaccggtccgtctgggaggcgcaaaagtgccgcacctgatgccgggggactcactgaacctgcaga

SEQ ID NO: 820171 - DNA, 75 bp, synthetic construct
  source 1..75: mol_type = other DNA
taatcaacgaattagcataaaattaaaaggtctgagcccggttgaataccgcctgaaggtctgttcccaccctgt

SEQ ID NO: 820172 - DNA, 75 bp, synthetic construct
  source 1..75: mol_type = other DNA
gatgcacctggtatacatagggagggttatgttatctgccgttctgtagattttaactcatggggatatgtgcca

SEQ ID NO: 820173 - DNA, 75 bp, synthetic construct
  source 1..75: mol_type = other DNA
aattacctcgccgggagagtatgccgataacgtgaccacgattgcaccatcaaccccatatgaccgctggaacgg

SEQ ID NO: 820174 - DNA, 75 bp, synthetic construct
  source 1..75: mol_type = other DNA
ctgcggattattttttggcgatgttcatttcagtggtgtctattccattccacccgatattagcggtgttattgg

SEQ ID NO: 820175 - DNA, 75 bp, synthetic construct
  source 1..75: mol_type = other DNA
gtgatgattggcgatttaagttcacatggcgtgttgttaggcattttaggcttttttattataactgtgttgtca

SEQ ID NO: 820176 - DNA, 75 bp, synthetic construct
  source 1..75: mol_type = other DNA
ttgcggggatgaccacttttttaaccatggtgtacatcgtttttgtgaacccgcaaatcctcggcgcggcacaaa

SEQ ID NO: 820177 - DNA, 75 bp, synthetic construct
  source 1..75: mol_type = other DNA
gaactgctggaacaggcagcctacggtctggcggagtggtgcggtaataaattaaaagaagcgaacttgattgcc

SEQ ID NO: 820178 - DNA, 75 bp, synthetic construct
  source 1..75: mol_type = other DNA
tatgtggggtaacgacgcggaagtactgtttatgccgcacacctggccggtctgggtgattagacttgagataaa

SEQ ID NO: 820179 - DNA, 75 bp, synthetic construct
  source 1..75: mol_type = other DNA
ttgccgtttagcgatcgtcaggattttgacgatgcccaacgtggatttatcgccccgctactggatgaaggtatt

SEQ ID NO: 820180 - DNA, 75 bp, synthetic construct
  source 1..75: mol_type = other DNA
acggcattgccacaaaggccggtgagattaccgtttataattttgacctcatcactcgtgaatatctggcggaat

SEQ ID NO: 820181 - DNA, 75 bp, synthetic construct
  source 1..75: mol_type = other DNA
tcggcatcatcagtgacgatgacaaggccagcctgattgcgtggatgaaatacattcaggcgctgaacgcggtcg

SEQ ID NO: 820182 - DNA, 75 bp, synthetic construct
  source 1..75: mol_type = other DNA
gatggtaaatgtgtggatctgcttgagaaagcaaagaacagtggaaagctcaatatcattacagtttttgatgaa

SEQ ID NO: 820183 - DNA, 75 bp, synthetic construct
  source 1..75: mol_type = other DNA
catattctggggcgcaatcggactgtttttgctcacgctctttcgtatccgttactggatgatttccaacattcc

SEQ ID NO: 820184 - DNA, 75 bp, synthetic construct
  source 1..75: mol_type = other DNA
tcgaaccgatagaggacggacagacccgaggagccaatgcgttttacagcgttatggagcagatgaaaatgctcg

SEQ ID NO: 820185 - DNA, 75 bp, synthetic construct
  source 1..75: mol_type = other DNA
tctcggcgcggataataaagagcagcagagcaaacttacgggctggctcggtgaaatggcgtcctattactcagc

SEQ ID NO: 820186 - DNA, 75 bp, synthetic construct
  source 1..75: mol_type = other DNA
ttttcgcgttgttaattttagcaacgttgataaaccgttttctggtatggcggttaccggagagaaaagggggtg

SEQ ID NO: 820187 - DNA, 75 bp, synthetic construct
  source 1..75: mol_type = other DNA
cgggcgcgttttgatttttatcaggcgcgttcagcctggtcacgggcagagtggattggctccggaagaatggcc

SEQ ID NO: 820188 - DNA, 75 bp, synthetic construct
  source 1..75: mol_type = other DNA
ttgacctgaaatacacggtggcagatgccgccaaagctatggatgttggcctttccacaatgacaagatgggtca

SEQ ID NO: 820189 - DNA, 75 bp, synthetic construct
  source 1..75: mol_type = other DNA
ttggcctttccacaatgacaagatgggtcaaacaactgcgtgatgagcgtcagggcaaaataccaaaagcctctc

SEQ ID NO: 820190 - DNA, 75 bp, synthetic construct
  source 1..75: mol_type = other DNA
tttttttattataaccgtgttgtcatcacgtaattttcatgcggcggtgttggtttctattgttgttacttcctg

SEQ ID NO: 820191 - DNA, 75 bp, synthetic construct
  source 1..75: mol_type = other DNA
ggcaaacgccgtgcagctccaccaggaccacatcgtcgggtcatttttcagactcagttatcgaccaagctggcg

SEQ ID NO: 820192 - DNA, 75 bp, synthetic construct
  source 1..75: mol_type = other DNA
actgagcacgtatgagaaagagccggcgctgatgggcgaggattatcaggacattttccgccagcaggtcaggga

SEQ ID NO: 820193 - DNA, 75 bp, synthetic construct
  source 1..75: mol_type = other DNA
cagggcaaaatacctaaagcctctcctataaccccggaacagattgaaatacgtgagttaaagaaaaagctacaa

SEQ ID NO: 820194 - DNA, 75 bp, synthetic construct
  source 1..75: mol_type = other DNA
tttaggcaagatataaaaaaaccagtgtttcatgcgtttttatctcttccaaaagatgaaaaattaacagatgaa

SEQ ID NO: 820195 - DNA, 75 bp, synthetic construct
  source 1..75: mol_type = other DNA
tctaaaagatggatatctagaacaaaaaaatcaggacaagtttatatttttcaatcaaagaggttttaaatcatg

SEQ ID NO: 820196 - DNA, 75 bp, synthetic construct
  source 1..75: mol_type = other DNA
aaaccagctcgtatcgtgctacagaacgcattacaggcggctatgttgggtaaaccagatctacagacgttcata

SEQ ID NO: 820197 - DNA, 75 bp, synthetic construct
  source 1..75: mol_type = other DNA
tattaacatgcttcggcaagttgaagcaaagatcagcgctatgaatattcccagcgaatctctttccgggcggcg

SEQ ID NO: 820198 - DNA, 75 bp, synthetic construct
  source 1..75: mol_type = other DNA
gtgaggatgttgcgtggatgcttcagcctgaaaatatcaatgcacaaattaacatccagaatcaaaagtacgcgc

SEQ ID NO: 820199 - DNA, 75 bp, synthetic construct
  source 1..75: mol_type = other DNA
aaaggaacaacggagccgggccgcgaggggacggggagaggagacaagggcgatcggggccggcaggcaagaaaa

SEQ ID NO: 820200 - DNA, 75 bp, synthetic construct
  source 1..75: mol_type = other DNA
gagtttgagtgcagagacgctgccggatgtgcaggcaggctcggtagtgctgtaccgtaaatttgaagttggtga

SEQ ID NO: 820201 - DNA, 75 bp, synthetic construct
  source 1..75: mol_type = other DNA
gtggcgcgaaggtgaaactggaaagtctggctgcgctggttaacggtgcgattgccttcgattcgccggaagagt

SEQ ID NO: 820202 - DNA, 75 bp, synthetic construct
  source 1..75: mol_type = other DNA
tagcagcttgtggacgtcttgagataaagcacgacttaaccataactaagagcttgcaggggcaaaaatcagacg

SEQ ID NO: 820203 - DNA, 75 bp, synthetic construct
  source 1..75: mol_type = other DNA
agacaaacatcaatatatttgtgtacgtcataaagatacagataaagaccatattcatattgtagcaaatagggt

SEQ ID NO: 820204 - DNA, 75 bp, synthetic construct
  source 1..75: mol_type = other DNA
gtgcaggagcatctgaacaaaaccggtatacctgatgccgataaagtgaacattcaaattgccgacggcaaagcg

SEQ ID NO: 820205 - DNA, 75 bp, synthetic construct
  source 1..75: mol_type = other DNA
aacccaacacctgatttacgcagtaacaggaaagcacagtgtcttgaaatgcgtcaggactctatacaatttaaa

SEQ ID NO: 820206 - DNA, 75 bp, synthetic construct
  source 1..75: mol_type = other DNA
aagagtaaggtctcagttaaaaaccgggatgtggtccttgataccggcgcgacaatttcagatgacagcactctg

SEQ ID NO: 820207 - DNA, 75 bp, synthetic construct
  source 1..75: mol_type = other DNA
ggcacgccacagatcatgctgtattcagggatggtggattttcctgttcatatccagccccgttacaatggttgt

SEQ ID NO: 820208 - DNA, 75 bp, synthetic construct
  source 1..75: mol_type = other DNA
cgagtacaccgcgacctttgccggactcggcaaaaaagactacagttctcattcttggtatgcgggggctgaagt

SEQ ID NO: 820209 - DNA, 75 bp, synthetic construct
  source 1..75: mol_type = other DNA
tttcgcagggaagatttacggcctttcctggggaaaccaggccagctccaccatcttcgacagcagccagtcagc

SEQ ID NO: 820210 - DNA, 75 bp, synthetic construct
  source 1..75: mol_type = other DNA
gcggaaccggctctgccggcggtggtttcagtgacaattatacgcatgttcaggtgggtgcggataaaaaacatg

SEQ ID NO: 820211 - DNA, 75 bp, synthetic construct
  source 1..75: mol_type = other DNA
aattcacagacacaaaatgtgggcttcagtgatgtgacaccggtgattgagcagaaggataacggagaaaaaacc

SEQ ID NO: 820212 - DNA, 75 bp, synthetic construct
  source 1..75: mol_type = other DNA
gggatttgtgctgtatgcgggaacaaatggtcttgtgtctgttgatgcaaacggcaatgccgcgctggcgacgga

SEQ ID NO: 820213 - DNA, 75 bp, synthetic construct
  source 1..75: mol_type = other DNA
aatgtcagtgcttgccgggggctctctgccgtccatgataaggtggcattcaaaaattttttcattacctgaaag

SEQ ID NO: 820214 - DNA, 75 bp, synthetic construct
  source 1..75: mol_type = other DNA
tcaaaaagttacttttgtctctttctgtttgtgctgcaattttagccccgactgcaaatgcagacaacgcaatgc

SEQ ID NO: 820215 - DNA, 75 bp, synthetic construct
  source 1..75: mol_type = other DNA
cccatcggatggcatgtgcaaaatgctcattttatatgccaaaatcttcatctgaagcacaatacttggaaggtc

SEQ ID NO: 820216 - DNA, 75 bp, synthetic construct
  source 1..75: mol_type = other DNA
caaaaattttttcattacctgaaagaacctctttttcctgtatcagggtgaaatctccggcgcctgagcgggtgg

SEQ ID NO: 820217 - DNA, 75 bp, synthetic construct
  source 1..75: mol_type = other DNA
ttatctcagtacaccgtttgactgcgcatgggttgatctcgcgaaagatatgatgcgcgtggtgacaggagacaa

SEQ ID NO: 820218 - DNA, 75 bp, synthetic construct
  source 1..75: mol_type = other DNA
aacgcgtttgatatcgatctgcatattaaaccggagtatcgcaaccttctgaccagcaacagcgtgttctgggca

SEQ ID NO: 820219 - DNA, 75 bp, synthetic construct
  source 1..75: mol_type = other DNA
attaatgagcttcgttaatgatgttgaaaaaggcataaagattgatcgtgataatattctttatgttttactttc

SEQ ID NO: 820220 - DNA, 75 bp, synthetic construct
  source 1..75: mol_type = other DNA
tgaaaggtggtctaggtgactttctaaccgctatcgagaaagggcttgttaaagctggtgatacgctactaatcg

SEQ ID NO: 820221 - DNA, 75 bp, synthetic construct
  source 1..75: mol_type = other DNA
agttgaaaaaaacttggcttcagaaagtgaaaaggcaataattaatttaaaaaatttgacatttaatcaggtgac

SEQ ID NO: 820222 - DNA, 75 bp, synthetic construct
  source 1..75: mol_type = other DNA
ttcggcctgtcagaaagcaggtgtgtgtatttttggatatgacaacttatgaacagttaaagaaaagagcgatcc

SEQ ID NO: 820223 - DNA, 75 bp, synthetic construct
  source 1..75: mol_type = other DNA
tcatgggaatttaaatataaaggctaatgaagaactaaaatcaatcatatctgcttgccttcctgttgattataa

SEQ ID NO: 820224 - DNA, 75 bp, synthetic construct
  source 1..75: mol_type = other DNA
gaccgaatatctgtacagctctcgtcgaactgcaatggtagcatcgttaagaaatattgatgatattattgaagt

SEQ ID NO: 820225 - DNA, 75 bp, synthetic construct
  source 1..75: mol_type = other DNA
ttctaattgaatatcaaaataagaaattatcaaaagccccagcatcacttcgcgttttacgaccatttttgatta

SEQ ID NO: 820226 - DNA, 75 bp, synthetic construct
  source 1..75: mol_type = other DNA
ccatttctaaagccctggaagctattaatcaggtccatatggcggagaattttaagctgttcagtaaggcatttg

SEQ ID NO: 820227 - DNA, 75 bp, synthetic construct
  source 1..75: mol_type = other DNA
gaaaacagtacgatctctcagacttttgaatttgttgatcatggtgattatctggagtcaacatctcccatccct

SEQ ID NO: 820228 - DNA, 75 bp, synthetic construct
  source 1..75: mol_type = other DNA
ttcacttctctgcaggctgatctggaaaacggcgtaaacctggaacagactatccgtctgcgcgaagaaatcgct

SEQ ID NO: 820229 - DNA, 75 bp, synthetic construct
  source 1..75: mol_type = other DNA
gcgttgcgctgtacggtatcgactacctgatgaaagacaaactggcacagttcacttctctgcaggctgatctgg

SEQ ID NO: 820230 - DNA, 75 bp, synthetic construct
  source 1..75: mol_type = other DNA
taagtcggaatttaaataaaaatttcccttgtgataaatgtgctttctttatgccggttgatattgatgaggtaa

SEQ ID NO: 820231 - DNA, 75 bp, synthetic construct
  source 1..75: mol_type = other DNA
agacaaacatcaatatatttgtgtgcgtcataaagatactgatcaagaccatatccatattatagccaatcgcat

SEQ ID NO: 820232 - DNA, 75 bp, synthetic construct
  source 1..75: mol_type = other DNA
tgaccggaaaaacctttgagttggtgcccggcgatggcgagccacgcaaagagttcgttgttgtgccaggcgaaa

SEQ ID NO: 820233 - DNA, 75 bp, synthetic construct
  source 1..75: mol_type = other DNA
acagttgatcccagcgtcgttaccctgcttcgtgaaaatacccgcatcgaattacgtaatccgaaattatccctt

SEQ ID NO: 820234 - DNA, 75 bp, synthetic construct
  source 1..75: mol_type = other DNA
aactatcactggaaattgaagacttgtccgctattaccagcaaactaaaacagttaaaaggtgagctatcacagg

SEQ ID NO: 820235 - DNA, 75 bp, synthetic construct
  source 1..75: mol_type = other DNA
aactggcggtcgggatgccaattcgctatctcggtattgatatcgggcaaatccagacgctggatctgattaccg

SEQ ID NO: 820236 - DNA, 75 bp, synthetic construct
  source 1..75: mol_type = other DNA
ttaagccggagtatcgcaaccttctgaccagcaacagcgtgttctgggcagaaggtggggcgaaagttcagctga

SEQ ID NO: 820237 - DNA, 75 bp, synthetic construct
  source 1..75: mol_type = other DNA
attaaccgccgactcgacgccgttaatgtatcaggggctggaagtcggacagctaactaaactggatttaaatcc

SEQ ID NO: 820238 - DNA, 75 bp, synthetic construct
  source 1..75: mol_type = other DNA
ggatattgatattgcttctgagctattacgtcgtatcttaagggctggtgtcgatatagtcacactgagcgatgg

SEQ ID NO: 820239 - DNA, 75 bp, synthetic construct
  source 1..75: mol_type = other DNA
atgaaacgtgtaatcagctacatcagattcagttctgagcgacaagccaaaggcgactcactacgcagacagtct

SEQ ID NO: 820240 - DNA, 75 bp, synthetic construct
  source 1..75: mol_type = other DNA
attatccgaatcagtcagtacagcattaaatcagacacagcaaacattaacgagagtgaacaactcattagaggc

SEQ ID NO: 820241 - DNA, 75 bp, synthetic construct
  source 1..75: mol_type = other DNA
aaacctcagtgcaagaccttctgaaaaatcgctctgtaattggttacttcacacctaaaggctgtgaggagatag

SEQ ID NO: 820242 - DNA, 75 bp, synthetic construct
  source 1..75: mol_type = other DNA
cagctacggttagagggtaagtctatctgggagattgtcagaactcttaatgctgaaggtcaccagacgcttaac

SEQ ID NO: 820243 - DNA, 75 bp, synthetic construct
  source 1..75: mol_type = other DNA
agtggagactgtgaagaggtgctttcagctacggttagagggtaagtctatctgggagattgtcaggactcttaa

SEQ ID NO: 820244 - DNA, 75 bp, synthetic construct
  source 1..75: mol_type = other DNA
aattagttaaacgcataccgggtgtgaaacctgcatcggtatatgctcaggctattgcggacataaaaaaagggc

SEQ ID NO: 820245 - DNA, 75 bp, synthetic construct
  source 1..75: mol_type = other DNA
ttcacgacccacgctgacggtttctaacctggacggtatggtcaccggaatggcggaagatctgcagagtctggt

SEQ ID NO: 820246 - DNA, 75 bp, synthetic construct
  source 1..75: mol_type = other DNA
ttcacgaccaaccctgacggtttctaacctggacggtatggtcaccggaatggcggaagatatgcagagtctggt

SEQ ID NO: 820247 - DNA, 75 bp, synthetic construct
  source 1..75: mol_type = other DNA
gaatgaaaaaggggagccggtcacctggcaggggcggaagtatgaggcgtacccgattgacggcagcggctttga

SEQ ID NO: 820248 - DNA, 75 bp, synthetic construct
  source 1..75: mol_type = other DNA
gaacgaaaaaggtgagtcagtcacctggcaggggcggcagtatcaggcgtatcccattcaggggagcggatttga

SEQ ID NO: 820249 - DNA, 75 bp, synthetic construct
  source 1..75: mol_type = other DNA
atcgctactttttctgcaatgagcagaacgagaaaggagagtctgtcacctggcagagtcggcagtatcaggcct

SEQ ID NO: 820250 - DNA, 75 bp, synthetic construct
  source 1..75: mol_type = other DNA
tgattacattcatattatttttcttggtgtataccatagatataaatcgttataatctctcagctatagcctcag

SEQ ID NO: 820251 - DNA, 75 bp, synthetic construct
  source 1..75: mol_type = other DNA
ttatatgtttttgcactaatgattactttcatattatttttcttggtgtataccatagatataaatcgttataat

SEQ ID NO: 820252 - DNA, 75 bp, synthetic construct
  source 1..75: mol_type = other DNA
gcggatgagttcgataaacccaccacggatatccgtaaggacagatgcagcaagtgcatgcgcgggtgtgaactg

SEQ ID NO: 820253 - DNA, 75 bp, synthetic construct
  source 1..75: mol_type = other DNA
gctgacagccatgacggcctcgtttgtgctggccacaccgaccgagacggaaggggcgctgtttcccggtcgtat

SEQ ID NO: 820254 - DNA, 75 bp, synthetic construct
  source 1..75: mol_type = other DNA
gctgacagccatgacggcctcgtttgtgctggcaacaccgaccgagacggatggggcgctgtttcccggtcggat

SEQ ID NO: 820255 - DNA, 75 bp, synthetic construct
  source 1..75: mol_type = other DNA
aagggcgttatcccaaacatgtctggccggacgacccggcaaatactgcaccgacgcgacggacgaaaaagtatt

SEQ ID NO: 820256 - DNA, 75 bp, synthetic construct
  source 1..75: mol_type = other DNA
gtcccttcaaaagactccctgactgagcgtattggtttgatgcattttgatggagtactggacgaaatcagctct

SEQ ID NO: 820257 - DNA, 75 bp, synthetic construct
  source 1..75: mol_type = other DNA
ctgaaaccttgcatggacgcaccacacagggtggcaaagaagtcatagctttagttaatgagattaagcaattga

SEQ ID NO: 820258 - DNA, 75 bp, synthetic construct
  source 1..75: mol_type = other DNA
gaatgaaaaaggggagccggtcacctggcaggggcgcaatatcaggcatacccgattgacggcagcggctttgag

SEQ ID NO: 820259 - DNA, 75 bp, synthetic construct
  source 1..75: mol_type = other DNA
gtggtgctctgggaaatcgacctgacggtgcagggcggtgagcggtattttttctgcaatgagctgaatgaaaaa

SEQ ID NO: 820260 - DNA, 75 bp, synthetic construct
  source 1..75: mol_type = other DNA
gttttgatgatataataaacaaatgtacgcatagacaacttaacaaaagattcctgaccgtagagcagatctttg

SEQ ID NO: 820261 - DNA, 75 bp, synthetic construct
  source 1..75: mol_type = other DNA
tacgcatagacaacttaacaaaagattcctgaccgtagagcagatctttgaggaattggagttgaaacgcttatg

SEQ ID NO: 820262 - DNA, 75 bp, synthetic construct
  source 1..75: mol_type = other DNA
atgcgcgggtgtgagatgcgcggcatggtggctaattttggcggtttcctttccatcaataaactttcgcagtaa

SEQ ID NO: 820263 - DNA, 75 bp, synthetic construct
  source 1..75: mol_type = other DNA
cgaaaaaggtgagccggttacctggcaggggcggcagtatcaggcataccccattcaggggacgggatttgaact

SEQ ID NO: 820264 - DNA, 75 bp, synthetic construct
  source 1..75: mol_type = other DNA
catgagcgtttccgttgtcgttcatgtaaacgtgttttccagctcacttactcttatgaagccagaaaacccggc

SEQ ID NO: 820265 - DNA, 75 bp, synthetic construct
  source 1..75: mol_type = other DNA
tttctcaatggaaatgagcgcattgcagattgcagagcgaagcattgccaacgccgggaggatgtcggttagcgt

SEQ ID NO: 820266 - DNA, 75 bp, synthetic construct
  source 1..75: mol_type = other DNA
aatgaagaaaccgacaaagagattttgcgacgcatcgaatctcgtgcacgggctgggtcgccaggtggtcagacc

SEQ ID NO: 820267 - DNA, 75 bp, synthetic construct
  source 1..75: mol_type = other DNA
tgcggcgggccgtagccatattgaaggggcgagcaaacagagtgattttgtccaggcgggttatcagtatggttt

SEQ ID NO: 820268 - DNA, 75 bp, synthetic construct
  source 1..75: mol_type = other DNA
tttatcagaaagaggttcctcctggcccgtttgcgattacagatttgcagttggccggtggtggagcagatcttg

SEQ ID NO: 820269 - DNA, 75 bp, synthetic construct
  source 1..75: mol_type = other DNA
ttggccggtggtggagcagatcttgatgttagcgtgaaagaggctgacggctcggtaaccacctatctggtgcct

SEQ ID NO: 820270 - DNA, 75 bp, synthetic construct
  source 1..75: mol_type = other DNA
gagcacctccccgcccccaaatctcagcaacgaaagacttcgttattcaccgcaacaatattcttgaagtacgaa

SEQ ID NO: 820271 - DNA, 75 bp, synthetic construct
  source 1..75: mol_type = other DNA
actgaatggcaaaggggccagcgccagaccagtgctgagcgtgtccaatctgtatggtctggtcaccgggatggt

SEQ ID NO: 820272 - DNA, 75 bp, synthetic construct
  source 1..75: mol_type = other DNA
tacttgcctgatttgcctgaaaaaatacgctgctccttggtgtcgaaagacggagaaactccagtgaggaatgat

SEQ ID NO: 820273 - DNA, 75 bp, synthetic construct
  source 1..75: mol_type = other DNA
gctgatggtgatatagccctgaaagctggtggcgcgctaaaagcaacagcgagcaatttctcctttgtgaaggga

SEQ ID NO: 820274 - DNA, 75 bp, synthetic construct
  source 1..75: mol_type = other DNA
gagcgcctccccgcccgcaattttcggcgacaaaagatttcgttattcaccgcaataatgtgctagaagtgcgaa

SEQ ID NO: 820275 - DNA, 75 bp, synthetic construct
  source 1..75: mol_type = other DNA
atcccattcaggggagtggatttgagatgaacggcaagggcagtgctgcccgtccgacactgacggtctctaacc

SEQ ID NO: 820276 - DNA, 75 bp, synthetic construct
  source 1..75: mol_type = other DNA
ccggcgacctgctggccagccctgacgctgtacgccaagcgcgatatgccgagcgcatgaaggccaaagggatgc

SEQ ID NO: 820277 - DNA, 75 bp, synthetic construct
  source 1..75: mol_type = other DNA
gatgaacgggaagggcagcagtgccagaccgtcgctgacggtgtccaatctgtttggtctggtcaccgggatggc

SEQ ID NO: 820278 - DNA, 75 bp, synthetic construct
  source 1..75: mol_type = other DNA
ggcgcgcgggctggggatgcgttggatgggcgttctgttcgccgtctttttgctcatcgcctatggcataatttt

SEQ ID NO: 820279 - DNA, 75 bp, synthetic construct
  source 1..75: mol_type = other DNA
ggagaaaattaccaaacaggcggggctttccgcggaaaccgcagctgatatccgccgccagatcttgggtatagc

SEQ ID NO: 820280 - DNA, 75 bp, synthetic construct
  source 1..75: mol_type = other DNA
taccgcgttgtgaagatgcctgttaccaaaggtgggaggctggaactgaccatcaccgaaatggggaatgaatga

SEQ ID NO: 820281 - DNA, 75 bp, synthetic construct
  source 1..75: mol_type = other DNA
ttacatttatgcggaaaataaccttttctttttacgtatgaacaacactaaagcgatctggtgtctgcgtatctg

SEQ ID NO: 820282 - DNA, 75 bp, synthetic construct
  source 1..75: mol_type = other DNA
cggcagcatcctggccgccgcatccggcagcacaaggtattgttcagatgatcggcatttttatcgacaccctgg

SEQ ID NO: 820283 - DNA, 75 bp, synthetic construct
  source 1..75: mol_type = other DNA
aatatcgggcaacttccccacgtcatttggtctatttttgagagtgcttttggctggcaggaagcggcaggcggc

SEQ ID NO: 820284 - DNA, 75 bp, synthetic construct
  source 1..75: mol_type = other DNA
atcgacctgacggtacagggcggtgagcggtattttttctgtaatgagctgaatgaaaaaggggagccggtcacc

SEQ ID NO: 820285 - DNA, 75 bp, synthetic construct
  source 1..75: mol_type = other DNA
atgcaggatatccgacaggacacactgaatgaatgcacccgtgcggatcagtcggccagcgtggtgctctgggaa

SEQ ID NO: 820286 - DNA, 75 bp, synthetic construct
  source 1..75: mol_type = other DNA
gatttgcagagcctggtgggggccacggtggtccgccgccgggtgtatgcccgttttctggatgcggtgaatttt

SEQ ID NO: 820287 - DNA, 75 bp, synthetic construct
  source 1..75: mol_type = other DNA
gttttctggatgcggtgaattttgtggcgggcaatccggaagcggacccggagcaggagctgagcgaccgctggg

SEQ ID NO: 820288 - DNA, 75 bp, synthetic construct
  source 1..75: mol_type = other DNA
cactgacggtctctaacctgcacggcatggtcaccgggatggcggaagatctgcagagtctggtcggcggaacgg

SEQ ID NO: 820289 - DNA, 75 bp, synthetic construct
  source 1..75: mol_type = other DNA
ttcccggcctaccctgacggtttctaacctggacggtatggtcaccgggatggcggaagagctgcagagtctggt

SEQ ID NO: 820290 - DNA, 75 bp, synthetic construct
  source 1..75: mol_type = other DNA
cgggatttgaactgaacggcaagggcagtgctgcccgtccgacactgacggtttctaacctgcacggcatggtca

SEQ ID NO: 820291 - DNA, 75 bp, synthetic construct
  source 1..75: mol_type = other DNA
acctaccgctctgatgagtgtggttacacgggcggggctgtggcggatgagttcgacaaccccaccacggatatc

SEQ ID NO: 820292 - DNA, 75 bp, synthetic construct
  source 1..75: mol_type = other DNA
aagggcagcagtgcctgcccgtcgctgacggtgtcgaatctgttaggtctggtcaccggcatggcggaggacctg

SEQ ID NO: 820293 - DNA, 75 bp, synthetic construct
  source 1..75: mol_type = other DNA
aagggcagcagtgcctgtccgtcgctgacggtgtcgaatctgtttggtctggtcaccggaatggcggaggacctg

SEQ ID NO: 820294 - DNA, 75 bp, synthetic construct
  source 1..75: mol_type = other DNA
aagggcagcagtgcctgaccgtcgctgacggtgtcgaatctgttaggtctggtcaccggaatggcggaggacctg

SEQ ID NO: 820295 - DNA, 75 bp, synthetic construct
  source 1..75: mol_type = other DNA
aagggcagcagtgcctggccgtcgctgacggtgtcgaatctgttgggtctggtcaccggaatggcggaggacctg

SEQ ID NO: 820296 - DNA, 75 bp, synthetic construct
  source 1..75: mol_type = other DNA
aagggcagcagtgcctggccgtcgctgacggtgtcgaatctgttaggtctggtcaccgggatggcggaggacctg

SEQ ID NO: 820297 - DNA, 75 bp, synthetic construct
  source 1..75: mol_type = other DNA
aagggcagcagtgcctgcccgtcgctgacggtgtcgaatctgttcggtctggtcaccggaatggcggaggacctg

SEQ ID NO: 820298 - DNA, 75 bp, synthetic construct
  source 1..75: mol_type = other DNA
tcaggggagcggttttgaactgaatggcaaaggggccagcgccagaccagtgctgagcgtgtccaatctgtatgg

SEQ ID NO: 820299 - DNA, 75 bp, synthetic construct
  source 1..75: mol_type = other DNA
tgaaggagtcggtgaaatcagagcagtcaccgcgggtggtgctctgggaaatcgacctgacggtgcagggcggtg

SEQ ID NO: 820300 - DNA, 75 bp, synthetic construct
  source 1..75: mol_type = other DNA
tttcgttgcgggcaatccggaagcggacccggagcaggagctgagtgaccgctgggtggtggagcagatgtcgca

SEQ ID NO: 820301 - DNA, 75 bp, synthetic construct
  source 1..75: mol_type = other DNA
cgcccgtcgctgacggtgtcgaatctgttcggtctggtcaccgggatggcggaggacctgcagagcctggtgggg

SEQ ID NO: 820302 - DNA, 75 bp, synthetic construct
  source 1..75: mol_type = other DNA
ctcgccggatgcgcggattttactggcgctaccggtcgatattgatgagttagtacaacgctgcccgcagctggt

SEQ ID NO: 820303 - DNA, 75 bp, synthetic construct
  source 1..75: mol_type = other DNA
ctaccgcggcaaaaattgccgctattctcgaagagccgccacggatgggcaattgtgacctgggcgtggcgtttt

SEQ ID NO: 820304 - DNA, 75 bp, synthetic construct
  source 1..75: mol_type = other DNA
cgatcagcgaaaagcgatcctcccggcaccgcaagggatgcgcaaagtggtgctggcgaccaatattgctgaaac

SEQ ID NO: 820305 - DNA, 75 bp, synthetic construct
  source 1..75: mol_type = other DNA
atcgagcagtgcagcgaactgaacgcggttagcgcggcctttgtgctgtccacgccgacggaaacggatggtgag

SEQ ID NO: 820306 - DNA, 75 bp, synthetic construct
  source 1..75: mol_type = other DNA
atttttacctggcgtcggagaaattcagcgtgtgcaggaacaactggcttcgcgcatcggcagtgatgtgttgct

SEQ ID NO: 820307 - DNA, 75 bp, synthetic construct
  source 1..75: mol_type = other DNA
gttacaaatgctgggggcactggagggtgaacggcttagtgcgcaagggcaaaaatggcagcgctgggtaacgat

SEQ ID NO: 820308 - DNA, 75 bp, synthetic construct
  source 1..75: mol_type = other DNA
aactggctggatcaaccgcctgcggtgaatttacaggcagcaaaacgtctgttacggatgctgggggcgctggac

SEQ ID NO: 820309 - DNA, 75 bp, synthetic construct
  source 1..75: mol_type = other DNA
gaatacccgactggaagtggttacggaaggcgtgctgacgcgcatgatccaacgcgacccagagctgagcggcgt

SEQ ID NO: 820310 - DNA, 75 bp, synthetic construct
  source 1..75: mol_type = other DNA
gctatcaactggcaaacggcatgggagcgatgctcgatgccgacgatgcgctaagccgccacgaatggttgatcg

SEQ ID NO: 820311 - DNA, 75 bp, synthetic construct
  source 1..75: mol_type = other DNA
acagtgcgtttattgcgccgctgcttgcccaggcctttgccgatcgtattgctcgtcgccgtggccaggatggtc

SEQ ID NO: 820312 - DNA, 75 bp, synthetic construct
  source 1..75: mol_type = other DNA
acccgattgacggcagtggctttgagatgaacgggaagggcagcagtgccagaccgtcgctgacggtgtcgaatc

SEQ ID NO: 820313 - DNA, 75 bp, synthetic construct
  source 1..75: mol_type = other DNA
ttcccgtcctaccctgacggtttctaacctgtacggtatggtcaccgggatggcggaagagctgcagagtctggt

SEQ ID NO: 820314 - DNA, 75 bp, synthetic construct
  source 1..75: mol_type = other DNA
ttcccgacctaccctgacggtttctaacctgaacggtatggtcaccgggatggcggaagagctgcagagtctggt

SEQ ID NO: 820315 - DNA, 75 bp, synthetic construct
  source 1..75: mol_type = other DNA
caagtttgctgatccagactggagccaacgcatagccttagagagcctgaatgtcgattcctttgctcaagcctg

SEQ ID NO: 820316 - DNA, 75 bp, synthetic construct
  source 1..75: mol_type = other DNA
atggcgttaaaaaagaaaccttgcacgatcgtcagtttttaccgcgaattctgctgggcgaatatttccgcgatc

SEQ ID NO: 820317 - DNA, 75 bp, synthetic construct
  source 1..75: mol_type = other DNA
gcgcgggtgtgagatgcgcggcatggtggctaattttggcggtttcctttccattaacaaactttcgcagtaaat

SEQ ID NO: 820318 - DNA, 75 bp, synthetic construct
  source 1..75: mol_type = other DNA
aggacagatgcagcaagtgcatgcgcgggtgtgagatgcgcggcatggtggctaattttggcggtttcctttcca

SEQ ID NO: 820319 - DNA, 75 bp, synthetic construct
  source 1..75: mol_type = other DNA
catgctggcgaacacctgtatgtgggattaccggggagatgaatgcgggtataacggtccggcagtggcggatga

SEQ ID NO: 820320 - DNA, 75 bp, synthetic construct
  source 1..75: mol_type = other DNA
aacgcgaaatagaccatctgcaggcacagctggataagctgcgccggatgaacatcggcagcggctcagaaaaag

SEQ ID NO: 820321 - DNA, 75 bp, synthetic construct
  source 1..75: mol_type = other DNA
gctgctgtgtatgctggtgtcagtgtttattctcggcgtgccgtatcgcgggtcgctgctgattctgttttttat

SEQ ID NO: 820322 - DNA, 75 bp, synthetic construct
  source 1..75: mol_type = other DNA
tccccggtgcggtgaccatcatcatgacggtcatcggcgcgatcctcacctcgctggtggtggcgcgggagtggg

SEQ ID NO: 820323 - DNA, 75 bp, synthetic construct
  source 1..75: mol_type = other DNA
aacgcgaaatagaccatctgcaggcacagctggataagctgcgccggatgaacgtcggcagctgctctgaaaaag

SEQ ID NO: 820324 - DNA, 75 bp, synthetic construct
  source 1..75: mol_type = other DNA
aacgcgaaatagaccatctgcaggcacagctggataagctgcgccggatgaacgtcggcagcagctcagaaaaag

SEQ ID NO: 820325 - DNA, 75 bp, synthetic construct
  source 1..75: mol_type = other DNA
aacgcgaaatagaccatctgcaggcacagctggataagctgcgccggatgaacctcggcagcggctccgaaaaag

SEQ ID NO: 820326 - DNA, 75 bp, synthetic construct
  source 1..75: mol_type = other DNA
ttgacgtcattgctgactggccggtaaaccgggtaggtgaactgctgccgtggcggatcacactgcctgccgaat

SEQ ID NO: 820327 - DNA, 75 bp, synthetic construct
  source 1..75: mol_type = other DNA
gctgaagcagataacaacatcgccgaaaatgccctgcggatggtcagcccggggcgtaaaaacttcctgttcttc

SEQ ID NO: 820328 - DNA, 75 bp, synthetic construct
  source 1..75: mol_type = other DNA
ggaaatcgacaacaacatcgctgaaaatgccctgcgggcggtcagtctgggtcgtaaaaacttcctgttcttcgg

SEQ ID NO: 820329 - DNA, 75 bp, synthetic construct
  source 1..75: mol_type = other DNA
tacattattcccgctcgttatttcgtcagcaccctgcaaagcctgttcctcgccgggaatattccagtggtgctg

SEQ ID NO: 820330 - DNA, 75 bp, synthetic construct
  source 1..75: mol_type = other DNA
ctgttgctgtgtaagctgatcccttattactttctcgggatgctggcgatgttgctgtgtatgctggtgtcagtg

SEQ ID NO: 820331 - DNA, 75 bp, synthetic construct
  source 1..75: mol_type = other DNA
tttctgccgtcgattatgctttccggctttatttttcagatcgacagtatgcccgcggtgatccgcgcggtgacg

SEQ ID NO: 820332 - DNA, 75 bp, synthetic construct
  source 1..75: mol_type = other DNA
aacgcgaaatagaccatctgcaggcacagctggataagctgcgccggatgaacgtcggcagccgctccgaaaaag

SEQ ID NO: 820333 - DNA, 75 bp, synthetic construct
  source 1..75: mol_type = other DNA
aagcggatgcgtacgccgggtttcaacgagctttatcgcaatggtgggataacggaagctgcctgctgggctcat

SEQ ID NO: 820334 - DNA, 75 bp, synthetic construct
  source 1..75: mol_type = other DNA
aacgtcagttgaaaacgaaaccgctgctgaaatccctggaaagctggctgcgtgaaaagatgaaaaccctgtcgc

SEQ ID NO: 820335 - DNA, 75 bp, synthetic construct
  source 1..75: mol_type = other DNA
ctgcgccatattctgagcgtactgccggaatggccctccaaccgtgttgacgaactcctgccatggaacgtagta

SEQ ID NO: 820336 - DNA, 75 bp, synthetic construct
  source 1..75: mol_type = other DNA
gttgcgtcagacccgcacccgtaagccgttccctgaatcacgtaccctgaatcactaccccgtgacgaaaagcgg

SEQ ID NO: 820337 - DNA, 75 bp, synthetic construct
  source 1..75: mol_type = other DNA
tgccgggtaataagaagacgaagaccgggcggttgtgggcgtatgttcgtgatgaccgcaatgccgggtcagcgt

SEQ ID NO: 820338 - DNA, 75 bp, synthetic construct
  source 1..75: mol_type = other DNA
ggtatcgccggaccggggctgctggcccacgtgctgacctcgaagtatgcagagcacaccccgctgtatcgcagt

SEQ ID NO: 820339 - DNA, 75 bp, synthetic construct
  source 1..75: mol_type = other DNA
ctgcggcgccgtgctgcccgaactgcggcggttcactgagctatctgggcgaggataccaccgaacagctggagt

SEQ ID NO: 820340 - DNA, 75 bp, synthetic construct
  source 1..75: mol_type = other DNA
ctggttgcgtgaaaagatgaagaccctgtcgcgacactcagagttgggcaaaggcgttcgcgtacgcattaccag

SEQ ID NO: 820341 - DNA, 75 bp, synthetic construct
  source 1..75: mol_type = other DNA
aacgcgaaatagaccatctgcaggcacagctggataagctgcgccggatgaacgtcggcagcggctcggaaaaag

SEQ ID NO: 820342 - DNA, 75 bp, synthetic construct
  source 1..75: mol_type = other DNA
cttgctgaacgtcagcgaaaaacgaaaccgctgttgaaatccctggtggatttgcccctatatttccagacacct

SEQ ID NO: 820343 - DNA, 75 bp, synthetic construct
  source 1..75: mol_type = other DNA
cggacagaaaaggcatccatccgcagactcatcttgcttgcttcagcggtgtgctgcaagcggatgcgtacgccg

SEQ ID NO: 820344 - DNA, 75 bp, synthetic construct
  source 1..75: mol_type = other DNA
ctgacggcaaactccatgccgatgataccccggtccaggtactgctgccgggtaataagaagacgaagaccgggc

SEQ ID NO: 820345 - DNA, 75 bp, synthetic construct
  source 1..75: mol_type = other DNA
gaagtggaaaaaaacgcgacgcctctccatgcgacaggagcatcgtgctggcgaaaagctctttatcgacttctg

SEQ ID NO: 820346 - DNA, 75 bp, synthetic construct
  source 1..75: mol_type = other DNA
gctgggtggaaatcgataacaacatcgctgaaaatgccctgcgggcggtcagtctgggtcgtaaaaacttcctgt

SEQ ID NO: 820347 - DNA, 75 bp, synthetic construct
  source 1..75: mol_type = other DNA
atgtacggccgccagggcgtggagctgagtcgttcactgctgtcgggctgggtggatgcatgctgccggctactg

SEQ ID NO: 820348 - DNA, 75 bp, synthetic construct
  source 1..75: mol_type = other DNA
tgcctcttcaggcgcaacatcttgctttactggatacgctcagcgcgctgctgacccaggaaggcacgccgtctg

SEQ ID NO: 820349 - DNA, 75 bp, synthetic construct
  source 1..75: mol_type = other DNA
gacgaaaagcgactgttgccagcggcgccgtgctgcccgaactgcggcggttcactgagctatctgggcgaggat

SEQ ID NO: 820350 - DNA, 75 bp, synthetic construct
  source 1..75: mol_type = other DNA
ccggcagagcagcggcttgctgaacgtcagcgaaaaacgaaaccgctgttgaaatccctggaaagctggttgcat

SEQ ID NO: 820351 - DNA, 75 bp, synthetic construct
  source 1..75: mol_type = other DNA
aagcatgcctgtactcagtgcgatgccatcgtgcaggcccccgcgccttcacggcccatcgagcggggtatcgca

SEQ ID NO: 820352 - DNA, 75 bp, synthetic construct
  source 1..75: mol_type = other DNA
cagcctgatcgggacgtgcaaactgaacggagtggagccagaaagctacctccgctatcatagccgactggccga

SEQ ID NO: 820353 - DNA, 75 bp, synthetic construct
  source 1..75: mol_type = other DNA
tcgccgaacagctggagttgatgcgtagtaccttccgggttatccggacggtacgggaaaaacatgcctgtactc

SEQ ID NO: 820354 - DNA, 75 bp, synthetic construct
  source 1..75: mol_type = other DNA
gggcgtccaactatacctacgttgaagcgtgcgaaggtcaggacatgatgtcatggttaaatgcccacagccgtt

SEQ ID NO: 820355 - DNA, 75 bp, synthetic construct
  source 1..75: mol_type = other DNA
agcggttccggttatcccggcggcgtgccgggggcgttgtcgaatcaacccgcgcctgcgaataacgcgccaatc

SEQ ID NO: 820356 - DNA, 75 bp, synthetic construct
  source 1..75: mol_type = other DNA
tggcgtcatagcagactggccggtcaaccgggtcagcgaactgcttccgtggcgtatagcactgccagctgaata

SEQ ID NO: 820357 - DNA, 75 bp, synthetic construct
  source 1..75: mol_type = other DNA
acaacatagctgagaatgcgctacggatggtcagcctgggccgcaaaaactacctgttcttcggttcggatcatg

SEQ ID NO: 820358 - DNA, 75 bp, synthetic construct
  source 1..75: mol_type = other DNA
gaaagctggctgcgtgaaaagatgaacaccctgtcacgacactcagagctggcgaaagcgttcgcgtacgccctt

SEQ ID NO: 820359 - DNA, 75 bp, synthetic construct
  source 1..75: mol_type = other DNA
gccgaacagctggagttgatgcgtagcgccttccgggttatccggacggtacgggaaaaacatgcctgtactcag

SEQ ID NO: 820360 - DNA, 75 bp, synthetic construct
  source 1..75: mol_type = other DNA
ggcggtgtggttcgcttacagcccggacagaaaaggcatccatccgcagactcatcttgcggggttcagtggtgt

SEQ ID NO: 820361 - DNA, 75 bp, synthetic construct
  source 1..75: mol_type = other DNA
aggtgtggagctgagccgttcactgctgtcgggctgggtggatgcatgctgccggcagctgtctccgctggaaga

SEQ ID NO: 820362 - DNA, 75 bp, synthetic construct
  source 1..75: mol_type = other DNA
agtgcgatgccatcgtgcaggccccgcgccttcacggcccatcgagcggggtatcgcaggaccggggctgctggc

SEQ ID NO: 820363 - DNA, 75 bp, synthetic construct
  source 1..75: mol_type = other DNA
atgaacgatacctcttctgacgacatccttctgctgaaacagcgcctggccgaacaggaagcgttgatccacgcc

SEQ ID NO: 820364 - DNA, 75 bp, synthetic construct
  source 1..75: mol_type = other DNA
cgtatctgcgccatatcctgagcgtactgccggaatggccttccaaccgagttgatgaactcctgccatggaacg

SEQ ID NO: 820365 - DNA, 75 bp, synthetic construct
  source 1..75: mol_type = other DNA
ccgtgcgctggaagaggtcggtctgaccgaagcccaggcacaggagatgtaccgttatctggcgattgctaacta

SEQ ID NO: 820366 - DNA, 75 bp, synthetic construct
  source 1..75: mol_type = other DNA
tcgataagtgcatcggctgccacacctgttcagttacctgtaaaaacgtctggaccagccgtgaaggcgtggaat

SEQ ID NO: 820367 - DNA, 75 bp, synthetic construct
  source 1..75: mol_type = other DNA
cggctgtcacacctgttcagttacctgtaaaaacgtctggaccagccgtgaaggcgtggaatacgcgtggttcaa

SEQ ID NO: 820368 - DNA, 75 bp, synthetic construct
  source 1..75: mol_type = other DNA
gcgctgggttgacatcatgggagagcagcttcgcccgctgtatgatgaactgaagcactatgtgctgatgccggg

SEQ ID NO: 820369 - DNA, 75 bp, synthetic construct
  source 1..75: mol_type = other DNA
ctggcggactacagaagtatcctgcaggccgatgcatatgcgggttacaatgctctttacgaaagcggtcaggta

SEQ ID NO: 820370 - DNA, 75 bp, synthetic construct
  source 1..75: mol_type = other DNA
acaccccgctgtatcgccagtcagaaatatacggccggcaaggtgtggagctgagccgttcactgctgtcgggct

SEQ ID NO: 820371 - DNA, 75 bp, synthetic construct
  source 1..75: mol_type = other DNA
gcgccgtacaacagcagccacaggctcgccaggaagtggaagatgcggtggaagtacgcctcagcaaagacgaac

SEQ ID NO: 820372 - DNA, 75 bp, synthetic construct
  source 1..75: mol_type = other DNA
ggacttcgccagtaaagaacaaacggaagaacagtatcgccctaacggtgatgaatctcatgcggcgcttcgttc

SEQ ID NO: 820373 - DNA, 75 bp, synthetic construct
  source 1..75: mol_type = other DNA
tgaactcgctgcgtgaagaggtcactgcggtactcgcggcatttaagccgcgtgaccaggtggttttgcgtctgg

SEQ ID NO: 820374 - DNA, 75 bp, synthetic construct
  source 1..75: mol_type = other DNA
ccatgaacctctggcgggggaagacgacgatacgcttccggttcccgtctctttacaagggcgtgtaacaggcaa

SEQ ID NO: 820375 - DNA, 75 bp, synthetic construct
  source 1..75: mol_type = other DNA
caatacgcccaaagtgactgatgtgccgtcaaccgtgttaccggcagagaaaccaacgctcttcacaaaactgac

SEQ ID NO: 820376 - DNA, 75 bp, synthetic construct
  source 1..75: mol_type = other DNA
atgcgtcacaggcggcgctccgttcccgtcaactgaatgagagcgaacaaagcggttccggttaccctggcggcg

SEQ ID NO: 820377 - DNA, 75 bp, synthetic construct
  source 1..75: mol_type = other DNA
ctaacacgtcgcgccgaggcggtgaagactgtgcagcaacaggcgctggcccgcgaggaagtggaagatgcggtg

SEQ ID NO: 820378 - DNA, 75 bp, synthetic construct
  source 1..75: mol_type = other DNA
ggaatggccttccagccgtgttgatgaactcctgctgcatattagcatggaggtgttcggtgagtgccggacgac

SEQ ID NO: 820379 - DNA, 75 bp, synthetic construct
  source 1..75: mol_type = other DNA
acgaagaccgggcggttgtgggcgtatgttcgtgacgaccgtaacgccgggtcaacgctggcgccggcggtgtgg

SEQ ID NO: 820380 - DNA, 75 bp, synthetic construct
  source 1..75: mol_type = other DNA
ggcgtctgcgcgataaaaacattcctttaaccgttacggtagacaaagtggctgccagcggcggggacatgatgg

SEQ ID NO: 820381 - DNA, 75 bp, synthetic construct
  source 1..75: mol_type = other DNA
gggtgaggtggtgactgacagtaaaccccgcgtctgggtactggatttcaaaggcagcatggacgcgcatgaagt

SEQ ID NO: 820382 - DNA, 75 bp, synthetic construct
  source 1..75: mol_type = other DNA
acgccagcttaatgagagcgagcaaagcggttccggttatccgggcggcgtaccgggggcgttgtcgaatcaacc

SEQ ID NO: 820383 - DNA, 75 bp, synthetic construct
  source 1..75: mol_type = other DNA
ccgctgacgttgacccctccgcattgcccggcggcaaagccagtgatgtcgctcaagattttctcgcattgttga

SEQ ID NO: 820384 - DNA, 75 bp, synthetic construct
  source 1..75: mol_type = other DNA
atgctggccccgaaggcaaaaacaccggattaccgcgcaacggataacggcagacagaacacgtacttttcctcg

SEQ ID NO: 820385 - DNA, 75 bp, synthetic construct
  source 1..75: mol_type = other DNA
acccgatgccggtgccttacggggaaatgctggttggctcccgccgtatatcccaggacatcagcacccgtgatg

SEQ ID NO: 820386 - DNA, 75 bp, synthetic construct
  source 1..75: mol_type = other DNA
ccattttgttccaaacgttgtcagctgatcgacctcggagaatgggctgctgaagaaaaacgaatccccagcagt

SEQ ID NO: 820387 - DNA, 75 bp, synthetic construct
  source 1..75: mol_type = other DNA
gacggccagcgtggtgctctgggaaattgatctgacagaggtcggtggggagcgttactttttctgcaatgagca

SEQ ID NO: 820388 - DNA, 75 bp, synthetic construct
  source 1..75: mol_type = other DNA
gattgcacaggggaacccgatgccggtgccttacggtgaaatgctggttggctcacggcgaatctcccaggacat

SEQ ID NO: 820389 - DNA, 75 bp, synthetic construct
  source 1..75: mol_type = other DNA
gatgaacggcaaaggagccagtgcaaggccaacgcttaaagtctctaatctgtacggcatggtcaccgggatggc

SEQ ID NO: 820390 - DNA, 75 bp, synthetic construct
  source 1..75: mol_type = other DNA
gtggcaacagataagcccacgacaaaaggcgagccgctgatcagcgatattgtttccgacgcgcaacaagcggat

SEQ ID NO: 820391 - DNA, 75 bp, synthetic construct
  source 1..75: mol_type = other DNA
aaccgacaaagcggccccccagttgctggtggcaacagataagcccacgacaaaaggcgagccgctggtcagcga

SEQ ID NO: 820392 - DNA, 75 bp, synthetic construct
  source 1..75: mol_type = other DNA
atgtcagaaactattacggtgaattgcccaacctgcgggaaaacagtggtgtggggtgaaatcagcccgtttcgg

SEQ ID NO: 820393 - DNA, 75 bp, synthetic construct
  source 1..75: mol_type = other DNA
atgaaaaataatgtaatgaaaaatggaactatcgacagccaggctctgttgaaaatggtgaatgaagcgcggaga

SEQ ID NO: 820394 - DNA, 75 bp, synthetic construct
  source 1..75: mol_type = other DNA
atcaccgtcctggaaaatctgcagcaggaaggctttcagccgttcttcgcctgccagacccgtgtgcgcgaccag

SEQ ID NO: 820395 - DNA, 75 bp, synthetic construct
  source 1..75: mol_type = other DNA
cgaatccggcagaataacggaagccgcgtgtatggctcatgcccggagaaaaatccacgatgtgcatgcaagagc

SEQ ID NO: 820396 - DNA, 75 bp, synthetic construct
  source 1..75: mol_type = other DNA
aaaatcatatagctaccttacaagaacggactcgcgatgcgctggcgcgcttcaagctggatgcgttacttattc

SEQ ID NO: 820397 - DNA, 75 bp, synthetic construct
  source 1..75: mol_type = other DNA
tgcctggcgtcatagcagactggccggtcaaccgggtcagcgaactgcttccgtggcgtatagcactgccagctg

SEQ ID NO: 820398 - DNA, 75 bp, synthetic construct
  source 1..75: mol_type = other DNA
tcagcgttggcacctgcagtgtggttcgcttacagcccggacagaaaaggcatccatccgcagactcatcttgct

SEQ ID NO: 820399 - DNA, 75 bp, synthetic construct
  source 1..75: mol_type = other DNA
acctcgcggcaccggcaaaatatccgtacctgcgctgcacccgtattctccagccgggcatggtgttaaccatcg

SEQ ID NO: 820400 - DNA, 75 bp, synthetic construct
  source 1..75: mol_type = other DNA
caacgactacgcacagctggtgaaagacgtaaatgatgaacaactggcgctgatcgccaccatgaaagcaggcgt

SEQ ID NO: 820401 - DNA, 75 bp, synthetic construct
  source 1..75: mol_type = other DNA
ggccagcaatatcaaccctaaaggggtgatcgactacctgcattactaccgctccttcaaaaccgagtacgaact

SEQ ID NO: 820402 - DNA, 75 bp, synthetic construct
  source 1..75: mol_type = other DNA
aaaaacgaaaccgctgttgaaatccctggaaagctggttgcgtgaaaagatgaagaccctgtcgcgacactcaga

SEQ ID NO: 820403 - DNA, 75 bp, synthetic construct
  source 1..75: mol_type = other DNA
ctgagccgttcactgctgtcgggctgggtggatgcatgctgccggctgctgtctccgctggaagaggcgcttcat

SEQ ID NO: 820404 - DNA, 75 bp, synthetic construct
  source 1..75: mol_type = other DNA
aatgcgttgcggatggtcagtctgggccgcaaaaactacctgttcttcggttcggatcgatgggaggagagcggg

SEQ ID NO: 820405 - DNA, 75 bp, synthetic construct
  source 1..75: mol_type = other DNA
gcaacagcaagcgtttatcgatcagttgctggctgccggtcgctggtactgctggtggcgtggctgctgtggcgg

SEQ ID NO: 820406 - DNA, 75 bp, synthetic construct
  source 1..75: mol_type = other DNA
ccgccgaacagatggagttgatgcgcagcgtcttccgggttatccggactgtacgtgaaaagcatgcctgtactc

SEQ ID NO: 820407 - DNA, 75 bp, synthetic construct
  source 1..75: mol_type = other DNA
gctacctccgctatgtccttgacgtcatagccgactggccgataaaccgggtcggcgaactgctccccctggcgc

SEQ ID NO: 820408 - DNA, 75 bp, synthetic construct
  source 1..75: mol_type = other DNA
cactcccacgggatgagaagcggctgctgccgactgagccgtgttgcccggagtgcggtggttcgctgagttacc

SEQ ID NO: 820409 - DNA, 75 bp, synthetic construct
  source 1..75: mol_type = other DNA
aaagtatgcagagcacacaccgctgtatcgccagtcggagatctatgcccgccagggtgtagtgttgagtcgttc

SEQ ID NO: 820410 - DNA, 75 bp, synthetic construct
  source 1..75: mol_type = other DNA
gccgactgagccgtgttgcccggagtgcggtggttcgctgagttacctgggtgaggatgccgccgaacagctgga

SEQ ID NO: 820411 - DNA, 75 bp, synthetic construct
  source 1..75: mol_type = other DNA
atgaagaccctgtcgcgacactcagagttggcgaaggcgttcgcgtacgcacttaaccagtggccggcactgacg

SEQ ID NO: 820412 - DNA, 75 bp, synthetic construct
  source 1..75: mol_type = other DNA
tgcgccagtatgtgctgatgcccggtaaagtccatgctgatgatatacccgtcccggtccaggagccgggcagcg

SEQ ID NO: 820413 - DNA, 75 bp, synthetic construct
  source 1..75: mol_type = other DNA
gtggtggtgaactcagtccactgggatgtgatgtgtcagagcaactggagcttatcagcagtgcctttaaggtta

SEQ ID NO: 820414 - DNA, 75 bp, synthetic construct
  source 1..75: mol_type = other DNA
tatcgccagtcggagatctatgcccgccagggtgtagtgttgagtcgttctgtactgtcgggctgggtggatgcg

SEQ ID NO: 820415 - DNA, 75 bp, synthetic construct
  source 1..75: mol_type = other DNA
gcttcaggggtgtcctgcaggcggatgcgtacgccgggttcaacgagctgtatcgcaatggtgggataacggaag

SEQ ID NO: 820416 - DNA, 75 bp, synthetic construct
  source 1..75: mol_type = other DNA
gtttcagcggtgtcctgcatgcggatgcgtacgccgggttcaacgagctgtatcgcaatggtgggataacggaag

SEQ ID NO: 820417 - DNA, 75 bp, synthetic construct
  source 1..75: mol_type = other DNA
gtttcagtggtgtcctgcacgcggatgcgtacgccgggttcaacgagctgtatcgcaatggtgggataacggaag

SEQ ID NO: 820418 - DNA, 75 bp, synthetic construct
  source 1..75: mol_type = other DNA
aacggcgtggatccggaacgctatctgcatcatgtacttgatgtcatcgccgactggcctgtgaaccgggggggt

SEQ ID NO: 820419 - DNA, 75 bp, synthetic construct
  source 1..75: mol_type = other DNA
agcccggacaggaaaggcatccatccgcagactcatcttgcttgcttcagcggtgtgctgcaagcggatgcgtac

SEQ ID NO: 820420 - DNA, 75 bp, synthetic construct
  source 1..75: mol_type = other DNA
ggttcagaggtgtcctgcaagcggatgcgtacgccgggttcaacgagctgtatcgcaatggtgggataacggaag

SEQ ID NO: 820421 - DNA, 75 bp, synthetic construct
  source 1..75: mol_type = other DNA
cggtacagggtggtgagcggtattttttctgtaatgagctgaatgaaaaaggggagccggtcacctggcaggggc

SEQ ID NO: 820422 - DNA, 75 bp, synthetic construct
  source 1..75: mol_type = other DNA
ttgcgcgttcagtgcaggatgtcgatgaatttgtccgttttgctgccagcgacagccaggtcgggctggaagagg

SEQ ID NO: 820423 - DNA, 75 bp, synthetic construct
  source 1..75: mol_type = other DNA
gatgcgcgatgcacagttgtggagccacatcgaatttcaccccgaatgcaacgcgatttacgcagcactggactg

SEQ ID NO: 820424 - DNA, 75 bp, synthetic construct
  source 1..75: mol_type = other DNA
tgattaaacaagccgttgccgatctccacgccaaaggtttagccgtccgcgtggttgacattgccgcagggcatg

SEQ ID NO: 820425 - DNA, 75 bp, synthetic construct
  source 1..75: mol_type = other DNA
tggcacttcatccgcctgccggacggtggcggctacatgatgccggatggcgaccgttttcatctggttaacggt

SEQ ID NO: 820426 - DNA, 75 bp, synthetic construct
  source 1..75: mol_type = other DNA
ggttactgttgctccggggagcagtcacttatgtggccgccgtgtcgtgtgcgggcggtgccgcggaatatgtga

SEQ ID NO: 820427 - DNA, 75 bp, synthetic construct
  source 1..75: mol_type = other DNA
aactaccgcccgccgtttactggctgacattgccctgccgcatcgggatgtggctgtctatgcgttggttttgtc

SEQ ID NO: 820428 - DNA, 75 bp, synthetic construct
  source 1..75: mol_type = other DNA
agcggcagaaagcgcgtgggagctattacagcgaggcgcggcaacgttcagcctgaatcttgcgcgtggacggcc

SEQ ID NO: 820429 - DNA, 75 bp, synthetic construct
  source 1..75: mol_type = other DNA
atgccaacaaaaataacgcctacagagcggcaaaaagcgcgtgggagcagctacagcgcggcgcggcaacgttca

SEQ ID NO: 820430 - DNA, 75 bp, synthetic construct
  source 1..75: mol_type = other DNA
actacaacgcggagccgcatcattctccatcacactggctcgtggacgcgcagaactctaccccgaaatgcatgg

SEQ ID NO: 820431 - DNA, 75 bp, synthetic construct
  source 1..75: mol_type = other DNA
gaagcgcagattttcgggatgaatttaacgtcaagcgcgaagtatcttggcatgatgtgaccgttgaacgcgtgg

SEQ ID NO: 820432 - DNA, 75 bp, synthetic construct
  source 1..75: mol_type = other DNA
acaggatttaaaagcgagattgataatcaggactggatcattgtaaaagccgagcacaccattgataacagcggc

SEQ ID NO: 820433 - DNA, 75 bp, synthetic construct
  source 1..75: mol_type = other DNA
gggtacagatgaaaacgtgctggtacttaatcgcacctatgccaaccggagcaacgccgaacgggcggcgagaat

SEQ ID NO: 820434 - DNA, 75 bp, synthetic construct
  source 1..75: mol_type = other DNA
tcagtcagcgcgcagaccccgtgaaaatgccggattttgatattcttgcggaaggtaaagcgctgtccggcgtgg

SEQ ID NO: 820435 - DNA, 75 bp, synthetic construct
  source 1..75: mol_type = other DNA
atgcgttcgattgccagacgtaccgcagtgggagctgcactattgcttgttatgccagtagccgtatggatttct

SEQ ID NO: 820436 - DNA, 75 bp, synthetic construct
  source 1..75: mol_type = other DNA
gcaacgtggcttgcgcaacgaatttgtgggccattaacaccacctgcggaagaaaatcgcgaaattgcacaacga

SEQ ID NO: 820437 - DNA, 75 bp, synthetic construct
  source 1..75: mol_type = other DNA
atgcagaactgacccagctttaccggatgcgcgatgcgcagttgtggcgtcacatcgaatttcaccctgaatgca

SEQ ID NO: 820438 - DNA, 75 bp, synthetic construct
  source 1..75: mol_type = other DNA
agagacgtattcatgaggccagaaaacactcttatggttacagtgaagtcgagcagagttcagatgtttctgaag

SEQ ID NO: 820439 - DNA, 75 bp, synthetic construct
  source 1..75: mol_type = other DNA
ccggcgaacaaacccattgttgatgcgatcaaagcgaaaaaacaggacccaagcggcgcattcgtttggaccacc

SEQ ID NO: 820440 - DNA, 75 bp, synthetic construct
  source 1..75: mol_type = other DNA
atggggcaaatcctgcgtcaggcacgcgcggcagggctgaaaactcagtttatggggccggaaggtgtggctaac

SEQ ID NO: 820441 - DNA, 75 bp, synthetic construct
  source 1..75: mol_type = other DNA
tggcacttcatccgcctgccggacggtggcggttacatgatgccggacggtgaccgtttccacatggtgaacggt

SEQ ID NO: 820442 - DNA, 75 bp, synthetic construct
  source 1..75: mol_type = other DNA
gaccagctaaccatcacgctggatgatgccgatggccagttgcagctaccgccacggggcgctcacctgacggtt

SEQ ID NO: 820443 - DNA, 75 bp, synthetic construct
  source 1..75: mol_type = other DNA
ctaccccgaaatgcatggtacggtaacaggattagactggccccctgaatctccagacaaccaatatcacttaaa

SEQ ID NO: 820444 - DNA, 75 bp, synthetic construct
  source 1..75: mol_type = other DNA
tttggcaacgattttctgtatgccgaggcgtatgtgtacgcgctggcgcaaaaaatgatgccggaatatcaggga

SEQ ID NO: 820445 - DNA, 75 bp, synthetic construct
  source 1..75: mol_type = other DNA
gcaaactggtttgaccgtaccgtgagtgctgatgccgcaggcatcattctgacttcccttgtgattaaccgtcag

SEQ ID NO: 820446 - DNA, 75 bp, synthetic construct
  source 1..75: mol_type = other DNA
tggcatttcatccgcctgcctgacggtggtggttacatgatgccggacggcgatcgttttcatatgattaacagt

SEQ ID NO: 820447 - DNA, 75 bp, synthetic construct
  source 1..75: mol_type = other DNA
cgcaagacttatcagaacgagcaggcagcaagacgcgcagcggcggcaaagtggcagcagctacaacgcggagcc

SEQ ID NO: 820448 - DNA, 75 bp, synthetic construct
  source 1..75: mol_type = other DNA
atttttatcagtgagaagttattggcaagttacatggaaaaacatggtgacttatcgggaaaagaaagaggggga

SEQ ID NO: 820449 - DNA, 75 bp, synthetic construct
  source 1..75: mol_type = other DNA
atggataagggcaagttgctgtttgatgttttttttctcaaactggtgaaaaaacttgatgcacgtcaaaaaatg

SEQ ID NO: 820450 - DNA, 75 bp, synthetic construct
  source 1..75: mol_type = other DNA
gaagagcattcgctttctgagcgcctttctggtggggatcacatggccgatgagttttccagtggcgctactgtt

SEQ ID NO: 820451 - DNA, 75 bp, synthetic construct
  source 1..75: mol_type = other DNA
ctgcccaaaaaacaaaaaaggagaaaagcagcagccgcgagggggattacatcgagggcgcagacggcaatgtgt

SEQ ID NO: 820452 - DNA, 75 bp, synthetic construct
  source 1..75: mol_type = other DNA
ctgatggatatcgaaatcgaccacgccgaccagactgaagaaagcgacatgtccttccttacgcgcatggcggaa

SEQ ID NO: 820453 - DNA, 75 bp, synthetic construct
  source 1..75: mol_type = other DNA
agcgcagattttcgggatgaatttaacgttaaacgtgaggtgtcctggcatgatgtgaccgttgagcgcgtggta

SEQ ID NO: 820454 - DNA, 75 bp, synthetic construct
  source 1..75: mol_type = other DNA
gaaatggacattatcgccgagctgctggaagaactggaaaccaaagacaacaggatcgctgaactggaaaaaatc

SEQ ID NO: 820455 - DNA, 75 bp, synthetic construct
  source 1..75: mol_type = other DNA
caggaaaacagtgaaaaactggcggccgatatgatgatcagtcagaaacgcatgggaggcctgcaggccgtgcgt

SEQ ID NO: 820456 - DNA, 75 bp, synthetic construct
  source 1..75: mol_type = other DNA
caggaaaacagtgaaaaactggcggccgatatgataatcagtcagaaacgcatggggggcctgcaggccgtgcgt

SEQ ID NO: 820457 - DNA, 75 bp, synthetic construct
  source 1..75: mol_type = other DNA
caatttggcttttatctactagagttggggttttagcgggaggtataggttgggtgttatgttcgttaattcaat

SEQ ID NO: 820458 - DNA, 75 bp, synthetic construct
  source 1..75: mol_type = other DNA
atattcgcttttagctattattgtgttttcattgattttagtggggagctatttcattattgacttttggttagt

SEQ ID NO: 820459 - DNA, 75 bp, synthetic construct
  source 1..75: mol_type = other DNA
atatcaatacaatcattaatgtatttggcagacgctggcatgtcccaaataatgccaagagatattgcaagatgt

SEQ ID NO: 820460 - DNA, 75 bp, synthetic construct
  source 1..75: mol_type = other DNA
gtgaccgttgagcgcgtggtatctgccatcgctcatcggtacggtctgaaaccgcaaatcagcgaaatgctgatg

SEQ ID NO: 820461 - DNA, 75 bp, synthetic construct
  source 1..75: mol_type = other DNA
cgagcacaccgttgataacagcggctttaccacgcagcttgagcttgaagcaaaaatcccggaatggatagcgga

SEQ ID NO: 820462 - DNA, 75 bp, synthetic construct
  source 1..75: mol_type = other DNA
cgagcacaccattgataacagcggctttaccacgcagcttgaacttgaaacaaaaatccctgaatggattgcgca

SEQ ID NO: 820463 - DNA, 75 bp, synthetic construct
  source 1..75: mol_type = other DNA
gaagcgcagattttcgggatgaatttaacgttaaacgtgaggtgtcctggcatgatgtgaccgttgagcgtgtgg

SEQ ID NO: 820464 - DNA, 75 bp, synthetic construct
  source 1..75: mol_type = other DNA
taccgctgtgccgcactggtggaaaacatccagattggtgatttcagcgccgccgcagccgaaaccggagcgtaa

SEQ ID NO: 820465 - DNA, 75 bp, synthetic construct
  source 1..75: mol_type = other DNA
gcgaaaacctccaaccgtagtgaaaacccgctgctgcaggatgtgaacaaaggctggctgcagaaaatccgtgag

SEQ ID NO: 820466 - DNA, 75 bp, synthetic construct
  source 1..75: mol_type = other DNA
attgccggaaccaccgacaccaccaccaaagagcgcgagcctaccgatccgatgctgatggaggacgcggaatat

SEQ ID NO: 820467 - DNA, 75 bp, synthetic construct
  source 1..75: mol_type = other DNA
tccgccatcgctcatcggtatggtctgaaaccgcaaatcagcgaaatgctgatggatatcgaaatcgaccacgcc

SEQ ID NO: 820468 - DNA, 75 bp, synthetic construct
  source 1..75: mol_type = other DNA
gacctcaccgatgtgaagcacgtccttacggcgctaatcagcatagccgctcaggccattgtggcgaccaacgga

SEQ ID NO: 820469 - DNA, 75 bp, synthetic construct
  source 1..75: mol_type = other DNA
tgaacacactcacccacgcggcagagcacgaggtgccgtaccggatggaaatcactgcagaaggcgatctgcaca

SEQ ID NO: 820470 - DNA, 75 bp, synthetic construct
  source 1..75: mol_type = other DNA
ctggcgtcggtgcgctgaaacagacctctggcgatctctatcagatggaacagatccgtcgtgaacatcctgatc

SEQ ID NO: 820471 - DNA, 75 bp, synthetic construct
  source 1..75: mol_type = other DNA
ctgatggatatcgaaatcgaccacgccgaccagaccgaagaaagcgatatgtccttccttacgcgcatggcggaa

SEQ ID NO: 820472 - DNA, 75 bp, synthetic construct
  source 1..75: mol_type = other DNA
ctgatggatattgaaatcgaccacgccgaccagaccgaagaaagcgacatgtccttccttacgcgcatggcggaa

SEQ ID NO: 820473 - DNA, 75 bp, synthetic construct
  source 1..75: mol_type = other DNA
cttttccaacaccacagaagcgggtattagctatcatgcgggcgacaaatttgatgatgcgccagcagtaagcta

SEQ ID NO: 820474 - DNA, 75 bp, synthetic construct
  source 1..75: mol_type = other DNA
ttttcaaaggtgcgactcgcttacctcgcgcgctgggtgtaccacgtaatgtagctatgatgatattcatgattt

SEQ ID NO: 820475 - DNA, 75 bp, synthetic construct
  source 1..75: mol_type = other DNA
gctcagagcatctaagaagcatcgttcctcttgtggagtttataaagttacgtcaagactctaatgaaattatcg

SEQ ID NO: 820476 - DNA, 75 bp, synthetic construct
  source 1..75: mol_type = other DNA
tccggcaaaactgacccgtctgctgttcgaacgttttagccatttcaacggtgcgctggataaaggttggatcat

SEQ ID NO: 820477 - DNA, 75 bp, synthetic construct
  source 1..75: mol_type = other DNA
attagcggcattgattgcgttctatcgcggtgagcgtaacggagaaacatatccggtacaggacgatgcacactg

SEQ ID NO: 820478 - DNA, 75 bp, synthetic construct
  source 1..75: mol_type = other DNA
gttggcagaaaaagaccactgggagcaggacctgacgcaagtgcctggtctggtcgagcaggtggctaatgacct

SEQ ID NO: 820479 - DNA, 75 bp, synthetic construct
  source 1..75: mol_type = other DNA
catatacagaatggcttattgaaagaaaattacgttataatgacgatgctcctaaagcatttatgaatatgtttg

SEQ ID NO: 820480 - DNA, 75 bp, synthetic construct
  source 1..75: mol_type = other DNA
gggtgtccattaatccttttcatggcacttttgaaaatacagaacccaatgaacagggcgttcttggttattgtc

SEQ ID NO: 820481 - DNA, 75 bp, synthetic construct
  source 1..75: mol_type = other DNA
aatcatatgtaggtgatgcacttaagtttaaaatatatgtaatggtttgttccagtaatcatgataatcaaatga

SEQ ID NO: 820482 - DNA, 75 bp, synthetic construct
  source 1..75: mol_type = other DNA
tggcatttgatgctcggactattgactggagtgggcctgagtggattgatgaacatatcacaataacttcgagac

SEQ ID NO: 820483 - DNA, 75 bp, synthetic construct
  source 1..75: mol_type = other DNA
aagcaagataccagctatggcgattttattatcaacaaatggttgcatttctctggtttattaatgactgtctgg

SEQ ID NO: 820484 - DNA, 75 bp, synthetic construct
  source 1..75: mol_type = other DNA
cactatgttatcagacaacaaataaaatcatatataggtgatgctcttaaatttaaattatatgtgaaaatttat

SEQ ID NO: 820485 - DNA, 75 bp, synthetic construct
  source 1..75: mol_type = other DNA
gctggatgtcgccgcaggtctggtgtgcgtgggaagtaccttaacccgccacgaaaccatcagtgaagatgaact

SEQ ID NO: 820486 - DNA, 75 bp, synthetic construct
  source 1..75: mol_type = other DNA
atggacgaaatgaatttaagtcctgaagcacaggaactgcgtgacagtattgtagctgagcttcagtccggtggt

SEQ ID NO: 820487 - DNA, 75 bp, synthetic construct
  source 1..75: mol_type = other DNA
acagaaatgtacgacatggctgtggcggcatcgctgacgcaagaacgggggcgagtggctgcggtgccggaatga

SEQ ID NO: 820488 - DNA, 75 bp, synthetic construct
  source 1..75: mol_type = other DNA
ctggcagcctctgccagtggctatttacgatgattaccacgacggcagcaggatcattcaacaactgctggcgct

SEQ ID NO: 820489 - DNA, 75 bp, synthetic construct
  source 1..75: mol_type = other DNA
taaagtttttatatgcggcaaaccggcagcacgaatgggtgatatctgtgctcatggggggacaattgtcagcgg

SEQ ID NO: 820490 - DNA, 75 bp, synthetic construct
  source 1..75: mol_type = other DNA
actcaggcactttgtaccggaccagtggatgccgttattatgggaagttttaaagtttttatatgcggcaaaccg

SEQ ID NO: 820491 - DNA, 75 bp, synthetic construct
  source 1..75: mol_type = other DNA
atatatataaagcaaagaaaaaaatggaatatcaggaaaaaatctcaaatataaatgtgcttatgaaaggcttgt

SEQ ID NO: 820492 - DNA, 75 bp, synthetic construct
  source 1..75: mol_type = other DNA
ggaaaaatggaagggcgagatttaaaagaagttcttaaaaaagaccctaacgattcattagaaagcgctgatatt

SEQ ID NO: 820493 - DNA, 75 bp, synthetic construct
  source 1..75: mol_type = other DNA
catgaagttcaaccaacacgggccattgcgcaactctggtgagttccaggtcacctgctctgagacaatcgaagg

SEQ ID NO: 820494 - DNA, 75 bp, synthetic construct
  source 1..75: mol_type = other DNA
aagtgtattccgacgcagtggacttctccaccgaagacgtaacagcagtcgttaagccttccctgcgtattgttt

SEQ ID NO: 820495 - DNA, 75 bp, synthetic construct
  source 1..75: mol_type = other DNA
aaaaaaacagagcaaaatattgaagttcccctcgcctacggctttgatttcggcgatctggacccgtattttttt

SEQ ID NO: 820496 - DNA, 75 bp, synthetic construct
  source 1..75: mol_type = other DNA
tcactgaaagcattcaaactcaaattgcggcggcagaggcactaccggatgcgatctcccgtgcagccatgacgc

SEQ ID NO: 820497 - DNA, 75 bp, synthetic construct
  source 1..75: mol_type = other DNA
ggaaaaatggaagggcgagatttaaaagaagtgctaaaaaaagaccctaacgatccattagaacgagctgatata

SEQ ID NO: 820498 - DNA, 75 bp, synthetic construct
  source 1..75: mol_type = other DNA
tctagcatggcaaaaaatgcatctgtcaggagatgaaaatagaagagataataatgtacttaacaatatactttt

SEQ ID NO: 820499 - DNA, 75 bp, synthetic construct
  source 1..75: mol_type = other DNA
tctgaaatgggaacaatggcaggcgcaaagcgaaacaaacggcctgattggtgcgtgcgtcagcggcctgaaggg

SEQ ID NO: 820500 - DNA, 75 bp, synthetic construct
  source 1..75: mol_type = other DNA
gaaattgacccaatcaagcaggcacaaaatgaatgggccgttcgcaaacaaatgctgatagacttgggcgctaca

SEQ ID NO: 820501 - DNA, 75 bp, synthetic construct
  source 1..75: mol_type = other DNA
tgctggcaggaatgattgagccaaccagcggcgagttattgattgacgatcatccgctgcattttggcgattact

SEQ ID NO: 820502 - DNA, 75 bp, synthetic construct
  source 1..75: mol_type = other DNA
gtgataaatgggcgcaaatagtaagcccgatgaatcagcttaaaggcgaggttgaccctattcagcaggtacaaa

SEQ ID NO: 820503 - DNA, 75 bp, synthetic construct
  source 1..75: mol_type = other DNA
agcgcggcgcaaaacaggctgaccgccaggtaaacaccctgaaaacatccatcaaggcactgaccagggttatcc

SEQ ID NO: 820504 - DNA, 75 bp, synthetic construct
  source 1..75: mol_type = other DNA
atggcaactagtttaggtacaatttactacgaagttgatgcaaaaactggtcaacttctcgttgctcaacgacag

SEQ ID NO: 820505 - DNA, 75 bp, synthetic construct
  source 1..75: mol_type = other DNA
cactacttttattaaatcaattgtgggtatctgtgtttgaaggggaagaaaaatttgggttgatcaatattcaga

SEQ ID NO: 820506 - DNA, 75 bp, synthetic construct
  source 1..75: mol_type = other DNA
aattggatttgttgttacagagctcatttttattaatgttaatacaattgtcacttttattaatgtatcaaaaaa

SEQ ID NO: 820507 - DNA, 75 bp, synthetic construct
  source 1..75: mol_type = other DNA
ttcgccgtctgtcaaaggaatgtggttttgccgtttcgccgcaccgtttcagacataccctggctacagaactga

SEQ ID NO: 820508 - DNA, 75 bp, synthetic construct
  source 1..75: mol_type = other DNA
tgccaccgcacgactaatgggcgtgggcctcaacaccattttgcgccatttaaaaaactcaggccgcagtcagta

SEQ ID NO: 820509 - DNA, 75 bp, synthetic construct
  source 1..75: mol_type = other DNA
ggaatttttgatgtaggcctgactcgctctgttattagagaaattgcaattcatcgtgataatcatcatgaaaga

SEQ ID NO: 820510 - DNA, 75 bp, synthetic construct
  source 1..75: mol_type = other DNA
ctggttgttcataccctgcctggtgaccgccacggtgtcgccgcaggtggtcgccgactggctgcactcaacatg

SEQ ID NO: 820511 - DNA, 75 bp, synthetic construct
  source 1..75: mol_type = other DNA
catgtcgctggctacgtcaattttcggcggcggtcgctttaatggtggtagcgtcattggtggcaatatgtaccg

SEQ ID NO: 820512 - DNA, 75 bp, synthetic construct
  source 1..75: mol_type = other DNA
tccacaaggctgtctgtgaaaaattaccgcattgcgaatggattaccgattcctgcaactgaaacactcgacaca

SEQ ID NO: 820513 - DNA, 75 bp, synthetic construct
  source 1..75: mol_type = other DNA
cggtcagtcagggggtgagcggtgaagccctgctgaatgaaagcggtaccgggataaccggccctgtatggaatg

SEQ ID NO: 820514 - DNA, 75 bp, synthetic construct
  source 1..75: mol_type = other DNA
atggataattacactcaggcagtacgtgaagctctggataatatggagccagaagcgaaattatttggttcacgg

SEQ ID NO: 820515 - DNA, 75 bp, synthetic construct
  source 1..75: mol_type = other DNA
atggctgtgattaatagcagaagtaaattcagttttttcaataaagttcgtgtattattgaaaaaaattctgaag

SEQ ID NO: 820516 - DNA, 75 bp, synthetic construct
  source 1..75: mol_type = other DNA
tttaatgcaggcgcagaaaaccgcgccagtattacaacgcgtcgccattggtaagcagattgttgatctgatgct

SEQ ID NO: 820517 - DNA, 75 bp, synthetic construct
  source 1..75: mol_type = other DNA
tcaggaacaagttcctcatcgtcctcttctgtgcgttcgcttcgttctaacgacaatattaactctactactacg

SEQ ID NO: 820518 - DNA, 75 bp, synthetic construct
  source 1..75: mol_type = other DNA
caacagaaacaggaattgttagcctatgagcagcagatccgcgatctgaagtgggagcagtggcaggcgcaaagc

SEQ ID NO: 820519 - DNA, 75 bp, synthetic construct
  source 1..75: mol_type = other DNA
tatcccgggccgtgatattggcggcggcggcggtatcagtatgcctgtttacatcgacattcaaaccacaaacgg

SEQ ID NO: 820520 - DNA, 75 bp, synthetic construct
  source 1..75: mol_type = other DNA
cagatcagatcatgatggagacacaaagcaaggccacgcaaacaagtacaacagcaagcgcggtagcagctcagg

SEQ ID NO: 820521 - DNA, 75 bp, synthetic construct
  source 1..75: mol_type = other DNA
ggaaattggtggatgagaatctattgaatccttttaatacttcattaaatcaaaagcaaattgatactgattgga

SEQ ID NO: 820522 - DNA, 75 bp, synthetic construct
  source 1..75: mol_type = other DNA
ttggttcaagaaaagatcgcggctggggagaggttgcaaatgctagctacggttcctttctcgatgtattacaaa

SEQ ID NO: 820523 - DNA, 75 bp, synthetic construct
  source 1..75: mol_type = other DNA
gtacaggtttctcacgaggctgcttatcgaaatcccgttagtcaggcatttgcattacgttctattataaaaata

SEQ ID NO: 820524 - DNA, 75 bp, synthetic construct
  source 1..75: mol_type = other DNA
tggtcattatatgactcttcattaaatcatgccagagccaccacacaaattgaatatgtatcaacagcgatagat

SEQ ID NO: 820525 - DNA, 75 bp, synthetic construct
  source 1..75: mol_type = other DNA
tgagtgttggtgttaatgatattacaccggatgatgaaagctcatgggctgtaagaaataatgatattaataaaa

SEQ ID NO: 820526 - DNA, 75 bp, synthetic construct
  source 1..75: mol_type = other DNA
cctgcaaaaaaatatttagaacacggattgttttctgaatatcgacaggacggtacaattccttatgtagtcagt

SEQ ID NO: 820527 - DNA, 75 bp, synthetic construct
  source 1..75: mol_type = other DNA
gtgttcgtgccgatcagctctggtcacaactttgccagacaggtccgttccggaatgtggatataaatgacttca

SEQ ID NO: 820528 - DNA, 75 bp, synthetic construct
  source 1..75: mol_type = other DNA
atccccgcgtccgtaagtgggtttacaagcaggggtggtcgacattaaggcccttgcaggagagttctatcccgg

SEQ ID NO: 820529 - DNA, 75 bp, synthetic construct
  source 1..75: mol_type = other DNA
tcgctgtccagagatctgcgtgaaacgctggagcagcggcttcagcaaggtaacttaccgaccaccgccatctgt

SEQ ID NO: 820530 - DNA, 75 bp, synthetic construct
  source 1..75: mol_type = other DNA
attctcacggcgtggtatacccagctccatctgataaattatttgagctattaagaagacatacaaattccaatt

SEQ ID NO: 820531 - DNA, 75 bp, synthetic construct
  source 1..75: mol_type = other DNA
cgacatatcccactacgcatatccaggtagtttattagaaaaattacagttaagtggctacgttttttctgacat

SEQ ID NO: 820532 - DNA, 75 bp, synthetic construct
  source 1..75: mol_type = other DNA
cacccaaaaaactgagggatctaaaaaagaagggcgatgtaacaaaaagtgaagaggtaatggctgcagtgcagt

SEQ ID NO: 820533 - DNA, 75 bp, synthetic construct
  source 1..75: mol_type = other DNA
tagatgctccaatatcagactccttttcatatctatatgataattttcagattgctgatggtgatgttcatatta

SEQ ID NO: 820534 - DNA, 75 bp, synthetic construct
  source 1..75: mol_type = other DNA
aacagttgtcagagattcttttaaaatttttaaaagatatcaaaaatggacagaaaacagctggaatattagagg

SEQ ID NO: 820535 - DNA, 75 bp, synthetic construct
  source 1..75: mol_type = other DNA
ggaggatttgttatatcaatatcaaataatgccacaaatgaactggcagatattaatgtattccgaaaaaacatg

SEQ ID NO: 820536 - DNA, 75 bp, synthetic construct
  source 1..75: mol_type = other DNA
cgtgtcgcgttgagtgccacgctgggagagctggaaaaagtaccagaactattgcgcccggataagagattacct

SEQ ID NO: 820537 - DNA, 75 bp, synthetic construct
  source 1..75: mol_type = other DNA
gttgtggtgagaatatcacctttcatcaggtggccaaatttagtgtgccactacatccgcctgttatcggcactg

SEQ ID NO: 820538 - DNA, 75 bp, synthetic construct
  source 1..75: mol_type = other DNA
ctctcctttttatatccaggggagacacccatgaaattcttatagaaacaaaccagcggacaaggcctgacgtac

SEQ ID NO: 820539 - DNA, 75 bp, synthetic construct
  source 1..75: mol_type = other DNA
ctctcctttttatatcccggggagacacccatgaaattctcatcgaaacaaatcagcgaacaagacctgacgtac

SEQ ID NO: 820540 - DNA, 75 bp, synthetic construct
  source 1..75: mol_type = other DNA
gaattgactgaatggcatcgtgttgctgtatccgggaaactggctgaggtcgtggggcagtatgtgaaaaaaggt

SEQ ID NO: 820541 - DNA, 75 bp, synthetic construct
  source 1..75: mol_type = other DNA
tccgtgcgctgggtgaagaattttccgcggtgctggcggatttacagcgcacatttgaggagaaaatagccgcgc

SEQ ID NO: 820542 - DNA, 75 bp, synthetic construct
  source 1..75: mol_type = other DNA
atgctgaaatttgcgcattcgttgaaaaagccatctacgaagaaattattccggtactggatttgcctcgtgatg

SEQ ID NO: 820543 - DNA, 75 bp, synthetic construct
  source 1..75: mol_type = other DNA
taaaccgctgggagcgtctgtgcggtctgccggatgaatgtattcccgcagggacacagacccttcgccagcgtc

SEQ ID NO: 820544 - DNA, 75 bp, synthetic construct
  source 1..75: mol_type = other DNA
gtaactttcagcgttttaaacttcaaaatgagtgttttattacgagtggacaacactgttacgtaataccctgga

SEQ ID NO: 820545 - DNA, 75 bp, synthetic construct
  source 1..75: mol_type = other DNA
accgtatcgcggtaggcaacaagagagtcgattatgctgatgccgcagccagaagcctcttcgcggaaggaagtg

SEQ ID NO: 820546 - DNA, 75 bp, synthetic construct
  source 1..75: mol_type = other DNA
atggacgtgacaaacgatgattacatccgtctgttgtcggcactgttgccgcccggtccggcgtggtcagccagc

SEQ ID NO: 820547 - DNA, 75 bp, synthetic construct
  source 1..75: mol_type = other DNA
gaaggcgatatccagaccgcgcagaagctgcaaaccgaatgtaataaagtcattgatttattgattaaaactggc

SEQ ID NO: 820548 - DNA, 75 bp, synthetic construct
  source 1..75: mol_type = other DNA
cgaagaggcgaaaggtaagattaaactcatcgcccacgtcggttgcgtcagcaccgccgaaagccaacaacttgc

SEQ ID NO: 820549 - DNA, 75 bp, synthetic construct
  source 1..75: mol_type = other DNA
ctataaatctctagggcgaataggtgaagtacatattaaagataataaattaagtgatatgaattttgtgggtgt

SEQ ID NO: 820550 - DNA, 75 bp, synthetic construct
  source 1..75: mol_type = other DNA
agggggccgccattggcctgcagcggaccactccgcttgcagctctggccgggcagcgaatggccagtgaactgc

SEQ ID NO: 820551 - DNA, 75 bp, synthetic construct
  source 1..75: mol_type = other DNA
aagaaaggatatcttcatcgggatataaaaccactaaatgtactaaaatttaaagatggaatttataagttatct

SEQ ID NO: 820552 - DNA, 75 bp, synthetic construct
  source 1..75: mol_type = other DNA
gtgtgggctgagaaatggttacgcggttatcaaatggctgaatcgacgcgcgatatgcggcgttcggtatatcaa

SEQ ID NO: 820553 - DNA, 75 bp, synthetic construct
  source 1..75: mol_type = other DNA
cgctctggacaatccccaaggagcggatgaagcgccgcaatccccatctggtgttcctgtcgaggcaggcgctcg

SEQ ID NO: 820554 - DNA, 75 bp, synthetic construct
  source 1..75: mol_type = other DNA
atcagcctggcagaagcgcgagaagaactgattgctgcaaagaagctgcttaaagcaggccagtcaccggctgcg

SEQ ID NO: 820555 - DNA, 75 bp, synthetic construct
  source 1..75: mol_type = other DNA
tgaatgaatgcattcgtgcggagcagtcggccagcgtggtgctctgggaaatcgacttgaccgaggtaggcgggg

SEQ ID NO: 820556 - DNA, 75 bp, synthetic construct
  source 1..75: mol_type = other DNA
ttggcaccgggtatatcggcaaggcgcatgccatcgcctatgcccaggccccgacggtgttcaacctgcgcggca

SEQ ID NO: 820557 - DNA, 75 bp, synthetic construct
  source 1..75: mol_type = other DNA
acgtccggcgaaggccgggtcgtcggagatgattgccgtcgaaaacgaggatcaggcccacgcgatggtacgttt

SEQ ID NO: 820558 - DNA, 75 bp, synthetic construct
  source 1..75: mol_type = other DNA
gatccgccacggcaagcacgtctattcggaaaagccgctggcactgaatgcccacgacgcgcgtgagatggtcga

SEQ ID NO: 820559 - DNA, 75 bp, synthetic construct
  source 1..75: mol_type = other DNA
agctgtttataacaaggctgaatatcgtgagcagagggctgagatgctacaagattgggcgaatatgattgatga

SEQ ID NO: 820560 - DNA, 75 bp, synthetic construct
  source 1..75: mol_type = other DNA
agctgctgtcagagataaccccctctctcctacgtgagtattgcgacaagataaaagcgcgtggtgcgccagcga

SEQ ID NO: 820561 - DNA, 75 bp, synthetic construct
  source 1..75: mol_type = other DNA
ccgggcgcacgttatttacctgcctaaacaggctcaggatatattggtcgggttgcagatgtgcgctggtggaag

SEQ ID NO: 820562 - DNA, 75 bp, synthetic construct
  source 1..75: mol_type = other DNA
cgccgcagggaaatctccagccaaagagaaggcgcgggacaaagcccgcgttaaggacgctgaaaactttggtgc

SEQ ID NO: 820563 - DNA, 75 bp, synthetic construct
  source 1..75: mol_type = other DNA
atcagttattggcattaagtactctgttgattttgatagatacaatgagaatttatttttgtctttacctataaa

SEQ ID NO: 820564 - DNA, 75 bp, synthetic construct
  source 1..75: mol_type = other DNA
aatgtgtccagcttcttgcaccctcccttatcagaagaacagaaaaaaatattgagtgatataaaattagaaatt

SEQ ID NO: 820565 - DNA, 75 bp, synthetic construct
  source 1..75: mol_type = other DNA
tagtcagatatcgagagatgctaactcaacaaatattttaacaatgggcgcaatggcatttgtaattggagttct

SEQ ID NO: 820566 - DNA, 75 bp, synthetic construct
  source 1..75: mol_type = other DNA
caccttgctacatgaggccgggtacaatactgactggattgagaagtgccttgcccatgaacaaaaaggggtacg

SEQ ID NO: 820567 - DNA, 75 bp, synthetic construct
  source 1..75: mol_type = other DNA
gattccgatgcgccaatgagtagcgctactttaaaccgggttttgacactgacgtatcgtctggctcagaaagaa

SEQ ID NO: 820568 - DNA, 75 bp, synthetic construct
  source 1..75: mol_type = other DNA
tatgacgaagcgctagacaggctgttaagccagtggatgcgcaacgtttccggcttgccagctgggatggttcgc

SEQ ID NO: 820569 - DNA, 75 bp, synthetic construct
  source 1..75: mol_type = other DNA
taccggcggaacgaatgaagggaagccggtcacacgttatctatctgccaaagcaggcgcaggatctcattgttg

SEQ ID NO: 820570 - DNA, 75 bp, synthetic construct
  source 1..75: mol_type = other DNA
caccaatgcaacgtgggatgaaatagattttaaaaaatggacatggacaattccttcagaccgcatgaagggaag

SEQ ID NO: 820571 - DNA, 75 bp, synthetic construct
  source 1..75: mol_type = other DNA
tacggttaagcaggcgcaggaacgggggatcaggctggcgtcgttttccgttcacgatatgcgccgaacagcatc

SEQ ID NO: 820572 - DNA, 75 bp, synthetic construct
  source 1..75: mol_type = other DNA
gcagcaatccgatgctgcaggatgtggcggtcggctggctgcagaaataccgcaatgaagccccggcgcgcgtga

SEQ ID NO: 820573 - DNA, 75 bp, synthetic construct
  source 1..75: mol_type = other DNA
gagcagactgaatggcaccgtgttgtgctgttcggcaaactggcggaagttgccagcgaatatctgcgtaaaggt

SEQ ID NO: 820574 - DNA, 75 bp, synthetic construct
  source 1..75: mol_type = other DNA
ccgttggggtttccgctaagacgcgtgagaaaatcatgcgcatctatgaaaactccaatatgacaaaaaaagatt

SEQ ID NO: 820575 - DNA, 75 bp, synthetic construct
  source 1..75: mol_type = other DNA
tacataattgatttcacatcaaaaaatcagtcaagattaagatataaacaatatttattaaaccagagtaaatat

SEQ ID NO: 820576 - DNA, 75 bp, synthetic construct
  source 1..75: mol_type = other DNA
accttaatgatgaaatgggaagtatttccaagagaagaaaaaacaataatatctcttttaataaatcaacttttg

SEQ ID NO: 820577 - DNA, 75 bp, synthetic construct
  source 1..75: mol_type = other DNA
tttctgacccgcatcaatattgtgccggtcagcgaaatgaaaggggaaaaaattggcatcggtgtcaccggctcc

SEQ ID NO: 820578 - DNA, 75 bp, synthetic construct
  source 1..75: mol_type = other DNA
ttacttcagtgaatctcttaataattggaagtatattaagctcccccttgttcagactgattctttgttaagaga

SEQ ID NO: 820579 - DNA, 75 bp, synthetic construct
  source 1..75: mol_type = other DNA
tttcagatcgttgatagtgatgtgcatattaagcttcttcatctcaacagagaaacaaagcaaataacaccacat

SEQ ID NO: 820580 - DNA, 75 bp, synthetic construct
  source 1..75: mol_type = other DNA
tattcaatagatatgattgcatggagggataaaaataaaactgcaaaagaaccgttaccagttgatgtaatccag

SEQ ID NO: 820581 - DNA, 75 bp, synthetic construct
  source 1..75: mol_type = other DNA
agtgaaactaaggaaaaattcaatgttttttttcttgagtcaatgataggtatgcaagacaactattttacatat

SEQ ID NO: 820582 - DNA, 75 bp, synthetic construct
  source 1..75: mol_type = other DNA
ttcccgtgatgatgaaaatagttcatcccccagtccaactctacctacgatacatcagtctgaaaggaaggagtt

SEQ ID NO: 820583 - DNA, 75 bp, synthetic construct
  source 1..75: mol_type = other DNA
aggaaaaatgatttcagatgaagttagaaattacagctccatacataatgatagaaatatcgtaattaactctgg

SEQ ID NO: 820584 - DNA, 75 bp, synthetic construct
  source 1..75: mol_type = other DNA
actgccatccataaggagcaaacctcatataaaggccttcaacatatgtatatttcagtaatttcaaatgatacg

SEQ ID NO: 820585 - DNA, 75 bp, synthetic construct
  source 1..75: mol_type = other DNA
cggaccattaaccggttttgccatgaatccagcgcgtgattttgggccaaaaattttcacctggcttgctggttg

SEQ ID NO: 820586 - DNA, 75 bp, synthetic construct
  source 1..75: mol_type = other DNA
gctggagcgtcatcatcttcgcggcgcacaactgatccagcacagcgccgtgtgggtggtgcgcaggagtccacg

SEQ ID NO: 820587 - DNA, 75 bp, synthetic construct
  source 1..75: mol_type = other DNA
caggaaaacagtgaaaaactggctgccgatatgattatcagtcagaaacgcatggggggcctgcaggccgtgcgt

SEQ ID NO: 820588 - DNA, 75 bp, synthetic construct
  source 1..75: mol_type = other DNA
caggaaaacagtgaaaaactggcagccgatatgatgatcagtcagaaacgcatggggggcctgcaggccgtgcgt

SEQ ID NO: 820589 - DNA, 75 bp, synthetic construct
  source 1..75: mol_type = other DNA
atgtgttggcgcagcaatttatcgttttctcattgcaaaaaacttacctgtcaatagtgttacgcctaaagacat

SEQ ID NO: 820590 - DNA, 75 bp, synthetic construct
  source 1..75: mol_type = other DNA
cagaaagcccaggatgcactaaagcatgcagtcttactgcacaaaaacacatcaaggagctttacggtttccctg

SEQ ID NO: 820591 - DNA, 75 bp, synthetic construct
  source 1..75: mol_type = other DNA
agcattgtggcaggagaagcacgaggaaagaacgcatcagctaagtgatgtaaatagtggatggttatgcccact

SEQ ID NO: 820592 - DNA, 75 bp, synthetic construct
  source 1..75: mol_type = other DNA
gacgacagataaaaataacacctgctccccctcaaaccagggcgataatcgcgcatcgcccttctgcacaatagt

SEQ ID NO: 820593 - DNA, 75 bp, synthetic construct
  source 1..75: mol_type = other DNA
tcaatgcctacctgcagcagctggcccgcctgaacggtgtggaggttgaggagctttccagcaagttcaccgttg

SEQ ID NO: 820594 - DNA, 75 bp, synthetic construct
  source 1..75: mol_type = other DNA
gcagtaccacaacgggcggtgaaaccacaccgggcgcggtgaaagtaggtaaaggtggcgaatatgccaacctgg

SEQ ID NO: 820595 - DNA, 75 bp, synthetic construct
  source 1..75: mol_type = other DNA
ttacgctatgaacgggatatcgaaaaagccgttatcctggcaggtggtgtggtcagatggcataacaagaaataa

SEQ ID NO: 820596 - DNA, 75 bp, synthetic construct
  source 1..75: mol_type = other DNA
attaaaaaatggatgttttatcttacataatccactttactctaattcatttccttcttcatattcacatgaatt

SEQ ID NO: 820597 - DNA, 75 bp, synthetic construct
  source 1..75: mol_type = other DNA
tcgtcgcgattttcccggtgcacagtatccagaacgtatcattcagtttggtgaaggtaacttcctgcgcgcctt

SEQ ID NO: 820598 - DNA, 75 bp, synthetic construct
  source 1..75: mol_type = other DNA
ccgcacacgcatcctgccgcagctgctggcagggcagaaggcaaacggcacacttccggcgcgccttactttcgc

SEQ ID NO: 820599 - DNA, 75 bp, synthetic construct
  source 1..75: mol_type = other DNA
cgatctgaattctggcgtggtcgttgttcgtccgattgaaacttcattcccgccgtcactgagcacgcaggatgg

SEQ ID NO: 820600 - DNA, 75 bp, synthetic construct
  source 1..75: mol_type = other DNA
caactagcgatggctttacagaccactcctgaatggattctttacggcaagggtgatgagactcaagatgacacc

SEQ ID NO: 820601 - DNA, 75 bp, synthetic construct
  source 1..75: mol_type = other DNA
taagatcccgtcgagtccagctcgacataacacagcagaccctggctaaacgcttaggggtaagccgtgtttccg

SEQ ID NO: 820602 - DNA, 75 bp, synthetic construct
  source 1..75: mol_type = other DNA
tggagaaacatatccggtacaggacgatgcacactggctggaacgttatcagcaactctggagccagtatcgtga

SEQ ID NO: 820603 - DNA, 75 bp, synthetic construct
  source 1..75: mol_type = other DNA
acgcaaccggcgaactggttattggaaccaaactgtccgcaagtctgaacggtaatgcattaacagcaacaaagc

SEQ ID NO: 820604 - DNA, 75 bp, synthetic construct
  source 1..75: mol_type = other DNA
ggtgggttcacttatgtccagaattcacagtatcaagtaagcccggagacttcttcctatagatcgtattatcaa

SEQ ID NO: 820605 - DNA, 75 bp, synthetic construct
  source 1..75: mol_type = other DNA
cactgccacccgttgaaacgaactggtgcgcgtttggcgttaccgggttgctcattgataacaaccctgcattca

SEQ ID NO: 820606 - DNA, 75 bp, synthetic construct
  source 1..75: mol_type = other DNA
ctagccaacgcacttaaatgcgatcctctgtggcttgttagcggaaaaggctcgcctgaaccaaagataaatcta

SEQ ID NO: 820607 - DNA, 75 bp, synthetic construct
  source 1..75: mol_type = other DNA
caacgaatttgtgggccattaacaccacctgcggaagaaaatcgcgaaatagcgcaacgagaacaagaaagttaa

SEQ ID NO: 820608 - DNA, 75 bp, synthetic construct
  source 1..75: mol_type = other DNA
ttgatggttatggtgaaaagacttacctgattgctttcgaccattacagcatctgtgcgcgttattgcggtgaaa

SEQ ID NO: 820609 - DNA, 75 bp, synthetic construct
  source 1..75: mol_type = other DNA
ccttatcagaagaacaaaaaaaaatattgagtgatataaaattagaaattagtgaatctgtatcagaacagtatt

SEQ ID NO: 820610 - DNA, 75 bp, synthetic construct
  source 1..75: mol_type = other DNA
cgcgtctgggctggacagatgagcgtattggcacagagttgggcatggatcaggatgaagtgctgaggctcaaac

SEQ ID NO: 820611 - DNA, 75 bp, synthetic construct
  source 1..75: mol_type = other DNA
gccaggttaagttaaccgaaaaagcaaacgataaactagagacctttcagaatcgactgcgtgaacgcagcataa

SEQ ID NO: 820612 - DNA, 75 bp, synthetic construct
  source 1..75: mol_type = other DNA
gtatctttttcatctataaatactgctttatcaataggcgcaatcgcatatcctcctttggcaatagctatagtt

SEQ ID NO: 820613 - DNA, 75 bp, synthetic construct
  source 1..75: mol_type = other DNA
tatgcaagacaactattttacatattgtatatcaaacggaatatcaaatactgatgatatatccagacttgactt

SEQ ID NO: 820614 - DNA, 75 bp, synthetic construct
  source 1..75: mol_type = other DNA
cttacattgataacagttcctattgatgacaaattgtcagataacaggataaatataacaccaatgggtataacg

SEQ ID NO: 820615 - DNA, 75 bp, synthetic construct
  source 1..75: mol_type = other DNA
tgacggtggcggacatgtcgggtttgttgtcggacagcaacagaacggtgacctgatggtgctgggcggtaatca

SEQ ID NO: 820616 - DNA, 75 bp, synthetic construct
  source 1..75: mol_type = other DNA
gggcgcactgctgttattcctcgcttgccctgaaagcggttcagctatcgctgcggcatattccggcatcacagc

SEQ ID NO: 820617 - DNA, 75 bp, synthetic construct
  source 1..75: mol_type = other DNA
gaatacgtcatggaccgggaatacatctgcgcatcagaccctgaagcccgtgaaatgtggcagcgcatctggcgc

SEQ ID NO: 820618 - DNA, 75 bp, synthetic construct
  source 1..75: mol_type = other DNA
cctttccgttacctgtttggcctgtaccatgaaccacactggtttgtggtgctggtgaacgtcctgatatgcgct

SEQ ID NO: 820619 - DNA, 75 bp, synthetic construct
  source 1..75: mol_type = other DNA
tggcaattcatcttcggcctctatcgtgactccagttggctggtggtgatgtcgaacctcctgatatgcgcagct

SEQ ID NO: 820620 - DNA, 75 bp, synthetic construct
  source 1..75: mol_type = other DNA
tgattaatgcggtgctttgcacagtaatagtaatggcgctgatgctttatcgacggaaagactccaggcatcgtc

SEQ ID NO: 820621 - DNA, 75 bp, synthetic construct
  source 1..75: mol_type = other DNA
agacgttacagcactggtggcggcgtgtacgaagatgaaagacgcagaggagccaaaagagagcgcatacgacct

SEQ ID NO: 820622 - DNA, 75 bp, synthetic construct
  source 1..75: mol_type = other DNA
aacaacgtattaccccgcacatcatcagccagattatggagtttgctgtaacgcgcaaaggggtgatgattttcg

SEQ ID NO: 820623 - DNA, 75 bp, synthetic construct
  source 1..75: mol_type = other DNA
agcgcaaagagagccacggtaaagtggtatttggcagcgtgcagtcggtcgcccgtaatcttgatgcctttcagg

SEQ ID NO: 820624 - DNA, 75 bp, synthetic construct
  source 1..75: mol_type = other DNA
gaaagcgaaaaatcacacttcccatctcatggggttctgagggattcgacgcgcagcaaagctacgtaattaagg

SEQ ID NO: 820625 - DNA, 75 bp, synthetic construct
  source 1..75: mol_type = other DNA
ttgtgcatcattccggcaaggatgagacgaaaggggcgcggggttccagtgcattccgtgcggcgcttgatgctg

SEQ ID NO: 820626 - DNA, 75 bp, synthetic construct
  source 1..75: mol_type = other DNA
gatgattgtcattgacacgctggcccgttgctttggtggtcatgatgaaaatgactcccgcgacatgggggcgtt

SEQ ID NO: 820627 - DNA, 75 bp, synthetic construct
  source 1..75: mol_type = other DNA
ttattggaagccggagttttcgacttcagcatatttcgtttatggacggatttagtgtggaacccattccaggcg

SEQ ID NO: 820628 - DNA, 75 bp, synthetic construct
  source 1..75: mol_type = other DNA
gatctttcatcaaaagtaaaaataattttttttacggacttaaatgattatgacataataaatacactactgaat

SEQ ID NO: 820629 - DNA, 75 bp, synthetic construct
  source 1..75: mol_type = other DNA
gcattggaaatccacgatatgataaatggcataatattattaataatacattaccatctcaaaataaagatgtat

SEQ ID NO: 820630 - DNA, 75 bp, synthetic construct
  source 1..75: mol_type = other DNA
acattcgagcaggatgtcttcccgttcattggtaaacgtcctatcagtgaaatcaaaccattagaactgcttgaa

SEQ ID NO: 820631 - DNA, 75 bp, synthetic construct
  source 1..75: mol_type = other DNA
tttttaaacagcttaaacctattacaggccattatcctttcatctttattggcaggaacaatcacagcaaaccga

SEQ ID NO: 820632 - DNA, 75 bp, synthetic construct
  source 1..75: mol_type = other DNA
ttgactttacatacaagtctgttgattactcagcatctaccattttgcaatacattagaagattaataagaaagc

SEQ ID NO: 820633 - DNA, 75 bp, synthetic construct
  source 1..75: mol_type = other DNA
ttactttcagagaatttcgaactactggaggactggagcgagcaactaccgcggcttaaagaaacctgggaacgc

SEQ ID NO: 820634 - DNA, 75 bp, synthetic construct
  source 1..75: mol_type = other DNA
gggatctgccggatacgacacacaacttgattacgtggttaaggggattattccggcggtatcgctgtgcagcat

SEQ ID NO: 820635 - DNA, 75 bp, synthetic construct
  source 1..75: mol_type = other DNA
tggagcgggaaacgggtaaacctgttcgcatgattattctggacacgctggcgcgttgctttggcggcaatgatg

SEQ ID NO: 820636 - DNA, 75 bp, synthetic construct
  source 1..75: mol_type = other DNA
atgacttacgcgtggtggagctttttaccgacgctgacggtgaattaatcacgtcgctggtggtggtggataagc

SEQ ID NO: 820637 - DNA, 75 bp, synthetic construct
  source 1..75: mol_type = other DNA
aataatatggtcggctccgcgtacagcaagaactgttattacgtgacggatgagggccggaataaactcaatgat

SEQ ID NO: 820638 - DNA, 75 bp, synthetic construct
  source 1..75: mol_type = other DNA
ccgctgatcggcataacgcccatcatggactgggcgcgcgatcacttcgacaaagcttataaaccgaacacccgt

SEQ ID NO: 820639 - DNA, 75 bp, synthetic construct
  source 1..75: mol_type = other DNA
tgcacgatcccgctgttacgtgatgacatgaaaaagctggggtatgaaatgaaaaacttccggcgctggctgtac

SEQ ID NO: 820640 - DNA, 75 bp, synthetic construct
  source 1..75: mol_type = other DNA
accataccgcgctatgggggtgcatccgttcacgcacacagaacggcgacaagtgcacgatcccgctgttacgtg

SEQ ID NO: 820641 - DNA, 75 bp, synthetic construct
  source 1..75: mol_type = other DNA
acgtttcaacgggtcgccactggggaggccgcagggttgcacatggtgcggtcctctatgtggttggtgaaggcg

SEQ ID NO: 820642 - DNA, 75 bp, synthetic construct
  source 1..75: mol_type = other DNA
agacgttacagcactggtggcggcgtgtacgaagatgaaggacgcagaggagccaaaagaaagcgcatacgacct

SEQ ID NO: 820643 - DNA, 75 bp, synthetic construct
  source 1..75: mol_type = other DNA
gtttgccgccatcattgttgcaggcgtcggctgatcttggcgcacgtccacgacaaacctttcgctatgtggtgc

SEQ ID NO: 820644 - DNA, 75 bp, synthetic construct
  source 1..75: mol_type = other DNA
acccccaacgaaacaccacgctaccgatgagcgttggatctgccggatacgacacgcagctggattacgtggtta

SEQ ID NO: 820645 - DNA, 75 bp, synthetic construct
  source 1..75: mol_type = other DNA
gtggttggtgaaggcggtataggcgttccgcgtcgtgtaaaagcctgggaggttgtgcacggtgagcaggtgaaa

SEQ ID NO: 820646 - DNA, 75 bp, synthetic construct
  source 1..75: mol_type = other DNA
gtttcttgataatggaaatgctattgagttggctataaaagcaatcagggagttgcactctgggagttatgaatt

SEQ ID NO: 820647 - DNA, 75 bp, synthetic construct
  source 1..75: mol_type = other DNA
gaaacagtgcagtttgattttctggggtatacgttcagagcgcgaagagcacgtaaccaccggcggggaaacctc

SEQ ID NO: 820648 - DNA, 75 bp, synthetic construct
  source 1..75: mol_type = other DNA
tgcgtattccggcttccgtttcacccacggtcggggatgcgttgcattatgccctgcgtgattccggataccgcc

SEQ ID NO: 820649 - DNA, 75 bp, synthetic construct
  source 1..75: mol_type = other DNA
tacgcggggacgaccgtgcccgaggtggtgcgttatgaccgctatctgctggttaacactcatccggatgcggta

SEQ ID NO: 820650 - DNA, 75 bp, synthetic construct
  source 1..75: mol_type = other DNA
atgaccatctataccttatcccacggggcgctaaagctggacgtttctgaccagagcggcgtaatcgaaggcttc

SEQ ID NO: 820651 - DNA, 75 bp, synthetic construct
  source 1..75: mol_type = other DNA
ggccgctaaagctggacgtttctgaccggggcggcgtcatcgaaggcttctggcgtgacgcgacgccgctcttac

SEQ ID NO: 820652 - DNA, 75 bp, synthetic construct
  source 1..75: mol_type = other DNA
tctttgtttcggatccgacgtttgataaagggtatgcgtttgatttcttctgcctggagccgatgagtcatgcgc

SEQ ID NO: 820653 - DNA, 75 bp, synthetic construct
  source 1..75: mol_type = other DNA
gccatcagcgcccacgagcagggtatgaccgcggcgatgcagtcgaaccgcctgagcgtgctgcgtatggtcggc

SEQ ID NO: 820654 - DNA, 75 bp, synthetic construct
  source 1..75: mol_type = other DNA
ggcaacgacattggtatcatttacacgtgtcatgttgatgcctaaaaaacaacgcgctcgttgggtaagtcccga

SEQ ID NO: 820655 - DNA, 75 bp, synthetic construct
  source 1..75: mol_type = other DNA
cgcaaagaaaactttcgaatgtggccgctgttttttgaatactgcctgacgacaatatgggccttcacctgcctg

SEQ ID NO: 820656 - DNA, 75 bp, synthetic construct
  source 1..75: mol_type = other DNA
gaacgtcagcgtctgaaagagctggaacgtgaaaatcgtgaactgcgccgcaggaacgatatccttcgccaggct

SEQ ID NO: 820657 - DNA, 75 bp, synthetic construct
  source 1..75: mol_type = other DNA
gttctaaacagtttagttgaaaatgatgtccttgcacttgcagtgccacctcgcccccttgcccaaggaagtgct

SEQ ID NO: 820658 - DNA, 75 bp, synthetic construct
  source 1..75: mol_type = other DNA
gttacgttatttaagcgacaatattactattgatggtggaactgttagtacgaacgttatggggtatgggtttac

SEQ ID NO: 820659 - DNA, 75 bp, synthetic construct
  source 1..75: mol_type = other DNA
cggatgaccatcatcgcccggaaggaggtgacctcattgcgcttgcgccgggggaatcaacaacgtcagagatgt

SEQ ID NO: 820660 - DNA, 75 bp, synthetic construct
  source 1..75: mol_type = other DNA
cgtaaaacaccgatcgtgatgggcatgttgctgtcgatggtgatggtgttctgcaactacgtcaacgttgagtgg

SEQ ID NO: 820661 - DNA, 75 bp, synthetic construct
  source 1..75: mol_type = other DNA
cggcttggtagttatggtccgttcgatcacgactggcacacgctgactttccgcttcccgggtggtggctcgctg

SEQ ID NO: 820662 - DNA, 75 bp, synthetic construct
  source 1..75: mol_type = other DNA
gatttgtggagacacaacatatttctggaagcagaagaacgaaacggcgtaccagacggtgtacggtagttacaa

SEQ ID NO: 820663 - DNA, 75 bp, synthetic construct
  source 1..75: mol_type = other DNA
tatgctcttcggcctcacttggggtatgaggttaataatccagaagagttgttttgtgctgtacagcatgtgtta

SEQ ID NO: 820664 - DNA, 75 bp, synthetic construct
  source 1..75: mol_type = other DNA
ggaaaaacgcaaagcgggagtgctggcaaaaaacgccacgccaatcagtgatgatgaaatggcggaaagcggaca

SEQ ID NO: 820665 - DNA, 75 bp, synthetic construct
  source 1..75: mol_type = other DNA
cacgtgctggcaacagcgatactggatcggttgctacatcactcaaccacgctgaatatcaaaggagagagttac

SEQ ID NO: 820666 - DNA, 75 bp, synthetic construct
  source 1..75: mol_type = other DNA
ccttcagacggatgcatcaaatctgaatcttatgcaccacaagggcacgtcgaatgcacaactgggtacatttgg

SEQ ID NO: 820667 - DNA, 75 bp, synthetic construct
  source 1..75: mol_type = other DNA
gaatgggacgcgcattatctgcacggcgatggctggctgggccagtggcaatgtgtaacgcgcagcgatgatagt

SEQ ID NO: 820668 - DNA, 75 bp, synthetic construct
  source 1..75: mol_type = other DNA
tctttgtttccgacccggcgtttgataaaggatatgcgtttgatttcttctgtctggaaccgatgagtcatgcgc

SEQ ID NO: 820669 - DNA, 75 bp, synthetic construct
  source 1..75: mol_type = other DNA
tcagggcggcgtcgccgtcagaccttgcggaaaaactgactcaaaaactgaaggaagggtggcagccttatggta

SEQ ID NO: 820670 - DNA, 75 bp, synthetic construct
  source 1..75: mol_type = other DNA
cggaaacaacagcattcaggtgacaccagtactggatgagaaacggggagcggcgttcacactggtgaagtcacc

SEQ ID NO: 820671 - DNA, 75 bp, synthetic construct
  source 1..75: mol_type = other DNA
atgtccttctttctgcagacggatacgacgaacctgaacgcgatgcatcacaggaagccgaatgcgaagctggat

SEQ ID NO: 820672 - DNA, 75 bp, synthetic construct
  source 1..75: mol_type = other DNA
caagcaaggtgaaaggattggatattctgattaccggcatgcccacgtcggaacgccagaaccaatcaaagtcgg

SEQ ID NO: 820673 - DNA, 75 bp, synthetic construct
  source 1..75: mol_type = other DNA
taacgagtggcatgacgcgattaactggctgggggactggtgcagtgaagagcggcatccggtgatctggtcaac

SEQ ID NO: 820674 - DNA, 75 bp, synthetic construct
  source 1..75: mol_type = other DNA
gcacagttacatcttgagcagatattctcatggtggagcgccgggcgatacgcgtcattttcccctgccggacgt

SEQ ID NO: 820675 - DNA, 75 bp, synthetic construct
  source 1..75: mol_type = other DNA
tgcgccagaacccgcgggcgctggaagccgacagcatcctgcgcgcctgtgttcactgcggattttgtactgcaa

SEQ ID NO: 820676 - DNA, 75 bp, synthetic construct
  source 1..75: mol_type = other DNA
taatttctggctttgcactgacgtttctgaccccgccatgcatttatgccatttataaggggctttctttcacta

SEQ ID NO: 820677 - DNA, 75 bp, synthetic construct
  source 1..75: mol_type = other DNA
catgccagcatcacagaaagagctgacggtaagcgctcaacgtggcatacacagcgattcacacgagctaaacgt

SEQ ID NO: 820678 - DNA, 75 bp, synthetic construct
  source 1..75: mol_type = other DNA
ccgggagcaggcagataacgagtggcatgacgcgattaactggctgggggactggtgcagtgaagagcagcatcc

SEQ ID NO: 820679 - DNA, 75 bp, synthetic construct
  source 1..75: mol_type = other DNA
atggatggctgtggcgtcattccgccagattctaaagaaataacggcagaacactggcagtcattattaaaatct

SEQ ID NO: 820680 - DNA, 75 bp, synthetic construct
  source 1..75: mol_type = other DNA
gttgaacatattcgtcaggtatttgaagagtggaagcaagagctgaacgtattccgcgccaaggcagagggcgga

SEQ ID NO: 820681 - DNA, 75 bp, synthetic construct
  source 1..75: mol_type = other DNA
gttcgcatgccccgtctctgctctgcagagcgcctctctgaaagtatggtcgatgaaatatttcagaagggggcg

SEQ ID NO: 820682 - DNA, 75 bp, synthetic construct
  source 1..75: mol_type = other DNA
acgaacgttttccggagcgcgccaatatcggttttatgcaagtggttaagcgcgagcatattcgtttacgcgttt

SEQ ID NO: 820683 - DNA, 75 bp, synthetic construct
  source 1..75: mol_type = other DNA
ggcagatgctgaaaaacgatgcgttgtatgccgataaagcgcgtcaggtcagtgaactggcggtcgatttagtcg

SEQ ID NO: 820684 - DNA, 75 bp, synthetic construct
  source 1..75: mol_type = other DNA
ggccatatgatgctgcacgtcgcggggatgtccttcctcggcctcggcgtgaccgcaccgaccgccgaatggggc

SEQ ID NO: 820685 - DNA, 75 bp, synthetic construct
  source 1..75: mol_type = other DNA
tgtgagtttgaattcggaaggctgttaaacgattttagcctccgcgagaaacttcatcatcaaactggtcagttg

SEQ ID NO: 820686 - DNA, 75 bp, synthetic construct
  source 1..75: mol_type = other DNA
aaaacctgcattacttcagattgttggcaaattctctttttttcacccgatcattttaataatgatttttattga

SEQ ID NO: 820687 - DNA, 75 bp, synthetic construct
  source 1..75: mol_type = other DNA
aacttgatcaataacgccctgcgctactgccattcaaccgtagaaaccagcctgctactggcaggaaacagagcg

SEQ ID NO: 820688 - DNA, 75 bp, synthetic construct
  source 1..75: mol_type = other DNA
gcttgccttggtgacgtttcgcgtcaggttgaatggcatggtcgctggctggatgcagaaagctggaagtgcgtt

SEQ ID NO: 820689 - DNA, 75 bp, synthetic construct
  source 1..75: mol_type = other DNA
aggctttgttgtgctgggaacgtcaaccagccggatgagtaaatcagaattcagtgaactaatagaactgatcta

SEQ ID NO: 820690 - DNA, 75 bp, synthetic construct
  source 1..75: mol_type = other DNA
cgccgaaaccatgcagatgctggcaaaagaactgttcccgcagtttctcgccctgccccatcaacagatggaggg

SEQ ID NO: 820691 - DNA, 75 bp, synthetic construct
  source 1..75: mol_type = other DNA
caaaaggacgggcaacaccctgcgcggctgaaaccatgcagatgctggctaaagaactgttcccgcaatttctcg

SEQ ID NO: 820692 - DNA, 75 bp, synthetic construct
  source 1..75: mol_type = other DNA
ataccattggcgcacgtaccatcgcgctggaaatggtgctgttagccagcgatctcattatctccccggtactgc

SEQ ID NO: 820693 - DNA, 75 bp, synthetic construct
  source 1..75: mol_type = other DNA
tacttgctcagccgtcaataaaaaagagctggaatgtattaaggagacgatttctaagtattgtgcaaaattcac

SEQ ID NO: 820694 - DNA, 75 bp, synthetic construct
  source 1..75: mol_type = other DNA
tcgaaaatgcatggccttggcaacgattttatggtcgtcgacgcggtaacgcagaatgtcttttttcaccggagc

SEQ ID NO: 820695 - DNA, 75 bp, synthetic construct
  source 1..75: mol_type = other DNA
gcgtgaccataccgatacggttgctgcagagaacagggagaatattatccggaacacggtggccataaaccgtaa

SEQ ID NO: 820696 - DNA, 75 bp, synthetic construct
  source 1..75: mol_type = other DNA
aaacgaccgaacaggtggaaaaggcgctcgacacgttacgcacaacgctgctggccgccattaaagcaggcgatc

SEQ ID NO: 820697 - DNA, 75 bp, synthetic construct
  source 1..75: mol_type = other DNA
ctctgcgagcctatacaaacagccgcgagttcgtggataactatccgtttgtaccgtggcattaccagatcctgc

SEQ ID NO: 820698 - DNA, 75 bp, synthetic construct
  source 1..75: mol_type = other DNA
ggacattaccgggtctcgctgggaagacgaacgcgatgtttatctgatgataaacgatcagatggctcaggcgct

SEQ ID NO: 820699 - DNA, 75 bp, synthetic construct
  source 1..75: mol_type = other DNA
gaaccgcgaagtaagccataatggtgtcactcgtaatgcactttccttctttgaagagaaaattgatgatgcact

SEQ ID NO: 820700 - DNA, 75 bp, synthetic construct
  source 1..75: mol_type = other DNA
atgttcctcatcatcttactcgtgatctccgcgctgaccatacagttacttgccatcagactggccggacattat

SEQ ID NO: 820701 - DNA, 75 bp, synthetic construct
  source 1..75: mol_type = other DNA
ctggatcagcatgagtattgagactcataagccagtttacctgcgggatattctcaccacttttggccgtcgccc

SEQ ID NO: 820702 - DNA, 75 bp, synthetic construct
  source 1..75: mol_type = other DNA
atgcggccattggtggtatgagcagtcgcgacggtcaggatttctccaagattcaagggcgtttctcaacgcgct

SEQ ID NO: 820703 - DNA, 75 bp, synthetic construct
  source 1..75: mol_type = other DNA
gttgtcaaaagcacactagacaaccttgtgacgctgtcaattgatcgaatcgatgcagataaaattgcgctgcgt

SEQ ID NO: 820704 - DNA, 75 bp, synthetic construct
  source 1..75: mol_type = other DNA
caccgattgaaagctttttggagccagcggttaagcgaacgattgaccaagcctgtgagttggattccttaacgg

SEQ ID NO: 820705 - DNA, 75 bp, synthetic construct
  source 1..75: mol_type = other DNA
catatatcattcagtctggtgctgaagtggataacttttatcgaattaccccgaaaatatctaataatacatcta

SEQ ID NO: 820706 - DNA, 75 bp, synthetic construct
  source 1..75: mol_type = other DNA
tctggatacgctggcgcgttgctttggtggcaatgatgaaaatgattcccgtgatatgggggcgtttatccgtgg

SEQ ID NO: 820707 - DNA, 75 bp, synthetic construct
  source 1..75: mol_type = other DNA
ttggtgaaggcggtatcggcgttccgcgtcgtgtaaaagcctgggaggttgtgcacgatgagcaggtgaaaaatc

SEQ ID NO: 820708 - DNA, 75 bp, synthetic construct
  source 1..75: mol_type = other DNA
agcaagaacaccttctccgcgaaaagcagatggaaaatatggagcgtgaaaaacgcttaagaacggattttgaag

SEQ ID NO: 820709 - DNA, 75 bp, synthetic construct
  source 1..75: mol_type = other DNA
tttaagctactgattaagccaggatgtgattcgaccgaagaggaaggcgatgcctggtatctacgtccgggagac

SEQ ID NO: 820710 - DNA, 75 bp, synthetic construct
  source 1..75: mol_type = other DNA
gggggatggaaatacagttgtattcccggttgcgtttaataatgcctgtgttgccgttgttgcaaattatgacaa

SEQ ID NO: 820711 - DNA, 75 bp, synthetic construct
  source 1..75: mol_type = other DNA
tgcgtccttttcccctgccggacgctgctatgtggcgcttgaagagcttcgatggggcgcgtttggtgatgtgat

SEQ ID NO: 820712 - DNA, 75 bp, synthetic construct
  source 1..75: mol_type = other DNA
cgctgccgagtcagaacagacttatgttgtggtggaaaaaaccgttatccaaccggtaccgaaaaaaacgcatct

SEQ ID NO: 820713 - DNA, 75 bp, synthetic construct
  source 1..75: mol_type = other DNA
atgacaccctgcatgtttatctgctgctgaacctcgataaagaccacgaggacaaatacaacgcggcggaaattc

SEQ ID NO: 820714 - DNA, 75 bp, synthetic construct
  source 1..75: mol_type = other DNA
ggctgcagaacacttaccggatcgcatgccacgactctgctcagcagaacgactctctgaaagtatggtcgatga

SEQ ID NO: 820715 - DNA, 75 bp, synthetic construct
  source 1..75: mol_type = other DNA
atccagtgatctggtcaaccacacaggctgcagaacacttaccggatcgcatgccacgactctgctcagcagaac

SEQ ID NO: 820716 - DNA, 75 bp, synthetic construct
  source 1..75: mol_type = other DNA
ctgacgattatcggcatgatcctgctgacttatgcgctgtatggactgtaccggctgtggcgggcgctgcgtctg

SEQ ID NO: 820717 - DNA, 75 bp, synthetic construct
  source 1..75: mol_type = other DNA
gtggagtacagttttgatgggcgacgggtagtgctggaaatcaccgccgggagagactttgacccggtgaaccgg

SEQ ID NO: 820718 - DNA, 75 bp, synthetic construct
  source 1..75: mol_type = other DNA
cggctgagtaaagccgtggtggagcagaccaccctggtaccgccgctggatgcacaggccagacaaaagcagatg

SEQ ID NO: 820719 - DNA, 75 bp, synthetic construct
  source 1..75: mol_type = other DNA
ggtgtaagtattccgacaccggtgatttttaaagatcctgaactcccgcgcaatacgccaaaaaggtcaatagaa

SEQ ID NO: 820720 - DNA, 75 bp, synthetic construct
  source 1..75: mol_type = other DNA
gagtggcggatgaagataacctgatcgtgcgagcagcgcggttgctgatgaaaacagcggctgccagcgggcgac

SEQ ID NO: 820721 - DNA, 75 bp, synthetic construct
  source 1..75: mol_type = other DNA
tgccgggcaagtcacatggtgctggcctgcgatacggtcagccggctcacggatgaagtctttgggctggatatc

SEQ ID NO: 820722 - DNA, 75 bp, synthetic construct
  source 1..75: mol_type = other DNA
cagtatcaggttacggggtcacttacgtaaagaactggcagaaggcagctcagccacaggcagcactgcaggaaa

SEQ ID NO: 820723 - DNA, 75 bp, synthetic construct
  source 1..75: mol_type = other DNA
tgatttttaaagatcctgaactcccgcgcaatacgccaaaaaggtcaatagaaacgttgctaaaatgtgaattca

SEQ ID NO: 820724 - DNA, 75 bp, synthetic construct
  source 1..75: mol_type = other DNA
aaaacagcggcaaacagcgggcgtcttccggcgggaagcggtgcagatatcagcattgacaaacaattaccgatg

SEQ ID NO: 820725 - DNA, 75 bp, synthetic construct
  source 1..75: mol_type = other DNA
acgcaaaccaacgcgcgacgaacgccatgctatccgggacttcttaatcagcattgaacgctgggagacagagga

SEQ ID NO: 820726 - DNA, 75 bp, synthetic construct
  source 1..75: mol_type = other DNA
tgccattttattttctataaaagcatcaatttcaatatgtgaggctattgaaaacaataaggctttgaaagaaag

SEQ ID NO: 820727 - DNA, 75 bp, synthetic construct
  source 1..75: mol_type = other DNA
aactatcatataagcttgatgggcagtatcaattcaaaagaccgacgcaacggcagaattcatttactcaacgcc

SEQ ID NO: 820728 - DNA, 75 bp, synthetic construct
  source 1..75: mol_type = other DNA
gtgcaggtgctggtcagaacccgggatggacgccggcgtgctgtccgtgagttcatcacttttgacacggcactg

SEQ ID NO: 820729 - DNA, 75 bp, synthetic construct
  source 1..75: mol_type = other DNA
atggaaaaagaagattcatttccccaacgcgtctggcaaatcgtcgccgctattcccgaaggctatgtcaccact

SEQ ID NO: 820730 - DNA, 75 bp, synthetic construct
  source 1..75: mol_type = other DNA
gaagaaatccggcaggatcgggaaaacgattattgcagccacggtattgagcgtaattgggggcgtttgcgggaa

SEQ ID NO: 820731 - DNA, 75 bp, synthetic construct
  source 1..75: mol_type = other DNA
cagccagattatggagttcgccgcaacgcgcaaaggggtgatgattttcgccgcgacggttgaacacgcaaaaga

SEQ ID NO: 820732 - DNA, 75 bp, synthetic construct
  source 1..75: mol_type = other DNA
aagtctgcgtgtgggtattaccagcggtatcggcctgtttatcggcatgatggggctgaaaaatgcaggtgtcat

SEQ ID NO: 820733 - DNA, 75 bp, synthetic construct
  source 1..75: mol_type = other DNA
tgcccgttgcgcttgccccggcaatgggcctcaatgcgttcttcgcttttgttgtcgtgcaggctatggggctgc

SEQ ID NO: 820734 - DNA, 75 bp, synthetic construct
  source 1..75: mol_type = other DNA
ggcggtcgtaccggtctgacggcagtggttgttggtctgctgttcctgctggttatctttctgtcgccgctggcg

SEQ ID NO: 820735 - DNA, 75 bp, synthetic construct
  source 1..75: mol_type = other DNA
ttgtctgattgctgcatttggcagcattctgatgggactgtttgctaatctgccagttgcactggcaccagcaat

SEQ ID NO: 820736 - DNA, 75 bp, synthetic construct
  source 1..75: mol_type = other DNA
cttctggtcaggggatgctggaacgcgtgtttaaactgcgcgaacatggcacgacggctcggaccgaagtgatcg

SEQ ID NO: 820737 - DNA, 75 bp, synthetic construct
  source 1..75: mol_type = other DNA
gggcctgaacgcgttcttcgcttttgtagtggtgcaggcgatgggcttgccgtggcaagtcgggatgggcgcaat

SEQ ID NO: 820738 - DNA, 75 bp, synthetic construct
  source 1..75: mol_type = other DNA
cgggttggaggtggattacgcacaaaggcagttgctgggggtttcggcggaggatgtgcgaaagatagaggcgct

SEQ ID NO: 820739 - DNA, 75 bp, synthetic construct
  source 1..75: mol_type = other DNA
cggccgggatgtgcagtacgatgcccgcccgttgctcggtttcacccgcgacgatgagcagatgattgaagacgt

SEQ ID NO: 820740 - DNA, 75 bp, synthetic construct
  source 1..75: mol_type = other DNA
ctctgcgctggataaccgctgccgatatcctcgcccaacaagcgttgctgcgccatccagatttcgtcgtcgcac

SEQ ID NO: 820741 - DNA, 75 bp, synthetic construct
  source 1..75: mol_type = other DNA
atccggaacatgggtatgttccgggggccataccggtaacgacaggccgccgctggagcagcccaccattctggt

SEQ ID NO: 820742 - DNA, 75 bp, synthetic construct
  source 1..75: mol_type = other DNA
acattcacggcaagccccaggtatatggtgttcatacgggtgaaggtacgccgtatgaaaacgtccgcgtggcga

SEQ ID NO: 820743 - DNA, 75 bp, synthetic construct
  source 1..75: mol_type = other DNA
atccggaacatgggaatgttccgggccataccggtaacgacaggccgccgctggatcagcccaccattctggtga

SEQ ID NO: 820744 - DNA, 75 bp, synthetic construct
  source 1..75: mol_type = other DNA
taaaaggaaaagtcttttgtttattggatacagatcaatcgtatgataaatttgatacttcagacagcatatcgc

SEQ ID NO: 820745 - DNA, 75 bp, synthetic construct
  source 1..75: mol_type = other DNA
ctgcgattgcgttgaattccttacgtctgtccctgttcactgccagccaatgaccgatacagataccaaacccaa

SEQ ID NO: 820746 - DNA, 75 bp, synthetic construct
  source 1..75: mol_type = other DNA
ggtaaaacgggccggtattgaactaccagaaggccaatgcacccacgtcctgcgccatacatttgccagccattt

SEQ ID NO: 820747 - DNA, 75 bp, synthetic construct
  source 1..75: mol_type = other DNA
aagccattgcttttgaaagcttcacaatggaagaggtaaataagaaaccttggctaggagaaaaagaagatcggc

SEQ ID NO: 820748 - DNA, 75 bp, synthetic construct
  source 1..75: mol_type = other DNA
gcgcgtaaagcgggtgttccggtgctgattgatccaaaaggtaccgattttgagcgctaccgcggcgctacgctg

SEQ ID NO: 820749 - DNA, 75 bp, synthetic construct
  source 1..75: mol_type = other DNA
gcatgaaaggaaagtcatcattcctaaagaagctttctgttgtgaggaaaacgatccagcattctccattagcac

SEQ ID NO: 820750 - DNA, 75 bp, synthetic construct
  source 1..75: mol_type = other DNA
gcgcagaacatccgtacgatggcgatgatccagttgctgctcggcaatatgggggatggctggcggcggcgttaa

SEQ ID NO: 820751 - DNA, 75 bp, synthetic construct
  source 1..75: mol_type = other DNA
gttttgagagatattttgggtcattctgatatcaagatgaccatggtatattcacacttttcaccagatcatctt

SEQ ID NO: 820752 - DNA, 75 bp, synthetic construct
  source 1..75: mol_type = other DNA
ttagccttggacgaaattaaacgcctgcttgatgcctgcgctgattctcaaagccctagcctattgatgatcgca

SEQ ID NO: 820753 - DNA, 75 bp, synthetic construct
  source 1..75: mol_type = other DNA
tggctgggtgaaaaggaagatcggcggcgtttgtcagaattgattgagcagtggcactccctttacggccagacg

SEQ ID NO: 820754 - DNA, 75 bp, synthetic construct
  source 1..75: mol_type = other DNA
aagctctggcttttgagcgtcacacgatggaagaaaccgaatcaaagccctggctgggcgaatcagtggatcgtc

SEQ ID NO: 820755 - DNA, 75 bp, synthetic construct
  source 1..75: mol_type = other DNA
gtaaatggttatgcgagctttatccaaacggtagggaagggcggcgtattcgtcggcatttcaatacaaaaggtg

SEQ ID NO: 820756 - DNA, 75 bp, synthetic construct
  source 1..75: mol_type = other DNA
tcctggctaactctttctcaaatccctgagctgtttcgagcctgcgagcaatacggcaaagaggatctcacgatg

SEQ ID NO: 820757 - DNA, 75 bp, synthetic construct
  source 1..75: mol_type = other DNA
tcaccggtgcgggcgatacggtgattggtgtgctggcagcaacgctggcggcgggtaattcgctggaagaagcct

SEQ ID NO: 820758 - DNA, 75 bp, synthetic construct
  source 1..75: mol_type = other DNA
agagaacattaacacattaccgtccaatgttgcagctggaatattagatctgacaactagccaaaaattaataat

SEQ ID NO: 820759 - DNA, 75 bp, synthetic construct
  source 1..75: mol_type = other DNA
agaggaagaggaagaggaagaggaagaggaagagagcgtagaagaacagcaaccgcccgcgccttcttcacctgt

SEQ ID NO: 820760 - DNA, 75 bp, synthetic construct
  source 1..75: mol_type = other DNA
aaaaacatttgtttatttaataaatgtacttcgctcatgcccagcagcatctgattttgatgatgtcgttaaagg

SEQ ID NO: 820761 - DNA, 75 bp, synthetic construct
  source 1..75: mol_type = other DNA
ttcaaaaatagagagtgagttattgcaatctttacttggagaaaacttacaacaacgaatcagtaagataattaa

SEQ ID NO: 820762 - DNA, 75 bp, synthetic construct
  source 1..75: mol_type = other DNA
cccgatggaagctccccaaacactcagaaaaaccatttcaagaacacatcaaatcgcttgcttgataatataaaa

SEQ ID NO: 820763 - DNA, 75 bp, synthetic construct
  source 1..75: mol_type = other DNA
ttataaagctcttgatgttattagtgatattacatggcaattggaaagtgaagactttaattcaatgcaacgaac

SEQ ID NO: 820764 - DNA, 75 bp, synthetic construct
  source 1..75: mol_type = other DNA
atccgcgtcgctaccgtgtttcgcaacgcgccggaaccgtttttgcgcatgatcgtggtgcatgaactggcgcat

SEQ ID NO: 820765 - DNA, 75 bp, synthetic construct
  source 1..75: mol_type = other DNA
aattgaagagttctttgtaacgtaccatggtgatgcgtctgaaagtgaactcattgcgcttatgtcttgtaacgc

SEQ ID NO: 820766 - DNA, 75 bp, synthetic construct
  source 1..75: mol_type = other DNA
ctggtgctcaactttgaagacggttgctcgacgactaacatcatcaagaagatccaacaggataaaaaaggctaa

SEQ ID NO: 820767 - DNA, 75 bp, synthetic construct
  source 1..75: mol_type = other DNA
gatatgcgtgatggtttttgtaagaatctccagctaaagggttatgatgtgaaagccacacatcgctatcaacaa

SEQ ID NO: 820768 - DNA, 75 bp, synthetic construct
  source 1..75: mol_type = other DNA
ggaaccgcagtaccaccagcttgaattcgacacccggctgtggctgacgcaactgtcgctgagtcaggacaaaat

SEQ ID NO: 820769 - DNA, 75 bp, synthetic construct
  source 1..75: mol_type = other DNA
actcaggatcttaaaaatcagtttctgcgcaatgccccgccgatcaataaagtgatgtatgacaataagatccat

SEQ ID NO: 820770 - DNA, 75 bp, synthetic construct
  source 1..75: mol_type = other DNA
ggcaaggcggccttaagctggctgaataacgataagggttttcagctcgatggccgcaatattgatgtcaaagcc

SEQ ID NO: 820771 - DNA, 75 bp, synthetic construct
  source 1..75: mol_type = other DNA
aggtaagcctctccagccttaccggacagcacggcgtgatgcaggtgcgcatggatctgcgtgatgacgaagggc

SEQ ID NO: 820772 - DNA, 75 bp, synthetic construct
  source 1..75: mol_type = other DNA
ggtcggtaaatctggtacgtcgcgacctgaatatggaagcggttgtcgcaccagagatttctgcgacggtgggcg

SEQ ID NO: 820773 - DNA, 75 bp, synthetic construct
  source 1..75: mol_type = other DNA
aggcctggcgctatttcccggaaaatctgatgggaaaagagttagttgattacttaagtggggcgattcagggcg

SEQ ID NO: 820774 - DNA, 75 bp, synthetic construct
  source 1..75: mol_type = other DNA
gacagcaagctggtttaatcagccgttgaacgtggatttttccaccaaagaaggggcaaaagcctaccaggtcgc

SEQ ID NO: 820775 - DNA, 75 bp, synthetic construct
  source 1..75: mol_type = other DNA
tatcacatttcgggtccgctggacgatccgcaaatcaacgaagtgttgcgccaaccgcgtaaagaaaaagcgcaa

SEQ ID NO: 820776 - DNA, 75 bp, synthetic construct
  source 1..75: mol_type = other DNA
ctatctgtcattgcatcagcatgataaagcgcgtaccgatttgttaaatgatgtagcggaggcgttggccctcgg

SEQ ID NO: 820777 - DNA, 75 bp, synthetic construct
  source 1..75: mol_type = other DNA
tagcgattgtgatgagcagtcacgatctcaatcacacattgcgtcacgcgcatcgggcatggctgctaaaaggtg

SEQ ID NO: 820778 - DNA, 75 bp, synthetic construct
  source 1..75: mol_type = other DNA
cgccgtttgcaatgccggtctggcactacctgacactgcatcagcacgataaaacgcgtaccgaactactgaatg

SEQ ID NO: 820779 - DNA, 75 bp, synthetic construct
  source 1..75: mol_type = other DNA
tctgaatatggaagcggttgtcgcaccagagatttctgcgacagtgggcgtggctgcggcctttgcggttaaccc

SEQ ID NO: 820780 - DNA, 75 bp, synthetic construct
  source 1..75: mol_type = other DNA
ttgagcggtaaattcagctttatcaatggtgatctgcaaagtgaaccactgaccgcaagctggtttaaccagcca

SEQ ID NO: 820781 - DNA, 75 bp, synthetic construct
  source 1..75: mol_type = other DNA
aacaacgcgccgtggctggcgatgattaaatatctctattacaaccccagtgtggcgaaaaatagcagtaattca

SEQ ID NO: 820782 - DNA, 75 bp, synthetic construct
  source 1..75: mol_type = other DNA
gaactgaaaaactaccttaccagtctgtgtgcagcggaaggtgtaactcaggcagagttgatagaaaggcttatc

SEQ ID NO: 820783 - DNA, 75 bp, synthetic construct
  source 1..75: mol_type = other DNA
tggtgaaactggcggcaggacgcgagtctacccagaacaaactgaatgaaatcgttgcgatttatcagaaactga

SEQ ID NO: 820784 - DNA, 75 bp, synthetic construct
  source 1..75: mol_type = other DNA
catcaagtctttcatcgacaagctgagcgactttgttgaacaggtttataaggttgataccgcagttattgccgc

SEQ ID NO: 820785 - DNA, 75 bp, synthetic construct
  source 1..75: mol_type = other DNA
tgaaaggcgtttcgacctggcatctgaacagtccggaagagttcaccaaagttcagaacaagatcaaagatctgg

SEQ ID NO: 820786 - DNA, 75 bp, synthetic construct
  source 1..75: mol_type = other DNA
accgactttctacggcaaaacggtagaagtgggtccgctggctaatatgctggtgaaactggcggcaggtcgcga

SEQ ID NO: 820787 - DNA, 75 bp, synthetic construct
  source 1..75: mol_type = other DNA
gaagcaccgcgcggtatgctctctcactggatggttattaaagacggtatcatcagcaactaccaggcagttgtt

SEQ ID NO: 820788 - DNA, 75 bp, synthetic construct
  source 1..75: mol_type = other DNA
gacccgtgcatggcctgtgcggtacacgtagtggatgccgacggcaacgaagtggtttcagtgaaggttctgtaa

SEQ ID NO: 820789 - DNA, 75 bp, synthetic construct
  source 1..75: mol_type = other DNA
gcactacaggacacagcaaaattactcgataggaccttgctggaagcagccacgcttgcactgcatcaggctcag

SEQ ID NO: 820790 - DNA, 75 bp, synthetic construct
  source 1..75: mol_type = other DNA
gttggtggaactgctcaccacgtcgctgtttggactggatgaaaagtacaacgatgtgagccagcaaacggcgag

SEQ ID NO: 820791 - DNA, 75 bp, synthetic construct
  source 1..75: mol_type = other DNA
atttcccggacgcctttctgacacaaatgcgcgaagcgatgccttcgacgctctcatttgatgattttcttgccg

SEQ ID NO: 820792 - DNA, 75 bp, synthetic construct
  source 1..75: mol_type = other DNA
caatgtggtcaatgaatccgtgcaagcaatacaggacacagcaaaattactcgacagagccttgctggaagcagc

SEQ ID NO: 820793 - DNA, 75 bp, synthetic construct
  source 1..75: mol_type = other DNA
gttgatagaactgctcaccacatcgctgattgcgctggatgaaaagtacagcgatgtgagtcagcaaacggccag

SEQ ID NO: 820794 - DNA, 75 bp, synthetic construct
  source 1..75: mol_type = other DNA
tgagactgcgccagagcgttaatggatatagccgaacacaacagaagctgggagagtttgtacttggcgatccgg

SEQ ID NO: 820795 - DNA, 75 bp, synthetic construct
  source 1..75: mol_type = other DNA
tgtgtgcagaggaaggagtaactcaggcagagttgatagaaaggcttattgagaaagaggcctgtcaccggaata

SEQ ID NO: 820796 - DNA, 75 bp, synthetic construct
  source 1..75: mol_type = other DNA
taaacgcgctttcacgcatatgggagacgcccttcgctgggccggtgatcctgagcttgcaaagcaattcgatgc

SEQ ID NO: 820797 - DNA, 75 bp, synthetic construct
  source 1..75: mol_type = other DNA
atgatcattgcaacgaagaacggctttctggtggccgcagaactaatcagggaagaggccgggtactggctacta

SEQ ID NO: 820798 - DNA, 75 bp, synthetic construct
  source 1..75: mol_type = other DNA
caacgtccaggcggcagacacgatggcgaaagactccatatctaagccgcatgctgaaatgtgcaaagacagcat

SEQ ID NO: 820799 - DNA, 75 bp, synthetic construct
  source 1..75: mol_type = other DNA
cccaagtctacagcggttacggcgaatcgctcatcgactataactttaaccagacccgcgtcggtgtgggggtta

SEQ ID NO: 820800 - DNA, 75 bp, synthetic construct
  source 1..75: mol_type = other DNA
acgctctatccttatgacaccaactacctcatctacacccaaaccagcgatctgaacaaagaagcgattgccagt

SEQ ID NO: 820801 - DNA, 75 bp, synthetic construct
  source 1..75: mol_type = other DNA
gcattggtgggggctgcaatctcgactgcaattctcctgatgtggcggcgtcacgcggttaagcatggcaactat

SEQ ID NO: 820802 - DNA, 75 bp, synthetic construct
  source 1..75: mol_type = other DNA
tccccgtgaaacccgggttatccggccggaagaggaatgctgtcctgcctgtggtggcgaactcagttctctggg

SEQ ID NO: 820803 - DNA, 75 bp, synthetic construct
  source 1..75: mol_type = other DNA
atgtcatcactgaatattaaacagggaagtgacactcattttcccgagtatcctctggcgtcgcccagtaataat

SEQ ID NO: 820804 - DNA, 75 bp, synthetic construct
  source 1..75: mol_type = other DNA
tgtcgatttagccggttcgtttaatctcggtttggcaggggtgattttctctttcatgctggtcaacctgtttga

SEQ ID NO: 820805 - DNA, 75 bp, synthetic construct
  source 1..75: mol_type = other DNA
cgaccaaagaacaagatacatcgcttgagtatcagatcgaggctttacaaaaagctggttgcgaaaaatggtacg

SEQ ID NO: 820806 - DNA, 75 bp, synthetic construct
  source 1..75: mol_type = other DNA
gaagaaatggcggaaacgctgggtgagcaatatgacccggtactgccatccgccctgcgccagtcttcagcccgt

SEQ ID NO: 820807 - DNA, 75 bp, synthetic construct
  source 1..75: mol_type = other DNA
tggtggtgaactcagttctctgggatgtgatgtgtcagagcaactggagcttatcagcagcgcctttaaggttat

SEQ ID NO: 820808 - DNA, 75 bp, synthetic construct
  source 1..75: mol_type = other DNA
tgccggtgtgtatgctgccgatagtggcaaatgcgcaagaggcaacggtgaaagatgtgcatgatgcgcctgcag

SEQ ID NO: 820809 - DNA, 75 bp, synthetic construct
  source 1..75: mol_type = other DNA
atgctaattcgagtagaaattcccattgatgcgccgggtattgatgccctgctgcgtcgttcattcgaaagtgat

SEQ ID NO: 820810 - DNA, 75 bp, synthetic construct
  source 1..75: mol_type = other DNA
acgttttgttacaacgtcacgaattttcgactctgacgttacttgacctctttacccacccttctcctgcagccc

SEQ ID NO: 820811 - DNA, 75 bp, synthetic construct
  source 1..75: mol_type = other DNA
atcgcctgctaaaactgaagccgggtcacaccgctggcgccgatcctctccccctgatgaactcactcgctatcc

SEQ ID NO: 820812 - DNA, 75 bp, synthetic construct
  source 1..75: mol_type = other DNA
aaatagccaaacatcttcgttatgggatgcattagcctatacattagcaattctggtaatgctgccaacttactg

SEQ ID NO: 820813 - DNA, 75 bp, synthetic construct
  source 1..75: mol_type = other DNA
agcgattaccgtagacaatttaaaaactgttttgcggaacaagaaatcctatctgaatttcctcaaccggtaagt

SEQ ID NO: 820814 - DNA, 75 bp, synthetic construct
  source 1..75: mol_type = other DNA
cgaaaactttaaaaatgcttatcgttcggagcaggggtatattaaaaaagatgttctgataaaagatattctttt

SEQ ID NO: 820815 - DNA, 75 bp, synthetic construct
  source 1..75: mol_type = other DNA
agcgtcccggcgctgttcgatatgctgctgacctggtgtgaaggtttcgccgacgccacgccggaaaacctgcgc

SEQ ID NO: 820816 - DNA, 75 bp, synthetic construct
  source 1..75: mol_type = other DNA
actcaaacgccagcagcgctacccccacggcgccccggtggtatttaccagcaatctggggcgttccctctacag

SEQ ID NO: 820817 - DNA, 75 bp, synthetic construct
  source 1..75: mol_type = other DNA
tgccggacaatcgccaccgcctccatgtcaatattgacctgctgattatggatgcctccagctttacgcttttct

SEQ ID NO: 820818 - DNA, 75 bp, synthetic construct
  source 1..75: mol_type = other DNA
cgtcggctcacatttctttgttgaatttgaaattgccgatctggacctcacccggctggagacggtctggaaccg

SEQ ID NO: 820819 - DNA, 75 bp, synthetic construct
  source 1..75: mol_type = other DNA
gcctcccgttaaacacgcagggcaatgcgcagagcgctcaccgcgcgtatgccctgagcactctcagccacacat

SEQ ID NO: 820820 - DNA, 75 bp, synthetic construct
  source 1..75: mol_type = other DNA
cagcgcccggtacgcctgcttgaggtgggaacccgcactggccgcaccgcagaatcgctgttagcacagctcaac

SEQ ID NO: 820821 - DNA, 75 bp, synthetic construct
  source 1..75: mol_type = other DNA
tggcggctgaagtaataaaagatctcgtcaataccgtgcgttcatatgacacggaaaacgaacatgatgtttgtg

SEQ ID NO: 820822 - DNA, 75 bp, synthetic construct
  source 1..75: mol_type = other DNA
tggcttcaggggcaaacgcgcagagttttgcagcaaatgagcgacgaacagctgaaagatatcggcctgcgtcgg

SEQ ID NO: 820823 - DNA, 75 bp, synthetic construct
  source 1..75: mol_type = other DNA
gcggttgatgatgaaagtttgttggcgacgctggaaacgtggctactgccgcatatgacaggcgtacattcgcta

SEQ ID NO: 820824 - DNA, 75 bp, synthetic construct
  source 1..75: mol_type = other DNA
aagggcgttatcccaaacacgtctggccggatgatccggcaaataccgcaccgacgcgacggacgaaaaagtatt

SEQ ID NO: 820825 - DNA, 75 bp, synthetic construct
  source 1..75: mol_type = other DNA
cggcggcaaatgcaggcccgacgggtgttacagcagatgagtgatgaacggttgagggaaattgggttatgctgg

SEQ ID NO: 820826 - DNA, 75 bp, synthetic construct
  source 1..75: mol_type = other DNA
cggcggcaaatgcaggcccgacgggtgttacagcagatgagtgatgaacggttgagggaaaatgggttaggctgg

SEQ ID NO: 820827 - DNA, 75 bp, synthetic construct
  source 1..75: mol_type = other DNA
atgaagcctctgaaagatgaggaggcagcagatggaattcacgaaaacaaagccaaaacgccgtttatcagactt

SEQ ID NO: 820828 - DNA, 75 bp, synthetic construct
  source 1..75: mol_type = other DNA
ttatgccattaacctcagatattggatcacgttcatttaatcttgggctggaggtttttcgtgcccgaattgcag

SEQ ID NO: 820829 - DNA, 75 bp, synthetic construct
  source 1..75: mol_type = other DNA
taatttcaggccatgacaagccgcagccgccaggctgcctactcgggctggaggtttttcgtgcccgaattgcag

SEQ ID NO: 820830 - DNA, 75 bp, synthetic construct
  source 1..75: mol_type = other DNA
tttgtgaagaattcagatggttcagatgtatgtactttatttgatgccgctgcattttctcgtttgactggtgaa

SEQ ID NO: 820831 - DNA, 75 bp, synthetic construct
  source 1..75: mol_type = other DNA
gcgaagccttcagaagacgagctgcatcaggcgatgcttaacggcattcgtgaaaaaggcttaagcgtgcttaac

SEQ ID NO: 820832 - DNA, 75 bp, synthetic construct
  source 1..75: mol_type = other DNA
ctcaacgcgttagtcaggcatccatgacgcagcgtgccgggcgcgccgggcgtctggagccgggtatctgcctgc

SEQ ID NO: 820833 - DNA, 75 bp, synthetic construct
  source 1..75: mol_type = other DNA
aagggcgttatcccaaacatgtctggccggacgacccggcaaacaccgcaccaacgcgacgaacgaaaaagtatt

SEQ ID NO: 820834 - DNA, 75 bp, synthetic construct
  source 1..75: mol_type = other DNA
cggcggcaaatgcaggcccgacgggtgttacagcagatgagtgatgaacggttgagggaaagtgggttaagctgg

SEQ ID NO: 820835 - DNA, 75 bp, synthetic construct
  source 1..75: mol_type = other DNA
aagctacctacgcaatgtacttgacgtcatagcagactggccgttgaaccgggtcagcgaactgctcccctggcg

SEQ ID NO: 820836 - DNA, 75 bp, synthetic construct
  source 1..75: mol_type = other DNA
ggctgctgtctccgctggaagaggcgcttcatggctatgtcatgactgacggcaaactccatgccgatgataccc

SEQ ID NO: 820837 - DNA, 75 bp, synthetic construct
  source 1..75: mol_type = other DNA
ctggttcgcctactcaccagacaggcagggaaaacatccggtacaacaccttcgtcccttccggggtatcctgca

SEQ ID NO: 820838 - DNA, 75 bp, synthetic construct
  source 1..75: mol_type = other DNA
aagctacctacgcaatgtacttgacgtcatagcggactggccgctgaaccgggtcagcgaactgctcccttggcg

SEQ ID NO: 820839 - DNA, 75 bp, synthetic construct
  source 1..75: mol_type = other DNA
aagctacctacgcaatgtacttgacgtcatagccgactggccgttgaaccgggtcagcgaactgctcccatggcg

SEQ ID NO: 820840 - DNA, 75 bp, synthetic construct
  source 1..75: mol_type = other DNA
aagctacctacgcaatgtacttgacgtcatagctgactggccgctgaaccgggtcagcgaactgctcccgtggcg

SEQ ID NO: 820841 - DNA, 75 bp, synthetic construct
  source 1..75: mol_type = other DNA
cggcggcaaatgcaggcccgacgggtgttacagcagatgagtgatgaacggttgagggagagtgggttaggctgg

SEQ ID NO: 820842 - DNA, 75 bp, synthetic construct
  source 1..75: mol_type = other DNA
cggcggcaaatgcaggcccgacgggtgttacagcagatgagtgatgaacggttgagggacagtgggttacgctgg

SEQ ID NO: 820843 - DNA, 75 bp, synthetic construct
  source 1..75: mol_type = other DNA
cggcggcaaatgcaggcccgacgggtgttacagcagatgagtgatgaacggttgagggacactgggttaggctgg

SEQ ID NO: 820844 - DNA, 75 bp, synthetic construct
  source 1..75: mol_type = other DNA
gatgcgtacgccgggttcaacgagctgtatcgcaatggtgggataacggaagctgcctgctgggctcatgcccgc

SEQ ID NO: 820845 - DNA, 75 bp, synthetic construct
  source 1..75: mol_type = other DNA
agtgacgatcaacatttatttggcagagctgcaatgatgggcaggtaggaagatgaaaataaaacgccagtgacg

SEQ ID NO: 820846 - DNA, 75 bp, synthetic construct
  source 1..75: mol_type = other DNA
accgcgaaaatcagtgatatcaaggctctaactgagaaggcgattgcagaaaatgtgcaggatactcgactgtag

SEQ ID NO: 820847 - DNA, 75 bp, synthetic construct
  source 1..75: mol_type = other DNA
gacttcagtgcccgccagagtctgctcaatgtcccattacattggagataccagaggaaggggtgtttattaaga

SEQ ID NO: 820848 - DNA, 75 bp, synthetic construct
  source 1..75: mol_type = other DNA
acgcactcagcaccgacgagcgcaatgtttacctggcgatcgcacaacactatcttgttcagttcatgcctgaaa

SEQ ID NO: 820849 - DNA, 75 bp, synthetic construct
  source 1..75: mol_type = other DNA
tccgctgacagaccgtaaattacttgataaagcgtgggcagacggaacggctgcatcccttgcaggaaaaccggc

SEQ ID NO: 820850 - DNA, 75 bp, synthetic construct
  source 1..75: mol_type = other DNA
gaccgttgaagagttcattaatgaactatacgatgaactcacaggcatgatttctgatgttgacctgggcgagat

SEQ ID NO: 820851 - DNA, 75 bp, synthetic construct
  source 1..75: mol_type = other DNA
gataagaaaacggctgcacccttaccgtttaacctcgttcgtcttcagcagtatatgaacaggaagttcaaaatg

SEQ ID NO: 820852 - DNA, 75 bp, synthetic construct
  source 1..75: mol_type = other DNA
gattgttatcaggccaaaaagctattcctgtacaggatgtgaatttaaaatctggaatgagttttctggcaagaa

SEQ ID NO: 820853 - DNA, 75 bp, synthetic construct
  source 1..75: mol_type = other DNA
taaagatcgggataaaaaagacgaacatggcggtattggtacgccagctacgcgggcttccatattggaaacact

SEQ ID NO: 820854 - DNA, 75 bp, synthetic construct
  source 1..75: mol_type = other DNA
gcctggtatagcggttaatcctgatatgacagcattatggtcagaaaagcaggctgccatagaaaatggcgacct

SEQ ID NO: 820855 - DNA, 75 bp, synthetic construct
  source 1..75: mol_type = other DNA
ttaaaacgattctcgaacttatcagacgtggagacgtgattgaaattgttcacgctggcgatcctgatgatgagg

SEQ ID NO: 820856 - DNA, 75 bp, synthetic construct
  source 1..75: mol_type = other DNA
cgaactggaagccaggggaatttgctccgctgaccgaccgtaaattacttgataaggcgtgggcagacggaacgg

SEQ ID NO: 820857 - DNA, 75 bp, synthetic construct
  source 1..75: mol_type = other DNA
ggcctgattgtgaatcgtacccgtgctaaccagaaccataaatccagtttttactacaccatgaccggagtcttt

SEQ ID NO: 820858 - DNA, 75 bp, synthetic construct
  source 1..75: mol_type = other DNA
acacccttccggcagtgaaaaaggcactggcaaatcccaaaaataaccgtgacttcagaggactctatctcaagg

SEQ ID NO: 820859 - DNA, 75 bp, synthetic construct
  source 1..75: mol_type = other DNA
gtttcaacgcctggactctccctgcccttcctgtggtaagcatattgttatcaggccaaaaggttatttctgtac

SEQ ID NO: 820860 - DNA, 75 bp, synthetic construct
  source 1..75: mol_type = other DNA
ccgcagtagcaaatgatattgttaaggcgcttgggggcaatttcacccgtcatgatggctggtttgaaagtgata

SEQ ID NO: 820861 - DNA, 75 bp, synthetic construct
  source 1..75: mol_type = other DNA
aatcgcaagagagtcttcaggagaaaatatctcaatgtaagttttctgtttgtccagatagccttcagtgtccgc

SEQ ID NO: 820862 - DNA, 75 bp, synthetic construct
  source 1..75: mol_type = other DNA
acagcggatttgaggcatttcttggtgcggaaaccacagacgaaggtgaatcagaagataacgatgattccgctt

SEQ ID NO: 820863 - DNA, 75 bp, synthetic construct
  source 1..75: mol_type = other DNA
gaaaatcacccaggcacaggccgaaaaactggttaaatcagggaaaaccgatttgattaagggatttaaaaagaa

SEQ ID NO: 820864 - DNA, 75 bp, synthetic construct
  source 1..75: mol_type = other DNA
gaatattcagaacaaaataggacaatgtaagtttcctgttaatacagagcgcctccagtgtccctctgatgcaac

SEQ ID NO: 820865 - DNA, 75 bp, synthetic construct
  source 1..75: mol_type = other DNA
gtcagcggtgacaacagtggattacttactgaattattgcgtttggggtttaatagcggacctcaagctcttggc

SEQ ID NO: 820866 - DNA, 75 bp, synthetic construct
  source 1..75: mol_type = other DNA
ttggtcaaaaattctgaggaatcagcagtatgctgcttatttgatgctaatgcatttgaacatttagttcgtgaa

SEQ ID NO: 820867 - DNA, 75 bp, synthetic construct
  source 1..75: mol_type = other DNA
ccgaccgctaatgtgcctgacgttaacgcgctcagtgctgacgagcgcaatgtgtacctggcaatagcacagcat

SEQ ID NO: 820868 - DNA, 75 bp, synthetic construct
  source 1..75: mol_type = other DNA
gccagttacttgttgatgaagtgctggaatatgcaggcaacacaaaacctgttaaacgcgttctgataaacgata

SEQ ID NO: 820869 - DNA, 75 bp, synthetic construct
  source 1..75: mol_type = other DNA
cgcgggcttccatgctggaaacgctgaaaaaacggaactatatcaccctggaaaaaggaaaacttattccaacag

SEQ ID NO: 820870 - DNA, 75 bp, synthetic construct
  source 1..75: mol_type = other DNA
gttgttaatgagaagaaaacaacaccaccaccattattcaccgaggccaccctgcttgctgcacttgttcgtgtc

SEQ ID NO: 820871 - DNA, 75 bp, synthetic construct
  source 1..75: mol_type = other DNA
tgccattcagtgtggtgatgagtcgttctatgcccgtgccagaaaaacaactgacagcggatttgaggcgtttct

SEQ ID NO: 820872 - DNA, 75 bp, synthetic construct
  source 1..75: mol_type = other DNA
gcggattttgtcaccgacccaacgattaaaaagttactgaaagataaagataaggataaaaaagatgagcatggc

SEQ ID NO: 820873 - DNA, 75 bp, synthetic construct
  source 1..75: mol_type = other DNA
gagctttccggtggtaccgcggtagttgccgatatggacgatccaaaagcggaagagctgctattttccgccaac

SEQ ID NO: 820874 - DNA, 75 bp, synthetic construct
  source 1..75: mol_type = other DNA
gtgacgctgacgctgccggtgggtctgtttacctgcatcaccggggtttcaggttccggtaaatcgacgctgatt

SEQ ID NO: 820875 - DNA, 75 bp, synthetic construct
  source 1..75: mol_type = other DNA
gccgcaacttctattatttccagatgctgaaatcgctggcagatcactataagttcgacgtcgaagcgccgtggg

SEQ ID NO: 820876 - DNA, 75 bp, synthetic construct
  source 1..75: mol_type = other DNA
acatcggtccaggcgcaggtgttcacggtggtgaagtggtcgcggaaggatcgctggaagcgattatggcagtgc

SEQ ID NO: 820877 - DNA, 75 bp, synthetic construct
  source 1..75: mol_type = other DNA
gagcggtaaacgcaaaattgaagtgccgaagaaacgcgtacccgcagatccggaaaaagtgctgaaactgacagg

SEQ ID NO: 820878 - DNA, 75 bp, synthetic construct
  source 1..75: mol_type = other DNA
tgtacgtgctggatgaaccgtctatcggcctgcatcagcgcgataacgaacgcctgctgggtacgcttatccacc

SEQ ID NO: 820879 - DNA, 75 bp, synthetic construct
  source 1..75: mol_type = other DNA
ggaaaacacccacaacggcaaagtgctgccgcgtgaatacctgaaagaagcatgggaatttacccgcgagcgcaa

SEQ ID NO: 820880 - DNA, 75 bp, synthetic construct
  source 1..75: mol_type = other DNA
catccgctggcggaaaatgaccggtggcgggatgcgtcagtccgggatcctggcggccgccgggatgtatgcgct

SEQ ID NO: 820881 - DNA, 75 bp, synthetic construct
  source 1..75: mol_type = other DNA
tggtgacgcatctcgacgtctcgcgcgagcaactggctgaagtcgccgcccactggcgcgcattcctggcgcgtt

SEQ ID NO: 820882 - DNA, 75 bp, synthetic construct
  source 1..75: mol_type = other DNA
ggtacgcgaagaattagccaagtttatcagcaatcgcccgtgcgccagctgcgaaggaacgcgtctgcgtcggga

SEQ ID NO: 820883 - DNA, 75 bp, synthetic construct
  source 1..75: mol_type = other DNA
aggttccggtaaatcgacgctgattaacgacacactgttcccgattgcccaacgccagttgaatggtgcgaccat

SEQ ID NO: 820884 - DNA, 75 bp, synthetic construct
  source 1..75: mol_type = other DNA
cggcctgcaccagcgcgataacgagcgcctgttgggtacgcttatccatctgcgcgatctcggtaataccgtgat

SEQ ID NO: 820885 - DNA, 75 bp, synthetic construct
  source 1..75: mol_type = other DNA
accttcgccatgtgcctggcgtcatagcagactggccggtcaaccgggtcagcgaactgcttccgtggcgcatag

SEQ ID NO: 820886 - DNA, 75 bp, synthetic construct
  source 1..75: mol_type = other DNA
ttctcgtctgacttccagaccgatggcggcctggtgcacctggcgctggcgtttaacccgtctcaccttgagatt

SEQ ID NO: 820887 - DNA, 75 bp, synthetic construct
  source 1..75: mol_type = other DNA
acgggagtcaaaccggatcaattccactctcaaacgcgtgaatatttccgccgcctggcgaaagacgcttcacgt

SEQ ID NO: 820888 - DNA, 75 bp, synthetic construct
  source 1..75: mol_type = other DNA
gcaccggggaaatgtggtggatacagtgattgaaggggcttacgaggtggtgggcgtgtttgaccggattgagga

SEQ ID NO: 820889 - DNA, 75 bp, synthetic construct
  source 1..75: mol_type = other DNA
actttgtgctgagcaaaacatgcaggtttgcgtaccgtctaccccggcacaggtttaccacatgctgcgtcgtca

SEQ ID NO: 820890 - DNA, 75 bp, synthetic construct
  source 1..75: mol_type = other DNA
tacgacctgctggaacaacgtcgtaagaacaatcaacacgatgtcgccattgtgcgtatcgagcaactctacccg

SEQ ID NO: 820891 - DNA, 75 bp, synthetic construct
  source 1..75: mol_type = other DNA
tgaatacggttatgccaccgcagaaccacgcaccctgaccatctgggaagcacagttcggtgacttcgccaacgg

SEQ ID NO: 820892 - DNA, 75 bp, synthetic construct
  source 1..75: mol_type = other DNA
gtgtggatcactattgcaccgttcgtgacagttcgtgacagtgtgctgcaagcggatgcgtacgccgggttcaac

SEQ ID NO: 820893 - DNA, 75 bp, synthetic construct
  source 1..75: mol_type = other DNA
gcaccggggaaatgtggtggatagagtcattgaaggggcttacgaggtggtgggcgtgtttgaccggattgagga

SEQ ID NO: 820894 - DNA, 75 bp, synthetic construct
  source 1..75: mol_type = other DNA
aactggcgaaagcgttcgcatacgccctgaaccagtggccggcgctgacgtactatgcgaacgatggctgggctg

SEQ ID NO: 820895 - DNA, 75 bp, synthetic construct
  source 1..75: mol_type = other DNA
aacggaagctgcctgctgggctcacgcccgccgaaagatccacgatgtgcacgtccgcatcccgtcagcactgac

SEQ ID NO: 820896 - DNA, 75 bp, synthetic construct
  source 1..75: mol_type = other DNA
acagtgtgctgcaagcggatgcgtacgccgggttcaacgagctgtatcgcaatggtgggataacggaagctgcct

SEQ ID NO: 820897 - DNA, 75 bp, synthetic construct
  source 1..75: mol_type = other DNA
gcgtacgcacttaaccagtggccggcactgacgtactatgcgaacgatggctgggtggaaatcgacaacaacatc

SEQ ID NO: 820898 - DNA, 75 bp, synthetic construct
  source 1..75: mol_type = other DNA
agcggggagcgctactgtacagcctgatcgggacgtgcaaactgaatgacgtggatccagaaagctaccttcgcc

SEQ ID NO: 820899 - DNA, 75 bp, synthetic construct
  source 1..75: mol_type = other DNA
ttgattccagccgttgcaccggttgcaaaacctgcgagctggcttgtaaagactacaaagatttgacaccagaag

SEQ ID NO: 820900 - DNA, 75 bp, synthetic construct
  source 1..75: mol_type = other DNA
actcccacgggatgagaagcggctgctgccgacggagccgtgttgcccggagtgcggtggttcgctgagttacct

SEQ ID NO: 820901 - DNA, 75 bp, synthetic construct
  source 1..75: mol_type = other DNA
gcacccgcaaaccgttccctgagtcactcccacgggatgagaagcggctgctgccgacggagccgtgttgcccgg

SEQ ID NO: 820902 - DNA, 75 bp, synthetic construct
  source 1..75: mol_type = other DNA
ttgattccagccgttgcaccggttgcaaaacctgcgagttggcctgtaaagactataaagatctgacgccggaag

SEQ ID NO: 820903 - DNA, 75 bp, synthetic construct
  source 1..75: mol_type = other DNA
aggctgataacaacatagctgagaatgcgctgcggatggtcagtctgggccgcaaaaattacctgttcttcggtt

SEQ ID NO: 820904 - DNA, 75 bp, synthetic construct
  source 1..75: mol_type = other DNA
ccgctaactttgtgcaggggtatgtcgaagggatctggcagatctggcaaatgcagcgagcggaggacaacgggc

SEQ ID NO: 820905 - DNA, 75 bp, synthetic construct
  source 1..75: mol_type = other DNA
ttgagcatatccaggactggccggcaaaccgggtacgcgatctgttgccctggaaagttgatctgaccactcagt

SEQ ID NO: 820906 - DNA, 75 bp, synthetic construct
  source 1..75: mol_type = other DNA
caacattggtgaaaacgcgctgcgatcggtggcggttggaagaaaaaattatctcttcttaggttctgacaacgg

SEQ ID NO: 820907 - DNA, 75 bp, synthetic construct
  source 1..75: mol_type = other DNA
atgtctttagattcgctggcctgcgggcatgacaatgtcaaacagtcaaagattgtggcgttgacggtcagtctg

SEQ ID NO: 820908 - DNA, 75 bp, synthetic construct
  source 1..75: mol_type = other DNA
ttgattccagccgttgcgccggttgcaaaacctgcgagctggcttgtaaagactacaaagatttgacgccagaag

SEQ ID NO: 820909 - DNA, 75 bp, synthetic construct
  source 1..75: mol_type = other DNA
tttggcgtcatagctgactggccggtcaaccatgtcagcgaactgcttccgtggcgcatagcactgcccgctgaa

SEQ ID NO: 820910 - DNA, 75 bp, synthetic construct
  source 1..75: mol_type = other DNA
gtggaccacctggcaacgcgtccaagagaatatgataaagggtggattaacaggaagaagtgcttccggtaaaaa

SEQ ID NO: 820911 - DNA, 75 bp, synthetic construct
  source 1..75: mol_type = other DNA
acggaagctgcctgctgggctcatgcctgccgaaagatccacgatgtgcacgtccgcatcccgtcagcactgacg

SEQ ID NO: 820912 - DNA, 75 bp, synthetic construct
  source 1..75: mol_type = other DNA
gcgaagaagaaagtagcgtggcgcacagttgcccaatcaattacaccctcatttcaaacggcctggcaaacctga

SEQ ID NO: 820913 - DNA, 75 bp, synthetic construct
  source 1..75: mol_type = other DNA
aacctgaccgaaaaagtcgatcatgtcgtggtagaagggactggcggctggcgcagtctgatgaatgatttgcgt

SEQ ID NO: 820914 - DNA, 75 bp, synthetic construct
  source 1..75: mol_type = other DNA
tgggcgtgtttgaccggattgaggaaaagcgtgatgccatgcagtcgctgattctgccgccaccggcacgccagg

SEQ ID NO: 820915 - DNA, 75 bp, synthetic construct
  source 1..75: mol_type = other DNA
gcaccggggaaatgtggtggagaaagttattgaaggggcttacgaggtggtgggcgtgtttgaccggattgagga

SEQ ID NO: 820916 - DNA, 75 bp, synthetic construct
  source 1..75: mol_type = other DNA
agatattgatatcgaactgcacactgccgggcagtataagcgcacgctgacgttgctgggtgaaaataccgaaga

SEQ ID NO: 820917 - DNA, 75 bp, synthetic construct
  source 1..75: mol_type = other DNA
gcaccggggaaatgtggtggagatagtaattgaaggggcttacgaggtggtgggcgtgtttgaccggattgagga

SEQ ID NO: 820918 - DNA, 75 bp, synthetic construct
  source 1..75: mol_type = other DNA
aaaaacaggacgcatctggacgtatgtccgggatgaccggaatgcgggctcatcagagccaccggcggtctggtt

SEQ ID NO: 820919 - DNA, 75 bp, synthetic construct
  source 1..75: mol_type = other DNA
ccattacaggtattgatggtgatataagaatcaacaaggcgttatgggtgattgccgaacagttcagaaagtgga

SEQ ID NO: 820920 - DNA, 75 bp, synthetic construct
  source 1..75: mol_type = other DNA
caatcactgcgaagatccggcgtgtaccaaagtctgtccgagcggcgcgatgcataaacgtgaagatggttttgt

SEQ ID NO: 820921 - DNA, 75 bp, synthetic construct
  source 1..75: mol_type = other DNA
ggctatgtcatgactgacggcaaactccatgccgatgataccccggtccaggtactgctgccgggtaataagaag

SEQ ID NO: 820922 - DNA, 75 bp, synthetic construct
  source 1..75: mol_type = other DNA
acaacatcgcagagaacgccttacggggtgtggccgtgggccggaagaactggttgtgtgtgtcacgaaggagaa

SEQ ID NO: 820923 - DNA, 75 bp, synthetic construct
  source 1..75: mol_type = other DNA
gggtgaagatgctgccgaacagctggagctgatgcgcagcgccttccgggttatccggacagtacgtgaaaaaca

SEQ ID NO: 820924 - DNA, 75 bp, synthetic construct
  source 1..75: mol_type = other DNA
taaacaggcgaagaaatttgccgatatgaccaacgtgcgtattccggcgtggatggcgcaaatgtttgacgggct

SEQ ID NO: 820925 - DNA, 75 bp, synthetic construct
  source 1..75: mol_type = other DNA
agcctgtaaagaagctggtcttgatgaacatggtaggggaatggctatagcccgtgccctttctctttcgtccaa

SEQ ID NO: 820926 - DNA, 75 bp, synthetic construct
  source 1..75: mol_type = other DNA
gccggatttcaggacgttattcaccactgcgcattgcggcagtaactgactttattattgtgctggcactgctga

SEQ ID NO: 820927 - DNA, 75 bp, synthetic construct
  source 1..75: mol_type = other DNA
tatgcctgtcaggtcgcgggctatgagcaggaaattgaacggctgaaagcgcaactcgacaggttgcgtcgcatg

SEQ ID NO: 820928 - DNA, 75 bp, synthetic construct
  source 1..75: mol_type = other DNA
gtgggcggtggcctgtatctctgctggatgggttatcagatgctgcgtagcgcactgaaaaaagaggtcgtttct

SEQ ID NO: 820929 - DNA, 75 bp, synthetic construct
  source 1..75: mol_type = other DNA
gcctgcatttgattatcgaaaaaatggcctggctgcatacgctgattatggtgggcggtggcctgtatctctgct

SEQ ID NO: 820930 - DNA, 75 bp, synthetic construct
  source 1..75: mol_type = other DNA
ggcattaaagatcgcactggtctggaagcggcaccgcatcttacttgcattgatgcgacgcccgacgagctgcgc

SEQ ID NO: 820931 - DNA, 75 bp, synthetic construct
  source 1..75: mol_type = other DNA
ggagatggatttaaatctctctttcgatctgcgcgtcgaacccttgagtaagtatcatctcgatgaaatttccat

SEQ ID NO: 820932 - DNA, 75 bp, synthetic construct
  source 1..75: mol_type = other DNA
ggtattaaagagcgtactggtctggaagctgcaccgcatcttacctgcattgatgcgactcccgacgagctgcgc

SEQ ID NO: 820933 - DNA, 75 bp, synthetic construct
  source 1..75: mol_type = other DNA
aaaccttacatgatgtttatctccggtttttcggaaacggcgatgacgtttattatgatgttagttgggctgggg

SEQ ID NO: 820934 - DNA, 75 bp, synthetic construct
  source 1..75: mol_type = other DNA
gatggtggtatgaaaaaagtcattttatctttggctctgggcacgtttggtttggggatggccgaatttggcatt

SEQ ID NO: 820935 - DNA, 75 bp, synthetic construct
  source 1..75: mol_type = other DNA
aatgcaagctttgccgataagcttggggttagcccttctcaactcacgcaagtctccggtgaaaaaagcactcga

SEQ ID NO: 820936 - DNA, 75 bp, synthetic construct
  source 1..75: mol_type = other DNA
ccagcgaactgggcggcgcccgcttctcgtttagctggccgttatggcacaacattgcgcaatttacctctgcct

SEQ ID NO: 820937 - DNA, 75 bp, synthetic construct
  source 1..75: mol_type = other DNA
cgctataacgtgatgacctgtattgaaaaagacgcctgcgtactggtcgagcaagatctgaatagtgatggcagg

SEQ ID NO: 820938 - DNA, 75 bp, synthetic construct
  source 1..75: mol_type = other DNA
gacgtgcggcgcttgagtcgctgaaaagcgatgccgggtttatgaaagacccgaaacgcgcgcgggatctgctga

SEQ ID NO: 820939 - DNA, 75 bp, synthetic construct
  source 1..75: mol_type = other DNA
atgcgtattagcgtgaacagtcatatggcgcgttatcagagcggcaaaaacacgccagaccaggtaactatctac

SEQ ID NO: 820940 - DNA, 75 bp, synthetic construct
  source 1..75: mol_type = other DNA
gtgttactggtttggtctctgggatattttgtcagtattgtctggcgtaaagggcaaaatccccttgttcttcag

SEQ ID NO: 820941 - DNA, 75 bp, synthetic construct
  source 1..75: mol_type = other DNA
tgagttgtttaaacttgttggcatcacgtttttcaatacgctcttttttgcaaccgactggtttatttatctcac

SEQ ID NO: 820942 - DNA, 75 bp, synthetic construct
  source 1..75: mol_type = other DNA
ctgggaacgaagcctaaagcgtggcgcgatcttgtagtggatggtgaaaggctggatgtgaatctgaatgagtga

SEQ ID NO: 820943 - DNA, 75 bp, synthetic construct
  source 1..75: mol_type = other DNA
cccgctgacacacgaagaactgatgcaccatgtaccggggattttcggggaagataaacacacgtcccgaagcca

SEQ ID NO: 820944 - DNA, 75 bp, synthetic construct
  source 1..75: mol_type = other DNA
atgtctgatgctttaaagatcatcaacaatattcgtactctccgtgctcaggctcgtgaactgacactcgaaacc

SEQ ID NO: 820945 - DNA, 75 bp, synthetic construct
  source 1..75: mol_type = other DNA
ttttgcagcgtatcccgcgcagccactacgtgctggcagttggtcctgttccttatctttattacctccatcaga

SEQ ID NO: 820946 - DNA, 75 bp, synthetic construct
  source 1..75: mol_type = other DNA
tcttaattcgccggtgctggacagtatgcgtattagcgtgaacagtcatatggcgcgttatcagagcggcaaaaa

SEQ ID NO: 820947 - DNA, 75 bp, synthetic construct
  source 1..75: mol_type = other DNA
cctgtattgaaaaagacgcctgcgtactggtcgagcaagatctgaatagtgatggtcaggcggagcggatcctgt

SEQ ID NO: 820948 - DNA, 75 bp, synthetic construct
  source 1..75: mol_type = other DNA
atgtaaatcagatccgccgggagcgcccgctgacacacgaagaactgatgcaccatgtaccggggattttcgggg

SEQ ID NO: 820949 - DNA, 75 bp, synthetic construct
  source 1..75: mol_type = other DNA
gtttgccgccgtcactgttgcaggcgtcggctgatcttggcgctcgtcctcgacaaactttccgctatgtagtgt

SEQ ID NO: 820950 - DNA, 75 bp, synthetic construct
  source 1..75: mol_type = other DNA
tgtcgccagcttgattgatctcggcgatcgttaccgtctgctggttaactgcatcgacacggtgaaaacgccgca

SEQ ID NO: 820951 - DNA, 75 bp, synthetic construct
  source 1..75: mol_type = other DNA
accaccacctttgaagatttgcacggtctgaagcagcttccaggcctggccgtgcagcgtctgatgcagcagggc

SEQ ID NO: 820952 - DNA, 75 bp, synthetic construct
  source 1..75: mol_type = other DNA
ggactttatgaacctgaaccagactgcacatggcggtcgcgagttcggcttcattggcgcgcgtatgcgtcagca

SEQ ID NO: 820953 - DNA, 75 bp, synthetic construct
  source 1..75: mol_type = other DNA
gaatacgccgttctggcctgatgtggagctgtcggagtttcgcagtgtgatgcgcactgacggcacggtgacgca

SEQ ID NO: 820954 - DNA, 75 bp, synthetic construct
  source 1..75: mol_type = other DNA
gccattgtcgccagcctgattgatctcggcgatcgttaccgtctgctggttaactgcatcgacacggtgaaaaca

SEQ ID NO: 820955 - DNA, 75 bp, synthetic construct
  source 1..75: mol_type = other DNA
tggcaggataaacaagcccatgagcgtatcggctcctggatgcgtcaggcggtctctaaacaggatacccgtcat

SEQ ID NO: 820956 - DNA, 75 bp, synthetic construct
  source 1..75: mol_type = other DNA
cagggcggcacctcctttatggaggactacacctatcacttcgagaaaggtaatgacctggtgctcggctcccat

SEQ ID NO: 820957 - DNA, 75 bp, synthetic construct
  source 1..75: mol_type = other DNA
caggtcacccaacatgccgagcacgtcgttaatgcgctgaatacggaagcgaaactgccctgcaaactggtgctg

SEQ ID NO: 820958 - DNA, 75 bp, synthetic construct
  source 1..75: mol_type = other DNA
attgataacgacacacgcctgccagcgtttaaagacgcgctgcgctggaacgaagtgtattacgggtttcgtcgc

SEQ ID NO: 820959 - DNA, 75 bp, synthetic construct
  source 1..75: mol_type = other DNA
caatgacctggtgctcggctcccacatgctggaagtctgcccgtcgatcgccgcagaagagaaaccgatcctcga

SEQ ID NO: 820960 - DNA, 75 bp, synthetic construct
  source 1..75: mol_type = other DNA
caccggaacaggcggaaatcatcagaaacacgccgttctggcctgatgtggacccgtcggagtttcgcagcgtga

SEQ ID NO: 820961 - DNA, 75 bp, synthetic construct
  source 1..75: mol_type = other DNA
ttggcccgctaatgtggtttggcattgtttatttcggctcgctgctaacgctgttatggcagggcttttatacct

SEQ ID NO: 820962 - DNA, 75 bp, synthetic construct
  source 1..75: mol_type = other DNA
cgatggctgcagctttcactctggtgccgattgttcttatcgcactgtatctggcgttcgtgaaacgcatggggg

SEQ ID NO: 820963 - DNA, 75 bp, synthetic construct
  source 1..75: mol_type = other DNA
cggtgtgaagcgaggcgaggaactggcggaagccagcggtgatttatggcgtgacgcccgctgggccatcagccg

SEQ ID NO: 820964 - DNA, 75 bp, synthetic construct
  source 1..75: mol_type = other DNA
aatgaaagcgtttttttatattgcggtaatgttgccgatgtgggcgagctacattgttaaagcctatgcctggac

SEQ ID NO: 820965 - DNA, 75 bp, synthetic construct
  source 1..75: mol_type = other DNA
ttttatcggcaacatggtttactcgcagcaaggcgcgattggcaatatgccgatggcagcagcgttcaccctggt

SEQ ID NO: 820966 - DNA, 75 bp, synthetic construct
  source 1..75: mol_type = other DNA
ggcggcaatacgctgtcaacttccgggctggggcgcttttatctggctgccgttcatgatcctgcccgtgcaggc

SEQ ID NO: 820967 - DNA, 75 bp, synthetic construct
  source 1..75: mol_type = other DNA
cggtgtgaagcggggcgaggaactggcagaagccagcggtgatttatggcgtgacgcccgctgggccatcagccg

SEQ ID NO: 820968 - DNA, 75 bp, synthetic construct
  source 1..75: mol_type = other DNA
atgaagtttgttgcgccagaacaggcaccggaacaggcggaaatcatcagaaatacgccgttctggcctgatgtg

SEQ ID NO: 820969 - DNA, 75 bp, synthetic construct
  source 1..75: mol_type = other DNA
gacctgtcggagtttcgcagtgtcatgcgcactgacggcacggtgactcagccgcgtttaaagcaggttgccctg

SEQ ID NO: 820970 - DNA, 75 bp, synthetic construct
  source 1..75: mol_type = other DNA
gcacgcgccatgctcaacgaacgttaccaagactatgacgccacggcgtctggtgtgaagcggggcgaggaactg

SEQ ID NO: 820971 - DNA, 75 bp, synthetic construct
  source 1..75: mol_type = other DNA
agctgtatgagtttcgcagacgccagctgatgctgggatatgcctcgctggcagaggttccggcagaacatctgg

SEQ ID NO: 820972 - DNA, 75 bp, synthetic construct
  source 1..75: mol_type = other DNA
gaatacgccgttctggcctgatgtggacttgtcggagtttcgcagtgtcatgcgtactgacggcacggtgacgca

SEQ ID NO: 820973 - DNA, 75 bp, synthetic construct
  source 1..75: mol_type = other DNA
gctggttctggaaatgacaacgcacagcgtggccgtgaaaggcatatacaccgcagaagactttatcggtgaata

SEQ ID NO: 820974 - DNA, 75 bp, synthetic construct
  source 1..75: mol_type = other DNA
agtgatgccagtacgccgccgcgttatatgcacatcctgtgtgacctggtctgtaaagccttcggtgtcgagtgt

SEQ ID NO: 820975 - DNA, 75 bp, synthetic construct
  source 1..75: mol_type = other DNA
gcccggaaattgcggcctacgcgtttgatgtgctttcccgtcagatgatggcagagcgcaagaaatatcaggata

SEQ ID NO: 820976 - DNA, 75 bp, synthetic construct
  source 1..75: mol_type = other DNA
ccaacaatcaatatcatcaataagttacgtgatgaaggtttccagccattctttgcctgtcagagtcgggttcgt

SEQ ID NO: 820977 - DNA, 75 bp, synthetic construct
  source 1..75: mol_type = other DNA
gttaccgcgtggacgtgaaaggtgatggtgatggctttggtttatttcacatcaacggcatcgacagcaccacca

SEQ ID NO: 820978 - DNA, 75 bp, synthetic construct
  source 1..75: mol_type = other DNA
ggtgaataccagcgccttctcgtgctgtaccgcgcggcgtttcaggtggcaactgccggggagtgcgacgcatga

SEQ ID NO: 820979 - DNA, 75 bp, synthetic construct
  source 1..75: mol_type = other DNA
gataagtatgaacagtattatggtggtatttatcatgatccagtttgtaatggcagcaccctacaaaaaaatgtc

SEQ ID NO: 820980 - DNA, 75 bp, synthetic construct
  source 1..75: mol_type = other DNA
gtgtagattatgaagggataaatgaaagaattgatactcatgcatgcctggataaatatgagcaatactataatg

SEQ ID NO: 820981 - DNA, 75 bp, synthetic construct
  source 1..75: mol_type = other DNA
gggcaaaaaatttgggagagtggagatattaatatcacggtttattgtgacaatgcaccaggatggacaacagac

SEQ ID NO: 820982 - DNA, 75 bp, synthetic construct
  source 1..75: mol_type = other DNA
ggcgcgtgctggcacctatcaatgatttcattaacacactgaacgctttctttagtgctggtggtaaaggagcga

SEQ ID NO: 820983 - DNA, 75 bp, synthetic construct
  source 1..75: mol_type = other DNA
attcattcatcagcaatttgcgcagcagctgaatattgaacatccctatgggcgcgtgttggcacccattaatga

SEQ ID NO: 820984 - DNA, 75 bp, synthetic construct
  source 1..75: mol_type = other DNA
atccgatagcccacagcaaatcgccattcattcatcagcaatttgctcagcaactgaatattgaacatccctatg

SEQ ID NO: 820985 - DNA, 75 bp, synthetic construct
  source 1..75: mol_type = other DNA
tgggtggttacggtcgcgaaaccgttcagggcaaacaaacaggctgaatgcgattatctgttcagtgctctgcgt

SEQ ID NO: 820986 - DNA, 75 bp, synthetic construct
  source 1..75: mol_type = other DNA
ttccggcagtgaaaaaggcgctggcaaatcccaaaaataaccgtgacttcagaggactctatctcaaggctctgg

SEQ ID NO: 820987 - DNA, 75 bp, synthetic construct
  source 1..75: mol_type = other DNA
cgcacgcaactggcagaaagcggcattcagttggggcaaagcgatatcagcggcgagagttttagcaaccagcaa

SEQ ID NO: 820988 - DNA, 75 bp, synthetic construct
  source 1..75: mol_type = other DNA
tgcgacccagttaaaacaacatggggtcgagttggcgtatgcacaggcgatcatggggcatagttcagggtctat

SEQ ID NO: 820989 - DNA, 75 bp, synthetic construct
  source 1..75: mol_type = other DNA
gttaagcgcgttctgattaacgacaacacgcttccggcagtgaaaaaggcactggcaaatcttaaagataatcgt

SEQ ID NO: 820990 - DNA, 75 bp, synthetic construct
  source 1..75: mol_type = other DNA
agtgacgagcaacatttatttggcagagctgcaatgatggtcaggtaggaagatgaaaataaaacgccagtgacg

SEQ ID NO: 820991 - DNA, 75 bp, synthetic construct
  source 1..75: mol_type = other DNA
agtgacgagcaacatttatttggcagagctgcattgatgggcaggtaggaagatgaaaataaaacgccagtgacg

SEQ ID NO: 820992 - DNA, 75 bp, synthetic construct
  source 1..75: mol_type = other DNA
gagcaggtgagcaaatggtttaacagaacgttgctacctaaagtcctcgctgaccgtagcggcttagcgttccac

SEQ ID NO: 820993 - DNA, 75 bp, synthetic construct
  source 1..75: mol_type = other DNA
tgccaaagcgcttggcatcacccacgtcatcagcagcgatttaggtcgcacccggcgtacggcggaaatcatcgc

SEQ ID NO: 820994 - DNA, 75 bp, synthetic construct
  source 1..75: mol_type = other DNA
atgcgattatctgttcagtgcactacgccgactggaaatccgggccgtgacggagaacggtacagatgctgacag

SEQ ID NO: 820995 - DNA, 75 bp, synthetic construct
  source 1..75: mol_type = other DNA
tattcgaccatctgggtctcaatgcagacgctaacagggctgacatgcttaaggtccgtgatgtgctccagcagt

SEQ ID NO: 820996 - DNA, 75 bp, synthetic construct
  source 1..75: mol_type = other DNA
ccgtttcgaaagcggaaatgaaattattcgaatcatcagtgcacgaaaagcagatcgtaaagagaggaatcgcta

SEQ ID NO: 820997 - DNA, 75 bp, synthetic construct
  source 1..75: mol_type = other DNA
aaccgcaagcaacgctttaagtctatgccgctgtctgacctgctgaaccgggagtctaagactgactgtttggat

SEQ ID NO: 820998 - DNA, 75 bp, synthetic construct
  source 1..75: mol_type = other DNA
gcgcatttatccagagagccagatagtcaactttgggcaaatcgctgcaaactctttctcaacatttccccccaa

SEQ ID NO: 820999 - DNA, 75 bp, synthetic construct
  source 1..75: mol_type = other DNA
ctttcgcaagcagagatgaagcggcgttttgttatcaagaatctctttttctataaagggctttcgttacgtgat

SEQ ID NO: 821000 - DNA, 75 bp, synthetic construct
  source 1..75: mol_type = other DNA
tttaaggcaattgaaacatcgccttccgataccaccgccgaaaaggtcgcgttattgcgccagcttgcggtaaac

SEQ ID NO: 821001 - DNA, 75 bp, synthetic construct
  source 1..75: mol_type = other DNA
gagtacctgaaacgtaagccggggcgctttccggcgggcaacgtcagcgagtggcgcttgggcgggcgattgtac

SEQ ID NO: 821002 - DNA, 75 bp, synthetic construct
  source 1..75: mol_type = other DNA
gatgacggttcccgtctggcgttttcgtgggtgccggttgtcaaaaaataccagcgcgatcgggcgaaagataaa

SEQ ID NO: 821003 - DNA, 75 bp, synthetic construct
  source 1..75: mol_type = other DNA
agatgttaatacactaagtgaccgcaccaacaccatttcatttttaaatgatgctgagcagtatgataatgagca

SEQ ID NO: 821004 - DNA, 75 bp, synthetic construct
  source 1..75: mol_type = other DNA
gcgctatgccgttgatgctgaccggctgttccacgatgtcgtcagttaactggtcggccgctaacccgtggaact

SEQ ID NO: 821005 - DNA, 75 bp, synthetic construct
  source 1..75: mol_type = other DNA
ctgaacttgccagaggtaaaatccagatctttagtatcgataaattgatcaccatgatggctcatgcaggattgc

SEQ ID NO: 821006 - DNA, 75 bp, synthetic construct
  source 1..75: mol_type = other DNA
tcaccctgccgtttgcgggcctgaatgcgatttctcgccatatctctgccgccgggttgcttttgacgctggcct

SEQ ID NO: 821007 - DNA, 75 bp, synthetic construct
  source 1..75: mol_type = other DNA
ttagccgaaaatgtgttaattgcaccaggttctggcaaaccggatgcggcattctggtcggcattaatcaaagaa

SEQ ID NO: 821008 - DNA, 75 bp, synthetic construct
  source 1..75: mol_type = other DNA
ccagcacacacttattcggggagtttcagctttggattgcgagaatggacgattacaaaactttcccggcctttc

SEQ ID NO: 821009 - DNA, 75 bp, synthetic construct
  source 1..75: mol_type = other DNA
gggatcgctggtatcaaatatgtgtgctggagggaaagacagagaattacatgtgcactggagggaaaaacggat

SEQ ID NO: 821010 - DNA, 75 bp, synthetic construct
  source 1..75: mol_type = other DNA
atgaaaattgaaacctttgatagtgtgtgggatgcagtgagtgccccccctgaacaagcggaaaatatgcggatc

SEQ ID NO: 821011 - DNA, 75 bp, synthetic construct
  source 1..75: mol_type = other DNA
tgttcccgtcggttgttgtttgcgccgaaggtgtcccgcctgactggcgaaatgaagctggcccttcggaagggg

SEQ ID NO: 821012 - DNA, 75 bp, synthetic construct
  source 1..75: mol_type = other DNA
aatatattgcaattcgatggttcacaaggagcaaacaccgataatagagccaaaaatttacacgctaatattact

SEQ ID NO: 821013 - DNA, 75 bp, synthetic construct
  source 1..75: mol_type = other DNA
tcaaactgtgctgttagatccaacgcagtttgatgccatcgttaccgccatgcttccagctctgcagacaatgat

SEQ ID NO: 821014 - DNA, 75 bp, synthetic construct
  source 1..75: mol_type = other DNA
acgtcttgacgaattgcatatccgcgtggattttaactgtgcccctaggaactatattctttcagcgagaagtca

SEQ ID NO: 821015 - DNA, 75 bp, synthetic construct
  source 1..75: mol_type = other DNA
tcccatcgttctgaacaacccgtatttaatatttggtgtgacttataacggtcaggactatgaaggaaatggtca

SEQ ID NO: 821016 - DNA, 75 bp, synthetic construct
  source 1..75: mol_type = other DNA
ttaacatttggcgtgacttataatggtgtagattatgaagggacaaatgaaaaaattgatactcatgcgtgcctg

SEQ ID NO: 821017 - DNA, 75 bp, synthetic construct
  source 1..75: mol_type = other DNA
aggagatcagacggtgaactttggcatagtcaacgtgctacaattcgatggcgaaggaggggcaaacatgtcctc

SEQ ID NO: 821018 - DNA, 75 bp, synthetic construct
  source 1..75: mol_type = other DNA
atttataataatgtattgccaattttgaaagtaaaattaaatccttcacagttggatgttactggctttgcattt

SEQ ID NO: 821019 - DNA, 75 bp, synthetic construct
  source 1..75: mol_type = other DNA
gagctgaaaaaactgatcagacaactggaaaaactgacgttgccagccgataactcgcacatgttgatgagagaa

SEQ ID NO: 821020 - DNA, 75 bp, synthetic construct
  source 1..75: mol_type = other DNA
tgatagcacacaaacaatttgccaggattatgcgaaaaaatatactaacgtagtttactatcagcaaggtaataa

SEQ ID NO: 821021 - DNA, 75 bp, synthetic construct
  source 1..75: mol_type = other DNA
gtccagcggagaaattcgcccagcagatgtatgagacgcgctatgccgatgaccgcacgaaattaccgcaagaaa

SEQ ID NO: 821022 - DNA, 75 bp, synthetic construct
  source 1..75: mol_type = other DNA
gtcaggataaaaactataacggcaaattaccaactaaagaattagtgaaagctataaataaactcaaaaagcgat

SEQ ID NO: 821023 - DNA, 75 bp, synthetic construct
  source 1..75: mol_type = other DNA
gaccgcacgaaattactgcaagaaaaacagattgcacagtttactgccgcagatgcgctggctgccgatcgccag

SEQ ID NO: 821024 - DNA, 75 bp, synthetic construct
  source 1..75: mol_type = other DNA
aaccaggcactttgtaccggggcagtggacgtcgtcattatgggcagttttaaagtttttatatgcggcaaaccg

SEQ ID NO: 821025 - DNA, 75 bp, synthetic construct
  source 1..75: mol_type = other DNA
atgtatgaagaattttaagacggatatctatttcgtctccacgtttgaaccgtcaacaaaatcggtcgatttgct

SEQ ID NO: 821026 - DNA, 75 bp, synthetic construct
  source 1..75: mol_type = other DNA
gtgccttcaaaatttgaagatggatatctattacgtctcagcgtatacaccatcaacaaaatcggtagatttgct

SEQ ID NO: 821027 - DNA, 75 bp, synthetic construct
  source 1..75: mol_type = other DNA
gctggaaacgggcgtttttggcggggtcgtgattggtctggtcacctgcgcactgcataaccgtttcaataaagt

SEQ ID NO: 821028 - DNA, 75 bp, synthetic construct
  source 1..75: mol_type = other DNA
ccgtgaagccttttcccgttatggactcccgttgccggtcagcccgtccgggcgtgaactgcgtggctatgatgc

SEQ ID NO: 821029 - DNA, 75 bp, synthetic construct
  source 1..75: mol_type = other DNA
ttcatgtcgctcgtcgtgatctacaactcgacgatgacacttaccgcgcctttctggtgcagtgcacgggcaaga

SEQ ID NO: 821030 - DNA, 75 bp, synthetic construct
  source 1..75: mol_type = other DNA
agagcttgtccagattaatctggatgccagcaatattcatttgcaggacatttttgaacggtctaccggtttgtg

SEQ ID NO: 821031 - DNA, 75 bp, synthetic construct
  source 1..75: mol_type = other DNA
gaagtacgttatggggttcacgtggaactagacgaagctgttaatattaattccttccgcatttttaaggatgat

SEQ ID NO: 821032 - DNA, 75 bp, synthetic construct
  source 1..75: mol_type = other DNA
gaggtatcgccgcgctattggttgtactttaccattatcgtggtgagttaaatagtatatatgctcagaagggtc

SEQ ID NO: 821033 - DNA, 75 bp, synthetic construct
  source 1..75: mol_type = other DNA
aagaggtggactgttgcgccacgcgcctgcgcgtgacggttaaagagagcagtaaggtagatgaagctgcgctga

SEQ ID NO: 821034 - DNA, 75 bp, synthetic construct
  source 1..75: mol_type = other DNA
gactttgacctttctgtcgcctccgtaattgcctgtgcgggtgtcaccacggcggtggttatcaacctgaaccgc

SEQ ID NO: 821035 - DNA, 75 bp, synthetic construct
  source 1..75: mol_type = other DNA
aaatacgttgaacgcctgacggccagacgtaatggcggtcagggtgtttccacgctggcctggtgtcacggggaa

SEQ ID NO: 821036 - DNA, 75 bp, synthetic construct
  source 1..75: mol_type = other DNA
tgttgatgacctgggttacccggtcaccggcgatgtcattcgcattgtcccggtgattatcgggagcaaaaaggc

SEQ ID NO: 821037 - DNA, 75 bp, synthetic construct
  source 1..75: mol_type = other DNA
aaagcgaccagtaaaacatctctggattttagctcatatattattgaggctataagagagaagcttgaacgtgat

SEQ ID NO: 821038 - DNA, 75 bp, synthetic construct
  source 1..75: mol_type = other DNA
gccaggacgaaggctaagaatcttaaggccataccgctgtcgtattttgaagcacatgcggaacttaaagcgacc

SEQ ID NO: 821039 - DNA, 75 bp, synthetic construct
  source 1..75: mol_type = other DNA
cggcgggatattacgcctatttgtggacgcaaatgctggcagacgatggttatcaatggtttgtcgagcagggcg

SEQ ID NO: 821040 - DNA, 75 bp, synthetic construct
  source 1..75: mol_type = other DNA
tgttaggaaagacattcggtagaacccatcaacgactgatagcgcgaactggtgaagctgctattgctttaagta

SEQ ID NO: 821041 - DNA, 75 bp, synthetic construct
  source 1..75: mol_type = other DNA
gggctatccggtaccgcttctttatggtcgccgacgcataggcggcgcaattatttcagccgggatttacgttgg

SEQ ID NO: 821042 - DNA, 75 bp, synthetic construct
  source 1..75: mol_type = other DNA
aaatcagttgccgcgagctgacggtaacgcaactggaacaggtgctcgatgccatgaaagaacgcggctttaaga

SEQ ID NO: 821043 - DNA, 75 bp, synthetic construct
  source 1..75: mol_type = other DNA
taatccatgtagcccgtcgtaatctacaacttgacgacgacacctaccgtgcctttctgatgcagaacacgggca

SEQ ID NO: 821044 - DNA, 75 bp, synthetic construct
  source 1..75: mol_type = other DNA
atgagtcgcacatccctgattaaattaattcatgttgcccgccgggagttgcacctcgacgatgacacttaccgc

SEQ ID NO: 821045 - DNA, 75 bp, synthetic construct
  source 1..75: mol_type = other DNA
agctcatgcggaacttaaagcgaccagtaaaacatctctggattttagctcgtatattattgaggctataagaga

SEQ ID NO: 821046 - DNA, 75 bp, synthetic construct
  source 1..75: mol_type = other DNA
catctcctgttgtaatgattggatatcctcatggttatcatgacacgactcactaccttccaatatggaaaacag

SEQ ID NO: 821047 - DNA, 75 bp, synthetic construct
  source 1..75: mol_type = other DNA
gcattacaagcgaatctgaaattaggtaatggtcttcaattaagcgaagatggtaagagtgtaatattcaaattt

SEQ ID NO: 821048 - DNA, 75 bp, synthetic construct
  source 1..75: mol_type = other DNA
atcgcagtcagacaccatcactgggctatcgcaggcaaaagatagtaatggaacaaaaggctatgtttttgtagg

SEQ ID NO: 821049 - DNA, 75 bp, synthetic construct
  source 1..75: mol_type = other DNA
gacgatccctcaggcatttatgagtaatcgcgcgcgtggttatattcctcctgagttatgggatcccggtattaa

SEQ ID NO: 821050 - DNA, 75 bp, synthetic construct
  source 1..75: mol_type = other DNA
ggcgcacatcaacactgtatttgagtggtagccatcaaacttattggggaacgagtaatgtcgatgagcaattcc

SEQ ID NO: 821051 - DNA, 75 bp, synthetic construct
  source 1..75: mol_type = other DNA
tattcgcggcaacggcgttcaggtgatttatggccctcatgtcaccatcattaaaaacgaagtcgaagagatttt

SEQ ID NO: 821052 - DNA, 75 bp, synthetic construct
  source 1..75: mol_type = other DNA
ctctttttgttttatgagttagtgagtagggataggtttattgttgcattttctatcgttacttggggagttttc

SEQ ID NO: 821053 - DNA, 75 bp, synthetic construct
  source 1..75: mol_type = other DNA
acatataccgttaactggcatgtcgtttcggtagacgggcataagaccaaagggcaatacacctttagcgtgaaa

SEQ ID NO: 821054 - DNA, 75 bp, synthetic construct
  source 1..75: mol_type = other DNA
taacgaattatcgaattttaagtttaatgagaacagcaaagacgagtttatggccggcatccaggcggaagtctg

SEQ ID NO: 821055 - DNA, 75 bp, synthetic construct
  source 1..75: mol_type = other DNA
gatattaagcagctctattacggagtcagcggtggggtattggctcatgccaatggcgtaacgctggggcagccg

SEQ ID NO: 821056 - DNA, 75 bp, synthetic construct
  source 1..75: mol_type = other DNA
acccggccgatttggtgcgcccgtcaactatcgctaagtttgagccgcgagatcgagcactgacgcccgaggaaa

SEQ ID NO: 821057 - DNA, 75 bp, synthetic construct
  source 1..75: mol_type = other DNA
aaagcgctggcggggcaaatgcctgccgattatcagactatcgcctcagcaatcattacgctggcaaacgatcct

SEQ ID NO: 821058 - DNA, 75 bp, synthetic construct
  source 1..75: mol_type = other DNA
ttcaacaaccaatggtgggatctcagcgttcaggcgacgatcgccgggaagttgtgggatcatctggaagagcga

SEQ ID NO: 821059 - DNA, 75 bp, synthetic construct
  source 1..75: mol_type = other DNA
ttccacgataacgatggccatgaatggatactggagtgtgcatctcaatctgaaattctgttttttattgttatt

SEQ ID NO: 821060 - DNA, 75 bp, synthetic construct
  source 1..75: mol_type = other DNA
tgattttatccttccttcgcggtacgattccgatgcgccaatgagtagcgctactttaaaccgggttttgacact

SEQ ID NO: 821061 - DNA, 75 bp, synthetic construct
  source 1..75: mol_type = other DNA
ctcaagccaaaggacaagctctacaaagtgaatgaccgtgacggcctctacgtggccatcacccctgcgggttcg

SEQ ID NO: 821062 - DNA, 75 bp, synthetic construct
  source 1..75: mol_type = other DNA
tggtggcgatgtccctgtggcataaccatccgcagaagacgcagatgccttccatgaatgatgtagtggcacact

SEQ ID NO: 821063 - DNA, 75 bp, synthetic construct
  source 1..75: mol_type = other DNA
gagaatgcccactgtgttgccgattacaagctaccgccagagagtcagcaccagttattaacccagctatcagcc

SEQ ID NO: 821064 - DNA, 75 bp, synthetic construct
  source 1..75: mol_type = other DNA
acgctgacccgtaataataagccactgccgtttggcgcgatggtcacatcggacagtagccagagtagcggcatt

SEQ ID NO: 821065 - DNA, 75 bp, synthetic construct
  source 1..75: mol_type = other DNA
gtggtgttgtgcctgtccgggatgatcgaagctgttcgtccggatactgatattactgaagtggcgaaaaataac

SEQ ID NO: 821066 - DNA, 75 bp, synthetic construct
  source 1..75: mol_type = other DNA
cgatgtccctgtggcataaccatccacagaaaacgcagtcaccgtcaatgaatgaggccgtgatgaagatagagc

SEQ ID NO: 821067 - DNA, 75 bp, synthetic construct
  source 1..75: mol_type = other DNA
atggcgctgccagtgaacaaacgcgttctcaaaattctgtttattctctttgttgttgccttctgcgtttattta

SEQ ID NO: 821068 - DNA, 75 bp, synthetic construct
  source 1..75: mol_type = other DNA
cagcaatattaggggcgtggtatacgctgggctgagtcgtgatattagaaacgaattggcctatgtgattaatgg

SEQ ID NO: 821069 - DNA, 75 bp, synthetic construct
  source 1..75: mol_type = other DNA
gcagttgcgccagctgttacacaaaccgcacggcatctttctggtgacggggccgacgggttccggcaaaagcac

SEQ ID NO: 821070 - DNA, 75 bp, synthetic construct
  source 1..75: mol_type = other DNA
aaaccacgctggttagtcttcaataagattgacctgctggataaagcggaagccgaagagaaagcgaaagcgatc

SEQ ID NO: 821071 - DNA, 75 bp, synthetic construct
  source 1..75: mol_type = other DNA
aatattatctgatctctgcggcgagcggactgggcgtgaaagatctctgctgggatgtgatgacctttatcattg

SEQ ID NO: 821072 - DNA, 75 bp, synthetic construct
  source 1..75: mol_type = other DNA
atctggaacgttgccgcgtattgctgcaccttatcgatatcgatccgattgacggcaccgatccggttgagaacg

SEQ ID NO: 821073 - DNA, 75 bp, synthetic construct
  source 1..75: mol_type = other DNA
tgcggcaaatcgacgaggccgaatttgaacagcggctgaatgcggtctggcagcgggactcttccgaggctcgcc

SEQ ID NO: 821074 - DNA, 75 bp, synthetic construct
  source 1..75: mol_type = other DNA
tgcggcaaatcgacggggccgaatttgaacagcgactgaatgcggtctggcagcgagactcttccgaagctcgcc

SEQ ID NO: 821075 - DNA, 75 bp, synthetic construct
  source 1..75: mol_type = other DNA
atggtgcctgtagcacaggaaaccaccgctaacaccgtgcgtctgccctacagtttcagccgtcggtttagcctg

SEQ ID NO: 821076 - DNA, 75 bp, synthetic construct
  source 1..75: mol_type = other DNA
tgccactgacgaagaaaaacgcctgctggggattaccgatgcgcgaaccgtcactctgtaccatccgcagggctg

SEQ ID NO: 821077 - DNA, 75 bp, synthetic construct
  source 1..75: mol_type = other DNA
cgactgccgccagcccgcgcctgccactgacgaagaaaaacgcctgctgggaattaccgacgcccgtaccgtcac

SEQ ID NO: 821078 - DNA, 75 bp, synthetic construct
  source 1..75: mol_type = other DNA
attgacgtccgtgtatctaccatgccttctgcctggggggaacgcgtggtgctgcgactgctggacaaaaaccag

SEQ ID NO: 821079 - DNA, 75 bp, synthetic construct
  source 1..75: mol_type = other DNA
cgcgactgcaccggtaagcgtggtaaagacgtgacgattaaagtaccagtaggtacgcgtgttatcgatcagggc

SEQ ID NO: 821080 - DNA, 75 bp, synthetic construct
  source 1..75: mol_type = other DNA
atgagcagaattatcaccaccaccgtgtatacgctggatgagctttcctgcccggcacaggaaaaagcccgcgac

SEQ ID NO: 821081 - DNA, 75 bp, synthetic construct
  source 1..75: mol_type = other DNA
ctggcagccagcgacaccccggaaaatcagggaatatgccccgcagaaccgtgagcttcatcgtatcgcggatgc

SEQ ID NO: 821082 - DNA, 75 bp, synthetic construct
  source 1..75: mol_type = other DNA
gagccgtgcatctggttcagcggattctgcggccagggggacggagcctgttttgaaggacgctggcactggcag

SEQ ID NO: 821083 - DNA, 75 bp, synthetic construct
  source 1..75: mol_type = other DNA
gtgaacttcatcgtatcgcggatgccctgcaggcggtccagaaacgtaacttctggcagttacaggctgaaatca

SEQ ID NO: 821084 - DNA, 75 bp, synthetic construct
  source 1..75: mol_type = other DNA
agaaaatgttttgggctacttttttcgcagcagtcggcggcgtaggaagtatgattgcagctataatagggcttc

SEQ ID NO: 821085 - DNA, 75 bp, synthetic construct
  source 1..75: mol_type = other DNA
agcctgttttgaagggcgctggcactggcagccagcgacaccccggaaaatcagggaatatgcccctcaggaccg

SEQ ID NO: 821086 - DNA, 75 bp, synthetic construct
  source 1..75: mol_type = other DNA
tcaaccaggtttatgttgttctgaaagtggagaaagtcacccacacctcagatgcgacactgcatgttaacggtg

SEQ ID NO: 821087 - DNA, 75 bp, synthetic construct
  source 1..75: mol_type = other DNA
tgtatacactgaatgagctatcctccaccgcacaggaaaaagcccgcgacgggtaccgtcagcatcatgctgaca

SEQ ID NO: 821088 - DNA, 75 bp, synthetic construct
  source 1..75: mol_type = other DNA
gtgcttaaaaccttccgtgtatttgcccgagctgttaacccacgaggccacacaattggtatcgctcagaacgtg

SEQ ID NO: 821089 - DNA, 75 bp, synthetic construct
  source 1..75: mol_type = other DNA
gtcaccggggacgttactgccatccgtacagtatggatatcacggttacccggaacagtccggctggtcaggcaa

SEQ ID NO: 821090 - DNA, 75 bp, synthetic construct
  source 1..75: mol_type = other DNA
cagccctggcaagttttaccgtacaggcacagcccccctcacagaccgtagaacaaacagtccggcagatttatc

SEQ ID NO: 821091 - DNA, 75 bp, synthetic construct
  source 1..75: mol_type = other DNA
agaacagccggaagcctttgttgccgaactctttgaacatattgctgattatagctggccgtggacgtgggtggt

SEQ ID NO: 821092 - DNA, 75 bp, synthetic construct
  source 1..75: mol_type = other DNA
accacgcagtttgagcgtaacgatctcgaccagtacggcaaccactccaaccgtggcattatcgccatgaaacag

SEQ ID NO: 821093 - DNA, 75 bp, synthetic construct
  source 1..75: mol_type = other DNA
atcttgttttattcaaccacccaatagcagcaacttaaccaccggaacggctattttaccgtgtattagccaaaa

SEQ ID NO: 821094 - DNA, 75 bp, synthetic construct
  source 1..75: mol_type = other DNA
atggaggcgtcactgcgcgccagttatcagcataataccgagaacggtcgtctctatctctccggtacatcacag

SEQ ID NO: 821095 - DNA, 75 bp, synthetic construct
  source 1..75: mol_type = other DNA
tagcgtaaaagatgaaaccagccacaaagaattaggactggttgctgatggcggctttgtatacctcaacggcat

SEQ ID NO: 821096 - DNA, 75 bp, synthetic construct
  source 1..75: mol_type = other DNA
caaaacctgttctcatagataaaggaaaacagacgtctggagcattcagcgccatatcaaaccttctaatacaat

SEQ ID NO: 821097 - DNA, 75 bp, synthetic construct
  source 1..75: mol_type = other DNA
tcaggaaaatagtactctgcatttaacctggggtgataatacctgtgaagtcacgccgccaaaccaaagtaacat

SEQ ID NO: 821098 - DNA, 75 bp, synthetic construct
  source 1..75: mol_type = other DNA
aaatcaactctaaccgtaccgttaccaacgggctgggcatcgccgtgataccttcgttatcgaactacaccacct

SEQ ID NO: 821099 - DNA, 75 bp, synthetic construct
  source 1..75: mol_type = other DNA
ttcttctatgccgcgctgcaatccattccccgttcgttgatcgaagccgcagccatcgacggtgcaggcccgatt

SEQ ID NO: 821100 - DNA, 75 bp, synthetic construct
  source 1..75: mol_type = other DNA
cagcgccgtgggctcacatactccgtatttaagggtaaaaaaaacatcggtgtggatgacctcggtttcccggtt

SEQ ID NO: 821101 - DNA, 75 bp, synthetic construct
  source 1..75: mol_type = other DNA
tgcaaagcacactgccgtatctggctccccgttttgatcaaattgcagatcatcactatcgtccggctttcgacg

SEQ ID NO: 821102 - DNA, 75 bp, synthetic construct
  source 1..75: mol_type = other DNA
aacttactttacgctggggtgacaaatcttgctttattcaaccccccaagagcagcaacttaaccaccggaacgg

SEQ ID NO: 821103 - DNA, 75 bp, synthetic construct
  source 1..75: mol_type = other DNA
atgaaagcgtcactacgcgccagttatcagcataataccgagaacggtcgactctacctctccggtacatcacag

SEQ ID NO: 821104 - DNA, 75 bp, synthetic construct
  source 1..75: mol_type = other DNA
agaaaacgttaccgtgaggggcaggaggatcaactgggtgcgctggggcttgtcactaacgcagttgtattgtgg

SEQ ID NO: 821105 - DNA, 75 bp, synthetic construct
  source 1..75: mol_type = other DNA
ggctgcgctgcaaaaatcggggcttaaaccgtcccagctggagttagaaattaccgaaaacgtgacgatttccaa

SEQ ID NO: 821106 - DNA, 75 bp, synthetic construct
  source 1..75: mol_type = other DNA
gtgctgtggggctccgatttgctgaaaaaccagcaggcgaactggtggtgcccggatcacgatgtttatgaatat

SEQ ID NO: 821107 - DNA, 75 bp, synthetic construct
  source 1..75: mol_type = other DNA
ataaatatccgtcgaaaatgatcgccggattgccggatcacgtacacaacgcggcgcgtattcgttatccgatgg

SEQ ID NO: 821108 - DNA, 75 bp, synthetic construct
  source 1..75: mol_type = other DNA
tcgaaccggggaaagtgatcaactggaacggtaaatcggtaaaactgccgccgctgaaaatgtgtatttttgccg

SEQ ID NO: 821109 - DNA, 75 bp, synthetic construct
  source 1..75: mol_type = other DNA
tcacgaaggggcatggtacgatccggacaaaggcggcgagcctggtgcgctgtgcaaatacggtaaccccaacgt

SEQ ID NO: 821110 - DNA, 75 bp, synthetic construct
  source 1..75: mol_type = other DNA
cagcgtttgatgacttctggaataacaaagagtacgtcgagtttgatcatccgcagatgtttgttcgccaccagg

SEQ ID NO: 821111 - DNA, 75 bp, synthetic construct
  source 1..75: mol_type = other DNA
gctggtgttgcagaacagcaaaatcattgtcatgtggggcatcgacctggtgaagaatcagcaggttaatttccg

SEQ ID NO: 821112 - DNA, 75 bp, synthetic construct
  source 1..75: mol_type = other DNA
aagcggaataagacaaccattaactactgacactataaataacgatcctgctatgttgaaggcgctggataacat

SEQ ID NO: 821113 - DNA, 75 bp, synthetic construct
  source 1..75: mol_type = other DNA
ccacagcaggagcaggctctagcaatcaaccaggctatggcgggcttttcgtctgcagcgccagcaccgaaaccc

SEQ ID NO: 821114 - DNA, 75 bp, synthetic construct
  source 1..75: mol_type = other DNA
cgccagtagttacctctggaaaacgaactatcacggcaccaagtgatgtgcagatttatgacaacggctacaagg

SEQ ID NO: 821115 - DNA, 75 bp, synthetic construct
  source 1..75: mol_type = other DNA
aattgatggtgaagataagggggtgcttggctctttgtttgactcgtcattaacaggtctgaaacgtattagctc

SEQ ID NO: 821116 - DNA, 75 bp, synthetic construct
  source 1..75: mol_type = other DNA
cgctttccgaaaaagcgaaaggaatggatcaggctcttactgaaaagatatccagcttaaccggtaaatcttttg

SEQ ID NO: 821117 - DNA, 75 bp, synthetic construct
  source 1..75: mol_type = other DNA
gttccattgctccaaagattggctgtacgccagagactctgcgtgtctgggttcgccagtatgagcgggataccg

SEQ ID NO: 821118 - DNA, 75 bp, synthetic construct
  source 1..75: mol_type = other DNA
gttccattgctccaaagaatggctgtacgccagagactctgcgtgtctgggttcgccagaatgagcgggataccg

SEQ ID NO: 821119 - DNA, 75 bp, synthetic construct
  source 1..75: mol_type = other DNA
atgtaccgactttattgctggtcagaacgactggagattggctgtacgccggagactctgcgtgtctgggttcgc

SEQ ID NO: 821120 - DNA, 75 bp, synthetic construct
  source 1..75: mol_type = other DNA
gttccattgctccaaagactggctgtacgcccgagactctgcgtgtctgggttcgccagaatgagcgggataccg

SEQ ID NO: 821121 - DNA, 75 bp, synthetic construct
  source 1..75: mol_type = other DNA
gttccattgctccaaagactggctgtacgccagagactctgcgtgtctgggttcgccagcatgagcgggataccg

SEQ ID NO: 821122 - DNA, 75 bp, synthetic construct
  source 1..75: mol_type = other DNA
gttccattgctccaaagattggctgtacgcctgagactctgcgtgtctgggttcgccagaatgagcgggataccg

SEQ ID NO: 821123 - DNA, 75 bp, synthetic construct
  source 1..75: mol_type = other DNA
ccgagcggtgcgatgcataaacgtgaagatggttttgttgtggtcgatgaagatgtgtgcattggctgccgctac

SEQ ID NO: 821124 - DNA, 75 bp, synthetic construct
  source 1..75: mol_type = other DNA
gggggcggtgatggtgggctcaccagcgctgaacgtcagcgtctgaaagagctggaacgtgaaaatcgtgaactg

SEQ ID NO: 821125 - DNA, 75 bp, synthetic construct
  source 1..75: mol_type = other DNA
atttgttccattgccccaaagattggctgtacaccggagactctgcgtgtctgggtacgccagcatgagcgggat

SEQ ID NO: 821126 - DNA, 75 bp, synthetic construct
  source 1..75: mol_type = other DNA
taatgccgctgctggataagctgcgtgagcagtacggggtcggaccggtatgcagtgaactgcatattgccccgt

SEQ ID NO: 821127 - DNA, 75 bp, synthetic construct
  source 1..75: mol_type = other DNA
gtcagcgtctgaaagagctggaacgtgaaaatcgtgaactgcgccgcagtaacgatatccttcgccaggcttccg

SEQ ID NO: 821128 - DNA, 75 bp, synthetic construct
  source 1..75: mol_type = other DNA
ggggcggtgatggtggactcaccaccgctgaacgtcagcgtctgaaagagctggaacgtgaaaatcgtgaactgc

SEQ ID NO: 821129 - DNA, 75 bp, synthetic construct
  source 1..75: mol_type = other DNA
gttccattgctccaaagagtggctgtacgccagagactctgcgtgtctgggttcgccaggatgagcgggataccg

SEQ ID NO: 821130 - DNA, 75 bp, synthetic construct
  source 1..75: mol_type = other DNA
gtttcattgctccaaagattggctgtacgccagagactctgcgtgtctgggttcgccagcatgagcgggataccg

SEQ ID NO: 821131 - DNA, 75 bp, synthetic construct
  source 1..75: mol_type = other DNA
tacgccggagactctgcgtgtctgggttcgccagcatgagcgggataccgggggggtgatggagggctcaccacc

SEQ ID NO: 821132 - DNA, 75 bp, synthetic construct
  source 1..75: mol_type = other DNA
gtttcttggtgataacgctgtaagaaccctgacgggtttgatagagaaacagcatcagcaagcgcaggtaatttc

SEQ ID NO: 821133 - DNA, 75 bp, synthetic construct
  source 1..75: mol_type = other DNA
atctggcagaaaccttcattgaatgggttagcagcatcatccagcctggtgagcgctaccagtttaaatctcccg

SEQ ID NO: 821134 - DNA, 75 bp, synthetic construct
  source 1..75: mol_type = other DNA
actgcacccattagtgctggcctaccatctacaactggcagacgctatcgttactgagtcggaacagaacgattc

SEQ ID NO: 821135 - DNA, 75 bp, synthetic construct
  source 1..75: mol_type = other DNA
catcatactcgataatactgaacacaaggtcgtcggagtacgacagcagttgttgatgcaggaagccttattaat

SEQ ID NO: 821136 - DNA, 75 bp, synthetic construct
  source 1..75: mol_type = other DNA
tttcattattcgaatgtacgcggtgaaagctggcaacatattacccggcaaatttgtgcgcaattagtggcacaa

SEQ ID NO: 821137 - DNA, 75 bp, synthetic construct
  source 1..75: mol_type = other DNA
gttccattgctccaaagagtggctgtacgccggagactctgcgtgtctgggttcgccagaatgagcgggataccg

SEQ ID NO: 821138 - DNA, 75 bp, synthetic construct
  source 1..75: mol_type = other DNA
gttccattgctccaaagagtggctgtacgcctgagactctgcgtgtctgggttcgccagtatgagcgggataccg

SEQ ID NO: 821139 - DNA, 75 bp, synthetic construct
  source 1..75: mol_type = other DNA
ctcgccatcccacattgctggagcgaacaggaacgccgttttcgtggattttttattaccctcgcccaaccggtt

SEQ ID NO: 821140 - DNA, 75 bp, synthetic construct
  source 1..75: mol_type = other DNA
aacggatcatcgcccgcgaaggcgaaggtgaaaacctgattgttaatcgtctcgccatcccacattgctggagcg

SEQ ID NO: 821141 - DNA, 75 bp, synthetic construct
  source 1..75: mol_type = other DNA
tgccgggtctcgcgtcattgaatattattgatacgcagctggttgagaacattaccggtcatttattacgttgcc

SEQ ID NO: 821142 - DNA, 75 bp, synthetic construct
  source 1..75: mol_type = other DNA
agcgccagcgggcaccatgccagtggttcttggcgcaggttggccgggcgtgctgttgcatgaagcggtgggtca

SEQ ID NO: 821143 - DNA, 75 bp, synthetic construct
  source 1..75: mol_type = other DNA
ccgcgacgaattcattatgatccgcaagatgaagaatattaactggctggatgatgaaggtcgcgatcaggtaca

SEQ ID NO: 821144 - DNA, 75 bp, synthetic construct
  source 1..75: mol_type = other DNA
gaactgtccattgttgataacgactgggtggaagtgtttaacgctaatggcgcactgacggcccgtgcggtggtc

SEQ ID NO: 821145 - DNA, 75 bp, synthetic construct
  source 1..75: mol_type = other DNA
tggttttcgctggggagaaaaaggcaaatggaatctggaatccattgccgcaggttcagaaaccgaattgtcgtt

SEQ ID NO: 821146 - DNA, 75 bp, synthetic construct
  source 1..75: mol_type = other DNA
ctggtgctggcaaactacggcctcgatcgcgggctggaggacgaaaacagcgcgaaagattacgatgaaatcaaa

SEQ ID NO: 821147 - DNA, 75 bp, synthetic construct
  source 1..75: mol_type = other DNA
gctggagcctcgcgacgatggtagctacgttcccgggcgcatgatccgcgcatctgacctggtggatggactggg

SEQ ID NO: 821148 - DNA, 75 bp, synthetic construct
  source 1..75: mol_type = other DNA
ccgcgacgaattcatcatgatccgcaaaatgaaaaacgttaactggctggatgatgaaggtcgcgatcaggtaca

SEQ ID NO: 821149 - DNA, 75 bp, synthetic construct
  source 1..75: mol_type = other DNA
cgctgaacgtcagcgtctgaaagagctggaacgtgaaaatcgtgaactgcgccgcagtaacgatattcttcgcca

SEQ ID NO: 821150 - DNA, 75 bp, synthetic construct
  source 1..75: mol_type = other DNA
ggggcggtgatggagggctcaccagcgcggaacgtcagcgtctgaaagagctggaacgtgaaaatcgtgaactgc

SEQ ID NO: 821151 - DNA, 75 bp, synthetic construct
  source 1..75: mol_type = other DNA
agcgctgaacgtcagcgtctgaaagagctggaacgtgaaaatcgtgaactgctgtcaacgacggatgaaaagtga

SEQ ID NO: 821152 - DNA, 75 bp, synthetic construct
  source 1..75: mol_type = other DNA
tggcgtgggcatcaattatgaatgacccgcaaaagtgcctgagctacaagcaggtacgcggacgcggtgggttta

SEQ ID NO: 821153 - DNA, 75 bp, synthetic construct
  source 1..75: mol_type = other DNA
tccgcaaaagtgcctgagctacaaacaagtgcgtgggcgcggcgggtttatccgctccaactggcaggaactaaa

SEQ ID NO: 821154 - DNA, 75 bp, synthetic construct
  source 1..75: mol_type = other DNA
atggttctggaaagtcagggtgaatatgactcacaatgggcggcaattggttccattgctccaaagattggctgt

SEQ ID NO: 821155 - DNA, 75 bp, synthetic construct
  source 1..75: mol_type = other DNA
ttggcggcattgaaaatccgcattttcgtagcgtaaaacacaatccggtcctggtgcgccaattgcccgttaaaa

SEQ ID NO: 821156 - DNA, 75 bp, synthetic construct
  source 1..75: mol_type = other DNA
ggcctttgcgctcgactggaaccgcccaccgcgccagatgaacagtacctcgtttttctacaatcattccagcca

SEQ ID NO: 821157 - DNA, 75 bp, synthetic construct
  source 1..75: mol_type = other DNA
cgaaagcaacaatccgcagtggaaaaccgtggcagttaataccgcaggtgaactggtggcgcctaacggttcgat

SEQ ID NO: 821158 - DNA, 75 bp, synthetic construct
  source 1..75: mol_type = other DNA
ttcaacctgttcaacagtagccgtatcgatgccatcaacattaccgaagtgcgcgataaagcggagggagaataa

SEQ ID NO: 821159 - DNA, 75 bp, synthetic construct
  source 1..75: mol_type = other DNA
tcaacctgctggcgctggaacagagcgcgcaagcggcgcgaaccatcgtccgtgatagtggcgatggcaaagtac

SEQ ID NO: 821160 - DNA, 75 bp, synthetic construct
  source 1..75: mol_type = other DNA
acggtaaagtaacgaagccggtgaaaggcgcaacgttgattggttccggtatcgaaaccatgcagcagatttcga

SEQ ID NO: 821161 - DNA, 75 bp, synthetic construct
  source 1..75: mol_type = other DNA
gtaggtgtctgcggtaaagaagggcaaagcctgccggttggcgtgggccagccgacgctcaaagtcgataacctg

SEQ ID NO: 821162 - DNA, 75 bp, synthetic construct
  source 1..75: mol_type = other DNA
aaaatctacttcaactggaaaagcggtaagtcagaaaaatgcatcttctgttacccacgaattgagtcaggccaa

SEQ ID NO: 821163 - DNA, 75 bp, synthetic construct
  source 1..75: mol_type = other DNA
tcgataaatgtatcggctgccatacctgttcggtgacctgtaaaaacgtctggaccggacgcgaaggcatggagt

SEQ ID NO: 821164 - DNA, 75 bp, synthetic construct
  source 1..75: mol_type = other DNA
ccatgatgtatcacgcccaggaacgcattatgaatatccctggttcggaagtaactggcatgcgcggcggcattc

SEQ ID NO: 821165 - DNA, 75 bp, synthetic construct
  source 1..75: mol_type = other DNA
gccccacctggtccggtctggaaagcgatcacgtctcctataacgcgggatacaccaacgttcatgagttaattc

SEQ ID NO: 821166 - DNA, 75 bp, synthetic construct
  source 1..75: mol_type = other DNA
ccggaagaagtcgagtggcaaactgcagcgattgaaggcaagctcgacctgctggtgacgctcgacttccgcatg

SEQ ID NO: 821167 - DNA, 75 bp, synthetic construct
  source 1..75: mol_type = other DNA
aacaaggtattccacaaaatgtgattgaagctgcccagcgttcgccagtctacaaaatggcgatggactggaaac

SEQ ID NO: 821168 - DNA, 75 bp, synthetic construct
  source 1..75: mol_type = other DNA
gacgaaaatcacgagccgggaaatcactggaactgcatcttgaacagcttttcaatgagcacggactgacaactt

SEQ ID NO: 821169 - DNA, 75 bp, synthetic construct
  source 1..75: mol_type = other DNA
ccctctgcgcaagcttatcacgatgaagcttttccagagcagaagttgcgtatgttagcggtaaaaacaacctgt

SEQ ID NO: 821170 - DNA, 75 bp, synthetic construct
  source 1..75: mol_type = other DNA
accggaggaagtctcgtgccgggaaaagtcttgagctccatcttgaatctcttttcaaagaacacggtgcaacga

SEQ ID NO: 821171 - DNA, 75 bp, synthetic construct
  source 1..75: mol_type = other DNA
acgcttgtcgggattggttctgcgttttggggattaattgccggaggcgtttgttacgtggtgttgaatttaatc

SEQ ID NO: 821172 - DNA, 75 bp, synthetic construct
  source 1..75: mol_type = other DNA
gaatgaaaaaaggattacccgctggggtaaaggtagcccgcttcaggatcctgaaaataccggtgctctgacgct

SEQ ID NO: 821173 - DNA, 75 bp, synthetic construct
  source 1..75: mol_type = other DNA
tcgcaggcgtgtagaatatgatattttcctccttgtagaggaaatgcatgtccttgatatcattaagaagggatt

SEQ ID NO: 821174 - DNA, 75 bp, synthetic construct
  source 1..75: mol_type = other DNA
acttaccgggcatctggtgctttccacactgcataccaacacggcggtgggggcgatcacgcgcctgcaggatat

SEQ ID NO: 821175 - DNA, 75 bp, synthetic construct
  source 1..75: mol_type = other DNA
tgcggcaaatcgacgaagccgaatttgaacagcgactgaatgcggtctggcagcgggactcttccgaggctcgcc

SEQ ID NO: 821176 - DNA, 75 bp, synthetic construct
  source 1..75: mol_type = other DNA
gcggttgataccggttttaaaaatgctgagctaaccctcagtgaggtttccttgcttaataacatccaacaggcg

SEQ ID NO: 821177 - DNA, 75 bp, synthetic construct
  source 1..75: mol_type = other DNA
tttccttccggtgctgcctatcacgatcctgattacccagctgaacggttacgcatgttgggggttaaaaccacc

SEQ ID NO: 821178 - DNA, 75 bp, synthetic construct
  source 1..75: mol_type = other DNA
ggagctacatcttgagcaaatttttattgagcatggactgcatcattttgctactcaatgtattactgaaggaaa

SEQ ID NO: 821179 - DNA, 75 bp, synthetic construct
  source 1..75: mol_type = other DNA
acgccgttcttacaggatatggagaagaagctgggcgtaaaggtcaacgccttctttgccccggactacgcgggc

SEQ ID NO: 821180 - DNA, 75 bp, synthetic construct
  source 1..75: mol_type = other DNA
gggcgatggtcaacttcgatgagctggggtacaactgcaaaaccaacaaggaaaagctgcagatcatgcccaaca

SEQ ID NO: 821181 - DNA, 75 bp, synthetic construct
  source 1..75: mol_type = other DNA
ggcgtcatttgctgacggcctctttgaagatgttgctgccgcctttgaagaaatccgcgacgcagaaggaccaga

SEQ ID NO: 821182 - DNA, 75 bp, synthetic construct
  source 1..75: mol_type = other DNA
gcaagcctctgccatggtggcaagacatgccgtgctgtatccgctgaaatttggctcctgtatgcgggaagttaa

SEQ ID NO: 821183 - DNA, 75 bp, synthetic construct
  source 1..75: mol_type = other DNA
acggcaaaagatttgagattatgtatgaggatttattgttcctttaccccaaagggtctatgacgttaaagagag

SEQ ID NO: 821184 - DNA, 75 bp, synthetic construct
  source 1..75: mol_type = other DNA
gtattgctgggattggtgttgtaggctggatcctgattggtgtttcggtggttagcgttgcgttctcaatcttta

SEQ ID NO: 821185 - DNA, 75 bp, synthetic construct
  source 1..75: mol_type = other DNA
tttaaatacacctttgcggttacggattgccgggaaagattataacgaaaagacggccccggcagcggttaatag

SEQ ID NO: 821186 - DNA, 75 bp, synthetic construct
  source 1..75: mol_type = other DNA
agcatttcacgctgacaggcagaattgatgaatggcccaatctgattacgaaaaaacaggcactacaacaagcac

SEQ ID NO: 821187 - DNA, 75 bp, synthetic construct
  source 1..75: mol_type = other DNA
agctaaaagaatatcaggcacagttgggtagtgcggtagctaataatgatcgtgttggcgtgcagaagttaatgg

SEQ ID NO: 821188 - DNA, 75 bp, synthetic construct
  source 1..75: mol_type = other DNA
tccttcggccgttacccgttcgcagaactataaccccctgacgctggggtttggattccttcctgatgtagcaga

SEQ ID NO: 821189 - DNA, 75 bp, synthetic construct
  source 1..75: mol_type = other DNA
atgcatttttatgtggatgaaaccggtcataccggtcccaatctttttgatcctacccagcccgtgctttcctac

SEQ ID NO: 821190 - DNA, 75 bp, synthetic construct
  source 1..75: mol_type = other DNA
aaacttgttgaacttgatgatattgtagaacacatagctcaatcctcatcagagcttcgggggcgtgcgggatta

SEQ ID NO: 821191 - DNA, 75 bp, synthetic construct
  source 1..75: mol_type = other DNA
ttgtctggatatgtgggatcaaaggatccggctggttacgtggcaatggggctaatttattacgttttgatgagg

SEQ ID NO: 821192 - DNA, 75 bp, synthetic construct
  source 1..75: mol_type = other DNA
agcaaggtacagcaggcgaaagtggagaagatgaacgataaaattaatactgttgcaggtaacatcgactccttg

SEQ ID NO: 821193 - DNA, 75 bp, synthetic construct
  source 1..75: mol_type = other DNA
acgtgcttaccgactctgcaattgagcgcaagttcgtcgaagagttggataccagcaaggatgtggtggtatatg

SEQ ID NO: 821194 - DNA, 75 bp, synthetic construct
  source 1..75: mol_type = other DNA
ttcaatattgaagggccgggagccgaagaagggttaaccttaccgctactctttgaccagagtcgtttcaataaa

SEQ ID NO: 821195 - DNA, 75 bp, synthetic construct
  source 1..75: mol_type = other DNA
gttggatcgccgcgaatggtggttgacgggtgactatcagttgggtgagttaaaagactatgctaatggctttgt

SEQ ID NO: 821196 - DNA, 75 bp, synthetic construct
  source 1..75: mol_type = other DNA
ctgcacggagccgcagcgccagcattcacggaaaactacatatcccatttgcgcgatgaagttgctggccgcagc

SEQ ID NO: 821197 - DNA, 75 bp, synthetic construct
  source 1..75: mol_type = other DNA
tgccagtcagtttaacctcctggaaatgccgaacgaacacactacaccggagaagggaatcaccaactatcagta

SEQ ID NO: 821198 - DNA, 75 bp, synthetic construct
  source 1..75: mol_type = other DNA
cttaagccagagtctgatgagcgtccatctccatctacatcgggcgtgcaggtaattacaccgccagacacacgg

SEQ ID NO: 821199 - DNA, 75 bp, synthetic construct
  source 1..75: mol_type = other DNA
catatagtgacgacctttgaacaggcgcttcaacaaatcgagttgagcagagcgttaacagcgcaggaaaagcgc

SEQ ID NO: 821200 - DNA, 75 bp, synthetic construct
  source 1..75: mol_type = other DNA
aacggtgagtggctgttaaaaatgttgcgttcaaatgaaaaggagcgcaaagaaaaacacggcattatcggtgca

SEQ ID NO: 821201 - DNA, 75 bp, synthetic construct
  source 1..75: mol_type = other DNA
agcttgagaagcattttagtctttatgtcgatggcgataagaaagttaagaagatgcgtgaccgggctttttggg

SEQ ID NO: 821202 - DNA, 75 bp, synthetic construct
  source 1..75: mol_type = other DNA
ggaaagcgatcaactggcttacgcccatctcgcatttttcaccaacaccgcaccggttgattgccgccaaattcg

SEQ ID NO: 821203 - DNA, 75 bp, synthetic construct
  source 1..75: mol_type = other DNA
catcggggggatggtttgaaaaagcgcagcggttcggaaaatccttcatgctgccgattgcggtattgcccgcag

SEQ ID NO: 821204 - DNA, 75 bp, synthetic construct
  source 1..75: mol_type = other DNA
cagaagctcaggcgctaagcctaacgatggttcctcgtcggattccaccgcgagaagtatttctcagactcgatg

SEQ ID NO: 821205 - DNA, 75 bp, synthetic construct
  source 1..75: mol_type = other DNA
ggccagaagacagaactgtatgtagcgaagaagcaaatgcgtggcatctcgtctacttctaagcgcccatcgctg

SEQ ID NO: 821206 - DNA, 75 bp, synthetic construct
  source 1..75: mol_type = other DNA
agtgaactacaatgcttgcaaatggtacgagtcctcagtggcatttaatcatttcatcggcggtgatagcggtgg

SEQ ID NO: 821207 - DNA, 75 bp, synthetic construct
  source 1..75: mol_type = other DNA
acgctgcataccaacacggcggtgggggcgatcacgcgtttgcaggatatgggggtagagcctttcctgctctct

SEQ ID NO: 821208 - DNA, 75 bp, synthetic construct
  source 1..75: mol_type = other DNA
gattgaaaccgacagctatacgggtgaaaaatcggtggtgtattcgcacgatggcaaggaaatgggaaaactcta

SEQ ID NO: 821209 - DNA, 75 bp, synthetic construct
  source 1..75: mol_type = other DNA
ggtatgttcagcagcgcaacggaaacggaaaagcgcctggcacgcaaggtcttgcgtgaccggggcgaactctga

SEQ ID NO: 821210 - DNA, 75 bp, synthetic construct
  source 1..75: mol_type = other DNA
taaaaggtctccatgctgacgtcttcgcgcaattcaagagcaacccggaaagtttcattgccgaagtcattcgct

SEQ ID NO: 821211 - DNA, 75 bp, synthetic construct
  source 1..75: mol_type = other DNA
gggtgaaggttctctcgttgttctttatcgacgaagtagccaggtaccgggactactctgctgtcgatgaaaaag

SEQ ID NO: 821212 - DNA, 75 bp, synthetic construct
  source 1..75: mol_type = other DNA
tgcgctcgatgcctacaaccagaagctggtgaagaagattgaggtgcgtggtatctcggtgaagggactggcggg

SEQ ID NO: 821213 - DNA, 75 bp, synthetic construct
  source 1..75: mol_type = other DNA
cttgtgggttttcagttatgtggcctcagcgtcgtgtgcgggctgtgccgtgcctccatcttagccgggctggcg

SEQ ID NO: 821214 - DNA, 75 bp, synthetic construct
  source 1..75: mol_type = other DNA
cttgcgccctgtgcatccccgccttatcgcccggcttttatggaggcacggcaccgcccggtgtcgcggaatatg

SEQ ID NO: 821215 - DNA, 75 bp, synthetic construct
  source 1..75: mol_type = other DNA
ccgtgtgcgtcaggctgcggcttcccttgcgccctgtgcatccccgccttatcgcccggcttttatggaggcacg

SEQ ID NO: 821216 - DNA, 75 bp, synthetic construct
  source 1..75: mol_type = other DNA
accgctgccctgatccatcttcgccagcaaattcctgcactaacgggtgatcgctggtgggaagagggcgatggc

SEQ ID NO: 821217 - DNA, 75 bp, synthetic construct
  source 1..75: mol_type = other DNA
ccaccccccatggtgcaacgtatgacggccatggtgtcaatttcacactcttctcggcccacgctgaacgcgttg

SEQ ID NO: 821218 - DNA, 75 bp, synthetic construct
  source 1..75: mol_type = other DNA
tgcaggcgaagcatcgcgcacagaaagcagtagatgagctggtggactgtgtggcagagctggaaaccagagtcg

SEQ ID NO: 821219 - DNA, 75 bp, synthetic construct
  source 1..75: mol_type = other DNA
gtgatctgcatcgtatcgcggatgccctgcaggcggtacagaaacgtaacttctggcagttacaggctgaaatca

SEQ ID NO: 821220 - DNA, 75 bp, synthetic construct
  source 1..75: mol_type = other DNA
atggaaaaacactccggcactcttatgacaagagtcgccgcaagggagcgattcatgtcattagtgcgttctcaa

SEQ ID NO: 821221 - DNA, 75 bp, synthetic construct
  source 1..75: mol_type = other DNA
ggcatgtcattgaaggcgttgatggtcacgatccagaagcggtagatgctgcggtgcgtgaagcgaaaagcgtca

SEQ ID NO: 821222 - DNA, 75 bp, synthetic construct
  source 1..75: mol_type = other DNA
gaactggtgattgctctgattaaatcgttgccgaaaccggtacgccgtaattttgtacctgcgccaaactatgcc

SEQ ID NO: 821223 - DNA, 75 bp, synthetic construct
  source 1..75: mol_type = other DNA
gattgccagaccaggcgaaattgtcagaagcgcaggccgagcagcttgaacaggcctaccagtctgcaatcggcg

SEQ ID NO: 821224 - DNA, 75 bp, synthetic construct
  source 1..75: mol_type = other DNA
cgctgatcgcacaattgcggtcggaaaacgtctggacagacattaacgatcgtgtcgtggaaggcggcttctact

SEQ ID NO: 821225 - DNA, 75 bp, synthetic construct
  source 1..75: mol_type = other DNA
tgagtgggaaacagcccttccggcgtgcactattaggtgggccattttacgttactaatatcgtgcccaccgttc

SEQ ID NO: 821226 - DNA, 75 bp, synthetic construct
  source 1..75: mol_type = other DNA
gccatatactcaatatactgtcggctaaccgtgttgatgaactcttgccatggaacgtagcacttaccaataaat

SEQ ID NO: 821227 - DNA, 75 bp, synthetic construct
  source 1..75: mol_type = other DNA
aagttcgccacagcaatccgaaaccactggcacgtggaaaataagctgcactggcgcctggacgtggtaatgaat

SEQ ID NO: 821228 - DNA, 75 bp, synthetic construct
  source 1..75: mol_type = other DNA
aagctatcagtttgagccgggggcggatgctgacggtgtgaccgtgcatattccgctgccgttacttaaccaggt

SEQ ID NO: 821229 - DNA, 75 bp, synthetic construct
  source 1..75: mol_type = other DNA
cggctttcgaacagcgagcagaaccgcgtcttccagtcgcacagcggacggcgcattgtgctggcgactaacgtc

SEQ ID NO: 821230 - DNA, 75 bp, synthetic construct
  source 1..75: mol_type = other DNA
gcgaaagagattgaccatgcggcagggaaagtcctgctgcgtgaagcggcacgaccggaaattacttacccggac

SEQ ID NO: 821231 - DNA, 75 bp, synthetic construct
  source 1..75: mol_type = other DNA
caaacgtctgaaagggcgggtggatatgaccatggcgctggggctttctgacattaaagcgcagatgggcgggct

SEQ ID NO: 821232 - DNA, 75 bp, synthetic construct
  source 1..75: mol_type = other DNA
ccgtcaggtgctgcagcctgccgggtttgtcaccgatgcacacgctccggtaacgaacaatattgaaaccatgaa

SEQ ID NO: 821233 - DNA, 75 bp, synthetic construct
  source 1..75: mol_type = other DNA
gcgcaatggcgagatgaatctggcgaactggtgccagcaactggttaccagcaaagcgatggtgccgctgatcca

SEQ ID NO: 821234 - DNA, 75 bp, synthetic construct
  source 1..75: mol_type = other DNA
ctgtggtttccggcctatgggctgctcccccgctggcaccacgcccgcccaacacattgcgaaaaacctgccggg

SEQ ID NO: 821235 - DNA, 75 bp, synthetic construct
  source 1..75: mol_type = other DNA
gcgcaatggcgaaatgaacctggcgaactggtgccagcaaagcaatggtgccgcttatccaccactggctgatca

SEQ ID NO: 821236 - DNA, 75 bp, synthetic construct
  source 1..75: mol_type = other DNA
tggtcgtgaactggaaatggacgatgtaatcgcttccctaaaaaggatcaatacgctcccactctattcccacat

SEQ ID NO: 821237 - DNA, 75 bp, synthetic construct
  source 1..75: mol_type = other DNA
atcagtggcatgaaggagagatcgagagcgatatctggcttaacagcgccaactttacgctgccgctggattttt

SEQ ID NO: 821238 - DNA, 75 bp, synthetic construct
  source 1..75: mol_type = other DNA
tttcgccgaggaacagtaccagcaactgtggttcccggcttatggaatgctcccccgctggcaccatgcccgccc

SEQ ID NO: 821239 - DNA, 75 bp, synthetic construct
  source 1..75: mol_type = other DNA
ctattggcgatacgattcgccgggcgattaacgaaggcgctgaaaagctcaccctatggatgaccggcgcgccca

SEQ ID NO: 821240 - DNA, 75 bp, synthetic construct
  source 1..75: mol_type = other DNA
acattcagatccacaaacagttgaatggaccactgtcgcagtttgggcaacgcttctgggacgtgctgtttaacg

SEQ ID NO: 821241 - DNA, 75 bp, synthetic construct
  source 1..75: mol_type = other DNA
gtagtcgcttacgcggaagcgtagtcgaaattctgagctggcatcaacgaacgcaaacgcccacggcgccgaacg

SEQ ID NO: 821242 - DNA, 75 bp, synthetic construct
  source 1..75: mol_type = other DNA
atgccatctgctcgtctgcaacaacagttcatccgcctgtggcaatgctgcgagggtaaatcgcaggacacaacg

SEQ ID NO: 821243 - DNA, 75 bp, synthetic construct
  source 1..75: mol_type = other DNA
tcgacattgagttacctttcccagctaaaggctgccttgctcttgatgtaaacggacgtcctctggataaaaaca

SEQ ID NO: 821244 - DNA, 75 bp, synthetic construct
  source 1..75: mol_type = other DNA
tagtcaaaatggctcaggcctgtcaggaagggaatgtggccaacactgaagagagctgggcaacggatgtgctgg

SEQ ID NO: 821245 - DNA, 75 bp, synthetic construct
  source 1..75: mol_type = other DNA
atttttatgagcggcgagcgagaaattcgcgataccgccgatgcgctgaacaagctgaacttacgccatacggaa

SEQ ID NO: 821246 - DNA, 75 bp, synthetic construct
  source 1..75: mol_type = other DNA
ctggcaagcgccaatgttcgacgccattagctatctggtgctggcggggctgtgcgcctcactgctgggcgatgc

SEQ ID NO: 821247 - DNA, 75 bp, synthetic construct
  source 1..75: mol_type = other DNA
tccgtgcggataatgcgattaccgcagcgtgctactttgctggtcatttcctcatcgttcgctcactgtacctct

SEQ ID NO: 821248 - DNA, 75 bp, synthetic construct
  source 1..75: mol_type = other DNA
cgtgcggataacgcgattgctgcggcctgctactttgccggtcatttcctcatcgtccgctcgctgtatctctga

SEQ ID NO: 821249 - DNA, 75 bp, synthetic construct
  source 1..75: mol_type = other DNA
gcgttctcaacaatgcacagtctggtcatcggacagatcaagacggatgagaaatctaatgagattacagctatc

SEQ ID NO: 821250 - DNA, 75 bp, synthetic construct
  source 1..75: mol_type = other DNA
tgatgcctcgcctggtaatgatgaatggggatttacaggcgcagacagactggtttgcaactggtgtggatatta

SEQ ID NO: 821251 - DNA, 75 bp, synthetic construct
  source 1..75: mol_type = other DNA
atgcagaagcagatctcatattgagtgacttcatcggtcagcgggaacgctggacacaaaagcgagaggaacttt

SEQ ID NO: 821252 - DNA, 75 bp, synthetic construct
  source 1..75: mol_type = other DNA
gcaacattgccgatgactggtcgcaggtgaagatacatagcggcgttcgcgtagacgttctgaacgttctgggcg

SEQ ID NO: 821253 - DNA, 75 bp, synthetic construct
  source 1..75: mol_type = other DNA
ggcaacggaaaaagtcactgtttatggtttgccgattgttgccgcgcgcaaggtcaactacagccagatcgatcc

SEQ ID NO: 821254 - DNA, 75 bp, synthetic construct
  source 1..75: mol_type = other DNA
tctgctcgaagaactgggtgcgatcaccacggatgaacaggccagcgcctataaactgacgccgcttggtcgcca

SEQ ID NO: 821255 - DNA, 75 bp, synthetic construct
  source 1..75: mol_type = other DNA
tgaatctgtggaattatcttggcgagcagcaaaaggcgctttcttcaaacgccttccgtcgcctgtgtcgtaccg

SEQ ID NO: 821256 - DNA, 75 bp, synthetic construct
  source 1..75: mol_type = other DNA
cgattgagccaatttcgcaggcttcagctaatcagcgtaaaggccgctgtggtcgtgtgtccgaagggatctgta

SEQ ID NO: 821257 - DNA, 75 bp, synthetic construct
  source 1..75: mol_type = other DNA
tctttgatgcggtagatgaactgggacgggaaagtcccggcgatattttgatcttcatgagcggggaacgtgaaa

SEQ ID NO: 821258 - DNA, 75 bp, synthetic construct
  source 1..75: mol_type = other DNA
aatcatcaaactgatgcgatgggttgccagaaagatattgcagagaagatacaaaaacagggaggtgattattta

SEQ ID NO: 821259 - DNA, 75 bp, synthetic construct
  source 1..75: mol_type = other DNA
gaaagacgcgctgaaaggcaaagtgcaggaaacgctgtctgcggtggcggatgacggtatcgagcagagcggctt

SEQ ID NO: 821260 - DNA, 75 bp, synthetic construct
  source 1..75: mol_type = other DNA
gcggaaacctcgctgaccgtaccggggattaaatacgttatcgacccaggtacggcgcgtatcagccgctacagc

SEQ ID NO: 821261 - DNA, 75 bp, synthetic construct
  source 1..75: mol_type = other DNA
gaactgatcatcgcgctgattaaatcgttgccgaaaccggtacggcgtaattttgtacccgcgccaaactacgcc

SEQ ID NO: 821262 - DNA, 75 bp, synthetic construct
  source 1..75: mol_type = other DNA
accaggtggaggagagcggatttgagtggcagatccccggtctgcgccgcgaactggtgattgctctgattaaat

SEQ ID NO: 821263 - DNA, 75 bp, synthetic construct
  source 1..75: mol_type = other DNA
atgaccatggcgctggggctttctgacattaaagcgcagatgggcgggctggtgtatcgcggttttgtgactggt

SEQ ID NO: 821264 - DNA, 75 bp, synthetic construct
  source 1..75: mol_type = other DNA
aagaagggcgctcattacaggatctgaaagatgctctgaaaggcaaagtgcaggaaacgctgtctgcggtggcgg

SEQ ID NO: 821265 - DNA, 75 bp, synthetic construct
  source 1..75: mol_type = other DNA
cctgtttcagccgccgcgccgtgaccgctctgttagctgacggtgacggtattgctttcgacgtgcagagtctta

SEQ ID NO: 821266 - DNA, 75 bp, synthetic construct
  source 1..75: mol_type = other DNA
cggctaaataaagcctttgaggaaaaattcccactgaaagaattaaataatccagagcatgacagttacgcaatt

SEQ ID NO: 821267 - DNA, 75 bp, synthetic construct
  source 1..75: mol_type = other DNA
tctgcgggcgcggcggcgtcggtggagtcgctgaaaaacgtcagcggctacaaaggcacactgcgcaaggtgatc

SEQ ID NO: 821268 - DNA, 75 bp, synthetic construct
  source 1..75: mol_type = other DNA
tgacggcggaaatggggctgttcctgattaactttaacaatcagtacgactccaaccagaccaacgacaccgtca

SEQ ID NO: 821269 - DNA, 75 bp, synthetic construct
  source 1..75: mol_type = other DNA
ttaaccgcatcgtgcagcgggtgattttcgtcactggctactacggtctgacgcaggggctgctatctgtcctgc

SEQ ID NO: 821270 - DNA, 75 bp, synthetic construct
  source 1..75: mol_type = other DNA
agttcgacaaaaatctcgctggatcatcggcattgttttccagggctttaaaacccacaaatggacctccagcct

SEQ ID NO: 821271 - DNA, 75 bp, synthetic construct
  source 1..75: mol_type = other DNA
cagagaagttcgccagagcaatccgaaaccactggcacgtggagaataagctgcactggcgtctggatgtggtaa

SEQ ID NO: 821272 - DNA, 75 bp, synthetic construct
  source 1..75: mol_type = other DNA
ttatgcgtggcagtctcctttcgctcaataatagcagagcaaaagaaagagcccgaaatgatggtcagatattat

SEQ ID NO: 821273 - DNA, 75 bp, synthetic construct
  source 1..75: mol_type = other DNA
aaaaacagggaggtgattatttattcgcggtaaaaggaaaccaggggcggctaaataaagcctttgaggaaaaat

SEQ ID NO: 821274 - DNA, 75 bp, synthetic construct
  source 1..75: mol_type = other DNA
atgggttgccagaaagatattgcagagaagatacaaaaacagggcggtgattatttattcgctgtaaaaggaaac

SEQ ID NO: 821275 - DNA, 75 bp, synthetic construct
  source 1..75: mol_type = other DNA
atagcagaacaaaagaaagagcccgaaatgacggtcagatattatatcagttctgctgatttaaccgcagagaag

SEQ ID NO: 821276 - DNA, 75 bp, synthetic construct
  source 1..75: mol_type = other DNA
tgctgatttaaccgctgagaaattcgccacagcgatccgaaatcactggcacgtggagaataagctgcactggcg

SEQ ID NO: 821277 - DNA, 75 bp, synthetic construct
  source 1..75: mol_type = other DNA
atgagaaccgttaaggtatttgaggaagcctggcccttacataccccgtttgtgattgcccggggaagtcgcagt

SEQ ID NO: 821278 - DNA, 75 bp, synthetic construct
  source 1..75: mol_type = other DNA
gcgtaaccaccgttctggtgccgtcgcagttgcaggataaaaacaacaaaggccagaccccggcgcagaagaaag

SEQ ID NO: 821279 - DNA, 75 bp, synthetic construct
  source 1..75: mol_type = other DNA
ggtaaagcaaaaggcgcaaccggtcgtccggtagcgttgctggcacagttcctgttaaaccgcgccgggtttaac

SEQ ID NO: 821280 - DNA, 75 bp, synthetic construct
  source 1..75: mol_type = other DNA
ttcttcagataataaagacgtcattgcaactgatggaaaaacactcctgcattcttatgacaagagtcgccgcag

SEQ ID NO: 821281 - DNA, 75 bp, synthetic construct
  source 1..75: mol_type = other DNA
caaaatttcacgagtgctttattaactggatgcgtgattgccattcatcaaatgataaagacgtcatcgcaattg

SEQ ID NO: 821282 - DNA, 75 bp, synthetic construct
  source 1..75: mol_type = other DNA
tggcgtgcagaagggttggcggcgcgttgccagctattggcggatttaggcgttgcgatgcttgaacaaccgctt

SEQ ID NO: 821283 - DNA, 75 bp, synthetic construct
  source 1..75: mol_type = other DNA
acgtttgaatggaaagggctgaagaaattatgcgtggcagtctcctttcggtccataatagcagaacaaaagaaa

SEQ ID NO: 821284 - DNA, 75 bp, synthetic construct
  source 1..75: mol_type = other DNA
tattcctattcacgataccattgccagagttgtatcctgtatcagtcctgcaaaatttcacgagtgctttattaa

SEQ ID NO: 821285 - DNA, 75 bp, synthetic construct
  source 1..75: mol_type = other DNA
cctgtatcagtcctgcaaaatttcatgagtgctttattaactggatgcgtgactgccattcttcagatgataaag

SEQ ID NO: 821286 - DNA, 75 bp, synthetic construct
  source 1..75: mol_type = other DNA
atatttctattatccccgattacagacaagtctggaaagtagaacataaattgtcagatattctactgttgacta

SEQ ID NO: 821287 - DNA, 75 bp, synthetic construct
  source 1..75: mol_type = other DNA
tccggcctgctgcgatgatgacggtcttgttatcgaaaactgccttacgcgtttaaagaagaaaaaaccggacga

SEQ ID NO: 821288 - DNA, 75 bp, synthetic construct
  source 1..75: mol_type = other DNA
ggagagcggagcctgtttagtattctgtgtaaatgcctttctcagaagtgaccgtccaggcggtcaccgaactcg

SEQ ID NO: 821289 - DNA, 75 bp, synthetic construct
  source 1..75: mol_type = other DNA
aaaacagggcggtgattatttattcactgtaaaaggaaatcaggggcggcttaataaagcctttgagggaaaatt

SEQ ID NO: 821290 - DNA, 75 bp, synthetic construct
  source 1..75: mol_type = other DNA
ggttgcgaaagtataaacccgaagagtatgagttgatcattgctcactttgttattggtatctcattacgcgcta

SEQ ID NO: 821291 - DNA, 75 bp, synthetic construct
  source 1..75: mol_type = other DNA
agagtcacggcagagaagaaatccgtcttcatattgtttgcgatgtccctgatgaacttattgatttcacgtttg

SEQ ID NO: 821292 - DNA, 75 bp, synthetic construct
  source 1..75: mol_type = other DNA
catcacaactgatgcgatgggctgccagaaagatattgcagaaaagatacaaaaacagggaggtgattatttatt

SEQ ID NO: 821293 - DNA, 75 bp, synthetic construct
  source 1..75: mol_type = other DNA
attaaaggaaaaatcatcacaactgatgcgatgggttgccagaaagatattgcagagaagatacaaaaacaggga

SEQ ID NO: 821294 - DNA, 75 bp, synthetic construct
  source 1..75: mol_type = other DNA
atggaacatatttctgttattcccgattacagacaagcctggaaagtggaacataaattgtcggatattctactg

SEQ ID NO: 821295 - DNA, 75 bp, synthetic construct
  source 1..75: mol_type = other DNA
cggctaaataaagccttcgaggaaaaattcccactgaaagaattaaataatccagagcataacagttacgcaatg

SEQ ID NO: 821296 - DNA, 75 bp, synthetic construct
  source 1..75: mol_type = other DNA
accgacgccgaaggccgtctggtgctgtgcgatgtattaacttatgttgaacgttttgagccggaagcggtaatt

SEQ ID NO: 821297 - DNA, 75 bp, synthetic construct
  source 1..75: mol_type = other DNA
tattcctgttcacgataccattgccagagttatatcctgtatcagtcctgcaaaatttcacgagtgctttattaa

SEQ ID NO: 821298 - DNA, 75 bp, synthetic construct
  source 1..75: mol_type = other DNA
ttatcggatattctactgttgactatttgtgccgttatttctggtgcagaaggatgggaagatatagaggatttt

SEQ ID NO: 821299 - DNA, 75 bp, synthetic construct
  source 1..75: mol_type = other DNA
gaaacgccgcagaattattttcagggctacggcacatcgctattaatattttgacgaatgataaggtattcaagg

SEQ ID NO: 821300 - DNA, 75 bp, synthetic construct
  source 1..75: mol_type = other DNA
agcaatatggtgattttgaaaatggtattcctgttcacgataccattgccagagttgtatcctgtatctgtcctg

SEQ ID NO: 821301 - DNA, 75 bp, synthetic construct
  source 1..75: mol_type = other DNA
gtcatcgcaattgatggaaaaatacaccggcattcttatgacaagagtcgccgtaagggagcgattcatgtcatt

SEQ ID NO: 821302 - DNA, 75 bp, synthetic construct
  source 1..75: mol_type = other DNA
gaaatgcagcagaattattttcagggatacggcacattgctattaatattttgacgaatgataaggtattcaagg

SEQ ID NO: 821303 - DNA, 75 bp, synthetic construct
  source 1..75: mol_type = other DNA
ggagaaacacatctcgattttttgaagcaatatggtgattttgaaaatggtattcctgttcacgataccattgcc

SEQ ID NO: 821304 - DNA, 75 bp, synthetic construct
  source 1..75: mol_type = other DNA
aagaaatccgtcttcatattgtttgcgatgtccctgatgaacttattgatttcacgtttgaatggaaaggtctga

SEQ ID NO: 821305 - DNA, 75 bp, synthetic construct
  source 1..75: mol_type = other DNA
aactccactaatcagttgaaaattcaggcattcgatgatttttttggctatcgggcactaattgacgaggttaat

SEQ ID NO: 821306 - DNA, 75 bp, synthetic construct
  source 1..75: mol_type = other DNA
aaacaggggggggtatttattcgctgtaaaaggaaatcagggtcggattaataaagcctttgaggaaaaatttcc

SEQ ID NO: 821307 - DNA, 75 bp, synthetic construct
  source 1..75: mol_type = other DNA
atatttctattattcccgattacagacaaacctggaaagtgaaacataaattgtcggatattctactgttgacta

SEQ ID NO: 821308 - DNA, 75 bp, synthetic construct
  source 1..75: mol_type = other DNA
atgcacagtctggtcatcggacagatcaagacggatgagaaatccaatgagattacagctatcccagaacttctt

SEQ ID NO: 821309 - DNA, 75 bp, synthetic construct
  source 1..75: mol_type = other DNA
tgccagaaagatattgcagagaagatacaaaaacagggaggtgattatttattcgctgtaaaaggaacccagggg

SEQ ID NO: 821310 - DNA, 75 bp, synthetic construct
  source 1..75: mol_type = other DNA
atgccaggcggtcgcgcctatcgtccgggcgatgtgttaaccaccatgtctggtcaaaccgttgaagtgctcaac

SEQ ID NO: 821311 - DNA, 75 bp, synthetic construct
  source 1..75: mol_type = other DNA
atgggttgccagaaagatattgcagagaagatacaaaaacagggcggtgattatttattcgcggtaaaaggtaac

SEQ ID NO: 821312 - DNA, 75 bp, synthetic construct
  source 1..75: mol_type = other DNA
aatcatcacaaccgatgcgatgggttgccagaaagatattgcagagaagatacaaaaacagggatgtgattattt

SEQ ID NO: 821313 - DNA, 75 bp, synthetic construct
  source 1..75: mol_type = other DNA
gcttacctcgcttcacaagcgcgccagctggctgacagctacagcaagaatgttatcacccgcgttatcggcgaa

SEQ ID NO: 821314 - DNA, 75 bp, synthetic construct
  source 1..75: mol_type = other DNA
tatcgccggtaccgcctggcgttctggtaaagcgaaaggcgcaaccggtcgcccggtagcgttgctggcacagtt

SEQ ID NO: 821315 - DNA, 75 bp, synthetic construct
  source 1..75: mol_type = other DNA
accgacgctgaaggccgcctggtactgtgcgacgtgttaacttacgttgagcgttttgagccggaagcggtgatt

SEQ ID NO: 821316 - DNA, 75 bp, synthetic construct
  source 1..75: mol_type = other DNA
ttctcacggctaaagtctccaccgctatcccggcttcgtttttatggctgcacagtaactttatttgtttaatta

SEQ ID NO: 821317 - DNA, 75 bp, synthetic construct
  source 1..75: mol_type = other DNA
actacactgcgctcagtgaacacgccagcgaacatttgctgacgttaatccgcaacacccccaatgcagtcatct

SEQ ID NO: 821318 - DNA, 75 bp, synthetic construct
  source 1..75: mol_type = other DNA
tttgcgatgtccctgatgaacttattgatttcacgtttgaatggaaagggctgaagaaattatgcgtggcagtct

SEQ ID NO: 821319 - DNA, 75 bp, synthetic construct
  source 1..75: mol_type = other DNA
gagaagaaatccgtcttcatattgtttgcgatgtccctgatgaacttattgatttcacgtttgaatggaaagggc

SEQ ID NO: 821320 - DNA, 75 bp, synthetic construct
  source 1..75: mol_type = other DNA
atgcaaaccttacagcaagttgaaaactatacggtgttaagtgaacgcgccagcgaatatttattggacgtgatc

SEQ ID NO: 821321 - DNA, 75 bp, synthetic construct
  source 1..75: mol_type = other DNA
cagaacgttttctcacggctaaagtctccaccactatcccggcgtcgtttttatggctgcataaccatttcacat

SEQ ID NO: 821322 - DNA, 75 bp, synthetic construct
  source 1..75: mol_type = other DNA
ctgatttaaaaaacaagacaattcagggtcataaagacactgtcgcaaaagtcatggactggtataacccacaaa

SEQ ID NO: 821323 - DNA, 75 bp, synthetic construct
  source 1..75: mol_type = other DNA
taaacagaaaaataaccaccactcccacaccagcgaaactattatcatatcgaaatgcagatttaacaaaagaaa

SEQ ID NO: 821324 - DNA, 75 bp, synthetic construct
  source 1..75: mol_type = other DNA
tctcttctagataaaggagcaaaagtatatcccgatacatcatgctctctgagactgggagaaccattcatcatt

SEQ ID NO: 821325 - DNA, 75 bp, synthetic construct
  source 1..75: mol_type = other DNA
ttttcaagattctgtttattctctttgttgttgccgtctgcgtttatttagtgccgcgcgtcgctatcaattttt

SEQ ID NO: 821326 - DNA, 75 bp, synthetic construct
  source 1..75: mol_type = other DNA
gtggcgaaagctgcagatgccacgctgaggcgaatggggattgccagtccgtccggggaggtattcagaaaaggt

SEQ ID NO: 821327 - DNA, 75 bp, synthetic construct
  source 1..75: mol_type = other DNA
aaaggatacatttaatgaaaagatacttaacagcaatgctaatttaacaaaaaaaatacggcacaacagaaaata

SEQ ID NO: 821328 - DNA, 75 bp, synthetic construct
  source 1..75: mol_type = other DNA
ggaaggtacggacctgaacgcctatgcgacgctgctgatcgagcgtttcagcaacccgtctctgcgtcaccgtac

SEQ ID NO: 821329 - DNA, 75 bp, synthetic construct
  source 1..75: mol_type = other DNA
aaaactcaagaaactacggtagatagtgctttaacaagacactcgaatacggccctgttaaataaggccagagat

SEQ ID NO: 821330 - DNA, 75 bp, synthetic construct
  source 1..75: mol_type = other DNA
gccaacaactctgttattgcgcttggagataacaaagtattcattgatacaaaagatggtaaaggtactgcattc

SEQ ID NO: 821331 - DNA, 75 bp, synthetic construct
  source 1..75: mol_type = other DNA
ccggtgagatcgagcgaaagatcatccgtatgttcgcgctgggcatgagttacaaagatatcagccaggaaatcg

SEQ ID NO: 821332 - DNA, 75 bp, synthetic construct
  source 1..75: mol_type = other DNA
cggcgacgcaaaagtgtatagcgacagcacggtgttcggtgacttcgatatctataacacggcgatcaccaacgt

SEQ ID NO: 821333 - DNA, 75 bp, synthetic construct
  source 1..75: mol_type = other DNA
taacggcaccgttcataaaaactttgagctgcgtctgccggtcatgcgtgataacgggcaggcactggaagaaac

SEQ ID NO: 821334 - DNA, 75 bp, synthetic construct
  source 1..75: mol_type = other DNA
ttctcaaaattctgtttattctctttgttgttgccttctgcgtttatttagtgccgcgcgttgccatcaacttct

SEQ ID NO: 821335 - DNA, 75 bp, synthetic construct
  source 1..75: mol_type = other DNA
ccagcagtgcatcagcactctggcaggcgggggcgaaattgctgaaagtgaagctggataaccatcttattagcg

SEQ ID NO: 821336 - DNA, 75 bp, synthetic construct
  source 1..75: mol_type = other DNA
aaactggataaccatcttattagcgagcggatggtggcaattcgctcggctgtacccgatgcgacgttgattgtt

SEQ ID NO: 821337 - DNA, 75 bp, synthetic construct
  source 1..75: mol_type = other DNA
atgagaaccgtaaaggtatttgaggaagcctggccgttacataccccgtttgtaattgctcgtggcagccgcagt

SEQ ID NO: 821338 - DNA, 75 bp, synthetic construct
  source 1..75: mol_type = other DNA
tgacctcaagtagtgaacaattggaagattatatcatcaaaaatgattttaccgataaacagaaactagagattt

SEQ ID NO: 821339 - DNA, 75 bp, synthetic construct
  source 1..75: mol_type = other DNA
tgtgattgctcggggaagtcgtagtgaagcgcgcgtggtggtggtggagttagaagaagagggcattaaaagtac

SEQ ID NO: 821340 - DNA, 75 bp, synthetic construct
  source 1..75: mol_type = other DNA
actcacttacagtggcacattgagcaggaaaatatcgatacccgtaacggcccgcagctggctgatctggtgaaa

SEQ ID NO: 821341 - DNA, 75 bp, synthetic construct
  source 1..75: mol_type = other DNA
gtagcgccccggcattgcaggagcttgaagactcaacgtggcgtaaagggcttacggattattgccaatgttcgc

SEQ ID NO: 821342 - DNA, 75 bp, synthetic construct
  source 1..75: mol_type = other DNA
gtgatttgcgtgcagaaccggttaaaggggaatttagtagttatggattaagcacaacggcaactattccctggt

SEQ ID NO: 821343 - DNA, 75 bp, synthetic construct
  source 1..75: mol_type = other DNA
tgaaatgttgatggcggcgttatttgccaaattgcaccggacattgggtgcaagagggcaaggtgatatcggcgt

SEQ ID NO: 821344 - DNA, 75 bp, synthetic construct
  source 1..75: mol_type = other DNA
tgaaatgttgatggcggcgttatttgccaaattgcaccgggcactgggtgcaagaggtcaaggtgatatcggcgt

SEQ ID NO: 821345 - DNA, 75 bp, synthetic construct
  source 1..75: mol_type = other DNA
tgttaaggcgttcagtgaaaaaaggctggctaactgaagaacaggcaattgaacgactggcgacgcaggctgaac

SEQ ID NO: 821346 - DNA, 75 bp, synthetic construct
  source 1..75: mol_type = other DNA
gtgatttgctcaaagaaccggttaaaggggaatttagtagttatggattaagcgcaaccgccactattccctggt

SEQ ID NO: 821347 - DNA, 75 bp, synthetic construct
  source 1..75: mol_type = other DNA
gcaggaacggtaaacagcgaaatatcatatcagttatttcgagatttcgctgaaaatagaggcctctttaaacca

SEQ ID NO: 821348 - DNA, 75 bp, synthetic construct
  source 1..75: mol_type = other DNA
tctcgatctgaacccgaacattattatcgaagggccatccacccagtgcctcgcaggtaagcgcctggccggtga

SEQ ID NO: 821349 - DNA, 75 bp, synthetic construct
  source 1..75: mol_type = other DNA
aaataacaacgagctgattgatttatttttatccaaaggtggatttatttatattagagaatacaaatccgagcc

SEQ ID NO: 821350 - DNA, 75 bp, synthetic construct
  source 1..75: mol_type = other DNA
ccctggcttataatgacgatttgccatctatagccaaacgtgttttcacagttgctaagccaggggactccataa

SEQ ID NO: 821351 - DNA, 75 bp, synthetic construct
  source 1..75: mol_type = other DNA
tacagcaaatcatcactaacctggtggggaacgcgattaaattcaccgagaatggcaacatcgatattctggtgg

SEQ ID NO: 821352 - DNA, 75 bp, synthetic construct
  source 1..75: mol_type = other DNA
actgcgcagcacgctggatgaagtcgttacccttctggcacactcttcccacgataaagggctggaattgacgct

SEQ ID NO: 821353 - DNA, 75 bp, synthetic construct
  source 1..75: mol_type = other DNA
gttcaactttctggttccacattaatctcgatctgaacccgaacattattatcgaagggccatccacccagtgcc

SEQ ID NO: 821354 - DNA, 75 bp, synthetic construct
  source 1..75: mol_type = other DNA
tagaagaatagcgaatcgtcaaaataaaaagctaagtcgtgagaagtatttgtatcgacaacgcaagcaggagat

SEQ ID NO: 821355 - DNA, 75 bp, synthetic construct
  source 1..75: mol_type = other DNA
gtcaaagaagactcctgaaaatggcaaaattagtttaatgtatgagagtgccattcattacgatatgtattccgt

SEQ ID NO: 821356 - DNA, 75 bp, synthetic construct
  source 1..75: mol_type = other DNA
gtgagctgcatcgtatcgcggatgccctgcaggcggttcagaaacgtaacttctggcagttacaggctgaaatca

SEQ ID NO: 821357 - DNA, 75 bp, synthetic construct
  source 1..75: mol_type = other DNA
tctatattatgtttataccaaaaaaagtaattctgatgttaaccttcttaaaggaatgttagttaacttttcttt

SEQ ID NO: 821358 - DNA, 75 bp, synthetic construct
  source 1..75: mol_type = other DNA
gagactatgtctcctcaacctgagagttctgatgtagtaaaatcaatgagtgtaagttctgttaaaaatacagat

SEQ ID NO: 821359 - DNA, 75 bp, synthetic construct
  source 1..75: mol_type = other DNA
atcgccagcgccagcttgatcaggagcgtcggcaactggaagatgaagaacggagaatggaagatgagtatgggc

SEQ ID NO: 821360 - DNA, 75 bp, synthetic construct
  source 1..75: mol_type = other DNA
ctgttaccgatgaaagtaagctggcaatgacagtcatggcggttgatgacaaccccgctaacctgaaacttatcg

SEQ ID NO: 821361 - DNA, 75 bp, synthetic construct
  source 1..75: mol_type = other DNA
gacgatcgccagcgccagcttgatcaggagcgtcggcaactggaagatgaagagcggagaatggaagatgagtat

SEQ ID NO: 821362 - DNA, 75 bp, synthetic construct
  source 1..75: mol_type = other DNA
gtttgctaatctgatgggagatttcagcttggaatatcctatccaggataagctgaacttcattgagcagcaaat

SEQ ID NO: 821363 - DNA, 75 bp, synthetic construct
  source 1..75: mol_type = other DNA
tgggcaaaaatgacaagctccgcctacacgaactgctgcgtggttttgaacaacgcggtttttatctggataacc

SEQ ID NO: 821364 - DNA, 75 bp, synthetic construct
  source 1..75: mol_type = other DNA
gcgttatttaagtgaaaatgctcataaagccggagctgacattaatgtgctggaacatgcgctcagactcgtggc

SEQ ID NO: 821365 - DNA, 75 bp, synthetic construct
  source 1..75: mol_type = other DNA
atgcacgataatcatgaagcacaaaaaattaatcaaaccagcgtgatgcctgaaaaaactggtgtttactggaat

SEQ ID NO: 821366 - DNA, 75 bp, synthetic construct
  source 1..75: mol_type = other DNA
gattctggcggcggtggatcgagagatctttggttcctcggatactgatgccgatccggtggcggtagtccgcgc

SEQ ID NO: 821367 - DNA, 75 bp, synthetic construct
  source 1..75: mol_type = other DNA
aaataacaaggaagtaattagcttctttttaggtaaaaatgggttggtttacattggggagtacaaacctaatcc

SEQ ID NO: 821368 - DNA, 75 bp, synthetic construct
  source 1..75: mol_type = other DNA
caatattaagagcgacgtgcccgataacgtaattggcgacccactgcgtttacagcaaatcatcactaacctggt

SEQ ID NO: 821369 - DNA, 75 bp, synthetic construct
  source 1..75: mol_type = other DNA
taagtcagagttcctggcaaatatgtcgcatgagttacgtacgccgttgaatggtgttatcggctttacccgcct

SEQ ID NO: 821370 - DNA, 75 bp, synthetic construct
  source 1..75: mol_type = other DNA
agttgaattttattgaaaaagagatgctgaataagctcaataaaaaattaatccgactgggtgaggggccatttg

SEQ ID NO: 821371 - DNA, 75 bp, synthetic construct
  source 1..75: mol_type = other DNA
gcttttttggggacggtttatattttgctattagtaaaatctatgagagtcgttttaacggctctcatagacaga

SEQ ID NO: 821372 - DNA, 75 bp, synthetic construct
  source 1..75: mol_type = other DNA
cgttacatagccgtttcaataaagtctcactacctcagtttctcggtttttttagtggttctcgttttgtaccca

SEQ ID NO: 821373 - DNA, 75 bp, synthetic construct
  source 1..75: mol_type = other DNA
aatcgttgaccggagaaagtgatccgctgctggcatcagataaagcgctggattgggtggatttagtgttatgta

SEQ ID NO: 821374 - DNA, 75 bp, synthetic construct
  source 1..75: mol_type = other DNA
aaaatacaacgtgccggtggtactgacactgggaaccaaatttgttatcgcggagaatccgcagtggtggcagga

SEQ ID NO: 821375 - DNA, 75 bp, synthetic construct
  source 1..75: mol_type = other DNA
gactgggttgatctggtgctgtgcaccgccgggccaatcggcttgtatatggcgggctttaccgaagacgaagcg

SEQ ID NO: 821376 - DNA, 75 bp, synthetic construct
  source 1..75: mol_type = other DNA
tttatctttcaggaaaacattttattaccatagcaacaatgtttatagccatttttttagtgcttttgtttttgt

SEQ ID NO: 821377 - DNA, 75 bp, synthetic construct
  source 1..75: mol_type = other DNA
gactgggtagatctggtgctgtgcaccgcggggccaattggtttatatatggcgggctttactgaagacgaagcg

SEQ ID NO: 821378 - DNA, 75 bp, synthetic construct
  source 1..75: mol_type = other DNA
cagcattcgccacgcttaacgcgcggtctgccggagcgtgaagacagcctggaagaatcttactgggatcgttaa

SEQ ID NO: 821379 - DNA, 75 bp, synthetic construct
  source 1..75: mol_type = other DNA
cactaccgaaccgctggaattcctgttcctgttcgtagcgccagttctgtatgtcatccacgcgctgttaaccgg

SEQ ID NO: 821380 - DNA, 75 bp, synthetic construct
  source 1..75: mol_type = other DNA
accaagtggtacatggtgccagtggtggcggcaatctggtttgtcgtttactacgtcatcttccgtttcgctatc

SEQ ID NO: 821381 - DNA, 75 bp, synthetic construct
  source 1..75: mol_type = other DNA
cgtatttctctgatgatgctgctgactattgaaggcggtaaaattaaggaaaaacgtgcgcactttgattataac

SEQ ID NO: 821382 - DNA, 75 bp, synthetic construct
  source 1..75: mol_type = other DNA
ccagaacggcgcagatattccaggaaaagataccttcacaaaaaatattggtgcatgtcgcgcttttcacggtgc

SEQ ID NO: 821383 - DNA, 75 bp, synthetic construct
  source 1..75: mol_type = other DNA
tgggagaaggaagttgtcctgcagctcagtttcggattaattataaaaatggcggtattttttatcgttcagccc

SEQ ID NO: 821384 - DNA, 75 bp, synthetic construct
  source 1..75: mol_type = other DNA
ccacttcaatatgaatacggggagttgccctgccgtacagttccgcgtgaattacaggaacggcggtatttttta

SEQ ID NO: 821385 - DNA, 75 bp, synthetic construct
  source 1..75: mol_type = other DNA
tcatcaccttcctaaattgtcatttgtaattgttgttgagctgtttgcttatttctttctgcgtctctataaaaa

SEQ ID NO: 821386 - DNA, 75 bp, synthetic construct
  source 1..75: mol_type = other DNA
gatcagacgtctgacgccgccgcaccacgaccggttagccggtttcaacaacgatgatgataaggaggcgctgtg

SEQ ID NO: 821387 - DNA, 75 bp, synthetic construct
  source 1..75: mol_type = other DNA
aaccgtcgggccggagggcgtcagctggttgctacaccagttgcgcagccatctggcgggcgaacatccaccagc

SEQ ID NO: 821388 - DNA, 75 bp, synthetic construct
  source 1..75: mol_type = other DNA
aagcattattactgacacatattttccagctgcattattagctcatgttgggctattgtttcttttcatcccata

SEQ ID NO: 821389 - DNA, 75 bp, synthetic construct
  source 1..75: mol_type = other DNA
ctcgtccattcaacattcaacattcaacattcaacattcaacattcaacaaggaaagaaacttgtcgctggcatg

SEQ ID NO: 821390 - DNA, 75 bp, synthetic construct
  source 1..75: mol_type = other DNA
atcagtgatatgacgggcacccgaccatttattgtgatgccggaaggaaagaacggcggcattggactgccggtc

SEQ ID NO: 821391 - DNA, 75 bp, synthetic construct
  source 1..75: mol_type = other DNA
ccgttttatctccgtaacaaggcaactggaagagggtcgtttccgttatcaattcacaggtaaatattatgtcca

SEQ ID NO: 821392 - DNA, 75 bp, synthetic construct
  source 1..75: mol_type = other DNA
atggggctggtgcgtaaaccgggtgtagtaaccgcggacacacttaacattctggggcgtgatgcactcaccctt

SEQ ID NO: 821393 - DNA, 75 bp, synthetic construct
  source 1..75: mol_type = other DNA
atgactgactcacgtcttagtatcaacaatctctgcgtcgattatccggagtcccgggtcgtcaacaatgtcagt

SEQ ID NO: 821394 - DNA, 75 bp, synthetic construct
  source 1..75: mol_type = other DNA
ccgtttgtgctggattctgtcgttgaggctgttgagtctggcgtcaaattgattgtggtgattaccgaaggtgtg

SEQ ID NO: 821395 - DNA, 75 bp, synthetic construct
  source 1..75: mol_type = other DNA
acctcgaccagattatgaggtagttattgaaaacagtaccagtgatgagtcattatgtcagcaacctggagataa

SEQ ID NO: 821396 - DNA, 75 bp, synthetic construct
  source 1..75: mol_type = other DNA
tcgggtgatggtgatgtatcagggaaataagatagatgaaatgcgcgccgacgcactccccacggcaacgcatcc

SEQ ID NO: 821397 - DNA, 75 bp, synthetic construct
  source 1..75: mol_type = other DNA
acgcctgagtcgccgcgaaaaagaagagaaaataaataccgtaattcaggctgtcggccttaatacgcgagtgtt

SEQ ID NO: 821398 - DNA, 75 bp, synthetic construct
  source 1..75: mol_type = other DNA
cctgcgaacatgcgggtatcgcaccggatattttatgtctcggcaaagccttaacgggcggtacaatgacgcttt

SEQ ID NO: 821399 - DNA, 75 bp, synthetic construct
  source 1..75: mol_type = other DNA
gttaatagcgagaatgaaaaaatcctggcaacactggcttcattacaaaaagaagagcctgaagcctttgtcgct

SEQ ID NO: 821400 - DNA, 75 bp, synthetic construct
  source 1..75: mol_type = other DNA
ggaaactttcgcacagtacgtggctgatacgcacacaccagaaatacaggccaagagaggccggaaaggtggtat

SEQ ID NO: 821401 - DNA, 75 bp, synthetic construct
  source 1..75: mol_type = other DNA
gtggcgcgaggaagcctacgccctcgatgaactggctgattatctcgatttgagagcctcagagcgtcgtagcgt

SEQ ID NO: 821402 - DNA, 75 bp, synthetic construct
  source 1..75: mol_type = other DNA
tttcccttttcatgttgcctggtttttcggctgataacctgttgcgctggcatgatgcgcagcatttctcggtgc

SEQ ID NO: 821403 - DNA, 75 bp, synthetic construct
  source 1..75: mol_type = other DNA
ggtttcagatgggctatcaacctgggcgatatttggtgcaatgggcgcacggtaaaccactgaacgtgctgttga

SEQ ID NO: 821404 - DNA, 75 bp, synthetic construct
  source 1..75: mol_type = other DNA
cggcgcgaaggcaagtgggaatcgctgattttatccgcccgaacagcggcagcctacttaagcagattgaggcaa

SEQ ID NO: 821405 - DNA, 75 bp, synthetic construct
  source 1..75: mol_type = other DNA
gggaaaaattaccgcacaaaccgtattgtacgaacgatttcacgtacggcgttcgcattctgccgaaagacattg

SEQ ID NO: 821406 - DNA, 75 bp, synthetic construct
  source 1..75: mol_type = other DNA
cgtaaaaccgccgagatctttaatgttgctccttcaacggtacagcgaattaagaaggaagaagaggaggcgtaa

SEQ ID NO: 821407 - DNA, 75 bp, synthetic construct
  source 1..75: mol_type = other DNA
aatgttcatcagcaacaaaactgtcagcacttataaaagtcgcctgatggaaaaattagaatgtaaatcactgat

SEQ ID NO: 821408 - DNA, 75 bp, synthetic construct
  source 1..75: mol_type = other DNA
agttggctgacagctacagcaagaatgtcatcacccgcgttatcggcgaacagcagatgaaagagctggggatgc

SEQ ID NO: 821409 - DNA, 75 bp, synthetic construct
  source 1..75: mol_type = other DNA
atggctaatattggatacattagggtatcgactgtgcaacaaaacacagaccgtcaattagcaggagtaactctt

SEQ ID NO: 821410 - DNA, 75 bp, synthetic construct
  source 1..75: mol_type = other DNA
gaacgtgctgttgatgcccggccccgataacgccgggggcagtaaggagatggtagagggtttccgcgccgccat

SEQ ID NO: 821411 - DNA, 75 bp, synthetic construct
  source 1..75: mol_type = other DNA
cgcggcagcgaacgccagcctgacgattatcgaatccggtaaatggcaacagcaggtggcaaatattgaagcgca

SEQ ID NO: 821412 - DNA, 75 bp, synthetic construct
  source 1..75: mol_type = other DNA
cgttccgctttctccggctgaatgtcgggctattggcaagagcattgcgaaatacacgcacaggaacttcacgcc

SEQ ID NO: 821413 - DNA, 75 bp, synthetic construct
  source 1..75: mol_type = other DNA
gcctgcaacgtatgggtctaagtaactactggggttacaacccggtggcgatgtttgcgctgcatccggcgtatg

SEQ ID NO: 821414 - DNA, 75 bp, synthetic construct
  source 1..75: mol_type = other DNA
acaatcacccgcagcttaatgcagcaatgaagtcgcaaattgatgctatgtcgcatgtgatgtttggcggtatta

SEQ ID NO: 821415 - DNA, 75 bp, synthetic construct
  source 1..75: mol_type = other DNA
cttttatgggcaatccgctggcctgcgcagcagcaaacgccagcctggcgattctcgaatctggcgactggcagc

SEQ ID NO: 821416 - DNA, 75 bp, synthetic construct
  source 1..75: mol_type = other DNA
catcgtcatgaaatcgcggcggtgatcattgaaccgattgtccagggcgcaggcgggatgcgcatgtaccatccg

SEQ ID NO: 821417 - DNA, 75 bp, synthetic construct
  source 1..75: mol_type = other DNA
atcgctttaacccggcgaagttgttgattgatccttgcgcgcggcaaattgacggggaatttaaagataacccgc

SEQ ID NO: 821418 - DNA, 75 bp, synthetic construct
  source 1..75: mol_type = other DNA
agcggactgatttgcaaaaatccgttccacctggaatggcaggtgatggagtggcgcgaggaagcctataccctc

SEQ ID NO: 821419 - DNA, 75 bp, synthetic construct
  source 1..75: mol_type = other DNA
tttcccttttcatgttatcggcattttcggctgataacctgttgcgctggcatgatgcgcagcatttcacggtgc

SEQ ID NO: 821420 - DNA, 75 bp, synthetic construct
  source 1..75: mol_type = other DNA
tcgctggtgggaagaaggcgacggcaatgtccgttggctaaatcgatatgctcaacctttaagcacggatgagtg

SEQ ID NO: 821421 - DNA, 75 bp, synthetic construct
  source 1..75: mol_type = other DNA
ttactggggctacaatccggtggcgttgtttgcgctgcatccggcatatgccagttcgcctgaaacggcgctgga

SEQ ID NO: 821422 - DNA, 75 bp, synthetic construct
  source 1..75: mol_type = other DNA
cgttttgctgcctccagcgatgtttttaaacgtaatggtcgtctgccgagtgccgcgattaatctcgtcaccgcg

SEQ ID NO: 821423 - DNA, 75 bp, synthetic construct
  source 1..75: mol_type = other DNA
cgaattttcgtgcgattatcgcaatatggcgcaagcaattattgatggatgtatcggacacgttgaatacacggg

SEQ ID NO: 821424 - DNA, 75 bp, synthetic construct
  source 1..75: mol_type = other DNA
gttatcggcgaagatgctgcaaaagaaattgattttaaccgcgacaacgaattttcgtgcgattatcgcaatatg

SEQ ID NO: 821425 - DNA, 75 bp, synthetic construct
  source 1..75: mol_type = other DNA
ggcgtggctgtaaaagtaaattcaacttatgacaatagcaaagtattgttaaaagcagatggtagcaacacggtt

SEQ ID NO: 821426 - DNA, 75 bp, synthetic construct
  source 1..75: mol_type = other DNA
cgtttgactccggcggtcgtcgccacacgtcgttcagctccgcgtttgtttacccggaagttgatgacgatatcg

SEQ ID NO: 821427 - DNA, 75 bp, synthetic construct
  source 1..75: mol_type = other DNA
ctgcggtgcgtattacccacatcccgaccgggatcgtgacccagtgccagaacgaccgttcccagcacaagaaca

SEQ ID NO: 821428 - DNA, 75 bp, synthetic construct
  source 1..75: mol_type = other DNA
ggatctttgttagaaaggatggtaaacacgaagaaacagccagatggaatgggtttaaatatcgcagatggatag

SEQ ID NO: 821429 - DNA, 75 bp, synthetic construct
  source 1..75: mol_type = other DNA
ttgggcgagctggcgcagcaaatgaacagtccgtctttgattattattggccgggtcgttggcctgcgcgacaaa

SEQ ID NO: 821430 - DNA, 75 bp, synthetic construct
  source 1..75: mol_type = other DNA
cgtgattgacggtacgcttgcgcagttgggcgagctggcgcagcaaatgaacagtccgtctttgattattattgg

SEQ ID NO: 821431 - DNA, 75 bp, synthetic construct
  source 1..75: mol_type = other DNA
cgccgtttctgggaaaaactgttcgttaatgaccgcctggcgcagtcgctggcgaataacgatcagaaagccatt

SEQ ID NO: 821432 - DNA, 75 bp, synthetic construct
  source 1..75: mol_type = other DNA
cgttcatttttacgttgacgaaccgacctgtgcaacagttgccctcgcacaagatcagggcaacgtcagtggcaa

SEQ ID NO: 821433 - DNA, 75 bp, synthetic construct
  source 1..75: mol_type = other DNA
cgttcccggtattgtttattcagtagaattagtatgtacaagttgtggagccgcggaggagcttgatttgtatct

SEQ ID NO: 821434 - DNA, 75 bp, synthetic construct
  source 1..75: mol_type = other DNA
ggcgataagattggttgtaaatccttaggtagtaacacaagcgcggtacattttcttaatactgctgatgccagt

SEQ ID NO: 821435 - DNA, 75 bp, synthetic construct
  source 1..75: mol_type = other DNA
ctggagatgcaaaagaaaaatgccgagaaacaggcgatggaagacaccaagtccgacatcggctggggcagccag

SEQ ID NO: 821436 - DNA, 75 bp, synthetic construct
  source 1..75: mol_type = other DNA
tgacgatcccaagtgtaatctgcgcaggtctgatcctgccgaagttcctcggcaatcttgagcgcccaacgccat

SEQ ID NO: 821437 - DNA, 75 bp, synthetic construct
  source 1..75: mol_type = other DNA
atgaagagaatcttacttgtggctgcaatggccttaacaggatgccaacagctcaatgatggcgtgaatacagtt

SEQ ID NO: 821438 - DNA, 75 bp, synthetic construct
  source 1..75: mol_type = other DNA
ccgtggattcgctaccgtcaacaatgcggatatgccagttcgtctggttgttctgagaaacggcacgatcaatca

SEQ ID NO: 821439 - DNA, 75 bp, synthetic construct
  source 1..75: mol_type = other DNA
ccagcatcggcgcagaattcaacgcatggaaatgggcacaattgcgtgccggttatcgccagaacatggcatcaa

SEQ ID NO: 821440 - DNA, 75 bp, synthetic construct
  source 1..75: mol_type = other DNA
tctttttagaaaaatagagagaagtaatgatctcgcattacagatccgatattataaagaaaaaaacattggttt

SEQ ID NO: 821441 - DNA, 75 bp, synthetic construct
  source 1..75: mol_type = other DNA
cagatatcagtgattatcatcggacttatttttggtctggcgatgttctatgaagtggcctttattatgctggcg

SEQ ID NO: 821442 - DNA, 75 bp, synthetic construct
  source 1..75: mol_type = other DNA
atagcgctggagtggttgggtgaggcgtttttctggcagaacacctgcgccagccacagtgaacaggtattgcag

SEQ ID NO: 821443 - DNA, 75 bp, synthetic construct
  source 1..75: mol_type = other DNA
gtgtggttagtagaagacctcgtgattgtcagcgatacgttgcagaaagggagcgcggcgttgattacctcgctc

SEQ ID NO: 821444 - DNA, 75 bp, synthetic construct
  source 1..75: mol_type = other DNA
ggtgaagacgcggcaaaagagattgactttaaccatgacaatgatttttcgtgcgattatcgcaatatggcgcaa

SEQ ID NO: 821445 - DNA, 75 bp, synthetic construct
  source 1..75: mol_type = other DNA
aagtaccgccactcaaaatcttggtccagcatcaccagtatcaggtctgggtgctgtctgcaaagactatgaaga

SEQ ID NO: 821446 - DNA, 75 bp, synthetic construct
  source 1..75: mol_type = other DNA
taattattatctgctctttaaaacagccgatacaagctactgcggcgggatggtctggctggattactactctgg

SEQ ID NO: 821447 - DNA, 75 bp, synthetic construct
  source 1..75: mol_type = other DNA
cagcgacgtccattactggccttggtgctgtctgcaaagactatgaagaaaatgcgatggcagcagaaaaaaaat

SEQ ID NO: 821448 - DNA, 75 bp, synthetic construct
  source 1..75: mol_type = other DNA
gtagcggtctcctctggcggcacctctccggttctggcgcgcctgttgcgcgaaaaactcgaatcactgctgccg

SEQ ID NO: 821449 - DNA, 75 bp, synthetic construct
  source 1..75: mol_type = other DNA
ttgtacttcaaaagagaggtacgaacaacataaacgcaaaaacagcagcaaaaagaaaaactgttccggtggaac

SEQ ID NO: 821450 - DNA, 75 bp, synthetic construct
  source 1..75: mol_type = other DNA
tgaagcgcagcggactcgtgtgcagagaacggtcagagccgtttgatccggagaaacattttgactgttatacgg

SEQ ID NO: 821451 - DNA, 75 bp, synthetic construct
  source 1..75: mol_type = other DNA
gagagaatgctggagtatatcaactcatatatccgcaatgtttatggaagattcctttgtacgtcaaaagaaagg

SEQ ID NO: 821452 - DNA, 75 bp, synthetic construct
  source 1..75: mol_type = other DNA
tatccgtttcgctgcggaacagccggaaaacggtaaaaaccacccgcgtaacctgttcatctggcgttctaacct

SEQ ID NO: 821453 - DNA, 75 bp, synthetic construct
  source 1..75: mol_type = other DNA
gcgcactatgtaggtcaggaaaaactgcgtccgcaaaccggctggcagccgctggcgtttgctcttgactggcag

SEQ ID NO: 821454 - DNA, 75 bp, synthetic construct
  source 1..75: mol_type = other DNA
ggcaccgatgcggcaatggcgctggcgatgggccacgtaatgctgcgtgaattccacctcgacaacccaagccag

SEQ ID NO: 821455 - DNA, 75 bp, synthetic construct
  source 1..75: mol_type = other DNA
aggcgctgctctccgcgacgccacgcctgaacccggacgatcgtcgtgaacgcatcaaactcaccggtgaactgc

SEQ ID NO: 821456 - DNA, 75 bp, synthetic construct
  source 1..75: mol_type = other DNA
ttgccgatgagccggtttccgcgctggacgtctcagtgcgtgcgcaggtgctcaacctgatgatggatttgcagc

SEQ ID NO: 821457 - DNA, 75 bp, synthetic construct
  source 1..75: mol_type = other DNA
ctggcggtagtaggtgaatctggctgcggtaaatcgaccctcggtcggttgctgacgatgattgaaacgcccacc

SEQ ID NO: 821458 - DNA, 75 bp, synthetic construct
  source 1..75: mol_type = other DNA
ccttggtcgcgcgcttttactgctgcaaaaagagaagctaattactctgaaagagggaaaagggttattacctac

SEQ ID NO: 821459 - DNA, 75 bp, synthetic construct
  source 1..75: mol_type = other DNA
gcgacaaatcatggcgagcttgatgcgaacgtcttccagcatcgaccctttcttgaacaagataatcagacgcat

SEQ ID NO: 821460 - DNA, 75 bp, synthetic construct
  source 1..75: mol_type = other DNA
cgcatatgttctccggcggtcagcgtcagcgtatcgccattgcccgaggtctgatgctcgacccggacgtggtga

SEQ ID NO: 821461 - DNA, 75 bp, synthetic construct
  source 1..75: mol_type = other DNA
gcgcgcttcgtattgttgaatgttgggccagcgatgtgccaaacggcaaagtgaccgattttcgcatggcagtga

SEQ ID NO: 821462 - DNA, 75 bp, synthetic construct
  source 1..75: mol_type = other DNA
atgcaaaggaaaggcaatagactgttgattcagttatgcagtgcgatactgctattttttacatcgtcctggtat

SEQ ID NO: 821463 - DNA, 75 bp, synthetic construct
  source 1..75: mol_type = other DNA
acgacgacagcaaagtattgttaaaagcagatggtagcaacacggttgactataacttcgcaatctggtcaaact

SEQ ID NO: 821464 - DNA, 75 bp, synthetic construct
  source 1..75: mol_type = other DNA
atgaatatcactgctactgttcttcttgcttttggtatgtcgatggatgcctttgctgcatcaatcggtaaaggt

SEQ ID NO: 821465 - DNA, 75 bp, synthetic construct
  source 1..75: mol_type = other DNA
cagacgctggtgttctatatggggctgaatcaggctgcgactattcagcaaaagctgattgaacacggaatgcca

SEQ ID NO: 821466 - DNA, 75 bp, synthetic construct
  source 1..75: mol_type = other DNA
aacagtccatcgctaattattattggtcgggttgttggcctgcgcgataaactgaactggttctccaaccattaa

SEQ ID NO: 821467 - DNA, 75 bp, synthetic construct
  source 1..75: mol_type = other DNA
gtgtttccagcggaacaacgatagcaggaaagattgcgtcatggtatataggtaccaataatcagccgtggataa

SEQ ID NO: 821468 - DNA, 75 bp, synthetic construct
  source 1..75: mol_type = other DNA
tcgggcttaccgggttcggttcgcttgctgcaggcgtgtatctccagttcggtctggcgatgtctctgatgatgt

SEQ ID NO: 821469 - DNA, 75 bp, synthetic construct
  source 1..75: mol_type = other DNA
cgctgacggtgggcgtgctgtggattaacctcgaagccacctcgctgacgctgggtctggtatgggcttcgttag

SEQ ID NO: 821470 - DNA, 75 bp, synthetic construct
  source 1..75: mol_type = other DNA
cacgttgatcgtttacttccagcatcagtggcaaggctggggtaaacagcctgaagcgacgaaggctaacgctag

SEQ ID NO: 821471 - DNA, 75 bp, synthetic construct
  source 1..75: mol_type = other DNA
agccgcgccgtcgacacggtttctggctactggtaaccaccgcgattgccaccagcctggatgccatggctgtgg

SEQ ID NO: 821472 - DNA, 75 bp, synthetic construct
  source 1..75: mol_type = other DNA
tgttagccagccggtttgtccttgaatggaaccactggattgcgtttgtgctgctgatattcctcggcgggcgaa

SEQ ID NO: 821473 - DNA, 75 bp, synthetic construct
  source 1..75: mol_type = other DNA
ggtctggcgatgtctctgatgatgtcgggaaccctgctactcatttatgcgctgttagcggcaatgagggggaat

SEQ ID NO: 821474 - DNA, 75 bp, synthetic construct
  source 1..75: mol_type = other DNA
tgaacggacatgccggattgatcctcaacccgcgtgcgctggatctgcgtctgtttctcaatcagtgggccagtg

SEQ ID NO: 821475 - DNA, 75 bp, synthetic construct
  source 1..75: mol_type = other DNA
tgtttccgggccgggagccaccacgttaccgatgctggtcttctccagcgtgcggatgggggtgaatccggaaat

SEQ ID NO: 821476 - DNA, 75 bp, synthetic construct
  source 1..75: mol_type = other DNA
atgaataatttaccggtggttcgttcgccctggcggattgtgattttgctgctgggcttcacctttctctacgcg

SEQ ID NO: 821477 - DNA, 75 bp, synthetic construct
  source 1..75: mol_type = other DNA
aaaatgctgctcggtgtctttgtgctggcgctgctgggctggattttcagtaagtctctgggggttgatgaatcc

SEQ ID NO: 821478 - DNA, 75 bp, synthetic construct
  source 1..75: mol_type = other DNA
gtggagaatttaaaacaacagccgtattaagcgggtatgcttccggtactacctggctggtattctcagcgttca

SEQ ID NO: 821479 - DNA, 75 bp, synthetic construct
  source 1..75: mol_type = other DNA
tactgtttggtatctacctggcggcaattgttggtctggttattaagccattcccggaacctgtcgtactgttaa

SEQ ID NO: 821480 - DNA, 75 bp, synthetic construct
  source 1..75: mol_type = other DNA
attacgtttcatgcggactggaaacggctgaagggtttcgcagaatgcctttatctcagattcctgccgctaccc

SEQ ID NO: 821481 - DNA, 75 bp, synthetic construct
  source 1..75: mol_type = other DNA
gatgacgcgccggtgactaatgacagcatctggcatgtgccggcccatcaggacgatatcgaacacctgcagaat

SEQ ID NO: 821482 - DNA, 75 bp, synthetic construct
  source 1..75: mol_type = other DNA
ggcgatccagaaccggtgtccatccctcccgcaaacagcctcgtcaccgctgactctgcaggtcaggccacaccg

SEQ ID NO: 821483 - DNA, 75 bp, synthetic construct
  source 1..75: mol_type = other DNA
cgccctggcggattgtgattttgctgctgggcttcacctttctctacgcgccaatgctgatgctggttatctatt

SEQ ID NO: 821484 - DNA, 75 bp, synthetic construct
  source 1..75: mol_type = other DNA
atgaatacgaatgtagtatcaaacagtaaaagacttattcgtttacaagaagtattaaatcgtactggtttatgt

SEQ ID NO: 821485 - DNA, 75 bp, synthetic construct
  source 1..75: mol_type = other DNA
gagaaaaacgagagcaggtaaaggaaagttttcgccgcaatgaagatctgaccccgcttgtacaccttgcccagg

SEQ ID NO: 821486 - DNA, 75 bp, synthetic construct
  source 1..75: mol_type = other DNA
gctccttattatcgaaagttaaattcttcgaatggttagctgaagtctttaaaaataacctggcatttgatggtc

SEQ ID NO: 821487 - DNA, 75 bp, synthetic construct
  source 1..75: mol_type = other DNA
aagaataccgcaagcatatttttggtgagagaaaacaggatgactggagcctatatggctatggcaccaggacaa

SEQ ID NO: 821488 - DNA, 75 bp, synthetic construct
  source 1..75: mol_type = other DNA
atggaaatatggggacgccagcaggaagaataccgcaagcatatttttggtgagagaaaacaggatggctggagc

SEQ ID NO: 821489 - DNA, 75 bp, synthetic construct
  source 1..75: mol_type = other DNA
tggcaaaatattgataaaatgattcaagtttgtgatgacacagtgataaacaatgaagcaggtaagtatgaattc

SEQ ID NO: 821490 - DNA, 75 bp, synthetic construct
  source 1..75: mol_type = other DNA
tgccgctggactggtgggttcaaagctgtcacaggctaccgggtatagtgacagaccattagacgcacttggtgc

SEQ ID NO: 821491 - DNA, 75 bp, synthetic construct
  source 1..75: mol_type = other DNA
gccgttaaaatcctgacgttcctgaataatcaggatatcggctcgctggtggcgctcataacgcgccggggaggt

SEQ ID NO: 821492 - DNA, 75 bp, synthetic construct
  source 1..75: mol_type = other DNA
gcccgtgctctggcgcagcagaccactgaaacgatcggtctggtcgttggtgatgtttccgatccgtttttcggc

SEQ ID NO: 821493 - DNA, 75 bp, synthetic construct
  source 1..75: mol_type = other DNA
atggcaaccgttccggctggccgtcaatgtttcggcgagccaagtggggccagatttcgacaagtgggtaaaggg

SEQ ID NO: 821494 - DNA, 75 bp, synthetic construct
  source 1..75: mol_type = other DNA
tggtcactccgctggtgatttacaccatgtatccgccagaaattaaaaaggtcgataacaaaaccatcgctaaag

SEQ ID NO: 821495 - DNA, 75 bp, synthetic construct
  source 1..75: mol_type = other DNA
gcaccgttaatgttaaccgcgctggcactgttgttctccaactcctatggcggcatggttactcactatggcggc

SEQ ID NO: 821496 - DNA, 75 bp, synthetic construct
  source 1..75: mol_type = other DNA
gattgtggtgaacaagtgggacggcctgagccaggaagtgaaggagcaggtgaaagagacgctggacttccgtct

SEQ ID NO: 821497 - DNA, 75 bp, synthetic construct
  source 1..75: mol_type = other DNA
agtacgtgaagcgtatgacagctccacccgtcgtgtggggacctctatgctgacgcgcatcatgacgatggctgt

SEQ ID NO: 821498 - DNA, 75 bp, synthetic construct
  source 1..75: mol_type = other DNA
agaaacccgcatggcggaacagtcgctgctggcgattgaagaagcggacgtcgtactgtttatggtggatgcgcg

SEQ ID NO: 821499 - DNA, 75 bp, synthetic construct
  source 1..75: mol_type = other DNA
agaatgaagtgcgcggggagctgagttttattgaaaaagcgcaggggatccacaaagcccgctctatatatgaag

SEQ ID NO: 821500 - DNA, 75 bp, synthetic construct
  source 1..75: mol_type = other DNA
ggtgttaactgtacaggctcctgcagctggaaaatctacgttaaaaaaggtctggttacctgggaaagccaacag

SEQ ID NO: 821501 - DNA, 75 bp, synthetic construct
  source 1..75: mol_type = other DNA
gaagattcgctttcgcgatattcaggcacagccacgtaaaattatctccagccccacctggtctggaaagcgatc

SEQ ID NO: 821502 - DNA, 75 bp, synthetic construct
  source 1..75: mol_type = other DNA
ccggaagaagttgagtggcaaactgcagcgattgaaggcaagctcgacctgctggtgacgcttgacttccgcatg

SEQ ID NO: 821503 - DNA, 75 bp, synthetic construct
  source 1..75: mol_type = other DNA
ccagaagaagtcgagtggcaaactgcggcgattgaaggcaagctcgacctgctggtgacgctcgacttccgcatg

SEQ ID NO: 821504 - DNA, 75 bp, synthetic construct
  source 1..75: mol_type = other DNA
ggtgttaactgtacaggctcctgcagctggaaaatctacgttaaaaagggtctggttacctgggaaaaccaacag

SEQ ID NO: 821505 - DNA, 75 bp, synthetic construct
  source 1..75: mol_type = other DNA
ggtgttaactgtacaggctcctgcagctggaaaatctacgttaaaaatggtctggttacctgggaaatccaacag

SEQ ID NO: 821506 - DNA, 75 bp, synthetic construct
  source 1..75: mol_type = other DNA
atgcgtctggtaacattgatgaatctgggaagccacattttgctgaatgttgtgaccatgccttaccggcggagc

SEQ ID NO: 821507 - DNA, 75 bp, synthetic construct
  source 1..75: mol_type = other DNA
ctgatattccagctgaagcaggaatggatgtttctggccgggcgaggagcctttccgctgtttgccctggtgtgg

SEQ ID NO: 821508 - DNA, 75 bp, synthetic construct
  source 1..75: mol_type = other DNA
gttgaaagcggcaaggtgagcaatctcgatgcaatggatattaccgcgccatatacgccaggagcgctgcgcggc

SEQ ID NO: 821509 - DNA, 75 bp, synthetic construct
  source 1..75: mol_type = other DNA
actcggtgccagcgacgggatcaaaccggaagaagttgagtggcaaactgcagcgattgaaggcaagctcgacct

SEQ ID NO: 821510 - DNA, 75 bp, synthetic construct
  source 1..75: mol_type = other DNA
atgcgtgcttttggtgaaagtctggtggcttatcgcccgcctatcgacacccgcagtgtcagtgaaatgcgccag

SEQ ID NO: 821511 - DNA, 75 bp, synthetic construct
  source 1..75: mol_type = other DNA
taaagttgccgtcgataaggtggccgctgctgttgcctggcaggaacgcatgaacaagcccgtcatgccggaact

SEQ ID NO: 821512 - DNA, 75 bp, synthetic construct
  source 1..75: mol_type = other DNA
gttttcagctatgccgataacgtgccgttggcgctgctgtatggttctgcgtcggtagtctcgttcctgtacgcg

SEQ ID NO: 821513 - DNA, 75 bp, synthetic construct
  source 1..75: mol_type = other DNA
gatgctggcagaagaagtacctgaggcgcgggaacatatgggaagctacgggctggcgatggtacggcagagtga

SEQ ID NO: 821514 - DNA, 75 bp, synthetic construct
  source 1..75: mol_type = other DNA
taactcgtttgtattactggcgacgcaaagaaatctgctgatgctaaaccgtgcttcagccgaggagattcagga

SEQ ID NO: 821515 - DNA, 75 bp, synthetic construct
  source 1..75: mol_type = other DNA
gccggttcccgatcgcgcggtttctttggcgatcaactcccgcaccgggcgtacgcaaaaccattttcatattca

SEQ ID NO: 821516 - DNA, 75 bp, synthetic construct
  source 1..75: mol_type = other DNA
ttggtgcggcagaggcaaattgctcaccggtcatggcatttcttgtcagactgaccggtgaggaggttctgcggg

SEQ ID NO: 821517 - DNA, 75 bp, synthetic construct
  source 1..75: mol_type = other DNA
gatgctggcggaagaagtgccagaagcgcgggaacatatgggaagttacgggctggcgatggtacggcagagtga

SEQ ID NO: 821518 - DNA, 75 bp, synthetic construct
  source 1..75: mol_type = other DNA
caaccagcagcaaaaccaaaatccttcgccatgtgtggaagtcaaacccgatgccggatatgtggttttaaaaga

SEQ ID NO: 821519 - DNA, 75 bp, synthetic construct
  source 1..75: mol_type = other DNA
atccataaagcacggatgatttatgaagagcagttaagcaaaagtgtgtccatgcgagagttgtcatcccttttg

SEQ ID NO: 821520 - DNA, 75 bp, synthetic construct
  source 1..75: mol_type = other DNA
cctgcggtttgcagggagggatcgttgagattgcctctgttgatgtcattgacggaaaaatcgtcaatcccatga

SEQ ID NO: 821521 - DNA, 75 bp, synthetic construct
  source 1..75: mol_type = other DNA
gctgaagctttgggctgtaatgacatgaatattgatgaacttaaacagattacgcatttaggtcaaactcggcgg

SEQ ID NO: 821522 - DNA, 75 bp, synthetic construct
  source 1..75: mol_type = other DNA
tcagcaggatggagaacgccctgaaatatctgtacccctggatccccgaactgatggagtcaggactggggcgac

SEQ ID NO: 821523 - DNA, 75 bp, synthetic construct
  source 1..75: mol_type = other DNA
atacggatgcagagccggtaccggaaatctctgctcctgctactgagcccgaacagcatggtatagcccgggcag

SEQ ID NO: 821524 - DNA, 75 bp, synthetic construct
  source 1..75: mol_type = other DNA
ctgatgattggtggcagtactgaagaagagccaccactgctggatgatgagcatgccgggaagttactccgtctg

SEQ ID NO: 821525 - DNA, 75 bp, synthetic construct
  source 1..75: mol_type = other DNA
aaaccgcgctgaactcttcaactgacgtgctgttcactgcggcagcttgccaggcggaagacgatcgtctggcaa

SEQ ID NO: 821526 - DNA, 75 bp, synthetic construct
  source 1..75: mol_type = other DNA
tattccggcgtctggctcatggcagcctggtaaaacaaatcctggtcggccttgttctggggattcttctggcat

SEQ ID NO: 821527 - DNA, 75 bp, synthetic construct
  source 1..75: mol_type = other DNA
acaataaatataaaacatcaataattaaattctcgttatatagcgcagtaatattcatactttcacttgcattgt

SEQ ID NO: 821528 - DNA, 75 bp, synthetic construct
  source 1..75: mol_type = other DNA
taattttaccgcgatagatcatgcggaattatataatcttggtaagatcaaggatgaaatctatggagaacaaaa

SEQ ID NO: 821529 - DNA, 75 bp, synthetic construct
  source 1..75: mol_type = other DNA
tggcgaagaagtgatgttgcactgggcaaataaggaccagtactacattaaaagcggtgaaaacttcgctaatta

SEQ ID NO: 821530 - DNA, 75 bp, synthetic construct
  source 1..75: mol_type = other DNA
gatttagttgaaactttcaactatctcattggattacatgtgaaatccatcgaatccaatatcgaacgtggctat

SEQ ID NO: 821531 - DNA, 75 bp, synthetic construct
  source 1..75: mol_type = other DNA
atatctgtcacccatttctcacagggagcttccgctttgaactgtcgctgaaggatattttctgcagcgagtccc

SEQ ID NO: 821532 - DNA, 75 bp, synthetic construct
  source 1..75: mol_type = other DNA
aaggtgatagcagcgtggccattggtcaaggtagcagcagctccgttgataccggcattgccttgggtagcagct

SEQ ID NO: 821533 - DNA, 75 bp, synthetic construct
  source 1..75: mol_type = other DNA
tgccaaaggttctcgtgacactagcgtaacggaaaatggcgtggtgattggttatgacaccactgacggcgaact

SEQ ID NO: 821534 - DNA, 75 bp, synthetic construct
  source 1..75: mol_type = other DNA
taattttgtccatcattacttccgttattgtgtatggttattgcttatttaactttagtctttctatagatggag

SEQ ID NO: 821535 - DNA, 75 bp, synthetic construct
  source 1..75: mol_type = other DNA
atgaatacatttaaaaataaaaatactgaaatcttttatgttgtgtccttgcatgtctacgctgagatttttaac

SEQ ID NO: 821536 - DNA, 75 bp, synthetic construct
  source 1..75: mol_type = other DNA
ctgggtaccggttccgttgcagaggaagaaaatacaatctctgtaggttcttctactaaccaacgccgtatcacc

SEQ ID NO: 821537 - DNA, 75 bp, synthetic construct
  source 1..75: mol_type = other DNA
aaaaaatgactatcaagtatttgaaacttgaaagttatgaggatgctcttaataatatacaattacgaagttatt

SEQ ID NO: 821538 - DNA, 75 bp, synthetic construct
  source 1..75: mol_type = other DNA
ccgattgaatcgcagttcaactatacgctggaaccggcacaatctagtttacctatgacgccgatgaccctgcga

SEQ ID NO: 821539 - DNA, 75 bp, synthetic construct
  source 1..75: mol_type = other DNA
ataccggtgcgccgaccaaagtattagcgcccgatacggcgggtaaattttatccgaaccaggattgcagtagtt

SEQ ID NO: 821540 - DNA, 75 bp, synthetic construct
  source 1..75: mol_type = other DNA
tttaaagaaacgcattcagcaggaagcggataaaaacggcagatcaatgaactcagagattgtgcttatccttca

SEQ ID NO: 821541 - DNA, 75 bp, synthetic construct
  source 1..75: mol_type = other DNA
accggtgctgctgtcagtagaaggtcactttacgcttgaggctaatccggatatcggggcaccgactaaggtatt

SEQ ID NO: 821542 - DNA, 75 bp, synthetic construct
  source 1..75: mol_type = other DNA
tggctgtaatcagcctttttacacttatgggatgtaataatcgtgccgaagtcgagatgctttctccggcgcagg

SEQ ID NO: 821543 - DNA, 75 bp, synthetic construct
  source 1..75: mol_type = other DNA
attatcgagcgaaaggggatgcactggagatgctcgatcgtgaaggtaatcccattgaatcgcagttcaactaca

SEQ ID NO: 821544 - DNA, 75 bp, synthetic construct
  source 1..75: mol_type = other DNA
ccggtatctgggcgtgctgctttacgacgccgaccgcatcgaggaagcgtcgagcaccgagcgcgaagttgacct

SEQ ID NO: 821545 - DNA, 75 bp, synthetic construct
  source 1..75: mol_type = other DNA
atgatgcctgcctattacctgatggtagtggcggtgattggtttaatcaccggcgtaaccatgaaagagacggca

SEQ ID NO: 821546 - DNA, 75 bp, synthetic construct
  source 1..75: mol_type = other DNA
gcgcgatgacaaacagccagtgtggctggacgaataccgcaacaaaaacggttacgaaggggcgcgtaaggcgct

SEQ ID NO: 821547 - DNA, 75 bp, synthetic construct
  source 1..75: mol_type = other DNA
aaaaatgcaaagctttattagtcgtttatatgctaacaagtcgcaaaaatttgattatcagcatgaagaccgcac

SEQ ID NO: 821548 - DNA, 75 bp, synthetic construct
  source 1..75: mol_type = other DNA
gtgttttttccggaacagacagctggtggcgcgtttttgatttttccgttctgaacggatcgtttgggcaactgc

SEQ ID NO: 821549 - DNA, 75 bp, synthetic construct
  source 1..75: mol_type = other DNA
gcatgaggaacagattgccgcagccgaattgaaaaaacagcaattgattaatcagtccaacgaatatatgaatac

SEQ ID NO: 821550 - DNA, 75 bp, synthetic construct
  source 1..75: mol_type = other DNA
ctaacctgacggattccgttggcgaccttaaggacgattctctgctgtggaacaaagcggctggcgcattcagcg

SEQ ID NO: 821551 - DNA, 75 bp, synthetic construct
  source 1..75: mol_type = other DNA
gtcgcccgcgttgaattacacaatgaagaacagctttatattgccagtgccaccgccacctatatggtaggttga

SEQ ID NO: 821552 - DNA, 75 bp, synthetic construct
  source 1..75: mol_type = other DNA
tcagcgagatgcgcgtggtgcagggaatggacgccgggctttatcaaaaactgaaaccgctggtctgtgcgctgc

SEQ ID NO: 821553 - DNA, 75 bp, synthetic construct
  source 1..75: mol_type = other DNA
cgcgttttttcccactgccgcaggggcaaattgccgtcactctgcgtgacgcacaggcctgctttaacctgaatg

SEQ ID NO: 821554 - DNA, 75 bp, synthetic construct
  source 1..75: mol_type = other DNA
tttattccgaaaatcatcgccgtatttatcgccattattattgccggaccgtggatgctcaatctgttgctggat

SEQ ID NO: 821555 - DNA, 75 bp, synthetic construct
  source 1..75: mol_type = other DNA
gtcgcccgtgtcgaactgcacaatgaagaacagctttatattgccagtgctaccgccacctatatggtaggttga

SEQ ID NO: 821556 - DNA, 75 bp, synthetic construct
  source 1..75: mol_type = other DNA
tgcgcccaggcagaggcgagcgttttactgctaccagtagcctgttgcgtgcaggcaataaagtcgccgtcgccc

SEQ ID NO: 821557 - DNA, 75 bp, synthetic construct
  source 1..75: mol_type = other DNA
ggcattggagcaattccgaatgggggctccactcgcagttgcctatcaattgacatctgatattactaaggactt

SEQ ID NO: 821558 - DNA, 75 bp, synthetic construct
  source 1..75: mol_type = other DNA
acagcgagtatctcgcccgctcggtgccgttctacgccgccaatcaaccgctggccgatatcagcgagatgcgcg

SEQ ID NO: 821559 - DNA, 75 bp, synthetic construct
  source 1..75: mol_type = other DNA
gatcttttatatggattttcgctgttcgtttgtagcacgacattcgaacagcgccgacttgtccaccggcttatt

SEQ ID NO: 821560 - DNA, 75 bp, synthetic construct
  source 1..75: mol_type = other DNA
caatacattagatgtcacgcaaagtgtgattcttgaggcgctgtttgacccgtggttaagccctgttcaggcgcg

SEQ ID NO: 821561 - DNA, 75 bp, synthetic construct
  source 1..75: mol_type = other DNA
gtcagataaaatatccgttattgaaaggctaatagacgaaagggttcagggaatagaaacaagattatcccgtgg

SEQ ID NO: 821562 - DNA, 75 bp, synthetic construct
  source 1..75: mol_type = other DNA
attgtagttgaaggaaaccgtcgcctatccgcggtcaaattattacgcgatccgacactatgtgaaaatccaagt

SEQ ID NO: 821563 - DNA, 75 bp, synthetic construct
  source 1..75: mol_type = other DNA
tggggacggaagcgatgaaagtcgctctggcgctggccgccccgctgctactggtggcgctggtgactggcctta

SEQ ID NO: 821564 - DNA, 75 bp, synthetic construct
  source 1..75: mol_type = other DNA
caccaatatcaccaacctgactgacgctgttaacggtctcggtgacgactccctgctgtggaacaaaacagctgg

SEQ ID NO: 821565 - DNA, 75 bp, synthetic construct
  source 1..75: mol_type = other DNA
cttatgccatcgctggcggcagttacaacaacgtcggtgacgcgctggaagcgatcgataccacgctggatgatg

SEQ ID NO: 821566 - DNA, 75 bp, synthetic construct
  source 1..75: mol_type = other DNA
aataccgtcaaatcatcaacgtcgccgatggttccgaagcccatgacgccgttacggttcgccagctgcaaaatg

SEQ ID NO: 821567 - DNA, 75 bp, synthetic construct
  source 1..75: mol_type = other DNA
actgcgccgacttacaccattgcaaatgccgagtacaacaacgtcggtgacgccctggatgcgctcgacgataac

SEQ ID NO: 821568 - DNA, 75 bp, synthetic construct
  source 1..75: mol_type = other DNA
ggcggcagttacaacaacgtcggtgacgcgctggaagcgatcgataccacgctggatgatgctctgctgtgggat

SEQ ID NO: 821569 - DNA, 75 bp, synthetic construct
  source 1..75: mol_type = other DNA
ggtactgactacactaacgtcggtgatgctctggcagccattaacacatcatttagcacatcactcggcgacgcc

SEQ ID NO: 821570 - DNA, 75 bp, synthetic construct
  source 1..75: mol_type = other DNA
ttggcgccgccagccccgttttgttattaattgcccgaatcgccatcgttttgattttcattatttttggttttc

SEQ ID NO: 821571 - DNA, 75 bp, synthetic construct
  source 1..75: mol_type = other DNA
tgtttattttctacacgctgggtacggcggtgattggtcaccattactgggatatgaccggcgatgcggttgggc

SEQ ID NO: 821572 - DNA, 75 bp, synthetic construct
  source 1..75: mol_type = other DNA
atccccagtcaggtattcggttgggaaacggcgatcccttttcttccctggactattgttccttactggagtctg

SEQ ID NO: 821573 - DNA, 75 bp, synthetic construct
  source 1..75: mol_type = other DNA
gaagccctggatgcgctcgatgataacgcgctgctgtgggatgaagacgcaggtgcctacaacgccagccatgat

SEQ ID NO: 821574 - DNA, 75 bp, synthetic construct
  source 1..75: mol_type = other DNA
aatcacaatctgtaactgcacgtattgcccatgaaattattgagggcatggagaacgtaaaagaagaaggcgaaa

SEQ ID NO: 821575 - DNA, 75 bp, synthetic construct
  source 1..75: mol_type = other DNA
gtacagggcagtttataagtgcagccatgcgtggcgagatcaaacgccgccagcgccgcaaggccaaagagcagg

SEQ ID NO: 821576 - DNA, 75 bp, synthetic construct
  source 1..75: mol_type = other DNA
ctttacgggcaatgtgacggtggataaaaacctgcatgttaaggggaatttcgcgcttgatggtacggggaaatc

SEQ ID NO: 821577 - DNA, 75 bp, synthetic construct
  source 1..75: mol_type = other DNA
atgatgaatgacgaagtcatcagccgccttctggcccccgtgatgcggggtattcgcctgttgtttggccggggc

SEQ ID NO: 821578 - DNA, 75 bp, synthetic construct
  source 1..75: mol_type = other DNA
tgccgatcgtacgcgctgcgaaatcatcggtaacggcggtccattagacgcagaaaatgcgctggagttgttcct

SEQ ID NO: 821579 - DNA, 75 bp, synthetic construct
  source 1..75: mol_type = other DNA
cggagagctacacggttggctccaatgagttttacctggggtatgccaccagccgccagacggcgctgtgcctgg

SEQ ID NO: 821580 - DNA, 75 bp, synthetic construct
  source 1..75: mol_type = other DNA
gtttgaccgggtgcatatcggcctcgacttctttgatgcctctatcaaccgcattgccgcgtgggtcattggtac

SEQ ID NO: 821581 - DNA, 75 bp, synthetic construct
  source 1..75: mol_type = other DNA
ggctgattccggggccgaaacggcttaatttacatgccatctatctggaatcagacacgccagtctcgcgcgatc

SEQ ID NO: 821582 - DNA, 75 bp, synthetic construct
  source 1..75: mol_type = other DNA
tcgtctgggcaatggcgcgttacatctgggtgatgagccggatccccgatgccccggtgtcgggatttgaaagcg

SEQ ID NO: 821583 - DNA, 75 bp, synthetic construct
  source 1..75: mol_type = other DNA
agaatactatcaggagattggtgataaaaaagcgcgtaagttgaaaatgaaaagagcacaaagattacttgagaa

SEQ ID NO: 821584 - DNA, 75 bp, synthetic construct
  source 1..75: mol_type = other DNA
agaatactatcaggagattggtgagaaaaaagcgcgtaagttgaaaatgaaaagattacaaagaatgcttgagaa

SEQ ID NO: 821585 - DNA, 75 bp, synthetic construct
  source 1..75: mol_type = other DNA
cctggaacaagaaaattatccgccattgcgtttacagggcagctttactggcggcaacgttgacgttgatggctc

SEQ ID NO: 821586 - DNA, 75 bp, synthetic construct
  source 1..75: mol_type = other DNA
tttgctgacgtactggaaaaaatgggggcgaccattagctggggggatgattatatttcctgcacgcgtggcgaa

SEQ ID NO: 821587 - DNA, 75 bp, synthetic construct
  source 1..75: mol_type = other DNA
gacacaatgatattattctgaccggcgagccacgcatgaaagaacgcccgattggtcacctggtggatgcgctgc

SEQ ID NO: 821588 - DNA, 75 bp, synthetic construct
  source 1..75: mol_type = other DNA
tctggatcccggatggcatgaaagatatcaccgttgaccgtctcgctccgcgccagcgtctgctggcagctctgg

SEQ ID NO: 821589 - DNA, 75 bp, synthetic construct
  source 1..75: mol_type = other DNA
aaacgtgaaggaatttctgcaatcttatcaatcgcccgaagtcgctaaagcggcagaaaccatctttaacggtgg

SEQ ID NO: 821590 - DNA, 75 bp, synthetic construct
  source 1..75: mol_type = other DNA
ctgaatgcaggattgaccggtttaacagggttgcagggtattgcaggtaagccaatcgaccgtaacgcctcgctc

SEQ ID NO: 821591 - DNA, 75 bp, synthetic construct
  source 1..75: mol_type = other DNA
atggcagaagtgggctttatactgactatcccattctttttaaagcgatttggcattaaaaccgtcatgctgatg

SEQ ID NO: 821592 - DNA, 75 bp, synthetic construct
  source 1..75: mol_type = other DNA
cgcatcaagctcaccggtgaactgccaagcccgctgaatccaccgccgggttgcgccttcaacgcccgctgtcgt

SEQ ID NO: 821593 - DNA, 75 bp, synthetic construct
  source 1..75: mol_type = other DNA
atccagatcgtcttccagaacccttacggttcgctgaatccgcgtaaaaaagttgggcaaattctcgaagagccg

SEQ ID NO: 821594 - DNA, 75 bp, synthetic construct
  source 1..75: mol_type = other DNA
atccagatcgtcttccagaacccttacggttcgctgaatccgcgtaaaaaagtcgggcaaattcttgaagagccg

SEQ ID NO: 821595 - DNA, 75 bp, synthetic construct
  source 1..75: mol_type = other DNA
cgttcccccgctaacgcccggagattgatggactcaatcgatagcctgaaatcaggcaaaggaacggaaaaggac

SEQ ID NO: 821596 - DNA, 75 bp, synthetic construct
  source 1..75: mol_type = other DNA
atgacacaacaaggggatgctgtggccggaaagctggcgacagaaaaagtaggtattaaagggtatctggcattt

SEQ ID NO: 821597 - DNA, 75 bp, synthetic construct
  source 1..75: mol_type = other DNA
acgacacttgcagatggcacccgtcacagtgggcaatcggttaaatccgtctacagcaaatccttctaccagaca

SEQ ID NO: 821598 - DNA, 75 bp, synthetic construct
  source 1..75: mol_type = other DNA
acttattggggaacgagtaatgtcgatgagcaattccaggctggtttaaatactgcattcgaagatatcaactgg

SEQ ID NO: 821599 - DNA, 75 bp, synthetic construct
  source 1..75: mol_type = other DNA
ggtatcgggaaaaacatgggggcactgggcgctctgtctgtggatatgacgcaggctaattccacacttcccgat

SEQ ID NO: 821600 - DNA, 75 bp, synthetic construct
  source 1..75: mol_type = other DNA
ctacgccacgctgaattatcgcggtggttacggcaatgccaacatcggttacagccatagcgatgatattaagca

SEQ ID NO: 821601 - DNA, 75 bp, synthetic construct
  source 1..75: mol_type = other DNA
ctgatgagccgcaactttggcgcgaaatttggccttctggaagccggttataaagccgatttaaccatttgcgat

SEQ ID NO: 821602 - DNA, 75 bp, synthetic construct
  source 1..75: mol_type = other DNA
cgcatcttaatcttgtagaggatgtttttattcagaacagattctggacaatatctgtccagtcatttcttaatg

SEQ ID NO: 821603 - DNA, 75 bp, synthetic construct
  source 1..75: mol_type = other DNA
cggcatagtagaaactatcacttttctagcactgagtatcggcttcttcaggcctgctgctggcatactgggaga

SEQ ID NO: 821604 - DNA, 75 bp, synthetic construct
  source 1..75: mol_type = other DNA
aagacgcgacagcgtcgcatcaggcattgattgccggatgcggcacgagtgccttatccggcctacagatcgtat

SEQ ID NO: 821605 - DNA, 75 bp, synthetic construct
  source 1..75: mol_type = other DNA
ggcatttacctggcagggcggcgaaccaacgttactcgggctggatttttaccgtcgtgcagtggcgctacaggc

SEQ ID NO: 821606 - DNA, 75 bp, synthetic construct
  source 1..75: mol_type = other DNA
ttggtgaagataaatttaagcagttaccggcgcagtgtcgcagttgcaacgtgttaaaagcgtgctggggaggct

SEQ ID NO: 821607 - DNA, 75 bp, synthetic construct
  source 1..75: mol_type = other DNA
gtgatctttttctggttgctgatgcaccggacccacgccggacgcaatgtcttcctgattgggcagagcccccgc

SEQ ID NO: 821608 - DNA, 75 bp, synthetic construct
  source 1..75: mol_type = other DNA
gatagtcacgtggcgatttttcggggatggcattgcaaatatttatgttccgaactctaatttgaaagttctata

SEQ ID NO: 821609 - DNA, 75 bp, synthetic construct
  source 1..75: mol_type = other DNA
tagaaaaagaggcgttggttgcttttttgcagaatgatgttttaatttatattttaactgatcttcaagaagtta

SEQ ID NO: 821610 - DNA, 75 bp, synthetic construct
  source 1..75: mol_type = other DNA
gcgggaacgcaggaaggtattgccgatatttccgtctggggatcgcggctgcccgctggcggaacgcagtggagc

SEQ ID NO: 821611 - DNA, 75 bp, synthetic construct
  source 1..75: mol_type = other DNA
tttccggttttgaaaacccggaaggttcgctgaccggtgggattcaggctactggtaattatccgggcaaagcgc

SEQ ID NO: 821612 - DNA, 75 bp, synthetic construct
  source 1..75: mol_type = other DNA
attgccgcatgggtcattggtacgcgcaatatgaaaaaagccctgctacgtgcgttgctggaacctaccactgaa

SEQ ID NO: 821613 - DNA, 75 bp, synthetic construct
  source 1..75: mol_type = other DNA
attacatacctgattctaaatattatgatttcagtcaggcaagcggtgatggtgatttggttgctggcagaaatg

SEQ ID NO: 821614 - DNA, 75 bp, synthetic construct
  source 1..75: mol_type = other DNA
taacgtgttaaaagcatgttggggaggctgcccgaaacaccgctttatgctcgatgccagcggcaaaccggggct

SEQ ID NO: 821615 - DNA, 75 bp, synthetic construct
  source 1..75: mol_type = other DNA
cggcaaagacctgctggcacgactagcgcaattcgatctcatcgacagcaaaacgctggtcgctcatgggcttta

SEQ ID NO: 821616 - DNA, 75 bp, synthetic construct
  source 1..75: mol_type = other DNA
atgattgatgaatttcatgtgatgtatatgtataaaaaaatccaagcggaagccgcaactactgacatcaaaaca

SEQ ID NO: 821617 - DNA, 75 bp, synthetic construct
  source 1..75: mol_type = other DNA
agaatactatcaggagattggtgagaaaaaagcacataagttgaaaatgaaaagattacaaagaatgcttgagaa

SEQ ID NO: 821618 - DNA, 75 bp, synthetic construct
  source 1..75: mol_type = other DNA
cacagcgtgatggtcaacggtgtgatggtctatgaagaccgtcagtttaacttcgattgcgattccatttatgcg

SEQ ID NO: 821619 - DNA, 75 bp, synthetic construct
  source 1..75: mol_type = other DNA
atgacctgttttgaaactactgaccgtaacaacggcatcaaagagttgcaggaaggtgtagaagaaaacatccgc

SEQ ID NO: 821620 - DNA, 75 bp, synthetic construct
  source 1..75: mol_type = other DNA
gtttgaagagatgaaatttgccttctttaaacatcgcgatgcgggtggtccgctgtggcctgacagttttgccaa

SEQ ID NO: 821621 - DNA, 75 bp, synthetic construct
  source 1..75: mol_type = other DNA
tgttggtgtgcgtaacgaattatggatcctgccaaccgtgggctgtgtcaacggtattgcacggcagatccagaa

SEQ ID NO: 821622 - DNA, 75 bp, synthetic construct
  source 1..75: mol_type = other DNA
tcaggtatccagcgccctctccggcgcattgctaattgtcgttgtcgtaggtcgttctgtcagcctgcatcgtca

SEQ ID NO: 821623 - DNA, 75 bp, synthetic construct
  source 1..75: mol_type = other DNA
atcttaaagcaatggctgatttgctggcgcacggtcgtccggccagcgacattatgcaggcgcatttgctggtgg

SEQ ID NO: 821624 - DNA, 75 bp, synthetic construct
  source 1..75: mol_type = other DNA
atcatcttactctacaataaaaagtttattcattatttatacgagaaggctatgtgtatcataaatacgcgttaa

SEQ ID NO: 821625 - DNA, 75 bp, synthetic construct
  source 1..75: mol_type = other DNA
aaaaaacgattgtcagtgatgatatcagaaatataatcagaagaatgagtgatgattcttctgtatcatcatatg

SEQ ID NO: 821626 - DNA, 75 bp, synthetic construct
  source 1..75: mol_type = other DNA
ctgaaaaatggcttctgtcgcagagagatttttgtgaattgatctctgtcacagagatggaagcatacaggaatg

SEQ ID NO: 821627 - DNA, 75 bp, synthetic construct
  source 1..75: mol_type = other DNA
aaagtgctcacatttttcaacagtcaggatttgggaagcctgttcagtattctttcgcgattccgtggaggaggg

SEQ ID NO: 821628 - DNA, 75 bp, synthetic construct
  source 1..75: mol_type = other DNA
aatatggtgccgtgtgacgaagaagagcattacgacgactatgtgatgacgctttacgcgcagggcgtgctcact

SEQ ID NO: 821629 - DNA, 75 bp, synthetic construct
  source 1..75: mol_type = other DNA
taatcgtgcgccgacaatcgagtcgatcatcagccatcagccgctggaatataaccgctatctgaataagctggt

SEQ ID NO: 821630 - DNA, 75 bp, synthetic construct
  source 1..75: mol_type = other DNA
gacgagaatggctttaatatctacattctcgacgagagtaaccgtgttgaggtgtatcaccactgcgaaggtagc

SEQ ID NO: 821631 - DNA, 75 bp, synthetic construct
  source 1..75: mol_type = other DNA
acataaagcagttgaagaagttattgattcccctctttcggaggtcgcaaatttaattaaaatattacaatcttg

SEQ ID NO: 821632 - DNA, 75 bp, synthetic construct
  source 1..75: mol_type = other DNA
ttcagttaaccagttttgatgaaaaactgtcggaccgtcacgtcgatacacacagtgaagtcctgatatttgaag

SEQ ID NO: 821633 - DNA, 75 bp, synthetic construct
  source 1..75: mol_type = other DNA
atggctttgccagcgaagggatcatccagttcttcttcgaagaaacgcacgatgagaacggttttaatatctata

SEQ ID NO: 821634 - DNA, 75 bp, synthetic construct
  source 1..75: mol_type = other DNA
gatagcgaagagcgccagttactacaacgtaaatgtagtctgctggaaagctgggccgcctcgctgggtgtggaa

SEQ ID NO: 821635 - DNA, 75 bp, synthetic construct
  source 1..75: mol_type = other DNA
ttttattaccctcgcccacccgatcgaggtgaataacgaagtcattaaccacgtgttgatcgcctgtgccgccgc

SEQ ID NO: 821636 - DNA, 75 bp, synthetic construct
  source 1..75: mol_type = other DNA
ccccttttcgacagcgatctgatcggtttgtattttgcctgtgcgctggagcggcatcaaaacgaacgccagccg

SEQ ID NO: 821637 - DNA, 75 bp, synthetic construct
  source 1..75: mol_type = other DNA
ccgtttcacctacggctcaagcttcatcaacttcaacttgccgcagttctatcagattgtgaaggttgatggtcg

SEQ ID NO: 821638 - DNA, 75 bp, synthetic construct
  source 1..75: mol_type = other DNA
tagtacgccgctgcttctatttgaaagtatgcgaaaaactcagccgtgaacgcgcttgtgtaggctggcgtcgcg

SEQ ID NO: 821639 - DNA, 75 bp, synthetic construct
  source 1..75: mol_type = other DNA
aatatgacccgacagctgcgttccgcaatcaggtggtgcatttcgatttccgtaagctggatgtcttcagctttg

SEQ ID NO: 821640 - DNA, 75 bp, synthetic construct
  source 1..75: mol_type = other DNA
gtgcaacgcatggtccgctggcgtgtgccacgcgtgctggcggtgtcaattttaatggccataatcgtgatggcg

SEQ ID NO: 821641 - DNA, 75 bp, synthetic construct
  source 1..75: mol_type = other DNA
acggcggcgcaggcgcaatcagccgctcgcagatgagctcgcaacaggaattacgctacattgaggcgctgtccg

SEQ ID NO: 821642 - DNA, 75 bp, synthetic construct
  source 1..75: mol_type = other DNA
atggcatggagcgcgtctcgccggagattttctccacgcctttgcgttatgaacaattactggcggcgcgtgagg

SEQ ID NO: 821643 - DNA, 75 bp, synthetic construct
  source 1..75: mol_type = other DNA
gaacataaaacactatcaataagttggagtcattaccttgcggtccgtattgacaccgccctctcgaccattgag

SEQ ID NO: 821644 - DNA, 75 bp, synthetic construct
  source 1..75: mol_type = other DNA
actatttataaaagaccacctttgggatttggaaaaacagttctccttatagacgatattacgactcgaggttac

SEQ ID NO: 821645 - DNA, 75 bp, synthetic construct
  source 1..75: mol_type = other DNA
cgtcattatattaatgagtacagcaaacattaggagtatgactgcgcgtaatacgatctttcttgagccgttgcg

SEQ ID NO: 821646 - DNA, 75 bp, synthetic construct
  source 1..75: mol_type = other DNA
tcaacgatcaagaacgcgccgaaatttacgataaaaataaaaaaatggccgaattaaccgctccagaaagaaagc

SEQ ID NO: 821647 - DNA, 75 bp, synthetic construct
  source 1..75: mol_type = other DNA
tttgatgaccatcatcgtgatggcaatggtgttgctgctagcttatctggggtccgcgctcaatgaattaacgag

SEQ ID NO: 821648 - DNA, 75 bp, synthetic construct
  source 1..75: mol_type = other DNA
ttatctggtgctgaaaacagccatcagcatcatcaccggcctggtcgcctgggcgatgctcgccgccctcgatgt

SEQ ID NO: 821649 - DNA, 75 bp, synthetic construct
  source 1..75: mol_type = other DNA
atggtgctattactggcctatctcggctcaacgctcaatgaactgacccgcactttgccacagtatcgcagctca

SEQ ID NO: 821650 - DNA, 75 bp, synthetic construct
  source 1..75: mol_type = other DNA
tgggtcgatgtttgatgttatggagcagcaacgatgttacgcagcagggcagtcgccctaaaacaaagttaggcc

SEQ ID NO: 821651 - DNA, 75 bp, synthetic construct
  source 1..75: mol_type = other DNA
cagggcgcgtaatgatcagcatcagtttgatggttatgtgacatacaaaattaatgattcatggttgtttgcatg

SEQ ID NO: 821652 - DNA, 75 bp, synthetic construct
  source 1..75: mol_type = other DNA
tgacgtctcagttgaccaactggcgcattacattgatccgaacgcggcgatgacgttgctcaccaacttattgac

SEQ ID NO: 821653 - DNA, 75 bp, synthetic construct
  source 1..75: mol_type = other DNA
gcaagcgcaggtaatttcagccgataatgtgcaggggttgctgcaaagggtgccgggcatcgcgtcattgaatat

SEQ ID NO: 821654 - DNA, 75 bp, synthetic construct
  source 1..75: mol_type = other DNA
tctcaagtcacggaaggaagatcgaaaaagctatatcttatagggatgataatggtgcaaaacttaaaattattt

SEQ ID NO: 821655 - DNA, 75 bp, synthetic construct
  source 1..75: mol_type = other DNA
ggtggcttgagcaaaatggagctttgaagaacaactacccaggaaaaaaactttatgcacttgtaaaggaaattc

SEQ ID NO: 821656 - DNA, 75 bp, synthetic construct
  source 1..75: mol_type = other DNA
gccatcacccgagcttcgcgcaggcgctggaaacctcgatggtatgtgaaatcccgttcgaaacgctggacgatt

SEQ ID NO: 821657 - DNA, 75 bp, synthetic construct
  source 1..75: mol_type = other DNA
ctggctacaaatgcgctttcagaaccgggctaacttcgaagcaatgattgatgcgaatatgcgaccttgtgggat

SEQ ID NO: 821658 - DNA, 75 bp, synthetic construct
  source 1..75: mol_type = other DNA
atgcgaatatgcgaccttgtgggatcaatccaaccattatttatcgtccctacagtttatggccaaaatcagcgc

SEQ ID NO: 821659 - DNA, 75 bp, synthetic construct
  source 1..75: mol_type = other DNA
gaagaacaactacccaggaaaaaaactttatgcacttgtaaaggaaattcttaaagatggtgttattactgaaga

SEQ ID NO: 821660 - DNA, 75 bp, synthetic construct
  source 1..75: mol_type = other DNA
tttatgccgcgccgccggataaccggatcagagatctggacaatatccctaaatgcctttttgacagccttactt

SEQ ID NO: 821661 - DNA, 75 bp, synthetic construct
  source 1..75: mol_type = other DNA
aacacctgtgataaaacacgttcgccgccatacactcatctatacgccagaagagtttatggcaatgccaatgat

SEQ ID NO: 821662 - DNA, 75 bp, synthetic construct
  source 1..75: mol_type = other DNA
cttcctccattttgatgtgaatgtcacgcacacatcagcaataacctctattccaggtgcaattggcttcgtaag

SEQ ID NO: 821663 - DNA, 75 bp, synthetic construct
  source 1..75: mol_type = other DNA
cagctttgcatcccgttcacactcaacgaacatgagcttgatcagcttgataatatcattgagcggaagaagcct

SEQ ID NO: 821664 - DNA, 75 bp, synthetic construct
  source 1..75: mol_type = other DNA
caatgccgcccgtgtacactgactgggattttttgcagcgagtttgccagcaggtgggattttcaccggttgtta

SEQ ID NO: 821665 - DNA, 75 bp, synthetic construct
  source 1..75: mol_type = other DNA
atgaacgagtatacatttagcctaccttacccgccatctaataaccgatattaccgacattcacgaggttttcac

SEQ ID NO: 821666 - DNA, 75 bp, synthetic construct
  source 1..75: mol_type = other DNA
atggatatttttatttcaaaaaagatgcgcaattttattttattagcgcaaaccaataatattgccagggcagca

SEQ ID NO: 821667 - DNA, 75 bp, synthetic construct
  source 1..75: mol_type = other DNA
gattgttatcgacttcatcgacatgacgcctgtacgccatcagcgcgcggtggaaaaccgtctgcgtgaagcggt

SEQ ID NO: 821668 - DNA, 75 bp, synthetic construct
  source 1..75: mol_type = other DNA
tggttgaaccgcaggaagagacggcagatattgaagaagttgccgaaactgctgaggttgtggttgctgaacctg

SEQ ID NO: 821669 - DNA, 75 bp, synthetic construct
  source 1..75: mol_type = other DNA
gcagccgatggtgactgaggtccctgtcgccgccgctgtcgaaccggttgttagcgcaccggttgttgaagaagt

SEQ ID NO: 821670 - DNA, 75 bp, synthetic construct
  source 1..75: mol_type = other DNA
gattgccgcagcggtaactgaacagccacaggtgattgccgaggctgatgttgctgtagcgcaggacgttgcaga

SEQ ID NO: 821671 - DNA, 75 bp, synthetic construct
  source 1..75: mol_type = other DNA
accgcgtcgtaaacagcgccagctaaatcagaaagtgcgttacgagcaaagcgttgcggaagaagtggtagccgc

SEQ ID NO: 821672 - DNA, 75 bp, synthetic construct
  source 1..75: mol_type = other DNA
aaaccggaacgtcaacaggatcgccgtaagcctcgtcagaacaatcgccgtgaccgtaatgaacgccgcgacacg

SEQ ID NO: 821673 - DNA, 75 bp, synthetic construct
  source 1..75: mol_type = other DNA
agaagcgaaggcgctgaatgttgaagagcaatctgttcaggaaaccgaacaggaagaacgtgtacgtccggttca

SEQ ID NO: 821674 - DNA, 75 bp, synthetic construct
  source 1..75: mol_type = other DNA
gttcgctgaacgtaagcgtccggaacaacctgcgctggcaacctttgccatgccggatgtgccgccagcgccaac

SEQ ID NO: 821675 - DNA, 75 bp, synthetic construct
  source 1..75: mol_type = other DNA
gagtccgccttccagcgtgaagttcgtctgccatccggtggttccattgttatcgacagcaccgaagcgttaacg

SEQ ID NO: 821676 - DNA, 75 bp, synthetic construct
  source 1..75: mol_type = other DNA
gatatcgaagaaaccgcgtttaacaccaacctcgaagctgccgatgagattgctcgtcagctgcgcctgcgtgac

SEQ ID NO: 821677 - DNA, 75 bp, synthetic construct
  source 1..75: mol_type = other DNA
ggttgctgaacctgaagttgttgctcaacctgccgcgccagtcgtcgctgaagtcgcagcagaagttgaaacggt

SEQ ID NO: 821678 - DNA, 75 bp, synthetic construct
  source 1..75: mol_type = other DNA
gtcgccgccgctgtggagccagtcattgccgcgccggttgttgaagaagtaactgaagtcgtagaagcacctgtt

SEQ ID NO: 821679 - DNA, 75 bp, synthetic construct
  source 1..75: mol_type = other DNA
tcatcgtgggcttactcacctggatcagctatcaaatcatggtcaatctgggattgctatttgcgttgagcgcac

SEQ ID NO: 821680 - DNA, 75 bp, synthetic construct
  source 1..75: mol_type = other DNA
ccgttgctgcactcggtttacctatggcatttgtgctggcggcgttgattctggtgtatctatttgataggcaac

SEQ ID NO: 821681 - DNA, 75 bp, synthetic construct
  source 1..75: mol_type = other DNA
tgacggtgaaatcgctgaacgagcagggccagccggtgggcgtggagatttttcattatcgcgacgatctctcgc

SEQ ID NO: 821682 - DNA, 75 bp, synthetic construct
  source 1..75: mol_type = other DNA
tattgttgtccctttgtataatttttcaggttaatactaagccctcattaatatatactattatgttattgttta

SEQ ID NO: 821683 - DNA, 75 bp, synthetic construct
  source 1..75: mol_type = other DNA
ggcgaaaagctgttctccacggtgaacgccatcgcggagaaggttaccagtatggaaaccgcatttgctgaactc

SEQ ID NO: 821684 - DNA, 75 bp, synthetic construct
  source 1..75: mol_type = other DNA
cgatgatattaccggcaatatgctgtgggccaggcgcggcaatgaatttgtgacggtgaaatcgctgaatgaaca

SEQ ID NO: 821685 - DNA, 75 bp, synthetic construct
  source 1..75: mol_type = other DNA
acgctggaggagcttatggcctccgctgatccctacacgctgattttttcccgccccagtccgctacggggcgtt

SEQ ID NO: 821686 - DNA, 75 bp, synthetic construct
  source 1..75: mol_type = other DNA
tcggcggttccattgcttacggtcatccttttgccgcaacaggtgcgcgaatgatcacccagaccttacatgaac

SEQ ID NO: 821687 - DNA, 75 bp, synthetic construct
  source 1..75: mol_type = other DNA
aacggcggcgaacagtacgccgctgaccgatggcgcggcagcggtgatcctgatgactgaatcccgggcgaaaga

SEQ ID NO: 821688 - DNA, 75 bp, synthetic construct
  source 1..75: mol_type = other DNA
ctactgccactgcgttgggcgatgaccacgacattaccgggaatatgctgtgggccagacgtggcaatgaatttg

SEQ ID NO: 821689 - DNA, 75 bp, synthetic construct
  source 1..75: mol_type = other DNA
ttcgttacgtttttctcggttttgccgctgcggcaggattactgctaccgcttttcacgactttcaacctgatta

SEQ ID NO: 821690 - DNA, 75 bp, synthetic construct
  source 1..75: mol_type = other DNA
gttacttctatggctcaagtaaatcagccagccagatcatccgccagaatgtcaccattaatgcgctgaaggagg

SEQ ID NO: 821691 - DNA, 75 bp, synthetic construct
  source 1..75: mol_type = other DNA
gcgtctctacggcattggctgatgttcattatcgccagcgtggcattctggaggtccagcttgagcagatgcgtc

SEQ ID NO: 821692 - DNA, 75 bp, synthetic construct
  source 1..75: mol_type = other DNA
cggcggcggcgtcacgctttctggcggcgaagtgttaatgcaggcggagtttgcgacccgttttttacagcgact

SEQ ID NO: 821693 - DNA, 75 bp, synthetic construct
  source 1..75: mol_type = other DNA
tcagttgtaacgttgtggaaacgcgccgcgaggatgtggcgcgtatttttaacattcagcgttattcgctgaatg

SEQ ID NO: 821694 - DNA, 75 bp, synthetic construct
  source 1..75: mol_type = other DNA
cctgttgccgtttcaccagtacggcgagccgaaataccgtctgctggggaaaacatggtcgatgacagacgtttc

SEQ ID NO: 821695 - DNA, 75 bp, synthetic construct
  source 1..75: mol_type = other DNA
atgaagagtggcgcacgtctttacaactcagccacaaaaaagatatttaataaccttgacaacttatcatatatt

SEQ ID NO: 821696 - DNA, 75 bp, synthetic construct
  source 1..75: mol_type = other DNA
gtaaaagaagttttaaaggattttattgatgcacttagtacaataatatgtgatgaagagtggcgcacgtcttta

SEQ ID NO: 821697 - DNA, 75 bp, synthetic construct
  source 1..75: mol_type = other DNA
tggtttcacgctcagccgggagaatatgcagcaggcgctggacgtgctgatcccgctgaatatcaggcagatcca

SEQ ID NO: 821698 - DNA, 75 bp, synthetic construct
  source 1..75: mol_type = other DNA
atcaatgcccgttgtttggtaatacctgtaatcctcaaaccgcgttcggtgcactgatggtctcttctgaaggag

SEQ ID NO: 821699 - DNA, 75 bp, synthetic construct
  source 1..75: mol_type = other DNA
gaaagagctgaaacgggttaccgacgaacgggacatattaaaaaaagccgttgtagattcaatctgtcaatgcaa

SEQ ID NO: 821700 - DNA, 75 bp, synthetic construct
  source 1..75: mol_type = other DNA
tcaccacccacagcctttatgcctggataaagaagtacggtccggattcttccgctaataaagaacagtcagatg

SEQ ID NO: 821701 - DNA, 75 bp, synthetic construct
  source 1..75: mol_type = other DNA
gccagcgttgcaacacgtctcgatatcaccacacacagcctttactcctggataaagaagtacggtccggattct

SEQ ID NO: 821702 - DNA, 75 bp, synthetic construct
  source 1..75: mol_type = other DNA
tcaccacccacagcctttatgcctggataaagaagtacggtccggattactccactttttcatcaagccaatccg

SEQ ID NO: 821703 - DNA, 75 bp, synthetic construct
  source 1..75: mol_type = other DNA
aaggcgtggtcatgctggtggagcagaaaatagcggcccacagcaaggtagagaatcagtatcgtcgggtggtac

SEQ ID NO: 821704 - DNA, 75 bp, synthetic construct
  source 1..75: mol_type = other DNA
ggcggtggatttggtttagtgaccgcctgtgctgccggtgggcttggcgcggcaatggttgtggaggcggaataa

SEQ ID NO: 821705 - DNA, 75 bp, synthetic construct
  source 1..75: mol_type = other DNA
tttgatggcgaaaatgtgagtgcggattttatggatatccgtgatcaacccgcaatgcaggaaagggaatcattt

SEQ ID NO: 821706 - DNA, 75 bp, synthetic construct
  source 1..75: mol_type = other DNA
tacggtctgctgcaaatgcggcatgcaccggaagactctcttgcgcaagggatccgaatgaattacatcggtgtg

SEQ ID NO: 821707 - DNA, 75 bp, synthetic construct
  source 1..75: mol_type = other DNA
gggatctttgctgtcccgcgccatcggcatgcagcggttggatcgtgcacagcggattttgtcggtcggtatcat

SEQ ID NO: 821708 - DNA, 75 bp, synthetic construct
  source 1..75: mol_type = other DNA
cgtcaaagaatcttcactactggctgctcagctatggaagcagtgcaatactacgtaacaaaacaaaacaaataa

SEQ ID NO: 821709 - DNA, 75 bp, synthetic construct
  source 1..75: mol_type = other DNA
caaaacaaaacaaaacaaaacaaataaaaggtaaaggaaaatattatggatttaaacatctcaaccttaacaaac

SEQ ID NO: 821710 - DNA, 75 bp, synthetic construct
  source 1..75: mol_type = other DNA
atgagttttttatcatttttacgaaagataagtaataaagaaaaagaaatttttatcagtgaggagcgttttttc

SEQ ID NO: 821711 - DNA, 75 bp, synthetic construct
  source 1..75: mol_type = other DNA
tacgtgacacggtaaataaagccagtagtgccgtaccgaatacccgcagggtcaacggcatggccctgacttcag

SEQ ID NO: 821712 - DNA, 75 bp, synthetic construct
  source 1..75: mol_type = other DNA
cggtgagaataatacgttcccgtattttaccggcgaagacgaaatggcattaacgccgctcagtgcgtttgtgcg

SEQ ID NO: 821713 - DNA, 75 bp, synthetic construct
  source 1..75: mol_type = other DNA
atccccatcaaaagggctcatacgccacatattgaaccactggccccggatcaccatgcggctgcagattactta

SEQ ID NO: 821714 - DNA, 75 bp, synthetic construct
  source 1..75: mol_type = other DNA
accgcagccaggcggtcagactgcccaaagcggttgcgctgccggaaaatgtaaaacgcgttgaagtaattgctg

SEQ ID NO: 821715 - DNA, 75 bp, synthetic construct
  source 1..75: mol_type = other DNA
aaagatcctaacttgatcaccgccattctcgacataacggacagcgaattaaaagaggatttattgcaaagcctg

SEQ ID NO: 821716 - DNA, 75 bp, synthetic construct
  source 1..75: mol_type = other DNA
atggttacgccagtaagcatcagcaattacatatctcttcctgatgattttcccgtacgtaatattgcaccgcag

SEQ ID NO: 821717 - DNA, 75 bp, synthetic construct
  source 1..75: mol_type = other DNA
cggacacgatgcgatcgtgcgccgcagaattgagcagcccgatgcgccaaaggataaccaaattcgagtggtggc

SEQ ID NO: 821718 - DNA, 75 bp, synthetic construct
  source 1..75: mol_type = other DNA
cgctgttcgttaacccctggattatttcattagtgaagctgttacatgccattgaggttccactttgtgtcatat

SEQ ID NO: 821719 - DNA, 75 bp, synthetic construct
  source 1..75: mol_type = other DNA
catcgttcaggataaactcggtctgaagaaaccgctcatctggtgtatgagtttcatcctggtcttgaccggacc

SEQ ID NO: 821720 - DNA, 75 bp, synthetic construct
  source 1..75: mol_type = other DNA
tgacgaagatcgcgctggcgttagtactcgccgggtattgtgcagtgcccgcggcgatggctgaagaggcgacat

SEQ ID NO: 821721 - DNA, 75 bp, synthetic construct
  source 1..75: mol_type = other DNA
atggcgcggcagcggtgatcctgatgactgaatcccgggcgaaagaattaggctggtgccgctggggtatctgcg

SEQ ID NO: 821722 - DNA, 75 bp, synthetic construct
  source 1..75: mol_type = other DNA
aggaacgcgcctgtatggttatctcaactcattccaggtggtactcgaagcgctgtgcatggcgattattccttt

SEQ ID NO: 821723 - DNA, 75 bp, synthetic construct
  source 1..75: mol_type = other DNA
tgatgatcaacatgcgttttaaatataaggatcaccagtgcgtagcggcagatgcgggaggggtaaaaaaagagg

SEQ ID NO: 821724 - DNA, 75 bp, synthetic construct
  source 1..75: mol_type = other DNA
atgagtacattacagttacctggcagttcatattctacagaagttaatttaaacggcttaattgaggtgctcagt

SEQ ID NO: 821725 - DNA, 75 bp, synthetic construct
  source 1..75: mol_type = other DNA
cggaaagtgaaattcatggctttctggcaacggttggtgtgggttatacccgaatgttacgccagcaggatgacg

SEQ ID NO: 821726 - DNA, 75 bp, synthetic construct
  source 1..75: mol_type = other DNA
tgaagttgcccccgaaggcgtaaccatgcaccgcgcgctggtacagcgtaaaaatctcgcctttgccgcccagtt

SEQ ID NO: 821727 - DNA, 75 bp, synthetic construct
  source 1..75: mol_type = other DNA
ctgactctgctggatatttctacggccagcggtggcggcagcgatacggataatgtcgatcctggtccggttgtt

SEQ ID NO: 821728 - DNA, 75 bp, synthetic construct
  source 1..75: mol_type = other DNA
atgaaagctaaaaaagaaacaacagacagatttccaacctggtggctattttattatgtattaagaaaagcttat

SEQ ID NO: 821729 - DNA, 75 bp, synthetic construct
  source 1..75: mol_type = other DNA
ctggaagagcatctttgcgacggcgagcaattaattatctcccgcttcgaacccgccgttttaccgctcgtggtt

SEQ ID NO: 821730 - DNA, 75 bp, synthetic construct
  source 1..75: mol_type = other DNA
gtgtcgcataacgttactccaaacacctctcgcgtggaattacgtaaaacgcttacgcttattccggttgttatg

SEQ ID NO: 821731 - DNA, 75 bp, synthetic construct
  source 1..75: mol_type = other DNA
ggttggcgcgattgccctgctggcaatcaacttcgacctggtaatggctacggcgctgattaactttggtgcgct

SEQ ID NO: 821732 - DNA, 75 bp, synthetic construct
  source 1..75: mol_type = other DNA
tggtggcgctggtggcctttatgaccgcctttaacctgcgtagtctgaaatccgtagcgaacttcaacactgtaa

SEQ ID NO: 821733 - DNA, 75 bp, synthetic construct
  source 1..75: mol_type = other DNA
aggattttcctgcgatcgcggtttatctgacggatgcagagtataccggtgaagagctggatgcagatacctggc

SEQ ID NO: 821734 - DNA, 75 bp, synthetic construct
  source 1..75: mol_type = other DNA
tgggctgctatcggtctgatttacctggcttgcgtcaccaagagcttccgtaacccagttccgcagtacgaagac

SEQ ID NO: 821735 - DNA, 75 bp, synthetic construct
  source 1..75: mol_type = other DNA
tgacggcatcagcaacctgtcggaagaaaccaaagatgcagagcgcgtgatcccacgtgcgattttcctgaccgc

SEQ ID NO: 821736 - DNA, 75 bp, synthetic construct
  source 1..75: mol_type = other DNA
cagtgctggatgcactcgagcagcatgaacacggggcgacgctgtttgatggtcgccccgttgttttttacgaag

SEQ ID NO: 821737 - DNA, 75 bp, synthetic construct
  source 1..75: mol_type = other DNA
cgcggtgattctgggcatggtagtttacggcgtatttgaaggtgaaggcgctggtacgctggcgagcactcgtcc

SEQ ID NO: 821738 - DNA, 75 bp, synthetic construct
  source 1..75: mol_type = other DNA
tgggcggctatcggcctgatttatctggcttgtgtgactaaaagcttccgcaacccggttccgcagtacgaagac

SEQ ID NO: 821739 - DNA, 75 bp, synthetic construct
  source 1..75: mol_type = other DNA
ggatttatccggcggtgactgcgatcccggcactggcagacctgattacgacgatggttacgcagggctatgagt

SEQ ID NO: 821740 - DNA, 75 bp, synthetic construct
  source 1..75: mol_type = other DNA
tttcagagatttaagaaacaagaatataggaaacatcattgagattattgaagataaatgtgatgcaataaaagt

SEQ ID NO: 821741 - DNA, 75 bp, synthetic construct
  source 1..75: mol_type = other DNA
aagaaagaaaatccggcgcaacccgagaagagtttaacgaagcgtgggcgcgattaagtgagagagggtatttgt

SEQ ID NO: 821742 - DNA, 75 bp, synthetic construct
  source 1..75: mol_type = other DNA
tggtttaccggaatcgtgatgtaacaaccgaagtcagccttgcagatggtgatattattttacttggtggccttg

SEQ ID NO: 821743 - DNA, 75 bp, synthetic construct
  source 1..75: mol_type = other DNA
gttatttgattattttataacttatccttcagaggaaattgctggcatgtcatattccgatcgtattcaatggct

SEQ ID NO: 821744 - DNA, 75 bp, synthetic construct
  source 1..75: mol_type = other DNA
aacggcgagaaagtaccggagctgtttattgtagagctgccacaaaatgaaaacggctggaaagcggctggtgag

SEQ ID NO: 821745 - DNA, 75 bp, synthetic construct
  source 1..75: mol_type = other DNA
atcctgatgaaacatggcattacgatttccatcaccgccgcggcgtgattgttgaaggcggaaagatgagcaatc

SEQ ID NO: 821746 - DNA, 75 bp, synthetic construct
  source 1..75: mol_type = other DNA
cttccatcatcggcgcggagtgattgttgaaggcggcaaggtgagcaatctcgatgcaatggatattaccgcgcc

SEQ ID NO: 821747 - DNA, 75 bp, synthetic construct
  source 1..75: mol_type = other DNA
gcagaaataatccggatcttatcaaacgtgcgatgcagcatggaaagttgagcaaaaccagtacggcgatccaac

SEQ ID NO: 821748 - DNA, 75 bp, synthetic construct
  source 1..75: mol_type = other DNA
cgcagcgcacgctgaataaatcacgcatccccgaaatggtgcgttatctgctggaaaatccaaaagattatgtgt

SEQ ID NO: 821749 - DNA, 75 bp, synthetic construct
  source 1..75: mol_type = other DNA
aagcagataccaatcttcttatctggagagcatgggattttgaaccggattttgaatataatctcaagcagcagc

SEQ ID NO: 821750 - DNA, 75 bp, synthetic construct
  source 1..75: mol_type = other DNA
agatattatcttattataaacataatttatttcacgttggcgatgacatattaaatattgagtcttgtcctgagt

SEQ ID NO: 821751 - DNA, 75 bp, synthetic construct
  source 1..75: mol_type = other DNA
tttacggacgctttcacctggtgaatttcgataacgtcaaagcagtctccgtgtctgacagtgaagaatgtggcg

SEQ ID NO: 821752 - DNA, 75 bp, synthetic construct
  source 1..75: mol_type = other DNA
acggggaatgctgatccaatttctgcacaagtctcaggcagtgtcactgtcgttaatcataaagatacgaacttt

SEQ ID NO: 821753 - DNA, 75 bp, synthetic construct
  source 1..75: mol_type = other DNA
atgactgattacgcgataagcaagaaaagcaagcgatcgctttggctcccgatcctggtattcattactctcgcg

SEQ ID NO: 821754 - DNA, 75 bp, synthetic construct
  source 1..75: mol_type = other DNA
tcgtcgccatggcaaacaagctggcacgaacagtatggcaggaaccatgtcagtatcagaccatattaatcgctg

SEQ ID NO: 821755 - DNA, 75 bp, synthetic construct
  source 1..75: mol_type = other DNA
ttcgacaaaaagagagaaactcttgcgcagcatcagaagagcgcggaagaatacttggtcaaactccatgagcat

SEQ ID NO: 821756 - DNA, 75 bp, synthetic construct
  source 1..75: mol_type = other DNA
gcttagctggtggtgctttaactggggcgagtgtttacgggctgttaaccggtactgactacggtgttgtattcg

SEQ ID NO: 821757 - DNA, 75 bp, synthetic construct
  source 1..75: mol_type = other DNA
gtgttcggtgcggtcatcggtaaattgatggtcgactccggcgcggctcaccagatagcgcatacgctgctggcg

SEQ ID NO: 821758 - DNA, 75 bp, synthetic construct
  source 1..75: mol_type = other DNA
tctttcagtcgctgttaaggccgacgatgttttggctttataatcaccacgttacagcgaatcacatcactcttg

SEQ ID NO: 821759 - DNA, 75 bp, synthetic construct
  source 1..75: mol_type = other DNA
agttcccgggctcagtgcattactgctgaaaatgaatcttcaggggtatgactaccgccgggatgatgagtttat

SEQ ID NO: 821760 - DNA, 75 bp, synthetic construct
  source 1..75: mol_type = other DNA
tagccccggttcaggcggcgaccgccgtagaacaggcagttccgcgttacctcaccgggcttggcaccattaccg

SEQ ID NO: 821761 - DNA, 75 bp, synthetic construct
  source 1..75: mol_type = other DNA
gccagaaagtggtgatccgcgcaggtatttctgcgggcgatcgcgtggtgacagacggcattgatcgcctgaccg

SEQ ID NO: 821762 - DNA, 75 bp, synthetic construct
  source 1..75: mol_type = other DNA
tggcaaggccgcaatgactcccggagtgcagccccaggggcgacgaaacaagcgcagcaatcgccagcgggtggt

SEQ ID NO: 821763 - DNA, 75 bp, synthetic construct
  source 1..75: mol_type = other DNA
cggttgccgctggtggccttatgggagccagtgtttttggtatcgcaactggtattgattatggcgtggtgtttg

SEQ ID NO: 821764 - DNA, 75 bp, synthetic construct
  source 1..75: mol_type = other DNA
ggaaggccagcaggtcaaagcaggcgatttactggcagaaattgaccccagccagttcaaagttgcattagcaca

SEQ ID NO: 821765 - DNA, 75 bp, synthetic construct
  source 1..75: mol_type = other DNA
aaggggcgaaagtggaagtggtggaagcccagagcgccactactccggaagaaaaagccgccagccgcgaagaca

SEQ ID NO: 821766 - DNA, 75 bp, synthetic construct
  source 1..75: mol_type = other DNA
aaattgatggtcgactccggcgcggctcaccagatagcgcatacgctgctggcgcgtctcggtctgcgctatgta

SEQ ID NO: 821767 - DNA, 75 bp, synthetic construct
  source 1..75: mol_type = other DNA
aaagagtactggtcgccgcaaggcatcccacaggatggtcgtaacggaaaaattttcgtgagttatcaatggtaa

SEQ ID NO: 821768 - DNA, 75 bp, synthetic construct
  source 1..75: mol_type = other DNA
cgcggcaaagacaccgataccggcgaatacatctccagcattaacccggataccgttaccagcaccctgaatatt

SEQ ID NO: 821769 - DNA, 75 bp, synthetic construct
  source 1..75: mol_type = other DNA
aatatatctccagtattaacccggataccgttaccagcaccctgaatattccgatcgctcacagtggcttctctg

SEQ ID NO: 821770 - DNA, 75 bp, synthetic construct
  source 1..75: mol_type = other DNA
atatggcaacaccaaatcccctggcgccggtaaaaggtgccggtaccacactgtggggtttacaccggcacgggt

SEQ ID NO: 821771 - DNA, 75 bp, synthetic construct
  source 1..75: mol_type = other DNA
aactggctgatgttatttggctcatatgctcaggcattccgcgccccgacgatgggcgaaatgtataacgattct

SEQ ID NO: 821772 - DNA, 75 bp, synthetic construct
  source 1..75: mol_type = other DNA
tagtattcggcatcggcctgatgctggtactgaatttgaagtttaagatcaactcgatggtggctttgctggtag

SEQ ID NO: 821773 - DNA, 75 bp, synthetic construct
  source 1..75: mol_type = other DNA
ccgctggttatcgtgattgccgccgaagctaaaattccgttcctgaaactggcgatcccggcagtagcagctgcc

SEQ ID NO: 821774 - DNA, 75 bp, synthetic construct
  source 1..75: mol_type = other DNA
cgtctggcgactggtcagggtgtcgtttcagcgatgaccgccgcggggattatcagtgccgcaattcttgatccg

SEQ ID NO: 821775 - DNA, 75 bp, synthetic construct
  source 1..75: mol_type = other DNA
gcgttattacaacaacgacgcgcgtgaaccaaaaaatccgcagaccgttgaagcttctgatagcagcaacccgat

SEQ ID NO: 821776 - DNA, 75 bp, synthetic construct
  source 1..75: mol_type = other DNA
gagcttgatcagtggatggaaagccggatttatccggggatgactgcgatcccggcactggctggactgattacc

SEQ ID NO: 821777 - DNA, 75 bp, synthetic construct
  source 1..75: mol_type = other DNA
ggtattgttattgaggatcttcaatttacccttgccggaaacgaagagatcaccctcaagcatttatccttcaga

SEQ ID NO: 821778 - DNA, 75 bp, synthetic construct
  source 1..75: mol_type = other DNA
aataagcgccagttgcaaatcgcaatggggcttaaggttgacgataaagtgccgctttttgcagtggtgagccgt

SEQ ID NO: 821779 - DNA, 75 bp, synthetic construct
  source 1..75: mol_type = other DNA
actactcgttacgtgttgaagctattgttgccgcagagccggcaaagaaatggtatctgtcagatgttgcatcag

SEQ ID NO: 821780 - DNA, 75 bp, synthetic construct
  source 1..75: mol_type = other DNA
gcccaggcgctggcaactcaggttagcgataccattggcgtggtggtgatggacgtttctgatgcgtttttcggc

SEQ ID NO: 821781 - DNA, 75 bp, synthetic construct
  source 1..75: mol_type = other DNA
atgatcaccattcgtgatgtagcgcgtcaggctggcgtctctgtggcaacggtttcccgggtgctcaataacagc

SEQ ID NO: 821782 - DNA, 75 bp, synthetic construct
  source 1..75: mol_type = other DNA
ggtattgttattgaagaccttcagtttactcttgccggaaacgaagagatcaccctcaagcatttgtccttcagg

SEQ ID NO: 821783 - DNA, 75 bp, synthetic construct
  source 1..75: mol_type = other DNA
tgaaaaaatctacgaactttatagtatagaaaagatagaaaagcatttagtattcaaagataacaaaacaggaaa

SEQ ID NO: 821784 - DNA, 75 bp, synthetic construct
  source 1..75: mol_type = other DNA
tgtgtttgacggtcgctcactggtggtgacccgttatgacacgtacaacggtaaaccccggatttttgtcgaaca

SEQ ID NO: 821785 - DNA, 75 bp, synthetic construct
  source 1..75: mol_type = other DNA
ttagatctgaaaaactgcgcgatgaaaatgacgcgcaacaacgaagatgtctccagcgggcgcggcagcgaatgc

SEQ ID NO: 821786 - DNA, 75 bp, synthetic construct
  source 1..75: mol_type = other DNA
tgctggattatcttaatgataaaaaccagttgctgcctgtattgtccggtgggctgaataactactcgttacgtg

SEQ ID NO: 821787 - DNA, 75 bp, synthetic construct
  source 1..75: mol_type = other DNA
attgatataccctgtcatatcgtcagtgactatctgtatatcagactgagggatgctgatgctttgcgtatcgcc

SEQ ID NO: 821788 - DNA, 75 bp, synthetic construct
  source 1..75: mol_type = other DNA
taccgggcggccctggaaatcgatccccggcagtcgatttctgtacacctgccgtattcacagacctacctctga

SEQ ID NO: 821789 - DNA, 75 bp, synthetic construct
  source 1..75: mol_type = other DNA
ttaagtgacgacgaactggtgcagtttatggacaacattcccggcatggtgttaatcaatcgcgttgtgccgggt

SEQ ID NO: 821790 - DNA, 75 bp, synthetic construct
  source 1..75: mol_type = other DNA
tgctgccacgctgccgggttttcagcagcttcactcctccgtggaggggctgaaactgattgctgattacgaagg

SEQ ID NO: 821791 - DNA, 75 bp, synthetic construct
  source 1..75: mol_type = other DNA
ggcaggcatgcaaccagctaccgcgctggatttacgttaacggtgtgaaaaataaaggtctggagaaccgccgcg

SEQ ID NO: 821792 - DNA, 75 bp, synthetic construct
  source 1..75: mol_type = other DNA
aggcgtgcgaccagctcacccgctgggtgtatgtgaagggtgtccgaaaccgggggctggaaaaccgacgcgatc

SEQ ID NO: 821793 - DNA, 75 bp, synthetic construct
  source 1..75: mol_type = other DNA
atgcgtgccgacagttgccgcgctgggtttatgtgaaaggtgtttttaatcaggggctggatactggagctgaag

SEQ ID NO: 821794 - DNA, 75 bp, synthetic construct
  source 1..75: mol_type = other DNA
atgaatccatcaatcgttaaacgctgccttgtcgggaccgtgctggctattgctgccacgctgccgggttttcag

SEQ ID NO: 821795 - DNA, 75 bp, synthetic construct
  source 1..75: mol_type = other DNA
gcagcgcgggtgtctggacagacggcattggtaatacatctggtgtcattccaggcaaaaccattacggaacgac

SEQ ID NO: 821796 - DNA, 75 bp, synthetic construct
  source 1..75: mol_type = other DNA
tgaattactgaatgcaaagattggatttgcagcttcaggaaatggcccgcagcagcaaagtagtaaccagcagaa

SEQ ID NO: 821797 - DNA, 75 bp, synthetic construct
  source 1..75: mol_type = other DNA
agtaatgcctggtcgctgttacgggctattcgacgtgcttttgtactgtggtcccgtccttcactgtggcggttt

SEQ ID NO: 821798 - DNA, 75 bp, synthetic construct
  source 1..75: mol_type = other DNA
caccccggacatgccaggcggtgaggcggcgatggttgaactgctggggcgcaatctacaacttaccgctgtatt

SEQ ID NO: 821799 - DNA, 75 bp, synthetic construct
  source 1..75: mol_type = other DNA
tggtgctggaagccttaccaggccttctggagcagggcggacagctggcgctactcggcgcgggtgatccggtgt

SEQ ID NO: 821800 - DNA, 75 bp, synthetic construct
  source 1..75: mol_type = other DNA
gggcgatatcctgacggtgatcctcgaagaatctacccagtcgagcaaacaggcgaaaaccaacttcggcaaaaa

SEQ ID NO: 821801 - DNA, 75 bp, synthetic construct
  source 1..75: mol_type = other DNA
gttaaatgttgcacaggggcaagagatgattgctcaacggggaatgtctgggcgggtgcgttttgaacagggcga

SEQ ID NO: 821802 - DNA, 75 bp, synthetic construct
  source 1..75: mol_type = other DNA
cctcggcgagccgctgcgtgccggagacattattctcaccggagcgttaggtccgatggtggcggtgaatgcggg

SEQ ID NO: 821803 - DNA, 75 bp, synthetic construct
  source 1..75: mol_type = other DNA
cgccttctgaaagaagggcgcatcaaactcgccaagcacggtaagtttctggaaggcagtgttgacgagcaggtt

SEQ ID NO: 821804 - DNA, 75 bp, synthetic construct
  source 1..75: mol_type = other DNA
gagcaggttgagcgtttccgacaggcatttccgaaaacagaagaagagatggaagacggtatctggttttttgat

SEQ ID NO: 821805 - DNA, 75 bp, synthetic construct
  source 1..75: mol_type = other DNA
atgacattattacttaatgacaagcaatataatgaattatgtgaagctgcagaaggtcgtaatttgggggccgtt

SEQ ID NO: 821806 - DNA, 75 bp, synthetic construct
  source 1..75: mol_type = other DNA
cccggggcttcaccatgatggacggcaaggcacagaacgacacggcgaggaccatctggtatctggccctgcgct

SEQ ID NO: 821807 - DNA, 75 bp, synthetic construct
  source 1..75: mol_type = other DNA
tccgcccccgaagacgaaatcataatgtcaggattttcgtcattttcagacacgtatactgcacagacaggcagc

SEQ ID NO: 821808 - DNA, 75 bp, synthetic construct
  source 1..75: mol_type = other DNA
tggaagacggtatctggttttttgatgagagctgtccgggaggagctgtctgggtgcttgaagatggctctctcg

SEQ ID NO: 821809 - DNA, 75 bp, synthetic construct
  source 1..75: mol_type = other DNA
atgaatttaagtattatcgcaagagtcttgcgccaattggcaattatttttgtcctctccgtgcttcttgtggcc

SEQ ID NO: 821810 - DNA, 75 bp, synthetic construct
  source 1..75: mol_type = other DNA
ggtaaaaaccaccttgccctggcgatcgcccgtgatgtcatcgagaaacaccagagcccggtaatttttaccacc

SEQ ID NO: 821811 - DNA, 75 bp, synthetic construct
  source 1..75: mol_type = other DNA
agtctgcatttaactggcatccgtcaggcgaatggctgggatttgtgctggataatcggattgcttgtgcccatg

SEQ ID NO: 821812 - DNA, 75 bp, synthetic construct
  source 1..75: mol_type = other DNA
tcaagaccggggaattcaatttcctgttacttctggccggtgagcatccgtcactgcagctggttgagaaggcga

SEQ ID NO: 821813 - DNA, 75 bp, synthetic construct
  source 1..75: mol_type = other DNA
taggacgatatcattcaataacatatcggcacaaacaaaaatatatcagattagtcagtgacaaatatgaatcta

SEQ ID NO: 821814 - DNA, 75 bp, synthetic construct
  source 1..75: mol_type = other DNA
tatgtttacttgctgccagtcaggcgaacgatgtaccaccgaaattacttgtttcggtgatagccgtggaaagag

SEQ ID NO: 821815 - DNA, 75 bp, synthetic construct
  source 1..75: mol_type = other DNA
gccatcgcaatgaacaaggctctggtgtcgggtgttaaatacctgtgcgtcgcagaaaaaaggtgcatgtcaatg

SEQ ID NO: 821816 - DNA, 75 bp, synthetic construct
  source 1..75: mol_type = other DNA
ccctgtgatcgtgctgttgaccgcgtggcaatactcccaccatatcgctccgtcgctggtgcaccatcgcgggcc

SEQ ID NO: 821817 - DNA, 75 bp, synthetic construct
  source 1..75: mol_type = other DNA
gcagcgctggaaaaactgggctatcgcatgcgacgcgcccatccggtgaatgaaagccgcggtcacggctttatc

SEQ ID NO: 821818 - DNA, 75 bp, synthetic construct
  source 1..75: mol_type = other DNA
ccgtggaagatgcccccctcacgccacagcctggcgaagtgctgatggtgaccaacgcggatttacgcgaaccgg

SEQ ID NO: 821819 - DNA, 75 bp, synthetic construct
  source 1..75: mol_type = other DNA
cgatcgttttgaagcccatatcgaaggcataggctcagttgctgcgacattttcaaatgcggccccaaaaggaag

SEQ ID NO: 821820 - DNA, 75 bp, synthetic construct
  source 1..75: mol_type = other DNA
ttcaggaactattgacagtttaaaaactttaaaggatgaggagatttcagttagtttatctcaggatacaagcaa

SEQ ID NO: 821821 - DNA, 75 bp, synthetic construct
  source 1..75: mol_type = other DNA
tatgaggtctagaacttttttattgatgggcaagaatgctcttttagatgcgaaagatgcaactgaaggagaatg

SEQ ID NO: 821822 - DNA, 75 bp, synthetic construct
  source 1..75: mol_type = other DNA
tcggggacgtctttgcggcagatgccggcgacatcgatattcgcgacagtatccacagcgaccgaattctgattg

SEQ ID NO: 821823 - DNA, 75 bp, synthetic construct
  source 1..75: mol_type = other DNA
atggcaacgcaggtacgctccctcaactttgccctgctgatggccgcacaggatgcggagcgtcttgaaggcact

SEQ ID NO: 821824 - DNA, 75 bp, synthetic construct
  source 1..75: mol_type = other DNA
ggagaaagtctcccgcctgatcgggatactgaagggagaagtggaaagtcccgtcgacagcttcacactcatcag

SEQ ID NO: 821825 - DNA, 75 bp, synthetic construct
  source 1..75: mol_type = other DNA
ggttctgataatcaaaaacaggaaaacgatattgatgaacgggtaatttctgtttgcctgaatggtcatgttatt

SEQ ID NO: 821826 - DNA, 75 bp, synthetic construct
  source 1..75: mol_type = other DNA
ccatcgataatatggttcgtaatgtgcgcaatgctttttcagggctatatggttctgataatcaaaaacaggaaa

SEQ ID NO: 821827 - DNA, 75 bp, synthetic construct
  source 1..75: mol_type = other DNA
ggggatcacgttcacattaccggactggctgggaacgctgctgattctgtcatcggtgattttgatttcaatgga

SEQ ID NO: 821828 - DNA, 75 bp, synthetic construct
  source 1..75: mol_type = other DNA
atacggcgaaaattcatccacggaacggatgagcaaaacgcagctatagcgaaagctatcgacgagatacacctg

SEQ ID NO: 821829 - DNA, 75 bp, synthetic construct
  source 1..75: mol_type = other DNA
acggaacggacgaacaaaatgcagctttgtcgaaaactatcgacgagatacgtctcactaccggcatcaccatca

SEQ ID NO: 821830 - DNA, 75 bp, synthetic construct
  source 1..75: mol_type = other DNA
gcgaagccctgcacctgatggccggtggtaaaagttgttttgatggtaaatggctacgcggaacggccaaaggag

SEQ ID NO: 821831 - DNA, 75 bp, synthetic construct
  source 1..75: mol_type = other DNA
gccgtccctcggagttctgtcaataactgtacgggaagcgaaaacgctccaccggtactggatttgacaaagccc

SEQ ID NO: 821832 - DNA, 75 bp, synthetic construct
  source 1..75: mol_type = other DNA
tggtaaaagttgttttgatgacaaatggctacgcggaacatcaatgggtgaaatattttccgctgcgccatcaca

SEQ ID NO: 821833 - DNA, 75 bp, synthetic construct
  source 1..75: mol_type = other DNA
acatctgacaaccggcattaatatcagccggggcgaagccctgcacctgatggccggtggtaaaagttgttttga

SEQ ID NO: 821834 - DNA, 75 bp, synthetic construct
  source 1..75: mol_type = other DNA
ggcatacgtgttgccgagcctcatcacgacgggacgcctcactggcatatgcttatgttcatgctgccggaagac

SEQ ID NO: 821835 - DNA, 75 bp, synthetic construct
  source 1..75: mol_type = other DNA
gttgctgagcctcatcacgacggaacgccgcactggcacatgcttatgttcatgttgccggaagacgtcgagagt

SEQ ID NO: 821836 - DNA, 75 bp, synthetic construct
  source 1..75: mol_type = other DNA
cgaatgcgctggtatcaacagcaaggtatcaaccgctgtttttggaagtcattttgatactcagcaaatgcaata

SEQ ID NO: 821837 - DNA, 75 bp, synthetic construct
  source 1..75: mol_type = other DNA
ccgactcaggaagcaaaagccagcagcacggcgaaaattcatccacggaacggatgagcaaaacgcagctatagc

SEQ ID NO: 821838 - DNA, 75 bp, synthetic construct
  source 1..75: mol_type = other DNA
cacactggcacatgctgatgttcatgctgccggaagatgttgaatatgttcgctccatcgtccgtaaatacgcat

SEQ ID NO: 821839 - DNA, 75 bp, synthetic construct
  source 1..75: mol_type = other DNA
tatcggcggtgcgccggtgacggtctaccgtgagttgcgtcgtctcgccgataccgagaccgcgcacggtctgag

SEQ ID NO: 821840 - DNA, 75 bp, synthetic construct
  source 1..75: mol_type = other DNA
gccagcagtttgttggtgagtttaccggtgagcgcaagggggacctcgcggcggtagcggtgaaaaataaattct

SEQ ID NO: 821841 - DNA, 75 bp, synthetic construct
  source 1..75: mol_type = other DNA
taatattatatctcagaaagggatgcctaaatttggcggttggatattcaatggttttgatacgagaaagcaaaa

SEQ ID NO: 821842 - DNA, 75 bp, synthetic construct
  source 1..75: mol_type = other DNA
tgggcagttaatcaggtagaactaatgaatgagatggctggtgagtatgatcatttagctgaacacataataaat

SEQ ID NO: 821843 - DNA, 75 bp, synthetic construct
  source 1..75: mol_type = other DNA
ggtgatgaggaattttcagagttattggaaccttcagatgatttcccttttggaaaaacggttaaagcatttgca

SEQ ID NO: 821844 - DNA, 75 bp, synthetic construct
  source 1..75: mol_type = other DNA
atctgtgaacgttttaaccgggcattaagagagcaattcattgaatttaatgaaattttactctttgaggatctg

SEQ ID NO: 821845 - DNA, 75 bp, synthetic construct
  source 1..75: mol_type = other DNA
atggattgccgatccgtcaatctgggtaggtctcgtcacgctggtgattatcgaactggtgttgggtatcgataa

SEQ ID NO: 821846 - DNA, 75 bp, synthetic construct
  source 1..75: mol_type = other DNA
aaatacaacaactatcaaagatatagaaaaaaagattacttctgagttgtggatttctcaacaaatctggcaaaa

SEQ ID NO: 821847 - DNA, 75 bp, synthetic construct
  source 1..75: mol_type = other DNA
ccgttggcgacagccttgaactgatgacgccacagggcaacatcaactttacccttgagcatatggaaaatgcca

SEQ ID NO: 821848 - DNA, 75 bp, synthetic construct
  source 1..75: mol_type = other DNA
tacaacgtccaggaaggtaaagaagatgacgtcggcaacatcgtacacaaatacgagccgattccggtgcaaaac

SEQ ID NO: 821849 - DNA, 75 bp, synthetic construct
  source 1..75: mol_type = other DNA
actccctgcgtgtgcgcaacaacgaattcaaccacgaaaatcttcagctcggcattaatgaagcccatgcgctgg

SEQ ID NO: 821850 - DNA, 75 bp, synthetic construct
  source 1..75: mol_type = other DNA
cccggatgagggatattctgcgcgcccatctgtttcctgaagtgaccgtgaaacagaactcacaaatcaaaatta

SEQ ID NO: 821851 - DNA, 75 bp, synthetic construct
  source 1..75: mol_type = other DNA
attacccgtcagcaactgaaggcactgacagggaataatgagaatgcggtggaaaagattttccttcagcacaga

SEQ ID NO: 821852 - DNA, 75 bp, synthetic construct
  source 1..75: mol_type = other DNA
ccagagctactcctgttcgctggagcaaatctctgatttccgccatgaaatgcgttatcagttctggcacgattt

SEQ ID NO: 821853 - DNA, 75 bp, synthetic construct
  source 1..75: mol_type = other DNA
accacaattgcattcggcccgtggcttgcgctcggtagtatgataaacctgacgtatctggtctggatctcttat

SEQ ID NO: 821854 - DNA, 75 bp, synthetic construct
  source 1..75: mol_type = other DNA
gtgtctggaaatataggggcaaatccagaaacctacactaccgaatctcatacttgggataacaatatctctgta

SEQ ID NO: 821855 - DNA, 75 bp, synthetic construct
  source 1..75: mol_type = other DNA
atgttaagtattaaagatttacacgtcagcgtggaagataaagctatcctgcgcggattaagcctcgacgttcat

SEQ ID NO: 821856 - DNA, 75 bp, synthetic construct
  source 1..75: mol_type = other DNA
tattcttgatgagtcggactccgggctggatattgacgcattaaaagtggttgccgatggcgtgaactcgctgcg

SEQ ID NO: 821857 - DNA, 75 bp, synthetic construct
  source 1..75: mol_type = other DNA
gttaatcttgatgtagaaagtaacatcaatatttccaataactcccgcgttgcaggtattgcattatctcaaggt

SEQ ID NO: 821858 - DNA, 75 bp, synthetic construct
  source 1..75: mol_type = other DNA
gaaccacgactacactgatggtacaaatggtaatgctaaccagcttgatattgctaattcagtaattcatggctc

SEQ ID NO: 821859 - DNA, 75 bp, synthetic construct
  source 1..75: mol_type = other DNA
ttacactgatgcggttgttgatacacactggcgtgatggtgatgttttcactttgaacattgctaacactactat

SEQ ID NO: 821860 - DNA, 75 bp, synthetic construct
  source 1..75: mol_type = other DNA
catcatctggatgttgcacggttcgctgtgtgaaatacggatgagcttctggggagcggagtttgcggcgttctt

SEQ ID NO: 821861 - DNA, 75 bp, synthetic construct
  source 1..75: mol_type = other DNA
gtggcgaactttgtcaccaaatctaaccttgaagatggtgtggcgtttgccattgaaaagtatgtgctgaattaa

SEQ ID NO: 821862 - DNA, 75 bp, synthetic construct
  source 1..75: mol_type = other DNA
cgcagctcgcgcccgtggcgtgaatgtcgtgctaacgacgggtcgcccttatgcaggtgttcacaattacctgaa

SEQ ID NO: 821863 - DNA, 75 bp, synthetic construct
  source 1..75: mol_type = other DNA
acaaaacagagcaggagcgcgaaacatcagtgcctaaaagaaaaatcatattcgtacccttgcagtcagaaaaga

SEQ ID NO: 821864 - DNA, 75 bp, synthetic construct
  source 1..75: mol_type = other DNA
gcaagactcaatggtcgcgcagtgtaccatccttcatgtagcctttcccgtaaactgggtgtaaccagagaaccg

SEQ ID NO: 821865 - DNA, 75 bp, synthetic construct
  source 1..75: mol_type = other DNA
ggcacgttctctgtaaaaatggcggagatctctggtgaaatggtgaaggagaaggttagccatattatggatgtt

SEQ ID NO: 821866 - DNA, 75 bp, synthetic construct
  source 1..75: mol_type = other DNA
accggttcaaataccgtgttggaaagttctggttatggtcatttcggtaactctggtgagccgagtgattatgct

SEQ ID NO: 821867 - DNA, 75 bp, synthetic construct
  source 1..75: mol_type = other DNA
tgttggcctggtgagtggctgtggattaagtaacaaccttctttgccgttgtgctttttcgcgctgtcgctcaag

SEQ ID NO: 821868 - DNA, 75 bp, synthetic construct
  source 1..75: mol_type = other DNA
cgtctgctcaagttgttaggtgtcataaaaattcgaaatgccaaagggctaaaagtctattcgcagaatccacag

SEQ ID NO: 821869 - DNA, 75 bp, synthetic construct
  source 1..75: mol_type = other DNA
cgctcaacgccttgggagccaccccaatggatttaatgtccatactgcaatcaatgcaaagtgcgggatgtctgc

SEQ ID NO: 821870 - DNA, 75 bp, synthetic construct
  source 1..75: mol_type = other DNA
atgatgacagaaaataaaaagaatcaggaattcaaaatcagaaaaattaagcggggtattgagcgcagctgtgat

SEQ ID NO: 821871 - DNA, 75 bp, synthetic construct
  source 1..75: mol_type = other DNA
ttgattcgtggaaaatggacccggaattaaataattcgatttatatgtggaatatcctgatatatgtcattccgt

SEQ ID NO: 821872 - DNA, 75 bp, synthetic construct
  source 1..75: mol_type = other DNA
ggcgatttttggttgcttttagccgccgtgggtatttcctgagaaactcttcaagtgcaaattttttatctcttg

SEQ ID NO: 821873 - DNA, 75 bp, synthetic construct
  source 1..75: mol_type = other DNA
gtgataacaggtgtctggaaatataggggcaaatccattgatacacactggcgtgatggtgatgttttcactttg

SEQ ID NO: 821874 - DNA, 75 bp, synthetic construct
  source 1..75: mol_type = other DNA
gatggtgacgttaccaaatatactaacgaaaccttccgtaccccagctggtgaaggtgaagaatacgccggtttg

SEQ ID NO: 821875 - DNA, 75 bp, synthetic construct
  source 1..75: mol_type = other DNA
gcgttgaccgaatctactgggtggggggctgattacaacctgtacgccaatactatcaccgtaactaacggcggt

SEQ ID NO: 821876 - DNA, 75 bp, synthetic construct
  source 1..75: mol_type = other DNA
aatgtataacgtgcagttaagcgtgcctttgtctcacaaagaatgtgtatgcattggctccagcatcgccaaatg

SEQ ID NO: 821877 - DNA, 75 bp, synthetic construct
  source 1..75: mol_type = other DNA
ctctccatacatactggcaggttgttgaatggcgtggagaactttatgagttagctgaactggctgattatgttg

SEQ ID NO: 821878 - DNA, 75 bp, synthetic construct
  source 1..75: mol_type = other DNA
aataactgtgactaacggtggtttactggatattaatgtagaccagttcgatgataatccgttccagactgatac

SEQ ID NO: 821879 - DNA, 75 bp, synthetic construct
  source 1..75: mol_type = other DNA
gctataaagagacagaaaaaacgtcaatgatgacgacaactcattctacaaaacttcagccatcacaggcgattt

SEQ ID NO: 821880 - DNA, 75 bp, synthetic construct
  source 1..75: mol_type = other DNA
accattaaacctcacagaagaaatgccgcccccttttccgacaaaggcgaattatcttattcatcctgtgcgata

SEQ ID NO: 821881 - DNA, 75 bp, synthetic construct
  source 1..75: mol_type = other DNA
tgtttaagatgagagaagatgcaccaccattaaacctcacagaagaaaccacgcccccttttccgacaaaggcga

SEQ ID NO: 821882 - DNA, 75 bp, synthetic construct
  source 1..75: mol_type = other DNA
ctggctggatgcactgaaagatcccaacggtctgaaaacttttgttaacaccacgctgggcgagacctgggaaga

SEQ ID NO: 821883 - DNA, 75 bp, synthetic construct
  source 1..75: mol_type = other DNA
ctgtggggaggcgcagtatctgaaatttggcgatgatgcctcgcctttcggtcttaagtgggagaagaataagcc

SEQ ID NO: 821884 - DNA, 75 bp, synthetic construct
  source 1..75: mol_type = other DNA
tattgaccagccgcttaacattgatgtcgtcgcaaaaaaatcaggctattcaaagtggtacttgcaacggatgtt

SEQ ID NO: 821885 - DNA, 75 bp, synthetic construct
  source 1..75: mol_type = other DNA
atcgcgatggatctgggttatgtctcgcagcagaccttttctcgcgttttccgtcggcagtttgatcgcaccccc

SEQ ID NO: 821886 - DNA, 75 bp, synthetic construct
  source 1..75: mol_type = other DNA
agcgatgacaaccacacactctacaaaacttcagccatcacaggcgattttgtttaagatgagagaagatgcgcc

SEQ ID NO: 821887 - DNA, 75 bp, synthetic construct
  source 1..75: mol_type = other DNA
gttgcgcgaagtgatcgtgaagctcaatgactggccgtcgaaccgtgtgcatgaactgctgccctggaactgctc

SEQ ID NO: 821888 - DNA, 75 bp, synthetic construct
  source 1..75: mol_type = other DNA
gaaaaggcctgaaagtactggcgtactgggaaaacggctggcgtgatgttaccaactcacgcgcaccggttaaaa

SEQ ID NO: 821889 - DNA, 75 bp, synthetic construct
  source 1..75: mol_type = other DNA
gttcggtaagctgtgcggtaaaatttcgtctaaaccgctgatgctgccaaaccgtcacaaaatgaacctggcggc

SEQ ID NO: 821890 - DNA, 75 bp, synthetic construct
  source 1..75: mol_type = other DNA
taacgttcacgggttcggtggtggcgttcggcaaactgtgtggcaagatttcgtctaaaccgttgatgctgccaa

SEQ ID NO: 821891 - DNA, 75 bp, synthetic construct
  source 1..75: mol_type = other DNA
gcaaaggactgaaagtactggcgtactgggaaaacggctggcgtgatgtgactaactctcgcgcgccggtaaaaa

SEQ ID NO: 821892 - DNA, 75 bp, synthetic construct
  source 1..75: mol_type = other DNA
caggttcgcgacatgtttgttaaagatgttccgcagggcgctgatctgctgaaagccgtggatgaggtgcaataa

SEQ ID NO: 821893 - DNA, 75 bp, synthetic construct
  source 1..75: mol_type = other DNA
aaaattttatgaagtgcagaagtacctttctctgacgcaccacgcctattccccgcttctggtggtaatcaacaa

SEQ ID NO: 821894 - DNA, 75 bp, synthetic construct
  source 1..75: mol_type = other DNA
ccacgttgagccgaccatccgcgatattccgttgctgctggcgctggctccgtggtatggcaaaaagcaccggga

SEQ ID NO: 821895 - DNA, 75 bp, synthetic construct
  source 1..75: mol_type = other DNA
gtacagatggtaatcatagccactcactgtccggcacagcagcatctgcaggtgcacacgcgcatactgtcggta

SEQ ID NO: 821896 - DNA, 75 bp, synthetic construct
  source 1..75: mol_type = other DNA
ccgcacggtgacgcatcagacgcttggcgattacattcgtcaacgccgcctgttactggctgccgtcgagttgcg

SEQ ID NO: 821897 - DNA, 75 bp, synthetic construct
  source 1..75: mol_type = other DNA
gtcgaccatttactggtcatgatggccgccgtggttatcgcgatcagcctgatgctgatggccagcaagccgtta

SEQ ID NO: 821898 - DNA, 75 bp, synthetic construct
  source 1..75: mol_type = other DNA
ttcagcttccgctcgtttacctttagcgcccgcgacttaatcatgctgtttggtggtttcttcctgctgttcaaa

SEQ ID NO: 821899 - DNA, 75 bp, synthetic construct
  source 1..75: mol_type = other DNA
taatgcccgcacgcactttgcttttgtggtggatgagtttggttcagtggaagggattgtgacattaagtgacgt

SEQ ID NO: 821900 - DNA, 75 bp, synthetic construct
  source 1..75: mol_type = other DNA
tgattcccgctatgtgagagatatcagacttggcacacgtgttgtgcagaccatgcagaaaggcgtgatgtatga

SEQ ID NO: 821901 - DNA, 75 bp, synthetic construct
  source 1..75: mol_type = other DNA
atttaattcatcttttggtgctatttttcgccgttctgaagaaaacctgtatatcatccctacacgagaaaatga

SEQ ID NO: 821902 - DNA, 75 bp, synthetic construct
  source 1..75: mol_type = other DNA
cgacggttcctggacggcgaatggtcatatgccgctggaagatctggtgcaatatgtgccgctgccgctggatga

SEQ ID NO: 821903 - DNA, 75 bp, synthetic construct
  source 1..75: mol_type = other DNA
gccacgatattgagcatatcgatctcaacgcgccggaagaagaaatccgccagttgctggagcgaaatcagcata

SEQ ID NO: 821904 - DNA, 75 bp, synthetic construct
  source 1..75: mol_type = other DNA
ctatcggtatcagccagatcatctcagataacgggaaagagttcctgggaagctttgacaaaacgctgcaggaag

SEQ ID NO: 821905 - DNA, 75 bp, synthetic construct
  source 1..75: mol_type = other DNA
gtggtggatgagtttggctcggtggaagggattgtgacattaagtgacgtcactgaaaccattgccggtaactta

SEQ ID NO: 821906 - DNA, 75 bp, synthetic construct
  source 1..75: mol_type = other DNA
cgcgtctggtcgttaccgatggcgatgacgcggaagatttgcttggtgttgttcacgttatcgatctgctacaac

SEQ ID NO: 821907 - DNA, 75 bp, synthetic construct
  source 1..75: mol_type = other DNA
tcgcagaaaaactaccgccgaagcagcgcgaccgcgcacgagttaccggactactgctggcaatgttaatgcgcc

SEQ ID NO: 821908 - DNA, 75 bp, synthetic construct
  source 1..75: mol_type = other DNA
ctcggtgattaccgccgtcgggatggtcgaccatttactggtcatgatggccgccgtggttatcgctatcagcct

SEQ ID NO: 821909 - DNA, 75 bp, synthetic construct
  source 1..75: mol_type = other DNA
caggtcgactatacggccgttggcttaatgtccacgccgaacgtggcagagtcttaccagagcaagttcaagggc

SEQ ID NO: 821910 - DNA, 75 bp, synthetic construct
  source 1..75: mol_type = other DNA
ttcgtgtgatccctataaagggggcgtcggtttatggaaagccagtggcgaacatgccacgcaagcgtaacaaga

SEQ ID NO: 821911 - DNA, 75 bp, synthetic construct
  source 1..75: mol_type = other DNA
atgatgacatcgagaaagaaggttctcccacctttctgggtgataagcgtattgagggttctgtatggccgaaat

SEQ ID NO: 821912 - DNA, 75 bp, synthetic construct
  source 1..75: mol_type = other DNA
atgaatatatcagaacaacaactgagtaatatgatggtggcagtcactatcgcactgcagccactggtcagggta

SEQ ID NO: 821913 - DNA, 75 bp, synthetic construct
  source 1..75: mol_type = other DNA
agcacaatggcattactgaaggttattgcaatatttgtgggaaatatggcttgctcacaaaagatcatgttcctc

SEQ ID NO: 821914 - DNA, 75 bp, synthetic construct
  source 1..75: mol_type = other DNA
gttcgctttaccacgcagcagcgcattcgccagcgtccgaaccctgagccgccgcgctactggattgccacgatt

SEQ ID NO: 821915 - DNA, 75 bp, synthetic construct
  source 1..75: mol_type = other DNA
ggcttaatgtccacgccgaacgtggcagagtcttaccagagcaagttcaagggccgcaatggtcttgataaggtt

SEQ ID NO: 821916 - DNA, 75 bp, synthetic construct
  source 1..75: mol_type = other DNA
caaaggcacctgccagatcgaaaaagccgctaacgagtcggcgcatttcatgcggttttatgttccttgtcctca

SEQ ID NO: 821917 - DNA, 75 bp, synthetic construct
  source 1..75: mol_type = other DNA
attgggcacgtgctatcagcaacttcagttgaagattgtaaaaaagaacccgtagatagccccttctatacacct

SEQ ID NO: 821918 - DNA, 75 bp, synthetic construct
  source 1..75: mol_type = other DNA
tagcatatctttcactaaggctatgattgggcacgtgctatcagcaacttcagttgaagattgtaaaaaagaacc

SEQ ID NO: 821919 - DNA, 75 bp, synthetic construct
  source 1..75: mol_type = other DNA
gcgcattaagaaaacaatactctataacggctggtcaagatggtgagaaatatgctagtagatggctggaaaaat

SEQ ID NO: 821920 - DNA, 75 bp, synthetic construct
  source 1..75: mol_type = other DNA
tcagacctgatctcttattctatatcgaggcagcatggcagcgcagagaaatggataagataaaagagcggattc

SEQ ID NO: 821921 - DNA, 75 bp, synthetic construct
  source 1..75: mol_type = other DNA
gcacttatagtggcggttctgttgttcttccgtcgccgcttgctgctggatggcgaattacgatagatcgtgtgc

SEQ ID NO: 821922 - DNA, 75 bp, synthetic construct
  source 1..75: mol_type = other DNA
ggtttactgctgccggaagagcgcagtgttctgcctgtgttcgatacgacggcaatccatgccgaagatgctgtg

SEQ ID NO: 821923 - DNA, 75 bp, synthetic construct
  source 1..75: mol_type = other DNA
gcttattatgcgcaagtgattgctcgcctcgcagaacagggagcgcagggcgttatttttggctgtactgaaata

SEQ ID NO: 821924 - DNA, 75 bp, synthetic construct
  source 1..75: mol_type = other DNA
atgaaaacaattggtttgctgggaggaatgagttgggaatccactattccttattatcgtctgattaatgaaggt

SEQ ID NO: 821925 - DNA, 75 bp, synthetic construct
  source 1..75: mol_type = other DNA
agtcagtatgcaacattatgatctgcttattactgacgttaatatgccgaatatggatggttttgagttgactcg

SEQ ID NO: 821926 - DNA, 75 bp, synthetic construct
  source 1..75: mol_type = other DNA
gttgaaggttattcacattacgacctgggtaatgactccaacttattgatagtgttttatgttcagataatgccc

SEQ ID NO: 821927 - DNA, 75 bp, synthetic construct
  source 1..75: mol_type = other DNA
ctgtcacgggtgcaaactacgggcgtcttatgcgtgagggatttacagcgtttaatcctatcggagcactcgaag

SEQ ID NO: 821928 - DNA, 75 bp, synthetic construct
  source 1..75: mol_type = other DNA
gcgatctcggtttacctgatcccggtatggctggttgtgttaggtatcggttatctgttcaaagagaaaaccgca

SEQ ID NO: 821929 - DNA, 75 bp, synthetic construct
  source 1..75: mol_type = other DNA
cgaatgcgctgaatatcgtggtactgactgctgcgctctccgtgtacaacagctgcgtatattgcaacagccgta

SEQ ID NO: 821930 - DNA, 75 bp, synthetic construct
  source 1..75: mol_type = other DNA
gcgttagcaacctgtgggatcagggtggtttcctgccgcacggcttcaccgggctggtgatgatgatggcgatta

SEQ ID NO: 821931 - DNA, 75 bp, synthetic construct
  source 1..75: mol_type = other DNA
atgaaaacaattggtttgctggggggaatgagttgggaatccaccatcccttactatcgcctgataaatgaaggc

SEQ ID NO: 821932 - DNA, 75 bp, synthetic construct
  source 1..75: mol_type = other DNA
aggtaaggactctttgattgagtcatatgcaaaaaaagagaacatacttggtttgattttttcaggaatttggcc

SEQ ID NO: 821933 - DNA, 75 bp, synthetic construct
  source 1..75: mol_type = other DNA
cactcagctatgaacaactgacccggtttgcggaacgacgcatccgggaatgcaatctggacagccagggcgcga

SEQ ID NO: 821934 - DNA, 75 bp, synthetic construct
  source 1..75: mol_type = other DNA
caggagtattgcgaatacctgcatcacggactttcggcgattaagcgtcggctggggttacagcgatataacgaa

SEQ ID NO: 821935 - DNA, 75 bp, synthetic construct
  source 1..75: mol_type = other DNA
gatgttgacttcagtatgtatgacagaaaactatcagatatttatcatgatattatatgtgaacaaaggttacga

SEQ ID NO: 821936 - DNA, 75 bp, synthetic construct
  source 1..75: mol_type = other DNA
ctgaactgccgggcgtagacactaagatcctcgatccgcgtaacacctacgcttctccggaacagtggcaggaaa

SEQ ID NO: 821937 - DNA, 75 bp, synthetic construct
  source 1..75: mol_type = other DNA
gaagagctcgatccgagcctgacaggttatgagcgcggggtgttaactaatctgggtgccgttgccgtcgatacc

SEQ ID NO: 821938 - DNA, 75 bp, synthetic construct
  source 1..75: mol_type = other DNA
atacgatgcacaaagtggcggatgctatcgaatcccgttgttcactgcctttcttacatattgcggatgccaccg

SEQ ID NO: 821939 - DNA, 75 bp, synthetic construct
  source 1..75: mol_type = other DNA
gacgagcaatcagccgcgccggaatgacgcgcgtagcgctactgggcacgcgctacactatggagcaggattttt

SEQ ID NO: 821940 - DNA, 75 bp, synthetic construct
  source 1..75: mol_type = other DNA
gctgtactgaaattggtttactggtgccagaagagcgcagtgtcctgcccgtgttcgataccaccgctcttcatg

SEQ ID NO: 821941 - DNA, 75 bp, synthetic construct
  source 1..75: mol_type = other DNA
tgaatcgcgggatcgcattatattacggcggtcgtgacaagttagcgcaagatgatctgctagcgttttatcaag

SEQ ID NO: 821942 - DNA, 75 bp, synthetic construct
  source 1..75: mol_type = other DNA
gattctggcacgtatggaacaaatccttgccagtcgggctttaaccgatgaagaacgcgcacagcttttatatga

SEQ ID NO: 821943 - DNA, 75 bp, synthetic construct
  source 1..75: mol_type = other DNA
aacattgtcgagttctacttgggcaacattagcgaacaaacgttaatggaaaggctcaaggcggacgcaacggat

SEQ ID NO: 821944 - DNA, 75 bp, synthetic construct
  source 1..75: mol_type = other DNA
tgattacagttatcagcgactgcgcgaccatattcgttttgttctgattgagtgcccgcaaagttttgaaaactg

SEQ ID NO: 821945 - DNA, 75 bp, synthetic construct
  source 1..75: mol_type = other DNA
gctcgttctggtattcaaccgatccctggacgcctggcattcttcccgaatcgcagcgcagcaatggctgatctg

SEQ ID NO: 821946 - DNA, 75 bp, synthetic construct
  source 1..75: mol_type = other DNA
gcgaacagcgaactggtcggtcagggactggggaatattatcgccccgttctttggcggcatcaccgctactgct

SEQ ID NO: 821947 - DNA, 75 bp, synthetic construct
  source 1..75: mol_type = other DNA
accgaataaactgcggtttaccagtgttgcacaaagcctgagctgggatgcgtttgcctttacagaaaaactgct

SEQ ID NO: 821948 - DNA, 75 bp, synthetic construct
  source 1..75: mol_type = other DNA
gctactgtgtcaattaaatactactgttaatggtggtggcactgggcgaataacttatatttatagaccgcaatt

SEQ ID NO: 821949 - DNA, 75 bp, synthetic construct
  source 1..75: mol_type = other DNA
ctactcactcaactcatatatcatcagtatcaaatatatccactacaaatgtgcttgtaaaaaatggtcttgaaa

SEQ ID NO: 821950 - DNA, 75 bp, synthetic construct
  source 1..75: mol_type = other DNA
agcagtagacgtgcctgacgatgtactggttctgcgtgttatcggcccgctgtttttcgctgcggctgaaggtct

SEQ ID NO: 821951 - DNA, 75 bp, synthetic construct
  source 1..75: mol_type = other DNA
aaccctgacgtggttaatcaccatctggcgaaggtatatggcaaggcatccgttggcgcgccgccgatgtcggtt

SEQ ID NO: 821952 - DNA, 75 bp, synthetic construct
  source 1..75: mol_type = other DNA
tactgcgtttggggacagaagtggtcagcgaccagcaaggaaccattgccgcgctgctgggggcatctccggggg

SEQ ID NO: 821953 - DNA, 75 bp, synthetic construct
  source 1..75: mol_type = other DNA
tagtgatggaagggcgcgatccgcaacagaaagtggcagccacgcgtacggaaattggtaccgatgtgaactatg

SEQ ID NO: 821954 - DNA, 75 bp, synthetic construct
  source 1..75: mol_type = other DNA
ctttccgtgcgatgccgtcattttcacaaggtgcctctgatgatattatgtttttaaagactgatgctaatcagg

SEQ ID NO: 821955 - DNA, 75 bp, synthetic construct
  source 1..75: mol_type = other DNA
tgtttcaatggtgacagatgccgcggggatactggtaactgatgcgatggcaatacttgatggattgaagaaaaa

SEQ ID NO: 821956 - DNA, 75 bp, synthetic construct
  source 1..75: mol_type = other DNA
ctgaaaaacggcacagcacagaacatccgcgcgaaatttgtctttatcggcgcgggcggtgcggcgctgaagctg

SEQ ID NO: 821957 - DNA, 75 bp, synthetic construct
  source 1..75: mol_type = other DNA
ggtggaaatttagtaaacataaaaaaagcaagaaatgcattggcacatggttcagaatcctttttaaacaagggt

SEQ ID NO: 821958 - DNA, 75 bp, synthetic construct
  source 1..75: mol_type = other DNA
aaccggcgcgaatgctctcgataccgcgaaagccattaaggcaaaactggcggaattacagccattcttcccgca

SEQ ID NO: 821959 - DNA, 75 bp, synthetic construct
  source 1..75: mol_type = other DNA
ctccggatttaaagaatcgaccgtcagcgacattgttgattcacgtcgtgcagagatgttgcaacaggccaacgc

SEQ ID NO: 821960 - DNA, 75 bp, synthetic construct
  source 1..75: mol_type = other DNA
cctttcatcaaccagactcaaagcgatcgctatggcaaagctgatccgctgacattctggttatgcgatcaactg

SEQ ID NO: 821961 - DNA, 75 bp, synthetic construct
  source 1..75: mol_type = other DNA
tgcgtttcagtgatgacggcgccagtgtttttattaaggatgctttttttgaagaagccttacagagaatgggac

SEQ ID NO: 821962 - DNA, 75 bp, synthetic construct
  source 1..75: mol_type = other DNA
ggtctgggcgggcgtgacgggtgataacgcgcgcgggcgcacggtgggttttccgtggctgcgtaccgcactgat

SEQ ID NO: 821963 - DNA, 75 bp, synthetic construct
  source 1..75: mol_type = other DNA
cagagagattttatcgcagtgtggtatccacgaacaggaaggccttgtagccccttcgcaggaaccacgagaaat

SEQ ID NO: 821964 - DNA, 75 bp, synthetic construct
  source 1..75: mol_type = other DNA
cccgcaactggttgagaagtggctggcgcagctgaaaatggctcataagcttgagttaagcaacgggcgtattgt

SEQ ID NO: 821965 - DNA, 75 bp, synthetic construct
  source 1..75: mol_type = other DNA
atcttgctggatggcaaacctgtcagcggcgaacaaccggaagattatcgcaaactgttttcggcagtgtttacc

SEQ ID NO: 821966 - DNA, 75 bp, synthetic construct
  source 1..75: mol_type = other DNA
gcaggccgttccctggatgcaaagtcgtggcattcagccagaagcctgggcaccgtttgcggttacagggcggta

SEQ ID NO: 821967 - DNA, 75 bp, synthetic construct
  source 1..75: mol_type = other DNA
ttgctgctggatacgttgcaaaacatcctgctgccgctgctgctgaacattggtttactggcgctggcattattt

SEQ ID NO: 821968 - DNA, 75 bp, synthetic construct
  source 1..75: mol_type = other DNA
tacttttaaccagccggggcatctggcaacggtagtcgcttttgatctgcctattaatgatttgatcccaccagg

SEQ ID NO: 821969 - DNA, 75 bp, synthetic construct
  source 1..75: mol_type = other DNA
gagcattacccgcttctttttactgttgatcattgtgttactggtgacgatgggggtaatggtacaaagcgccgt

SEQ ID NO: 821970 - DNA, 75 bp, synthetic construct
  source 1..75: mol_type = other DNA
agctgaaccgggcactgacggacgcgtctgcccttatcgacagttatctgtctgcccgttacacgctgccgctgg

SEQ ID NO: 821971 - DNA, 75 bp, synthetic construct
  source 1..75: mol_type = other DNA
cctgaatccggggatttaccacaggttcagtctgatgcggcggtattcgggcgcaaccagaagggcttcatatga

SEQ ID NO: 821972 - DNA, 75 bp, synthetic construct
  source 1..75: mol_type = other DNA
atgttgttggcacattctgagcctgagtccgagccggtctttaacctgatgataccgcgctctcattgtccctac

SEQ ID NO: 821973 - DNA, 75 bp, synthetic construct
  source 1..75: mol_type = other DNA
gtcgataaacgcggcgtaccggttaacaccattctggtgtctgcgctggttacggcattgtgcgtactgattaac

SEQ ID NO: 821974 - DNA, 75 bp, synthetic construct
  source 1..75: mol_type = other DNA
gactgttaatggcgctggtggtatctgcactggtcatcaactgggcgatgatcagtctggcgcatatgaaattcc

SEQ ID NO: 821975 - DNA, 75 bp, synthetic construct
  source 1..75: mol_type = other DNA
cggtttcctgccgcacggctttagcgggctggtaatgatgatggcgattatcatgttctcgttcggggggcttga

SEQ ID NO: 821976 - DNA, 75 bp, synthetic construct
  source 1..75: mol_type = other DNA
cacagtcgcaactcacctcaatggccgaagatgcggggtcaaaaatctcagccactcccgcccgcaaagcgcttc

SEQ ID NO: 821977 - DNA, 75 bp, synthetic construct
  source 1..75: mol_type = other DNA
gcagtaacccggcgaaacccgggaatgtggttgattttgctgccgatacccagatcccgggggataccgatggtg

SEQ ID NO: 821978 - DNA, 75 bp, synthetic construct
  source 1..75: mol_type = other DNA
ggtaagcacaccgtgacgctggagaaaggggataacggctggacatccagtgacccgacgctgatcccggacagc

SEQ ID NO: 821979 - DNA, 75 bp, synthetic construct
  source 1..75: mol_type = other DNA
atgccccttacaaatacccccaaacgctatggtgttatatcgatggcctttcattggctgagtgcaatcattatc

SEQ ID NO: 821980 - DNA, 75 bp, synthetic construct
  source 1..75: mol_type = other DNA
accgatcagcgtttttggctggtttgacgttcccgcaacccttgccgatactggcgcgcaggctgacttagccga

SEQ ID NO: 821981 - DNA, 75 bp, synthetic construct
  source 1..75: mol_type = other DNA
agttaccggggttgccaaagatccgagcggtaatgaaagtgacccgtcaaccgtgacgtcaaaaactgatggtgt

SEQ ID NO: 821982 - DNA, 75 bp, synthetic construct
  source 1..75: mol_type = other DNA
aagttattgcggtagtagcgatgatcatcttcggcggctggctgctgttcagtggtaacggcggtccgcaggcga

SEQ ID NO: 821983 - DNA, 75 bp, synthetic construct
  source 1..75: mol_type = other DNA
gtgatttctacctactatctggacgacggtatttctaccaataccaacgccaatagtctgacaatcaaaaacagc

SEQ ID NO: 821984 - DNA, 75 bp, synthetic construct
  source 1..75: mol_type = other DNA
gtgataacagatgtctggaaatataggggcaaatccactgctgctaacaaagctgacctgggtgcatacacctat

SEQ ID NO: 821985 - DNA, 75 bp, synthetic construct
  source 1..75: mol_type = other DNA
gactttagtaactctactttgatgggcgatgtaatcttctctagcaactttgatgaaaacttcttcccacgtggt

SEQ ID NO: 821986 - DNA, 75 bp, synthetic construct
  source 1..75: mol_type = other DNA
gtgaaatcgctggcggaagtgcttggcattaaaccggaagaaattatggcgattggcgatcaggaaaacgacatc

SEQ ID NO: 821987 - DNA, 75 bp, synthetic construct
  source 1..75: mol_type = other DNA
tcacgttctgcgtgacggtaatcctcatcatctggatgctacacggttcgctgtgtgaaatacggatgagcttct

SEQ ID NO: 821988 - DNA, 75 bp, synthetic construct
  source 1..75: mol_type = other DNA
gttgcgaaactgcagcgtatgcagttcggtaaaagctcagaaaaacttcgcgcaaaaactgaacggcagatacag

SEQ ID NO: 821989 - DNA, 75 bp, synthetic construct
  source 1..75: mol_type = other DNA
tgctcaacgtcttctcgggcataaatcagattcaatggcggcgcggtatagagacagccgtggacgggaatggga

SEQ ID NO: 821990 - DNA, 75 bp, synthetic construct
  source 1..75: mol_type = other DNA
agagagtcggcgatttgtgcagaatgaaatggtcagacataaacgacaaccatcttcacattgaacagagtaaaa

SEQ ID NO: 821991 - DNA, 75 bp, synthetic construct
  source 1..75: mol_type = other DNA
gtcgcgccaaacaagcacaaggcgtggtaactcgcttccctgccctgctctatccacttggtaactggatctgcc

SEQ ID NO: 821992 - DNA, 75 bp, synthetic construct
  source 1..75: mol_type = other DNA
gctcgcgcaggcattcaaccgatcccgggacgcctggcgttcttcccgaatcgtcgcgcggcgatggcggattta

SEQ ID NO: 821993 - DNA, 75 bp, synthetic construct
  source 1..75: mol_type = other DNA
cacgtatgactcgcctggcaccggtagtcgtagacgttccagacgatgttctggttctgcgcgttattggtccgc

SEQ ID NO: 821994 - DNA, 75 bp, synthetic construct
  source 1..75: mol_type = other DNA
cactctgcttccggcagcattttcgatggcgatgttaggggcaattgaatcactgctctgcgccgtggtgctgga

SEQ ID NO: 821995 - DNA, 75 bp, synthetic construct
  source 1..75: mol_type = other DNA
gataaagtgacggcagatggtcagtattctgtaaccgcggaaatcacagacccggcaggtaacaccagtggctag

SEQ ID NO: 821996 - DNA, 75 bp, synthetic construct
  source 1..75: mol_type = other DNA
cgacagaaacacagcgtctggtattgtagaaccgggcgattgctgggacagctgactcagagacgtgttgatagc

SEQ ID NO: 821997 - DNA, 75 bp, synthetic construct
  source 1..75: mol_type = other DNA
aaccgctgggggaaagcatctctgaacagctggatatcatcaatactgcgttcagggtaatcgaaacggtccgcc

SEQ ID NO: 821998 - DNA, 75 bp, synthetic construct
  source 1..75: mol_type = other DNA
cccgcgagatcagctcactcagagcgctggtcgctaaactgcagagaatgttgttcggtcgcagcagcgagaaaa

SEQ ID NO: 821999 - DNA, 75 bp, synthetic construct
  source 1..75: mol_type = other DNA
tgaaaacctgctggctgccgaaatgctaaaaaccgacgcccgtcaggatttgcgcctgtgggtgctggaagatga

SEQ ID NO: 822000 - DNA, 75 bp, synthetic construct
  source 1..75: mol_type = other DNA
atgcaagagagacacacggaacaggactatcgtgccctgctgattgctgatacgcccattattgatgttcgcgcc

SEQ ID NO: 822001 - DNA, 75 bp, synthetic construct
  source 1..75: mol_type = other DNA
cctgttagtaaagtggaatcagagcggatagccgaagagatcgatacagcagaacacattaagaagttacgcgcc

SEQ ID NO: 822002 - DNA, 75 bp, synthetic construct
  source 1..75: mol_type = other DNA
atcgctgaaagatggcgcgcagaaagaggcggataagcttggctataacctggtggtgctggactcccagaacaa

SEQ ID NO: 822003 - DNA, 75 bp, synthetic construct
  source 1..75: mol_type = other DNA
gtgctaactatgcatgcgtactggatttttctggcgaaaagctaacttttaattttttcaagcttgataaacaga

SEQ ID NO: 822004 - DNA, 75 bp, synthetic construct
  source 1..75: mol_type = other DNA
cagcatgagtcattagcatctcattatgttccttataatttcagtcggaagtatagccaaaaaaaaggggagttt

SEQ ID NO: 822005 - DNA, 75 bp, synthetic construct
  source 1..75: mol_type = other DNA
tacattcatccagataagtgaaatgctgacaaaggagtacggaaaacccgttgctacaaaagatcgtgtttttaa

SEQ ID NO: 822006 - DNA, 75 bp, synthetic construct
  source 1..75: mol_type = other DNA
aggctgtatttgcacagaatgatgaaatggcgctgggcgcgctgcgcgcactgcaaactgccggtaaatcggatg

SEQ ID NO: 822007 - DNA, 75 bp, synthetic construct
  source 1..75: mol_type = other DNA
cgaaggcttccagcaggccgttgctgctcacaagtttaatgttcttgccagccagcagattttgatcgcaccaaa

SEQ ID NO: 822008 - DNA, 75 bp, synthetic construct
  source 1..75: mol_type = other DNA
tgacaacgcaactcaccaccggcagcaccgacggtcatctggcctggctggtgccgttacttaaagaatattacg

SEQ ID NO: 822009 - DNA, 75 bp, synthetic construct
  source 1..75: mol_type = other DNA
atgtgatagttgccaacccgtatggtatcacctgtgacggctgtggttttatcaacacgccgcacgcgacgctca

SEQ ID NO: 822010 - DNA, 75 bp, synthetic construct
  source 1..75: mol_type = other DNA
gtgactgaaggcagtatcaccatcaatggcgcgggcctggacggcacccggagcgatgctgtatccattattgcc

SEQ ID NO: 822011 - DNA, 75 bp, synthetic construct
  source 1..75: mol_type = other DNA
cgggtgatatcacactgaaaggccgcagcgttgccgggaaaacactcaccgtcagttccggcagcctgaacaacg

SEQ ID NO: 822012 - DNA, 75 bp, synthetic construct
  source 1..75: mol_type = other DNA
accctgctgaacagtgcgctgatctatgcggggaataacctgaagctgtttacagaccgtctgcataaccagcat

SEQ ID NO: 822013 - DNA, 75 bp, synthetic construct
  source 1..75: mol_type = other DNA
gtgccccgtcgctcagcctcagtgcgccggaactgaccagcagcggcgtacttgttggttccgccctgaatacac

SEQ ID NO: 822014 - DNA, 75 bp, synthetic construct
  source 1..75: mol_type = other DNA
gctgtacagtgcaggcaacctgctgcttgacgctcaggacttcagtggtcaggggcaggtggtggccaccggtga

SEQ ID NO: 822015 - DNA, 75 bp, synthetic construct
  source 1..75: mol_type = other DNA
ttcgctcagcggcgcgggccagctggttgcactcggtaacctgacgctgaagctcacccgtggtttgaccgcaca

SEQ ID NO: 822016 - DNA, 75 bp, synthetic construct
  source 1..75: mol_type = other DNA
cgttgacaccggcgcgctcggtggaatgtacgccaggcgtattcatctgacctccactgaaagtggtgtcggggt

SEQ ID NO: 822017 - DNA, 75 bp, synthetic construct
  source 1..75: mol_type = other DNA
aaccgcaacttagccaggcgagttttgaaaacctactggctgccgaaatgctaaaaaccgacgcccgtcaggatc

SEQ ID NO: 822018 - DNA, 75 bp, synthetic construct
  source 1..75: mol_type = other DNA
ggcgggcgacctcaccctccgggggaaaacactgaataccgcagggaccacgcagggacagaatctcaccgtgca

SEQ ID NO: 822019 - DNA, 75 bp, synthetic construct
  source 1..75: mol_type = other DNA
gaaagtgctgggtaaccagggattaatcagcgcgaagacgctggaagtgaatggcgattcgctcagcaacagtgg

SEQ ID NO: 822020 - DNA, 75 bp, synthetic construct
  source 1..75: mol_type = other DNA
ggaaactcactggataacagcggcactgtccagggtaaccatgtcacgcttcaccacagaagcactgacaacagc

SEQ ID NO: 822021 - DNA, 75 bp, synthetic construct
  source 1..75: mol_type = other DNA
acccgatcaacgtcgtctggtcagcaaaattttatgaagtgcagaagtacctttctctgacccatcacgcctatt

SEQ ID NO: 822022 - DNA, 75 bp, synthetic construct
  source 1..75: mol_type = other DNA
tccgaacaatccgcaaagcgtcacgcgtacgctgtctgcgcgttattacaaagatggcgcggaaattttaatcga

SEQ ID NO: 822023 - DNA, 75 bp, synthetic construct
  source 1..75: mol_type = other DNA
atcgatcgcggctgggatatggccacgggtgagaaagactttgacgatccgctgaatcagcaacatcgtccacgt

SEQ ID NO: 822024 - DNA, 75 bp, synthetic construct
  source 1..75: mol_type = other DNA
gacacccccaccagctacgaactacccaagctcaccagagcagaacgcaaaggccttgatgaattaattcgtagc

SEQ ID NO: 822025 - DNA, 75 bp, synthetic construct
  source 1..75: mol_type = other DNA
caacacgcaaagaaaaagagaacactttaaagactttcctgatgagttttgatagctacgaacaattaccatcac

SEQ ID NO: 822026 - DNA, 75 bp, synthetic construct
  source 1..75: mol_type = other DNA
attacgccacgggtaagacacatgccaacacgcaaaacaacagagaatactttaaaaactttcttgatgagcttt

SEQ ID NO: 822027 - DNA, 75 bp, synthetic construct
  source 1..75: mol_type = other DNA
aaattgaagatttaattatcggcacttgtcgcagttttggaagagataattatcaccggaaagttttctatttac

SEQ ID NO: 822028 - DNA, 75 bp, synthetic construct
  source 1..75: mol_type = other DNA
atgcagcgtgacaaatcatcttcaaagacaatcaaccagacttagctacgaattaccaaccgatgcctattgtgc

SEQ ID NO: 822029 - DNA, 75 bp, synthetic construct
  source 1..75: mol_type = other DNA
ttaccgttggaaatatcgaaccaatggaaaacgaacaaacagactttgaatttgacccttatctaattgcagaag

SEQ ID NO: 822030 - DNA, 75 bp, synthetic construct
  source 1..75: mol_type = other DNA
ccaacccgaggtcatgaatttgctccgctatgtcaaggaggcctgctttaccgaggatgagctcaagaacctcgt

SEQ ID NO: 822031 - DNA, 75 bp, synthetic construct
  source 1..75: mol_type = other DNA
taacttagccaccatttgcatgaaagttattgagacaattaatcatcatgtggaagtgggcaatattagccttac

SEQ ID NO: 822032 - DNA, 75 bp, synthetic construct
  source 1..75: mol_type = other DNA
tgcgaagtcttgatgagattaactcaagcacagtgacgagccatcttcaaagacaagcaaccagacttagctacg

SEQ ID NO: 822033 - DNA, 75 bp, synthetic construct
  source 1..75: mol_type = other DNA
catcaaaaattatttggctaactttgattcttacgagcagttaccaagcaagcttgatgatatttttattggatt

SEQ ID NO: 822034 - DNA, 75 bp, synthetic construct
  source 1..75: mol_type = other DNA
gattctgtagaggtgaaggtcacccgaaatacaacaaaaaactattttatcttctaaagaatcttgacgaaatta

SEQ ID NO: 822035 - DNA, 75 bp, synthetic construct
  source 1..75: mol_type = other DNA
gtggatcactattgcaccgttcgtgacattaaccctcgcagaaacatagatccgaaagctcaagccgttcatggc

SEQ ID NO: 822036 - DNA, 75 bp, synthetic construct
  source 1..75: mol_type = other DNA
gagcagccagaccgctaacgctgcattgcgccggatgggatacgctggtgtgctggtgtctcacggattacgcgc

SEQ ID NO: 822037 - DNA, 75 bp, synthetic construct
  source 1..75: mol_type = other DNA
atgtggccgcatcgtggtacgaaatgaaaaaaaaccagaatctcgcccacaatacgatcaaggacatctggcgct

SEQ ID NO: 822038 - DNA, 75 bp, synthetic construct
  source 1..75: mol_type = other DNA
tgtaatgcggatcagataccaagtaaaagatcagttggggaggaggcaatagaagaagaaagacgtttgctttat

SEQ ID NO: 822039 - DNA, 75 bp, synthetic construct
  source 1..75: mol_type = other DNA
tggtgcttatgcgctggtggggggaatttgtagaggccgcagcaaccggagtgaccatagccagtggtaaaaggg

SEQ ID NO: 822040 - DNA, 75 bp, synthetic construct
  source 1..75: mol_type = other DNA
tgctggtgtctcatggattacgcgccatattcagcacagcagcgaacgaggaaggattcgagccggacgtaatcg

SEQ ID NO: 822041 - DNA, 75 bp, synthetic construct
  source 1..75: mol_type = other DNA
gttggtaatattgagccaatggaaaacgagcaaccagactttgagtttgacccgtatattttggaggaattttaa

SEQ ID NO: 822042 - DNA, 75 bp, synthetic construct
  source 1..75: mol_type = other DNA
gtgcattgcttgctgtaatgtgtgcaaagctaattggtattgttgaacatcatattgccgttgggaatattgagc

SEQ ID NO: 822043 - DNA, 75 bp, synthetic construct
  source 1..75: mol_type = other DNA
tatgaattaccaagcgataaatattgtgcattgcttgctgtaatgtgtgcaaagctaattggtattgttgaacat

SEQ ID NO: 822044 - DNA, 75 bp, synthetic construct
  source 1..75: mol_type = other DNA
tcgaacaaaaaacgaacaatcattagtttgggctcgcttgatgaagtctccctggctgatgccagaaaacgccgt

SEQ ID NO: 822045 - DNA, 75 bp, synthetic construct
  source 1..75: mol_type = other DNA
ttaatgcaggatatttcccgcgatttatgggatcagggtgataaacctgttccaccgctgcgccagttattctgg

SEQ ID NO: 822046 - DNA, 75 bp, synthetic construct
  source 1..75: mol_type = other DNA
tcattaggggattcatcagtaccaagtaagcttgatgatattttcattggattctgtagaagtgaaggccacccg

SEQ ID NO: 822047 - DNA, 75 bp, synthetic construct
  source 1..75: mol_type = other DNA
gtcagcagaaagtatctgggcacaattaaaactgggtgttccgggtgtgcctgactcaccggtgattgctgatga

SEQ ID NO: 822048 - DNA, 75 bp, synthetic construct
  source 1..75: mol_type = other DNA
ttatcgaaaaagaaaccggtcgtgaaactcgtgcaactgtactgggccacattcagcgcggcggttccccggtac

SEQ ID NO: 822049 - DNA, 75 bp, synthetic construct
  source 1..75: mol_type = other DNA
ctggacatcatgctgccgggcaatcgcccccttcgttgcccccagtgccgttattcaggcccgccagcgcctggg

SEQ ID NO: 822050 - DNA, 75 bp, synthetic construct
  source 1..75: mol_type = other DNA
ctgccagatggaactgaccagccatctgctgacggctgcagccttcggcacgatgagaacagcgaaaatgagctt

SEQ ID NO: 822051 - DNA, 75 bp, synthetic construct
  source 1..75: mol_type = other DNA
gagattgccagccatggtcgtcagcactcattgagtcttacgctaccgccactggccactatttggctggtgcgg

SEQ ID NO: 822052 - DNA, 75 bp, synthetic construct
  source 1..75: mol_type = other DNA
ttttgcggatcctttttccgtactgggaatgcataaaaccaccgcgggactggaagtccgtgcccttttacccga

SEQ ID NO: 822053 - DNA, 75 bp, synthetic construct
  source 1..75: mol_type = other DNA
ccgggactgggaaatgaagtgacagcccgcctgctgaccgtgacgcgcaaaggaaaagtctgccatctgctgacg

SEQ ID NO: 822054 - DNA, 75 bp, synthetic construct
  source 1..75: mol_type = other DNA
cccagtgccgttattcaggcccgccagcgcctgggaagtgaggctgtccgccgtgtgttcacgaaaacagcgcag

SEQ ID NO: 822055 - DNA, 75 bp, synthetic construct
  source 1..75: mol_type = other DNA
cttacacgcctgctggaaaaacactatggtctgaccctgaacgatacgccgttctgtgatgaaatcgttatacag

SEQ ID NO: 822056 - DNA, 75 bp, synthetic construct
  source 1..75: mol_type = other DNA
agatatccttcatgccaggagagcatgcggattaatgaacagttgttcgtatcgggaagtaagtaatattgttct

SEQ ID NO: 822057 - DNA, 75 bp, synthetic construct
  source 1..75: mol_type = other DNA
gtgtgttctggcgcacaccggatacactagagaacgatgcagccttcccccgccagacacatgccgggaacccgg

SEQ ID NO: 822058 - DNA, 75 bp, synthetic construct
  source 1..75: mol_type = other DNA
aaaacccaaccgttgtatgacacccaggtttctgtttcacacaccacacgccaaccgcgtcctggtgaagtccac

SEQ ID NO: 822059 - DNA, 75 bp, synthetic construct
  source 1..75: mol_type = other DNA
agatttatcgccgtcagcgtgaaatgaaagaggagctgagcggtctggatgatttggcttcaattcgggcgtttg

SEQ ID NO: 822060 - DNA, 75 bp, synthetic construct
  source 1..75: mol_type = other DNA
aaaaagcgaatcagtttgatgcgccaatctctatctatgaagttcacctgggttcctggcgtcgtcacaccgaca

SEQ ID NO: 822061 - DNA, 75 bp, synthetic construct
  source 1..75: mol_type = other DNA
cgagttatttccccggctatgattggacgtggcgtgaagtggctgactttgcggggtgtgaaacagaaacggcgt

SEQ ID NO: 822062 - DNA, 75 bp, synthetic construct
  source 1..75: mol_type = other DNA
ctgctacgccctatcgctcgtgaagcaggaagcaaaatctatctacaagaagaatccatctgcggtttctggtat

SEQ ID NO: 822063 - DNA, 75 bp, synthetic construct
  source 1..75: mol_type = other DNA
atggcctgccgtacttcgctggaagtagaacacctgctggcgcaattccgcatgacccaacaagacgcaccgctg

SEQ ID NO: 822064 - DNA, 75 bp, synthetic construct
  source 1..75: mol_type = other DNA
atgcactcgggatttcttccggtgcagttcttaatcttcatttcagtaaaccggtgacagggcagtcagtctggc

SEQ ID NO: 822065 - DNA, 75 bp, synthetic construct
  source 1..75: mol_type = other DNA
acagcattcccccgccggttcagattcagcaggcggccataccaccgccagcagaaatgccgtttctttctgccc

SEQ ID NO: 822066 - DNA, 75 bp, synthetic construct
  source 1..75: mol_type = other DNA
ggccggaatactggatgattcacagcgccgcctgcatgttcctcatccagaaaaactggcaacgttattggctaa

SEQ ID NO: 822067 - DNA, 75 bp, synthetic construct
  source 1..75: mol_type = other DNA
aagggccttcccgagagtggtaaaggagaggccctggaaataccccacagccccgaaaaagaggccagtcaggtt

SEQ ID NO: 822068 - DNA, 75 bp, synthetic construct
  source 1..75: mol_type = other DNA
tggcggatctgtacagtcatcgctgggaaatcgaactgggatacagggagataaaacagacgatgcaactgagca

SEQ ID NO: 822069 - DNA, 75 bp, synthetic construct
  source 1..75: mol_type = other DNA
aaattaccgacgagaagggaaagggccttcccgagagtggtaaaggagaggccctggaaataccctacagccccg

SEQ ID NO: 822070 - DNA, 75 bp, synthetic construct
  source 1..75: mol_type = other DNA
ctgctgctggcagggcgctgccgctatccgcgtaaactggaagccgacttgtgggcgcgcgaggccgttttctct

SEQ ID NO: 822071 - DNA, 75 bp, synthetic construct
  source 1..75: mol_type = other DNA
aattaggctgttttgaggaaggcgcacagtatacggctgaaaaaccaatggggttatcacctaaattgcctttta

SEQ ID NO: 822072 - DNA, 75 bp, synthetic construct
  source 1..75: mol_type = other DNA
gcgttctgtgatgggaatgaaaagaggagatatcattgtcatctatagaaccggagacaaaaaagggccagctcg

SEQ ID NO: 822073 - DNA, 75 bp, synthetic construct
  source 1..75: mol_type = other DNA
tctggggaattaacactctgtttggcccgtttgttctggatctgtttactgacggtgataacgccaaatgtaccg

SEQ ID NO: 822074 - DNA, 75 bp, synthetic construct
  source 1..75: mol_type = other DNA
cgggcgctatgttttcctgatcaaagctgccaccagcgaagtgtggtggccggaagatgcggaccatattgcttt

SEQ ID NO: 822075 - DNA, 75 bp, synthetic construct
  source 1..75: mol_type = other DNA
tattcgcgggcgtattggttttgaactgccagcctggtttatcccgaaggacgagaagcaggtgccgacaggcgc

SEQ ID NO: 822076 - DNA, 75 bp, synthetic construct
  source 1..75: mol_type = other DNA
gactggatggactaccagcaggtcaggtatcagaatgcgaggcgcagaatgccagacgctggctggcagtaaggg

SEQ ID NO: 822077 - DNA, 75 bp, synthetic construct
  source 1..75: mol_type = other DNA
gtgtctatctgctacgtaccgctgtcaccggtgtcacccgctatgacctcgacggtaagcctgccgggcaggttt

SEQ ID NO: 822078 - DNA, 75 bp, synthetic construct
  source 1..75: mol_type = other DNA
ttttcacgattttaagcagagatacattttgaacggggatgcgcaggaaagacttgacgccctctgtgtcggtcg

SEQ ID NO: 822079 - DNA, 75 bp, synthetic construct
  source 1..75: mol_type = other DNA
gctacaaacctttgtgccttaccgtaccgccgtagagttgtgcgcgctggaacatggtggattagatacctgcga

SEQ ID NO: 822080 - DNA, 75 bp, synthetic construct
  source 1..75: mol_type = other DNA
catcattgccattttaagcgccattggtattcccgcttatcaaaactacctgcgcaaagccgcactcaccgacat

SEQ ID NO: 822081 - DNA, 75 bp, synthetic construct
  source 1..75: mol_type = other DNA
attcacctaccgggcattattggcatttggggattttgacaacattgccgctggagaaagcagtaaaagcatgga

SEQ ID NO: 822082 - DNA, 75 bp, synthetic construct
  source 1..75: mol_type = other DNA
acttgaggcatgtggtgaggcctttctggcgcaggttcgccagcaggcagaaaaactggtcagggagatggtggc

SEQ ID NO: 822083 - DNA, 75 bp, synthetic construct
  source 1..75: mol_type = other DNA
aatgcccgagtggtcgggtcatggggctggcgaataaaggctggataaagggcgaaccacaggatggaggctgga

SEQ ID NO: 822084 - DNA, 75 bp, synthetic construct
  source 1..75: mol_type = other DNA
accgccgtagaattgtgtgcgctggaacatggtgggttgaacacctgtgacggcggcagcaatggcatcccctcg

SEQ ID NO: 822085 - DNA, 75 bp, synthetic construct
  source 1..75: mol_type = other DNA
acagaactctccatggacgaatggttctgtgcagtgtcctgcatcacctcccgccgcgtatatctgcagcggacc

SEQ ID NO: 822086 - DNA, 75 bp, synthetic construct
  source 1..75: mol_type = other DNA
ttgtactggattatatcgacgctgtgacggcaacagatatcagcactgcaccggatattgagtggcctgcaatac

SEQ ID NO: 822087 - DNA, 75 bp, synthetic construct
  source 1..75: mol_type = other DNA
ccgcatccggcaagaagctataagaaaagggcggagatcatctccgccctttttatttctgcaatccgcaattat

SEQ ID NO: 822088 - DNA, 75 bp, synthetic construct
  source 1..75: mol_type = other DNA
aattgccagagaagcagaattccctaccgggataatgcttgagcagcacgccattgcaataccgcattgtgaggc

SEQ ID NO: 822089 - DNA, 75 bp, synthetic construct
  source 1..75: mol_type = other DNA
aatagctgtaaccggggacagagcctttagtgcatatcttcatacgggagttgaatggagcgatgtcattacaaa

SEQ ID NO: 822090 - DNA, 75 bp, synthetic construct
  source 1..75: mol_type = other DNA
tttttctttgctgtacagtatcagacagtgtttatgcggatacagatcaaacatatgatattttttggggaatgc

SEQ ID NO: 822091 - DNA, 75 bp, synthetic construct
  source 1..75: mol_type = other DNA
tatatcgatgcggtgaccgcaacggataccagcactgcaccagatgtcaatttgccagcgttcccggaggcgtag

SEQ ID NO: 822092 - DNA, 75 bp, synthetic construct
  source 1..75: mol_type = other DNA
atatttcaacatgcagcgtgcgcggcgagatgtgtttattccagaagtttaatcggctgattgacgaaaattatc

SEQ ID NO: 822093 - DNA, 75 bp, synthetic construct
  source 1..75: mol_type = other DNA
gttctgaccgtacgtcaggagttaatttggcccctggtagaaaagctctggcctggtagtggagatgccgcaatg

SEQ ID NO: 822094 - DNA, 75 bp, synthetic construct
  source 1..75: mol_type = other DNA
cacctgtatttactgaacagacgacagaatcagtatccgccggaataaattcatctgccgtcgaaaaacatatcc

SEQ ID NO: 822095 - DNA, 75 bp, synthetic construct
  source 1..75: mol_type = other DNA
actcttaagcaagctgtggctatgggaaggcaaagcagaaagctatggctgggggagtaattcaacacaggaagc

SEQ ID NO: 822096 - DNA, 75 bp, synthetic construct
  source 1..75: mol_type = other DNA
tcctattccggaagcccggcggaaaatatttcccggtgtgatgttatgtgttgaatgtcaggcgtatcaggaaag

SEQ ID NO: 822097 - DNA, 75 bp, synthetic construct
  source 1..75: mol_type = other DNA
tcctattccggaagcccggcggaaaatatttcccggtgtgacgttgtgcgttgaatgtcaggcgtatcaggaaaa

SEQ ID NO: 822098 - DNA, 75 bp, synthetic construct
  source 1..75: mol_type = other DNA
gatgccatccagacgaccggctcctcgcgtggtacggggaacgaaaccaactatgtaatgcaaaaatttgcgcgc

SEQ ID NO: 822099 - DNA, 75 bp, synthetic construct
  source 1..75: mol_type = other DNA
tggttcaggaaattgacttcgtaagacaaacagcccctgccgggcagtttcctgtaagagagtgtttgccttctc

SEQ ID NO: 822100 - DNA, 75 bp, synthetic construct
  source 1..75: mol_type = other DNA
ttccctgccgggaaaaatcaggaaatgccctgtttatcttcctgatgacagaacaaacagaaacaacggagataa

SEQ ID NO: 822101 - DNA, 75 bp, synthetic construct
  source 1..75: mol_type = other DNA
aaggtcgcgttgttagcgacaaaatggagaaatccattgttgttgctatcgaacgttttgtgaaacatccgatct

SEQ ID NO: 822102 - DNA, 75 bp, synthetic construct
  source 1..75: mol_type = other DNA
tttcggtgattcagattgatgatcccaacaatcccggcgaaaaaatgagtctggcaccgtttatagaacgagctg

SEQ ID NO: 822103 - DNA, 75 bp, synthetic construct
  source 1..75: mol_type = other DNA
gatgcatcaggactggtcgccggaacagatcgccggttggctgaaacgctgttatccggataatcaggaaatgca

SEQ ID NO: 822104 - DNA, 75 bp, synthetic construct
  source 1..75: mol_type = other DNA
gacaacaccacgccggggaaattactggttaaggagattaacttcgtaagacaaacagcacctgccggacagttc

SEQ ID NO: 822105 - DNA, 75 bp, synthetic construct
  source 1..75: mol_type = other DNA
gaaactatcgatcgcgagctgaccactgttatgtctaacagcttcggcttcggtggcaccaacgccacgctggtg

SEQ ID NO: 822106 - DNA, 75 bp, synthetic construct
  source 1..75: mol_type = other DNA
gacaaacaactcaacaatcaacttactccacattaggggacaggtttaaaattctcccagaaggatatttttccg

SEQ ID NO: 822107 - DNA, 75 bp, synthetic construct
  source 1..75: mol_type = other DNA
agttgcgtcaataccggaatttccgtgcgcggcatggatatggcgctgactggcgcacaggcggcggcacaaacg

SEQ ID NO: 822108 - DNA, 75 bp, synthetic construct
  source 1..75: mol_type = other DNA
atgtggccgggaaggggtaccgttatgccagccgtctggaggcctggcaggcactgcaggtgtttctgaaacgtt

SEQ ID NO: 822109 - DNA, 75 bp, synthetic construct
  source 1..75: mol_type = other DNA
gaacacggctttatcgccccgagcatcaacattgaagagctggacgaacaggctgcgggtctgaacatcgtgacc

SEQ ID NO: 822110 - DNA, 75 bp, synthetic construct
  source 1..75: mol_type = other DNA
ccaaatacaacgacaccccggaaaaagcctcccgtacttatgacgctcaccgtgacggtttcgttatcgctggcg

SEQ ID NO: 822111 - DNA, 75 bp, synthetic construct
  source 1..75: mol_type = other DNA
cttccgtgctcgtatggctactaaaaatggtcgtcaggtactggcacgtcgtcgtgctaaaggccgtgctcgtct

SEQ ID NO: 822112 - DNA, 75 bp, synthetic construct
  source 1..75: mol_type = other DNA
ataagatacaaaaacagggcggtgattatttattcgctgtaaaaggaaaccaggagcggctaaataaagcctttg

SEQ ID NO: 822113 - DNA, 75 bp, synthetic construct
  source 1..75: mol_type = other DNA
tcattgcttaagaaaagtaataaaactatcagcgcccaaaaaaaacagtgcgatgcgtcgactggcaattcacag

SEQ ID NO: 822114 - DNA, 75 bp, synthetic construct
  source 1..75: mol_type = other DNA
gaattgttatcagtaaaatacccgttatgcaggcaggattaaaagaggtcatgaggacccatctacctgaatatg

SEQ ID NO: 822115 - DNA, 75 bp, synthetic construct
  source 1..75: mol_type = other DNA
gccagaaagatattgcagagaagatacaaaaacagggaggtgattatttattcgcggtaaaaggaaaccaggggc

SEQ ID NO: 822116 - DNA, 75 bp, synthetic construct
  source 1..75: mol_type = other DNA
gataaagacgtcattgcaattgatggaaaaacgctccggcactcttatgacaagagtcgccgcaggggagcgatt

SEQ ID NO: 822117 - DNA, 75 bp, synthetic construct
  source 1..75: mol_type = other DNA
tcaagacggatgagaaatccaatgagattacagctatcccagaacttcttaacatgctggatattaaaggaaaaa

SEQ ID NO: 822118 - DNA, 75 bp, synthetic construct
  source 1..75: mol_type = other DNA
ataagaattctcaattatgtttctcgcataatcaattcaaaattatgcaactgattctgaaaaacaaaaatgaaa

SEQ ID NO: 822119 - DNA, 75 bp, synthetic construct
  source 1..75: mol_type = other DNA
catatccttgatgaagaagctattaagtttcttgagaaattagatgccgaaagaatcattgttctggcaccttat

SEQ ID NO: 822120 - DNA, 75 bp, synthetic construct
  source 1..75: mol_type = other DNA
catatccttgatgaagaagcgattaaatttctggagaaattagatgccgagagaattattgttttggcaccttat

SEQ ID NO: 822121 - DNA, 75 bp, synthetic construct
  source 1..75: mol_type = other DNA
ataccactggaacggcaacaacagtttatacgcctacttatggaattactggcgcgtataacacaactgtgacgg

SEQ ID NO: 822122 - DNA, 75 bp, synthetic construct
  source 1..75: mol_type = other DNA
cgggcaggtgagtactgggtctatcttccagcctggaacaacggcatgaaaatggcgtatgagagccgcccgaag

SEQ ID NO: 822123 - DNA, 75 bp, synthetic construct
  source 1..75: mol_type = other DNA
cttttcttttacagggctttttgcagttgaaagataatcacgaaatgataaaaatcaattccctgtcagagatca

SEQ ID NO: 822124 - DNA, 75 bp, synthetic construct
  source 1..75: mol_type = other DNA
tctctgttgatgaattttcttttctggagagtgaggccggaactcaattatttcgtaacaatcgaattatacttg

SEQ ID NO: 822125 - DNA, 75 bp, synthetic construct
  source 1..75: mol_type = other DNA
agatttcaccttgcgggatatcagtgactgctatccggcacaacgtattacgctggcgcagttactggacccggt

SEQ ID NO: 822126 - DNA, 75 bp, synthetic construct
  source 1..75: mol_type = other DNA
gacgagatgtttctggacattcgcggcatagaccactgcatcaatattgaggacttcggcggcaactgcgcgagt

SEQ ID NO: 822127 - DNA, 75 bp, synthetic construct
  source 1..75: mol_type = other DNA
gtgatcgccgaatttcccaccacgttcgaagcggcagaagcctcgcgcaagcatggcatgaacgtgctgatgggc

SEQ ID NO: 822128 - DNA, 75 bp, synthetic construct
  source 1..75: mol_type = other DNA
cggtacacacttattgcgtaacaggcgagttgtacttttacctgtgtttccggatgatgatcttacgacaagtct

SEQ ID NO: 822129 - DNA, 75 bp, synthetic construct
  source 1..75: mol_type = other DNA
aactatataactaactggaattcgggagttaattatcgcgttgtcaggaaagtttcgtttattgatttgcaactc

SEQ ID NO: 822130 - DNA, 75 bp, synthetic construct
  source 1..75: mol_type = other DNA
acgccgacaccatagaaaaacaggtcaacaacgccttagcccgcgtcaacaacctgacgcaatccatcctggcaa

SEQ ID NO: 822131 - DNA, 75 bp, synthetic construct
  source 1..75: mol_type = other DNA
ggagaaaacagcgccaccgcgttgctggaaaaaatcaaagctgaacgcgcagccagcgggggtaaaaaagcctcg

SEQ ID NO: 822132 - DNA, 75 bp, synthetic construct
  source 1..75: mol_type = other DNA
atgagtgattcgcgactgctgccgaccggctcatcagcgcttgaaattgctgccgcgaaagcctgtgcggaaatt

SEQ ID NO: 822133 - DNA, 75 bp, synthetic construct
  source 1..75: mol_type = other DNA
atctcgcagtgtttcgggcgggcgctgaaatatccggtctggcagaccgtcggcgcacataaccgcatgatgaac

SEQ ID NO: 822134 - DNA, 75 bp, synthetic construct
  source 1..75: mol_type = other DNA
ttgagcactatacaaagtggaaaagctactataagagtgagttgagttttgatgaatggaagattaaagtaatga

SEQ ID NO: 822135 - DNA, 75 bp, synthetic construct
  source 1..75: mol_type = other DNA
aatttataagagatttgcaatcccctgttcctccacttgcggaacaaaaaatcatcgctgaaaaactcgatacgc

SEQ ID NO: 822136 - DNA, 75 bp, synthetic construct
  source 1..75: mol_type = other DNA
tgttctgcaagcggatgcgtacgccgggttcaacgagctgtatcgcaatggtgggataacggaagctgcctgctg

SEQ ID NO: 822137 - DNA, 75 bp, synthetic construct
  source 1..75: mol_type = other DNA
gtcggcaactttgggacgacatcattcgtgcaggaaagcgtgacgatatatcagcgcattttatcggttcggttg

SEQ ID NO: 822138 - DNA, 75 bp, synthetic construct
  source 1..75: mol_type = other DNA
ctggagccagaacatcaaagccaactgtacgacgattactggcggcccatggagctggcgtttggtcagaaggga

SEQ ID NO: 822139 - DNA, 75 bp, synthetic construct
  source 1..75: mol_type = other DNA
tgggatgcgatccgctttctctgctgagtgaaaaaaacagcgagtcagttattcgcgtaaatgcgcctgaagtcc

SEQ ID NO: 822140 - DNA, 75 bp, synthetic construct
  source 1..75: mol_type = other DNA
tttacgtcaaatctgaaagacgttgaggaatatggtgtgcaggttttccagaacgccaaaaatggtatttacggc

SEQ ID NO: 822141 - DNA, 75 bp, synthetic construct
  source 1..75: mol_type = other DNA
tgccaaactcggtgatgacttgatccccttatgtcgtgggttagcaaagttattaattgtcgatgtggcgcttaa

SEQ ID NO: 822142 - DNA, 75 bp, synthetic construct
  source 1..75: mol_type = other DNA
gtcattgatggtcagcagcggctgacgaccgcaatgttgctgattgaggctttatcgcgccatcttggcgaagac

SEQ ID NO: 822143 - DNA, 75 bp, synthetic construct
  source 1..75: mol_type = other DNA
atgttccagacgcgcggcgtagtggtcgatagcgttttgcagcgccctggttggctgggtaacattggtgcggaa

SEQ ID NO: 822144 - DNA, 75 bp, synthetic construct
  source 1..75: mol_type = other DNA
agttacaacagtccgcaccgctgccggtagctattgactatccggctgcactagccctgcgtcagatggctctga

SEQ ID NO: 822145 - DNA, 75 bp, synthetic construct
  source 1..75: mol_type = other DNA
aagctgcctgctgggctcatgcccgctgaaagatccacgatgtgcacgtccgcatcccgtcagcactgacggaag

SEQ ID NO: 822146 - DNA, 75 bp, synthetic construct
  source 1..75: mol_type = other DNA
aaacaatccttccctgaaagctggctggttaaccttcgcacccaacgcgaagcctgcggcttaacaaccgccgaa

SEQ ID NO: 822147 - DNA, 75 bp, synthetic construct
  source 1..75: mol_type = other DNA
cgagtccttaattgaatccggcgactatcgcacccaaagcgaagtgatccgtgagtcactgcgattacttcgaga

SEQ ID NO: 822148 - DNA, 75 bp, synthetic construct
  source 1..75: mol_type = other DNA
atggccagaacaatgacagtggatctcggagatgaactccgtgaattcattgaatctctcatagaatcaggtgat

SEQ ID NO: 822149 - DNA, 75 bp, synthetic construct
  source 1..75: mol_type = other DNA
atgaaaagtggccggaagcgacaaaacgcgccgttatccgcgatgcctatttcatccactgtcataaaggcactg

SEQ ID NO: 822150 - DNA, 75 bp, synthetic construct
  source 1..75: mol_type = other DNA
cagtcatcattatggtcacggcggcgatctgcacactgttaattgccacattgattaccccatttgccacccgta

SEQ ID NO: 822151 - DNA, 75 bp, synthetic construct
  source 1..75: mol_type = other DNA
aattagctgaacgtgaagagatggtcgcggagttaagcgcggcaaaacaacaaattacccaaagcgagcactggc

SEQ ID NO: 822152 - DNA, 75 bp, synthetic construct
  source 1..75: mol_type = other DNA
cgctgaacgctactggaattcaactcttgcgacaattgaaagggtcaaacacacctaccgcgcaaaaatccgaaa

SEQ ID NO: 822153 - DNA, 75 bp, synthetic construct
  source 1..75: mol_type = other DNA
ccccgtatctgtatgctccgcaccgttgccggtgatgaacacgccgcacggctttccctcgttcgcgattacgtc

SEQ ID NO: 822154 - DNA, 75 bp, synthetic construct
  source 1..75: mol_type = other DNA
ccccgtatctgtatgcttcgcaccgttgccggtgatgagcacgccgcacgccgttccctcgttcgcgattacgtc

SEQ ID NO: 822155 - DNA, 75 bp, synthetic construct
  source 1..75: mol_type = other DNA
tgagcggtgcctatcaggccggcggacgctttactgcattctatcgccttggggggggggatgcagtacgtcaaa

SEQ ID NO: 822156 - DNA, 75 bp, synthetic construct
  source 1..75: mol_type = other DNA
cgctgctgctgaccatttcgctgcaggcaatggtggtcatccgggcctatcgctcaggtcaggagagcacccgtt

SEQ ID NO: 822157 - DNA, 75 bp, synthetic construct
  source 1..75: mol_type = other DNA
ctccaatggaaaagacgcaatcacccgcagagcgcttttacgaaagcatttattattctgatgaaagcctggaag

SEQ ID NO: 822158 - DNA, 75 bp, synthetic construct
  source 1..75: mol_type = other DNA
gatctggaactggactggattgactgggataacggcgcactgcgtattggcgcaatgtcgcgcttacaaccactg

SEQ ID NO: 822159 - DNA, 75 bp, synthetic construct
  source 1..75: mol_type = other DNA
gacgccattggcgggaaatgcgtgtttacaagcgaatggaatcagttctcccgccggacatacagtgcaaactgg

SEQ ID NO: 822160 - DNA, 75 bp, synthetic construct
  source 1..75: mol_type = other DNA
tcggcaaatgctttgcaggtgatcatcccgaaaagattcagttcaacaagctggtcttcctaaagcattacagcg

SEQ ID NO: 822161 - DNA, 75 bp, synthetic construct
  source 1..75: mol_type = other DNA
gcaaatcatcaaagcctattatcgggcaaaaccgtataccaaacagttggagttgcaaagcaaggttttgggcat

SEQ ID NO: 822162 - DNA, 75 bp, synthetic construct
  source 1..75: mol_type = other DNA
gcattttccgttgaccgctgggatcgcaactggccggaagagacaaaacgacaggcgattcgtgatgcatggctg

SEQ ID NO: 822163 - DNA, 75 bp, synthetic construct
  source 1..75: mol_type = other DNA
gctcgtcgccgctggaggttgccgccgccgctgcgttctctgagattcagcgcgtgccggtaccgctgcgcaccc

SEQ ID NO: 822164 - DNA, 75 bp, synthetic construct
  source 1..75: mol_type = other DNA
tggatgaaaggtaagttagttaaatctgattgttctccagctgacctgcccccacgattagatacaacactcagt

SEQ ID NO: 822165 - DNA, 75 bp, synthetic construct
  source 1..75: mol_type = other DNA
gcgaggaaagtaatgtcatttacggcatactcggatccatgctggccatggtcccggcggtaggcccattgctcg

SEQ ID NO: 822166 - DNA, 75 bp, synthetic construct
  source 1..75: mol_type = other DNA
acccgcagtttgtttttgtgtttgccgccgttcgtcgtgcagaccgtaaaccccgtatctgtatgctccgcaccg

SEQ ID NO: 822167 - DNA, 75 bp, synthetic construct
  source 1..75: mol_type = other DNA
gcacgtctttccctcgttcgcgattatgtcctctcgttcgctggccgtctgccggttgcggaggtgtgcgcatga

SEQ ID NO: 822168 - DNA, 75 bp, synthetic construct
  source 1..75: mol_type = other DNA
attaccggtacagcagaacgtcgctacctctttcctatgcagcttccagcttcaggtaagtttctctacaacggc

SEQ ID NO: 822169 - DNA, 75 bp, synthetic construct
  source 1..75: mol_type = other DNA
ccataccctgacccacgaaattcgtaatctacagcaactcaacgcgcaaatggcccaggaagcgatcaacctgac

SEQ ID NO: 822170 - DNA, 75 bp, synthetic construct
  source 1..75: mol_type = other DNA
acgcccgctcgcggatgcagccggatgtcatcgtgcgactaccgcaggggaaagatgtggtgatcgacgccaaaa

SEQ ID NO: 822171 - DNA, 75 bp, synthetic construct
  source 1..75: mol_type = other DNA
gctatctacatgggctgatgcggacgccgaacgcctgacaatcacggcactgccagccattaccacattcggaga

SEQ ID NO: 822172 - DNA, 75 bp, synthetic construct
  source 1..75: mol_type = other DNA
gctgaacgcctgaccgttacggctctgccagccattaccacttatggcgaaccggaagggaacctgctaacaggg

SEQ ID NO: 822173 - DNA, 75 bp, synthetic construct
  source 1..75: mol_type = other DNA
ttccgctttgcgcctccgatcctgttcgctggcaacgccgtaccgccgacacggagcacggcatctggcctgacg

SEQ ID NO: 822174 - DNA, 75 bp, synthetic construct
  source 1..75: mol_type = other DNA
gcacgtggtaatgatgagcaggcaatgtataatgttacacaagaagctgctcgccttctgcacgaagtcgaaact

SEQ ID NO: 822175 - DNA, 75 bp, synthetic construct
  source 1..75: mol_type = other DNA
tctggagcgtggcctttggaaaacggaaacacgctgggatggaaacgaccgcgagcagctaggcaaagaggctct

SEQ ID NO: 822176 - DNA, 75 bp, synthetic construct
  source 1..75: mol_type = other DNA
gctgactcgccgataactgttagatcattcctacaaatcacactttccaacaataattacaaatcattagagcat

SEQ ID NO: 822177 - DNA, 75 bp, synthetic construct
  source 1..75: mol_type = other DNA
aagaaatacacctccggcgtgctgtcttttgccgaacaggatttgccgcccggccagcgtgaaaagctgatggcg

SEQ ID NO: 822178 - DNA, 75 bp, synthetic construct
  source 1..75: mol_type = other DNA
aaagaacagtatcagcattgccgacccggacggggggcgaaacatccgactgaagggagccatttatgagcagtc

SEQ ID NO: 822179 - DNA, 75 bp, synthetic construct
  source 1..75: mol_type = other DNA
tgggaatcttcacgccgtagaggtggaagtaccggggttgttaactgaccatactgtttcatctattggccacga

SEQ ID NO: 822180 - DNA, 75 bp, synthetic construct
  source 1..75: mol_type = other DNA
atatatccgcgatttccagtcttctggcgcgtctttccggcaatgtgtcggcatggttaatagcggagggagagc

SEQ ID NO: 822181 - DNA, 75 bp, synthetic construct
  source 1..75: mol_type = other DNA
gcggttatgccagtgcagggttacttgcacggatcctggtcagcaaatatgtggaacatatccctttatatcgcc

SEQ ID NO: 822182 - DNA, 75 bp, synthetic construct
  source 1..75: mol_type = other DNA
agaaatcgaaagcgcagcagcagagtaccggcgagatgctgaaagccgcattcagcgagcacgagaagtctgtca

SEQ ID NO: 822183 - DNA, 75 bp, synthetic construct
  source 1..75: mol_type = other DNA
tccaagtctggcccgtccatcatggaagcgatgctggaagctatctcaggaaccagcgtcaatcagcctgtgacc

SEQ ID NO: 822184 - DNA, 75 bp, synthetic construct
  source 1..75: mol_type = other DNA
aatattccagatttgaattacgcctacgtaaacatttatcactggcggaagagtctctctggcaaaaatgtgcac

SEQ ID NO: 822185 - DNA, 75 bp, synthetic construct
  source 1..75: mol_type = other DNA
gcaaaaatgtgcacaaaaacttattgccgcaattccacatattccagaatggcggcaaccattaattgctttgtt

SEQ ID NO: 822186 - DNA, 75 bp, synthetic construct
  source 1..75: mol_type = other DNA
atggttacgttttggggaaattatgaggggatctctcagtgcttaaccgccccgcctaaagaagccgccagaccg

SEQ ID NO: 822187 - DNA, 75 bp, synthetic construct
  source 1..75: mol_type = other DNA
atgaaaaatctacctgctacaatttcgcgggcggcgaagccctgtctgtcgcccgttgcaatctggcaaatgtta

SEQ ID NO: 822188 - DNA, 75 bp, synthetic construct
  source 1..75: mol_type = other DNA
gcaaggtactgcggctattaggtaaaggatggggcatcaaccagatagcttcgttgcttaagaaaagtaataaaa

SEQ ID NO: 822189 - DNA, 75 bp, synthetic construct
  source 1..75: mol_type = other DNA
tcatcatatttgcgacgatgtataacgcctacacacagcgatattgtactttacaggttacaagtcaatgtcggt

SEQ ID NO: 822190 - DNA, 75 bp, synthetic construct
  source 1..75: mol_type = other DNA
ctaactaatccagaatctcctgtattcaaacaaacagcatggatggggcatctggagcgtggcctttggaaaacg

SEQ ID NO: 822191 - DNA, 75 bp, synthetic construct
  source 1..75: mol_type = other DNA
ggggcatcgtaatatcagttatctcggcgtgccgcatagtgacgtgacgaccggtaagcgacgtcacgaagccta

SEQ ID NO: 822192 - DNA, 75 bp, synthetic construct
  source 1..75: mol_type = other DNA
gcaaactgacgccattaatccgcgcctggcctggcgaatcccagcataaacgcgccaccgttgggttggatattc

SEQ ID NO: 822193 - DNA, 75 bp, synthetic construct
  source 1..75: mol_type = other DNA
aaccgccccacctaaagaagccgccagaccgacattaatgcctcgtgctcagagctacaaagatttgacccatct

SEQ ID NO: 822194 - DNA, 75 bp, synthetic construct
  source 1..75: mol_type = other DNA
ttatccgcgcatggcctggcgaatcccagcataaacgggccaccgtcggactggatattctcgccgctatcggca

SEQ ID NO: 822195 - DNA, 75 bp, synthetic construct
  source 1..75: mol_type = other DNA
gaacatccggttcctcctctgatgccactcttgcaacacgttacgctgccgagcattttggtaagacatgggccg

SEQ ID NO: 822196 - DNA, 75 bp, synthetic construct
  source 1..75: mol_type = other DNA
tttttaccgtgcctttagtgataaatgggaaagtgactacaccggtaacttaacaattaatgaaagacccagtgc

SEQ ID NO: 822197 - DNA, 75 bp, synthetic construct
  source 1..75: mol_type = other DNA
agcaccagtgatttgaacgtgcgtcaggcctttgttgaactgggcaacttgcccaccttcgacgggccgtttaaa

SEQ ID NO: 822198 - DNA, 75 bp, synthetic construct
  source 1..75: mol_type = other DNA
aataattacgccagcgacgacgccctgggcagtgacggttttaactcgggcggcgaatggtctttcggtgtgcag

SEQ ID NO: 822199 - DNA, 75 bp, synthetic construct
  source 1..75: mol_type = other DNA
cgataatgaactggtggaagccgttaaacgttttcaggcatggcaaggattgggagcagatggcgctattggccc

SEQ ID NO: 822200 - DNA, 75 bp, synthetic construct
  source 1..75: mol_type = other DNA
ctcatttcacaaatcagtgaggcggccacgaatgaaaagcaacagaacattcagcacagcgaggagcagcagagc

SEQ ID NO: 822201 - DNA, 75 bp, synthetic construct
  source 1..75: mol_type = other DNA
ggcaaaccagcaacgcaccctgcaactcatttcacaaatcagtaaggcggccacgaatgaaaaacagcagaacat

SEQ ID NO: 822202 - DNA, 75 bp, synthetic construct
  source 1..75: mol_type = other DNA
tgctggctgccgtggtatggggaatgcaccagaagacgcagcgccttgaagacaataatcatgtgcttgtgcgtg

SEQ ID NO: 822203 - DNA, 75 bp, synthetic construct
  source 1..75: mol_type = other DNA
agaagaatagtaatctgagcgcattaatttctgcggcaaaggagccagtagtatgggcacctgttctggcaacga

SEQ ID NO: 822204 - DNA, 75 bp, synthetic construct
  source 1..75: mol_type = other DNA
tttctattattgttaacgcaattactattcctattggtctgtatttgctgaatccttcctcaggagcggatggta

SEQ ID NO: 822205 - DNA, 75 bp, synthetic construct
  source 1..75: mol_type = other DNA
tgaaagcagcgaggcgtactacgccacgctgctgcatgaactgacgcatgccactggtcacgcttcacgcctgag

SEQ ID NO: 822206 - DNA, 75 bp, synthetic construct
  source 1..75: mol_type = other DNA
ggtagccaactacgtgttagacaagatttatgcgtcagatccgcatcaatacaattccttgttaaaaagcattgg

SEQ ID NO: 822207 - DNA, 75 bp, synthetic construct
  source 1..75: mol_type = other DNA
caacactgcctttaccgaaactgaagctgaaatttttgaacaagaaaccgaagtgacccgtttacaggggcagca

SEQ ID NO: 822208 - DNA, 75 bp, synthetic construct
  source 1..75: mol_type = other DNA
gttctggcaacgatcctggtgttggttggggtaaaaattccggcagcatgggacccaacctttaatctgattgcg

SEQ ID NO: 822209 - DNA, 75 bp, synthetic construct
  source 1..75: mol_type = other DNA
taaaacactcgacggcaaagtcggcgatgaactgaaggcctcccttgaaggtaagggactgaaagtactggccta

SEQ ID NO: 822210 - DNA, 75 bp, synthetic construct
  source 1..75: mol_type = other DNA
ttgctgacgaacgtctccagcaatggctgcaaactgatgcgattcgactctacattcccggcgaatggatcagcg

SEQ ID NO: 822211 - DNA, 75 bp, synthetic construct
  source 1..75: mol_type = other DNA
tcaggtgacgatggcgctgaaaaaatatcgcccacaggccgacgatacccggctgctcgcagaattgtcagcgat

SEQ ID NO: 822212 - DNA, 75 bp, synthetic construct
  source 1..75: mol_type = other DNA
aagtgaatgataaagccagtcgtgtcaatatcctggcggttgtaggccagcgtcagaatccccgattcattcttt

SEQ ID NO: 822213 - DNA, 75 bp, synthetic construct
  source 1..75: mol_type = other DNA
acggtgaatcaggacgttattttccagactttttttatttccgttgaaaagagacttcgagaaaactgtcgtctt

SEQ ID NO: 822214 - DNA, 75 bp, synthetic construct
  source 1..75: mol_type = other DNA
gtcagcttgggaagaaatgacctgcttattcgcaccttccctaactgaccatactgtttcatctattggccatga

SEQ ID NO: 822215 - DNA, 75 bp, synthetic construct
  source 1..75: mol_type = other DNA
aagaaatacacgtccggtgttctgtcgttcgcggagaaggagctgccgccgggaggacgtgaaaaagtgatggcg

SEQ ID NO: 822216 - DNA, 75 bp, synthetic construct
  source 1..75: mol_type = other DNA
attagtttacttggacagcacgtacttttcgaagtgaatgatgaggcccgtcgtgtcaatatcctggcggttgtt

SEQ ID NO: 822217 - DNA, 75 bp, synthetic construct
  source 1..75: mol_type = other DNA
agatcagcaaaaaatcatcgacggcatgaaagaagcgggcgtggaagtcatcaccgatctcgaccgcaaagcctt

SEQ ID NO: 822218 - DNA, 75 bp, synthetic construct
  source 1..75: mol_type = other DNA
gcgctgggtactcaggtccgcgacatgtttgttaaagatgtgccgcatggcgctgatctgctgaaagccgtggat

SEQ ID NO: 822219 - DNA, 75 bp, synthetic construct
  source 1..75: mol_type = other DNA
ctgcccgccttactggaagaagaactgaaccaggatatcgacgaactgcattttgcgccgttgaaaatcgaccag

SEQ ID NO: 822220 - DNA, 75 bp, synthetic construct
  source 1..75: mol_type = other DNA
caactggcaaccgtagcagtgattcaccagcagcatatgcgcaacattgcgcagtggttgcaggcaaacggcatc

SEQ ID NO: 822221 - DNA, 75 bp, synthetic construct
  source 1..75: mol_type = other DNA
gtgaatgataaggcccgtcgtgtcaatatcctggcggttgtaggccagcgtcagaatccccgattcattctttga

SEQ ID NO: 822222 - DNA, 75 bp, synthetic construct
  source 1..75: mol_type = other DNA
ccggtgaagtggtctacgctgatggcaacgaagtgccttaccgttgctctttgcatccgcaatgcaaactggggt

SEQ ID NO: 822223 - DNA, 75 bp, synthetic construct
  source 1..75: mol_type = other DNA
tggcgattgcccgaccttatgaagacgccgtgcgtctggtgagtaatatcgctgcgccgatgatggtaaccaaca

SEQ ID NO: 822224 - DNA, 75 bp, synthetic construct
  source 1..75: mol_type = other DNA
gcgacgactatggaatcagcgttgcctgtgaggctgatagttacacccgaataactttacgactgccatggaggg

SEQ ID NO: 822225 - DNA, 75 bp, synthetic construct
  source 1..75: mol_type = other DNA
tttgtggtgtttgatttgcaggggttgcaggtcacgccgctgccgcttaaccattcgaaactcactttcggctat

SEQ ID NO: 822226 - DNA, 75 bp, synthetic construct
  source 1..75: mol_type = other DNA
agatgtgctgcgtgagagcgtcggtaagtcggtcgttaaccttattcacggcgtgcgtgatatggcggcgatccg

SEQ ID NO: 822227 - DNA, 75 bp, synthetic construct
  source 1..75: mol_type = other DNA
ctcgacggaaggcattttgcgccagggctttaacgaagtgaacagcatgaaagtggcacaggtgctatatcagga

SEQ ID NO: 822228 - DNA, 75 bp, synthetic construct
  source 1..75: mol_type = other DNA
gaaaagatctctcattcaacgctgggttactggttgtggaatcattatttaattgaatgtgacgagttgcttcct

SEQ ID NO: 822229 - DNA, 75 bp, synthetic construct
  source 1..75: mol_type = other DNA
cattcctgcttccagcctttcactttttcatagccgctttgcttttagcgatcgccagcgaattgaaatggagac

SEQ ID NO: 822230 - DNA, 75 bp, synthetic construct
  source 1..75: mol_type = other DNA
ccttatgccaccggtgctcacgcatgggaaatgagcgttgtcagagtgcgtcgaagctggtggaaaaaacatcgg

SEQ ID NO: 822231 - DNA, 75 bp, synthetic construct
  source 1..75: mol_type = other DNA
tttgcaaccgatagtcgaaaatgcgattaaacatggaacgtcacaactgctggaaacagggaaagtggcaattag

SEQ ID NO: 822232 - DNA, 75 bp, synthetic construct
  source 1..75: mol_type = other DNA
aaagcggccttcggagtttgttactctcgccgacgaaattgaacatgtgaacgcttatctgcaaattgaaaaggc

SEQ ID NO: 822233 - DNA, 75 bp, synthetic construct
  source 1..75: mol_type = other DNA
tttttaacgcgcttaacaccattaaagcagtgattcgccgtgacagtgaacaggccagtcaactggttcagtacc

SEQ ID NO: 822234 - DNA, 75 bp, synthetic construct
  source 1..75: mol_type = other DNA
tggtgattgattgcagtcacccgccgcgcgcggatgcaccgcgtaatcactgtgatttaaataccgtgcttgcgc

SEQ ID NO: 822235 - DNA, 75 bp, synthetic construct
  source 1..75: mol_type = other DNA
aggaagacgccactctgtgaaactattgtcctgaatctgaggtatgggggaaaaacccgctacagactgttctcc

SEQ ID NO: 822236 - DNA, 75 bp, synthetic construct
  source 1..75: mol_type = other DNA
ttagcattcggttgtcacagtgggcgcagggcggtgagttcggctgggtgtttgataacgagtctgacacgttcg

SEQ ID NO: 822237 - DNA, 75 bp, synthetic construct
  source 1..75: mol_type = other DNA
agaacgggattatccttcggttgtcccaatgggctaatggtcaggctcatggctgggtttttgataatgctaaag

SEQ ID NO: 822238 - DNA, 75 bp, synthetic construct
  source 1..75: mol_type = other DNA
cagagagatgatcgggatgagcaggagaacgggattatccttcggttgtcccaatgggctaatggtcaggctcat

SEQ ID NO: 822239 - DNA, 75 bp, synthetic construct
  source 1..75: mol_type = other DNA
aaaaacccgctacagactgttctcctgcaggaggcatcccaatggattcagagtacatcgcaatggcggagcatt

SEQ ID NO: 822240 - DNA, 75 bp, synthetic construct
  source 1..75: mol_type = other DNA
ctgaacgacaaagacgtgcgcagcccgctcaccttctacctgctctaccgcgtgaccagcctcctcgatggccgc

SEQ ID NO: 822241 - DNA, 75 bp, synthetic construct
  source 1..75: mol_type = other DNA
caaaacgggcctgcagccggtgcgactgtatagttcaggctccgcagccaccaaaacccatcgagcgcagttacg

SEQ ID NO: 822242 - DNA, 75 bp, synthetic construct
  source 1..75: mol_type = other DNA
tgcgtcagagcacggcgctcgccgcagtatcgccgccagccatgcagcggcgcagtaaagtttaacgaggcgatc

SEQ ID NO: 822243 - DNA, 75 bp, synthetic construct
  source 1..75: mol_type = other DNA
atggcaaagctgctcaaggcaatgaaacgcccggcggcgctgtggggggtgccaatggtgcccctgctggctgtc

SEQ ID NO: 822244 - DNA, 75 bp, synthetic construct
  source 1..75: mol_type = other DNA
tgatgatgagtgctgatgatgatgctgtatctcaacgtctggatctcgatgtggcacttgacctgctcacctccg

SEQ ID NO: 822245 - DNA, 75 bp, synthetic construct
  source 1..75: mol_type = other DNA
ctgcttaacgaaggatttaaagccctgcttgatgaggcagggctgaatctgtcaaaccttcgtaaacagtgtgag

SEQ ID NO: 822246 - DNA, 75 bp, synthetic construct
  source 1..75: mol_type = other DNA
tgtgaacggtgtccgtctgacaccacgtggctggtttgaatttaccgaagcctggcttcccgcgccgtcgcaatg

SEQ ID NO: 822247 - DNA, 75 bp, synthetic construct
  source 1..75: mol_type = other DNA
aagaggcgctggcaaaacgtcctggctttcgttcattccgctgtcaggactccagcctgctggcctttgatttcg

SEQ ID NO: 822248 - DNA, 75 bp, synthetic construct
  source 1..75: mol_type = other DNA
tcagatgtcgaacgtcactggcggttgcccggatctggcgcgagcgattacctttgctcattcagccgggatggt

SEQ ID NO: 822249 - DNA, 75 bp, synthetic construct
  source 1..75: mol_type = other DNA
ggaacgccaaatgtcgctggtgtcataggattaagcgcggcgctggaatggctggcagattacgatatcaaccag

SEQ ID NO: 822250 - DNA, 75 bp, synthetic construct
  source 1..75: mol_type = other DNA
ccgacaggtatcggcgtgctgtatggcaaatcagaactgctggaagcgatgtcgccctggctgggcggcggcaaa

SEQ ID NO: 822251 - DNA, 75 bp, synthetic construct
  source 1..75: mol_type = other DNA
tgcccggatctggcgcgcgcgattacttttgctcacgcagccgaaatggtggtcatggttgatggcgcccagggc

SEQ ID NO: 822252 - DNA, 75 bp, synthetic construct
  source 1..75: mol_type = other DNA
ctcgtagtcgaattcttgctctgggacaaatgtcgaacgtcactggcggttgcccggatctggcgcgagcgatta

SEQ ID NO: 822253 - DNA, 75 bp, synthetic construct
  source 1..75: mol_type = other DNA
gagttcctttttttggaaccggtaagaaccgactgaatcaacaacaagcacgagaaaatttagtcagaacattta

SEQ ID NO: 822254 - DNA, 75 bp, synthetic construct
  source 1..75: mol_type = other DNA
ttatggcctgctggttggtggaggcgctataaatgcggcagttctggcggggatgctgaaaacggctgcgtttgt

SEQ ID NO: 822255 - DNA, 75 bp, synthetic construct
  source 1..75: mol_type = other DNA
tgatgaaaaatgttggcggtggtggtatctggaatattacacccatgccaaatacggatgtatgtgtacagatcc

SEQ ID NO: 822256 - DNA, 75 bp, synthetic construct
  source 1..75: mol_type = other DNA
ggagccaccagccttgctggtggagaagatattgatccgttacaaacggtaatctctgctggcattggcggcatt

SEQ ID NO: 822257 - DNA, 75 bp, synthetic construct
  source 1..75: mol_type = other DNA
agacgatatcaccagcggaccaaatgacctgcgtctggcgagggaaaacagaactgaaccgccccgggtttcctg

SEQ ID NO: 822258 - DNA, 75 bp, synthetic construct
  source 1..75: mol_type = other DNA
tctgggtggcatttctgataaacagctttatgaatctgcgactaaagggcaacaaaaattcattgaggcagcagg

SEQ ID NO: 822259 - DNA, 75 bp, synthetic construct
  source 1..75: mol_type = other DNA
ctgccaacaatggcaacggccaatgccatgtacgatcggctggtcaaaacctggcttgctttctattcgccagaa

SEQ ID NO: 822260 - DNA, 75 bp, synthetic construct
  source 1..75: mol_type = other DNA
cacaattcccgcaggtgggaaccggtccttttcgcttaacacaattcacagcggaactggtgcgtctggaaagtc

SEQ ID NO: 822261 - DNA, 75 bp, synthetic construct
  source 1..75: mol_type = other DNA
tctactgacgggctacgctgggatttttatcttcgttcaacgctgcactggcataacggcgatgctgtaaaagca

SEQ ID NO: 822262 - DNA, 75 bp, synthetic construct
  source 1..75: mol_type = other DNA
tgtgctggagctggcgcaactggctcctggcgagctgcgtaccctgttacaaccgtttatgggcgggcaatggca

SEQ ID NO: 822263 - DNA, 75 bp, synthetic construct
  source 1..75: mol_type = other DNA
ccctctggcaggcgcgaaaagtgatctccattattcatcaatccggtttattacaaacgttagaagtcggagaaa

SEQ ID NO: 822264 - DNA, 75 bp, synthetic construct
  source 1..75: mol_type = other DNA
ctgcgttgcgatccactctggtcatatgttttcgacgcttccgcatatgcacatcagcaatcgacactggatacc

SEQ ID NO: 822265 - DNA, 75 bp, synthetic construct
  source 1..75: mol_type = other DNA
ggatcaattatttattagcgtgaagcgtattgaagtcacccatccgcagtgtctgaccttctttttacatcgccc

SEQ ID NO: 822266 - DNA, 75 bp, synthetic construct
  source 1..75: mol_type = other DNA
agtttacagagatcatcgcaagtcattgtttgtacacaagtaattgaacaaagtgtggatattgacctggacgaa

SEQ ID NO: 822267 - DNA, 75 bp, synthetic construct
  source 1..75: mol_type = other DNA
catagcgaacaagaatgtattgcgcgtatcgaatcggcagtaagtcaggggaaatgcatcgcctggatccggaat

SEQ ID NO: 822268 - DNA, 75 bp, synthetic construct
  source 1..75: mol_type = other DNA
agatggcaaatgtgattttagttaccgatgacgaaagttgcgggtattcggctagggagggattgattggtaagg

SEQ ID NO: 822269 - DNA, 75 bp, synthetic construct
  source 1..75: mol_type = other DNA
tattctggaagatgtgactggcgcaggtaaaacagaagcggcgcttatcctggcgcacaggttgatgtctgcggg

SEQ ID NO: 822270 - DNA, 75 bp, synthetic construct
  source 1..75: mol_type = other DNA
caccgggtagcgacgcgcaaagacgttgagcgcagcgtgagtgtgggttggcttcatagcgaacaagagtgtatt

SEQ ID NO: 822271 - DNA, 75 bp, synthetic construct
  source 1..75: mol_type = other DNA
aaaagtccttattagcactcaggtattggagcagagcgttgattgcgatatggatgaaatgatttccgacctggc

SEQ ID NO: 822272 - DNA, 75 bp, synthetic construct
  source 1..75: mol_type = other DNA
catacgatgaacaagtggtatggggcggtgattatcgccaattcattcagaatgttgttcatggaacttcatggt

SEQ ID NO: 822273 - DNA, 75 bp, synthetic construct
  source 1..75: mol_type = other DNA
atgggacgaacctcagccagaccgcgatcgcagacgtcagataaggacccgctggtcactcacggatgacgtgat

SEQ ID NO: 822274 - DNA, 75 bp, synthetic construct
  source 1..75: mol_type = other DNA
ccgaaacaaccgaaacaccgaaaaacagcatcccgccgacaggaaaaagaacaatgaccatccactacactggca

SEQ ID NO: 822275 - DNA, 75 bp, synthetic construct
  source 1..75: mol_type = other DNA
atggcttatcaatctcaagatatcattcgtcgttccgcgactaacggtctgacccccgcgcctcaggcgcgggac

SEQ ID NO: 822276 - DNA, 75 bp, synthetic construct
  source 1..75: mol_type = other DNA
tttgtggctcgctgttgccgcagtgttttctggtgcaggaatgattatattctactggtttgtccatgcatcaga

SEQ ID NO: 822277 - DNA, 75 bp, synthetic construct
  source 1..75: mol_type = other DNA
ttttgttcttttgtcaacaaaacctcttaccaatgcgaagatcaaaggtttgagggtaaagaagcttactgaaca

SEQ ID NO: 822278 - DNA, 75 bp, synthetic construct
  source 1..75: mol_type = other DNA
ggaacaattaaagtcagaaatacttaaagccctggagaatgtgcccaatgaattgaacaagcggttcgaatatgt

SEQ ID NO: 822279 - DNA, 75 bp, synthetic construct
  source 1..75: mol_type = other DNA
ccgattcgattattaccggaggcggtggaatggaaaccacagaagaaacccgaaaccgtgcacagtattatgttg

SEQ ID NO: 822280 - DNA, 75 bp, synthetic construct
  source 1..75: mol_type = other DNA
aatttaataccaagctgaatgaaaattcctggtggtcacggtttgtaaacagtcagtttgtacagatgcaggcgg

SEQ ID NO: 822281 - DNA, 75 bp, synthetic construct
  source 1..75: mol_type = other DNA
accgaaacaaccgaaacaaccgaaacaaccgaaacaaccgaaaaacagcatcccgccgacaaggaaaaagaacaa

SEQ ID NO: 822282 - DNA, 75 bp, synthetic construct
  source 1..75: mol_type = other DNA
aacatgaaagaagctgtgtactttaatgattttgtttatctggacgtggaatcatcaacgttcagcataacctat

SEQ ID NO: 822283 - DNA, 75 bp, synthetic construct
  source 1..75: mol_type = other DNA
tttgagtatgtagatacaaatgaacaaccatttactataaaatttacaggtattgcacgtaaaaatgttctgata

SEQ ID NO: 822284 - DNA, 75 bp, synthetic construct
  source 1..75: mol_type = other DNA
cgctggatgcttcaaaccaggaagcgggcggttcgtcgatcgaactggcggaagcggaatatatggtgcgcgcca

SEQ ID NO: 822285 - DNA, 75 bp, synthetic construct
  source 1..75: mol_type = other DNA
tcgtgctgttatatctggcgttccgtcgcgtaggcgaagcgttgttgattatcagcagtgtaccgtttgcgctgg

SEQ ID NO: 822286 - DNA, 75 bp, synthetic construct
  source 1..75: mol_type = other DNA
aagcggcgagtatgctgcaaaaaactgacaagctgatcatgagcgtgccggaagtggcgcgggtatttggcaaga

SEQ ID NO: 822287 - DNA, 75 bp, synthetic construct
  source 1..75: mol_type = other DNA
atgggttactggatccgtggcaaaattccgccggaaagcagtaacccgctcaatcgctttttgattcgtgtttat

SEQ ID NO: 822288 - DNA, 75 bp, synthetic construct
  source 1..75: mol_type = other DNA
tctcgtctgtactctggatactttccgcttttatctggagaagcaggggtggactcttgtaaacaggagcgcaat

SEQ ID NO: 822289 - DNA, 75 bp, synthetic construct
  source 1..75: mol_type = other DNA
gatactttccagttctacctggaaaaacagggctggactcttgtaaaccggggcgcaattaaaaacatgaccgta

SEQ ID NO: 822290 - DNA, 75 bp, synthetic construct
  source 1..75: mol_type = other DNA
ggctatctgcaaacgctcgacgactttaatcacatcgttttaaaagccagtgaaaatggcgtgcccgtttatctg

SEQ ID NO: 822291 - DNA, 75 bp, synthetic construct
  source 1..75: mol_type = other DNA
tgtcggtggttcacgatttgcaaaaagcgatagctgaaaaagtgcagttaaaaccgggcaccagcgtggcattct

SEQ ID NO: 822292 - DNA, 75 bp, synthetic construct
  source 1..75: mol_type = other DNA
taaaagccccatcggcattaaagtttccggcactgtgctggcggatatcgacgcgatggcggagcaaattgaaga

SEQ ID NO: 822293 - DNA, 75 bp, synthetic construct
  source 1..75: mol_type = other DNA
ggcattaaaagccccatcggcattaaagtgtccggcactgtactggcagatatcgacgcgatggcagagcaaatt

SEQ ID NO: 822294 - DNA, 75 bp, synthetic construct
  source 1..75: mol_type = other DNA
cctttgctgtcgctgtttattatcccggcggcgtataagctgatgtggctgcaccgacatcgggtacggaaataa

SEQ ID NO: 822295 - DNA, 75 bp, synthetic construct
  source 1..75: mol_type = other DNA
tggcggcatgatcaccgcacctttgctgtcgctgtttattatcccggcggcgtataagctgatgtggctgcaccg

SEQ ID NO: 822296 - DNA, 75 bp, synthetic construct
  source 1..75: mol_type = other DNA
aagtttccggcactgtgctggcggatatcgacgcgatggcggagcaaattgaagaagtggcgcgaacggtgccag

SEQ ID NO: 822297 - DNA, 75 bp, synthetic construct
  source 1..75: mol_type = other DNA
cttaagcaacccgccggtaaagatttcgcctttgcaggcccatcagtgaaagacaaaaaatacttcggtgacggc

SEQ ID NO: 822298 - DNA, 75 bp, synthetic construct
  source 1..75: mol_type = other DNA
ggtggtcatgatattaccgccgcatcaacggtaaaccaagatttcgttgaaggtgtaaaagttagtggtaacaaa

SEQ ID NO: 822299 - DNA, 75 bp, synthetic construct
  source 1..75: mol_type = other DNA
aggatggctcagtaattggggcggctaataataaacaaacaatttatgcttctgcttcggcacaaggagcaggtt

SEQ ID NO: 822300 - DNA, 75 bp, synthetic construct
  source 1..75: mol_type = other DNA
ttgctggaaaccgcgcacagccgcgtggcgtggctgtctgacaccgcaggcctaccggaaaaaacgctgaaattt

SEQ ID NO: 822301 - DNA, 75 bp, synthetic construct
  source 1..75: mol_type = other DNA
gaggttgatagcagattacctcccatgttggcatcgcttttatccggtgataatagccctgaagtgatcagaaaa

SEQ ID NO: 822302 - DNA, 75 bp, synthetic construct
  source 1..75: mol_type = other DNA
cctggctaacagaggctggcagccgatcagctcgtggtatctgggaaatcgaatttaaccataaactcctgcggt

SEQ ID NO: 822303 - DNA, 75 bp, synthetic construct
  source 1..75: mol_type = other DNA
tgagcaaatttttcaggtaagccgtaaccaggctatcaaggatgttaaagaaggcgtgtttgagttaagccgttc

SEQ ID NO: 822304 - DNA, 75 bp, synthetic construct
  source 1..75: mol_type = other DNA
acgcgaaccgctggaaattacaatgaccgagtggtttaaaagcggcttccctgccggatttacagcaggtgaaga

SEQ ID NO: 822305 - DNA, 75 bp, synthetic construct
  source 1..75: mol_type = other DNA
tcttcatctatcgtctttcacgtgaagttaactggagtgccgcagaagtatccgatgctcttagcaaattcgtgt

SEQ ID NO: 822306 - DNA, 75 bp, synthetic construct
  source 1..75: mol_type = other DNA
gattaaactgccagggactggtgtcagaaagcctccggttagcctgctctttccggaatgtgccggttatgaaaa

SEQ ID NO: 822307 - DNA, 75 bp, synthetic construct
  source 1..75: mol_type = other DNA
gcgtggctgatggaaaacgcactgccgtcggggtttgaggcggggtttgatgggatggagattggggtggcgtga

SEQ ID NO: 822308 - DNA, 75 bp, synthetic construct
  source 1..75: mol_type = other DNA
cagtttgatgcgtggctgatggaaaatacgctgccatcgggggttgaggcggggtttgatgggatggagattggg

SEQ ID NO: 822309 - DNA, 75 bp, synthetic construct
  source 1..75: mol_type = other DNA
cgtgattctgacgcacatcagccaccagtttgatgcgtggctgatggaaaatacgctgccatcgggggttgaggc

SEQ ID NO: 822310 - DNA, 75 bp, synthetic construct
  source 1..75: mol_type = other DNA
agtacatcatcgactgctgatgaaagcagtacgccgcaggctcagggatccacgctttatggtcctgctgtggaa

SEQ ID NO: 822311 - DNA, 75 bp, synthetic construct
  source 1..75: mol_type = other DNA
gtgtcttaccaacactcacccacaactgaagacccgatgaatatatggtatatcgttggcaccatatgcctgctc

SEQ ID NO: 822312 - DNA, 75 bp, synthetic construct
  source 1..75: mol_type = other DNA
gcgcctgacgcctccgaactggctgtggctcaagggcgttgaccggacgctcttctatgcccttcaccgggcaaa

SEQ ID NO: 822313 - DNA, 75 bp, synthetic construct
  source 1..75: mol_type = other DNA
acgaaattccctcggtgctaaacattgaacaagattatcaattagttatccctaaaaaagtactgagtaatgata

SEQ ID NO: 822314 - DNA, 75 bp, synthetic construct
  source 1..75: mol_type = other DNA
aagttgctgccagcgaaggattcctcaagcaacctgctggtaaagatttcgcctttgctggctcatcagtaaaag

SEQ ID NO: 822315 - DNA, 75 bp, synthetic construct
  source 1..75: mol_type = other DNA
atgaagaagtcgattctcgctctgtctttgttagtcgggatttccgcagcagcttccagctacgcggcgctgccg

SEQ ID NO: 822316 - DNA, 75 bp, synthetic construct
  source 1..75: mol_type = other DNA
acgccagtgtattcactggccagaaacgcctttatccgggtcatcaaaacagaaggcgcacaacagtggctcagg

SEQ ID NO: 822317 - DNA, 75 bp, synthetic construct
  source 1..75: mol_type = other DNA
cagcaggtctcccgctatgtactggataatacgaacagtgtagcgtttgatacggttgcggtcatagccgagcgt

SEQ ID NO: 822318 - DNA, 75 bp, synthetic construct
  source 1..75: mol_type = other DNA
tggagcacgccgtacaactactggcctacgccgacaccatttacatcgccggattacgcagatcctttagcattg

SEQ ID NO: 822319 - DNA, 75 bp, synthetic construct
  source 1..75: mol_type = other DNA
aaaatgagcaactggatgctgcagtaagtttattgtcaaaagccgataatatttatgtgattggattacgtcgtt

SEQ ID NO: 822320 - DNA, 75 bp, synthetic construct
  source 1..75: mol_type = other DNA
tcacatcaaaggcattctggagcggtaccggaaaaaacgcaaaattccatccggcaacctataaacgctgggtga

SEQ ID NO: 822321 - DNA, 75 bp, synthetic construct
  source 1..75: mol_type = other DNA
tcagtgtggaaaaagaggattttgtccgcgcgataacgattttaaataataatggttttccgaaaaagaaatttg

SEQ ID NO: 822322 - DNA, 75 bp, synthetic construct
  source 1..75: mol_type = other DNA
atgatagtgacgatgatgacttttctttcacaccaaaaaagaaaactcacaccgattcaaagaaagagaagatta

SEQ ID NO: 822323 - DNA, 75 bp, synthetic construct
  source 1..75: mol_type = other DNA
gaataatgttggtggatttggggatgtggagaaagcgagtaaagtttttgtgagaaatgaactgatcccgctgca

SEQ ID NO: 822324 - DNA, 75 bp, synthetic construct
  source 1..75: mol_type = other DNA
acttgacacatccaatattcggccttgggaagcaacagcggaaagcctttcacaacaacttgatgcctatgtaag

SEQ ID NO: 822325 - DNA, 75 bp, synthetic construct
  source 1..75: mol_type = other DNA
attgagaaagtggcaaaagtattcgtgcgaaatgaacttactccactccaaaaccggctcagtgaggtcaatcat

SEQ ID NO: 822326 - DNA, 75 bp, synthetic construct
  source 1..75: mol_type = other DNA
gctcagccaacaggctttttcgcgttttgtgcaggactatctggtatttggtaacgcctacctggagaaacgcac

SEQ ID NO: 822327 - DNA, 75 bp, synthetic construct
  source 1..75: mol_type = other DNA
ttgacggactggcacgcaccttccgcgctgccgtgcatcacagttccccgattgcagtaaagtgcaacattctga

SEQ ID NO: 822328 - DNA, 75 bp, synthetic construct
  source 1..75: mol_type = other DNA
atttacgtcaaacgtaatattctggcttcaacgtttatcccgcatccatggctttcccagcaggatttcagccgc

SEQ ID NO: 822329 - DNA, 75 bp, synthetic construct
  source 1..75: mol_type = other DNA
gacttctggcctgtccatgagaatcaggagcgcgcattgtgcaaaccgggcgatttaattgtggttgatgaatgt

SEQ ID NO: 822330 - DNA, 75 bp, synthetic construct
  source 1..75: mol_type = other DNA
agtcagcgccgttacgttcttcgccgtcttcgccgtcggttaatgtttcgccttcaccggagaataaaaccgctc

SEQ ID NO: 822331 - DNA, 75 bp, synthetic construct
  source 1..75: mol_type = other DNA
aaaaacaaactgataagtgatgatatttcaccaggtgaaatcattcatgttgaaaatgagcgggttatgtcccct

SEQ ID NO: 822332 - DNA, 75 bp, synthetic construct
  source 1..75: mol_type = other DNA
aatcttaagtccacgcagatgatgagcgtgattgatgccattggtgaagggccgattgaaggtccggtgaagggg

SEQ ID NO: 822333 - DNA, 75 bp, synthetic construct
  source 1..75: mol_type = other DNA
gaccgtatcgaaaagacattcaggatgcgtaaacttaaacaactcggattgtcccgtagttattgtgttgatgtt

SEQ ID NO: 822334 - DNA, 75 bp, synthetic construct
  source 1..75: mol_type = other DNA
gccagcggttttacggggtataacatcatggcagaaggggaacttgacggagaaaaaatcacagcatggtcatgt

SEQ ID NO: 822335 - DNA, 75 bp, synthetic construct
  source 1..75: mol_type = other DNA
tgtacgtcactgatgccgtgcaggatcgcaacgatatcgaaatgcttcgcgaaaacatggtgaagtcgaaaggcc

SEQ ID NO: 822336 - DNA, 75 bp, synthetic construct
  source 1..75: mol_type = other DNA
cacagccacaaaagcgcccgcgcaatatgaaagacgccgtaccccagaaagtggaggcgtttacctttggtgaac

SEQ ID NO: 822337 - DNA, 75 bp, synthetic construct
  source 1..75: mol_type = other DNA
gacctgctggacgcgcaccgcatcccctttcagttgatgggcggcaagccggagaacgtcgggtcgctgggcgat

SEQ ID NO: 822338 - DNA, 75 bp, synthetic construct
  source 1..75: mol_type = other DNA
cgcccggctccgtgtttcacctgctggagccggatattaatcaggagctgtacggcctgccggaatatctcagcg

SEQ ID NO: 822339 - DNA, 75 bp, synthetic construct
  source 1..75: mol_type = other DNA
aacggccagtggtacgagccgccggtgagtttctccgggctggcgaaaagtatgcgcgccgccgtgcaccacagc

SEQ ID NO: 822340 - DNA, 75 bp, synthetic construct
  source 1..75: mol_type = other DNA
gtcgagctttaacaacccacatcagttcgcacccggctcggtgtttcatctgctggagcctgacattaatcagga

SEQ ID NO: 822341 - DNA, 75 bp, synthetic construct
  source 1..75: mol_type = other DNA
aaaaatggaggcgttcacctttggcgagccctctgccgttctggatcgtcgcgatatcctcgattatgtcgagtg

SEQ ID NO: 822342 - DNA, 75 bp, synthetic construct
  source 1..75: mol_type = other DNA
tttgtgcaggactatctggtatttggtaacgcttacctggagaaacgcacgaaccggttcggtgaagttatcgcc

SEQ ID NO: 822343 - DNA, 75 bp, synthetic construct
  source 1..75: mol_type = other DNA
gcgctgaagatctttttgatggcgctggctattatcgacgatcttggggccatcattatcatcgctttgttctac

SEQ ID NO: 822344 - DNA, 75 bp, synthetic construct
  source 1..75: mol_type = other DNA
atgaccaccacaacgccacaacgtattggaggctggttgcttggcccgttagcctggctgttagtcgccctattg

SEQ ID NO: 822345 - DNA, 75 bp, synthetic construct
  source 1..75: mol_type = other DNA
ggtaatgcgtttctggaaaagcgttacagcaccaccggtaaggtcatcagactggaaacctcaccggcaaaatat

SEQ ID NO: 822346 - DNA, 75 bp, synthetic construct
  source 1..75: mol_type = other DNA
atggcgtcgcacgcggtgcctggcagctggatgaaaaaagttccgctgtagtggtgctggataaagacggtcgcg

SEQ ID NO: 822347 - DNA, 75 bp, synthetic construct
  source 1..75: mol_type = other DNA
attgcagtaaagtgcaacattctgaccagcacctacatccctcatccgctgctcagccagcaggctttttcgcgt

SEQ ID NO: 822348 - DNA, 75 bp, synthetic construct
  source 1..75: mol_type = other DNA
cgtgtcccaatgtaattaaagagattctgtatcgcgcagcagaacgtatgcaggtgccgttggtgctggtggcaa

SEQ ID NO: 822349 - DNA, 75 bp, synthetic construct
  source 1..75: mol_type = other DNA
gtttaaaaacggcgttgattcaatgatgggcgaacaagggaaacgtaaatatctggatcagatgaaagatgtacg

SEQ ID NO: 822350 - DNA, 75 bp, synthetic construct
  source 1..75: mol_type = other DNA
gcgtcagggtggaatcagcctgagtcagcatgcccggcatcatgtggctggccggacggggtggacccgtttatg

SEQ ID NO: 822351 - DNA, 75 bp, synthetic construct
  source 1..75: mol_type = other DNA
caaccgtatccgcttctatgaggtgctgaaaatgcaaatcatgagcggacggacacttgagcaggccatgctcaa

SEQ ID NO: 822352 - DNA, 75 bp, synthetic construct
  source 1..75: mol_type = other DNA
gtagcatttgtagacggctttatgaaatctctcgatccaaaagtaacggaagagtttatgaaaaacctttctaat

SEQ ID NO: 822353 - DNA, 75 bp, synthetic construct
  source 1..75: mol_type = other DNA
tattaatgaacttctaaacatcggtgttattaacaaaagcgaccttaaaaaatttgctgataatccagccggatt

SEQ ID NO: 822354 - DNA, 75 bp, synthetic construct
  source 1..75: mol_type = other DNA
ctcaaagcacaacaagcggctcaacgtgtagcggcgcgagaacaaaaagccctggcagcacgcaaagagaaggcg

SEQ ID NO: 822355 - DNA, 75 bp, synthetic construct
  source 1..75: mol_type = other DNA
cgataatgatgtgttgtgccagctacttacgtccgcatacaaggatgcggaaaaaccacatacaggtgaggggaa

SEQ ID NO: 822356 - DNA, 75 bp, synthetic construct
  source 1..75: mol_type = other DNA
tacaccaccaccagaaaaccttcagcaggagatgttggtgcactgccgttatctggtggtcaactgaatggtgca

SEQ ID NO: 822357 - DNA, 75 bp, synthetic construct
  source 1..75: mol_type = other DNA
cttagtggtgatttaagcgctggtgatctgcaaacagtgaaggcggctatttcagctaaagcgaataacctgaca

SEQ ID NO: 822358 - DNA, 75 bp, synthetic construct
  source 1..75: mol_type = other DNA
cacaatcgcggggctatcagccatcacatttgatgcaaaaaaaatattttctatgctattaacgatagcagaaac

SEQ ID NO: 822359 - DNA, 75 bp, synthetic construct
  source 1..75: mol_type = other DNA
gcttggtttgctgaaaatcagcagagcaacgatccgcgcttttacatgcgggttggcatggacgccatgaaagag

SEQ ID NO: 822360 - DNA, 75 bp, synthetic construct
  source 1..75: mol_type = other DNA
ctacagagattattactgatggtgaatcggctgacgccgacacccaacaacctgccgaccagagaataaattatc

SEQ ID NO: 822361 - DNA, 75 bp, synthetic construct
  source 1..75: mol_type = other DNA
gctaattcaacgtgcaaggcttggcggtgtagacgttaaccagatgtacaacgttacagaatgggcctatagaca

SEQ ID NO: 822362 - DNA, 75 bp, synthetic construct
  source 1..75: mol_type = other DNA
cgtaaggcgctttcctcacagcaactggcggcacgtatagaagcttatgatgaagcgcaaaacattctggcgcag

SEQ ID NO: 822363 - DNA, 75 bp, synthetic construct
  source 1..75: mol_type = other DNA
tccgctgaagaccgccgaactgattcaggcggatatggcgcaagtcggcgtaaaagtagtaattgtgccagtaga

SEQ ID NO: 822364 - DNA, 75 bp, synthetic construct
  source 1..75: mol_type = other DNA
tgttgccttcggtggtatgcgtacaactggctggttagccgttccacgttccgtagcgtggggtactgaatttta

SEQ ID NO: 822365 - DNA, 75 bp, synthetic construct
  source 1..75: mol_type = other DNA
tttattggcgatgcggtattgatgtttctcgcatgggcaggtgttgcaacattaattaagaccacgccgatatta

SEQ ID NO: 822366 - DNA, 75 bp, synthetic construct
  source 1..75: mol_type = other DNA
cgcctgatgcaatccatctattatggtacggctgaaacggcggcctctattttaccgcgcgcctcgtgggcttat

SEQ ID NO: 822367 - DNA, 75 bp, synthetic construct
  source 1..75: mol_type = other DNA
taaataatcccgctgtccgccatgcgctggcactggcgattaataaccagcgcctgatgcaatccatctattatg

SEQ ID NO: 822368 - DNA, 75 bp, synthetic construct
  source 1..75: mol_type = other DNA
agcgaaaaacgaaaaacagaatcaaagagcacaagctgccgcagcaagagcacaggcaaggcaacaggcacaaat

SEQ ID NO: 822369 - DNA, 75 bp, synthetic construct
  source 1..75: mol_type = other DNA
ggctgatgatttgatgctcacctctaaatactggacacgctccgctaaagaagtggaacaatcagcacgagaaca

SEQ ID NO: 822370 - DNA, 75 bp, synthetic construct
  source 1..75: mol_type = other DNA
ctaacagaaacacagcaagaatctatcgttaaattcagagaactaaacagacagctttcacagctttctgatgca

SEQ ID NO: 822371 - DNA, 75 bp, synthetic construct
  source 1..75: mol_type = other DNA
ttgtattcctggcactaactcattttcagtacgtcatattcctactggctatgtaatggcacaaactttaacttt

SEQ ID NO: 822372 - DNA, 75 bp, synthetic construct
  source 1..75: mol_type = other DNA
agcatttgaagaacatgaaaatatactttttgttatagatggtcatgttaaagattctatacgcgaatgctgcaa

SEQ ID NO: 822373 - DNA, 75 bp, synthetic construct
  source 1..75: mol_type = other DNA
ctatagaagaacacgcaagaataattgagcaattatgctgttcatctgaattttatttacagcgtatatattcca

SEQ ID NO: 822374 - DNA, 75 bp, synthetic construct
  source 1..75: mol_type = other DNA
tcattgagggtaaatgtgtcagtgatatcaaactgatccacgatcaaatgctcaatgccaccctgtattactccg

SEQ ID NO: 822375 - DNA, 75 bp, synthetic construct
  source 1..75: mol_type = other DNA
aaaatcgacaatgattttgagccaaaactgattcaaaccgtgcgtggcgtgggttacatgcttgaggtgccggat

SEQ ID NO: 822376 - DNA, 75 bp, synthetic construct
  source 1..75: mol_type = other DNA
atgaaactgttgattgtcgaagatgaaaagaaaactggcgaatacctaaccaaagggttaaccgaagccggtttt

SEQ ID NO: 822377 - DNA, 75 bp, synthetic construct
  source 1..75: mol_type = other DNA
gccgacgcactgggggccacatgatggtgatgcggggatccgcaaagatgccgctatggtcgcggatatgcgtga

SEQ ID NO: 822378 - DNA, 75 bp, synthetic construct
  source 1..75: mol_type = other DNA
aactggctcacgcttgtgccccttataacctgaaatggatcgaagagtgcctgccgccgcaacagtatgaaggtt

SEQ ID NO: 822379 - DNA, 75 bp, synthetic construct
  source 1..75: mol_type = other DNA
ggtgattatcacgaccagggggcgaatcactggatagacgatcatattgccaccccgatgagtaaataccgcgat

SEQ ID NO: 822380 - DNA, 75 bp, synthetic construct
  source 1..75: mol_type = other DNA
gcggggaagcacgatgatcacggaaagccagtttaaggtggctgatctctcgattgatctcgtatccagaaaagt

SEQ ID NO: 822381 - DNA, 75 bp, synthetic construct
  source 1..75: mol_type = other DNA
aaaccctttgcgtttgccgaactgctcgcccgggtgagaactcttctgaggcggggaaacacgatgatcacggaa

SEQ ID NO: 822382 - DNA, 75 bp, synthetic construct
  source 1..75: mol_type = other DNA
gatatcatgctacctgatgtgaacggctgggatatcatccgtatgctgcgcactgccggaaagggtacgccggtc

SEQ ID NO: 822383 - DNA, 75 bp, synthetic construct
  source 1..75: mol_type = other DNA
gctgggatatcgtgcgcatgttgcgctccgccaataaagggatgccgattctgttgcttaccgcgcttggcacca

SEQ ID NO: 822384 - DNA, 75 bp, synthetic construct
  source 1..75: mol_type = other DNA
acttgccactgatgacaacagatcttgtggaaccgggaccaaatattggtaagcaagcacgagctatggctgagc

SEQ ID NO: 822385 - DNA, 75 bp, synthetic construct
  source 1..75: mol_type = other DNA
atgacctagagcgcgcagtagcgcttcaaaacatactaattgcaagagctacaggagcccaggatgaagctaata

SEQ ID NO: 822386 - DNA, 75 bp, synthetic construct
  source 1..75: mol_type = other DNA
ttcgcgcctggtttactggtggcgcaacagcagaaaaaggcgctggcggcggtgattatcacgaccagggggcga

SEQ ID NO: 822387 - DNA, 75 bp, synthetic construct
  source 1..75: mol_type = other DNA
atcaaactggctgagcgtattgctcatctgcgcgaagtgaaagacgcgccggaagatgaacgcgtactggcagca

SEQ ID NO: 822388 - DNA, 75 bp, synthetic construct
  source 1..75: mol_type = other DNA
agataacggtcgtgtagtggtagaaggcgtgggcaacctgatgcaccacatcgcgcgttgctgccagccgattcc

SEQ ID NO: 822389 - DNA, 75 bp, synthetic construct
  source 1..75: mol_type = other DNA
tactgcttccgttatctccacccgaccgaatacaaacgcattgcaaaactgctgcatgaacgccgcctcgaccgc

SEQ ID NO: 822390 - DNA, 75 bp, synthetic construct
  source 1..75: mol_type = other DNA
tgtattgaagttaaaacaaataaacctttgaacaacgtgatggatacactgaatgggggggcaatgagtgcttac

SEQ ID NO: 822391 - DNA, 75 bp, synthetic construct
  source 1..75: mol_type = other DNA
tgtcatcaagcatttcatttgcaattattggatttgtttgtaaggcttttttacaacatattgataaaagagagt

SEQ ID NO: 822392 - DNA, 75 bp, synthetic construct
  source 1..75: mol_type = other DNA
tactgcttccgttacctccacccgaccgagtacaaacgtattgcaaaactgctgcatgagcgccgcctcgaccgc

SEQ ID NO: 822393 - DNA, 75 bp, synthetic construct
  source 1..75: mol_type = other DNA
taccccgatgagtaaataccgcgattacgagcagtcccgccagtcatttggtattaacgttcttggcacgttaat

SEQ ID NO: 822394 - DNA, 75 bp, synthetic construct
  source 1..75: mol_type = other DNA
cacaagtcggtgctcgataaacctggcttcggcgttgaactcaatcgtgactgcaatctgaaacgtccctacagc

SEQ ID NO: 822395 - DNA, 75 bp, synthetic construct
  source 1..75: mol_type = other DNA
gccggtgccggtgaatggtcgtattcacaaatcagtacttgataaaccgggtttcggcgtcgaactcaatcgtga

SEQ ID NO: 822396 - DNA, 75 bp, synthetic construct
  source 1..75: mol_type = other DNA
tcacgcctggttccgtaaacaggatcgtgacaaaaatattctggcaggacggcaaatccttgacgacgaactgga

SEQ ID NO: 822397 - DNA, 75 bp, synthetic construct
  source 1..75: mol_type = other DNA
gacattaagtatggatattgacacgctgcgggcggcgctgctgttccctctggcggatgccaacgtagtcagcga

SEQ ID NO: 822398 - DNA, 75 bp, synthetic construct
  source 1..75: mol_type = other DNA
attaccagccagaagtcgtgtgagtgcttagccgaaacctgggcgtattgtctgcagcagacgcaggggcatccg

SEQ ID NO: 822399 - DNA, 75 bp, synthetic construct
  source 1..75: mol_type = other DNA
tggtgccgcgactttccagctttaattcagcttatccgggaatcgacgttcgaatccaggcggtcgatcgccagg

SEQ ID NO: 822400 - DNA, 75 bp, synthetic construct
  source 1..75: mol_type = other DNA
ctttatctgatcggactgttaggactcacacaggcgaataaatacgtttcctcacacacaggcacgaacggtgca

SEQ ID NO: 822401 - DNA, 75 bp, synthetic construct
  source 1..75: mol_type = other DNA
cgcagccagcggtgaaaacaatgactgccagcgccccgaaaatggaggcattcacctttggtgagccggtgccgg

SEQ ID NO: 822402 - DNA, 75 bp, synthetic construct
  source 1..75: mol_type = other DNA
ggaaagccgacggcattaaaattatccccctcagtgaagtggcgacgaaggacgatttttttaatatcaaaaaag

SEQ ID NO: 822403 - DNA, 75 bp, synthetic construct
  source 1..75: mol_type = other DNA
agtgaaggcattgtgtcgatgtttcgagtagacccggatctggctggtccactgatggcaatggtcaccaccatg

SEQ ID NO: 822404 - DNA, 75 bp, synthetic construct
  source 1..75: mol_type = other DNA
gccgaactaattccaccagatccagaaaacaccgcgcacgccgggctgtggattggtaagagcaggaggatgtga

SEQ ID NO: 822405 - DNA, 75 bp, synthetic construct
  source 1..75: mol_type = other DNA
catcactgtacagccgaactgattccaccagatccagaaaacaccgcacacgctgggctttggataggtaaaagc

SEQ ID NO: 822406 - DNA, 75 bp, synthetic construct
  source 1..75: mol_type = other DNA
tgcgaaatgaacttactccactccaaaaccggctcagtgaggtcaatcattgggtaggagaatcagtaatatgtt

SEQ ID NO: 822407 - DNA, 75 bp, synthetic construct
  source 1..75: mol_type = other DNA
ccgtgtttcacctgctggagccggatatcaatcaggagctgtacggcctgccggaatatctcagcgcccttaatt

SEQ ID NO: 822408 - DNA, 75 bp, synthetic construct
  source 1..75: mol_type = other DNA
aatacacccgccgtggcatcgaggatgacgtgtactggtatattcagtcctacacgcagccgcaccagttcgcgc

SEQ ID NO: 822409 - DNA, 75 bp, synthetic construct
  source 1..75: mol_type = other DNA
cgcttaatggacattatccctataccgagaaggttcactcaacaaaatatcatttcactattatttttaacctgc

SEQ ID NO: 822410 - DNA, 75 bp, synthetic construct
  source 1..75: mol_type = other DNA
aaagacgggcttcagattatcccgctatcagaagtcgcagcgaaggatgaatttcttaacatcaagaacgtgagt

SEQ ID NO: 822411 - DNA, 75 bp, synthetic construct
  source 1..75: mol_type = other DNA
tttgtgcaggactatctggtatttggtaacgcctacctggagaaacgcacgaaccgattcggtgaagttatcgct

SEQ ID NO: 822412 - DNA, 75 bp, synthetic construct
  source 1..75: mol_type = other DNA
cccattacgatgtgcacggacgcttgcgtttacctttcctcttctggtgcgtgctgctgcttcaggcgcgaacct

SEQ ID NO: 822413 - DNA, 75 bp, synthetic construct
  source 1..75: mol_type = other DNA
gcagcagaagagctttttgtgacccaggccgcagtaagtcatcaaatcaagtctcttgaggattttttggggcta

SEQ ID NO: 822414 - DNA, 75 bp, synthetic construct
  source 1..75: mol_type = other DNA
gcgtacaaaatttataaacggttgtccttcggcagatcctgatattgtaaagcagattttgaagaagtttggaaa

SEQ ID NO: 822415 - DNA, 75 bp, synthetic construct
  source 1..75: mol_type = other DNA
aagccacgcagtgaaataggtgtgacttgtgttggtcgccagaagcaacgcggaaaatcaattccagcttattgc

SEQ ID NO: 822416 - DNA, 75 bp, synthetic construct
  source 1..75: mol_type = other DNA
ggcgaaaaacccttgaagaccccggaagatctggctaaacatacgttattacatgatgcgtcgcgccgtgactgg

SEQ ID NO: 822417 - DNA, 75 bp, synthetic construct
  source 1..75: mol_type = other DNA
gtcacttgaagattttttgggtctaaagctattccgccgccgtaatcgttcacttctgttaaccgaagaagggca

SEQ ID NO: 822418 - DNA, 75 bp, synthetic construct
  source 1..75: mol_type = other DNA
aggccgcagtaagtcatcaaatcaagtctcttgaggattttctggggctaaaactgttccgccgccgtaatcgtt

SEQ ID NO: 822419 - DNA, 75 bp, synthetic construct
  source 1..75: mol_type = other DNA
accgcaaccgtctgctaccagaagacaacgttatggcccgcctggctcggctggagaaagaaaccagcgaagcga

SEQ ID NO: 822420 - DNA, 75 bp, synthetic construct
  source 1..75: mol_type = other DNA
atcctggcggtcctgccgattgaataccgcaaccgtctgctaccagaagacaacgttatggcccgcctggctcgg

SEQ ID NO: 822421 - DNA, 75 bp, synthetic construct
  source 1..75: mol_type = other DNA
aggttacgatcacgcgttcttgttacaggccaaaggcaatggcaagaaagtggcagcgcatgtctggtcagcaga

SEQ ID NO: 822422 - DNA, 75 bp, synthetic construct
  source 1..75: mol_type = other DNA
gtaaggaagaagatgaacgcagtggaagtatttgcctgccaaacgtagctctttacgcggcaggctaccggaaat

SEQ ID NO: 822423 - DNA, 75 bp, synthetic construct
  source 1..75: mol_type = other DNA
tgaactgaccccggcaattctggcggtactaccgctggaatatcgcggccacctggttgagcaggatagcttcat

SEQ ID NO: 822424 - DNA, 75 bp, synthetic construct
  source 1..75: mol_type = other DNA
gccagaagctgttccgcttcctcgataacaaattcgattctgaaaaataccgaaataacgtgcgtgaactgaccc

SEQ ID NO: 822425 - DNA, 75 bp, synthetic construct
  source 1..75: mol_type = other DNA
gctactacccttaccctttctcaccctgacgtaaccattgaaaatggtcgcgcagtcactacgtctattgcgatc

SEQ ID NO: 822426 - DNA, 75 bp, synthetic construct
  source 1..75: mol_type = other DNA
tttaagagaaagtccagcaatgaagattgctgtgcaaattgctaatgagcatgcgggaaaagtagttgcagttga

SEQ ID NO: 822427 - DNA, 75 bp, synthetic construct
  source 1..75: mol_type = other DNA
aagcgtcccccggggaagaaaagctgaaagcacaccagaaaatgattaactacattgaagagttctgcaacaaaa

SEQ ID NO: 822428 - DNA, 75 bp, synthetic construct
  source 1..75: mol_type = other DNA
aaaatacctgatgcccgcagcaagcagacactacaaaaagaagaaaatcgccaggagcgaaagtggtgaaagtta

SEQ ID NO: 822429 - DNA, 75 bp, synthetic construct
  source 1..75: mol_type = other DNA
agcggcaaactcgcgccgattgatccgcagcatttgatttttatgatctgggcttccactcaacattacgccgat

SEQ ID NO: 822430 - DNA, 75 bp, synthetic construct
  source 1..75: mol_type = other DNA
ggacgcatcgccccgccagcgccggtagtgccggaagaaatcagtacgacccacacaatgctgcccgccatgagt

SEQ ID NO: 822431 - DNA, 75 bp, synthetic construct
  source 1..75: mol_type = other DNA
tattgatggtaatggtattgaacaggccacacactggatgccgctaccggaaccgccgcaggaggttaaccgtgg

SEQ ID NO: 822432 - DNA, 75 bp, synthetic construct
  source 1..75: mol_type = other DNA
ggtggtcgtaaagggtttattgattgcctggttacatcatcagacggccagcagtgtgccattgaggtcgataag

SEQ ID NO: 822433 - DNA, 75 bp, synthetic construct
  source 1..75: mol_type = other DNA
cacaccgccgggcatgcgccagaatcgctgattctgtctctgtcatggatttactgcgaaagtttattaatggaa

SEQ ID NO: 822434 - DNA, 75 bp, synthetic construct
  source 1..75: mol_type = other DNA
ccagatggtaagcgtcccggaacagcgtgtaacagtccgtcaccccgtgctcaaagcgccgcccggtaagatgcg

SEQ ID NO: 822435 - DNA, 75 bp, synthetic construct
  source 1..75: mol_type = other DNA
tattggcgtggctaccgcggagatgggggattatctgatccacgccggaccgcctaaaaaatcggaagaaattgc

SEQ ID NO: 822436 - DNA, 75 bp, synthetic construct
  source 1..75: mol_type = other DNA
gaaggcgtgagtctgaactaccttgcaatgtttactctggtcaccctgttcatcggcctggcattataccgaacg

SEQ ID NO: 822437 - DNA, 75 bp, synthetic construct
  source 1..75: mol_type = other DNA
ctgtagatgttgtcattctgtcacttgtcgtgggggcttctgctcagcaattgtcggtgatgctgccaacttact

SEQ ID NO: 822438 - DNA, 75 bp, synthetic construct
  source 1..75: mol_type = other DNA
cgcgaagaaaaaagcgattcttagcgcagcactggacactttttcacaattcggttttcacggcacaaggctgga

SEQ ID NO: 822439 - DNA, 75 bp, synthetic construct
  source 1..75: mol_type = other DNA
attgcgtcctgctcgactaaccctggcggggctgaatgtaaacgcggtgaggctgtaaacaaagcgattgcagca

SEQ ID NO: 822440 - DNA, 75 bp, synthetic construct
  source 1..75: mol_type = other DNA
acagtatcgcaaacatgtttatgatcccgatgggtattgtaatccgcgacttcgcatccccggaattttggaccg

SEQ ID NO: 822441 - DNA, 75 bp, synthetic construct
  source 1..75: mol_type = other DNA
tggtcaatggggacttaacgtcctacaaaccgccgaccacaaagtacaccatacttttattgaggctgtctgcct

SEQ ID NO: 822442 - DNA, 75 bp, synthetic construct
  source 1..75: mol_type = other DNA
acacattgatgcactgatccgccgtcctcacggcattattttggtgaccgggcctacagggtcgggtaaaagcac

SEQ ID NO: 822443 - DNA, 75 bp, synthetic construct
  source 1..75: mol_type = other DNA
aggagcctggaagcagatggaaaatacttgggcaaaagcattgggtgaaggaaaagaggttaaggtcaacattca

SEQ ID NO: 822444 - DNA, 75 bp, synthetic construct
  source 1..75: mol_type = other DNA
tttagcaggtgctctggcgggggctttggctccggaactggcaaacttcatagggcacaatgctggaattaatga

SEQ ID NO: 822445 - DNA, 75 bp, synthetic construct
  source 1..75: mol_type = other DNA
tgaccacctgccaacggtgtatgcagtaggcgcggcggtcagcatttccgcgctgatgagtctttatgacggacg

SEQ ID NO: 822446 - DNA, 75 bp, synthetic construct
  source 1..75: mol_type = other DNA
atgaaagtgaaggcactggaaggcgacaccgtggattcgctctgtttccggttactacggcacgacgcagggcgt

SEQ ID NO: 822447 - DNA, 75 bp, synthetic construct
  source 1..75: mol_type = other DNA
tcggttttcacggcacaaggctggagcagatcgcagagttggcaggcgtttcaaaaaccaatctgctgtattact

SEQ ID NO: 822448 - DNA, 75 bp, synthetic construct
  source 1..75: mol_type = other DNA
tctctggggctgattctttgtgttgtctgcggagccgatctctttacttccacagtgttgattgttgttgctaag

SEQ ID NO: 822449 - DNA, 75 bp, synthetic construct
  source 1..75: mol_type = other DNA
aataaaaatacctgttcttatatcacctgttgttatgatgatgatatcccttatcacccttacagataacatcat

SEQ ID NO: 822450 - DNA, 75 bp, synthetic construct
  source 1..75: mol_type = other DNA
atgaagttgatgtgttaatggaagatgatgccttcatggaaggtatttataaagagtgcattaaaaatgcaggtg

SEQ ID NO: 822451 - DNA, 75 bp, synthetic construct
  source 1..75: mol_type = other DNA
cccgcgcatgcacttgctgcatctgtccttacggatatcggtggtgggtttatcgaactcatccgccacagcccc

SEQ ID NO: 822452 - DNA, 75 bp, synthetic construct
  source 1..75: mol_type = other DNA
gctgattcgattgtggaagggccgcaggaacgctaccagctgaattggcccggtaagcgcgaggcactgctgacg

SEQ ID NO: 822453 - DNA, 75 bp, synthetic construct
  source 1..75: mol_type = other DNA
gaaatggaaaaggcaaagtcaatctgattaaacattactcctccgttgaatccatacagcagcatgttcccttag

SEQ ID NO: 822454 - DNA, 75 bp, synthetic construct
  source 1..75: mol_type = other DNA
ctgaagcagcgaaatggaaacaaacatggttgcgccataaacctgaaaacatcagggttgccatgcatgcaatgc

SEQ ID NO: 822455 - DNA, 75 bp, synthetic construct
  source 1..75: mol_type = other DNA
ttatcaaaaatataaaaagaaaagttaaatcccgaggttccaggcctcccgccaaacgtaaaaacactcacaagg

SEQ ID NO: 822456 - DNA, 75 bp, synthetic construct
  source 1..75: mol_type = other DNA
catttgccccggagcgcatgaaggagttgcttgcagatgagcgcattcgatttggtgcagacgaaaagacgcggc

SEQ ID NO: 822457 - DNA, 75 bp, synthetic construct
  source 1..75: mol_type = other DNA
ggacttcgatacgacgaagaacctgttcatcgagggggacaaccttgatgcattaaagttgcttcaggagaacta

SEQ ID NO: 822458 - DNA, 75 bp, synthetic construct
  source 1..75: mol_type = other DNA
cgggaagagtggcagtatttacgggtaagggatggagccatgaagaagaccatcgcaatgagactgtttactcaa

SEQ ID NO: 822459 - DNA, 75 bp, synthetic construct
  source 1..75: mol_type = other DNA
tgggtgcgctgttgctggcaaccagcgtagcgtgggccgcaccggtcactgcgggttcaaccaatgcctctggaa

SEQ ID NO: 822460 - DNA, 75 bp, synthetic construct
  source 1..75: mol_type = other DNA
ggtgttaacccgtaacgctgccggagaaatgacggaagaatgggtgtcatgcgggaaaattcatgcggatatccg

SEQ ID NO: 822461 - DNA, 75 bp, synthetic construct
  source 1..75: mol_type = other DNA
tactgggttttctggcgggtaactgcgtgggggtaatttcagaatatggtggacaaaaattaagcgaagcgacga

SEQ ID NO: 822462 - DNA, 75 bp, synthetic construct
  source 1..75: mol_type = other DNA
caccgttaacgccatacaataaatgggatggtgagaaatgggtgacagatactgaggcacagcatagtgccgcag

SEQ ID NO: 822463 - DNA, 75 bp, synthetic construct
  source 1..75: mol_type = other DNA
aatgagactgtttactcaatcgaaaatggcgcagctgttacagtggattatatcggtgccatcaaagacggttat

SEQ ID NO: 822464 - DNA, 75 bp, synthetic construct
  source 1..75: mol_type = other DNA
ctaattgttctgactctctttactcctttatttatcctgcactgcaacaacgctctggaaccgagaatgaaagtc

SEQ ID NO: 822465 - DNA, 75 bp, synthetic construct
  source 1..75: mol_type = other DNA
cgactatgaggagaaattgcttattgccagatgggaactgacagcagaacaggctgttacacagcagttaaaaaa

SEQ ID NO: 822466 - DNA, 75 bp, synthetic construct
  source 1..75: mol_type = other DNA
tggcattgtccagtacgcttgattctattccgttatccatgcagcgacagttcccggatttaacgccacgtcatc

SEQ ID NO: 822467 - DNA, 75 bp, synthetic construct
  source 1..75: mol_type = other DNA
gctgcttcgggccagagctgaactgacagaagaacaggccgtagctcaaaaacttaaaaatcaggtaaccgaagg

SEQ ID NO: 822468 - DNA, 75 bp, synthetic construct
  source 1..75: mol_type = other DNA
atgttcctgtacggtatcggctacaatttcaccggcagcggttggtggttcaaaccgttctttgctaagcgttat

SEQ ID NO: 822469 - DNA, 75 bp, synthetic construct
  source 1..75: mol_type = other DNA
cgacaacacaatcatagaacacctgatgacgggggcgatctggaggaaaggctgcttcgggccagagctgaactg

SEQ ID NO: 822470 - DNA, 75 bp, synthetic construct
  source 1..75: mol_type = other DNA
tgggaaggctgggtcatatccctccggcagaagcagaaaaagcttattatgcttccatcagaaacgatgatctgg

SEQ ID NO: 822471 - DNA, 75 bp, synthetic construct
  source 1..75: mol_type = other DNA
caatggcgttatccagtacgcttgattccattccgttatccatgcagcgacagttcccggatttaacgccacgtc

SEQ ID NO: 822472 - DNA, 75 bp, synthetic construct
  source 1..75: mol_type = other DNA
ccgggctggaactacaaccccggcataaaccgtgagcaggagctggcacgccagctggcagccagacaggcacgt

SEQ ID NO: 822473 - DNA, 75 bp, synthetic construct
  source 1..75: mol_type = other DNA
taaaccgtgagcaggagctggcgcgccagctggcgacaaaacaggcccgttttgacagtgaatacccctcccgcc

SEQ ID NO: 822474 - DNA, 75 bp, synthetic construct
  source 1..75: mol_type = other DNA
ctgacagcagaacaggctgttacacagcagctaaaaaatgaggtgtcaaaaggaaaactgattgacaccggattc

SEQ ID NO: 822475 - DNA, 75 bp, synthetic construct
  source 1..75: mol_type = other DNA
tgaacccgattcatgcgctctatccggcaaacccggaaagtgccagcccgtatagcccgtcttctcgccgctggc

SEQ ID NO: 822476 - DNA, 75 bp, synthetic construct
  source 1..75: mol_type = other DNA
gaatcgtggcttacagcgctacatcgccgatagcaacagcgccctgttagggctacagccggaagactggctgga

SEQ ID NO: 822477 - DNA, 75 bp, synthetic construct
  source 1..75: mol_type = other DNA
gctcaggttgttcgtaaccatggtgtagagcttccaattgtaaaaaccgaaaatgggtggaagcttgtcggggaa

SEQ ID NO: 822478 - DNA, 75 bp, synthetic construct
  source 1..75: mol_type = other DNA
caccgggcgttgccagtggctggagcctgagctggcaggcgcaggacggtcgtatgctgaattacacactgcgaa

SEQ ID NO: 822479 - DNA, 75 bp, synthetic construct
  source 1..75: mol_type = other DNA
gactttcgggccggtgcttgcactgatggataatcagaacaacagtgcggatatgctgaatctgcagacatatct

SEQ ID NO: 822480 - DNA, 75 bp, synthetic construct
  source 1..75: mol_type = other DNA
gcagatttaaacaaagccgagacaggtgaagccagattcactgactatcctcgtatatggtggcatgcaagagaa

SEQ ID NO: 822481 - DNA, 75 bp, synthetic construct
  source 1..75: mol_type = other DNA
catccaaaaccggaagatgtggccatcaatgtcgagggcattaattcacaacatcataatccattaaatcatgtt

SEQ ID NO: 822482 - DNA, 75 bp, synthetic construct
  source 1..75: mol_type = other DNA
cattaaaaaatgcattaagcaacagcaatataccaaccactgtatcgactgctgcatccactattgcatcagcca

SEQ ID NO: 822483 - DNA, 75 bp, synthetic construct
  source 1..75: mol_type = other DNA
ggggctagcagatttaaacaaagccgagaccggagaagccagattcactgactatcctcgtatatggtggcatgc

SEQ ID NO: 822484 - DNA, 75 bp, synthetic construct
  source 1..75: mol_type = other DNA
cagcgacatccaaatctagaggatgtggtaatcgatatcgaaagcaatggctcaccacatcataacccatcaaat

SEQ ID NO: 822485 - DNA, 75 bp, synthetic construct
  source 1..75: mol_type = other DNA
ggatgcagtgccttggtttggattaacggctcaggttgttcgtaaccatggtgtggaacttcctatagtcaaaac

SEQ ID NO: 822486 - DNA, 75 bp, synthetic construct
  source 1..75: mol_type = other DNA
attttctgaacagtctgcacttgcgtaaagctcagacgctgtctgatgtgacagagcaactgacgcttatggctg

SEQ ID NO: 822487 - DNA, 75 bp, synthetic construct
  source 1..75: mol_type = other DNA
agacctgctcgcggtcgtaatgcccctttatgcacaaaatgcacatcttttactgcgtgatgccgctgctgctca

SEQ ID NO: 822488 - DNA, 75 bp, synthetic construct
  source 1..75: mol_type = other DNA
gatattcgtcatactctgcggcgccagtatggcagattctggggacgtaaaatacgcattctgttgataacaggt

SEQ ID NO: 822489 - DNA, 75 bp, synthetic construct
  source 1..75: mol_type = other DNA
tgccgcctgttttattctcggcgttctgctgtacagcacggtggttcgtgcggaatatccggatatcggttctaa

SEQ ID NO: 822490 - DNA, 75 bp, synthetic construct
  source 1..75: mol_type = other DNA
gtgaaaccggaaaacaaagaccgcgtgaagaaacaggtagaagccggcaagttgattatcggcccctggtatacc

SEQ ID NO: 822491 - DNA, 75 bp, synthetic construct
  source 1..75: mol_type = other DNA
aggaagggcgtaacggcatggctgtctttagcgaagggctacgtgaatttgaagtcatcggtgaagagaagaaaa

SEQ ID NO: 822492 - DNA, 75 bp, synthetic construct
  source 1..75: mol_type = other DNA
agaaggtgacagtagaggcattatttctacgagaaatacgaacacgttttggtaagtttcgtctgggatatctgt

SEQ ID NO: 822493 - DNA, 75 bp, synthetic construct
  source 1..75: mol_type = other DNA
ttccctgctggccttcctgttcgcccttgtcggcagcatcaccgaatgggtactcaaccgccgccgttctcacgc

SEQ ID NO: 822494 - DNA, 75 bp, synthetic construct
  source 1..75: mol_type = other DNA
ggtgtactgttgctgaccgcactggcaggctggttatttagcccggccatttccctgctggccttcctgttcgcc

SEQ ID NO: 822495 - DNA, 75 bp, synthetic construct
  source 1..75: mol_type = other DNA
ataaccaggctgacgatcatcgccttcgcgtcctgatccctacaccttttaacaccgacagtgttctggcagata

SEQ ID NO: 822496 - DNA, 75 bp, synthetic construct
  source 1..75: mol_type = other DNA
ttactttgttttttctgctgctaaagttgttaaaggcgtgattcaatgcattggttacattgacaaaaataacaa

SEQ ID NO: 822497 - DNA, 75 bp, synthetic construct
  source 1..75: mol_type = other DNA
ttgattcagtaatcagtaattccggtaaagcaggtttatcacaagtcattatttcagcagtgtatgaattaaaag

SEQ ID NO: 822498 - DNA, 75 bp, synthetic construct
  source 1..75: mol_type = other DNA
cattttctgtattcccgattatttccctggtgctgacagtttactgcctgcatcaacgttatcttaatcgcacta

SEQ ID NO: 822499 - DNA, 75 bp, synthetic construct
  source 1..75: mol_type = other DNA
caatctgttgtgcggcctgaagctggcgcgcagcacatacttctatcaacgcctgcggcagacgcggcccgacaa

SEQ ID NO: 822500 - DNA, 75 bp, synthetic construct
  source 1..75: mol_type = other DNA
gcgtggatccgccgcactgaaaatgcccaattaacgcggtcgatgtccaaaaagggctgctcgccagacaatgct

SEQ ID NO: 822501 - DNA, 75 bp, synthetic construct
  source 1..75: mol_type = other DNA
cgtgtgtccgagaaggtcgtgcgtcgcttgatggcgcaagagcgtctggtcgtgagaacaccgcgccgccggcgc

SEQ ID NO: 822502 - DNA, 75 bp, synthetic construct
  source 1..75: mol_type = other DNA
ccaacacaaataccgcaatccgaattacctctaggatgccaagctggatttgttgttaatattccagatgatata

SEQ ID NO: 822503 - DNA, 75 bp, synthetic construct
  source 1..75: mol_type = other DNA
actgacgaagaaaaacgcctgctgggaattaccgacgcccgtaccgtcactctgtaccatccacagggctgtccc

SEQ ID NO: 822504 - DNA, 75 bp, synthetic construct
  source 1..75: mol_type = other DNA
gcgtcaggacccggatgtggtgatggtcggtgaaatccgcgataccgaaaccgcagaaatcgccgtccaggcttc

SEQ ID NO: 822505 - DNA, 75 bp, synthetic construct
  source 1..75: mol_type = other DNA
ttgttgctgacgaagctttctacgacgtagcaccgaatagcctgaacccgtacgcttcttactctgaagatggct

SEQ ID NO: 822506 - DNA, 75 bp, synthetic construct
  source 1..75: mol_type = other DNA
attacacgccataagtggcaggataatttgatcaacgccatcgcgttattgggcttttcaatccctgttttctgg

SEQ ID NO: 822507 - DNA, 75 bp, synthetic construct
  source 1..75: mol_type = other DNA
tacgaagtgaaaccgattaccggttttgcgttgattgatgcctggctttcggactcaccatggcgggatgaaatg

SEQ ID NO: 822508 - DNA, 75 bp, synthetic construct
  source 1..75: mol_type = other DNA
tcatctcctgcatcatgttccctctacactcgattccaaagcaatactggtcatatctactctggaacccattag

SEQ ID NO: 822509 - DNA, 75 bp, synthetic construct
  source 1..75: mol_type = other DNA
taagctacttcggtggtaacttcaacggcgacaacggcaccatcaactatgatcaggatgttaacggcatcatgg

SEQ ID NO: 822510 - DNA, 75 bp, synthetic construct
  source 1..75: mol_type = other DNA
catcgctaattctactattgacgatgattttgacgccttctacttcaccgatacttatctggatgcagacggtaa

SEQ ID NO: 822511 - DNA, 75 bp, synthetic construct
  source 1..75: mol_type = other DNA
cttcgaaccatggtgaacgcatcgtgctgcgtttactagacaaaaacagcgttagtctcgatctggctgcactcg

SEQ ID NO: 822512 - DNA, 75 bp, synthetic construct
  source 1..75: mol_type = other DNA
ggttataccttcacctacagcgaagaccaggctctgactccgtacttcaaactggcttacgtctacgacgactct

SEQ ID NO: 822513 - DNA, 75 bp, synthetic construct
  source 1..75: mol_type = other DNA
taccctggctatcaacagcggttctcaggttaacgtgagtgcagattcttccctgacttccgacaccatcactct

SEQ ID NO: 822514 - DNA, 75 bp, synthetic construct
  source 1..75: mol_type = other DNA
gaacggtggttcttcaatggaagtcaacggtgaagttaacaccgatcacctgaccattgataccttctcaaccgt

SEQ ID NO: 822515 - DNA, 75 bp, synthetic construct
  source 1..75: mol_type = other DNA
aacagagacaaaaagccatgcaaaaattggctgacccggcctggcgagaggaacaaagggcaaagcgccttcaac

SEQ ID NO: 822516 - DNA, 75 bp, synthetic construct
  source 1..75: mol_type = other DNA
atccataccgtccgctgcctctggctgggctggtgttcagtcaaccctctgccagcggtgaacgtgccgtgccgc

SEQ ID NO: 822517 - DNA, 75 bp, synthetic construct
  source 1..75: mol_type = other DNA
tgaaggcaatacaagcaacacaacttatactagcgaatatcatcagtgggacaacaacattaatgtgtctaactc

SEQ ID NO: 822518 - DNA, 75 bp, synthetic construct
  source 1..75: mol_type = other DNA
ggtgcggctgcaggcttcgctaaaggtgacatgaatgaccgttctggtcaggtagatcaagacagccagactgcc

SEQ ID NO: 822519 - DNA, 75 bp, synthetic construct
  source 1..75: mol_type = other DNA
ccatattccgactcaatgaagtctttactaaaaaacggttatcaagcaaaaacacgtccctcgggccatgtgatt

SEQ ID NO: 822520 - DNA, 75 bp, synthetic construct
  source 1..75: mol_type = other DNA
atgactgttgaagatataagcaaaacatttggtgtcagtcaacaagcggctgaaacttggatgagaaaaaatgca

SEQ ID NO: 822521 - DNA, 75 bp, synthetic construct
  source 1..75: mol_type = other DNA
tgcttgataaggctgagatcagtgcttatcccggcgtcggcagtagctacacactgagctggaaagctcaggatg

SEQ ID NO: 822522 - DNA, 75 bp, synthetic construct
  source 1..75: mol_type = other DNA
ctggtgtattcgatatccacagcagcgattatgttctgaacgctgatttggtgaacgaccgtacctgggatactt

SEQ ID NO: 822523 - DNA, 75 bp, synthetic construct
  source 1..75: mol_type = other DNA
gtgataacagatgtctggaaatataggggcaaatccactgtagatggtaactatgtgaattatagtggctttgtc

SEQ ID NO: 822524 - DNA, 75 bp, synthetic construct
  source 1..75: mol_type = other DNA
ctgccggaaacggttttcgaactctccggtatatcggcgttcacaggcaatgacgaagatgccggggattccgtg

SEQ ID NO: 822525 - DNA, 75 bp, synthetic construct
  source 1..75: mol_type = other DNA
tggttgctacagaccacctgactgttgatagctacagtaccgttaatttaaccgaatctaccggttggaataatt

SEQ ID NO: 822526 - DNA, 75 bp, synthetic construct
  source 1..75: mol_type = other DNA
gatgtcgaatttacaagtcactggaataacgatggcgtattcttctattccaccggtcatgacagcaacggcgac

SEQ ID NO: 822527 - DNA, 75 bp, synthetic construct
  source 1..75: mol_type = other DNA
ggtggtttactggatattaatgtagaccagttcgatgataatccgttccagactgatactttggaactgaccagc

SEQ ID NO: 822528 - DNA, 75 bp, synthetic construct
  source 1..75: mol_type = other DNA
cagcatcagtattgaaggcaaggatatcaccactgtgctggacaaccgcctgatgagtttgacgctgacggacaa

SEQ ID NO: 822529 - DNA, 75 bp, synthetic construct
  source 1..75: mol_type = other DNA
atctgttattcatccggcagggacagggcaaaagcgccagcggtaaaccactaccggttatcactatcacacgta

SEQ ID NO: 822530 - DNA, 75 bp, synthetic construct
  source 1..75: mol_type = other DNA
atcactactgtcctggataatcgcctgatgagtctgacgttgacggacaataggggctttgaagcggaccagctt

SEQ ID NO: 822531 - DNA, 75 bp, synthetic construct
  source 1..75: mol_type = other DNA
atctgttattcatccggcagggacagggcaaaagcgccagcggtaaaccactgccggtgatctctatcacacgta

SEQ ID NO: 822532 - DNA, 75 bp, synthetic construct
  source 1..75: mol_type = other DNA
attttcgtgaaaccctgaatatccgccgtgaaaaatcgtggcacaagaccaccgttggggaagtggtgaaggaaa

SEQ ID NO: 822533 - DNA, 75 bp, synthetic construct
  source 1..75: mol_type = other DNA
tactgtcagcccggataacggttttacgaccagtatcgaacttgaagtgaagattgatgatcttgaaatggaata

SEQ ID NO: 822534 - DNA, 75 bp, synthetic construct
  source 1..75: mol_type = other DNA
ctgactattcgggcgcgaagtgctgattttcgtgaaacgctgaatacccgccgtgaaaaatcgtggcataacacc

SEQ ID NO: 822535 - DNA, 75 bp, synthetic construct
  source 1..75: mol_type = other DNA
aagatgttgtccctataacccccccccggtcacaacctgtagctgctgcgacacctgaatcactcaatatcagct

SEQ ID NO: 822536 - DNA, 75 bp, synthetic construct
  source 1..75: mol_type = other DNA
acagtcaccgctttaccctggcagatcgcggagcttacacgggcgtaattgccagctggttgcatacccgcgaac

SEQ ID NO: 822537 - DNA, 75 bp, synthetic construct
  source 1..75: mol_type = other DNA
cagcatcagtattgaaggcagggatatcaccactgtgctggacaaccgcctgatggggcttacgctgacggataa

SEQ ID NO: 822538 - DNA, 75 bp, synthetic construct
  source 1..75: mol_type = other DNA
tccgggcgcgaagtgctgattttagggaaacgctgaatactcgccgtgaaaaatcgtggcataagaccaccgtcg

SEQ ID NO: 822539 - DNA, 75 bp, synthetic construct
  source 1..75: mol_type = other DNA
actaagaagcagaagaaagagccagaagcgaagcagggtgattacctggtgggtacggatgaaaacgtgctggta

SEQ ID NO: 822540 - DNA, 75 bp, synthetic construct
  source 1..75: mol_type = other DNA
acacttgatgccgaagatgttgtccctacaacccccccccggtcacaacctgtagctgctgcgacacctgaatca

SEQ ID NO: 822541 - DNA, 75 bp, synthetic construct
  source 1..75: mol_type = other DNA
gaagcaaaaaatcatcattgaacttcttgatgaactccctgacagtgaaactgatgaacttttaaaaactcttga

SEQ ID NO: 822542 - DNA, 75 bp, synthetic construct
  source 1..75: mol_type = other DNA
agaagggctatgacggcgttctgaacgttggccgggtacaaagtgccgttcttggtctggtgaacatgcgcacgc

SEQ ID NO: 822543 - DNA, 75 bp, synthetic construct
  source 1..75: mol_type = other DNA
tctgggttatgccggaaacaagaaacccgtccagcgactgcttgttgccgacctcaaccttgcgccagtgcaaaa

SEQ ID NO: 822544 - DNA, 75 bp, synthetic construct
  source 1..75: mol_type = other DNA
gtggctaagaaaaatacactacagaaattattcatgttcgcatcactgtgtttatttacggcatcaagtcatgcg

SEQ ID NO: 822545 - DNA, 75 bp, synthetic construct
  source 1..75: mol_type = other DNA
atgttgcgtttcaccaaaccggtcactggcggctattacttcgcgccgtcgctggacaagctgatggcgctgtaa

SEQ ID NO: 822546 - DNA, 75 bp, synthetic construct
  source 1..75: mol_type = other DNA
gccggaaatgggaatccaaaaggtattactggtgcattatggcgacggacatcggttggatttactaattttgca

SEQ ID NO: 822547 - DNA, 75 bp, synthetic construct
  source 1..75: mol_type = other DNA
gttctgcgtgccggaaatggaaatccaaacggtattactggtgcattatggcgacggacctcggttggatttact

SEQ ID NO: 822548 - DNA, 75 bp, synthetic construct
  source 1..75: mol_type = other DNA
tgataactaccgcgagcatgatcagaaactggcgcgtgaaggcggcctggatttggtggtgctgggattaggtgc

SEQ ID NO: 822549 - DNA, 75 bp, synthetic construct
  source 1..75: mol_type = other DNA
taaaggctttaccagtaataaaaccgggaaaaagtttgacgctgcaattgttttgcaggataaagctacgggtaa

SEQ ID NO: 822550 - DNA, 75 bp, synthetic construct
  source 1..75: mol_type = other DNA
tcaaaaaaggtaaaaccggagagattaaaggctttaccagtaataaaaccgggaaaaagtttgacgctgcaattg

SEQ ID NO: 822551 - DNA, 75 bp, synthetic construct
  source 1..75: mol_type = other DNA
accaggccggaaaacaccaaacctccactgccacttaacctgtccacgcttcagcagctatgcgcaaagcgattt

SEQ ID NO: 822552 - DNA, 75 bp, synthetic construct
  source 1..75: mol_type = other DNA
gtggcgctggatgtcggtggcgcaatcaaaggccaacacttcgatatctatcaagggatcgggccggaagccgga

SEQ ID NO: 822553 - DNA, 75 bp, synthetic construct
  source 1..75: mol_type = other DNA
aagttaaaatagccctaattgaatggttatataaaaaaggcatgcttagtgatgcaacgatcattaatgaaatgg

SEQ ID NO: 822554 - DNA, 75 bp, synthetic construct
  source 1..75: mol_type = other DNA
aaaacctcggtggtgagttaatcaaattcatcgcggaggctgccatcatggctactatccttaccctttctcacc

SEQ ID NO: 822555 - DNA, 75 bp, synthetic construct
  source 1..75: mol_type = other DNA
tgatgacgctctcgtctgtaccctagacactttccgcctttatctggagaaacagggctggactcttgtaaaccg

SEQ ID NO: 822556 - DNA, 75 bp, synthetic construct
  source 1..75: mol_type = other DNA
cctcgctgtcagtcagccattgtcagctagaaaatttaagccttgcgatctgcacccccgttactttattcgtac

SEQ ID NO: 822557 - DNA, 75 bp, synthetic construct
  source 1..75: mol_type = other DNA
accttacaggtcgagagccacagggtacagaaagtgcagattatcccgccgccgcaggaagagtgggattacgaa

SEQ ID NO: 822558 - DNA, 75 bp, synthetic construct
  source 1..75: mol_type = other DNA
ggtggttgggcaagaaccggcctgcgtgaagacctgcccgacgggcgcgattcacttcggtacgaaagagtcgat

SEQ ID NO: 822559 - DNA, 75 bp, synthetic construct
  source 1..75: mol_type = other DNA
gccctcaattttgaggacgtcacctacaccgacaccaaaggcgaaaaacgcccaatgaccaaatcaccaaaaacg

SEQ ID NO: 822560 - DNA, 75 bp, synthetic construct
  source 1..75: mol_type = other DNA
ctggagaaacaaggctggactcttgtaaaccggagcgcaattaaaaatatgactgtggagcaattactaaaaatt

SEQ ID NO: 822561 - DNA, 75 bp, synthetic construct
  source 1..75: mol_type = other DNA
cgctgtcactacgtctgttgcaattgcagagttctttggtaagcgtcacgagcgagtactggataaaattcgcaa

SEQ ID NO: 822562 - DNA, 75 bp, synthetic construct
  source 1..75: mol_type = other DNA
aatcccgggtgatgaccgaaccctggttatccgcttcgacgaacacggctacatcaaattcaccgaaaccgttcc

SEQ ID NO: 822563 - DNA, 75 bp, synthetic construct
  source 1..75: mol_type = other DNA
tttatgcgtcaagcacagccacattcagattatggtggggcgtgcagggcagccgcaaggctggccggtttcggt

SEQ ID NO: 822564 - DNA, 75 bp, synthetic construct
  source 1..75: mol_type = other DNA
tttatgcgtaatgcacagccacattcaaattatggtgaggcgtgcggggcagccgcaaggctggccgggttctcg

SEQ ID NO: 822565 - DNA, 75 bp, synthetic construct
  source 1..75: mol_type = other DNA
cgaagtgattcgcccgcgtgccaactggcgctggctggcgaacgcagtgttcagcctcggagaacatgccgagat

SEQ ID NO: 822566 - DNA, 75 bp, synthetic construct
  source 1..75: mol_type = other DNA
attacgttgctgcgtggcgtgggcttactggggaaagaagatctgcttttaaggcctggacgtccttcaggaata

SEQ ID NO: 822567 - DNA, 75 bp, synthetic construct
  source 1..75: mol_type = other DNA
gagtttatttagttatatcggtactcccgtaactgccggtgtagcccagcaggcacgcgcatggctgacgccagt

SEQ ID NO: 822568 - DNA, 75 bp, synthetic construct
  source 1..75: mol_type = other DNA
tgaaatagcggtgccgcgtaatctgtcagagcgtcgcgcaaagcaatgttctggcagggtaggggtggagacggt

SEQ ID NO: 822569 - DNA, 75 bp, synthetic construct
  source 1..75: mol_type = other DNA
ggcgtaacggcaaagtggttacacaccaaagacccgaagtcacaaaagcagaaggtaaaactgaaacgcaaaaag

SEQ ID NO: 822570 - DNA, 75 bp, synthetic construct
  source 1..75: mol_type = other DNA
cgcaactcgctcgtgagcatgagatcaacgataatctgctgttcaagtggtgccagtactggcgcgaaggaaaac

SEQ ID NO: 822571 - DNA, 75 bp, synthetic construct
  source 1..75: mol_type = other DNA
tccggcatggctcactccgtttgaatggtgccatcagcgaaaatatcctgaacctgctgatacaggaactgaagc

SEQ ID NO: 822572 - DNA, 75 bp, synthetic construct
  source 1..75: mol_type = other DNA
atgttacgtttcaccaaaccggtcactggcggctattacttcgcaccgtcgctggacaagctgatggcgctgtaa

SEQ ID NO: 822573 - DNA, 75 bp, synthetic construct
  source 1..75: mol_type = other DNA
gcttgccatacggtacagccagcggcacgcacggtctgtacttctgcgcttactgcgcacgtctgcacaacattg

SEQ ID NO: 822574 - DNA, 75 bp, synthetic construct
  source 1..75: mol_type = other DNA
cacgcaaagaagccatcgttaaacaacgtggcggcagcgcctggcaaatcgtcagcgtagacagcacctatcagt

SEQ ID NO: 822575 - DNA, 75 bp, synthetic construct
  source 1..75: mol_type = other DNA
tggataagctacgtgagatctaccctcaacgtaagtttgtgatgagccgctttgaagaggtatttgagaagatcg

SEQ ID NO: 822576 - DNA, 75 bp, synthetic construct
  source 1..75: mol_type = other DNA
tataacgagtgtgaatgtacccttcttgacaattacaaacctcttgtttacaacactaaatttattgaagataac

SEQ ID NO: 822577 - DNA, 75 bp, synthetic construct
  source 1..75: mol_type = other DNA
tacaaagaatgcgaatgtcctttcatagatacttttcgcctattggtttataatactaagtttgttgaggataat

SEQ ID NO: 822578 - DNA, 75 bp, synthetic construct
  source 1..75: mol_type = other DNA
gtggtggatgaactggatcgtctgatcgaacgcggcctgtcggtgctttcagagcatggctcgaaggtgaagggc

SEQ ID NO: 822579 - DNA, 75 bp, synthetic construct
  source 1..75: mol_type = other DNA
tcagacgctgaccacaacggccaccgtgacgctggcggcgattaccggtgagatgaacagtgtcaccggggcggt

SEQ ID NO: 822580 - DNA, 75 bp, synthetic construct
  source 1..75: mol_type = other DNA
tttccgggctggtgatgagtgaaaacgcgatgtggggagtcgcggttttacactgcgccgagggcaaaatgcatc

SEQ ID NO: 822581 - DNA, 75 bp, synthetic construct
  source 1..75: mol_type = other DNA
atggctgaaagcgggtatggtctggcagggctggggatgggtaaggtgaaatctatcaatcagtaccggcttacg

SEQ ID NO: 822582 - DNA, 75 bp, synthetic construct
  source 1..75: mol_type = other DNA
ggtggaaccacgccagctggcgatgctgatctccgaagagcatttgcaattacaggcggtgttcctcgcgtttct

SEQ ID NO: 822583 - DNA, 75 bp, synthetic construct
  source 1..75: mol_type = other DNA
gatcctcgaccagatgcgcgagcgcgacgaagacgtgctggagcagctccaggatgagatgtacgacttctttat

SEQ ID NO: 822584 - DNA, 75 bp, synthetic construct
  source 1..75: mol_type = other DNA
gcaggaatatcccaaacgtgctggtggcaattccaagtcagcagccttcaaagcctggaaagcccgtatcaggga

SEQ ID NO: 822585 - DNA, 75 bp, synthetic construct
  source 1..75: mol_type = other DNA
ggaactgcgctcccatgcgccagaacgcattgttgacgcggtatggggcgagagctactccgccggatattcgct

SEQ ID NO: 822586 - DNA, 75 bp, synthetic construct
  source 1..75: mol_type = other DNA
gtgctgggccgcgtgctgggtaaactcaaccaggtgccggacgttatcgacgcgcgtcggttgcacgggagttag

SEQ ID NO: 822587 - DNA, 75 bp, synthetic construct
  source 1..75: mol_type = other DNA
agataaaaaccgaagagcagcaggccgttttagcgttacacactgaacggggaatacttatccgtgagcggattg

SEQ ID NO: 822588 - DNA, 75 bp, synthetic construct
  source 1..75: mol_type = other DNA
ccgcagtatgtgaagccttatgtgaaaacgaacaagacggatgcagcagatgctgaagcaatctgcgaagcggta

SEQ ID NO: 822589 - DNA, 75 bp, synthetic construct
  source 1..75: mol_type = other DNA
gcgttaatttgaccagctcacaatttgcgaaagatcgtgatgatatcgtaacgcgtgcttttgctgcgggggtta

SEQ ID NO: 822590 - DNA, 75 bp, synthetic construct
  source 1..75: mol_type = other DNA
cacagatgataagtgttctgaagccggtgttaacccgtaatgctgccggagaaatgacggaagaatgggtgtcat

SEQ ID NO: 822591 - DNA, 75 bp, synthetic construct
  source 1..75: mol_type = other DNA
ggctggctacagtgccgggcgatatgcgttgtttttattatgatgctgaaacaactgagtatacgggctggtctg

SEQ ID NO: 822592 - DNA, 75 bp, synthetic construct
  source 1..75: mol_type = other DNA
caatgttcactctggtcaccctgttcatcggtctggctttataccgaacgcgtgaagaggcaatgctgacatcat

SEQ ID NO: 822593 - DNA, 75 bp, synthetic construct
  source 1..75: mol_type = other DNA
aagtggctgtatttacaggtaagggatggagccatgaagaggaccatcgcaatgagactgtttactcaatcgaaa

SEQ ID NO: 822594 - DNA, 75 bp, synthetic construct
  source 1..75: mol_type = other DNA
ttaatactggcgtaagtatgcccgcctgttccactggtattgaccttggcgaaaacattccgggaaaagtggcag

SEQ ID NO: 822595 - DNA, 75 bp, synthetic construct
  source 1..75: mol_type = other DNA
gcttaacgccgtgctggattacattgacgcggtggcggtaacagataccagcaccgcgccggatgtcatctggcc

SEQ ID NO: 822596 - DNA, 75 bp, synthetic construct
  source 1..75: mol_type = other DNA
acttaacattgtgctggattacattgacgcggtgacggcaacagataccagcaccgcgcctgatgtcatctggcc

SEQ ID NO: 822597 - DNA, 75 bp, synthetic construct
  source 1..75: mol_type = other DNA
gtccctggcgtgactgtatcctgaatgttgtcggggtgcccgtgccggatgcgaccggcgggcgcctggaaattc

SEQ ID NO: 822598 - DNA, 75 bp, synthetic construct
  source 1..75: mol_type = other DNA
ggcgcaggcggaaatccgcatctgggtgcgcggtcagtccggtcgggaaatcacggcggcgtcacgacttcatgt

SEQ ID NO: 822599 - DNA, 75 bp, synthetic construct
  source 1..75: mol_type = other DNA
tcatctcctgcatcatgttccctctgcactcaattcctaagcaatattggtcttatcttctctggaacccattag

SEQ ID NO: 822600 - DNA, 75 bp, synthetic construct
  source 1..75: mol_type = other DNA
atgataaatgggatggtgagaaatgggtgacagatactgaggcacaacacggtgccgcagtagaagcggcagaag

SEQ ID NO: 822601 - DNA, 75 bp, synthetic construct
  source 1..75: mol_type = other DNA
gcgttgtttttattatgatgctgaaacatctgagtatatgggctgctctgatgaatatattaatactggtgtaag

SEQ ID NO: 822602 - DNA, 75 bp, synthetic construct
  source 1..75: mol_type = other DNA
ccacaaagtgcaccatacttttattgaggccgtctgtcttggtatcctggcaaacctgatggtatgtctggcagt

SEQ ID NO: 822603 - DNA, 75 bp, synthetic construct
  source 1..75: mol_type = other DNA
ggaaaaatggatcgcaagtctgggtattaccagccagaagtcgtgtgagtgcttagccgaaacctgggcgtattg

SEQ ID NO: 822604 - DNA, 75 bp, synthetic construct
  source 1..75: mol_type = other DNA
tgattatcgctttttccctgctgtgttttctctccggcacactggctccggtcgttatcggaccctttcagtggt

SEQ ID NO: 822605 - DNA, 75 bp, synthetic construct
  source 1..75: mol_type = other DNA
tgccattaattcaccggaggggttttcactcaaaaaaatatttgatgaaggtggctgctgttatgttatcggctc

SEQ ID NO: 822606 - DNA, 75 bp, synthetic construct
  source 1..75: mol_type = other DNA
gccgttgtcggtgcggtcgttgaaaatgctaaattcaaactggtttaccgggttatggacccggatacagcggaa

SEQ ID NO: 822607 - DNA, 75 bp, synthetic construct
  source 1..75: mol_type = other DNA
tgatcgccgcgcagccagaaatgtagccgcaattcataaaacaggaatgacactgtatgatttattcaacgatga

SEQ ID NO: 822608 - DNA, 75 bp, synthetic construct
  source 1..75: mol_type = other DNA
tgaactggaagaattgttcgttgcaggtttcagccttgcggaaaaaggtcaggaatctgacttttatcgcattga

SEQ ID NO: 822609 - DNA, 75 bp, synthetic construct
  source 1..75: mol_type = other DNA
gatattcacgccggaactggacaaaataaagaaacgccttgttaaaaaaaccacccttgaacgggaattgcgcac

SEQ ID NO: 822610 - DNA, 75 bp, synthetic construct
  source 1..75: mol_type = other DNA
ttaagatgatttatcggcctgagtcactaaaagagggtagggaagatgcggagaaaaatatcaagatcatccatg

SEQ ID NO: 822611 - DNA, 75 bp, synthetic construct
  source 1..75: mol_type = other DNA
aaaaataccgcccacgcgcaacaactcggcattggcaccgtctatcaggaagtcaacctgctacccaatatgtcg

SEQ ID NO: 822612 - DNA, 75 bp, synthetic construct
  source 1..75: mol_type = other DNA
cagcaaatcgtcgccatttgccgggctatcgatctctctgccaaagtgctgatcctcgatgaacccaccgccagt

SEQ ID NO: 822613 - DNA, 75 bp, synthetic construct
  source 1..75: mol_type = other DNA
gcccagcgcatgctactggttcgcctttaccagctggcagaaaagcgcgatcgagtaatagacgtcccccgcccc

SEQ ID NO: 822614 - DNA, 75 bp, synthetic construct
  source 1..75: mol_type = other DNA
gcacaatttgtcagcgataatccatcgacaacaatccgggatgtttataacggtgattacgttcagagtattgcc

SEQ ID NO: 822615 - DNA, 75 bp, synthetic construct
  source 1..75: mol_type = other DNA
gagaaaaatatcaagatcatccatgaggggggaaatacgattctatataataactctccgtactattttgcagtg

SEQ ID NO: 822616 - DNA, 75 bp, synthetic construct
  source 1..75: mol_type = other DNA
attattagcaggtgaaatagacagtctgaaacacagaatgataaagaaaagcaaacttgagagaaatacaagaac

SEQ ID NO: 822617 - DNA, 75 bp, synthetic construct
  source 1..75: mol_type = other DNA
acagggcattgctttttccaatgccttattaccctggtcagaggtatttccgccactctatcaggcgatgatccg

SEQ ID NO: 822618 - DNA, 75 bp, synthetic construct
  source 1..75: mol_type = other DNA
ctggctgctgctgttgttcggcttactgctggcaatagccaataagttgctggtgcgccgcccgacctggctcat

SEQ ID NO: 822619 - DNA, 75 bp, synthetic construct
  source 1..75: mol_type = other DNA
atcggtgctgttattgagaatgccaaattcaaattaatttataaaattcagaaccccgaaacagcagaatgggcg

SEQ ID NO: 822620 - DNA, 75 bp, synthetic construct
  source 1..75: mol_type = other DNA
tactgccgtcattattgtccggctgtgccggaatttccggcggcaataacgtggcaccatcagatacgcctgctc

SEQ ID NO: 822621 - DNA, 75 bp, synthetic construct
  source 1..75: mol_type = other DNA
attttaaaataacaaatcttttaaggataataggaacctggagtctgttgattattctttcatgtagtattggtt

SEQ ID NO: 822622 - DNA, 75 bp, synthetic construct
  source 1..75: mol_type = other DNA
caggtagtgcaggagttgcaccagggggtggtgcaggagattcacccagaaccagtcactcttttgaaccagtca

SEQ ID NO: 822623 - DNA, 75 bp, synthetic construct
  source 1..75: mol_type = other DNA
tgaatgcttttgctgacgccttttccttttttcttttatggctgcaaaacagccctgtcatattatccctgctcg

SEQ ID NO: 822624 - DNA, 75 bp, synthetic construct
  source 1..75: mol_type = other DNA
tgttccagctcgcggaattgcgcgaccgcgtcgcggggaatatccgccccatcgccatctttaaggacgaggtga

SEQ ID NO: 822625 - DNA, 75 bp, synthetic construct
  source 1..75: mol_type = other DNA
tgctgtcgccgatagcaaatgccgtcctggcctttatcgcctttttgcaggcgcatcaactggcgttagcgctgc

SEQ ID NO: 822626 - DNA, 75 bp, synthetic construct
  source 1..75: mol_type = other DNA
gatgaccagccgcaatacataaccataaaagaatttaaaacccaacacgcagcaattatcggtacaacaggttcc

SEQ ID NO: 822627 - DNA, 75 bp, synthetic construct
  source 1..75: mol_type = other DNA
actattcaggggttgagctacttttttaagtcactcgacaacaacatactgttcagcgttccgctatggattatg

SEQ ID NO: 822628 - DNA, 75 bp, synthetic construct
  source 1..75: mol_type = other DNA
agccctgtcatattatccctgctcgcaggtattacattaccttttatattccatcttccccgcgaggaaagaaag

SEQ ID NO: 822629 - DNA, 75 bp, synthetic construct
  source 1..75: mol_type = other DNA
accgccatgtatgcgctgaattacaaccggctgcataaaaacccgtatcccttagatgcaccaataagcaaagat

SEQ ID NO: 822630 - DNA, 75 bp, synthetic construct
  source 1..75: mol_type = other DNA
gtaaatccagtattcgctttaaatacgccgatgccattgggcatccggccacgtctcttatcggtggcagtatcg

SEQ ID NO: 822631 - DNA, 75 bp, synthetic construct
  source 1..75: mol_type = other DNA
aagcccgggatattcagctggcaatggaattgatcactctcggcgctcgtttgcagatgctggaaagtgaaacac

SEQ ID NO: 822632 - DNA, 75 bp, synthetic construct
  source 1..75: mol_type = other DNA
atgagtgaaaaaagcattgttcaggaagcgcgggatattgaattgatcaccctgggcgctcgtttgcagatgctg

SEQ ID NO: 822633 - DNA, 75 bp, synthetic construct
  source 1..75: mol_type = other DNA
catcaaaatgcgtcaatgggggcaattgttggcgtctattctggtagcttcctgtatggcgcattgaccgccgcg

SEQ ID NO: 822634 - DNA, 75 bp, synthetic construct
  source 1..75: mol_type = other DNA
aggcattggtttcattgcgctaaccatgaccatcaaactgatgctggaaaaaatgcaaccggcagtcaccggatt

SEQ ID NO: 822635 - DNA, 75 bp, synthetic construct
  source 1..75: mol_type = other DNA
gttccgctttccaacgtagcacgcaaaaaactggtcaaacgtttcccggatcgtcaaatcactgttggtatggac

SEQ ID NO: 822636 - DNA, 75 bp, synthetic construct
  source 1..75: mol_type = other DNA
tgccgtattcgctcaaataactgttacggtcaggtatcccgtcgcgaccaggagagtgcgctggcgtgctgggga

SEQ ID NO: 822637 - DNA, 75 bp, synthetic construct
  source 1..75: mol_type = other DNA
cgcatacgtttaaataactgctatggacaggttattcgccgtgaccaggaagcggcactggtgtgctggggtatc

SEQ ID NO: 822638 - DNA, 75 bp, synthetic construct
  source 1..75: mol_type = other DNA
taatcaccggttatcacccaaccggccagcaatgccttcgccgtaaaccagactcaaccacaaccggcacaagtg

SEQ ID NO: 822639 - DNA, 75 bp, synthetic construct
  source 1..75: mol_type = other DNA
gcatattcaaccaatttgtgaccgagttagcacgagctgaaaatgatagagaaaaattcgaacagcttattagtg

SEQ ID NO: 822640 - DNA, 75 bp, synthetic construct
  source 1..75: mol_type = other DNA
ctaccgagggaaaaatcatcatcaacttgtttgctcccaatcttcccggaagtaccaaagaagatgatctcattc

SEQ ID NO: 822641 - DNA, 75 bp, synthetic construct
  source 1..75: mol_type = other DNA
atgagaaaatcagtggtgacattagcttgtttgttttttattagtgcatgtaaaccatcagataattatgttatt

SEQ ID NO: 822642 - DNA, 75 bp, synthetic construct
  source 1..75: mol_type = other DNA
gtttggcattctcggcgatccaactatggttggttttattattggtattttgttgggcttttgtggttatggctg

SEQ ID NO: 822643 - DNA, 75 bp, synthetic construct
  source 1..75: mol_type = other DNA
tgcgagtcacgttcgcgctggactgctgtgaccgtgaggcactgcactgggcggtcactacgggcggcttcaaca

SEQ ID NO: 822644 - DNA, 75 bp, synthetic construct
  source 1..75: mol_type = other DNA
aggaagcgctggacgcggcggaagatctggttgcaaaagcagaggaagccgagaaggttgcagaagatgcactga

SEQ ID NO: 822645 - DNA, 75 bp, synthetic construct
  source 1..75: mol_type = other DNA
agtcggagcccgtcatactgtaaaggcacaggccggggaacagtatggactggttgatgaggtgacaggtctggt

SEQ ID NO: 822646 - DNA, 75 bp, synthetic construct
  source 1..75: mol_type = other DNA
gcgaacaaaagcggataaaaaacgccaataaatataaatcacaatctgaggcgcaaaaacaaaaacatgctgttc

SEQ ID NO: 822647 - DNA, 75 bp, synthetic construct
  source 1..75: mol_type = other DNA
gacgcctaatataaattgtaaggtaattctttatgtaaattatgatgaaaaagaaaattattatctttttgaggt

SEQ ID NO: 822648 - DNA, 75 bp, synthetic construct
  source 1..75: mol_type = other DNA
ttggtgtgccggtgattgccactcacagcgacgcggcgtgggaagtgctgcaaaagtctggcggtaaaaccgtca

SEQ ID NO: 822649 - DNA, 75 bp, synthetic construct
  source 1..75: mol_type = other DNA
tcagtggagaaaaaacagtactggcagccggagcccgtcataccgtaaaggcacaggccggggaacagtatggac

SEQ ID NO: 822650 - DNA, 75 bp, synthetic construct
  source 1..75: mol_type = other DNA
ggtcacggaaaataccggtacgcgcaatcacaaatggcagcggctgaccccccacatgacacagtcatgtgccgt

SEQ ID NO: 822651 - DNA, 75 bp, synthetic construct
  source 1..75: mol_type = other DNA
gtgcggccacaccgctgtttccttattacctgagcacgctcgacagtgtgccgtggcggctcggtgtgccggaaa

SEQ ID NO: 822652 - DNA, 75 bp, synthetic construct
  source 1..75: mol_type = other DNA
caaggcagcggaagcgaagaaagcagaagcagacgatgctgccgcgcaggctgataaggacggtaacggcctgat

SEQ ID NO: 822653 - DNA, 75 bp, synthetic construct
  source 1..75: mol_type = other DNA
ttaaccacagatgctgttgatgacattataaatgagacaaaacatcatatagatatttattacaatggattagga

SEQ ID NO: 822654 - DNA, 75 bp, synthetic construct
  source 1..75: mol_type = other DNA
gccaataactcctttcaggtttttcatgtaaagttttttattgactatgcactaactaatgcaatcaaattattt

SEQ ID NO: 822655 - DNA, 75 bp, synthetic construct
  source 1..75: mol_type = other DNA
aaccggcacaagtggctgttccgcatcaggtcacacagcctgcaccactggcaacgcctgccggtaatgagattc

SEQ ID NO: 822656 - DNA, 75 bp, synthetic construct
  source 1..75: mol_type = other DNA
cgcaggggagcgtgtgaggcgattcgctggtggattaaggacggtggcagagactgccgtattcgttcaaacaac

SEQ ID NO: 822657 - DNA, 75 bp, synthetic construct
  source 1..75: mol_type = other DNA
caggtcaacgccattgagcgtgataaggcgctggcatgggtggagcgcaatattaaagtaccactgaccgaacca

SEQ ID NO: 822658 - DNA, 75 bp, synthetic construct
  source 1..75: mol_type = other DNA
cgggtcgtgcggtgactgcgcatcacaccgtgctggtgtcaaatatcatcggcgtggaacgtaacgaatacacgg

SEQ ID NO: 822659 - DNA, 75 bp, synthetic construct
  source 1..75: mol_type = other DNA
cgggataaggcgctggcatgggtggagaaaaacatcagagtgccactgactgaaccccagaaagcgggtattgcg

SEQ ID NO: 822660 - DNA, 75 bp, synthetic construct
  source 1..75: mol_type = other DNA
atctgccggggagcaacgatggtggatggtaaacctgttattcagggcatgaaactgacgaaggaaaaatgtggc

SEQ ID NO: 822661 - DNA, 75 bp, synthetic construct
  source 1..75: mol_type = other DNA
atacttgaccagtttctggacgaaaaagaaggcaaccacacaatggcataccgcgatggttctggcatatggacc

SEQ ID NO: 822662 - DNA, 75 bp, synthetic construct
  source 1..75: mol_type = other DNA
atctgtcgcggtgccacgatagtagatggtaaacctgttattccgggcatgacactgacgaaggaaaaatgcgat

SEQ ID NO: 822663 - DNA, 75 bp, synthetic construct
  source 1..75: mol_type = other DNA
tgtcggctgtcgttctggcgctgattgccgcaggggcgcctgcgcctgatattctcgaccagtttctggatgaaa

SEQ ID NO: 822664 - DNA, 75 bp, synthetic construct
  source 1..75: mol_type = other DNA
gaagctgtcgaaggaaaaatgcgaccgggttaacgccattgagcgtgataaggcgctttgtagtggtcaagtaat

SEQ ID NO: 822665 - DNA, 75 bp, synthetic construct
  source 1..75: mol_type = other DNA
cagatggcgaatattcgcgatatcgctaccggcgttcgggaatctgcacgcttctatgttgagctacacaagctc

SEQ ID NO: 822666 - DNA, 75 bp, synthetic construct
  source 1..75: mol_type = other DNA
atgctgaactgcaacaacagttccttgaagagttcgaggcaggtttgtacggttatacttatcttgaagatgagt

SEQ ID NO: 822667 - DNA, 75 bp, synthetic construct
  source 1..75: mol_type = other DNA
tgcaaaagcagctggatccgcaaaaccgtgctcatcgtccgattatcgacgagctgcaggaacgtatggcggaca

SEQ ID NO: 822668 - DNA, 75 bp, synthetic construct
  source 1..75: mol_type = other DNA
cgtcgacgccaccgcagggctggggcgcgatgcctttgtactggcttcggtcggctgccgcgtgcggatgctgga

SEQ ID NO: 822669 - DNA, 75 bp, synthetic construct
  source 1..75: mol_type = other DNA
agagctggaacgtgaaaatcgtgaactgcgccgcagcaacaatatccttcgccaggcttccgcttattttgcgaa

SEQ ID NO: 822670 - DNA, 75 bp, synthetic construct
  source 1..75: mol_type = other DNA
atgattaaaaaatattggtttctaatggtgtactccgtcacagccttttctgtctgggcacaggatacccctctg

SEQ ID NO: 822671 - DNA, 75 bp, synthetic construct
  source 1..75: mol_type = other DNA
tataacattggccccggtaagtgtttcccgtcgacgttttataaacgaattaatgcaggcgatcgcagaggagcg

SEQ ID NO: 822672 - DNA, 75 bp, synthetic construct
  source 1..75: mol_type = other DNA
atcctgcggcctataacgcccgccttcaagaagtgtgcagtaaaaacggctacctgagcacaaatgcagcacaat

SEQ ID NO: 822673 - DNA, 75 bp, synthetic construct
  source 1..75: mol_type = other DNA
gtcaacgaaaatcaacacccggtcattccacagaacgaaccgcaggtgatcccccaaccacacaacaacgccccc

SEQ ID NO: 822674 - DNA, 75 bp, synthetic construct
  source 1..75: mol_type = other DNA
tttcctctgtaaatgatgttctccgccgtttgcctggtgtggcaattgcacaaaatggaggagaaggtcagctct

SEQ ID NO: 822675 - DNA, 75 bp, synthetic construct
  source 1..75: mol_type = other DNA
tgctggcgaccaaacgcgtggtggtaaagcgcccggactacgcgccaccgctagcgaatgtcgccacgccaaacg

SEQ ID NO: 822676 - DNA, 75 bp, synthetic construct
  source 1..75: mol_type = other DNA
ctggcgaatgtcgccacgccaaacgcggttgtcaccaaagggcatcgttttgatatttatgctggtacgccagtg

SEQ ID NO: 822677 - DNA, 75 bp, synthetic construct
  source 1..75: mol_type = other DNA
ctggcgaatgtcgccacgccaaacgcggtagtgaccaaagggcatcgctttgatatttatgccggaacgccggtg

SEQ ID NO: 822678 - DNA, 75 bp, synthetic construct
  source 1..75: mol_type = other DNA
cggattaatgcaggtgatcgaaaaggtgcctgcgaagcgattcgctggtggattaaggacggtggcagagactgc

SEQ ID NO: 822679 - DNA, 75 bp, synthetic construct
  source 1..75: mol_type = other DNA
atctgtcgaggggccacgatggtggatggtaaacctgttattcctggcatgaaactgacgaaggaaaaatgcgat

SEQ ID NO: 822680 - DNA, 75 bp, synthetic construct
  source 1..75: mol_type = other DNA
tggacatatgctggcggtaagcaatggaaaggtctcatgactcgtcgtgagattgagcgtgaaatctgtttgtgg

SEQ ID NO: 822681 - DNA, 75 bp, synthetic construct
  source 1..75: mol_type = other DNA
gaaaaccggcgacctgctcttccaaatacttcaagattgacgttcttgatatggaagtaagtgcagggccaggcg

SEQ ID NO: 822682 - DNA, 75 bp, synthetic construct
  source 1..75: mol_type = other DNA
gacccgatcgagaaagacgagatgaaccgggtgttcatcttcggtaaggttattgggagcatgccgcagacgtac

SEQ ID NO: 822683 - DNA, 75 bp, synthetic construct
  source 1..75: mol_type = other DNA
cgaaaagtcttgatacttcaggtcttaagccaagccgcccggcaccgccgccaccgacaagtggacaggcatccg

SEQ ID NO: 822684 - DNA, 75 bp, synthetic construct
  source 1..75: mol_type = other DNA
taagccagtccgtccggcaccgccgccaccaacaagcggccagacatctgggtctgctgggctaccgcccattgc

SEQ ID NO: 822685 - DNA, 75 bp, synthetic construct
  source 1..75: mol_type = other DNA
tgaaggataagctgctggttatctctgataacaagagctactcaccgtgggacccgatcgagaaagacgagatga

SEQ ID NO: 822686 - DNA, 75 bp, synthetic construct
  source 1..75: mol_type = other DNA
cgatcgagaaagacgagatgaaccgggtgtttatcttcgggaaagttattgggagcatgccgcagacatacagaa

SEQ ID NO: 822687 - DNA, 75 bp, synthetic construct
  source 1..75: mol_type = other DNA
caggttatgttgaggatggatatgatcaacgtaataccggcatctatctgaccgggctgcaacaagtcggcgatt

SEQ ID NO: 822688 - DNA, 75 bp, synthetic construct
  source 1..75: mol_type = other DNA
gatggcgtacgcctgaatctggcaggggtgagtggttcagccgatcttagtcaattccccattgcacttgttcag

SEQ ID NO: 822689 - DNA, 75 bp, synthetic construct
  source 1..75: mol_type = other DNA
gtcgacctcggtcaatgatgtgctgcgccgtcttccgggcgtcgatatcacccaaaacggcggttcaggtcagct

SEQ ID NO: 822690 - DNA, 75 bp, synthetic construct
  source 1..75: mol_type = other DNA
ccttaagccaagccgcccggcaccgccgccgccgccgccgacaagcgggttggtatctgggtcatcccggtcttt

SEQ ID NO: 822691 - DNA, 75 bp, synthetic construct
  source 1..75: mol_type = other DNA
ggatgactggtggcgcaacggccagaacctgtacctggacaatatggaggccactggcttttgccgtgtgtccct

SEQ ID NO: 822692 - DNA, 75 bp, synthetic construct
  source 1..75: mol_type = other DNA
tcttaagccaagccgcccggcaccgccgccaccgacaagtggacaggcatccgaggcatcccgccctttaccgcc

SEQ ID NO: 822693 - DNA, 75 bp, synthetic construct
  source 1..75: mol_type = other DNA
atgtcaatgcacaatggacccatttactggaacgttatttttatgaaaagcgacttaaacccgatacggaacaaa

SEQ ID NO: 822694 - DNA, 75 bp, synthetic construct
  source 1..75: mol_type = other DNA
tcggtacggtctgcgcattatggctgtataacaattttgtcggctggttgaccttcctttcggcagctattcctc

SEQ ID NO: 822695 - DNA, 75 bp, synthetic construct
  source 1..75: mol_type = other DNA
tgttctttctcacgttagaagcatatttcggggtgttttcctttaaaagaaaaggaaaaataaatggcaaaaaga

SEQ ID NO: 822696 - DNA, 75 bp, synthetic construct
  source 1..75: mol_type = other DNA
cctctttggcgcggcaaccatcgccctcagctatatcccaatgatgagctgggtggctgtctcgccggtgatcct

SEQ ID NO: 822697 - DNA, 75 bp, synthetic construct
  source 1..75: mol_type = other DNA
aggtgcaaaatgaaaaattaaaaaaagtacaggaagagaaaaaagatggcactatccaaaaaggattgtacaggg

SEQ ID NO: 822698 - DNA, 75 bp, synthetic construct
  source 1..75: mol_type = other DNA
tgttttttatgctcgtagaaacatacttcggggtgttttcctttaaaagaaaaggaagattaaataatggcaaaa

SEQ ID NO: 822699 - DNA, 75 bp, synthetic construct
  source 1..75: mol_type = other DNA
agggttttctcatgcaaaccaaatttctcaagatgggtaacgatatggtaatagattgctccatcaaaggagatg

SEQ ID NO: 822700 - DNA, 75 bp, synthetic construct
  source 1..75: mol_type = other DNA
ctatgaactatcgaaagcgtctgagactgtaagctttaagccaacccgtcaggcacccccgccaccaacaagtgg

SEQ ID NO: 822701 - DNA, 75 bp, synthetic construct
  source 1..75: mol_type = other DNA
ttaagctatatcccgatgatgagctgggtggctgtctcgccggtgatccttatcgatgcaggcagcttaacaact

SEQ ID NO: 822702 - DNA, 75 bp, synthetic construct
  source 1..75: mol_type = other DNA
tgttctttctcacgttagaaacatatttcggggtgttttcctttaaaagaaaaggaaaagtaaatggcaaaaaga

SEQ ID NO: 822703 - DNA, 75 bp, synthetic construct
  source 1..75: mol_type = other DNA
atgatagtagctatgtattggttattgttctttctcacgttagaaacatacttcggggtgttttcctttaaaaga

SEQ ID NO: 822704 - DNA, 75 bp, synthetic construct
  source 1..75: mol_type = other DNA
gctttccacgatacgtttttacgtgtctgcggcgactggctggcacaaaccccatgcccggtactggcttgcggc

SEQ ID NO: 822705 - DNA, 75 bp, synthetic construct
  source 1..75: mol_type = other DNA
atgtcagaaatcacatccctggtcactgctgaagcagtgaaggaagtcctgcgctctgaagaagtcctgagcgca

SEQ ID NO: 822706 - DNA, 75 bp, synthetic construct
  source 1..75: mol_type = other DNA
cccttgcggggctaatgcctttagctccgcaagcaagtgtcgcaaaatcaaaggcgacaacttcagacgaaagcg

SEQ ID NO: 822707 - DNA, 75 bp, synthetic construct
  source 1..75: mol_type = other DNA
tcgatgggcgtaaggctgagaacatccggatcatcaacgtccggggtgacagcatgtccggcacgattgagccgg

SEQ ID NO: 822708 - DNA, 75 bp, synthetic construct
  source 1..75: mol_type = other DNA
ggtgggggccggagctggatgggggggctggcatcattatgccggaaaaggaaaaccgactgccgttgcgcggac

SEQ ID NO: 822709 - DNA, 75 bp, synthetic construct
  source 1..75: mol_type = other DNA
agcaaaagcgtgtttgtgacgttgccggaaaccattgtcacgctgcatgacaacaacggcgcggaccattatttg

SEQ ID NO: 822710 - DNA, 75 bp, synthetic construct
  source 1..75: mol_type = other DNA
acgattgttactgccggatgcgaacaggcgctgaaaggtggttcaaaggatgtattgatcgagcgggcaacgcag

SEQ ID NO: 822711 - DNA, 75 bp, synthetic construct
  source 1..75: mol_type = other DNA
agctgcagctgaaaaagccgctgcagcaaaagcggccgcagaggcagatgatattttcggtgagctaagctctgg

SEQ ID NO: 822712 - DNA, 75 bp, synthetic construct
  source 1..75: mol_type = other DNA
aacttgcgaagatcccgaaaccaccaagccaggcagtatatgaagtgttcaaaaacgcgccattggacttcaaac

SEQ ID NO: 822713 - DNA, 75 bp, synthetic construct
  source 1..75: mol_type = other DNA
tgccaccaaaggaatgactaccgacacggaaagttactacgctgtttacaattcaatcgtctttggcgctgagat

SEQ ID NO: 822714 - DNA, 75 bp, synthetic construct
  source 1..75: mol_type = other DNA
tgttgctctgcgctttctcatccgtagctagtagtgcggtctcgggcgaaattcagccatatcctgattacctgt

SEQ ID NO: 822715 - DNA, 75 bp, synthetic construct
  source 1..75: mol_type = other DNA
ggttctctaatgggtaaaaacctcaaaaagggtaagactatcaccgaagataaaactgtgattgatagttgcggt

SEQ ID NO: 822716 - DNA, 75 bp, synthetic construct
  source 1..75: mol_type = other DNA
gcaggaaggcggaaaatatccgcatcattaacgtgcgtggtgacagcatgtcaggaacgatcgaaccaggtgatc

SEQ ID NO: 822717 - DNA, 75 bp, synthetic construct
  source 1..75: mol_type = other DNA
attcatatcagcagttcaagaagtatcgggagcagttggccgaagccacggaagaaattaataggctcagggctg

SEQ ID NO: 822718 - DNA, 75 bp, synthetic construct
  source 1..75: mol_type = other DNA
ttgcagtctcctcattggtattcagttcggcgtcgtttgccgctgatcttgaagacaatatggaaaccctcaacg

SEQ ID NO: 822719 - DNA, 75 bp, synthetic construct
  source 1..75: mol_type = other DNA
gggatttgccaacgaagaactacgtcgtgagaaagcagcaattgatgtaatgagcgataagtcctcattctgcac

SEQ ID NO: 822720 - DNA, 75 bp, synthetic construct
  source 1..75: mol_type = other DNA
aaagatcacctggctgcctatgaaaaatcgaaaagccttgaggcttcaggtcttaagccaagccgcccggcccca

SEQ ID NO: 822721 - DNA, 75 bp, synthetic construct
  source 1..75: mol_type = other DNA
cgccaccgacaagtggacaggcatccgggtctgccgggctaccgcccattgcacaggcattaaaagatcatttag

SEQ ID NO: 822722 - DNA, 75 bp, synthetic construct
  source 1..75: mol_type = other DNA
gagtcgtatgagtcagatggcgacttcatttacgcctactcgcccggcaccaccgccaccgacaagtggacaggc

SEQ ID NO: 822723 - DNA, 75 bp, synthetic construct
  source 1..75: mol_type = other DNA
gcacggggtgacggattgttacacactgttccgggacgcttaccatctggcggggattgagatgccggattttca

SEQ ID NO: 822724 - DNA, 75 bp, synthetic construct
  source 1..75: mol_type = other DNA
gcggcaacgcgcgcggctcaacaaaaattgttgaaatagctaatgcattgggtgttcgaacagagtggctctcat

SEQ ID NO: 822725 - DNA, 75 bp, synthetic construct
  source 1..75: mol_type = other DNA
aaccgtgagtttgtagaagttctacgctcggttgagtactcgtttgacgatgctcgtcacatgttcgatggcagg

SEQ ID NO: 822726 - DNA, 75 bp, synthetic construct
  source 1..75: mol_type = other DNA
atgaacatgaaagcgatatcttttattaaccatgagcgctgtattaatccgacacgactcactgaagctcgagag

SEQ ID NO: 822727 - DNA, 75 bp, synthetic construct
  source 1..75: mol_type = other DNA
gacccgatcgagaaagacgagatgaaccgggtgtttatcttcgggaaagttattgggagcatgccgcagacatac

SEQ ID NO: 822728 - DNA, 75 bp, synthetic construct
  source 1..75: mol_type = other DNA
cgatcgagaaagacgagatgaaccgggtgttcattttcgggaaggttattggcagtatgccgcagacgtatagga

SEQ ID NO: 822729 - DNA, 75 bp, synthetic construct
  source 1..75: mol_type = other DNA
taaaagctgtatgctggcatgtccgtttggcgcgatggaggtcgtttcatcgcgtgcaaaggcgagggcgattaa

SEQ ID NO: 822730 - DNA, 75 bp, synthetic construct
  source 1..75: mol_type = other DNA
atctgcttattaccttggtgtgcatccggagtttcgtgggcgtggcattgctaacgcgctgcttaaccggctgga

SEQ ID NO: 822731 - DNA, 75 bp, synthetic construct
  source 1..75: mol_type = other DNA
aagatttcgaagaggtcatcaccctttgggagcgttgcgacttgctgcgtccgtggaacgatccggaaatggaca

SEQ ID NO: 822732 - DNA, 75 bp, synthetic construct
  source 1..75: mol_type = other DNA
gcgctgattgccgcaggtgcgtctgcgcctgaaatcctcgaccagtttctggatgaaaaggaaggtaaccacacc

SEQ ID NO: 822733 - DNA, 75 bp, synthetic construct
  source 1..75: mol_type = other DNA
gtgtttcccgtcgacgttttatagacgaattaatgcaggtgatcgaaaaggtgcctgcgaagcgattcgctggtg

SEQ ID NO: 822734 - DNA, 75 bp, synthetic construct
  source 1..75: mol_type = other DNA
gcgcagctatgctatccctgatcgccgctggtgcttcagctcctgtgctgtttgaccagttcatcagtgagaagg

SEQ ID NO: 822735 - DNA, 75 bp, synthetic construct
  source 1..75: mol_type = other DNA
agaagagacgctgaaagaagccacggccaaaggagatgtcaaaattactggcaatgaggaaaaactcaacgagct

SEQ ID NO: 822736 - DNA, 75 bp, synthetic construct
  source 1..75: mol_type = other DNA
atactgccagcccagacaccgtgcgtgcgatgacgccggagatgttctttgattatcttgccgtccatattaatg

SEQ ID NO: 822737 - DNA, 75 bp, synthetic construct
  source 1..75: mol_type = other DNA
tcagcaggaacagtcacgttgattgctcctactaactacatcaccaaaaccggacaaatagaaactattgacggg

SEQ ID NO: 822738 - DNA, 75 bp, synthetic construct
  source 1..75: mol_type = other DNA
tttgaagtgttaatcattttgacactagggtcggcggctggggatgtggcattttatgacgatgtgccgatgatc

SEQ ID NO: 822739 - DNA, 75 bp, synthetic construct
  source 1..75: mol_type = other DNA
cgcagaagatgtcacgcacaccctccacaacacctattcgctgcgtggtgccaaaattcgtcaacctctcccgtg

SEQ ID NO: 822740 - DNA, 75 bp, synthetic construct
  source 1..75: mol_type = other DNA
gtacggtaatttgttgaaacctgatgctaaaggtcaggtcggcgctgggctgggaacaacgacctcagccggaac

SEQ ID NO: 822741 - DNA, 75 bp, synthetic construct
  source 1..75: mol_type = other DNA
acgggaccggcttgtgttgaagcctgcccgacacaggcgttgcaatgtatggatgtcgagaaaatccagcgtcaa

SEQ ID NO: 822742 - DNA, 75 bp, synthetic construct
  source 1..75: mol_type = other DNA
aaatgcgaccgggttaacgccattgagcgtgataaggcgctggcatgggtggagaaaaacatcaaagtgccactg

SEQ ID NO: 822743 - DNA, 75 bp, synthetic construct
  source 1..75: mol_type = other DNA
ctggtcgtggcgaactgcacctgtctgttcttatcgaaaacatgcgtcgtgaaggtttcgagctggcggtatccc

SEQ ID NO: 822744 - DNA, 75 bp, synthetic construct
  source 1..75: mol_type = other DNA
ggacggtggcagagactgccgtattcgttcaaataactgctatggacaggtctcacggcgtgaccaggtgaaccg

SEQ ID NO: 822745 - DNA, 75 bp, synthetic construct
  source 1..75: mol_type = other DNA
cagaaagccggtatcgcgtcattctgtccctataacattggccctggtaagtgtttcccgtcgacgttttataag

SEQ ID NO: 822746 - DNA, 75 bp, synthetic construct
  source 1..75: mol_type = other DNA
atctgtcgcggtgccacccgggtggatggtaagcctgtcctcccgggcatgaagttgtcgaaggaaaaatgcgac

SEQ ID NO: 822747 - DNA, 75 bp, synthetic construct
  source 1..75: mol_type = other DNA
cctataaagtcctggatgactacttcaccggagaacttcagcatcgcaacagcttaagtgcgcagctcaatatga

SEQ ID NO: 822748 - DNA, 75 bp, synthetic construct
  source 1..75: mol_type = other DNA
atggtaagcccgtcataccgggaatgaggctgtcgaaggaaaaatgcgaccaggttaacgctattgaacgtgata

SEQ ID NO: 822749 - DNA, 75 bp, synthetic construct
  source 1..75: mol_type = other DNA
cggcttaatgccggtgatcgtaaaggtgcctgcgaggcgattcgctggtggattaaggatggtggcaaagactgc

SEQ ID NO: 822750 - DNA, 75 bp, synthetic construct
  source 1..75: mol_type = other DNA
ccgtgatggtgcaggaatatggaccatctgccgtggtgccacaatggtggacggtaagccagtcgtccccggcat

SEQ ID NO: 822751 - DNA, 75 bp, synthetic construct
  source 1..75: mol_type = other DNA
ggcggtacgactgccgggccgtgtgaccacctcccgcctgctgcataccgccaccggggccgtggcacacgttac

SEQ ID NO: 822752 - DNA, 75 bp, synthetic construct
  source 1..75: mol_type = other DNA
tggaaggtgtcagctacataccatacaaagatatcattggtgtatggactgtatgtcacggacacaccggaaaag

SEQ ID NO: 822753 - DNA, 75 bp, synthetic construct
  source 1..75: mol_type = other DNA
ggcgatatcaaaggcgcatgtgatcagttactagactggccccctgaatctccagacaaccaatatcacttattt

SEQ ID NO: 822754 - DNA, 75 bp, synthetic construct
  source 1..75: mol_type = other DNA
atgcagcttaaccatattgctaaaagtctgctagtcatgggattattcacaacaagttcacttcctctcatcgca

SEQ ID NO: 822755 - DNA, 75 bp, synthetic construct
  source 1..75: mol_type = other DNA
atgaagaaaaaatacgaactggttgttaaagggataaataattacccggataagattactgttactgtggtactg

SEQ ID NO: 822756 - DNA, 75 bp, synthetic construct
  source 1..75: mol_type = other DNA
gatcaactttgttaggtcacgatcctgccgatccgctgaaaaagcccgttgaagcggaaaagattaaagatttct

SEQ ID NO: 822757 - DNA, 75 bp, synthetic construct
  source 1..75: mol_type = other DNA
gcccgtgaggcgctgttctggcatgttcagcaagcactaagcgccaataacagcaaagatatcggcctcggtttt

SEQ ID NO: 822758 - DNA, 75 bp, synthetic construct
  source 1..75: mol_type = other DNA
cggttgcctgacgacgtgacgagtaaagtgaaagagctgcagcgggtacatcagcatcgctttcatgccgtggcg

SEQ ID NO: 822759 - DNA, 75 bp, synthetic construct
  source 1..75: mol_type = other DNA
tgccgccagaactggcgacactagggataacggaactggagtatgagttttaccgtcggctggtggaaaaacagt

SEQ ID NO: 822760 - DNA, 75 bp, synthetic construct
  source 1..75: mol_type = other DNA
atgctaacactggatacgcttaatgtaatgctggccgtcagcgaagagggattgatcgaagagatgatcatcacg

SEQ ID NO: 822761 - DNA, 75 bp, synthetic construct
  source 1..75: mol_type = other DNA
gttgccggttccaccaatatcagcaacatcaccgacaccgtttaccactggcccctgagccagagcatcccgttg

SEQ ID NO: 822762 - DNA, 75 bp, synthetic construct
  source 1..75: mol_type = other DNA
aggcgctggtgttatttgccgttgcgccgctgctctccggtattacccgtgtggcgcgtgcccgtctgcataacc

SEQ ID NO: 822763 - DNA, 75 bp, synthetic construct
  source 1..75: mol_type = other DNA
ttgccatcgtcaaactggtggtcggcgtcctggttatcgcgctgttcgaaaacagcatggcccgtctgcgtcttg

SEQ ID NO: 822764 - DNA, 75 bp, synthetic construct
  source 1..75: mol_type = other DNA
gtggatgcgcgctcggttgtcgaccaaataaacaaaacgtttggcgaactgaaaggcaaacgtgaaacgccagct

SEQ ID NO: 822765 - DNA, 75 bp, synthetic construct
  source 1..75: mol_type = other DNA
atcgcgccggagcaatatcagaaactgcggcaggatttccttaatagcctgacggtagagatgttaaatcaggat

SEQ ID NO: 822766 - DNA, 75 bp, synthetic construct
  source 1..75: mol_type = other DNA
ggtgaaaattggtaccaggacgatgaagggatcgttattcgtgaaatatcgaagttttcccggctgtttgatgtc

SEQ ID NO: 822767 - DNA, 75 bp, synthetic construct
  source 1..75: mol_type = other DNA
aaatcaataccgcgtaacgatgcgcagatggaagccttccgcaccatggtgcgcgaaccggcaactgttcctgag

SEQ ID NO: 822768 - DNA, 75 bp, synthetic construct
  source 1..75: mol_type = other DNA
tgatataccggaaacaacgcgcggcgctctttactcgttcgtttacaacgtgggcgctggcaatttcagaacatc

SEQ ID NO: 822769 - DNA, 75 bp, synthetic construct
  source 1..75: mol_type = other DNA
aattaacggagaaagcgtcaatctctggcactggcgcaatgctgtttataccgccacgcgcgccctgattctgga

SEQ ID NO: 822770 - DNA, 75 bp, synthetic construct
  source 1..75: mol_type = other DNA
ccatcacaaaaatgcggtagtagaaactatgagcatatgatttgccattttttgagggttgaatgtaaacaagcc

SEQ ID NO: 822771 - DNA, 75 bp, synthetic construct
  source 1..75: mol_type = other DNA
gtccctataacattggccccggtaagtgtttcccgtcgacgttttataagcggctgaatgccggtgatcgtaaga

SEQ ID NO: 822772 - DNA, 75 bp, synthetic construct
  source 1..75: mol_type = other DNA
acgggaccagcctgtgttgaagcctgcccgactaaggcgttgctgtgcgtggatgtcgagaaaatgcagcggcat

SEQ ID NO: 822773 - DNA, 75 bp, synthetic construct
  source 1..75: mol_type = other DNA
atgaaactctgcgtgctgatgttgccgctggtcgtaagcgcctgcgctatcaacgccaactgtccaggctccttg

SEQ ID NO: 822774 - DNA, 75 bp, synthetic construct
  source 1..75: mol_type = other DNA
aggcaccacggcagcggcactgggttttgcacccagcgtagcgctcgcggaaacccggcagtataaactgctgcg

SEQ ID NO: 822775 - DNA, 75 bp, synthetic construct
  source 1..75: mol_type = other DNA
gctatatcgctgaattgaaaaaaagtaccccaacaaaaaatgaggtgcttgcagcagacgaaatgaaagaagcta

SEQ ID NO: 822776 - DNA, 75 bp, synthetic construct
  source 1..75: mol_type = other DNA
ccgtgattttagaggcgcagaatgtatggataacctacaaaggaaatctaccgggaagaattactggttctctga

SEQ ID NO: 822777 - DNA, 75 bp, synthetic construct
  source 1..75: mol_type = other DNA
ccctctccctccgtgcaggagaaaccagccagtactgacaataccaacgtcaacggcgaagacatgacggagatt

SEQ ID NO: 822778 - DNA, 75 bp, synthetic construct
  source 1..75: mol_type = other DNA
gatgccactatcactctgtctcgtgatgtattgaacaaaattgtactgaaagaagagacgctgaaagaagccacg

SEQ ID NO: 822779 - DNA, 75 bp, synthetic construct
  source 1..75: mol_type = other DNA
tgcgtgagattgtagctcaccctaactatataattctttaccgtgtagccactttaagcattgagatcgtgagtg

SEQ ID NO: 822780 - DNA, 75 bp, synthetic construct
  source 1..75: mol_type = other DNA
gaaccccagaaagcggggatcgcgtcattctgtccgtacaacattggtcccggtaagtgtttcccgtcgacgttt

SEQ ID NO: 822781 - DNA, 75 bp, synthetic construct
  source 1..75: mol_type = other DNA
tttgcctgtggggtgagaatccgcaaaatctcaacgatggatttgggccacttaaccctggaacgcctgcaacaa

SEQ ID NO: 822782 - DNA, 75 bp, synthetic construct
  source 1..75: mol_type = other DNA
tgggtgctggcaatttcagaacatcgacgcttcttcgcaaaataaaccagggtgatattaaaggcgcatgtgatc

SEQ ID NO: 822783 - DNA, 75 bp, synthetic construct
  source 1..75: mol_type = other DNA
gattaaggacggtggcagagactgccgtatccgctcaaataattgctacggtcaggtatcccgtcgcgaccagga

SEQ ID NO: 822784 - DNA, 75 bp, synthetic construct
  source 1..75: mol_type = other DNA
cggattaatgctggtgatcgcaggggagcatgcgaggcgattcgctggtggattaaggacggtggcagagactgc

SEQ ID NO: 822785 - DNA, 75 bp, synthetic construct
  source 1..75: mol_type = other DNA
attaaggacggtggcagagactgccgtattcgttcaaacaactgttacggtcaggtatcccgtcgtgaccaggag

SEQ ID NO: 822786 - DNA, 75 bp, synthetic construct
  source 1..75: mol_type = other DNA
tgattggcgtgatcgccggcggcggtggcgccatagccattgcctctgcgctcatcactggcccaaccggtaacg

SEQ ID NO: 822787 - DNA, 75 bp, synthetic construct
  source 1..75: mol_type = other DNA
atagcgtaatagcggcgataagtggcggggctattgctatagcatctgtgttaatcactggcccaagtggtaacg

SEQ ID NO: 822788 - DNA, 75 bp, synthetic construct
  source 1..75: mol_type = other DNA
cgcggcgctctttactcgttcgtttacaacgtgggcgctggcaatttcagaacatcgacgcttcttcgcaaaata

SEQ ID NO: 822789 - DNA, 75 bp, synthetic construct
  source 1..75: mol_type = other DNA
gctgtcgaaggggaaatgcgaccgggttaacgccattgagcgtgataaggcgctggcatgggtggagaaaaacat

SEQ ID NO: 822790 - DNA, 75 bp, synthetic construct
  source 1..75: mol_type = other DNA
agaacatcgacgcttcttcgcaaaataaaccagggcgatatcaaaggcgcatgtgatcagctacggcgctggaca

SEQ ID NO: 822791 - DNA, 75 bp, synthetic construct
  source 1..75: mol_type = other DNA
ttgctgctgctattggtggcggggctattgccatagcatctgtgttaatcactggcccaagtggtaacgatggtc

SEQ ID NO: 822792 - DNA, 75 bp, synthetic construct
  source 1..75: mol_type = other DNA
cgatataccggaaacaacgcgcggcgctctttactcattcgtttacaacgtgggtgctggcaatttcagaacatc

SEQ ID NO: 822793 - DNA, 75 bp, synthetic construct
  source 1..75: mol_type = other DNA
catcagagtgccactgaccgaacctcagaaagcggggatcgcgtcattctgtccttacaacattggcccgggtaa

SEQ ID NO: 822794 - DNA, 75 bp, synthetic construct
  source 1..75: mol_type = other DNA
gattaaggacggtggcagggactgccgtattcgctcaaataactgttacggtcaggtatcccgtcgtgaccagga

SEQ ID NO: 822795 - DNA, 75 bp, synthetic construct
  source 1..75: mol_type = other DNA
attctcgaccagtttcttgacgaaaaagaaggcaaccacaccacagcataccgtgatggtgcgggtatctggacc

SEQ ID NO: 822796 - DNA, 75 bp, synthetic construct
  source 1..75: mol_type = other DNA
cttacaacatcgaccgtctgcatgagctggatgaagtgggcgttgtcggcttcaaatgcttcgttgcgacctgtg

SEQ ID NO: 822797 - DNA, 75 bp, synthetic construct
  source 1..75: mol_type = other DNA
cgtattcgctcaaacaactgttacggtcaggtatcccgtcgcgaccaggagagtgcgctggcgtgttgggggatc

SEQ ID NO: 822798 - DNA, 75 bp, synthetic construct
  source 1..75: mol_type = other DNA
cggatccgctcaaacaactgttacggccagatatcccgtcgtgaccaggagagcgcgctggcgtgctggggaatc

SEQ ID NO: 822799 - DNA, 75 bp, synthetic construct
  source 1..75: mol_type = other DNA
tctggaccatctgccgtggtgccattctggtggatggtaagcctgttattcctggcatgaagctgtcaaaggaaa

SEQ ID NO: 822800 - DNA, 75 bp, synthetic construct
  source 1..75: mol_type = other DNA
agctacgtcgctggacatatgctggcggtaagcaatggaaagggctgatgacccgtcgtgagattgagcgtgaag

SEQ ID NO: 822801 - DNA, 75 bp, synthetic construct
  source 1..75: mol_type = other DNA
gaaaacccgtttttcccggtatgaaactgtcgaaggaaaaatgcgaccaggtcaacgccattgagcgtgataagg

SEQ ID NO: 822802 - DNA, 75 bp, synthetic construct
  source 1..75: mol_type = other DNA
catcagagtgccactgactgaaccccagaaagcgggtattgcgtcattctgtccttacaacattggccccggtaa

SEQ ID NO: 822803 - DNA, 75 bp, synthetic construct
  source 1..75: mol_type = other DNA
aggcgctggcgtgggtggagaaaaacatcagagtgccgctgaccgaaccccagaaagcggggatcgcgtcattct

SEQ ID NO: 822804 - DNA, 75 bp, synthetic construct
  source 1..75: mol_type = other DNA
gtccctataacattggtcccggtaagtgtttcccgtcgacgttttataagcggctgaatgctggtgatcgtaaag

SEQ ID NO: 822805 - DNA, 75 bp, synthetic construct
  source 1..75: mol_type = other DNA
atgacagaaatgaaaaaactggtcactgctgatgcagtgagatctgcgctgcgcactgaagaagtccgcgggacg

SEQ ID NO: 822806 - DNA, 75 bp, synthetic construct
  source 1..75: mol_type = other DNA
tgaccgaaccccagaaagcggggatcgcgtcattctgtccgtataacattggccccggtaagtgtttcccgtcga

SEQ ID NO: 822807 - DNA, 75 bp, synthetic construct
  source 1..75: mol_type = other DNA
atctgccgtggtgccattctggtggacggtaagcctgttgttcccggcatgaagttgtcgagggaaaaatgcgac

SEQ ID NO: 822808 - DNA, 75 bp, synthetic construct
  source 1..75: mol_type = other DNA
atctgccggggtgccacggtggtggatggcaaacctgtcgttccgggcatgaagttgtcgaaggaaaaatgcgac

SEQ ID NO: 822809 - DNA, 75 bp, synthetic construct
  source 1..75: mol_type = other DNA
gtgcctgcgaggcgattcgctggtggattaaggacagggggcgcgattgccgcattcgttcaaataactgttatg

SEQ ID NO: 822810 - DNA, 75 bp, synthetic construct
  source 1..75: mol_type = other DNA
gctctttactcgttcgtctacaacgtgggtgctggcaatttcagaacatcgacgcttcttcgcaaaataaaccag

SEQ ID NO: 822811 - DNA, 75 bp, synthetic construct
  source 1..75: mol_type = other DNA
agcgaacaacctgaggcacaacccgctgctggagaacaaccagctgatgtactgcagcctgaaccagcgaccatg

SEQ ID NO: 822812 - DNA, 75 bp, synthetic construct
  source 1..75: mol_type = other DNA
gagtattcagttaagactgatgtttatgctgtgggacggttaattgaagacttaaatttagatgataaaaaataa

SEQ ID NO: 822813 - DNA, 75 bp, synthetic construct
  source 1..75: mol_type = other DNA
aaagcactggcattggattcgttttacgaagcattcaatcttaacagccttcagcctggttctgtcgttgtagtc

SEQ ID NO: 822814 - DNA, 75 bp, synthetic construct
  source 1..75: mol_type = other DNA
cgcattcgttcaaataactgttacggtcaggttattcgtcgtgaccaggaaagcgcattagcctgttggggaata

SEQ ID NO: 822815 - DNA, 75 bp, synthetic construct
  source 1..75: mol_type = other DNA
atatccagatcaaaaccggcaatattccggcgcaggccagcagcagcctgacctttaccgctaacttcaacgcca

SEQ ID NO: 822816 - DNA, 75 bp, synthetic construct
  source 1..75: mol_type = other DNA
gcagaccattgagtttcagaccgacgccgccgcacccatcgacttaaccgtcgattactccacctgtacgcaata

SEQ ID NO: 822817 - DNA, 75 bp, synthetic construct
  source 1..75: mol_type = other DNA
gcagcagaccggcgttccggcgacgacgttaaccttcgacccgaacaccgggaagctgacctctccaaccacgcc

SEQ ID NO: 822818 - DNA, 75 bp, synthetic construct
  source 1..75: mol_type = other DNA
gtcatcagcacatattgctggaaggcggcgtcggcgctcaggttgtatttaaatatcccgatacagacgccgccg

SEQ ID NO: 822819 - DNA, 75 bp, synthetic construct
  source 1..75: mol_type = other DNA
tggcagagactgccgtatccgttcaaataattgctacggtcaggtctcacggcgtgaccaggagagcgcgctggc

SEQ ID NO: 822820 - DNA, 75 bp, synthetic construct
  source 1..75: mol_type = other DNA
cagaaagcggggatcgcgtcattctgtccgtataacattggccccggtaagtgtttcccgtcgacgttttataaa

SEQ ID NO: 822821 - DNA, 75 bp, synthetic construct
  source 1..75: mol_type = other DNA
agcgaacgacctgaggcacaaaccggtggtgaggaacaaccaaatgatgttctgcagccggagccagcaaccatg

SEQ ID NO: 822822 - DNA, 75 bp, synthetic construct
  source 1..75: mol_type = other DNA
gtgaccagttgcgccgctggacctacgccaagggcaaacagtggaaaggcctggtaactcgccgcgagattgagc

SEQ ID NO: 822823 - DNA, 75 bp, synthetic construct
  source 1..75: mol_type = other DNA
tgccgctggtgcgcctgcgcctgacattctcgaccagtttctggatgaaaaggaaggcaatcacaccacggcata

SEQ ID NO: 822824 - DNA, 75 bp, synthetic construct
  source 1..75: mol_type = other DNA
tgtcggctgccgttctggcgctgattgccgcaggggcttctgcacctgaaatccttgaccagtttctggatgaaa

SEQ ID NO: 822825 - DNA, 75 bp, synthetic construct
  source 1..75: mol_type = other DNA
catctccgcagaggaactggagcaactgattacgctcatcgcaaaacttgagcataatatcattgagttacaggc

SEQ ID NO: 822826 - DNA, 75 bp, synthetic construct
  source 1..75: mol_type = other DNA
tggcacggttggtgcgcatatggcgtgctctgatagaccatcgcctgaaaccgctggagttaacacaaacccatt

SEQ ID NO: 822827 - DNA, 75 bp, synthetic construct
  source 1..75: mol_type = other DNA
ttttagggacccggcacccccagcaatctacacgtagggggtcgtcggcagcgtcagaggtgtataggggacagc

SEQ ID NO: 822828 - DNA, 75 bp, synthetic construct
  source 1..75: mol_type = other DNA
ccggtaagtgtttcccgtcgacgttttataagcggcttaatgcaggcgatcgcaggggagcgtgtgaggcgattc

SEQ ID NO: 822829 - DNA, 75 bp, synthetic construct
  source 1..75: mol_type = other DNA
acatacgctggcggtaagcaatggaaagggctgatgactcgccgtgagattgagcgtgaagtctgtttgtggggg

SEQ ID NO: 822830 - DNA, 75 bp, synthetic construct
  source 1..75: mol_type = other DNA
ttgctgctgctattggtggcggagcaattgctatagcatcagtgttaatcactggctcaagtggtaacgatggtc

SEQ ID NO: 822831 - DNA, 75 bp, synthetic construct
  source 1..75: mol_type = other DNA
ttttaatgccgatgtcagtctggctccggctgccgtcagtctctatctcgctggaggcatggcgttgcagtggct

SEQ ID NO: 822832 - DNA, 75 bp, synthetic construct
  source 1..75: mol_type = other DNA
ccggaagactggctgcgggcagagatgtcgggggagattgtggcactggtccacagtcatcccggtgggctgccc

SEQ ID NO: 822833 - DNA, 75 bp, synthetic construct
  source 1..75: mol_type = other DNA
tgaacacggcagcggaggccatccgtgccctgtcgctgcaggtgccgggattccgctgtcagatgaacgaaggct

SEQ ID NO: 822834 - DNA, 75 bp, synthetic construct
  source 1..75: mol_type = other DNA
gagattcataaattccgctgtgtgccacatctgacaggacggcgctttgagcacggggtgacggactgttacacg

SEQ ID NO: 822835 - DNA, 75 bp, synthetic construct
  source 1..75: mol_type = other DNA
gcttttaccgggtgcccctgtcctctgcactgccgggcgatatcctgctgtgctgcttcggcgcatcggtggcta

SEQ ID NO: 822836 - DNA, 75 bp, synthetic construct
  source 1..75: mol_type = other DNA
tggcacacacccggcggtgtgtgcctgcggagtcgtgcggcttcgtggtgagaacgccggagggggagcggtatg

SEQ ID NO: 822837 - DNA, 75 bp, synthetic construct
  source 1..75: mol_type = other DNA
ctgggtggtgtggcccagatgctggccccgaaggcaaaaacaccggattaccgcgcaacggataacggcagacag

SEQ ID NO: 822838 - DNA, 75 bp, synthetic construct
  source 1..75: mol_type = other DNA
ggtgtggctcagatgctggccccgaaggctaaagtaccggagtacaaaagcacggataacggcagacagaacacg

SEQ ID NO: 822839 - DNA, 75 bp, synthetic construct
  source 1..75: mol_type = other DNA
gccggtgccttacggtgaaatgctggttggctcccggcgaatctcccaggacatcagtacccgtgatgaaggcgg

SEQ ID NO: 822840 - DNA, 75 bp, synthetic construct
  source 1..75: mol_type = other DNA
tcacgacgtatctctcaggacatcagcacccgtgatgaaggcgggggcggaaaggtggtggttattggtcgacag

SEQ ID NO: 822841 - DNA, 75 bp, synthetic construct
  source 1..75: mol_type = other DNA
tggcgtcaccgccactggcacacatctgccttcacggggatttacaacgatttggccgccgcctcagcctgtatg

SEQ ID NO: 822842 - DNA, 75 bp, synthetic construct
  source 1..75: mol_type = other DNA
gctgcgctgattgcggtggcatggtggaaccctgtgggctggctgggtgccgcggctgtatcgggtatgtatgcg

SEQ ID NO: 822843 - DNA, 75 bp, synthetic construct
  source 1..75: mol_type = other DNA
gccggaggggtattttcgtatcgctccggaagactggctgcgggcagagatgcagggggagattgtggctctggt

SEQ ID NO: 822844 - DNA, 75 bp, synthetic construct
  source 1..75: mol_type = other DNA
gccggaggggtattttcgtatcgcaccggaagactggctgcgggcagagatgcagggggagattgtggcactggt

SEQ ID NO: 822845 - DNA, 75 bp, synthetic construct
  source 1..75: mol_type = other DNA
gccggaggcgtattttcgtatcgcgccggaagactggctgcgggcagagatgcagggggagattgtggccctggt

SEQ ID NO: 822846 - DNA, 75 bp, synthetic construct
  source 1..75: mol_type = other DNA
ggcgactggctttttaccgggtgcccctgtcctctgcacaggcgggcgatatcctgctgtgctgctttggcgcat

SEQ ID NO: 822847 - DNA, 75 bp, synthetic construct
  source 1..75: mol_type = other DNA
gccggaggggtattttcgtatcgcgccggaagactggctgcgggcagagatgcagggggagattgtggcgctggt

SEQ ID NO: 822848 - DNA, 75 bp, synthetic construct
  source 1..75: mol_type = other DNA
gccggaggggtattttcgtatcgccccggaagactggctgcgggcagagatgcagggggagattgtggccctggt

SEQ ID NO: 822849 - DNA, 75 bp, synthetic construct
  source 1..75: mol_type = other DNA
tgaccgggcgtcgttttgaacacggggtgacggactgttacacgctgttcagggatgcctgccatctggcgggga

SEQ ID NO: 822850 - DNA, 75 bp, synthetic construct
  source 1..75: mol_type = other DNA
accctttcggtaatcaacggtattatcggtacggtctgcgcattatggctgtataacaattttgtcggctggctg

SEQ ID NO: 822851 - DNA, 75 bp, synthetic construct
  source 1..75: mol_type = other DNA
gtggtgtggctcagatgctggccccgaagccaaaaacaccggaatacagggcaacggataacggtaaacagaaca

SEQ ID NO: 822852 - DNA, 75 bp, synthetic construct
  source 1..75: mol_type = other DNA
gccggaggtgtattttcgtatcgcgccggaagactggctgcgggcagagatgcagggggagattgtggctctggt

SEQ ID NO: 822853 - DNA, 75 bp, synthetic construct
  source 1..75: mol_type = other DNA
gccggaggtgtattttcgtatcgctccggaagactggctgcgggcagagatgcagggggagattgtggcactggt

SEQ ID NO: 822854 - DNA, 75 bp, synthetic construct
  source 1..75: mol_type = other DNA
gccggaggagtattttcgtatcgcgccggaagactggctgcgggcagagatgcagggggagattgtggcactggt

SEQ ID NO: 822855 - DNA, 75 bp, synthetic construct
  source 1..75: mol_type = other DNA
gcctgaggcatattttcgtattgcaccggaggactggctgcgggcagagatgcagggggagattgtggcactggt

SEQ ID NO: 822856 - DNA, 75 bp, synthetic construct
  source 1..75: mol_type = other DNA
cgggaattgatatgccggattttgagcgtgaggatgactggtggcgcaacggtcagaacctgtacctggacaata

SEQ ID NO: 822857 - DNA, 75 bp, synthetic construct
  source 1..75: mol_type = other DNA
cccagggtaacccgatgccggtgccttacggggaaatgctggttggctcccgccgtatatcccaggacatcagta

SEQ ID NO: 822858 - DNA, 75 bp, synthetic construct
  source 1..75: mol_type = other DNA
cgttccgttcatttgcgtaaacatgccggacaagtggcatttcccggtggcgcggttgatgccactgatgcttca

SEQ ID NO: 822859 - DNA, 75 bp, synthetic construct
  source 1..75: mol_type = other DNA
cggagattgagatgccggattttgtgcgtgaggatgactggtggcgtaacggtcagaatctctatctggataatc

SEQ ID NO: 822860 - DNA, 75 bp, synthetic construct
  source 1..75: mol_type = other DNA
caggtatcgatttgccggatttttaccgacatgatgactggtggaaatcaggtcagaatctctatctggataatc

SEQ ID NO: 822861 - DNA, 75 bp, synthetic construct
  source 1..75: mol_type = other DNA
gcccgcagttggtttacctccagcccacaacttgccgaagaaacagcgtttcgcaacagctccatgcaggcggcc

SEQ ID NO: 822862 - DNA, 75 bp, synthetic construct
  source 1..75: mol_type = other DNA
cgcactgacagaggcgcagcctggcgatgtgctgctgtgctgttttggttcatcggtgccgaatcatgccgccat

SEQ ID NO: 822863 - DNA, 75 bp, synthetic construct
  source 1..75: mol_type = other DNA
atggctccggaggactggctgcaggccgaaatgcagggtgatattgtggcgctggtccacagtcaccccggtggt

SEQ ID NO: 822864 - DNA, 75 bp, synthetic construct
  source 1..75: mol_type = other DNA
cgtttacctgcccacttgcaactcctgcctttaatctgattcgaaaacaacaacaactggcactcagtacaacgt

SEQ ID NO: 822865 - DNA, 75 bp, synthetic construct
  source 1..75: mol_type = other DNA
cgcacacactccctctggcgtcacccggcatggctcgcatctgcctttacggggatttccaacgatttggccgcc

SEQ ID NO: 822866 - DNA, 75 bp, synthetic construct
  source 1..75: mol_type = other DNA
attaaaaacaaacgcatctacgaaaccctcggtactttccctcttctcagtgtggatgctgcccgtcaatacgtt

SEQ ID NO: 822867 - DNA, 75 bp, synthetic construct
  source 1..75: mol_type = other DNA
ccggaagactggctgcaggcacaaatgcagggggagattgtggcgctggtccacagtcatcccggtggtctgccc

SEQ ID NO: 822868 - DNA, 75 bp, synthetic construct
  source 1..75: mol_type = other DNA
gcgcatgcccggcggtgtgcgcctgcggagtcgtgcggcttcgtgataagcacgccggagggggagcggtatatc

SEQ ID NO: 822869 - DNA, 75 bp, synthetic construct
  source 1..75: mol_type = other DNA
cgcacacactccctctggcgtcacccggcatggcccgcatctgcctttacggggattttcaacgatttggccgcc

SEQ ID NO: 822870 - DNA, 75 bp, synthetic construct
  source 1..75: mol_type = other DNA
cacgtatttttcgtcactggacaacatgattgcccagggtaacccgatgccggtgccttacggggaaatgctggt

SEQ ID NO: 822871 - DNA, 75 bp, synthetic construct
  source 1..75: mol_type = other DNA
gtacgcccgtcttcacgaacagctgggtgagggaacggtcatccatattgtgccgcgactggccggggccggaaa

SEQ ID NO: 822872 - DNA, 75 bp, synthetic construct
  source 1..75: mol_type = other DNA
ttgcccaggggaacccgatgccggtgccttacggtgaaatgctggttggctcacggcgaatctcccaggacatca

SEQ ID NO: 822873 - DNA, 75 bp, synthetic construct
  source 1..75: mol_type = other DNA
tctctatctggataatctggaggccgcagggctgtatcaggtgccgctgtcagcggcgcagccgggcgatgtgct

SEQ ID NO: 822874 - DNA, 75 bp, synthetic construct
  source 1..75: mol_type = other DNA
tgcagggggagattgtggcgctggtccacagtcatcccggtggtctgccctggctgagcgaggcggaccggcggc

SEQ ID NO: 822875 - DNA, 75 bp, synthetic construct
  source 1..75: mol_type = other DNA
atgagacaagataaaagtaataaaaacagtaataaaaagtttcactttgataaaaaagagaaggatattgagact

SEQ ID NO: 822876 - DNA, 75 bp, synthetic construct
  source 1..75: mol_type = other DNA
agctctttgccctgcgcagacaaatcaaaactctcagggatcaccttattccttcaacatttctggagccagacc

SEQ ID NO: 822877 - DNA, 75 bp, synthetic construct
  source 1..75: mol_type = other DNA
gattatcgaccagaccgaagcgatgaccaccgtggacatcaataccggggcgtttgtcggtcatcgcaatctgga

SEQ ID NO: 822878 - DNA, 75 bp, synthetic construct
  source 1..75: mol_type = other DNA
ttgtttgaactgggcgcccgcgcgttacaaaatgttgatcttattcgtagcgcagatatccagatgcgtgagctt

SEQ ID NO: 822879 - DNA, 75 bp, synthetic construct
  source 1..75: mol_type = other DNA
ctgaagagcgtttacaggaatatgtcgcaatgttgcataccgcagcgcgcaaaatttctgcccaaatgggttatc

SEQ ID NO: 822880 - DNA, 75 bp, synthetic construct
  source 1..75: mol_type = other DNA
tggcgtggtcattgccggtttgagcatctccttcccgacgttgcgtttctctgaagagcgtttacaggaatatgt

SEQ ID NO: 822881 - DNA, 75 bp, synthetic construct
  source 1..75: mol_type = other DNA
tacgcattttttaacatcattgtagcaggagatttttttcaggcgattttttgttcgtcagcgaggagaatggct

SEQ ID NO: 822882 - DNA, 75 bp, synthetic construct
  source 1..75: mol_type = other DNA
ccataacaaaaacgcagcaacaaatttacgtatttttaacatcattgtagcaggtgatttttttcaggcgattat

SEQ ID NO: 822883 - DNA, 75 bp, synthetic construct
  source 1..75: mol_type = other DNA
agtggctggtattttcgttcttagacaaaaaccaagcatcaagaagaaatctgaagacaacaaacctgaagaaaa

SEQ ID NO: 822884 - DNA, 75 bp, synthetic construct
  source 1..75: mol_type = other DNA
tccagttataccagctattaacaccaaagcctggatagctttaactgacatatcgcaaaagctaaatcgaattgc

SEQ ID NO: 822885 - DNA, 75 bp, synthetic construct
  source 1..75: mol_type = other DNA
taagaattagagaggaaaaaagaaagctgacgttcttattttcattcataacaaaaataataatatttatatctt

SEQ ID NO: 822886 - DNA, 75 bp, synthetic construct
  source 1..75: mol_type = other DNA
gcagctatgcataaaattaaggttcgtcaggaacttgctgagaaggagaaagcagtatgacggcccgaggcacgc

SEQ ID NO: 822887 - DNA, 75 bp, synthetic construct
  source 1..75: mol_type = other DNA
gatgaacaaccggcggagatcctgcatggcgatatggtgcagccgctgcgcgtgaaagtggatcgcgaagcacgc

SEQ ID NO: 822888 - DNA, 75 bp, synthetic construct
  source 1..75: mol_type = other DNA
ccccgcgcctgtattccatcgcctcctcgcaggcggaagtcgagaacgaagtacacgtcaccgttggtgtggtgc

SEQ ID NO: 822889 - DNA, 75 bp, synthetic construct
  source 1..75: mol_type = other DNA
ttacagcattacgccgcgacgacgccgattgttgacatggtgcgtttctccccggcacagcttgatgccgaagcg

SEQ ID NO: 822890 - DNA, 75 bp, synthetic construct
  source 1..75: mol_type = other DNA
tctcagtattgattgagacggaggtttttcacaacgcgaaccctgtacgcggtatacgcaaactgaaagttcaga

SEQ ID NO: 822891 - DNA, 75 bp, synthetic construct
  source 1..75: mol_type = other DNA
ctttttgagatccgcacaatggggacagacattgccaggggcatctgggtataccacaaaggcaacactatcatt

SEQ ID NO: 822892 - DNA, 75 bp, synthetic construct
  source 1..75: mol_type = other DNA
aggggaatttctattctttatgtatctccacgagaaatggcgttcctgtcacagaaggaagtggcgctattgctc

SEQ ID NO: 822893 - DNA, 75 bp, synthetic construct
  source 1..75: mol_type = other DNA
tatatacagggctaccgtgatcgtcgaacgctaaatgatttgcttgagttgtggtggatgtatcacggccagcac

SEQ ID NO: 822894 - DNA, 75 bp, synthetic construct
  source 1..75: mol_type = other DNA
acaacttgaagagcttcgtcacaacttgttaagaacagatttttggagtatcccacgtgaagggtatgcggaaga

SEQ ID NO: 822895 - DNA, 75 bp, synthetic construct
  source 1..75: mol_type = other DNA
gagttaaccaaaacagagatcttcgcagtcaagaaacagatcaaagagcttcgttcgtgtctgatatcttctatt

SEQ ID NO: 822896 - DNA, 75 bp, synthetic construct
  source 1..75: mol_type = other DNA
gaaacttaatcgtctgatagtacatctggattctaaaaccagtgacagccctctgactaagacagaagcttatgc

SEQ ID NO: 822897 - DNA, 75 bp, synthetic construct
  source 1..75: mol_type = other DNA
tcagcacgttgataaagctggaagagttcaggaaggataacccctgtaagggtctggaaccactgaaagaagcgc

SEQ ID NO: 822898 - DNA, 75 bp, synthetic construct
  source 1..75: mol_type = other DNA
tcctgctgatagcaggatttgccattcttcgcctgttgttcagagcattaaccagcacagcgtctgcgctggcag

SEQ ID NO: 822899 - DNA, 75 bp, synthetic construct
  source 1..75: mol_type = other DNA
atggcaacgcgccgtcagccgttaattcccggctggttaattccaggtttaagcgccgctacgcttgtggtggcg

SEQ ID NO: 822900 - DNA, 75 bp, synthetic construct
  source 1..75: mol_type = other DNA
ctgcggtcagggcctgctgtgcgtgactgacctcgcggtgcttgagcggtggtgcgtggcctatgagttctggcg

SEQ ID NO: 822901 - DNA, 75 bp, synthetic construct
  source 1..75: mol_type = other DNA
agggaacggtcatccacattgtgccgcgactggccggggccggaaaggggggactgcagattgtgctgggggccg

SEQ ID NO: 822902 - DNA, 75 bp, synthetic construct
  source 1..75: mol_type = other DNA
agggaacggtcatccacattgtgccgcgactggccggggccggaaagggcggactgcagattgtgctgggggcgg

SEQ ID NO: 822903 - DNA, 75 bp, synthetic construct
  source 1..75: mol_type = other DNA
agggaacggtcatccacattgtgccgcgactggccggcgccggaaaggggggactgcagattgtgctgggggcgg

SEQ ID NO: 822904 - DNA, 75 bp, synthetic construct
  source 1..75: mol_type = other DNA
gcgaatctcccaggacatcagtacccgtgatgaaggcggtgacgggaaggtggtggttatcgggcggcaggcata

SEQ ID NO: 822905 - DNA, 75 bp, synthetic construct
  source 1..75: mol_type = other DNA
agggatgcctgccatctggcggggataacgctgccggattttcaccgcgaggatgagtggtggcgcaatggtcag

SEQ ID NO: 822906 - DNA, 75 bp, synthetic construct
  source 1..75: mol_type = other DNA
tctggcgggaattgagatgccggattttcatcgcggggatgactggtggcgtcacggccagaatctctatctgga

SEQ ID NO: 822907 - DNA, 75 bp, synthetic construct
  source 1..75: mol_type = other DNA
gtacggataacggtaaacagaacacgtatttttcgtcactggacaacatgattgcccaggggaacccgatgccgg

SEQ ID NO: 822908 - DNA, 75 bp, synthetic construct
  source 1..75: mol_type = other DNA
gagtaatctgctgttttctctcggtgccagtatgacgcttggcggtgttgcacagatgctggcccctcaacccaa

SEQ ID NO: 822909 - DNA, 75 bp, synthetic construct
  source 1..75: mol_type = other DNA
gaccggcggctgcagataaaaagcgcactgccctggtggctggtctgccggggtgacattcacaaattccgctgt

SEQ ID NO: 822910 - DNA, 75 bp, synthetic construct
  source 1..75: mol_type = other DNA
tggctgagcgaggccgaccggcggctgcagataaagagtgccctgccctggtggctggtctgccggggggaaatt

SEQ ID NO: 822911 - DNA, 75 bp, synthetic construct
  source 1..75: mol_type = other DNA
ctggtcggtaccgttctcggtaatgctggtcgtgccgctgggggttatcggcgcgctgctggcaacctggatgcg

SEQ ID NO: 822912 - DNA, 75 bp, synthetic construct
  source 1..75: mol_type = other DNA
cgcgggcggtgcatccagcttcctggctgaccgtgtcgaagaggagggcgaagttcgcgtctttatcgagcacaa

SEQ ID NO: 822913 - DNA, 75 bp, synthetic construct
  source 1..75: mol_type = other DNA
gtcaccactgatgagctggtgttttcccatctggccacgctgcgcagcaatgcgccggtgacgacgctgacgccg

SEQ ID NO: 822914 - DNA, 75 bp, synthetic construct
  source 1..75: mol_type = other DNA
cagcgatgttctgagtccggtgttcacgctgtggtatctgcagaagaacatcaccaccgatatcgccccctatgt

SEQ ID NO: 822915 - DNA, 75 bp, synthetic construct
  source 1..75: mol_type = other DNA
actgacctcgcggtgcttgagcggtggtgcgtggcctatgagttctggcgacgtgccgtgaaaaatattgccata

SEQ ID NO: 822916 - DNA, 75 bp, synthetic construct
  source 1..75: mol_type = other DNA
atgctcggactcgaccccagcagccgtcagcgtctgattggcctggcggggcagaagaaagccactaacccgttt

SEQ ID NO: 822917 - DNA, 75 bp, synthetic construct
  source 1..75: mol_type = other DNA
ctgtggtcagggcctgctgtgcgtgactgacctcgcggtgcttgagcggtggtgcgtggcctacgagttctggcg

SEQ ID NO: 822918 - DNA, 75 bp, synthetic construct
  source 1..75: mol_type = other DNA
tcgccagccgtatcgcccaaacgcacggtctgaaactggtgggcaaaatcgagccgctcaccatcgaccgggtaa

SEQ ID NO: 822919 - DNA, 75 bp, synthetic construct
  source 1..75: mol_type = other DNA
tttgaagagacgacgctttcggctatcgccagccgtatcgcgcaaacgcacggtctgaaactggtgggcaaaatc

SEQ ID NO: 822920 - DNA, 75 bp, synthetic construct
  source 1..75: mol_type = other DNA
gtggctgattgataaatctactcacagttttgtgcgcagtggctataccactgaaatcgacatttcacgcgggcc

SEQ ID NO: 822921 - DNA, 75 bp, synthetic construct
  source 1..75: mol_type = other DNA
gcacgggggccagtcacaagagggaaaaaacaaaaaactcagaaactcacggtttatcacccggatggcagtaca

SEQ ID NO: 822922 - DNA, 75 bp, synthetic construct
  source 1..75: mol_type = other DNA
atcaaaaatgagtccgataccattgaggtggagctggatgacaccgatggtcgctggctggataagtggtatccg

SEQ ID NO: 822923 - DNA, 75 bp, synthetic construct
  source 1..75: mol_type = other DNA
tatggctatgcggtaaaggtgaccaccaaagaactgattttttcgcatttacccacgctgcgctgcctggcgccg

SEQ ID NO: 822924 - DNA, 75 bp, synthetic construct
  source 1..75: mol_type = other DNA
ttaaccagtattacaactctcagcagtataaagatcttgctggtcaggctcgctatcagagtctggcggcagcgg

SEQ ID NO: 822925 - DNA, 75 bp, synthetic construct
  source 1..75: mol_type = other DNA
aatgcgaataagccttcaggcctacagagttttgctacaggtgccattggtggggccgcatcaggtgcaatgatt

SEQ ID NO: 822926 - DNA, 75 bp, synthetic construct
  source 1..75: mol_type = other DNA
aacgccgggcagaactacgctaacaacgtcagccaattgtatcaacagcaggcggcagcatctgcggcgaatgct

SEQ ID NO: 822927 - DNA, 75 bp, synthetic construct
  source 1..75: mol_type = other DNA
ccagaatctggcaaatattggtcttggcgcactgcaaggtcaggcaaacgccgggcagacatatgccaacaacat

SEQ ID NO: 822928 - DNA, 75 bp, synthetic construct
  source 1..75: mol_type = other DNA
aaccagtaatcagttagcaacaatcgcaccaacgcttggtcagcagtggctgtctggtcagatgaacaactacca

SEQ ID NO: 822929 - DNA, 75 bp, synthetic construct
  source 1..75: mol_type = other DNA
gcactgcaaggtcaggcaaacgccgggcagacatatgccaacaacatgagtcagatttcgcagcaaagtgcggct

SEQ ID NO: 822930 - DNA, 75 bp, synthetic construct
  source 1..75: mol_type = other DNA
ggtcaggaacactacgacaccgctcgtggcgttcagtccatcctgcaacgttatcaggaactgaaagacatcatc

SEQ ID NO: 822931 - DNA, 75 bp, synthetic construct
  source 1..75: mol_type = other DNA
ctccgtacaggcggtatacgtacctgcagatgacttgactgacccgtctccggcaaccacctttgcgcaccttga

SEQ ID NO: 822932 - DNA, 75 bp, synthetic construct
  source 1..75: mol_type = other DNA
gccaaaagcgtcttgcgcgattttcgcaatgtcttttgcaaccggctgttcctctttggcgcggcaaccatcgcc

SEQ ID NO: 822933 - DNA, 75 bp, synthetic construct
  source 1..75: mol_type = other DNA
tgctattggtggcagtgtcggtggtccatggggagcagcaattggtgcaggtgtaggtgctctcggctctcttct

SEQ ID NO: 822934 - DNA, 75 bp, synthetic construct
  source 1..75: mol_type = other DNA
ctgtcccagccgttcttcgtggcagaagtattcaccggttctccgggtaaatacgtctccctgaaagacaccatc

SEQ ID NO: 822935 - DNA, 75 bp, synthetic construct
  source 1..75: mol_type = other DNA
cgcactgacagaggcgcagcctggcgacgtgctgctgtgctgctttggttcatcggtgccgaatcatgccgccat

SEQ ID NO: 822936 - DNA, 75 bp, synthetic construct
  source 1..75: mol_type = other DNA
caaacaatgccagtcagttgtatcaacagcaggcagcagcagtcgcagcaaatgccaaccgaccatctacaggtc

SEQ ID NO: 822937 - DNA, 75 bp, synthetic construct
  source 1..75: mol_type = other DNA
ctggcggcggcaaacgctaacagaccttccggccttcaatctgcaataggcggggctgcctctggagcaattgct

SEQ ID NO: 822938 - DNA, 75 bp, synthetic construct
  source 1..75: mol_type = other DNA
aacaccatcatgaacaacctgaagccgtttactcctctggctgagaagtatgtcggcagcctcgagaacttatcg

SEQ ID NO: 822939 - DNA, 75 bp, synthetic construct
  source 1..75: mol_type = other DNA
ggcagcagcagtcgcagcaaatgccaaccgaccatctacaggtcagaaattgattggtggaataggttctggtgc

SEQ ID NO: 822940 - DNA, 75 bp, synthetic construct
  source 1..75: mol_type = other DNA
tggctgagcgaggcagaccggcgactgcagataaaaagcgcactgccctggtggctggtctgccggggtgacatt

SEQ ID NO: 822941 - DNA, 75 bp, synthetic construct
  source 1..75: mol_type = other DNA
caaaggcggcagtgatggcggttcaaaagcccaggcacgcgcaactgaaaagggtatcgaattgcagcgtgaaat

SEQ ID NO: 822942 - DNA, 75 bp, synthetic construct
  source 1..75: mol_type = other DNA
ggcatcaggtgcaatgattggtagtgcagttcctgttattgggactggtattggtgctcttgctggcggtgttat

SEQ ID NO: 822943 - DNA, 75 bp, synthetic construct
  source 1..75: mol_type = other DNA
tgaaggcaccgatacgctggcgtataccgatgcgcagtatcaacagcttgcggcggttacgcgggcactgattga

SEQ ID NO: 822944 - DNA, 75 bp, synthetic construct
  source 1..75: mol_type = other DNA
atgttaattttccagattgccaataagcacctcagcaaagctgtgtactgcaaagggggcagtgatagcggagca

SEQ ID NO: 822945 - DNA, 75 bp, synthetic construct
  source 1..75: mol_type = other DNA
agggcatcgaattgcagcgtgaaatgtggcagacgaacatgcaaaaccttgcaccgttcacgccactcgctcagc

SEQ ID NO: 822946 - DNA, 75 bp, synthetic construct
  source 1..75: mol_type = other DNA
ggcgctggacgaaactaaccagtatgaccttagcgacgagcgtattcagagctggtgcgagcaaatcctcaacga

SEQ ID NO: 822947 - DNA, 75 bp, synthetic construct
  source 1..75: mol_type = other DNA
agtatgaccttagcgacgagcgtattcagagctggtgcgagcaaatcctcaacgaaatggcagagcattacgcct

SEQ ID NO: 822948 - DNA, 75 bp, synthetic construct
  source 1..75: mol_type = other DNA
cggatcgtaaaaccgatcctggtcctgcatttgattgggcacggtttcgcgcgctggtcagcaaggagacaacat

SEQ ID NO: 822949 - DNA, 75 bp, synthetic construct
  source 1..75: mol_type = other DNA
cggaaattgagatgccggatttttatcgcggggatgactggtggcgtaacggccagaatttctatcttgacaata

SEQ ID NO: 822950 - DNA, 75 bp, synthetic construct
  source 1..75: mol_type = other DNA
gcgtgaagacgctgctgtcacgctgtcgcgtattaccgccttgttggtggggattgttactcgcaccacttatct

SEQ ID NO: 822951 - DNA, 75 bp, synthetic construct
  source 1..75: mol_type = other DNA
gcagctcagtcatctggcggagacgctgattgttgcggcgcgtgactggctgtatgacgcctgctgccgcgagtg

SEQ ID NO: 822952 - DNA, 75 bp, synthetic construct
  source 1..75: mol_type = other DNA
ggaagagcaggaagcgatggcgctgacccgtgcttacactacgctgcgcgatgaacttcatcatctggcattaca

SEQ ID NO: 822953 - DNA, 75 bp, synthetic construct
  source 1..75: mol_type = other DNA
ttatgacgctgccgcgtgaaggtaaaactctgcaaacggaagtgcgggaaatgcgcgagaaaatgcgcgctcatc

SEQ ID NO: 822954 - DNA, 75 bp, synthetic construct
  source 1..75: mol_type = other DNA
gtgccgcatcgccgatgattgccagccaactggcgcgttatccattattgctggatgaactgctcgatccaaata

SEQ ID NO: 822955 - DNA, 75 bp, synthetic construct
  source 1..75: mol_type = other DNA
ttttatctgcgtctggcgcaacgcattatgcatctgttcagtacgcgtacctcttccggcattttgtatgaagtg

SEQ ID NO: 822956 - DNA, 75 bp, synthetic construct
  source 1..75: mol_type = other DNA
gattcagtcgctgcgcaacatgaaagggatgattgcccgtgaagtgcgtcgacgtggtttgaccgacaatatcaa

SEQ ID NO: 822957 - DNA, 75 bp, synthetic construct
  source 1..75: mol_type = other DNA
aaagcacggataacggcagacagaacacgtatttttcgtcactggacaacatgattgctcaggggaatccgatgc

SEQ ID NO: 822958 - DNA, 75 bp, synthetic construct
  source 1..75: mol_type = other DNA
cgaatctcccaggacatcagtacccgtgatgaaggcggtgacgggaagatggtggttatcgggcggcaggcataa

SEQ ID NO: 822959 - DNA, 75 bp, synthetic construct
  source 1..75: mol_type = other DNA
gagcgatcacttaacctggctggcggaagctatgatagatgccgtcgttcagcaggcgtgggttcaaatggtggc

SEQ ID NO: 822960 - DNA, 75 bp, synthetic construct
  source 1..75: mol_type = other DNA
gtgccgcatcgccgatgattgccagccagctggcgcgttatccattattgctggatgaattgctcgatccaaaca

SEQ ID NO: 822961 - DNA, 75 bp, synthetic construct
  source 1..75: mol_type = other DNA
ttcctgcggcgtctggaaaacctgctgcaaagcattaacgacgaacaaacccaaacgcttccttctgatgagctt

SEQ ID NO: 822962 - DNA, 75 bp, synthetic construct
  source 1..75: mol_type = other DNA
tatttgctgcgtgtgccggaagatgacgaagaacaacagcttgaggcgctgcgtcagttcaaacaggcgcaactg

SEQ ID NO: 822963 - DNA, 75 bp, synthetic construct
  source 1..75: mol_type = other DNA
tcacgacgtatctctcaggacatcagcacccgtgatgaaggcggagacggaaaggtggtggttattggtcgacag

SEQ ID NO: 822964 - DNA, 75 bp, synthetic construct
  source 1..75: mol_type = other DNA
tttctgccaccacgatgctgttttcactgggtgccagcatgatactgggcggtgtggcccagatgctggccccga

SEQ ID NO: 822965 - DNA, 75 bp, synthetic construct
  source 1..75: mol_type = other DNA
tgttgtgaccgcacctcaggggtcaatgtacattgattataatggtgattggtatcaaaaaaaaacaggaacagg

SEQ ID NO: 822966 - DNA, 75 bp, synthetic construct
  source 1..75: mol_type = other DNA
tttggccagaccaccgggatgagactgacgcaggtcagaaatctttgtgacgacaaccgtatcaatgccggcgtg

SEQ ID NO: 822967 - DNA, 75 bp, synthetic construct
  source 1..75: mol_type = other DNA
acaggtgtttctttgcctgcaggatatactataaattatgacagagataacagtaacctggttagactggccccc

SEQ ID NO: 822968 - DNA, 75 bp, synthetic construct
  source 1..75: mol_type = other DNA
gcatcggactcagagcacgaaccgttgcgtatcagaagggcttcagatggtttgttgtttgcatacgagaaagta

SEQ ID NO: 822969 - DNA, 75 bp, synthetic construct
  source 1..75: mol_type = other DNA
ctgaccgccgtatgtagccatcagacgagaattggtaacttagacgcccatctgatatgtaagcgtacagcctga

SEQ ID NO: 822970 - DNA, 75 bp, synthetic construct
  source 1..75: mol_type = other DNA
cgatcgcggtaaagagggcaaagccccggttgacgcagccaacccgcgcgccaacaaccagttcggccatatcat

SEQ ID NO: 822971 - DNA, 75 bp, synthetic construct
  source 1..75: mol_type = other DNA
attgagatgccggactttcatcgtgaggatgactggtggcgtaatttccgggatgcttatcatctggcgggaatt

SEQ ID NO: 822972 - DNA, 75 bp, synthetic construct
  source 1..75: mol_type = other DNA
atgctgtgcagcaaagggactattgctttgtccctttgctgcgattatctgattacggtacagaatcccatgaca

SEQ ID NO: 822973 - DNA, 75 bp, synthetic construct
  source 1..75: mol_type = other DNA
aggcttaacacatatactctcagagcatttcgagaatgttaaaaccaaggttcaaggtactgtagtaatgttttc

SEQ ID NO: 822974 - DNA, 75 bp, synthetic construct
  source 1..75: mol_type = other DNA
ctacggcaatcgagtcaacggctcagcgatgcaagaaaaaccaaatttattcacctaaaatagtagaacaatctc

SEQ ID NO: 822975 - DNA, 75 bp, synthetic construct
  source 1..75: mol_type = other DNA
gcgacatcacggcaggagaactggaacaatatgctgctggcttacgggaaaaattacgtccgtcaacagtaaacc

SEQ ID NO: 822976 - DNA, 75 bp, synthetic construct
  source 1..75: mol_type = other DNA
tgatgtatatcagtttattgaaaagttaaaaaaggaaaaggtgccattagataaagcagagcagcaactcaaaaa

SEQ ID NO: 822977 - DNA, 75 bp, synthetic construct
  source 1..75: mol_type = other DNA
atggaaaaaaaccactcgtaatggacaagaggtatggtggccatacgttaaatattatgttgaagggagaactaa

SEQ ID NO: 822978 - DNA, 75 bp, synthetic construct
  source 1..75: mol_type = other DNA
ccaacaagaagaaaacaagaacagtcaaaacctgttaatcaaaggggataacctcgaagtattgaagcatatggt

SEQ ID NO: 822979 - DNA, 75 bp, synthetic construct
  source 1..75: mol_type = other DNA
gcgtcaccgccactggcacgcatctgccttcacggggatttacaacgatttggccgccgcctcagcctgtatgtg

SEQ ID NO: 822980 - DNA, 75 bp, synthetic construct
  source 1..75: mol_type = other DNA
attaccgcgcaacggataacggcagacagaacacgtatttttcctcactggacaacatgattgctcaggggaacc

SEQ ID NO: 822981 - DNA, 75 bp, synthetic construct
  source 1..75: mol_type = other DNA
gccttacggtgaaatgctggttggctcccgccgtatatcccaggacatcagtacccgtgatgaaggcgggggcgg

SEQ ID NO: 822982 - DNA, 75 bp, synthetic construct
  source 1..75: mol_type = other DNA
ttagatgaagttgaagagtttttactaagatcaattatttcaactaaaagtgatggtggtgttgaggttgaaaat

SEQ ID NO: 822983 - DNA, 75 bp, synthetic construct
  source 1..75: mol_type = other DNA
tgcggagtcttgcggcttcgtgataagcacgccggagggtgaccggtaccagccgtgtgtgaatatctctgcaga

SEQ ID NO: 822984 - DNA, 75 bp, synthetic construct
  source 1..75: mol_type = other DNA
tcaaactgctgggaccagatgtcggcttcgattctattaatgaccgtccgatggcagaagaactgtctaaactcc

SEQ ID NO: 822985 - DNA, 75 bp, synthetic construct
  source 1..75: mol_type = other DNA
cgaacaggcgacttttaacgactatatggcgaagctgggcgaagtttccgacaccgacattcgccgctttgctga

SEQ ID NO: 822986 - DNA, 75 bp, synthetic construct
  source 1..75: mol_type = other DNA
actggcggtgctggagcaggagtatcaggtagtctgttacgaccagcgcggcaccggcaataatcccgacacgct

SEQ ID NO: 822987 - DNA, 75 bp, synthetic construct
  source 1..75: mol_type = other DNA
cgatcccgaaacgtttaatgctctgttactcaacgggcttgccagcctgttcaccgtgaagccgctctgtaagga

SEQ ID NO: 822988 - DNA, 75 bp, synthetic construct
  source 1..75: mol_type = other DNA
tctgttttatgcgatgagttaaaaaaaaatactgtttatgatgatatcattgaagctgcgggtgaattaggtgat

SEQ ID NO: 822989 - DNA, 75 bp, synthetic construct
  source 1..75: mol_type = other DNA
aatgccttatcttcagaaatgcagccggcatccgaactggacgatattgtaaattcacctaaatacgaggcattg

SEQ ID NO: 822990 - DNA, 75 bp, synthetic construct
  source 1..75: mol_type = other DNA
atgaatacacaaccccaatttcaactgaaaaaagaaactcttttctctgaaactgaaaccacaaacagtaaacag

SEQ ID NO: 822991 - DNA, 75 bp, synthetic construct
  source 1..75: mol_type = other DNA
atgtcgccggaggactggctgcaggcagagatgcagggtgagattgtggcactggtccacagtcatcccggtggt

SEQ ID NO: 822992 - DNA, 75 bp, synthetic construct
  source 1..75: mol_type = other DNA
ctatgttgtacaagtttgatgacaatgaaattataacttccgctattgataagctgaagcgggtaatgactccaa

SEQ ID NO: 822993 - DNA, 75 bp, synthetic construct
  source 1..75: mol_type = other DNA
tggtgtggctcagatgcttgccccgaaggcaaaaataccggattaccgcgcaacggataacggcagacagaacac

SEQ ID NO: 822994 - DNA, 75 bp, synthetic construct
  source 1..75: mol_type = other DNA
cgacgaacgcattctgtctggcgtcaccgccactggcacgcatctgccttcacggggatttgcaacgatttggcc

SEQ ID NO: 822995 - DNA, 75 bp, synthetic construct
  source 1..75: mol_type = other DNA
ggcgtgctgaccaactcgcagggcttgccgttgcagccggaaatcgacgttccggcaggggccaccaacgtcgcg

SEQ ID NO: 822996 - DNA, 75 bp, synthetic construct
  source 1..75: mol_type = other DNA
cctccgggttttaccgggtgcccctgtcctcggcacaggcaggcgatatcctgctgtgctgctttggcgcatcgg

SEQ ID NO: 822997 - DNA, 75 bp, synthetic construct
  source 1..75: mol_type = other DNA
tcccttgtgtgaatatttccgcagagccggaggcgtattttcgtattgcgccggaagactggctgcgggcagaga

SEQ ID NO: 822998 - DNA, 75 bp, synthetic construct
  source 1..75: mol_type = other DNA
attaaagggccgaaacagatgaaggcgctgaataagatattcggctcgctgtttatgctggtgggggcgctgttg

SEQ ID NO: 822999 - DNA, 75 bp, synthetic construct
  source 1..75: mol_type = other DNA
tgtgaatctcaccaatcccaaaagtattgtgtttctggcggcgctatttccgcaattcatcatgccgcaacagcc

SEQ ID NO: 823000 - DNA, 75 bp, synthetic construct
  source 1..75: mol_type = other DNA
acggttatcgcggcgcggtggcgtctattgctgggcttcagaccggactggcgattcatattgtgctggttggcg

SEQ ID NO: 823001 - DNA, 75 bp, synthetic construct
  source 1..75: mol_type = other DNA
atgtaccagatggaaaaaatcacaacgggtgtgtcatacaccacgtcagcggtgggaacgggatactggttactg

SEQ ID NO: 823002 - DNA, 75 bp, synthetic construct
  source 1..75: mol_type = other DNA
aggatattgagcgatactacccggcagaagacgccaaagcgggagatcgcccaattaatctgcgctgtgaactgc

SEQ ID NO: 823003 - DNA, 75 bp, synthetic construct
  source 1..75: mol_type = other DNA
gatgctgcagggcggcgaatatgtgatgtttacctatgaaggtctgggaaccggcgtgcaggagtttatcctgac

SEQ ID NO: 823004 - DNA, 75 bp, synthetic construct
  source 1..75: mol_type = other DNA
tggtaacggtgaactgcttcaccatctgcctgaacaactgagtaaacgggagaggtattccgaaaaatggcaacg

SEQ ID NO: 823005 - DNA, 75 bp, synthetic construct
  source 1..75: mol_type = other DNA
ctgcctgaacaactgagtaaacgggagaggtattctgaaaaatggcaacgacgaacgcattctgtctggcgtcac

SEQ ID NO: 823006 - DNA, 75 bp, synthetic construct
  source 1..75: mol_type = other DNA
gaccgagttagggcaactgacgctggttaacttcgccaacccggcggggctttccgccgagggcgacaacctgta

SEQ ID NO: 823007 - DNA, 75 bp, synthetic construct
  source 1..75: mol_type = other DNA
attaaagggccgaagcagatgaaggcgctgaataagattttcggctcgttgtttatgctggtgggggcgctgttg

SEQ ID NO: 823008 - DNA, 75 bp, synthetic construct
  source 1..75: mol_type = other DNA
ctgctgtgctgctttggcgcatcggtgccgaatcatgccgccatttactgtggcaacggtgagctgcttcaccat

SEQ ID NO: 823009 - DNA, 75 bp, synthetic construct
  source 1..75: mol_type = other DNA
ggcaggcgatatcctgctgtgctgctttggcgcatcggtgccgaatcatgccgccatttactgtggcaacggtga

SEQ ID NO: 823010 - DNA, 75 bp, synthetic construct
  source 1..75: mol_type = other DNA
ccacagccaccccggtggtctgccctggctgagcgaggccgaccggcggctgcagataaaaagtgcactgtcctg

SEQ ID NO: 823011 - DNA, 75 bp, synthetic construct
  source 1..75: mol_type = other DNA
cgactggtttttaccgtgtcgcactgacagaggcgcagccgggcgatgtgctgctgtgctgctttggttcatcgg

SEQ ID NO: 823012 - DNA, 75 bp, synthetic construct
  source 1..75: mol_type = other DNA
actctcagagcatttcgagaatgttaaaaccaaggttcaaggtactgtagtaatgttttccgcttcagggaaaaa

SEQ ID NO: 823013 - DNA, 75 bp, synthetic construct
  source 1..75: mol_type = other DNA
cgggatgcataccatctggcgggaattgagatgccggattttcatcgcggggatgactggtggcgtaacggtcag

SEQ ID NO: 823014 - DNA, 75 bp, synthetic construct
  source 1..75: mol_type = other DNA
ggacggtattcgtttttttgatcacgacggtggtgtcgttcgcgcgccgaaacacgcggcgatcgtgataaacgc

SEQ ID NO: 823015 - DNA, 75 bp, synthetic construct
  source 1..75: mol_type = other DNA
gtggctggtctgccggggagacattcataaatttcgctgtgtgccgcacctgaccggacggcgctttgagcacgg

SEQ ID NO: 823016 - DNA, 75 bp, synthetic construct
  source 1..75: mol_type = other DNA
ctgacacggcaaaagatttgctcgcgatgcgcctgcagctggaacctgactctaaatcggcgacaccaggtgcga

SEQ ID NO: 823017 - DNA, 75 bp, synthetic construct
  source 1..75: mol_type = other DNA
tacgtgtggggctggggagccgaggaggagtgctggctgattgataaaacaatcgtcctcggtcgctacgacgag

SEQ ID NO: 823018 - DNA, 75 bp, synthetic construct
  source 1..75: mol_type = other DNA
aagacgctgctgatctgacatttcgtttttacctgaagtgtccgcattgtagcgaggagcagaccctggtatttg

SEQ ID NO: 823019 - DNA, 75 bp, synthetic construct
  source 1..75: mol_type = other DNA
gctgactatcagcagcccacacagcaactaccgggtcgttataacaaggccgcagctgatgcactggctgcagta

SEQ ID NO: 823020 - DNA, 75 bp, synthetic construct
  source 1..75: mol_type = other DNA
accggttaaaagcgtcgcaaaggctgactatcagcagcccgcacaacaactacctggtcgttataacaaggctgc

SEQ ID NO: 823021 - DNA, 75 bp, synthetic construct
  source 1..75: mol_type = other DNA
atagcgaacaaccaaaatctcgtggaattcgttcctataggattttgcgagctattgatcggatgcgaggtagtg

SEQ ID NO: 823022 - DNA, 75 bp, synthetic construct
  source 1..75: mol_type = other DNA
cggggtgtcgccagtctgattttacgccacattttgcaggtcgcccatgacagatgccttcatcgcctgagctta

SEQ ID NO: 823023 - DNA, 75 bp, synthetic construct
  source 1..75: mol_type = other DNA
gtgaatgagctacgcagtaaagccgccgctaaaacttcgcagccagcaccgcagcaggaagcaccggaacaggcg

SEQ ID NO: 823024 - DNA, 75 bp, synthetic construct
  source 1..75: mol_type = other DNA
ctacgagtatggaacgaatggtatctggcgaatgcccggttgcatacagactggccagtaagttcgctccccgtg

SEQ ID NO: 823025 - DNA, 75 bp, synthetic construct
  source 1..75: mol_type = other DNA
tgcctggagtatttagccggctaccttacccgcatactattacctttgacccatgggggttatataacaatagta

SEQ ID NO: 823026 - DNA, 75 bp, synthetic construct
  source 1..75: mol_type = other DNA
agtatatatttcaaatgaatacggtgtcagtaaaaaagaaggggggctttttgatcttgttattaatgagtccgg

SEQ ID NO: 823027 - DNA, 75 bp, synthetic construct
  source 1..75: mol_type = other DNA
cgcagtggcattgcagcagattaaagagcgtggtgctttaccgatgattgatcgcggtgatatgatcctacccac

SEQ ID NO: 823028 - DNA, 75 bp, synthetic construct
  source 1..75: mol_type = other DNA
caattagatctaccaattggtcggaaaacaaatgagatcgatcgttttaaccgttttgctaatgattccaatgtt

SEQ ID NO: 823029 - DNA, 75 bp, synthetic construct
  source 1..75: mol_type = other DNA
tcctctccaggtaagtgcgcattattctttccagactgatacaccatattctaatcaaatggaatttttgttaga

SEQ ID NO: 823030 - DNA, 75 bp, synthetic construct
  source 1..75: mol_type = other DNA
gctcgattcggagttgagacaaacaaaatctctccagactactttaaacaagctggatttactgatgagaatgaa

SEQ ID NO: 823031 - DNA, 75 bp, synthetic construct
  source 1..75: mol_type = other DNA
atgtcatcaatatctaacgacgcgccacaaaagcgccgaattattcctaaccccggcttgtggttggcgatcatt

SEQ ID NO: 823032 - DNA, 75 bp, synthetic construct
  source 1..75: mol_type = other DNA
atgtacgaccaggtcctgggtgacaacatgaaaaacaaattgttatttatgatgttaacaatactgggtgcgcct

SEQ ID NO: 823033 - DNA, 75 bp, synthetic construct
  source 1..75: mol_type = other DNA
tttcctgggcggcaaattatcattacgatcttaatttacagtcaatttcttcttattccatggaacaacaagcat

SEQ ID NO: 823034 - DNA, 75 bp, synthetic construct
  source 1..75: mol_type = other DNA
gcatctatagttgctgattattggctattgattaactatggactggtggctgatttggcaaatgttaactatgta

SEQ ID NO: 823035 - DNA, 75 bp, synthetic construct
  source 1..75: mol_type = other DNA
gcgcatctcgaacgcgtcagcaaggcggtagaagaggcgaaagcgacagggcacatcaaagtgatcactggcggt

SEQ ID NO: 823036 - DNA, 75 bp, synthetic construct
  source 1..75: mol_type = other DNA
gttactcgcgatattggatctcgccgttcgtgacgttcatttcctgctggaaggtggcgaaatgtcaggaaaacg

SEQ ID NO: 823037 - DNA, 75 bp, synthetic construct
  source 1..75: mol_type = other DNA
tttgtcggttgtttcgcaagaaggtaatagcaaccgggcaaagattgaccagacaggagattataaccttgcata

SEQ ID NO: 823038 - DNA, 75 bp, synthetic construct
  source 1..75: mol_type = other DNA
aaaacgcgcggagaactcaccgacggggcccgtgtgggggtcctgtccgtaaccgcaaaaggctgtaacaccgag

SEQ ID NO: 823039 - DNA, 75 bp, synthetic construct
  source 1..75: mol_type = other DNA
tttcactggcaagcacctcattcagttgcctggcatttaaatcacaacccaatgtaactccggaggctttagata

SEQ ID NO: 823040 - DNA, 75 bp, synthetic construct
  source 1..75: mol_type = other DNA
atatgaatcacccggaaactattctcggcaccgcgaaggcgctgaaaatgactctgtcgggtttttccaactctg

SEQ ID NO: 823041 - DNA, 75 bp, synthetic construct
  source 1..75: mol_type = other DNA
gcttctcacttgtttattcatgaaatgatgcatgtttggcaatatcagaaagggtatgcagttaagttgcgtggt

SEQ ID NO: 823042 - DNA, 75 bp, synthetic construct
  source 1..75: mol_type = other DNA
cgctgtggcaaaactactacgatgcgctggcgcctctggcaaaaaatgggcgtatcgagctgccgtcgattcccg

SEQ ID NO: 823043 - DNA, 75 bp, synthetic construct
  source 1..75: mol_type = other DNA
atgattccatttaacgcaccgccggtggtgggaaccgaactcgactatatgcagtcggcaatgggtagcggcaaa

SEQ ID NO: 823044 - DNA, 75 bp, synthetic construct
  source 1..75: mol_type = other DNA
tcactgcccggtgctggctacggtcagtatgaacacaagatcgatagtctgattgccaaattcaaagaagctggc

SEQ ID NO: 823045 - DNA, 75 bp, synthetic construct
  source 1..75: mol_type = other DNA
cactatgtgcactaataatactgtttttttcattagcatcatacaaagttaaagaaaaagagatgttaacatcat

SEQ ID NO: 823046 - DNA, 75 bp, synthetic construct
  source 1..75: mol_type = other DNA
ttgcaagggaagccaggtctcatgcaataacagatgaagagttgtgccgggccattttagaaacggaacaaggta

SEQ ID NO: 823047 - DNA, 75 bp, synthetic construct
  source 1..75: mol_type = other DNA
gagcgtggcgctttaccgatgattgatcgcggcgatattcgtcaggctatcgatcgttgcagcaatatctgggct

SEQ ID NO: 823048 - DNA, 75 bp, synthetic construct
  source 1..75: mol_type = other DNA
agtatgaacataaaatcggtgacctgattgcccgatttaaagaggctggtggggtggtaaatgaagttgagttat

SEQ ID NO: 823049 - DNA, 75 bp, synthetic construct
  source 1..75: mol_type = other DNA
gcaccaaacgtgcctgtccgtatccgttccggctcacaggccagtgcggcgtttggtcagggttccatgctggca

SEQ ID NO: 823050 - DNA, 75 bp, synthetic construct
  source 1..75: mol_type = other DNA
ccaataatactcaagccattatattttgtatcatgtattatgcttccattacatgcaataccaaaaggttattgg

SEQ ID NO: 823051 - DNA, 75 bp, synthetic construct
  source 1..75: mol_type = other DNA
agctttctttctggcggtgtgactcaggctttggaaagtaaactaaatgagaggcatatcactccactttctcca

SEQ ID NO: 823052 - DNA, 75 bp, synthetic construct
  source 1..75: mol_type = other DNA
tactcaatacttcgctgacaagccaccatatgtcatggggcaagtttagcagaactcttcatgtattgaatgaag

SEQ ID NO: 823053 - DNA, 75 bp, synthetic construct
  source 1..75: mol_type = other DNA
cctccccgctcggcctcgccgatgagcacatcgagacggagaaaatgctggctgattctggcatcgtttacaccc

SEQ ID NO: 823054 - DNA, 75 bp, synthetic construct
  source 1..75: mol_type = other DNA
taatgcaagaatatttataaaacctcaccctaaagagcctaaaaaaaatattaatgcaattcaaaaggcaataaa

SEQ ID NO: 823055 - DNA, 75 bp, synthetic construct
  source 1..75: mol_type = other DNA
tggaaaaagcagggtacgcatgagtatcaggtgctggtgacacgctgtaagcagacgttgcatcaagttgagcca

SEQ ID NO: 823056 - DNA, 75 bp, synthetic construct
  source 1..75: mol_type = other DNA
aagctttcctcgatatgttggcgtggtcagagggaacggataacgggcgacaaccgacacgtaaccacggttatg

SEQ ID NO: 823057 - DNA, 75 bp, synthetic construct
  source 1..75: mol_type = other DNA
caaccgacacgtaaccacggttatgatgttattgttggcggcgaactgtttactgattactccgatcaccctcgc

SEQ ID NO: 823058 - DNA, 75 bp, synthetic construct
  source 1..75: mol_type = other DNA
caaccgacacgtaaccacggttatgatgttattgttggtggcgaactgttcactgattactccgatcaccctcgc

SEQ ID NO: 823059 - DNA, 75 bp, synthetic construct
  source 1..75: mol_type = other DNA
tggtagtgaatgaagtgaaaccgctgctaccgcgtaagccgtacgatgcgccgaactgggtgcgtaccgatcgtc

SEQ ID NO: 823060 - DNA, 75 bp, synthetic construct
  source 1..75: mol_type = other DNA
tcaaatcaacagcagccggacgttaccagcttctttcccgttggtgggacgcctaccgtaagcagcttggcctga

SEQ ID NO: 823061 - DNA, 75 bp, synthetic construct
  source 1..75: mol_type = other DNA
cactgattactccgatcacccccgcaaacttgtcacgctaaatccgaaactcaaatcaacagccgctggacgtta

SEQ ID NO: 823062 - DNA, 75 bp, synthetic construct
  source 1..75: mol_type = other DNA
tcgtttcacctggtcagaacgtaatgcgctgctgtttgacggcatctccacgtttaacgtgaatgatggtggtga

SEQ ID NO: 823063 - DNA, 75 bp, synthetic construct
  source 1..75: mol_type = other DNA
gagccagctgtagccgcccaggcggagcaaaatccgcaggtggggcaagtgatgccgggcgtgcagggcgctgat

SEQ ID NO: 823064 - DNA, 75 bp, synthetic construct
  source 1..75: mol_type = other DNA
aggtatatggaaaaagttgatgttttgatattaatatttggatatataaatgccctttttttagggaaggtgcga

SEQ ID NO: 823065 - DNA, 75 bp, synthetic construct
  source 1..75: mol_type = other DNA
tgccctttttttaggggtgttcatggcggttgttcttgcccccttatttccagacaggggttgtatcttaagtta

SEQ ID NO: 823066 - DNA, 75 bp, synthetic construct
  source 1..75: mol_type = other DNA
tgacattaatatttggacatataagtgcgctttttgtaggggtattcatggcggtcatttgtattgaatactggc

SEQ ID NO: 823067 - DNA, 75 bp, synthetic construct
  source 1..75: mol_type = other DNA
agccctgcaagctcgtgccgaattgcgtcaaaaagtacgtaatagtacagattttaaaccgcttccggcggaaat

SEQ ID NO: 823068 - DNA, 75 bp, synthetic construct
  source 1..75: mol_type = other DNA
gggctaccgaaagccccctccaccttcaacccgctctactctatggatcgtgccgttgcgcgacggaacgtcgtg

SEQ ID NO: 823069 - DNA, 75 bp, synthetic construct
  source 1..75: mol_type = other DNA
gggctgccgaaagcgccttccacctttaatccgctctactcaatggatcgtgccgtcgcgcggcgtaacgtcgta

SEQ ID NO: 823070 - DNA, 75 bp, synthetic construct
  source 1..75: mol_type = other DNA
ggccttgcgctgctgctgcaacttcaccgtcgtcgccagaacctgaacattgattcagtaagtgagatgcgcgga

SEQ ID NO: 823071 - DNA, 75 bp, synthetic construct
  source 1..75: mol_type = other DNA
ccactgagcgcagttttgacgggcgaatgacagttacgttaaccggccagcacaacgacaccggccagcaacttt

SEQ ID NO: 823072 - DNA, 75 bp, synthetic construct
  source 1..75: mol_type = other DNA
cacccttgataccgatggtaacaaagagaacgtcgacaaccgtgttgcaacggtgaccgtatcctccaccaccgg

SEQ ID NO: 823073 - DNA, 75 bp, synthetic construct
  source 1..75: mol_type = other DNA
ttcggccgtccttagttctaatagtggtactatatcgaagtttaatcggatgggaaaactggctggttttggaag

SEQ ID NO: 823074 - DNA, 75 bp, synthetic construct
  source 1..75: mol_type = other DNA
ccacggcgcgcagttttgacgggcgaataagggggtgcggacgatttcttggacggtttatacggacatcaatcc

SEQ ID NO: 823075 - DNA, 75 bp, synthetic construct
  source 1..75: mol_type = other DNA
gcggtcgtgttaaagccctcccgggtgttcgttaccacaccgtacgtggtgcgcttgactgctccggcgttaaag

SEQ ID NO: 823076 - DNA, 75 bp, synthetic construct
  source 1..75: mol_type = other DNA
cactggtagcgatactggtgccttttttcttggtgggatgcgtcagcatggataaggcgcgccagcttttcgata

SEQ ID NO: 823077 - DNA, 75 bp, synthetic construct
  source 1..75: mol_type = other DNA
cttgctggtttaacgatagcccctgcgttactgtcacttttgggttgcaagcaggaagatattgatagcggtacg

SEQ ID NO: 823078 - DNA, 75 bp, synthetic construct
  source 1..75: mol_type = other DNA
tagatattggcttaacgcgacttgaatttttgcgtatatcaggaaaaggccttgcaggtttaactattgcacctg

SEQ ID NO: 823079 - DNA, 75 bp, synthetic construct
  source 1..75: mol_type = other DNA
agcaaagatgttttcgtacacttctccgctatccagggtaatggcttcaaaactctggctgaaggtcagaacgtt

SEQ ID NO: 823080 - DNA, 75 bp, synthetic construct
  source 1..75: mol_type = other DNA
agggagggattataattaaggcgctcctgattttgggaagcatgatcttctcttgcagcatggttgcggcaaaga

SEQ ID NO: 823081 - DNA, 75 bp, synthetic construct
  source 1..75: mol_type = other DNA
gtcgatcataaacgctgtattggctgtagcgcctgtactacggcatgcccgtggatgatggccaccgtaccgaaa

SEQ ID NO: 823082 - DNA, 75 bp, synthetic construct
  source 1..75: mol_type = other DNA
tggcgcgagcctgcacttcgcaccgctggaattcccggctgtcgctgatttcgaatgtacgactgcgctggttga

SEQ ID NO: 823083 - DNA, 75 bp, synthetic construct
  source 1..75: mol_type = other DNA
accacctggcgtgctgagctggatggtaaacctatcattgtttgttctactggtatcggtggtccttccacctct

SEQ ID NO: 823084 - DNA, 75 bp, synthetic construct
  source 1..75: mol_type = other DNA
gccgtggtgacgccatccgtgatcaaaacggagctgctggcactgtttgaagagtgggaaagcgccgggctggtt

SEQ ID NO: 823085 - DNA, 75 bp, synthetic construct
  source 1..75: mol_type = other DNA
gaaggtcagaacgttgagttcgaaattcaggacggccagaaaggtccggcagctgttaacgtaacagctatctga

SEQ ID NO: 823086 - DNA, 75 bp, synthetic construct
  source 1..75: mol_type = other DNA
atgccacgagtggcggcgaaatgggcactggtagcgatactggtgccttttttcttggcgggatgcgtcagcctg

SEQ ID NO: 823087 - DNA, 75 bp, synthetic construct
  source 1..75: mol_type = other DNA
agcggcgaagtcaattggtgcaaccactcacgttggcgtgacggcttcttccgacaccttctacccaggccagga

SEQ ID NO: 823088 - DNA, 75 bp, synthetic construct
  source 1..75: mol_type = other DNA
acgctgtcaggaaaagcgcgtatcgcagtctggtatgcagcgtgcgccgttcgacctgaagcgattggtgtaggt

SEQ ID NO: 823089 - DNA, 75 bp, synthetic construct
  source 1..75: mol_type = other DNA
gaaatcaccgctctggctgcggcgacgctggcgctggaaatgctgtatattcaggcggcgaaaaagggcgagtaa

SEQ ID NO: 823090 - DNA, 75 bp, synthetic construct
  source 1..75: mol_type = other DNA
aatggcgctggtacactttgacgcccacaccgatacctacgcgaacggttgtgaatttgaccacggcaccatgtt

SEQ ID NO: 823091 - DNA, 75 bp, synthetic construct
  source 1..75: mol_type = other DNA
ttccagccgtatgacagcgatgccgactgggtgatcaccggcgtgccgttcgacatggccacctctggccgtgcc

SEQ ID NO: 823092 - DNA, 75 bp, synthetic construct
  source 1..75: mol_type = other DNA
cgtatcagttccctcacggtaaatctgtctccgggggccagcctgccccttgtccgtaccgctctgcataacgtc

SEQ ID NO: 823093 - DNA, 75 bp, synthetic construct
  source 1..75: mol_type = other DNA
acattagcccggccacacggtgagccgctctcatcgttgataaaaaaattcattgtgtggtcgatgataatcagc

SEQ ID NO: 823094 - DNA, 75 bp, synthetic construct
  source 1..75: mol_type = other DNA
ttcgccaggtttcgactaacctggcctgggaacacaaccgcttcccgtggaatttcgacatgcgcgagcgtctga

SEQ ID NO: 823095 - DNA, 75 bp, synthetic construct
  source 1..75: mol_type = other DNA
ggcagggaagctcggtgagctaatgcaaatcacgctgctgattaaaactgaggggctgacgcaactggtccagcc

SEQ ID NO: 823096 - DNA, 75 bp, synthetic construct
  source 1..75: mol_type = other DNA
gccataccgcgccgtccattaagcgtactcatatggaacttggtggcaaagcgccagtgattgtttttgatgatg

SEQ ID NO: 823097 - DNA, 75 bp, synthetic construct
  source 1..75: mol_type = other DNA
cggtatggacgaaagatgtgggcagggcgcatcgcgtcagcgcgcggctgcaatatggttgtacctgggtcaata

SEQ ID NO: 823098 - DNA, 75 bp, synthetic construct
  source 1..75: mol_type = other DNA
tctgaaacggcggtgggatgtgacaccggcaatcatccgtgccgtggaatacctttcccgggtcccggtattaca

SEQ ID NO: 823099 - DNA, 75 bp, synthetic construct
  source 1..75: mol_type = other DNA
atgcgtcttttttatcttaatcatttcccgtattcctggcactggaatgtcagattcagaccccaggaagcggtc

SEQ ID NO: 823100 - DNA, 75 bp, synthetic construct
  source 1..75: mol_type = other DNA
tggttatcgcgttaatcgccgccgcacttggctttggtgggctggcaggtactgcggcaggcgcagcaaaaatcg

SEQ ID NO: 823101 - DNA, 75 bp, synthetic construct
  source 1..75: mol_type = other DNA
tgttcttgctttgcgctggtgtgcttattatcgcgttaatgctatgcgcatacgtgattgtaatgattggcgcgc

SEQ ID NO: 823102 - DNA, 75 bp, synthetic construct
  source 1..75: mol_type = other DNA
ggaacgcggtacggtacaatcatcagtatggacttttcgtcagcgtaacccgaatgaaaaatggtttatcgttgt

SEQ ID NO: 823103 - DNA, 75 bp, synthetic construct
  source 1..75: mol_type = other DNA
gtagagcaggagtcacccactcaggagggctgggatttaactgataaagcgacagggttactggaacttaacgtc

SEQ ID NO: 823104 - DNA, 75 bp, synthetic construct
  source 1..75: mol_type = other DNA
tgccttgatcgtcaaactgaaccttatcaccatgccggaacagatcatcaaagtgagtgagtgccaaccgacaac

SEQ ID NO: 823105 - DNA, 75 bp, synthetic construct
  source 1..75: mol_type = other DNA
gctaacgtgttctgggctgatgactcaatccgcctgctgtctcagccgatcccggtaacccatgaactgtttgct

SEQ ID NO: 823106 - DNA, 75 bp, synthetic construct
  source 1..75: mol_type = other DNA
acaagtttgcgtagtctttagtgacgagcaagggctggctacatttgcagaacatctgtcatccctcggtctagg

SEQ ID NO: 823107 - DNA, 75 bp, synthetic construct
  source 1..75: mol_type = other DNA
cgatcgcgataatgaacaggcgcagctttatacacaaattcaggcgcagatccgtgaacaggaacgcgcacgagc

SEQ ID NO: 823108 - DNA, 75 bp, synthetic construct
  source 1..75: mol_type = other DNA
ccagtccaaagtctcgcggatgttgacgaagtttggtgctgtacgcacccgcaacgcaaaaatggaaatggttta

SEQ ID NO: 823109 - DNA, 75 bp, synthetic construct
  source 1..75: mol_type = other DNA
taattcatttattgcaatcaggtaatataagcatggaaagagattttattataagagatatatatgtgagccaga

SEQ ID NO: 823110 - DNA, 75 bp, synthetic construct
  source 1..75: mol_type = other DNA
tgatcaaagggcgtatatcacggcgtcttccggtaacgaactcttctggcattggcgttgaattattacctgtgg

SEQ ID NO: 823111 - DNA, 75 bp, synthetic construct
  source 1..75: mol_type = other DNA
gcatgcccgcaaaaacgtggcgtatgtactcgtgtatatattaccactcctaaaaaaccgaactccgcgctgcgt

SEQ ID NO: 823112 - DNA, 75 bp, synthetic construct
  source 1..75: mol_type = other DNA
cgatgctgtcgttgtgattcacaccagtccgggcgcggcacagttgattgcacgtctgctggactcactgggtaa

SEQ ID NO: 823113 - DNA, 75 bp, synthetic construct
  source 1..75: mol_type = other DNA
actacccctgctaacggtttcaccgtcaaagacctgtacgaagcgattttagagctgttcgaccaggagctttaa

SEQ ID NO: 823114 - DNA, 75 bp, synthetic construct
  source 1..75: mol_type = other DNA
gaaactgaaattcaaagcattacaggagcgggcaaaagaaaaaattgccgacattgccgaaagtcgcgaactcac

SEQ ID NO: 823115 - DNA, 75 bp, synthetic construct
  source 1..75: mol_type = other DNA
gagatttatcgtcgtcagcgggagatgaaggaagagctgaataatcttgatgatttacgctcaatccgagcgttt

SEQ ID NO: 823116 - DNA, 75 bp, synthetic construct
  source 1..75: mol_type = other DNA
ctggtgcctggcctacgttgagatgctggcgcgtgatgaaagccgcttgcaggatgcgcttaagcgtctggatgt

SEQ ID NO: 823117 - DNA, 75 bp, synthetic construct
  source 1..75: mol_type = other DNA
acagccaccgctgatgatgtcgctccgacgggtcagcaaatctggcaggaactgcaaagcggcaaatggggtgag

SEQ ID NO: 823118 - DNA, 75 bp, synthetic construct
  source 1..75: mol_type = other DNA
aaaagaacggcgaaccagctatagccgtgaatttaaggtccgtctggctaagcaggcattacagcctggggctgt

SEQ ID NO: 823119 - DNA, 75 bp, synthetic construct
  source 1..75: mol_type = other DNA
tgggtttgcgttcgggggagcatgtaattgtgcagcttcccaacgacaacgcgtttgttaccctgctgttcgcct

SEQ ID NO: 823120 - DNA, 75 bp, synthetic construct
  source 1..75: mol_type = other DNA
gaaatgaaagatgcgttaaatgcactggatggtttgaactcgatcagaaaactagttattagcccagaaaatttt

SEQ ID NO: 823121 - DNA, 75 bp, synthetic construct
  source 1..75: mol_type = other DNA
tcgctgcaatcgtgcctcgacaagcgcgcggcaaaaggcggtgtttcaccgcagcaggtggcacaggcgattgct

SEQ ID NO: 823122 - DNA, 75 bp, synthetic construct
  source 1..75: mol_type = other DNA
gcgaaattgccccgttcaccgtcacgccggaacttatcgcagtggcaaaggatgccagaaagcgggaaatcgagg

SEQ ID NO: 823123 - DNA, 75 bp, synthetic construct
  source 1..75: mol_type = other DNA
ctcgatagcgtttctgaccgcgaccacgtgctggagctgctttctgcggccgctatcggtatggtgcatctgtcg

SEQ ID NO: 823124 - DNA, 75 bp, synthetic construct
  source 1..75: mol_type = other DNA
atggcactttggggcgggcgttttacccaggcagcagatcaacggttcaaacaattcaacgactcactgcgtttt

SEQ ID NO: 823125 - DNA, 75 bp, synthetic construct
  source 1..75: mol_type = other DNA
ctgcaaagcggcaaatggggtgaaataactccgttcaccgtcacgccggaacttatcgcagcggcaaaagatgct

SEQ ID NO: 823126 - DNA, 75 bp, synthetic construct
  source 1..75: mol_type = other DNA
tggcggatgtacagtcatcgcctggtagcgtggcgcaggtgcgtgaaacggcggcttatttgacacgcttcgcca

SEQ ID NO: 823127 - DNA, 75 bp, synthetic construct
  source 1..75: mol_type = other DNA
agtaccggataatgaatactttgacggacttaatctccatccagagagttgcgagaggatttttagcgcgatctg

SEQ ID NO: 823128 - DNA, 75 bp, synthetic construct
  source 1..75: mol_type = other DNA
acgagatttatcagcgccagcgtgaaatgaaggagcagctttcccggctgtccatactggacgaggtgagagcgt

SEQ ID NO: 823129 - DNA, 75 bp, synthetic construct
  source 1..75: mol_type = other DNA
atgatgcaaattaaaaaaatcaccagtccccgctacaccgagtccggtgcgattgactgcgacgtgctgtttgaa

SEQ ID NO: 823130 - DNA, 75 bp, synthetic construct
  source 1..75: mol_type = other DNA
acggacgccggccgggccgtggcacagcctctgctgctggcagaacaggaccgcctccgggcagaacagcgtgcg

SEQ ID NO: 823131 - DNA, 75 bp, synthetic construct
  source 1..75: mol_type = other DNA
gcgccaatcgattgtttaattcaacaattacaacagcgcctgcgtgattgcgatattaagcatctgaccgatgtg

SEQ ID NO: 823132 - DNA, 75 bp, synthetic construct
  source 1..75: mol_type = other DNA
ggcaaattgcagaccttattgactctaaaccaaatgttcccggatgtggatatgattcaatgggtttacctgcta

SEQ ID NO: 823133 - DNA, 75 bp, synthetic construct
  source 1..75: mol_type = other DNA
aacaggtgaaactgtcaatgccggaactggaagaactggcggcagcaatggcgcaagcacaggtcgaacgcaatg

SEQ ID NO: 823134 - DNA, 75 bp, synthetic construct
  source 1..75: mol_type = other DNA
atgaaaatcagagcggtaaagggcatcagaaacgcccattatcttgaaaatggtgcggttgactgcgaggtgtta

SEQ ID NO: 823135 - DNA, 75 bp, synthetic construct
  source 1..75: mol_type = other DNA
cagcgtggcgcaggtgcgtgaaacagcggcttatctgacgcgcttcgccaaaacgcgcggtgtggcgattgtcat

SEQ ID NO: 823136 - DNA, 75 bp, synthetic construct
  source 1..75: mol_type = other DNA
cgaaccgcccttgcatggggtgatgccgataatcagcaagtaaagatgtcgatgccagagcttgaggagctggct

SEQ ID NO: 823137 - DNA, 75 bp, synthetic construct
  source 1..75: mol_type = other DNA
cgtaccgacaggccagcgcatctgggaagagttacagagcggcaaatggggcgaaattgccccgttcaccgtcac

SEQ ID NO: 823138 - DNA, 75 bp, synthetic construct
  source 1..75: mol_type = other DNA
tcagcgggagatgaaggaagaactgaataatctggaggatttgggttcaatcaggaaactggtcgttagctcaga

SEQ ID NO: 823139 - DNA, 75 bp, synthetic construct
  source 1..75: mol_type = other DNA
gaagagttacagagcggcaagtggggggaaatcgccccattcaccgtcacgcctgaacttatcgcagcggcaaaa

SEQ ID NO: 823140 - DNA, 75 bp, synthetic construct
  source 1..75: mol_type = other DNA
atgcctgccaccagcgaagtgtggtggccggaagatgcagatcatattgcttttattcgcgggcgtattggtttt

SEQ ID NO: 823141 - DNA, 75 bp, synthetic construct
  source 1..75: mol_type = other DNA
ccggaagatgccgaacatatttcttttattcgcgggcgtattggttttgaactgcctgactggtttatcccgaag

SEQ ID NO: 823142 - DNA, 75 bp, synthetic construct
  source 1..75: mol_type = other DNA
ccggaagatgctgagcatattgcttttattcgcgggcgtattggttttgaactgcctgactggtttatcccgaag

SEQ ID NO: 823143 - DNA, 75 bp, synthetic construct
  source 1..75: mol_type = other DNA
actcggttttaaagatccggcttattttgcccgcttttttaatcgcttagtcggttgctcgcccagtgcttatcg

SEQ ID NO: 823144 - DNA, 75 bp, synthetic construct
  source 1..75: mol_type = other DNA
taaggatccggcttattttgcgcgcttttttaatcgtttagtcggttgctcgcccagtgcttatcgtgccaaaaa

SEQ ID NO: 823145 - DNA, 75 bp, synthetic construct
  source 1..75: mol_type = other DNA
cggaaattgagtggacggttcgcgtgatctccgcactgctgttgctgggtgttctggcggaaatcgcttcctgga

SEQ ID NO: 823146 - DNA, 75 bp, synthetic construct
  source 1..75: mol_type = other DNA
ctgaagtttacgcgcttgggcgaacagctggctggaacgcctgccgcgccgccatgctaaacaaggaggagaaca

SEQ ID NO: 823147 - DNA, 75 bp, synthetic construct
  source 1..75: mol_type = other DNA
cacagcagtaactggagaccgtgcttttagtgcataccttcatacaggtattgaatggaactctcttgcaaatga

SEQ ID NO: 823148 - DNA, 75 bp, synthetic construct
  source 1..75: mol_type = other DNA
gctgccgatgacggactgttcccaccgatttttgcccgtgtaaataaagcgggcacgccagtggcggggctgatt

SEQ ID NO: 823149 - DNA, 75 bp, synthetic construct
  source 1..75: mol_type = other DNA
ccggaagatgcagatcatattgcttttattcgcgggcgtattggttttgaactgcctgactggtttatcccgaag

SEQ ID NO: 823150 - DNA, 75 bp, synthetic construct
  source 1..75: mol_type = other DNA
tttcttcgctggtgctattgctgttttcgacaagacctggaagggaccggcaatcagctacatcgggcgctatga

SEQ ID NO: 823151 - DNA, 75 bp, synthetic construct
  source 1..75: mol_type = other DNA
cggcaaccatcctcaaactaatgaatatgacctgattagcaatgtcacacactggatgccgctaccagaacctcc

SEQ ID NO: 823152 - DNA, 75 bp, synthetic construct
  source 1..75: mol_type = other DNA
agccattttcatcagcactggacagtaccggattacgctaacgaactgcatatcaccgaatcacgcctcacggac

SEQ ID NO: 823153 - DNA, 75 bp, synthetic construct
  source 1..75: mol_type = other DNA
gtgctggcagaaggtgccaacagcgtcctggcggaacgccacgggttagtgactcgtcctgctggcgaagcgatg

SEQ ID NO: 823154 - DNA, 75 bp, synthetic construct
  source 1..75: mol_type = other DNA
ctgataagcgcctgccagcaccgcgagccgcaaaatctgtttccgctttatcatcacaacgtagagcgcagcctg

SEQ ID NO: 823155 - DNA, 75 bp, synthetic construct
  source 1..75: mol_type = other DNA
tgttccaccgctgcgccagttactctggcgtcatttacgtcgtcatggcctgtggcatctggcgggcgatgttat

SEQ ID NO: 823156 - DNA, 75 bp, synthetic construct
  source 1..75: mol_type = other DNA
gggaaattgccccgtttacagtcacacctgaacttatcgcagcggcaaaagatgccaaaaaacgggaaattgagg

SEQ ID NO: 823157 - DNA, 75 bp, synthetic construct
  source 1..75: mol_type = other DNA
tatgccggtgcaatacgccggtaacggctggctgctggtgggcgatgcgttgcgcagttgcgtcaataccggaat

SEQ ID NO: 823158 - DNA, 75 bp, synthetic construct
  source 1..75: mol_type = other DNA
tgttccaccgctgcgccagttgctctggcgtcatttacgtcgtcacggcttgtggcatctgacgggcgatgttat

SEQ ID NO: 823159 - DNA, 75 bp, synthetic construct
  source 1..75: mol_type = other DNA
gatatcatcaatttgactaaaaaaatgctgacttttttacagtcaaggaatgtcaaactagttgctgtcgcatgt

SEQ ID NO: 823160 - DNA, 75 bp, synthetic construct
  source 1..75: mol_type = other DNA
gacattagctcttgatgttgtgctggatatcgttttctacaaagtgctgattgcactggagatgttgttacctgt

SEQ ID NO: 823161 - DNA, 75 bp, synthetic construct
  source 1..75: mol_type = other DNA
gttcagctgactaacagcggctctgatccgctggtcggggttgtatgggcagatgccggaaccagtgcagaagaa

SEQ ID NO: 823162 - DNA, 75 bp, synthetic construct
  source 1..75: mol_type = other DNA
gggtgtgtggtgtcatttgtggtgacgatattctccgcgcccgttatgtggtgctggcagaaggtgccaacagcg

SEQ ID NO: 823163 - DNA, 75 bp, synthetic construct
  source 1..75: mol_type = other DNA
acccatgcactcgcggaactcctcccgcaatttcacctgaccgcgcctcttgaacgacgcatcactcacgaaagc

SEQ ID NO: 823164 - DNA, 75 bp, synthetic construct
  source 1..75: mol_type = other DNA
cccgcatttttcgtgcccgctccgttgatgttatcgatccctctccggacaaaccgaccgtcatgttgcataacg

SEQ ID NO: 823165 - DNA, 75 bp, synthetic construct
  source 1..75: mol_type = other DNA
aaggccaggcctcagcattttattatggtgatcccctgggcgaaatgcgcctggtaagcagagtttttgaaatgt

SEQ ID NO: 823166 - DNA, 75 bp, synthetic construct
  source 1..75: mol_type = other DNA
ccgggccgtcgacagccggggccgcactgtcgatttttatctctcctcccgtcgtaacagcaaagctgcatacct

SEQ ID NO: 823167 - DNA, 75 bp, synthetic construct
  source 1..75: mol_type = other DNA
ggggctgtccaataagcagattgcctcagtgttgaatatttccgagcaaacagtgaaagtacacattcgcaatct

SEQ ID NO: 823168 - DNA, 75 bp, synthetic construct
  source 1..75: mol_type = other DNA
ccagcggcgttcgctaaaatgaacaaaaatggcgtaccggtaacgctggttatttcgcagctggtgattactact

SEQ ID NO: 823169 - DNA, 75 bp, synthetic construct
  source 1..75: mol_type = other DNA
gacccggtaacgaaaaccattgcagcactcatcattctttgggcactggcattaacgcagttcggcggcacgaaa

SEQ ID NO: 823170 - DNA, 75 bp, synthetic construct
  source 1..75: mol_type = other DNA
ttgcaaagttagcgatgaggcagccttttgtcttattcaaaggccttacatttcaaaaactctgcttaccaggcg

SEQ ID NO: 823171 - DNA, 75 bp, synthetic construct
  source 1..75: mol_type = other DNA
gacgtcccggcgctgcgcgaaattttgcagcgtacgggcatgctcgaaggtgggccgaaaatagcactgccgggt

SEQ ID NO: 823172 - DNA, 75 bp, synthetic construct
  source 1..75: mol_type = other DNA
gtggtgctctctgatgcgatgatgggctatctccatttcattgcaaatattccagtcaaaggcactcgctggcta

SEQ ID NO: 823173 - DNA, 75 bp, synthetic construct
  source 1..75: mol_type = other DNA
ctgcgcctgtcgttcgtgccgcctacgataatgaactggtggaagccgttaaacgttttcaggcatggcaaggat

SEQ ID NO: 823174 - DNA, 75 bp, synthetic construct
  source 1..75: mol_type = other DNA
aacggataatcggcgccacgctgggatttaaatccatgaagacggcttacgccaccatcaaaggtattgaggtga

SEQ ID NO: 823175 - DNA, 75 bp, synthetic construct
  source 1..75: mol_type = other DNA
ataccggtttctgggtaaaatcctcaacaacgtgaagaagtggcagatcccgcgattcatcaacacggataaagc

SEQ ID NO: 823176 - DNA, 75 bp, synthetic construct
  source 1..75: mol_type = other DNA
ggctatacagttatgcgtggctggaacagtaaagatgcgcttgacccgtggcagattgactggtcgacgataacc

SEQ ID NO: 823177 - DNA, 75 bp, synthetic construct
  source 1..75: mol_type = other DNA
agaagcatccgcaacccacgtcaatgaaatgagcaacccagggcgcgactatccgttggctatgttactgctgat

SEQ ID NO: 823178 - DNA, 75 bp, synthetic construct
  source 1..75: mol_type = other DNA
gatgtgagcaatttgggtgtcagagaacttcaacaggtgtgtgaaagcacccaggccaaatggcagagtcaaggt

SEQ ID NO: 823179 - DNA, 75 bp, synthetic construct
  source 1..75: mol_type = other DNA
acgacccgcgccgctgttccggcaattccatatcggaggtgctggaaaatatcaagaataatctcgacgcgtttc

SEQ ID NO: 823180 - DNA, 75 bp, synthetic construct
  source 1..75: mol_type = other DNA
gtccactgcttgcgttgtctagcggaggcgtttacgtcaagagaaaagatcaagatttttctgtgacgcgtcagc

SEQ ID NO: 823181 - DNA, 75 bp, synthetic construct
  source 1..75: mol_type = other DNA
tatacacacttccctgaaattgacccgcgcctgcgtaattaccgctcacgctatggcgctatcagtaatgactga

SEQ ID NO: 823182 - DNA, 75 bp, synthetic construct
  source 1..75: mol_type = other DNA
atgccagcgcctctgtatggtgcggatgaccagcgccgctgttccggaaattccgtatcggaggtgctggataaa

SEQ ID NO: 823183 - DNA, 75 bp, synthetic construct
  source 1..75: mol_type = other DNA
gaagatggacatattggtcatagcgctatccttcacggctgcattatccgccgcaatgcattagtgggaatgaac

SEQ ID NO: 823184 - DNA, 75 bp, synthetic construct
  source 1..75: mol_type = other DNA
gtatttaagggattgagctgggattacaaaaccaataatccctgttacttcggtaagaagattatcgttaacaat

SEQ ID NO: 823185 - DNA, 75 bp, synthetic construct
  source 1..75: mol_type = other DNA
ctggtgaatcatgacagatggggctacagcctgaactggggctggcggcgagatcagcttgccgatctggagcgt

SEQ ID NO: 823186 - DNA, 75 bp, synthetic construct
  source 1..75: mol_type = other DNA
ttggccacttcgtgaagcagggcgcgcgggaagaagcgcactacaggcccgcagcgcgcgcaccgccagtgcaag

SEQ ID NO: 823187 - DNA, 75 bp, synthetic construct
  source 1..75: mol_type = other DNA
gagggcgatgagctgctaaacgagttggtgagtcttcttaatgcatacaagaaatcagtagaatttgatcttatt

SEQ ID NO: 823188 - DNA, 75 bp, synthetic construct
  source 1..75: mol_type = other DNA
atcacgtttaagcgtctggacctggtggagaagatgaatgacattgtggcaaagcattatccgggagcgctgccc

SEQ ID NO: 823189 - DNA, 75 bp, synthetic construct
  source 1..75: mol_type = other DNA
tgactgctggctgatgcagccaaccgacaaagcgatgccggtgatcacccgcaatatcgaccgcagtatctggcg

SEQ ID NO: 823190 - DNA, 75 bp, synthetic construct
  source 1..75: mol_type = other DNA
agcaagctcctggcccacgaaattcgctaggacggtataaatttaatatgccgagttcagacgctatctacttgc

SEQ ID NO: 823191 - DNA, 75 bp, synthetic construct
  source 1..75: mol_type = other DNA
gcgatccgctggacgtggcgcagtggctgcatgcctgtcacgatgccggaatagaagttcgtgtacaggttaatg

SEQ ID NO: 823192 - DNA, 75 bp, synthetic construct
  source 1..75: mol_type = other DNA
aaggcagagtggtacgccgggagggcgatccgctggaagtggcgcagtggctgcaggcctgtcatgatgccggaa

SEQ ID NO: 823193 - DNA, 75 bp, synthetic construct
  source 1..75: mol_type = other DNA
cagttatggaataaagaaggcagggtggtacgccgggagggcgatccgctggaagtggcgcagtggctgcaggcc

SEQ ID NO: 823194 - DNA, 75 bp, synthetic construct
  source 1..75: mol_type = other DNA
gtgctggctgcccttgatgaaaaacggccaggccacgtgctaacgcgggacatagaacgggtgctggagcgaagc

SEQ ID NO: 823195 - DNA, 75 bp, synthetic construct
  source 1..75: mol_type = other DNA
cactgcagcggagagtgctgattgtcctggctgcccttgatgaaaaacggccgggacccgtgctgacgcgggaca

SEQ ID NO: 823196 - DNA, 75 bp, synthetic construct
  source 1..75: mol_type = other DNA
gcgcagtggctgcaggcctgtcacgatgcaggaatggaggttcgtgtgcaggttaatgaaagcatcaccccgtaa

SEQ ID NO: 823197 - DNA, 75 bp, synthetic construct
  source 1..75: mol_type = other DNA
agggcgatccgctggaagtggcgcagtggctgcaggcctgtcacgatgcaggaatggaggttcgcgtacagataa

SEQ ID NO: 823198 - DNA, 75 bp, synthetic construct
  source 1..75: mol_type = other DNA
tgctgcccgcaggcggcacttctgccactgatctggcggtggagctgaacggcataacgtatcaggcctgccgtg

SEQ ID NO: 823199 - DNA, 75 bp, synthetic construct
  source 1..75: mol_type = other DNA
cggcacttctgccactgatctggcggtggagctgaacggcatgacgtatcaggcctgccgtggggattttgtggt

SEQ ID NO: 823200 - DNA, 75 bp, synthetic construct
  source 1..75: mol_type = other DNA
atgatgcgggaaaaagcccgacgtccgtcgccgctgcagcggcgggtgctgattgtgctggctgcccttgatgaa

SEQ ID NO: 823201 - DNA, 75 bp, synthetic construct
  source 1..75: mol_type = other DNA
gcagacgttgcatcaagtcgagccattgcgggaagttgaacctggccggcagcgcctggtatttgatgagaatct

SEQ ID NO: 823202 - DNA, 75 bp, synthetic construct
  source 1..75: mol_type = other DNA
atgacccagagccgccgaccgtcgccactgcagcggagagtgctgattgtgctgactgcccttgatgaaaaacga

SEQ ID NO: 823203 - DNA, 75 bp, synthetic construct
  source 1..75: mol_type = other DNA
cgctgcagcggcgggtgctgattgtgctggccgccctggattcgaaacgtccggggccggtggccacgcgggata

SEQ ID NO: 823204 - DNA, 75 bp, synthetic construct
  source 1..75: mol_type = other DNA
ccaatggcagctggcgctggataaaggtcaattgcctacgtttgttgctggactggcaccgcagcatccgcaata

SEQ ID NO: 823205 - DNA, 75 bp, synthetic construct
  source 1..75: mol_type = other DNA
tgaataccatacgccagttggcacaggaaaagcgcaccatggtgattgtgacgcacgaaatgagctttgcccgtg

SEQ ID NO: 823206 - DNA, 75 bp, synthetic construct
  source 1..75: mol_type = other DNA
acagtgctggaaaacattattgaagggccggtgatcgttaaaggcgaaccgaaggaggaggccacggcgcgcgct

SEQ ID NO: 823207 - DNA, 75 bp, synthetic construct
  source 1..75: mol_type = other DNA
ggcatcatggtcaatatacccgcctattctttggtctattaccagaacggtaatcaggtgctggactcgcgggtg

SEQ ID NO: 823208 - DNA, 75 bp, synthetic construct
  source 1..75: mol_type = other DNA
aatttaccgttccgcttccagcaggctccaggcccacggaactcgctggggcgctataaattcaatatgccgagt

SEQ ID NO: 823209 - DNA, 75 bp, synthetic construct
  source 1..75: mol_type = other DNA
gcgtgactggttaaacgtaacgcccgcccagcgtgctggcgtgttggcactcaacatccagcgattgcgcttgct

SEQ ID NO: 823210 - DNA, 75 bp, synthetic construct
  source 1..75: mol_type = other DNA
tgatccgctggaagtggcacagtggctgcacgcctgtcacgatgccggaatagaagttcgtgtacaggttaatga

SEQ ID NO: 823211 - DNA, 75 bp, synthetic construct
  source 1..75: mol_type = other DNA
atccgctggaagtggcgcagtggctgcaggcctgtcacgatgcaggaatagaagttcgtgtacaggtaaatgaaa

SEQ ID NO: 823212 - DNA, 75 bp, synthetic construct
  source 1..75: mol_type = other DNA
aagccccggtctacgggccaaacctgcgcgcctcctgccgtcgtctggaggatgccggctggctgcgtaccctgc

SEQ ID NO: 823213 - DNA, 75 bp, synthetic construct
  source 1..75: mol_type = other DNA
gaaagaagaggccacggcgcgcgctcgcgagctgctggcgaaagttgggctggccggtaaagaaaccagctatcc

SEQ ID NO: 823214 - DNA, 75 bp, synthetic construct
  source 1..75: mol_type = other DNA
atgagtgccattgaagttaagaacctggtgaaaaaatttcacggtcagacggtgctgcacggtatcgacctcgag

SEQ ID NO: 823215 - DNA, 75 bp, synthetic construct
  source 1..75: mol_type = other DNA
gaagacggcttacgctaccatcaaaggtattgaggtgatgtgtgcactacgcaaaggccaggcctcagcatttta

SEQ ID NO: 823216 - DNA, 75 bp, synthetic construct
  source 1..75: mol_type = other DNA
gtgatgctatccaggaaatgcctgtttttatcagcgcagaacagcgccgggcgctctgccgtatgcagtcagagg

SEQ ID NO: 823217 - DNA, 75 bp, synthetic construct
  source 1..75: mol_type = other DNA
cttttagagcctgacaataaaggtcgtaaagtctcatctattcacctttttagagtgaatgagtctggcaatata

SEQ ID NO: 823218 - DNA, 75 bp, synthetic construct
  source 1..75: mol_type = other DNA
aatgtattatccggtcagaatctggccaccgccatgcgcaattctgactatgattttccttcaaaaatatgcatc

SEQ ID NO: 823219 - DNA, 75 bp, synthetic construct
  source 1..75: mol_type = other DNA
cggaggataattttaccggggcatggatatcaatgcgcccccgcaatgttgcgtttaattacatcgtaagggccg

SEQ ID NO: 823220 - DNA, 75 bp, synthetic construct
  source 1..75: mol_type = other DNA
tcccgctctcgctgcgggtacgttttctgttagcaacggcagcagtagtattggtgctttcgcttgcctacggaa

SEQ ID NO: 823221 - DNA, 75 bp, synthetic construct
  source 1..75: mol_type = other DNA
aaattatcgccggagagagtatgctcggcggcgcacgcatggaggttatttttggccgccagcattctgcgccaa

SEQ ID NO: 823222 - DNA, 75 bp, synthetic construct
  source 1..75: mol_type = other DNA
gtggtggttgatactatacccattgagcttaaaagttcatatatggtctggagctggtttatttatgtgctctcg

SEQ ID NO: 823223 - DNA, 75 bp, synthetic construct
  source 1..75: mol_type = other DNA
atgctggattattataaccaggacactacgggaacctcggggatagtcggcatgggattcaacaatgaagattcc

SEQ ID NO: 823224 - DNA, 75 bp, synthetic construct
  source 1..75: mol_type = other DNA
tttttacgatgcaggaacacgatcagcgacaatggcgaataacacaactgctataggcaaaaccgatgaccttgg

SEQ ID NO: 823225 - DNA, 75 bp, synthetic construct
  source 1..75: mol_type = other DNA
aggtgcaattaacggtaggtttaccagtcaatacagaacggaatcctcagatgggaatgaaaaccgcccacgcaa

SEQ ID NO: 823226 - DNA, 75 bp, synthetic construct
  source 1..75: mol_type = other DNA
gcacctctgaaacgctggccgccacaccaaaggccgtcaaggctgcatatgacctagctgccggcaaggcccccg

SEQ ID NO: 823227 - DNA, 75 bp, synthetic construct
  source 1..75: mol_type = other DNA
agtcctcaattaccttggtttagaagaaggctcggcgctacccgttggtgtgcctgttccgtggcccaccgccac

SEQ ID NO: 823228 - DNA, 75 bp, synthetic construct
  source 1..75: mol_type = other DNA
gctggttacagtgcaacggagctacgttcaccaaagaacaatatcctgttctggccagagcctacccgaccctcc

SEQ ID NO: 823229 - DNA, 75 bp, synthetic construct
  source 1..75: mol_type = other DNA
ctggtgctttcgcttgcctacggaatggtcgcgctgatcggttatagcgtcagtttcgataaaaccacgtttcgg

SEQ ID NO: 823230 - DNA, 75 bp, synthetic construct
  source 1..75: mol_type = other DNA
ccggtacgctaccggtaatgaaagtgagcgatcacttaacctggctggcagaagccatgattgatgccgtcattc

SEQ ID NO: 823231 - DNA, 75 bp, synthetic construct
  source 1..75: mol_type = other DNA
tgcatctgctttctgaaaacgatgctgaacaattgcgagtggcgtatctgttcctgcggcgtctggaaaacctgc

SEQ ID NO: 823232 - DNA, 75 bp, synthetic construct
  source 1..75: mol_type = other DNA
cgacggcgtctatgctaacgagttgcgtgcgatgctgcgtccgtttgttttccgtcgttacatcgatttcagcgt

SEQ ID NO: 823233 - DNA, 75 bp, synthetic construct
  source 1..75: mol_type = other DNA
ggacagattgagcaggactgcgactactgggttggtatccaccgggaaggtgctttcgatgacagcgtgccgccg

SEQ ID NO: 823234 - DNA, 75 bp, synthetic construct
  source 1..75: mol_type = other DNA
ctgtacgggcagatggcgatcaactgcgcggttcgtgagaaaaagccagcgctgatgttcagcctcgaaatgcct

SEQ ID NO: 823235 - DNA, 75 bp, synthetic construct
  source 1..75: mol_type = other DNA
gcgcttaagcatttgatttctctgtgtgccgcatcgccgatgattgccagccagctggcgcgctatccgttattg

SEQ ID NO: 823236 - DNA, 75 bp, synthetic construct
  source 1..75: mol_type = other DNA
atgaatttgtttgattcactgaataacgcccgtcgcctgaccgagcttgccggtgcggtactggagcgcagtaaa

SEQ ID NO: 823237 - DNA, 75 bp, synthetic construct
  source 1..75: mol_type = other DNA
aaatcgtcgccggagagagcatgcttggcggtgcgcggatggaggtgatttttggtcgccagcattctacgccga

SEQ ID NO: 823238 - DNA, 75 bp, synthetic construct
  source 1..75: mol_type = other DNA
tggttttcatgaaattgaagcggatgttaacgacactagcctgttactgagtggagatcactctatgcagcaaca

SEQ ID NO: 823239 - DNA, 75 bp, synthetic construct
  source 1..75: mol_type = other DNA
ttgctgatttccgcaaagagctggataagcgcaccatcgggccgcgaggacgtcaggtgctcgaccatctgatgc

SEQ ID NO: 823240 - DNA, 75 bp, synthetic construct
  source 1..75: mol_type = other DNA
ctgattgttgcggcgcgtgactggctgtatgacgcctgctgccgcgaatggggaacgccgtgcaatgcgcagggc

SEQ ID NO: 823241 - DNA, 75 bp, synthetic construct
  source 1..75: mol_type = other DNA
cacaaccttttcctgtaaagcaatacaggaaggtcatattgactcgggaagccagaaagtttctgtagattcaac

SEQ ID NO: 823242 - DNA, 75 bp, synthetic construct
  source 1..75: mol_type = other DNA
cgatctggcaaacggaaaacaaccggcagatgccacgctcactgctctggcaggacttgccactgcagcagatcg

SEQ ID NO: 823243 - DNA, 75 bp, synthetic construct
  source 1..75: mol_type = other DNA
gcccggataatctgcctgctttaaaccagaacgacgtgctggtgtatggtcatacccatctaccagtagcggaaa

SEQ ID NO: 823244 - DNA, 75 bp, synthetic construct
  source 1..75: mol_type = other DNA
agctttgcaggattattacggttacgatctgaatactaatgtcaaagtaggtatcgcttttgctactgctgattc

SEQ ID NO: 823245 - DNA, 75 bp, synthetic construct
  source 1..75: mol_type = other DNA
gtttgggggaaggctctgcattgcctgttggtgtaccggttccatggcccaccgccacaccgccagcaggctggt

SEQ ID NO: 823246 - DNA, 75 bp, synthetic construct
  source 1..75: mol_type = other DNA
atttgcagggccttcacgaggtgatggggttaattatgtaaccattcgtcctcgtaatattacgtttaattacat

SEQ ID NO: 823247 - DNA, 75 bp, synthetic construct
  source 1..75: mol_type = other DNA
gcgcaaagttgatacaggacgtaagttgctgtccgcacaaggggcaacgctgttaagaacagcaatgctggatta

SEQ ID NO: 823248 - DNA, 75 bp, synthetic construct
  source 1..75: mol_type = other DNA
gcacgtctgaaatactggccgccacaccgaaggcggtcaaggctgcatacgaccttgcagccggcaaggcgcccg

SEQ ID NO: 823249 - DNA, 75 bp, synthetic construct
  source 1..75: mol_type = other DNA
acctcaactccagcgtcaaaatcgtcaacccaattatgggcgtgaaattctgggatgagagcgtgaagatcccgg

SEQ ID NO: 823250 - DNA, 75 bp, synthetic construct
  source 1..75: mol_type = other DNA
tgggatgagagcgtgaaaatcccggcagaagaagtcacagtacgctttgagcaaggtcatccggtggcgctgaac

SEQ ID NO: 823251 - DNA, 75 bp, synthetic construct
  source 1..75: mol_type = other DNA
ctctttacccggaaataccgacggcgtagcactggttgtttcaacgactaaagtgccttatgaactcgacgtgcc

SEQ ID NO: 823252 - DNA, 75 bp, synthetic construct
  source 1..75: mol_type = other DNA
gcgcgcctttacaaaagaacaatatcctgttctggccagagtctactcgaccctccgtcttcccgatttgcgcgg

SEQ ID NO: 823253 - DNA, 75 bp, synthetic construct
  source 1..75: mol_type = other DNA
cgaagctccggggatggcactgctgcacattgcgtatgaacgcctgttgaccggtattcacaacgaagacaccat

SEQ ID NO: 823254 - DNA, 75 bp, synthetic construct
  source 1..75: mol_type = other DNA
atgattgcctgcggtttcgactacaaaatgtcggttgaaaaagcctactccacagactccaacatgctcggcgcg

SEQ ID NO: 823255 - DNA, 75 bp, synthetic construct
  source 1..75: mol_type = other DNA
gtgccacaatacgctactgtcgcagcgttgtgtcaggcacgcttaaaaaaaacgattttacgtggtttaagaggc

SEQ ID NO: 823256 - DNA, 75 bp, synthetic construct
  source 1..75: mol_type = other DNA
gattaccttggtttgggagaaggctctgcattacctgttggtgtccctgttccgtggccttcagccactccgcca

SEQ ID NO: 823257 - DNA, 75 bp, synthetic construct
  source 1..75: mol_type = other DNA
ggaaagccgggctgtgggcgattggtgatgtcgtacgagggccgatgctggcgcataaagcgatggccgaaggtg

SEQ ID NO: 823258 - DNA, 75 bp, synthetic construct
  source 1..75: mol_type = other DNA
cgcccgtaatgtggtgattgcaacaggttctcagccgcgtcaactgcctggcgttaccattgataatcaacagat

SEQ ID NO: 823259 - DNA, 75 bp, synthetic construct
  source 1..75: mol_type = other DNA
agcacgtctgaaatactggccgccacaccgaaagcggtcaaggctgcatacgatctggcaaacggaaaacaaccg

SEQ ID NO: 823260 - DNA, 75 bp, synthetic construct
  source 1..75: mol_type = other DNA
cccagaacgccaccacaacacaaaaagggattgttcagctcagtagcgccacgaacagcacgtctgaaacgctgg

SEQ ID NO: 823261 - DNA, 75 bp, synthetic construct
  source 1..75: mol_type = other DNA
caagtgttggacgtgccattcttggtaaaaccagcactcagggagttcttgattaccttggtttgggagaaggtt

SEQ ID NO: 823262 - DNA, 75 bp, synthetic construct
  source 1..75: mol_type = other DNA
tttgcaggtccttcgcgaggcgatggggttaattatgtgaccattcgtccccgtaacattgcgtttaattacatc

SEQ ID NO: 823263 - DNA, 75 bp, synthetic construct
  source 1..75: mol_type = other DNA
tgaaatattcggtagcagaaattttcgacagtatcgacctgacgcaacgtctgatggacgaacagcagcagcagg

SEQ ID NO: 823264 - DNA, 75 bp, synthetic construct
  source 1..75: mol_type = other DNA
ggctacgaccgccacgtacacaaatttattcgtaccgcgatcgatatggataaaaaccgcgtctttgctcagcgg

SEQ ID NO: 823265 - DNA, 75 bp, synthetic construct
  source 1..75: mol_type = other DNA
gaactgattaatgaaattgcgctggcgatgaattttagcgcctctggcgaggatattgcctgtgcaatccatgcc

SEQ ID NO: 823266 - DNA, 75 bp, synthetic construct
  source 1..75: mol_type = other DNA
aatgtcggctgtatcccgtcgaaatcactgctgcaatcttctgagctgtacgcgcaaatccagcatgaggcgagc

SEQ ID NO: 823267 - DNA, 75 bp, synthetic construct
  source 1..75: mol_type = other DNA
tggctaaaatgcaacggagcagctttttctgctgaagaatacccagaactggcaaaggcttacccgacaaataaa

SEQ ID NO: 823268 - DNA, 75 bp, synthetic construct
  source 1..75: mol_type = other DNA
ggcccagccagtgaagtagaaacggaagaggaggacgatgatgagggtgaagaagataatcaggcgaatacctcc

SEQ ID NO: 823269 - DNA, 75 bp, synthetic construct
  source 1..75: mol_type = other DNA
atgtcatcgctttccttgaaccttcctacaacgcattcgtatcactggaaaaagtggagggcggtagtggtgaat

SEQ ID NO: 823270 - DNA, 75 bp, synthetic construct
  source 1..75: mol_type = other DNA
ctcttacaccgaaggacttcgaagaaaacccggataaagaaaactatggcctgcctacatggtgggaatacaagg

SEQ ID NO: 823271 - DNA, 75 bp, synthetic construct
  source 1..75: mol_type = other DNA
gctacccggaatatcgtgcgccaggttctgacaaatggcagcgcattagctgggatgaagcattctctcgtattg

SEQ ID NO: 823272 - DNA, 75 bp, synthetic construct
  source 1..75: mol_type = other DNA
agagattcgcactgctgcgggctatgacaatgatgacgaggagccgttaggagaagatggcgacgaaaaagacga

SEQ ID NO: 823273 - DNA, 75 bp, synthetic construct
  source 1..75: mol_type = other DNA
tacgaaaatctctatgccctgtaccggcgcggtggtatcgctcacggtgccgttgagaagctggtgggcaagtgc

SEQ ID NO: 823274 - DNA, 75 bp, synthetic construct
  source 1..75: mol_type = other DNA
ttctcttgttatgccagatgcaattgaatggaacggaaagaatacgccaagacggcaatacatgataaaatatat

SEQ ID NO: 823275 - DNA, 75 bp, synthetic construct
  source 1..75: mol_type = other DNA
cggatattgctgaggggcttgagcacggggaccgctcatcgctggatatcatcagatgtagtaatggtgagcagg

SEQ ID NO: 823276 - DNA, 75 bp, synthetic construct
  source 1..75: mol_type = other DNA
gttatatctacaacgaacagcaccttgaccaggcatatgacgacgatacgccccgtcttggctggctgacaaccc

SEQ ID NO: 823277 - DNA, 75 bp, synthetic construct
  source 1..75: mol_type = other DNA
tgatgatggcattacaaggggcaagtgttagcccgctggtgactgccgtagccgatccatctgcaacctatgacg

SEQ ID NO: 823278 - DNA, 75 bp, synthetic construct
  source 1..75: mol_type = other DNA
cgaatacggattcaaagaagagatcacgtatcacgatctatacaaactgtacagacgcggcggcatcgctcacgg

SEQ ID NO: 823279 - DNA, 75 bp, synthetic construct
  source 1..75: mol_type = other DNA
tggatgcgcagtttgcctcgctgaaggcattgatcgtgagaatggtgtccggcagcagtgatgctgcggtggctg

SEQ ID NO: 823280 - DNA, 75 bp, synthetic construct
  source 1..75: mol_type = other DNA
tacgtggcttgtttaatcatgatcctaatttcattctcggacgaagttctgccggcacgttgtcattgtcggtgg

SEQ ID NO: 823281 - DNA, 75 bp, synthetic construct
  source 1..75: mol_type = other DNA
gctctctggtatcttccgtgttcttcatgctgctgccggagcaggtttacgtttacggtgactgtgcgatcaacc

SEQ ID NO: 823282 - DNA, 75 bp, synthetic construct
  source 1..75: mol_type = other DNA
caacgtggttctcggtacgctgatgctggaacaggatgaagttgatggtctggtttccggtgctgttcacaccac

SEQ ID NO: 823283 - DNA, 75 bp, synthetic construct
  source 1..75: mol_type = other DNA
atcgggccgatgctccagggtatgcgcaagccggttaacgacctgtctcgtggcgcactggttgacgatatcgtc

SEQ ID NO: 823284 - DNA, 75 bp, synthetic construct
  source 1..75: mol_type = other DNA
gccgtatgtgatggtgggcgtcatgctgactatcgctaccgcgctgccggtggtgaccgtcggttctccgctgcc

SEQ ID NO: 823285 - DNA, 75 bp, synthetic construct
  source 1..75: mol_type = other DNA
ctacatcaacgctgactggattgactctctgactgccacctctgagcgcagccgtcgtctgtctccgccagcctt

SEQ ID NO: 823286 - DNA, 75 bp, synthetic construct
  source 1..75: mol_type = other DNA
tccctgactgcaacttccgaacgcagccgtcgtctgtctccgccagcgttccgttatcaactgaccgaactggca

SEQ ID NO: 823287 - DNA, 75 bp, synthetic construct
  source 1..75: mol_type = other DNA
cactcgacccacaggttgaagctctctggcgggatgcccggtgggcaatttcagatatacgcggcgtcactcgca

SEQ ID NO: 823288 - DNA, 75 bp, synthetic construct
  source 1..75: mol_type = other DNA
tacgtggcttgtttaatcatgatcctaatttcattctcggacgaagttctgccggcacgttgtcattatcagtgg

SEQ ID NO: 823289 - DNA, 75 bp, synthetic construct
  source 1..75: mol_type = other DNA
tcttaacagtgaaagtgtgcatgtccaccgctaccgcagggcggtgtatgcccttgcccgtgcatttgttctcga

SEQ ID NO: 823290 - DNA, 75 bp, synthetic construct
  source 1..75: mol_type = other DNA
gtaaacaatgttgatccggcgaagctgcaagaatccagcccgctgccggttctcggcgctgtgccgtggagcttt

SEQ ID NO: 823291 - DNA, 75 bp, synthetic construct
  source 1..75: mol_type = other DNA
tcggcggtgccaaaaacaccaacatcaccggcgttatcgttaacaaactgaacgcaccggttgatgaacagggtc

SEQ ID NO: 823292 - DNA, 75 bp, synthetic construct
  source 1..75: mol_type = other DNA
tgccggaaggtgacgaaccacgtacagtgaaagcagcggctatctgtgcggaacgtggtatcgcaacttgtgtgc

SEQ ID NO: 823293 - DNA, 75 bp, synthetic construct
  source 1..75: mol_type = other DNA
taagatatctctaccccgttctctttcacaaaagacgattagaattattagcaatatatatgaaaggtttggtcg

SEQ ID NO: 823294 - DNA, 75 bp, synthetic construct
  source 1..75: mol_type = other DNA
agaggcgaacgaggagagaccggacctcagggacctcgtggagagccaggtccggcaggcagcgctgcaaatgtg

SEQ ID NO: 823295 - DNA, 75 bp, synthetic construct
  source 1..75: mol_type = other DNA
gacacggcgacaaaaaacactcaggccacacagtcaaaagaaagtgcagcagccagtgcgaagagtgcatctgac

SEQ ID NO: 823296 - DNA, 75 bp, synthetic construct
  source 1..75: mol_type = other DNA
caacatatcgagccactggccccggtggcaggctctgatttgtatgtattcagtccggtggcgcatacggtggat

SEQ ID NO: 823297 - DNA, 75 bp, synthetic construct
  source 1..75: mol_type = other DNA
tggaaagcagaaccaataaacgcccattaccaagtgactcacgagatacagggcatcctcgcaactcctctcgat

SEQ ID NO: 823298 - DNA, 75 bp, synthetic construct
  source 1..75: mol_type = other DNA
cgaagctattcaggcgattttcacgcaactgacagaccatgcaaaaaccggatcgcgtcgcggccttcgttcatt

SEQ ID NO: 823299 - DNA, 75 bp, synthetic construct
  source 1..75: mol_type = other DNA
gatgaaacgaaggcagccacaccgaaagctgtgaaggcggcaatggatgaggccagggcagcgaaacagaaggca

SEQ ID NO: 823300 - DNA, 75 bp, synthetic construct
  source 1..75: mol_type = other DNA
atcaaacgctgcctgcgaaaagatgcggtgacagcccggggatttgtgcgctgggatggcgtagagggaacacct

SEQ ID NO: 823301 - DNA, 75 bp, synthetic construct
  source 1..75: mol_type = other DNA
tggcctgacgcttttcgatgaactggagcgcaaatcgttaacggtgtctgttggcggttttgcttatatcgctga

SEQ ID NO: 823302 - DNA, 75 bp, synthetic construct
  source 1..75: mol_type = other DNA
cccatgtggaaagttaatgttcccctgaaaaataaaagcacctcaaatcacgaactttgcgagcgatggatgctg

SEQ ID NO: 823303 - DNA, 75 bp, synthetic construct
  source 1..75: mol_type = other DNA
actgaagaccttgaggtctggcgtgcccgggttatggagcgctactactggactccgcaaggtggcgctgacgga

SEQ ID NO: 823304 - DNA, 75 bp, synthetic construct
  source 1..75: mol_type = other DNA
tgtgcgctgggatggcgtagaggggacgccggtattgccagcgggaacgcagatccagcgtgataatcaggtgac

SEQ ID NO: 823305 - DNA, 75 bp, synthetic construct
  source 1..75: mol_type = other DNA
agccatcagttgcttacaccggcagacaatatctccattgcaaaaaatgaactggcggtactggggacgatttca

SEQ ID NO: 823306 - DNA, 75 bp, synthetic construct
  source 1..75: mol_type = other DNA
agagccaggtccggcaggcagcgctgcaaatgtggctgatgcaacgacggcacagaagggaattgtgcagttaag

SEQ ID NO: 823307 - DNA, 75 bp, synthetic construct
  source 1..75: mol_type = other DNA
tctggctcataccaacgaaacggtgctgcttttgttacgagttatctgatcgctataggtgacgctgtactctta

SEQ ID NO: 823308 - DNA, 75 bp, synthetic construct
  source 1..75: mol_type = other DNA
atgagaattattaaaaattttggccttgttaaggctaccacatccgaaatctctgcaaaatatcataatgaagat

SEQ ID NO: 823309 - DNA, 75 bp, synthetic construct
  source 1..75: mol_type = other DNA
gaacgtccttccggactgactcaggcaatcattgaagtggggcgcatcaacaaaacgctgtatctgcttaattat

SEQ ID NO: 823310 - DNA, 75 bp, synthetic construct
  source 1..75: mol_type = other DNA
gctttgccaaaaggaagtgtttcgcgccagatacaggcactggaacatcaacttggcacccagcttctccagcgc

SEQ ID NO: 823311 - DNA, 75 bp, synthetic construct
  source 1..75: mol_type = other DNA
cctttcgctggtttatccgcagcgtcgggagctttcccggcgtgtaaacctgtttatgcagtggctggctggcgt

SEQ ID NO: 823312 - DNA, 75 bp, synthetic construct
  source 1..75: mol_type = other DNA
aaagcctaccccaactattttggctcaacaaaccagtttacaaaattcttagataagcatcttcgtaacgaagga

SEQ ID NO: 823313 - DNA, 75 bp, synthetic construct
  source 1..75: mol_type = other DNA
aattgcattgttagtcgaaggctttaaaacacttcgtcatgagattaaagaactccgggagaagttaacgacagc

SEQ ID NO: 823314 - DNA, 75 bp, synthetic construct
  source 1..75: mol_type = other DNA
aacggcataattgcattgttagtcgaaggctttaaaacacttcgtcatgagattaaagaactccgggagaagtaa

SEQ ID NO: 823315 - DNA, 75 bp, synthetic construct
  source 1..75: mol_type = other DNA
gggaccgaagggagacactggagcccccgggcaaggaacagaactgcttactactgccaatacatggactcaggc

SEQ ID NO: 823316 - DNA, 75 bp, synthetic construct
  source 1..75: mol_type = other DNA
acggatgataatggttatcctgtgtgggttgacatcccctccctgtcgcctgaagagcgggttgcccgggctgag

SEQ ID NO: 823317 - DNA, 75 bp, synthetic construct
  source 1..75: mol_type = other DNA
tatacgccgctggacgggctgaccaatagccagtttgtcagcattgcggggagatatccccacagcagcgtgatg

SEQ ID NO: 823318 - DNA, 75 bp, synthetic construct
  source 1..75: mol_type = other DNA
gggaccgaaaggagaaacaggtgcggcaggcccggtgggggcgaccggacctcagggaccgaagggcgacccggg

SEQ ID NO: 823319 - DNA, 75 bp, synthetic construct
  source 1..75: mol_type = other DNA
gttgggcgcgaaaaagcccatgaagtggcatcacaactggtgatggcggcagggatttataattattacgagtag

SEQ ID NO: 823320 - DNA, 75 bp, synthetic construct
  source 1..75: mol_type = other DNA
gcattggttaagccagtgggttcgcgactacgggattgatggttttcgggtcgacaccgccaaacatgttgagtt

SEQ ID NO: 823321 - DNA, 75 bp, synthetic construct
  source 1..75: mol_type = other DNA
taatgcaaagtgactactatcgccacggcttcgatgcgatgatcaatttcgattatcaggagcaggcggcgaaag

SEQ ID NO: 823322 - DNA, 75 bp, synthetic construct
  source 1..75: mol_type = other DNA
cctggccattacctgctcgcgcggcgtgaagctgctggcggatgcgccgctggtcgaagtggctgatggcgaata

SEQ ID NO: 823323 - DNA, 75 bp, synthetic construct
  source 1..75: mol_type = other DNA
ggcttcccgacgctgaaagacaaaatccccaccgaacaatggcaggataaacgcgtcgtctgggatgcgcgggta

SEQ ID NO: 823324 - DNA, 75 bp, synthetic construct
  source 1..75: mol_type = other DNA
cctggcgattacctgctcgcgcggcgtgaagctactggcggatgcgccactggtcgaagttgccgatggcgaata

SEQ ID NO: 823325 - DNA, 75 bp, synthetic construct
  source 1..75: mol_type = other DNA
atcgtcgttactggtttactgatgttcatgctcgtggatattatccgcaacatatgctgaattactttgccagga

SEQ ID NO: 823326 - DNA, 75 bp, synthetic construct
  source 1..75: mol_type = other DNA
ccttatatcgatacatccgaatggggatggcaaattgatccggcagggctacgttattcactcaactggttctgg

SEQ ID NO: 823327 - DNA, 75 bp, synthetic construct
  source 1..75: mol_type = other DNA
agcgactaatattggtatgggcatcaagcgacgggatgctgctgatgctgcatttatcacgcccaataatagcgt

SEQ ID NO: 823328 - DNA, 75 bp, synthetic construct
  source 1..75: mol_type = other DNA
cggcttcgatgcgatgatcaatttcgattatcaggagcaggcggcgaaagcagtcgattgtctggcgcagatgga

SEQ ID NO: 823329 - DNA, 75 bp, synthetic construct
  source 1..75: mol_type = other DNA
gagtatcagtttggcgcgttatatctttctggtgacgaggtgaaaaaaacgctgggtgaacgctggagcgactgg

SEQ ID NO: 823330 - DNA, 75 bp, synthetic construct
  source 1..75: mol_type = other DNA
cgtccatatttttgtattgaggcatctaataagtatggaaatacaacacgcggttgttctataaaagggttgtca

SEQ ID NO: 823331 - DNA, 75 bp, synthetic construct
  source 1..75: mol_type = other DNA
attaaaggcgcagagtgttttcgcgatagcaccctgctggttgaaaccgttaaacagttccaccgttccgggcgt

SEQ ID NO: 823332 - DNA, 75 bp, synthetic construct
  source 1..75: mol_type = other DNA
cacacgagatgttgatatcaatgagccagacggaccaacgaatctttccgcatggatgagacttaagaataaaga

SEQ ID NO: 823333 - DNA, 75 bp, synthetic construct
  source 1..75: mol_type = other DNA
ctgctactgatgctgccggggaaaggcgtaacgaaaaaacagcctccgttaccggacagcaaggaggctgaatgg

SEQ ID NO: 823334 - DNA, 75 bp, synthetic construct
  source 1..75: mol_type = other DNA
gtattgacagcattgatgaactttcaattgaacaaatcccgcttgccgtagagtacatccacagggtagtgcttg

SEQ ID NO: 823335 - DNA, 75 bp, synthetic construct
  source 1..75: mol_type = other DNA
gtagcactctgggccattacggcgttggctacgggccgtacatgcaattaccgttctacggcagcttcacgttgc

SEQ ID NO: 823336 - DNA, 75 bp, synthetic construct
  source 1..75: mol_type = other DNA
cgagatgttgatatcaatgagccagacggaccaacaaatctttccgcatggataaggcttaagaataaagaattg

SEQ ID NO: 823337 - DNA, 75 bp, synthetic construct
  source 1..75: mol_type = other DNA
ttaaaacaaaggtttgccaaaggtatttcggaaatcgaaataccttctgctggcggtaaacagttaatgacatgt

SEQ ID NO: 823338 - DNA, 75 bp, synthetic construct
  source 1..75: mol_type = other DNA
atcatcatattaaaaatggaatgagccgcgacgaagctgaagcattagtctctatggatttggggcatggagatg

SEQ ID NO: 823339 - DNA, 75 bp, synthetic construct
  source 1..75: mol_type = other DNA
ctctacacccgtaccaccagcggtaacgtctctgctcccgcgcagtctacccaggataacgcgcctgctgaaccg

SEQ ID NO: 823340 - DNA, 75 bp, synthetic construct
  source 1..75: mol_type = other DNA
tttaattaatcgtccgtcattacattctgccaaagatcgttatattaatgtgatgcgacggataggcggatttat

SEQ ID NO: 823341 - DNA, 75 bp, synthetic construct
  source 1..75: mol_type = other DNA
cgtaacgataatgcattgctggttaagcccgctgatgtacgctggaatatgggtttccgaccagatgatgaaaaa

SEQ ID NO: 823342 - DNA, 75 bp, synthetic construct
  source 1..75: mol_type = other DNA
taaaaagaacttactagaagctgaacgtaacgataatgcattgctggttaagcccgctgatgtacgctggaatat

SEQ ID NO: 823343 - DNA, 75 bp, synthetic construct
  source 1..75: mol_type = other DNA
tcaattgatcttggtcatggcgatggcagaggacgatatattgaaaaggtttattgtcagttattaggctatgag

SEQ ID NO: 823344 - DNA, 75 bp, synthetic construct
  source 1..75: mol_type = other DNA
atgaaaaaaatcataataatctccacgttaattggcttggagtttcccataaccagttctgcgacggatattaat

SEQ ID NO: 823345 - DNA, 75 bp, synthetic construct
  source 1..75: mol_type = other DNA
caattttatatggaaagagaggctatttccttaaacaaaaatgcgttactatcctctagaattaagaggatgcct

SEQ ID NO: 823346 - DNA, 75 bp, synthetic construct
  source 1..75: mol_type = other DNA
cctgactgcttgatcgctgaggccaacgatttgaccatggagctgtcgtccctcaaggcggaagagctgactgat

SEQ ID NO: 823347 - DNA, 75 bp, synthetic construct
  source 1..75: mol_type = other DNA
aattatcgacctgctggttggccgtgaaaaagcccatgaagtggcatcacaactggtgatggcggcagggattta

SEQ ID NO: 823348 - DNA, 75 bp, synthetic construct
  source 1..75: mol_type = other DNA
cggctacgccacggcgctggcgtttgttgaggcgggagcgaaagttaccggttttgatcaagcgttcactcagga

SEQ ID NO: 823349 - DNA, 75 bp, synthetic construct
  source 1..75: mol_type = other DNA
gggtaactggcgcggggaaaggtatcggctatgctacggcgctggcatttgttgaggcgggggcgaaagttacag

SEQ ID NO: 823350 - DNA, 75 bp, synthetic construct
  source 1..75: mol_type = other DNA
gccaatctgctgttagtgatcccgctgctgtgggtcgccgcttggtggagtttacgccccatcgaagccctggca

SEQ ID NO: 823351 - DNA, 75 bp, synthetic construct
  source 1..75: mol_type = other DNA
gagagtgggttaaccgaccgcgtactcgacgacccgcatcatccgtatacccagttgctggtgtcatcggttttg

SEQ ID NO: 823352 - DNA, 75 bp, synthetic construct
  source 1..75: mol_type = other DNA
cgcgcagaagtggctggaagaggtggagattcccgccaaccggatcgacgacctgccgaccaccttttccggcgg

SEQ ID NO: 823353 - DNA, 75 bp, synthetic construct
  source 1..75: mol_type = other DNA
taacggtaccagtcttgttctgacaggcagttgtggtaccggaaaaaatcatctggctgtggctatggcaaaaca

SEQ ID NO: 823354 - DNA, 75 bp, synthetic construct
  source 1..75: mol_type = other DNA
tggtcgaagtagctgatggcgaatatgacgtgatcgtgctgccaggtggcattaaaggcgcggagtgttttcgcg

SEQ ID NO: 823355 - DNA, 75 bp, synthetic construct
  source 1..75: mol_type = other DNA
gattgtggatcgcgttactgatggtgggcgtaactgcctggtgtttggttgggaaagctaccgcgcgcatatcag

SEQ ID NO: 823356 - DNA, 75 bp, synthetic construct
  source 1..75: mol_type = other DNA
ctctcaccggaagagttgtgggcgttcatcagtccccgaattgccgacaggatcacagacgggggacgcaactgg

SEQ ID NO: 823357 - DNA, 75 bp, synthetic construct
  source 1..75: mol_type = other DNA
gggtaactggcgcggggaaaggtatcggctacgccacggcgctggcatttgttgaggcgggggcgaaagttacag

SEQ ID NO: 823358 - DNA, 75 bp, synthetic construct
  source 1..75: mol_type = other DNA
gtagcgatgctggagaaaagcgaacagggatggttaagcctctccggcggcgagcggcagcgggtgcatatcgcc

SEQ ID NO: 823359 - DNA, 75 bp, synthetic construct
  source 1..75: mol_type = other DNA
atgcgggtgcgcgacgtcgtgcgcctgggacgcattccccaccactctccgttctcaaactggagcgctcaggat

SEQ ID NO: 823360 - DNA, 75 bp, synthetic construct
  source 1..75: mol_type = other DNA
ccctatgaactgatgatggaaatccttaaacgggccaaatacgacccgctgaaacttcaggatgtgtttgatctg

SEQ ID NO: 823361 - DNA, 75 bp, synthetic construct
  source 1..75: mol_type = other DNA
tctatttccggtaagttgattaaaaacgaagctacaggctcgcaagtagccaataacatcggtatgggaattaag

SEQ ID NO: 823362 - DNA, 75 bp, synthetic construct
  source 1..75: mol_type = other DNA
ctgcgccgcccggatgcaggtcgcgtcaccctcgacggccaggatatcgcccggatggcgaaaaagcagctcgcc

SEQ ID NO: 823363 - DNA, 75 bp, synthetic construct
  source 1..75: mol_type = other DNA
ccgaagcgctgctgtgggacgttttccgggtgaaaaccaaaatcgagatctccccttaccacggcaaaaagcaca

SEQ ID NO: 823364 - DNA, 75 bp, synthetic construct
  source 1..75: mol_type = other DNA
gtttctggtgctaatgcatctggtaaaacatctcttggtcgcgtgatgctttctgtgttgcgttttctcagtagt

SEQ ID NO: 823365 - DNA, 75 bp, synthetic construct
  source 1..75: mol_type = other DNA
tctgcccgattggtgcgattacctggcagcagaaagaaggctgtattaccgtcgatcataaacgttgtattggct

SEQ ID NO: 823366 - DNA, 75 bp, synthetic construct
  source 1..75: mol_type = other DNA
taaagaggactggcagcagacttttgcggtcaacgtcggcggtgcgtttaacctgtttcagcagaccatgaacca

SEQ ID NO: 823367 - DNA, 75 bp, synthetic construct
  source 1..75: mol_type = other DNA
cgacgtccgtattatcgatctgcaacagcggcgctctgcgcagacggtcgcacaggccatgatgcagggtgatat

SEQ ID NO: 823368 - DNA, 75 bp, synthetic construct
  source 1..75: mol_type = other DNA
ctattcagtccagtcactggtcgccgctgacgccggcgcagttggatttttgggaagagtttacgtttcaccccc

SEQ ID NO: 823369 - DNA, 75 bp, synthetic construct
  source 1..75: mol_type = other DNA
aacgaacgtgcgctgattgccgcacttcagcaggttataaaagaaaccgaggtattttccgtacgctttcgttta

SEQ ID NO: 823370 - DNA, 75 bp, synthetic construct
  source 1..75: mol_type = other DNA
gatgctggactcagctcactggcaaaccagctcgatgacatcgcccatgccagctacaacggcgtgtcgattgtc

SEQ ID NO: 823371 - DNA, 75 bp, synthetic construct
  source 1..75: mol_type = other DNA
tttcggtgagcgtaacggggcatgacgccagcaacgacagcgccagcgcgcctgttgctacggatgtttcctccg

SEQ ID NO: 823372 - DNA, 75 bp, synthetic construct
  source 1..75: mol_type = other DNA
cagcggcactggtaaaaaccgacggcaccaccaccattatgctcacctcggatagcaccggggcgcagagcgcgt

SEQ ID NO: 823373 - DNA, 75 bp, synthetic construct
  source 1..75: mol_type = other DNA
aatagttttaatgatccaagaattgtattattgagtaatgcttgcaatcaaggagtaacaaaagcacgaaatagg

SEQ ID NO: 823374 - DNA, 75 bp, synthetic construct
  source 1..75: mol_type = other DNA
atgtggttgaaacttattgaaaaaagtcgagttgcttacattattcaagaacctttggcttattataggattagg

SEQ ID NO: 823375 - DNA, 75 bp, synthetic construct
  source 1..75: mol_type = other DNA
atgatcaacccaagaaccattgcgcaagaaatcgcgtatgcggatgttgccactcaggcggcaaacttgcaggaa

SEQ ID NO: 823376 - DNA, 75 bp, synthetic construct
  source 1..75: mol_type = other DNA
ggtatttaaactggtgataattgctctcatcttctactttatgggacattcatatgcgagcgagtttattaattt

SEQ ID NO: 823377 - DNA, 75 bp, synthetic construct
  source 1..75: mol_type = other DNA
ggtgcggtattaaacatattttcattgtatattttgccaatttctttgattgtctttgttggaactgttacaact

SEQ ID NO: 823378 - DNA, 75 bp, synthetic construct
  source 1..75: mol_type = other DNA
gagactccattacctttagttattgaaacaggaaaagatgccaaagctctacagatcattaaactggctgaactc

SEQ ID NO: 823379 - DNA, 75 bp, synthetic construct
  source 1..75: mol_type = other DNA
taccagcgccggggtatttgcaggcgacgccggactcagttcactggcgaaccagctcgatgacatcgcccatgc

SEQ ID NO: 823380 - DNA, 75 bp, synthetic construct
  source 1..75: mol_type = other DNA
cagcaataatgactcggcgaccgtttccgctaactcgcaggcgcaggcgggaagctactcgtttttcgttgagca

SEQ ID NO: 823381 - DNA, 75 bp, synthetic construct
  source 1..75: mol_type = other DNA
gatctgtcggcggcagatcagaacggtgacggcgacggttttatcgacgccagcgaactggtgaatgcgattaac

SEQ ID NO: 823382 - DNA, 75 bp, synthetic construct
  source 1..75: mol_type = other DNA
taaccttgcaggtaatgtaaaggtagtaatttgcatataccttctatggagatttacagtaagatgcaagataaa

SEQ ID NO: 823383 - DNA, 75 bp, synthetic construct
  source 1..75: mol_type = other DNA
cgggctggccggtattcttcgaggccggtattctcacccccgtctgggctatcgccatcgagcgtgagaactccg

SEQ ID NO: 823384 - DNA, 75 bp, synthetic construct
  source 1..75: mol_type = other DNA
ccgtcatccccgtatctgtatgcttcgcaccgtcgccggtgatgaacgcagtgcccgccgttcccttgtccgtga

SEQ ID NO: 823385 - DNA, 75 bp, synthetic construct
  source 1..75: mol_type = other DNA
cgccggtgatgaacgcagcgcccgccgttcccttgtccgtgactatgtgctctcccttgctgcccgtctgccggt

SEQ ID NO: 823386 - DNA, 75 bp, synthetic construct
  source 1..75: mol_type = other DNA
tcaaatcgttgctgatcagcagtgtatggcagaaggcgttattgcaagtgctttatttgataaagcatacctgca

SEQ ID NO: 823387 - DNA, 75 bp, synthetic construct
  source 1..75: mol_type = other DNA
ctccgggctggccggtttccgataacgccggtatttccacccccgtctgggctatcgccatcgagcgtggaaact

SEQ ID NO: 823388 - DNA, 75 bp, synthetic construct
  source 1..75: mol_type = other DNA
atggtgtggtgtgtggtcagtcgagcaaatggcactccgtgcattctgcccgcgtccgctcattataccgcagag

SEQ ID NO: 823389 - DNA, 75 bp, synthetic construct
  source 1..75: mol_type = other DNA
ctttgtgtttgctgctgttcgtcgcgcagaccgtacccctcgtatttgtatgctccgcaccgttgccggtgatga

SEQ ID NO: 823390 - DNA, 75 bp, synthetic construct
  source 1..75: mol_type = other DNA
cggagcgccgtgacatcaatggtaaaacgcatatcgttcatctgccgaatgcgattgcccgcgatattagtgttc

SEQ ID NO: 823391 - DNA, 75 bp, synthetic construct
  source 1..75: mol_type = other DNA
gcagttatttgctactcgaaggagactgccttatggctacaacccttaccccctcacaccctgaatttgtctttg

SEQ ID NO: 823392 - DNA, 75 bp, synthetic construct
  source 1..75: mol_type = other DNA
cccccgtctgggctatcgccatcgagcgtgagaactccggcgatagcgttatttgctattcacaggaggctgcca

SEQ ID NO: 823393 - DNA, 75 bp, synthetic construct
  source 1..75: mol_type = other DNA
tgtttttctggctgtggtttttaaaccgtagcctctgtcagataatggtggtccgggcggggcagccttcgggct

SEQ ID NO: 823394 - DNA, 75 bp, synthetic construct
  source 1..75: mol_type = other DNA
agcgttccgcgcgcctttcgctggtccgtgattatgtgctctccctttctgcacgactgcctgccggggaggtga

SEQ ID NO: 823395 - DNA, 75 bp, synthetic construct
  source 1..75: mol_type = other DNA
gaatataaataaaggacaatacataacagaagacttttttgagcctgtggcacaattgattcgtattgcgataga

SEQ ID NO: 823396 - DNA, 75 bp, synthetic construct
  source 1..75: mol_type = other DNA
ccagaacgatgtgctggtgtacggtcatacccatctgccagtggcagaacagcgggggagattttccatttcaac

SEQ ID NO: 823397 - DNA, 75 bp, synthetic construct
  source 1..75: mol_type = other DNA
gccaaagccgcgacctttgccgctagtctcggtctgaaagttaacgccggacacggtctgacctatcacaacgtg

SEQ ID NO: 823398 - DNA, 75 bp, synthetic construct
  source 1..75: mol_type = other DNA
cattattggtcgtgcagtgatgaccggactgaaagatgcggtggcagaaatgaagcgtttgatgctggaagcgcg

SEQ ID NO: 823399 - DNA, 75 bp, synthetic construct
  source 1..75: mol_type = other DNA
caaaacgacaccgacccgcaggtcagtgatgttatcgaaacgatgatgctacaaatgaaaacacaatgtgatgcg

SEQ ID NO: 823400 - DNA, 75 bp, synthetic construct
  source 1..75: mol_type = other DNA
ttggatgtttcccttcccttggtaatatgtaatgagcaacatcgttttatcgtagcggaacaactgcgaacctta

SEQ ID NO: 823401 - DNA, 75 bp, synthetic construct
  source 1..75: mol_type = other DNA
atgaaactctcaacttgctgtgccgcgcttctgctcgccctcgcctcacccacggtactcgccgtcccggtttcc

SEQ ID NO: 823402 - DNA, 75 bp, synthetic construct
  source 1..75: mol_type = other DNA
aaatcagtgaggagcagtttaccgaagcactatcacttgcagctcgagttccacttgaaggtgagttcattggca

SEQ ID NO: 823403 - DNA, 75 bp, synthetic construct
  source 1..75: mol_type = other DNA
aattgaacaaatcccgctggccgtagagtacatccacagggtagtgcttgaaggtgaattcatcggaaaacaaga

SEQ ID NO: 823404 - DNA, 75 bp, synthetic construct
  source 1..75: mol_type = other DNA
gggttatgggccgtacgttcagttaccgttctacggtagctttacgctgcgtgatgacggcggtgatatggcaga

SEQ ID NO: 823405 - DNA, 75 bp, synthetic construct
  source 1..75: mol_type = other DNA
acacacgagatgttgatatcaatgagccagacggaccagcgaatctttccgcatggatgagacttaagaataaag

SEQ ID NO: 823406 - DNA, 75 bp, synthetic construct
  source 1..75: mol_type = other DNA
cgagatgttgatatcaatgagccagacggaccaacgaatctttccgcatggatgagacttaagaataaagaatta

SEQ ID NO: 823407 - DNA, 75 bp, synthetic construct
  source 1..75: mol_type = other DNA
gtaatccagtatcaggaagagtgtgacgatgtgctctacgaatactggactaaaggccatgtagttaacccacgc

SEQ ID NO: 823408 - DNA, 75 bp, synthetic construct
  source 1..75: mol_type = other DNA
ctggattcgactgatacgcagcttcccggcgaatatgacctttttgatttaatggcgcaggttactgaagagaac

SEQ ID NO: 823409 - DNA, 75 bp, synthetic construct
  source 1..75: mol_type = other DNA
gacagccagtacggacttgcatcttcggtatggacgaaagatgtgggcagggcgcatcgcgtcagcgcacggctg

SEQ ID NO: 823410 - DNA, 75 bp, synthetic construct
  source 1..75: mol_type = other DNA
acgggagaagtattactggagattgccgaggcaaccgcagagcaggttgatgccgctgttcgcgcggcagatgcc

SEQ ID NO: 823411 - DNA, 75 bp, synthetic construct
  source 1..75: mol_type = other DNA
ttatgaagtgcgccctggtctcatcaaaaccgatatgaccattccggcaacggcttattacgacgaactgattgc

SEQ ID NO: 823412 - DNA, 75 bp, synthetic construct
  source 1..75: mol_type = other DNA
aacgtaccggagcaatgggcggtcatgtcgctggcaccgcaggattctgtgttgctgtgccaaccttttattcat

SEQ ID NO: 823413 - DNA, 75 bp, synthetic construct
  source 1..75: mol_type = other DNA
agtctacggagcttggacctttaagctcgctggcgcatctcgaacgcgtcagcaaggcggtagaagaggcgaaag

SEQ ID NO: 823414 - DNA, 75 bp, synthetic construct
  source 1..75: mol_type = other DNA
gccgtatctacgcgcaaaaaggcatttacgacgtgctggtagaaaaactcggtgccgcagtggcaacgttgaaat

SEQ ID NO: 823415 - DNA, 75 bp, synthetic construct
  source 1..75: mol_type = other DNA
gtttcgccaggcatggttgatgcgcacacccatatttctgaaccgggtcgtagccactgggaaggttatgaaact

SEQ ID NO: 823416 - DNA, 75 bp, synthetic construct
  source 1..75: mol_type = other DNA
tttctgaagatgtccggaaaaactgcgccggtacgtgtgttcttaccggcgttcgaggcagacaaagaactgagg

SEQ ID NO: 823417 - DNA, 75 bp, synthetic construct
  source 1..75: mol_type = other DNA
cggcgaatatgacctttttgatttaatggcgcaggttactgaagagaacctgcacgcccctgtggattccgggcc

SEQ ID NO: 823418 - DNA, 75 bp, synthetic construct
  source 1..75: mol_type = other DNA
cgtagaaaaattacatgccacgcaacaggaatgtctggcagaaggcgtggaagtgatttgcttccctgccgatgt

SEQ ID NO: 823419 - DNA, 75 bp, synthetic construct
  source 1..75: mol_type = other DNA
tcatcactggagccgcacgtggtattggaaagggctgtgcactggaacttgcgcgtggcggatttaatctgctga

SEQ ID NO: 823420 - DNA, 75 bp, synthetic construct
  source 1..75: mol_type = other DNA
gcttataaagatttggtgaaaattcgtattccgcgtacggcgaatgaaatgtatcaccgaaatgtatcacctgcg

SEQ ID NO: 823421 - DNA, 75 bp, synthetic construct
  source 1..75: mol_type = other DNA
ttttcttgatccgccaaaagagacaacggctccggctctgcgggcgttaaaagccagtggaattaccgtgaagat

SEQ ID NO: 823422 - DNA, 75 bp, synthetic construct
  source 1..75: mol_type = other DNA
atttgcgccgttatttctggtgcataaggctgggaagatatagaggatttggggaaacacatctcgattttttga

SEQ ID NO: 823423 - DNA, 75 bp, synthetic construct
  source 1..75: mol_type = other DNA
gtgaaagtcactggcaactcaagcaccgcccatgttgctagctttatcgctgatccatcgactatcgccgccacc

SEQ ID NO: 823424 - DNA, 75 bp, synthetic construct
  source 1..75: mol_type = other DNA
aaggaaaattttacaaatcgaactggctttatccattgctaacttatctgaggcgaatccaattgagatacgaaa

SEQ ID NO: 823425 - DNA, 75 bp, synthetic construct
  source 1..75: mol_type = other DNA
aactatctccaaaaaaacatacttttaatattgaaggtgcagaattttttattcaccgtgcacgttctaaagata

SEQ ID NO: 823426 - DNA, 75 bp, synthetic construct
  source 1..75: mol_type = other DNA
tttttccgtctggtaacgcgtccgtggcgatagaaccccggctccctcaggcggattttcctgaacatcatcatg

SEQ ID NO: 823427 - DNA, 75 bp, synthetic construct
  source 1..75: mol_type = other DNA
gttcgatgaaatctggaaagagggtatgaagccggaagagtggcttgatacctatctggaacgtgcaaacctgat

SEQ ID NO: 823428 - DNA, 75 bp, synthetic construct
  source 1..75: mol_type = other DNA
aactttattttgacaaaattaaagccattgacccgttatctcgtcagttcctggtcgtcaaaaacccacagagga

SEQ ID NO: 823429 - DNA, 75 bp, synthetic construct
  source 1..75: mol_type = other DNA
tactatcgggtaaaagaaggagagccgacaggctggaaccctgcggctttgccccccactaaacgtaatatttcc

SEQ ID NO: 823430 - DNA, 75 bp, synthetic construct
  source 1..75: mol_type = other DNA
ctgccacattaacgtcattaacagcggtgaccgatcaaaacggaatcgcgacaacaagcgtgaaaggagcgatga

SEQ ID NO: 823431 - DNA, 75 bp, synthetic construct
  source 1..75: mol_type = other DNA
ggagacggagagggtatcgcaacgctgatccccgtattgaatggtgttcatcaggcgggcctgagtaccacgata

SEQ ID NO: 823432 - DNA, 75 bp, synthetic construct
  source 1..75: mol_type = other DNA
cgtcgccgtggagagcggcgaggaagcgatcaaccatcgcacactcagcatggccgtttacaccggacccagcga

SEQ ID NO: 823433 - DNA, 75 bp, synthetic construct
  source 1..75: mol_type = other DNA
gctgctgccagtcaccattacgctggatattgtgacttcaccactccagttcctgattttatgcacgaccagaaa

SEQ ID NO: 823434 - DNA, 75 bp, synthetic construct
  source 1..75: mol_type = other DNA
atgaccttgctaacgggaaatatactgctcaggacgctacgacagcacaaaaaggaattgtccagctcagtagtg

SEQ ID NO: 823435 - DNA, 75 bp, synthetic construct
  source 1..75: mol_type = other DNA
ggagggggaaaatggagacatcggttcattaagaccattctctataaacttaagatcagggttggtgtccatcgg

SEQ ID NO: 823436 - DNA, 75 bp, synthetic construct
  source 1..75: mol_type = other DNA
atgagtttatttgataaaaagcatctggtttcccccgccgatgccctgcctggacgtaacaccccgatgcccgta

SEQ ID NO: 823437 - DNA, 75 bp, synthetic construct
  source 1..75: mol_type = other DNA
agaaagggatagttcagcttagcaacgcgaccaacagcacatctgaaatgctggcggcaacgccaaagtcggtaa

SEQ ID NO: 823438 - DNA, 75 bp, synthetic construct
  source 1..75: mol_type = other DNA
cctcagccagggatgcgtcggcttcaaaagaggcggcaaaatcatcagaaacgagcgcagcctcgagcgccagta

SEQ ID NO: 823439 - DNA, 75 bp, synthetic construct
  source 1..75: mol_type = other DNA
aggaaaataagcaatgtggcttttgatggttcctccgatatcacattaaaagcaagtcatgttggtgcgtttgcc

SEQ ID NO: 823440 - DNA, 75 bp, synthetic construct
  source 1..75: mol_type = other DNA
cggtgatcatactcatggtaatggtattcgttggccaggaggcggcggttctgcgttagcattttatgatggcgg

SEQ ID NO: 823441 - DNA, 75 bp, synthetic construct
  source 1..75: mol_type = other DNA
tcacagccatagagatggccgtcgatttaaccccagtgtttttaaagatacttatcaatatggttatacaagctc

SEQ ID NO: 823442 - DNA, 75 bp, synthetic construct
  source 1..75: mol_type = other DNA
acacgcattcaataccaacatcagatggtgcaaaccagggggggaaaattccactgacatctgggcgtctggcaa

SEQ ID NO: 823443 - DNA, 75 bp, synthetic construct
  source 1..75: mol_type = other DNA
gtcggaaaccagtgcagaatcctcaaaaacggcagctgcatcgtccgccagttcggcggcgtcatcggcatcatc

SEQ ID NO: 823444 - DNA, 75 bp, synthetic construct
  source 1..75: mol_type = other DNA
acgtccgagacgaacgctaagtcttctgagacggcagcgggacagagcgcctcagctgcggcaggctcaaaaaca

SEQ ID NO: 823445 - DNA, 75 bp, synthetic construct
  source 1..75: mol_type = other DNA
tataacaacggatatccaacagcgtatggaaatatcattcacctgaaagggatgacagccgttggcgaaggtgag

SEQ ID NO: 823446 - DNA, 75 bp, synthetic construct
  source 1..75: mol_type = other DNA
ccgtgtcaccatgctggctgatggccgccgactccttatctacatggatgagttctggcaatggattaacaacga

SEQ ID NO: 823447 - DNA, 75 bp, synthetic construct
  source 1..75: mol_type = other DNA
atatttctgtgtggtggttgtgatttgcattttcccactacttttcagatgtgtacttcttattgtaaggtctgc

SEQ ID NO: 823448 - DNA, 75 bp, synthetic construct
  source 1..75: mol_type = other DNA
cagttttggcattaccttcgccattgcaatggtgcttggcccgatcatcactcacaaacttgggctacacgcgct

SEQ ID NO: 823449 - DNA, 75 bp, synthetic construct
  source 1..75: mol_type = other DNA
attgcagaagaagaacattcagcttacgtgaaaatcgacagcaaagtgacgaatcgctttgaggttgaacaggca

SEQ ID NO: 823450 - DNA, 75 bp, synthetic construct
  source 1..75: mol_type = other DNA
aagtgtcgactctgtcagcgttgatccgtcaaccaaagaagtgacggtaggtgacagcttcacggtcggcgaagc

SEQ ID NO: 823451 - DNA, 75 bp, synthetic construct
  source 1..75: mol_type = other DNA
acgtttccgatgtgaaacgggctgtggaagtggcgcttggcgaacttgagcgtactttcggtgatatttacgcca

SEQ ID NO: 823452 - DNA, 75 bp, synthetic construct
  source 1..75: mol_type = other DNA
cccgttgtcagtctgctcaggtttatcgtcatggacagaatccgaaaggacatgcccagtttcattgccgtgact

SEQ ID NO: 823453 - DNA, 75 bp, synthetic construct
  source 1..75: mol_type = other DNA
ggctggcagtgtttgccgccggtagcgttatcgctgcgctctctgactccatctggggaattattctgggccggg

SEQ ID NO: 823454 - DNA, 75 bp, synthetic construct
  source 1..75: mol_type = other DNA
ctgatcaccaatggcaatggccgtgaaaccgaagtccagggcgaaggagtggttggcgtccagccacttatcgcg

SEQ ID NO: 823455 - DNA, 75 bp, synthetic construct
  source 1..75: mol_type = other DNA
atgatcaattcgccccgagtgtgtattcaggttcaaagcgtctacattgaggcacaatcttcacctgataatgaa

SEQ ID NO: 823456 - DNA, 75 bp, synthetic construct
  source 1..75: mol_type = other DNA
cttatcagtaaagagtcgccagccggttacaaaggtacggcgatgggggtttactccaccagccagtttctcggc

SEQ ID NO: 823457 - DNA, 75 bp, synthetic construct
  source 1..75: mol_type = other DNA
gtgagcggcgcgcgacctggggtttagggaccgtattctcgttgcgcatgctgggcatgtttatggttctgccgg

SEQ ID NO: 823458 - DNA, 75 bp, synthetic construct
  source 1..75: mol_type = other DNA
gctggattgacggcatgtttgacggtcagggggtatttctcgctggcgcaatgctggccgcagtgtggctggcag

SEQ ID NO: 823459 - DNA, 75 bp, synthetic construct
  source 1..75: mol_type = other DNA
ggaagggggaaagtgatgattttgcggctttcgcaagactggatttgggaaaagcggcgtattacctaccggttc

SEQ ID NO: 823460 - DNA, 75 bp, synthetic construct
  source 1..75: mol_type = other DNA
taccgcccgcgccagctatgcactggaaaaagcgtttggcgcaccactgggccgcgcttgtggcgtcattgtcgg

SEQ ID NO: 823461 - DNA, 75 bp, synthetic construct
  source 1..75: mol_type = other DNA
acacattatggccgctgatgaagcggtaaaagccaccaacactgaagttattagcattgaacttcctcgcgatac

SEQ ID NO: 823462 - DNA, 75 bp, synthetic construct
  source 1..75: mol_type = other DNA
atgagcagcaatgaactggtcgaacagatcatggcgcaggtcatcgctcgcgtagcgacgccagagcatgaggtt

SEQ ID NO: 823463 - DNA, 75 bp, synthetic construct
  source 1..75: mol_type = other DNA
tactttcgggtgaaagaaggagagccgactggctggaaccctgcggctttgccaccaaccaaacgaaatatttcc

SEQ ID NO: 823464 - DNA, 75 bp, synthetic construct
  source 1..75: mol_type = other DNA
taaaattccttttgtgaacagagtaatgaatgattattacgagtcattccctcagtctgaatttttcgagaataa

SEQ ID NO: 823465 - DNA, 75 bp, synthetic construct
  source 1..75: mol_type = other DNA
attatacttaaccgtatgctataaaccgttcagcgctgaagataaagtgacgcattttctttcaaggaaaaaggg

SEQ ID NO: 823466 - DNA, 75 bp, synthetic construct
  source 1..75: mol_type = other DNA
gggtattcgtgctatgggcggggcttattttcgtgtgaagggcggagagcctaccgggtggaacccggcagccct

SEQ ID NO: 823467 - DNA, 75 bp, synthetic construct
  source 1..75: mol_type = other DNA
acctggggggaaaaactgattactctccgggggtcaggtaatgatatctaccatctgaattaccatatgacgact

SEQ ID NO: 823468 - DNA, 75 bp, synthetic construct
  source 1..75: mol_type = other DNA
gatttgaaagttggtctcgatatggtctccagcggctatatttctttcgggaaaagtcaccagacactgattgtt

SEQ ID NO: 823469 - DNA, 75 bp, synthetic construct
  source 1..75: mol_type = other DNA
agatcatggcgcaggtcatcgctcgcgtagcgacgccagagcatgaggttctcccgaaaaccactcatcaaatac

SEQ ID NO: 823470 - DNA, 75 bp, synthetic construct
  source 1..75: mol_type = other DNA
cactctgcgctctacctggctaagttcgccagaagtccccgtctggccgctgcccgcgaagaaaatatgtgtagt

SEQ ID NO: 823471 - DNA, 75 bp, synthetic construct
  source 1..75: mol_type = other DNA
tgccagcaaagaaaatatgtgtggtggggataagcggtctgatggattttcaggcacatcttgcggcagcttcgc

SEQ ID NO: 823472 - DNA, 75 bp, synthetic construct
  source 1..75: mol_type = other DNA
cgacgggcgatgaacgcccgggcctgatgaacttcccgtttgaaggattaacctcaggatcgaaatacgggacag

SEQ ID NO: 823473 - DNA, 75 bp, synthetic construct
  source 1..75: mol_type = other DNA
tttaaccgccgtcatgatctgggtaatttggggcgttatcgtcaatgcctggtttattccagaaatagccagcca

SEQ ID NO: 823474 - DNA, 75 bp, synthetic construct
  source 1..75: mol_type = other DNA
gtcgttgctcaggggattgccggcgttccggtgctttctggctccgggttgcgcatcgtggtgtgggttatcgcc

SEQ ID NO: 823475 - DNA, 75 bp, synthetic construct
  source 1..75: mol_type = other DNA
gttgacgatatgcgcgagaagctggaagccgcagagaagcgcattgcagagttagaaagtggttctcaggcacaa

SEQ ID NO: 823476 - DNA, 75 bp, synthetic construct
  source 1..75: mol_type = other DNA
gatgggcgacgctaggcatagcaacacacgggccgcagctgatatctacttccaactggtcgaggagtgcgaaat

SEQ ID NO: 823477 - DNA, 75 bp, synthetic construct
  source 1..75: mol_type = other DNA
gagtccgatcgcttcttccgcgaaaagcaggctgatgttgaagagcgcccgttcaccctgggtgactggctggtc

SEQ ID NO: 823478 - DNA, 75 bp, synthetic construct
  source 1..75: mol_type = other DNA
agtttggtgatggcttcagtcacatcatttacccaacctcagcgtcgttaatggcaacgctcggtgtgtgcaggg

SEQ ID NO: 823479 - DNA, 75 bp, synthetic construct
  source 1..75: mol_type = other DNA
gcgcatcgtagtgtgggttatcgccacgctgattggcctggtcttcaccatggtgtacgcctcacgagtgaaaaa

SEQ ID NO: 823480 - DNA, 75 bp, synthetic construct
  source 1..75: mol_type = other DNA
aatgctattagcggactggataacgcggtcgccgcctggtttatgcttctcttccaggcggtatttaatttcttt

SEQ ID NO: 823481 - DNA, 75 bp, synthetic construct
  source 1..75: mol_type = other DNA
cctttgccattatcatcgcaccgctaatggtccggctgggctatgacagtattaccaccgtcctggtgacctata

SEQ ID NO: 823482 - DNA, 75 bp, synthetic construct
  source 1..75: mol_type = other DNA
ttgccacgcagatcggttttgccagttcgtggatgaacccgttttgcgtggtcgtcgctcaggggattgcggggg

SEQ ID NO: 823483 - DNA, 75 bp, synthetic construct
  source 1..75: mol_type = other DNA
gattaccaaacggtaatggcatacaaagtttctgaggtcatcgatgcaatccgcgccgctggcattcgcatcaaa

SEQ ID NO: 823484 - DNA, 75 bp, synthetic construct
  source 1..75: mol_type = other DNA
gggcaccggtggtcgttatactggctccagctatggtgatccggctaactcctttaaagtgggaagttatacggt

SEQ ID NO: 823485 - DNA, 75 bp, synthetic construct
  source 1..75: mol_type = other DNA
aaggacaatatgcgctttggtctggagtttgagaaatccgcctttggtaaatataacgtggataatgcggtaaac

SEQ ID NO: 823486 - DNA, 75 bp, synthetic construct
  source 1..75: mol_type = other DNA
agttgggcaaaagtaacattctgctgatcggtccgaccggttccggtaaaacgctgctggccgaaacgctggcgc

SEQ ID NO: 823487 - DNA, 75 bp, synthetic construct
  source 1..75: mol_type = other DNA
tgaagttgtagatggacaacaacgtcttacaacgttaagcattattgtctccgagctaaaaaatcatcccgattc

SEQ ID NO: 823488 - DNA, 75 bp, synthetic construct
  source 1..75: mol_type = other DNA
gaagtcgccagaaaacttcgtgatcgcctgatgtcaactgtgcaaattgtgattacacacgaaggcagcagacag

SEQ ID NO: 823489 - DNA, 75 bp, synthetic construct
  source 1..75: mol_type = other DNA
taagcgtctgccgacagactttaacgaaggggcgaagaacaacacctattctcgtaatgagaagatggtgggcta

SEQ ID NO: 823490 - DNA, 75 bp, synthetic construct
  source 1..75: mol_type = other DNA
ttgcgcatggctgaaaagacgacttttttattatacaacaccttttttttcatcgttgctggccctttataaggg

SEQ ID NO: 823491 - DNA, 75 bp, synthetic construct
  source 1..75: mol_type = other DNA
ctgtttggcccaggcgaattgccggacgaatctgagaaagatgctcaggcctactttaatcgcaaatatgcaccg

SEQ ID NO: 823492 - DNA, 75 bp, synthetic construct
  source 1..75: mol_type = other DNA
tcgatgaagatttccaaatggaacagcaggccaatgctgaattcatcgccgtagccaatccggctaccgtcttgg

SEQ ID NO: 823493 - DNA, 75 bp, synthetic construct
  source 1..75: mol_type = other DNA
gcatgaaattcgcaaccacctggacgattacgttatcggccaggaacaggcgaaaaaagtgctggcggtcgcggt

SEQ ID NO: 823494 - DNA, 75 bp, synthetic construct
  source 1..75: mol_type = other DNA
gcactggcggaacttctagtgcaaaaagaagagaatagttggcgcattatgctaatgacgatgtttatctcgcaa

SEQ ID NO: 823495 - DNA, 75 bp, synthetic construct
  source 1..75: mol_type = other DNA
ggagcagcagggaaacgaactgcacatcaactggggtaaagtcggcaccaacggacaaagccaggtaaaaagttt

SEQ ID NO: 823496 - DNA, 75 bp, synthetic construct
  source 1..75: mol_type = other DNA
ttaaccattacggaaatccgtcgcggcctggcaggaaatctttgccgctgcacgggatatcaaatgattgtaaat

SEQ ID NO: 823497 - DNA, 75 bp, synthetic construct
  source 1..75: mol_type = other DNA
caaaagatgaggcgaccagacaggcgtcagcagcgaggggcagcgccacgacggcatccacgaaggcgacagagg

SEQ ID NO: 823498 - DNA, 75 bp, synthetic construct
  source 1..75: mol_type = other DNA
atcaggcgcttacaatgtcacccgctctggcgacagctatattctggttaacttctataccggagtcggaagttg

SEQ ID NO: 823499 - DNA, 75 bp, synthetic construct
  source 1..75: mol_type = other DNA
ctaagcgcggggattatgagcacaacaagcggtagtggccagactcgtaatgcagggaagacatcatcagatggt

SEQ ID NO: 823500 - DNA, 75 bp, synthetic construct
  source 1..75: mol_type = other DNA
cggaaaatcggcagaaagcgccgcatcgtccgcttcaacagccacaacgaaggctggcgaagccactgaacaggc

SEQ ID NO: 823501 - DNA, 75 bp, synthetic construct
  source 1..75: mol_type = other DNA
atcagataccgttccgtctggttatgccctgatgcaggggcagacttttgacaaatctgcttacccgaaacttgc

SEQ ID NO: 823502 - DNA, 75 bp, synthetic construct
  source 1..75: mol_type = other DNA
ccggcacatctgcccgtgaggcggcaacccatgcgactgatgctacaggctcagcacgcgcagccagcacgtcag

SEQ ID NO: 823503 - DNA, 75 bp, synthetic construct
  source 1..75: mol_type = other DNA
ccagtcactcttacgctggatatagtaacgtcaccactgcagttcctgattttatgcactaccagaaattgttaa

SEQ ID NO: 823504 - DNA, 75 bp, synthetic construct
  source 1..75: mol_type = other DNA
gctgctaccagtcactcttacgctggatatagtaacgtcaccactccagttcctgattttatgcactaccagaaa

SEQ ID NO: 823505 - DNA, 75 bp, synthetic construct
  source 1..75: mol_type = other DNA
agggcaaacccgccagtggtcgtgccgtattgtctcaggaacaggacggcattaaatcgcacacccacagcgcca

SEQ ID NO: 823506 - DNA, 75 bp, synthetic construct
  source 1..75: mol_type = other DNA
acggcggcagctcagagcaaaagtacggcagaatccgcagcaacgcgcgccgagacagcagcaaaacgggcagag

SEQ ID NO: 823507 - DNA, 75 bp, synthetic construct
  source 1..75: mol_type = other DNA
caccacaacaaattgccgcctgggcgcagattgatgaacatcgatggaaagagaaactcgcgaaatcacaagtgc

SEQ ID NO: 823508 - DNA, 75 bp, synthetic construct
  source 1..75: mol_type = other DNA
accacgaaggcgtcagaagctgccacctcagcccgggatgcggcggcctcaaaagaggcggcaaaatcatcagaa

SEQ ID NO: 823509 - DNA, 75 bp, synthetic construct
  source 1..75: mol_type = other DNA
aaggcggaaaactttctcatgttcagcaggcttatgcgaaatccggcgcggtgcagtgcgggttttgtacgcctg

SEQ ID NO: 823510 - DNA, 75 bp, synthetic construct
  source 1..75: mol_type = other DNA
gtgcagtgcgggttttgtacgcctggcctgattatggctaccacggcaatgctggcgaaaccacgcgagaagcca

SEQ ID NO: 823511 - DNA, 75 bp, synthetic construct
  source 1..75: mol_type = other DNA
aataacaaacactaccctggtgaaatacggaaaactaggatacatcgttccaagaccacaaaaaattcgtgggcg

SEQ ID NO: 823512 - DNA, 75 bp, synthetic construct
  source 1..75: mol_type = other DNA
tgccgcctgggctgaaggaaaagagatccgcacgctggaaggtgaagcgaaaggcggtaaactttctcatgtcca

SEQ ID NO: 823513 - DNA, 75 bp, synthetic construct
  source 1..75: mol_type = other DNA
gcaggaaatctttgtcgctgcacggggtatcagatgattgtaaatacagttctggattgcgagaaaacgaagtaa

SEQ ID NO: 823514 - DNA, 75 bp, synthetic construct
  source 1..75: mol_type = other DNA
gcaggcttatgcgaaatccggcgcagtgcagtgcgggttttgtacgccgggcctgattatggctaccacggcaat

SEQ ID NO: 823515 - DNA, 75 bp, synthetic construct
  source 1..75: mol_type = other DNA
caaggggcggttggtctgggcattggcacgatggcgaatacgaactctgctggcgcgcatacccactcactgtcc

SEQ ID NO: 823516 - DNA, 75 bp, synthetic construct
  source 1..75: mol_type = other DNA
gctaatgataatgcgaatggtcgggtaccttctgcccgtaaggtgaatggtaaggcgctttcagcggatataaca

SEQ ID NO: 823517 - DNA, 75 bp, synthetic construct
  source 1..75: mol_type = other DNA
atcaccgtgtatgaagattctcaacccggtacgctgaatgattttctcggtgccatgtcggaggatgacgtccgt

SEQ ID NO: 823518 - DNA, 75 bp, synthetic construct
  source 1..75: mol_type = other DNA
cctcagctgcggcagactctgagacagcagctgcatcatcggcccgtgaggcgtccattaaggcagaggaggcag

SEQ ID NO: 823519 - DNA, 75 bp, synthetic construct
  source 1..75: mol_type = other DNA
agcgaccgaggcagctggtagtgcgacggcggcagcacagagcaagagtacggcagaatccgcagcaacgcgcgc

SEQ ID NO: 823520 - DNA, 75 bp, synthetic construct
  source 1..75: mol_type = other DNA
acacacaccattaccattgccgcttatggcaacgcggaaaacaccgtcaaaaacatcgcatttaactatattgtg

SEQ ID NO: 823521 - DNA, 75 bp, synthetic construct
  source 1..75: mol_type = other DNA
gcagtacggctgaaacaccgcatccggaagcgccggtcacggcaaaagctgaagccccccgggccggcacaccgg

SEQ ID NO: 823522 - DNA, 75 bp, synthetic construct
  source 1..75: mol_type = other DNA
ctgaccggcagtgatgcctttaaacaaaaagccatgcagctgattgtcgaatacgacattaaggttcgcatgaaa

SEQ ID NO: 823523 - DNA, 75 bp, synthetic construct
  source 1..75: mol_type = other DNA
tatccgtaatatctgggccatgactcctgtcagtaacggcattaccgtcgataatgaccatcctcatgctggtca

SEQ ID NO: 823524 - DNA, 75 bp, synthetic construct
  source 1..75: mol_type = other DNA
tcgttttgttgtctctggtagcttcaactcaggcctttgccggtcgttgtcagcacgacagcgatactgctgctg

SEQ ID NO: 823525 - DNA, 75 bp, synthetic construct
  source 1..75: mol_type = other DNA
cggtcagccatgtaactgaagacattccccttcagccagagccgttccttcctgagtcagatggccctgaagaat

SEQ ID NO: 823526 - DNA, 75 bp, synthetic construct
  source 1..75: mol_type = other DNA
accctgttcaggaaaaagaagccacacaatccccggcgtccccagtagcccctgaagcatcaaccgtcagcaccg

SEQ ID NO: 823527 - DNA, 75 bp, synthetic construct
  source 1..75: mol_type = other DNA
aaccccgcaggtcattttcaaatgagtttaaacttcaaatggttaaactggctttacaaccaagggtttttgttg

SEQ ID NO: 823528 - DNA, 75 bp, synthetic construct
  source 1..75: mol_type = other DNA
agcatgaaactttgtctggatgttatcgatcttctgaattactggttaaatattataagaaatattctgcttcgc

SEQ ID NO: 823529 - DNA, 75 bp, synthetic construct
  source 1..75: mol_type = other DNA
gaagaaggccattaaaaaggctgagcagcttgtgaaggatctgattcagttcaagctatgtgacatgggggattt

SEQ ID NO: 823530 - DNA, 75 bp, synthetic construct
  source 1..75: mol_type = other DNA
atcagaagcgtcagacaacagcgagcccgacgccatcacctatggccctgaacgaaaaaatcatacccgcgtccg

SEQ ID NO: 823531 - DNA, 75 bp, synthetic construct
  source 1..75: mol_type = other DNA
tggtaccgacagttcgtgagggagcggcgcaaattcttaattatgtcgggccagtattctgaggataaccagtga

SEQ ID NO: 823532 - DNA, 75 bp, synthetic construct
  source 1..75: mol_type = other DNA
ttttcaagagaacacatacctttcctttcatcagatggaaataacaatccgctttttaatgatgaagaagaataa

SEQ ID NO: 823533 - DNA, 75 bp, synthetic construct
  source 1..75: mol_type = other DNA
cggttcgctggatttgctgagccatctgccagatagtcaagctgtgacagacattcaccacgggctggaatcgtt

SEQ ID NO: 823534 - DNA, 75 bp, synthetic construct
  source 1..75: mol_type = other DNA
ttcgctgactacggtctggaatttgttgcaggagtggaacagagaagggttattgccggtgaaaacagaaggaaa

SEQ ID NO: 823535 - DNA, 75 bp, synthetic construct
  source 1..75: mol_type = other DNA
gcaaaacggttattgttgatgtgatcactcgtaatgcacagtttccacttaaggcaagagctatcacggtgaatg

SEQ ID NO: 823536 - DNA, 75 bp, synthetic construct
  source 1..75: mol_type = other DNA
tgaagggaaaaatgtcttgcagattgcagttcgtactcgcatcaagcttttttatcgcccagcaggtctaaaagg

SEQ ID NO: 823537 - DNA, 75 bp, synthetic construct
  source 1..75: mol_type = other DNA
ggagtaaatgaggtgtcacaaataaaatataacatcattaatgattttgggtcatcaggtgaactgttgaccaga

SEQ ID NO: 823538 - DNA, 75 bp, synthetic construct
  source 1..75: mol_type = other DNA
cgggctggtggcggaacgtgatggcattctagagccgattctcggccttgatgtgctacaaaccgccacgcgcag

SEQ ID NO: 823539 - DNA, 75 bp, synthetic construct
  source 1..75: mol_type = other DNA
ggggatgtcagttttgccatcgtgctgatgacgcccgacgatagcggcagtgctctggcatctgaaagcacacgt

SEQ ID NO: 823540 - DNA, 75 bp, synthetic construct
  source 1..75: mol_type = other DNA
taccgagcttgatgaacatggtggatggaaacgcaagctgctgagcgaactggcgtatgcaggtgttccttttga

SEQ ID NO: 823541 - DNA, 75 bp, synthetic construct
  source 1..75: mol_type = other DNA
gtcgccgtgggcgagggcaaggtgttcgacaacggcaacgtgcgcgcgccgaaggtcaaggtcggcgaccaggtg

SEQ ID NO: 823542 - DNA, 75 bp, synthetic construct
  source 1..75: mol_type = other DNA
tcaaagagcattatgtcgataccacgccaaccggacataaagccagtattctcaaatcattttgcgcgatattcc

SEQ ID NO: 823543 - DNA, 75 bp, synthetic construct
  source 1..75: mol_type = other DNA
aatttgtacggtcgcgtttattccgttgcagtcgcttttctctgactccacggtcggttatgcctgtgcggcgct

SEQ ID NO: 823544 - DNA, 75 bp, synthetic construct
  source 1..75: mol_type = other DNA
gatgattattgaggaagttaaccaacgcaaaaataaagagatggcgacagaagaaaaaacggcttccttaacgtt

SEQ ID NO: 823545 - DNA, 75 bp, synthetic construct
  source 1..75: mol_type = other DNA
aatgttgcgctgtcgtcgctttccggcggttggttgcgtaaagcggcattaggacgcgcgctggtgagcaatccg

SEQ ID NO: 823546 - DNA, 75 bp, synthetic construct
  source 1..75: mol_type = other DNA
gtttactaccagtataaaaatccagtgactggaaaatttcacggactcggaacagacaaaggcaaggcagaaaaa

SEQ ID NO: 823547 - DNA, 75 bp, synthetic construct
  source 1..75: mol_type = other DNA
cggaccgaatgttggtgtcgcatatgacaatccactccgtgccgccatgattgtctttctcatgattcaggacgc

SEQ ID NO: 823548 - DNA, 75 bp, synthetic construct
  source 1..75: mol_type = other DNA
atcagcataattttagacaatccctcaatgccgtgcgccacagacaacgcaagggacttgtttgatgatgccgga

SEQ ID NO: 823549 - DNA, 75 bp, synthetic construct
  source 1..75: mol_type = other DNA
aatctggtgaaacttatagagcaaacaacaggatacacatctacatcaattgatataagtgtgttaaaaaacatc

SEQ ID NO: 823550 - DNA, 75 bp, synthetic construct
  source 1..75: mol_type = other DNA
tgatataagtacgctaaaaaacattatagaggcatcttcagaaaacaaatcagagaacatcactccgaaagatga

SEQ ID NO: 823551 - DNA, 75 bp, synthetic construct
  source 1..75: mol_type = other DNA
tctgttgcagtgtcgccatcaggtcgtttcatttattgtgttgctgataatttttgtcaccacacactggctgcc

SEQ ID NO: 823552 - DNA, 75 bp, synthetic construct
  source 1..75: mol_type = other DNA
ggcatcgcaggatgcgtggcgcgtgggatggcgttgcttgtttgcggagcggtcctgttggggatcggcgaactt

SEQ ID NO: 823553 - DNA, 75 bp, synthetic construct
  source 1..75: mol_type = other DNA
cttatacgcgacattgatgtttgatttgaaagggaaatattatgttccatttattatatttatagtggttatgct

SEQ ID NO: 823554 - DNA, 75 bp, synthetic construct
  source 1..75: mol_type = other DNA
tcgacagggagtgtatcgaacgaaatctcagtccaggcggcagtgccgacctgctgatccttacctggtttttag

SEQ ID NO: 823555 - DNA, 75 bp, synthetic construct
  source 1..75: mol_type = other DNA
ccgaatgttggtgtcgcatatgacaatccactccgtgccgccatgattgtctttctcatgatgcggagaatccaa

SEQ ID NO: 823556 - DNA, 75 bp, synthetic construct
  source 1..75: mol_type = other DNA
gttctactcctgcgtaggcctgataagacgcgctagcgtcgcatcaggcaacggctgtcggatgcagcgtgaacg

SEQ ID NO: 823557 - DNA, 75 bp, synthetic construct
  source 1..75: mol_type = other DNA
cggaatacctgcgtacaaaggttgaggtaaatccacacgtttttgtttggccttatggcgaagcgggtgatgctg

SEQ ID NO: 823558 - DNA, 75 bp, synthetic construct
  source 1..75: mol_type = other DNA
ccgcagcgctggcggcgattgttccggtcgcgctggcgattggcgttgaccctgcgtacatcgtggcttcagcac

SEQ ID NO: 823559 - DNA, 75 bp, synthetic construct
  source 1..75: mol_type = other DNA
aaaccgcagtggaatgttcttcatgaagacggttttgtccggaaaatctcgcgatatgttgcgagcctacaagac

SEQ ID NO: 823560 - DNA, 75 bp, synthetic construct
  source 1..75: mol_type = other DNA
atgaaaatccaataccaggactatggcgccgtagcgaacatcgtgatcaccagttcctgcctgacattgcaaaag

SEQ ID NO: 823561 - DNA, 75 bp, synthetic construct
  source 1..75: mol_type = other DNA
ggaagggcttgaactccttctggatgaaattattaacgaaatgaatactcatagcatgcaatccgaaaaccaaca

SEQ ID NO: 823562 - DNA, 75 bp, synthetic construct
  source 1..75: mol_type = other DNA
atgatttcgttgccgaaggtattgaagaacaagcggaatacctgaaacgctatcacgatatttcgcgcctggtga

SEQ ID NO: 823563 - DNA, 75 bp, synthetic construct
  source 1..75: mol_type = other DNA
atgtcattaatcagtatgcatggcgcatggctgtcgttcagcgacgcgccgcttctcgataacgcagaactgcat

SEQ ID NO: 823564 - DNA, 75 bp, synthetic construct
  source 1..75: mol_type = other DNA
atgtaaaaccggtcattcgttttgatggaaatatgcttcaccaggaacgtgacgatatatccaacatggttccgg

SEQ ID NO: 823565 - DNA, 75 bp, synthetic construct
  source 1..75: mol_type = other DNA
atggatttagttctagagatctctggttggatgaaatgattagaacggaaaagatacttcctttatatgctaaag

SEQ ID NO: 823566 - DNA, 75 bp, synthetic construct
  source 1..75: mol_type = other DNA
gaaagaaagttgtggcatacctgcacccggcactttatccgcaggacaacctgacacaacaaacaatagactctc

SEQ ID NO: 823567 - DNA, 75 bp, synthetic construct
  source 1..75: mol_type = other DNA
atagaggcatcttcagaaaacaaatcagagagcatcgcttcaaaagatgatttcgaagaacaaaccagacgcaat

SEQ ID NO: 823568 - DNA, 75 bp, synthetic construct
  source 1..75: mol_type = other DNA
tggcagtatgactattgattatcacgacgcaatccgccgtctggatgccggtgaattcgatcatcctaatgtgaa

SEQ ID NO: 823569 - DNA, 75 bp, synthetic construct
  source 1..75: mol_type = other DNA
aatatggcgaagctgaaggcatggggcgagttctgtttctctatcaaaaaatgctcatcgtagatccaggcaatg

SEQ ID NO: 823570 - DNA, 75 bp, synthetic construct
  source 1..75: mol_type = other DNA
tttattaaattatcatattgttcatgtgatgaatggtttgagcatttgactttagaatccaagttacaactatca

SEQ ID NO: 823571 - DNA, 75 bp, synthetic construct
  source 1..75: mol_type = other DNA
cggggattgagatggacagctctgtaatggtcgttgatttcccatcgaaacctcagaattttaaggcgacagggg

SEQ ID NO: 823572 - DNA, 75 bp, synthetic construct
  source 1..75: mol_type = other DNA
gacccgaataatccggataacaccgcctatccgtttgcggtctctggtggaaaagttgttattcccaaagcgatg

SEQ ID NO: 823573 - DNA, 75 bp, synthetic construct
  source 1..75: mol_type = other DNA
cgtggtgacggacgtcacgcatttgtgacccgtgaggaactggttggtcttaaactcgcccggcgtcgaacatcg

SEQ ID NO: 823574 - DNA, 75 bp, synthetic construct
  source 1..75: mol_type = other DNA
tcgcagaaaattgtcgcggatgaagtaaaggccggggtaagtatcacctcgccggtgattcgcagtgctgttatt

SEQ ID NO: 823575 - DNA, 75 bp, synthetic construct
  source 1..75: mol_type = other DNA
gcttgttgccacgacgccggggcaggtttacggcgatccggttgaccctggctggtcgggattttactggatacg

SEQ ID NO: 823576 - DNA, 75 bp, synthetic construct
  source 1..75: mol_type = other DNA
tgacccgtgaagagctggttggccttaaacttgcccgacgtcgtacacagggtggtgcgggtacctcatatgcac

SEQ ID NO: 823577 - DNA, 75 bp, synthetic construct
  source 1..75: mol_type = other DNA
cctcagaattttaaggcgacagggggatttggctcggtactgcttgaatgggatatgccgaattatcgcggtcat

SEQ ID NO: 823578 - DNA, 75 bp, synthetic construct
  source 1..75: mol_type = other DNA
tatatgcttgcacatcacgtaacactggaagaactatccgaagcaagcgcgcgtattcgtagaatgaaagacatt

SEQ ID NO: 823579 - DNA, 75 bp, synthetic construct
  source 1..75: mol_type = other DNA
caggtcgtctcagttacgacggcaatcgcagctataacggactgtttgttcatggagatgcagccgcctgggcgg

SEQ ID NO: 823580 - DNA, 75 bp, synthetic construct
  source 1..75: mol_type = other DNA
attcgtcaaccagtgaatcgcttaatgaggtcgacaagcgcatcactaaactggataaagaaggcggtgaggcct

SEQ ID NO: 823581 - DNA, 75 bp, synthetic construct
  source 1..75: mol_type = other DNA
aataaaaaacgcgcaggggcaggctgtaaaggatgcggcaattaagacaaccgaagttgtgggggctctcaggga

SEQ ID NO: 823582 - DNA, 75 bp, synthetic construct
  source 1..75: mol_type = other DNA
tgaagtaaaggccggggtaagtatcacctcgccggtgattcgcagtgctgttattcagaacgggaactttcaggt

SEQ ID NO: 823583 - DNA, 75 bp, synthetic construct
  source 1..75: mol_type = other DNA
acttcgccagttatccggagtgctgttattcagaacgggagattcactgttggttctgatgggagtatgaagatc

SEQ ID NO: 823584 - DNA, 75 bp, synthetic construct
  source 1..75: mol_type = other DNA
cggctaccattttgacctaaaaggcgatgaatggatttgcgatcgcagcggcgaaaccttctgggatttgctgga

SEQ ID NO: 823585 - DNA, 75 bp, synthetic construct
  source 1..75: mol_type = other DNA
agcggcgaaaccttctgggatttgctggaacaggcggcgacacagcaggcgggtgaaacagtcagtttccgctaa

SEQ ID NO: 823586 - DNA, 75 bp, synthetic construct
  source 1..75: mol_type = other DNA
atgcgtacagtcataacctttggaacatttgatgttttgcatattggccacatcaaaattttagaaagagcaaaa

SEQ ID NO: 823587 - DNA, 75 bp, synthetic construct
  source 1..75: mol_type = other DNA
agcttaaacaaaaagtaataacagcaattaaatgctcttttatctcatgtcgtacagatgaagaacgatatgtcg

SEQ ID NO: 823588 - DNA, 75 bp, synthetic construct
  source 1..75: mol_type = other DNA
tggcctgtgttagcggtcgatgatgatggcgaaacgatggttgtcactgcatcttccgttgaacaaaaccttaaa

SEQ ID NO: 823589 - DNA, 75 bp, synthetic construct
  source 1..75: mol_type = other DNA
ttatgaaagtttgacttttttagccacatacatagtaccttttatgggattcagttttgatgacccccagaaaaa

SEQ ID NO: 823590 - DNA, 75 bp, synthetic construct
  source 1..75: mol_type = other DNA
gtttgatcgcaagttgatactccttcccttcactttctattcaggaacactgacgatagagattaacggaagagt

SEQ ID NO: 823591 - DNA, 75 bp, synthetic construct
  source 1..75: mol_type = other DNA
atggagatgtgacggccagtaatgcgaagataagtggtcatattgatgcggattccggcacgctgaataacgtga

SEQ ID NO: 823592 - DNA, 75 bp, synthetic construct
  source 1..75: mol_type = other DNA
gaacatggaaattggcaccgggcagcgtggtgacggacgccacgcatttgtgacccgtgaggaactggttggtct

SEQ ID NO: 823593 - DNA, 75 bp, synthetic construct
  source 1..75: mol_type = other DNA
aacaggcagtgcgtatggttgggtgtatgttaagcatagtaatcaaatggaaaaatgtctaaagaatggtcgaaa

SEQ ID NO: 823594 - DNA, 75 bp, synthetic construct
  source 1..75: mol_type = other DNA
gaccaaccagtctgttgcaatgctgtattaaatgttacagcaaataatacatatagaatattaacaatacataac

SEQ ID NO: 823595 - DNA, 75 bp, synthetic construct
  source 1..75: mol_type = other DNA
tgaatggagatgtgacggccagtaatgcgaagatcagtggtcatattgatgcggattccggcacgctgaataacg

SEQ ID NO: 823596 - DNA, 75 bp, synthetic construct
  source 1..75: mol_type = other DNA
cctggagtatcagtctgtcgccattcgctacaacaacaccgccaactatgacggcagctataaccacgggagcag

SEQ ID NO: 823597 - DNA, 75 bp, synthetic construct
  source 1..75: mol_type = other DNA
atggcgaagtcattatccctgtattcacggaagcggaaagagcacagggactgaccgatttcaatgacctggacg

SEQ ID NO: 823598 - DNA, 75 bp, synthetic construct
  source 1..75: mol_type = other DNA
gcgccgttttctgaccggtgtgaaatcacgcacctcagaaccttccgttattcaggagaaaaagcccacggaggc

SEQ ID NO: 823599 - DNA, 75 bp, synthetic construct
  source 1..75: mol_type = other DNA
cggcaggccaccgctgaaccgacggctgaagataaactgcaggaagagcgtcttgtttccgccactgagaccagc

SEQ ID NO: 823600 - DNA, 75 bp, synthetic construct
  source 1..75: mol_type = other DNA
cctgccccacagttgatgcagtttcacctgaagcaacaggactccccgttgtttgccgccatccacaaaccggaa

SEQ ID NO: 823601 - DNA, 75 bp, synthetic construct
  source 1..75: mol_type = other DNA
aagcgccgacgaatacatgcagggcgtggtccgcctgaacggcaccctttacccggcactggccaccccgacagc

SEQ ID NO: 823602 - DNA, 75 bp, synthetic construct
  source 1..75: mol_type = other DNA
cgatccggtcaccgaatttgctcaggtcctggaaaacgccgggctggttattcagggattgccacagatggatgg

SEQ ID NO: 823603 - DNA, 75 bp, synthetic construct
  source 1..75: mol_type = other DNA
ctggatgtgctgcgcaataacgccaccgagttccgggcggtgaatattgcccgcttccttgataatgaagaaaac

SEQ ID NO: 823604 - DNA, 75 bp, synthetic construct
  source 1..75: mol_type = other DNA
atgaaaaaaattgcacttatcttgtttgtgggaatgcttgtttctttttatgccgatgccgggcgcaagccgtgt

SEQ ID NO: 823605 - DNA, 75 bp, synthetic construct
  source 1..75: mol_type = other DNA
tgaaggtaaaaatgtgctgcaaattgcagtgcgtacacgtataaaacttttttatcgcccggaaggactaaaggg

SEQ ID NO: 823606 - DNA, 75 bp, synthetic construct
  source 1..75: mol_type = other DNA
gcggcaggaagttcttcaccgaatggcaggtggccccgtccccgttccgacaagttatgcaggtcatgacggtac

SEQ ID NO: 823607 - DNA, 75 bp, synthetic construct
  source 1..75: mol_type = other DNA
acaagaagatttttttccatctgtggtacagctactggctggaagagatggttttcatactcaacaacaaggccg

SEQ ID NO: 823608 - DNA, 75 bp, synthetic construct
  source 1..75: mol_type = other DNA
cgatttgcggtgcttgcgagcggcagtttctttagcggcggactggtggcagaacgtgacggcattcgcgagccg

SEQ ID NO: 823609 - DNA, 75 bp, synthetic construct
  source 1..75: mol_type = other DNA
tcacgctgacattgcaggcccgggagagatcaccttcatcaccgggcaaaccggaatgggtgcgaaatatctgga

SEQ ID NO: 823610 - DNA, 75 bp, synthetic construct
  source 1..75: mol_type = other DNA
ttacagaggatgtcatcaggcaggtcatatcaaacctgttcgaatttgaaaaagaaatgctgggaggtaaaccgg

SEQ ID NO: 823611 - DNA, 75 bp, synthetic construct
  source 1..75: mol_type = other DNA
agctaaaccctgaagccatggtcgccgaacgtatttactgggcagaagatgaatctgtcgcccgcctccatctta

SEQ ID NO: 823612 - DNA, 75 bp, synthetic construct
  source 1..75: mol_type = other DNA
cgctgcattgcctgaattgtggttacctgagcctttaccgtacgtctgcggtgctgaagtggttggagaaaggca

SEQ ID NO: 823613 - DNA, 75 bp, synthetic construct
  source 1..75: mol_type = other DNA
cagcacttgagggtgatatcagcttcagggcactgggcaatctggccggaagactggacagcatcgacctgagcg

SEQ ID NO: 823614 - DNA, 75 bp, synthetic construct
  source 1..75: mol_type = other DNA
cgtcagggcaatgaccacggcacgcagtatcgttccgcaatttacccgctgacaccagaacaggacgctgccgcc

SEQ ID NO: 823615 - DNA, 75 bp, synthetic construct
  source 1..75: mol_type = other DNA
aggaatcgctctgtatcgggtgcggagaatgtgttctggcatgtcccacccttgcctggcagcgtcagccccagg

SEQ ID NO: 823616 - DNA, 75 bp, synthetic construct
  source 1..75: mol_type = other DNA
tcaaacatctgacggaagaaatgcgccgtacactacaggatatttcaagattgtcagatcaaaatgcccgaaaag

SEQ ID NO: 823617 - DNA, 75 bp, synthetic construct
  source 1..75: mol_type = other DNA
ctcatcctctggacagaacgcggagcagcccgtcatgcaaaaatgctcgaaaccgatcaggcgtgggaagtgttc

SEQ ID NO: 823618 - DNA, 75 bp, synthetic construct
  source 1..75: mol_type = other DNA
ggtcagcataccctggagtttccgatggcaacattcagccaggtgatgttacagatgcaacaacactggccacag

SEQ ID NO: 823619 - DNA, 75 bp, synthetic construct
  source 1..75: mol_type = other DNA
ccagaaatcttcttccgtttcttgtctgagaagggggtttccagtgtctgcccttcatgtggatcgtctcgatta

SEQ ID NO: 823620 - DNA, 75 bp, synthetic construct
  source 1..75: mol_type = other DNA
atggagattacgccagaaatcttcttccgtttcttgtctgagaagggggtttccagtgtctgcccttcatgtgga

SEQ ID NO: 823621 - DNA, 75 bp, synthetic construct
  source 1..75: mol_type = other DNA
gccgaatttaacgccttcaaacatctgacggaagaaatgcgccgtaaattgctggatatttcccgcacatcggaa

SEQ ID NO: 823622 - DNA, 75 bp, synthetic construct
  source 1..75: mol_type = other DNA
ggcgacggatgacgttaacccgctacaggcgtgggaagcggcggatgaatatttgctgcaacagttggacgacac

SEQ ID NO: 823623 - DNA, 75 bp, synthetic construct
  source 1..75: mol_type = other DNA
attacttattgctggctttttcaagtgcgctttggatgctgtatttaggccgtttgctttcagggatcacaggag

SEQ ID NO: 823624 - DNA, 75 bp, synthetic construct
  source 1..75: mol_type = other DNA
attaaaagaccatgaagaactgttagaaacccttcatcacgaggcgcttcatcttgagcagcgccattaccctga

SEQ ID NO: 823625 - DNA, 75 bp, synthetic construct
  source 1..75: mol_type = other DNA
gatttggattattggtttagcgttttactgtattattatcctgctatcgatgaccttcatgttaacccctcaagg

SEQ ID NO: 823626 - DNA, 75 bp, synthetic construct
  source 1..75: mol_type = other DNA
tttcctgctgactggataattcagtgtgcactagaaaccggtgtttcgttactttggttagccacaggacaggga

SEQ ID NO: 823627 - DNA, 75 bp, synthetic construct
  source 1..75: mol_type = other DNA
atcaagacgaagcatcctttgagtgcaaccttgatgatatcgaggttgtaggccgcgcattaaaaataattaaga

SEQ ID NO: 823628 - DNA, 75 bp, synthetic construct
  source 1..75: mol_type = other DNA
taaaagcatcgtcaaaattgcgcgcatacccggaaacaaaatagtagttaaccaagatgacacttcatttgaatg

SEQ ID NO: 823629 - DNA, 75 bp, synthetic construct
  source 1..75: mol_type = other DNA
cgggctgatggcaatggaattattcaccccggcacgcgatgtgctggcgcagcgcactctcggttgggtggcgcg

SEQ ID NO: 823630 - DNA, 75 bp, synthetic construct
  source 1..75: mol_type = other DNA
agcgtcgacagagcgatcgcgaagcaaccatcggcgtcacggacagccttgtacatctttttgccaaccgttgga

SEQ ID NO: 823631 - DNA, 75 bp, synthetic construct
  source 1..75: mol_type = other DNA
tgagcgcggagaagacatcggtgattacggcatattgtgccgctatcagcagcgtcgacagagcgatcgcgaagc

SEQ ID NO: 823632 - DNA, 75 bp, synthetic construct
  source 1..75: mol_type = other DNA
gatggtggaagaagcgaagcgcctgcgcgacgccattccgggcattgtggtgaaaatcccggtgacttccgaagg

SEQ ID NO: 823633 - DNA, 75 bp, synthetic construct
  source 1..75: mol_type = other DNA
ccgctgtatatagcgccgcacaagggttattagccgcgctggcaggggcaaaatacgttgctccgtatgttaacc

SEQ ID NO: 823634 - DNA, 75 bp, synthetic construct
  source 1..75: mol_type = other DNA
gactgatccgttcacaccttaaccagcatcctgaattaaaaaaggattttgacctgctgacgtcaataaaatccg

SEQ ID NO: 823635 - DNA, 75 bp, synthetic construct
  source 1..75: mol_type = other DNA
cgaatattcaaagtttgaatacggaagagaaagatggtcgcgtctacagcgcctttattcgtctgaccgcccgtg

SEQ ID NO: 823636 - DNA, 75 bp, synthetic construct
  source 1..75: mol_type = other DNA
atcgatacctcagaaatgttggcgcgaatcacaccgtatggttttcatgccctacaaggatgcttatggcctgct

SEQ ID NO: 823637 - DNA, 75 bp, synthetic construct
  source 1..75: mol_type = other DNA
ggatgagcgaagattgccagcgaagaggcgacgtggaggataaagtgtataagcgccccgtttcggtcttagtgg

SEQ ID NO: 823638 - DNA, 75 bp, synthetic construct
  source 1..75: mol_type = other DNA
gcttgatgctccctctgcggcggcactcaccaagtcctggagcaaccggcaggcgattgaacagtttgtaattaa

SEQ ID NO: 823639 - DNA, 75 bp, synthetic construct
  source 1..75: mol_type = other DNA
tttatgccggatgcggcgcaaacgccttatccgacctacaaaatcgtgcaaactcaatacattgcagagttttcg

SEQ ID NO: 823640 - DNA, 75 bp, synthetic construct
  source 1..75: mol_type = other DNA
atgagtacctttggtattgcagctattattctttatgcgcccagtggcgttattgccgataaattctcacatcgc

SEQ ID NO: 823641 - DNA, 75 bp, synthetic construct
  source 1..75: mol_type = other DNA
ccaataacgaagaaaaacagtcattccagcttagcgacatcctggccgttttgcgcatcagcaccacctggtatt

SEQ ID NO: 823642 - DNA, 75 bp, synthetic construct
  source 1..75: mol_type = other DNA
gcagggagacggttccattccaccagcaacccaaagccacgggcatctgccgattaaaggcgctgatggcgtgtt

SEQ ID NO: 823643 - DNA, 75 bp, synthetic construct
  source 1..75: mol_type = other DNA
agaccaaatcaagcgtctgcggcaggcgtatctcgttacacgtgatgctcacgaggggcaaacacgttcaagcgg

SEQ ID NO: 823644 - DNA, 75 bp, synthetic construct
  source 1..75: mol_type = other DNA
tcgaaacttgataaactcaagttccgcgataagaaagaggcgcaagccgaaaactttcgcaagatgattatggcg

SEQ ID NO: 823645 - DNA, 75 bp, synthetic construct
  source 1..75: mol_type = other DNA
ctgaaagccattttaaagttgtgctggtcagcgatcgttttacgggtgaacgttttctgaatcgtcatcgaatga

SEQ ID NO: 823646 - DNA, 75 bp, synthetic construct
  source 1..75: mol_type = other DNA
atgatacgtgagcggatagaagaaaaattaagggcggcgttccaacccgtattcctcgaagtagtggatgaaagc

SEQ ID NO: 823647 - DNA, 75 bp, synthetic construct
  source 1..75: mol_type = other DNA
aatgaaatcccgcaggaaaatattcagcgcgagctggaccgcatgaagctggcaacgcttgacgatctgctggca

SEQ ID NO: 823648 - DNA, 75 bp, synthetic construct
  source 1..75: mol_type = other DNA
acgctgcattgccctgatcgcgtggctaacgttgcccgtactcagagtcacgttgaagtgacgctggagagtggc

SEQ ID NO: 823649 - DNA, 75 bp, synthetic construct
  source 1..75: mol_type = other DNA
caaagagatcaaatttaaagccttcctcgaatttgccgctgaagatttaggtgccgattatatcgctaccggtca

SEQ ID NO: 823650 - DNA, 75 bp, synthetic construct
  source 1..75: mol_type = other DNA
ggccatgaacacccgcgtctgatgtctgtcggtctgattgcccagcagctgcactgggtcgatcgcgagccgttc

SEQ ID NO: 823651 - DNA, 75 bp, synthetic construct
  source 1..75: mol_type = other DNA
atgtctgaaaccgcaaaaaaagtaatcgtcggtatgtccggcggtgtcgattcctctgtttctgcctggctgttg

SEQ ID NO: 823652 - DNA, 75 bp, synthetic construct
  source 1..75: mol_type = other DNA
tttgtgggtttgttatcgcaacccatttaatattttgctcactattctcggagggatttcctacgcgacggaaga

SEQ ID NO: 823653 - DNA, 75 bp, synthetic construct
  source 1..75: mol_type = other DNA
acctgatcctcgaaggatatattgctttccttgatccgccgaaagagacaacagctccggcactgaaggcattaa

SEQ ID NO: 823654 - DNA, 75 bp, synthetic construct
  source 1..75: mol_type = other DNA
gcactgggtcgatcgcgaaccattcaccggcactatgcgttgcacggtaaaaacccgctatcgccagaccgacat

SEQ ID NO: 823655 - DNA, 75 bp, synthetic construct
  source 1..75: mol_type = other DNA
ataaacaggaagcggcgcggctactcggctggggccgcaacactctgacgcgtaagttaaaagagctggggatgg

SEQ ID NO: 823656 - DNA, 75 bp, synthetic construct
  source 1..75: mol_type = other DNA
tattccccgtctggcacgccattttttacaggttgccgcgcgcgaactgggcgtagaagcgaagttgctgcatcc

SEQ ID NO: 823657 - DNA, 75 bp, synthetic construct
  source 1..75: mol_type = other DNA
gttccgtgaggatttgttccaccgcctgaacgttatccgcgttcatctgccgccattgcgcgagcgtcgggaaga

SEQ ID NO: 823658 - DNA, 75 bp, synthetic construct
  source 1..75: mol_type = other DNA
gggacagtctgccgtcttctacaacggcgaagtgtgcctcggcggcggcatcattgagcagcgtctgccgctgcc

SEQ ID NO: 823659 - DNA, 75 bp, synthetic construct
  source 1..75: mol_type = other DNA
gcgtaaaggtctgggtatcggtggcaccaaagaaggtaccgaagaaccgtggtatgtggtggacaaagacgtcga

SEQ ID NO: 823660 - DNA, 75 bp, synthetic construct
  source 1..75: mol_type = other DNA
aaacccgctaccgccagactgacattccatgcaccgtcaaggcgctggatgatgatcgcattgaagtgattttcg

SEQ ID NO: 823661 - DNA, 75 bp, synthetic construct
  source 1..75: mol_type = other DNA
gatccgtcgcgatccgctaccgggtgcgcagcagacagcgaatgcaccaatcccgccttccttaagcgcgcattg

SEQ ID NO: 823662 - DNA, 75 bp, synthetic construct
  source 1..75: mol_type = other DNA
gctcaaagctgaaaggtacgatcggcagtcggttaatgaacgaacggaagagagagaagcgtgtcctggctgtcg

SEQ ID NO: 823663 - DNA, 75 bp, synthetic construct
  source 1..75: mol_type = other DNA
gaattacggataattgcccggcgatagtccgcttgctgggggatatgtcgccttcttatgatgccgctgcctgga

SEQ ID NO: 823664 - DNA, 75 bp, synthetic construct
  source 1..75: mol_type = other DNA
aggagatgcccgacttgagcgcagtctggcggctattccggttgaagtgaaaagcgttacgactgttgaagaact

SEQ ID NO: 823665 - DNA, 75 bp, synthetic construct
  source 1..75: mol_type = other DNA
gcatggcgggcgcgacgctggcgctggctatttcccggttaagtcacggggcgctgccggtacatttgattgaag

SEQ ID NO: 823666 - DNA, 75 bp, synthetic construct
  source 1..75: mol_type = other DNA
catgttagatgatacaattgatgtgggtgggaatgcctggggtagtgatgacaatcgctgggatgaccgttggta

SEQ ID NO: 823667 - DNA, 75 bp, synthetic construct
  source 1..75: mol_type = other DNA
tggtcgctggcagaaacgttgttcagtgaatcacggcaacaaaatacattaaacgcagctgagcgccgtcagtgg

SEQ ID NO: 823668 - DNA, 75 bp, synthetic construct
  source 1..75: mol_type = other DNA
ggctgcatgcgcaacgttacattcctggtcagccggaactcgcactgagcgatctcacgcgctcaatcaatattg

SEQ ID NO: 823669 - DNA, 75 bp, synthetic construct
  source 1..75: mol_type = other DNA
tcgaatcactgcgcgcaattccgtggatttttgcctggacacaaaaccgcctgatgctcccagcctggctgggcg

SEQ ID NO: 823670 - DNA, 75 bp, synthetic construct
  source 1..75: mol_type = other DNA
gcgcaaatacctggtttggtcaactggcgggacgcgttagtgaacaggagagtgaaccaaatgctttccagcaag

SEQ ID NO: 823671 - DNA, 75 bp, synthetic construct
  source 1..75: mol_type = other DNA
gaaatggcgcggctcgcgatcgctggcttcagcaggcagaacaacgcgggctgggaaacaatgctctgtactggt

SEQ ID NO: 823672 - DNA, 75 bp, synthetic construct
  source 1..75: mol_type = other DNA
tccttgccgttgaacagcagttcccgctgaatgggcaaaatggcacctccgacaccatgctgcgtgccagcgcct

SEQ ID NO: 823673 - DNA, 75 bp, synthetic construct
  source 1..75: mol_type = other DNA
accgtctggcgaagtgttatcgggagacgctacctggtgtggcgttgtatgcatggcttcaggcagaaaaacggc

SEQ ID NO: 823674 - DNA, 75 bp, synthetic construct
  source 1..75: mol_type = other DNA
gcgatcgatgttatccacgcccaggtaagcggcggcgggcgtctgatttatctcggtgcgggaacatcaggtcgt

SEQ ID NO: 823675 - DNA, 75 bp, synthetic construct
  source 1..75: mol_type = other DNA
ttttgcctgacgttattctggatgaatatgaatctgatttgtcgcaggataatcttgccgagatgattcgccgct

SEQ ID NO: 823676 - DNA, 75 bp, synthetic construct
  source 1..75: mol_type = other DNA
tccggggagcgccgtttcaaccaccgcagagtttgccattacgccagttgttgggccgaagtggtcactggttct

SEQ ID NO: 823677 - DNA, 75 bp, synthetic construct
  source 1..75: mol_type = other DNA
cttctcttatgctgccgttaagcaactggaaggcaaatatctggtacagaaccgcgtgaccggcgaaatctacga

SEQ ID NO: 823678 - DNA, 75 bp, synthetic construct
  source 1..75: mol_type = other DNA
tggcaattttccacctgcgtaaaaaagcctacggccagtttgagccgcctgcgctgtatgaccatgtgaagaaaa

SEQ ID NO: 823679 - DNA, 75 bp, synthetic construct
  source 1..75: mol_type = other DNA
cctgctcaccgcctacaaattcggggtcaaaacgctgtattatcagaacacccgtgacggcgctgaagacgcgca

SEQ ID NO: 823680 - DNA, 75 bp, synthetic construct
  source 1..75: mol_type = other DNA
ataagatccagttgctggaaaacggcgagcaatattatcccgcggtgtttaaggcgattggagaggcacaagaac

SEQ ID NO: 823681 - DNA, 75 bp, synthetic construct
  source 1..75: mol_type = other DNA
cctgcaattatcggtgttatcgttggcgcattactcggagttttaacgaaacaggcaattaccacaattgttccc

SEQ ID NO: 823682 - DNA, 75 bp, synthetic construct
  source 1..75: mol_type = other DNA
aaccaggtgccgcgatcaagtcgggcatcaccgtcggtattggttttattggtttagggttggttgttggtttat

SEQ ID NO: 823683 - DNA, 75 bp, synthetic construct
  source 1..75: mol_type = other DNA
tgatcgtgctgggtctgttcccggcagtgagcggttttgtacaacacattccagaaccggttctgggcggcgcaa

SEQ ID NO: 823684 - DNA, 75 bp, synthetic construct
  source 1..75: mol_type = other DNA
gtgtcaaatatgccagtatgaatatggggaccatgtattatcaaaaacctgatatatatctaggtaataacaaaa

SEQ ID NO: 823685 - DNA, 75 bp, synthetic construct
  source 1..75: mol_type = other DNA
gtgtcaaatatgccagtatgaatatggggaccatgtattatcaaaaacctgatatatatataggtaataaaaaaa

SEQ ID NO: 823686 - DNA, 75 bp, synthetic construct
  source 1..75: mol_type = other DNA
tggcgatcttccacctgcgtaaaaaagcctacggccagtttgagccgccagcgctgtacgatcacgtggtaaaaa

SEQ ID NO: 823687 - DNA, 75 bp, synthetic construct
  source 1..75: mol_type = other DNA
aggatgatacattagctgtattggcaaagaaatataatgagcatcttggtagtgactcaggtgttattgattcta

SEQ ID NO: 823688 - DNA, 75 bp, synthetic construct
  source 1..75: mol_type = other DNA
tcgcacgccgtatgtgattgccggactggaatatgcacgccagctcggctgccgcacagtgggaatttcctgtaa

SEQ ID NO: 823689 - DNA, 75 bp, synthetic construct
  source 1..75: mol_type = other DNA
gggtctggtggttggtttgattgctggcggcgaatatgccattcagcacgcggtggaaggcgcggaagatagccg

SEQ ID NO: 823690 - DNA, 75 bp, synthetic construct
  source 1..75: mol_type = other DNA
ttatcctaatgcctggctttcagggcaacgttatttcgaactttggccgcgtgttattaacttgcgccatgcagg

SEQ ID NO: 823691 - DNA, 75 bp, synthetic construct
  source 1..75: mol_type = other DNA
cgtctttctggctcattcccagccggaataccgcaaacttggcccgtttgtggctgatattcatcggtggcaaaa

SEQ ID NO: 823692 - DNA, 75 bp, synthetic construct
  source 1..75: mol_type = other DNA
caccaatgttttgatgcacgttcagggatattttcgcccacatattgattccacagaacgccagcagctggcggc

SEQ ID NO: 823693 - DNA, 75 bp, synthetic construct
  source 1..75: mol_type = other DNA
cgcgatatgtatcgctatcaacaactggaggcggcgctcgacgacgctccggaaattcgcgaggaggccatcgat

SEQ ID NO: 823694 - DNA, 75 bp, synthetic construct
  source 1..75: mol_type = other DNA
agcgctgatgccgtcagaaacctcttcgcagatttctaacgccaccaacggtattgagccgccacgtggttacgt

SEQ ID NO: 823695 - DNA, 75 bp, synthetic construct
  source 1..75: mol_type = other DNA
caacctgggcgcaattaacagcctggatgaacttgaagaactggcgattctggcagtacgtgcgcttgatgcgct

SEQ ID NO: 823696 - DNA, 75 bp, synthetic construct
  source 1..75: mol_type = other DNA
tggtggtcggtattgccgccagtggtcgtacgccgtatgtgattgccggactggaatacgcgcgccagctcggtt

SEQ ID NO: 823697 - DNA, 75 bp, synthetic construct
  source 1..75: mol_type = other DNA
ttattattgctgtgttaggctatatctattcaattcagactacagagtgggcgattttaatctatggcctggtga

SEQ ID NO: 823698 - DNA, 75 bp, synthetic construct
  source 1..75: mol_type = other DNA
aatggatggtcaaataatttcctcaatgccgcctttacctcggcattaatgtttggttatttcatcggctctctt

SEQ ID NO: 823699 - DNA, 75 bp, synthetic construct
  source 1..75: mol_type = other DNA
ctggcgggatttgcctgggatctgtttaccgcctggcagaccgctggcgcgccgtcgaaagagagttgggcgttc

SEQ ID NO: 823700 - DNA, 75 bp, synthetic construct
  source 1..75: mol_type = other DNA
gaaagcctgccctgccggactttataagcaggatgatgccggcaacattcattttgattctgccggttgtctgga

SEQ ID NO: 823701 - DNA, 75 bp, synthetic construct
  source 1..75: mol_type = other DNA
tgacggaaaatcatcagatgatcatggcagcagcggctcaaccggttttgtgggatgggcatcaggcagtgcaag

SEQ ID NO: 823702 - DNA, 75 bp, synthetic construct
  source 1..75: mol_type = other DNA
tgtatattatgttaaattgaatttgagtgatgcgaagcgattttccggtcgtcgttattacttcagggttccaga

SEQ ID NO: 823703 - DNA, 75 bp, synthetic construct
  source 1..75: mol_type = other DNA
acaacagcggaaacactgatggtcatcgttccggaagatgacacgctggaggttactgctctggtacaaaataaa

SEQ ID NO: 823704 - DNA, 75 bp, synthetic construct
  source 1..75: mol_type = other DNA
acaacattgagttattaactctggagttagagaaaaatgaagagcgtcaacaggcttcagtaatcagggcccctg

SEQ ID NO: 823705 - DNA, 75 bp, synthetic construct
  source 1..75: mol_type = other DNA
actgcttatggtgtagtggattgcaaaggtgttgatttagcgccgggtgaaagcgtgccgatggtgggtgttgta

SEQ ID NO: 823706 - DNA, 75 bp, synthetic construct
  source 1..75: mol_type = other DNA
tcgatagtcaggcacacctggagccagccacccgctgggtcgcacatggatctggtgatattattgataatatta

SEQ ID NO: 823707 - DNA, 75 bp, synthetic construct
  source 1..75: mol_type = other DNA
tctgtattgctcacaaatcaattcccgcccttgtgggacagggaatgaagtattgctgccggatggcgctgcacg

SEQ ID NO: 823708 - DNA, 75 bp, synthetic construct
  source 1..75: mol_type = other DNA
atgacccgcagcctggaactgcgtgtctgtattgctcacaaatcaattcccgcccaggtcgggcagggaatgaag

SEQ ID NO: 823709 - DNA, 75 bp, synthetic construct
  source 1..75: mol_type = other DNA
tatcacccattatgggatgaaggatatttatcggtcggcgatacccatacaacccgtaaatgggaacccggcatg

SEQ ID NO: 823710 - DNA, 75 bp, synthetic construct
  source 1..75: mol_type = other DNA
accaaagaaggcaccgaagaaccgtggtatgtggtggacaaagacgtcgaaaacaacattctggttgtcgctcag

SEQ ID NO: 823711 - DNA, 75 bp, synthetic construct
  source 1..75: mol_type = other DNA
tgaactgcacaccgttaactttgctgccgagtactgggacaacgtcttcgaactgttccttgccgaatataaagt

SEQ ID NO: 823712 - DNA, 75 bp, synthetic construct
  source 1..75: mol_type = other DNA
atggggttcagcgagttcctgttgcgctataaacttgtttggagtgaaacatggaaaatccgggagcaattagat

SEQ ID NO: 823713 - DNA, 75 bp, synthetic construct
  source 1..75: mol_type = other DNA
tcgattatcacagccgctataaactcgtctttctggcgcattctcagccggagtaccgcaaacttggcccgtttg

SEQ ID NO: 823714 - DNA, 75 bp, synthetic construct
  source 1..75: mol_type = other DNA
taatcatcatcatcctggcggttattctttatcttgcatacagcaccgccgccatctatctgtcagcagtacacg

SEQ ID NO: 823715 - DNA, 75 bp, synthetic construct
  source 1..75: mol_type = other DNA
aggtggtctctgaaattcgctgtgcattgacacagacgctaacagagcaccagctccgtgcagcgcatcctaacc

SEQ ID NO: 823716 - DNA, 75 bp, synthetic construct
  source 1..75: mol_type = other DNA
attcacgctttcactgattgttctgggggcagcgttcaggtacagcctggaggagctcacatacagcctcctcaa

SEQ ID NO: 823717 - DNA, 75 bp, synthetic construct
  source 1..75: mol_type = other DNA
tctcggtgatgtattcctgattgcggggattgccatgtggacacagccacaacacacgccgctgatcatcgccgg

SEQ ID NO: 823718 - DNA, 75 bp, synthetic construct
  source 1..75: mol_type = other DNA
atacccgcccacacaacgctgcggtgtgcatctgttgtcttctggctgtcctgagcatttgcctcaacggtgcat

SEQ ID NO: 823719 - DNA, 75 bp, synthetic construct
  source 1..75: mol_type = other DNA
tttagttgaaagattaaataaccttaacgttcctgtatatttagttgcttttggttttgccaataatttttgtga

SEQ ID NO: 823720 - DNA, 75 bp, synthetic construct
  source 1..75: mol_type = other DNA
cgccaaaaaggttaattcaaagtgactcagttttgacttataatgacgaggatttattcaatgaaatatctcgaa

SEQ ID NO: 823721 - DNA, 75 bp, synthetic construct
  source 1..75: mol_type = other DNA
cctgctggcgcacgtaatacgctctttagccgcttcactcgctatagcggtgagcaaacgcaaaaagccgtcgcg

SEQ ID NO: 823722 - DNA, 75 bp, synthetic construct
  source 1..75: mol_type = other DNA
agctacagcaccgctgacgatgatcttttcaccctgccggaaggcgatatctctgttggcattcctcacgttctg

SEQ ID NO: 823723 - DNA, 75 bp, synthetic construct
  source 1..75: mol_type = other DNA
aatacagtgggcggaaattaaccgtgctattgaatatggtaaaagtaaaggcgtcgaagttaaagtgacgcaggt

SEQ ID NO: 823724 - DNA, 75 bp, synthetic construct
  source 1..75: mol_type = other DNA
atcatcaagatcataaaaaatgacatgccagaatcaaagcatactaaaagtatatgcttacttagcggagatctt

SEQ ID NO: 823725 - DNA, 75 bp, synthetic construct
  source 1..75: mol_type = other DNA
gctaggtcaggtttttgaattattaaaagatcgtcgcgcctcggtcatgtattttgccgatcacggcctggaacg

SEQ ID NO: 823726 - DNA, 75 bp, synthetic construct
  source 1..75: mol_type = other DNA
gtatctttgtgttattgtttttggtattacgaacttagtcgcctcttccggcgcgcatatggttcagcgattgct

SEQ ID NO: 823727 - DNA, 75 bp, synthetic construct
  source 1..75: mol_type = other DNA
cagacatcatcgccgggttaagaaagaaaggaacctcgctagctgccgtttcacgcaaggcgggtttgtcatctt

SEQ ID NO: 823728 - DNA, 75 bp, synthetic construct
  source 1..75: mol_type = other DNA
atttcgtgactgtaaaacctgcgtcgaacctgaattaccgggttgaagccgttatcgtagcggggctcggtcccg

SEQ ID NO: 823729 - DNA, 75 bp, synthetic construct
  source 1..75: mol_type = other DNA
gattctgatatcgccaacagaggatgtgatcgctggcgtcggacaggccccgcactgcacagaaatcaaactcag

SEQ ID NO: 823730 - DNA, 75 bp, synthetic construct
  source 1..75: mol_type = other DNA
cgggcggcaccggtggcgcgggaatggcgggaaattccccgcacggagcctgacccggaaatcaccccggataac

SEQ ID NO: 823731 - DNA, 75 bp, synthetic construct
  source 1..75: mol_type = other DNA
acgcgaaatagcggccgacccggcattacagcaataccgggcgcggaatatcgataactatcctgacgatattcc

SEQ ID NO: 823732 - DNA, 75 bp, synthetic construct
  source 1..75: mol_type = other DNA
gaatggcgagaaattccccgcacggagcctgacccggaaatcaccccggataacagttaccgcaattatctgtaa

SEQ ID NO: 823733 - DNA, 75 bp, synthetic construct
  source 1..75: mol_type = other DNA
tgccgctattgcactgtggccggtaggtcgccgcgtagtttctgtggaaacagctcaagctgcgcgtgaagcgaa

SEQ ID NO: 823734 - DNA, 75 bp, synthetic construct
  source 1..75: mol_type = other DNA
actttgtgcttggcggattcgccaccactcttggctggctgttagcgaccctggtcagtattgtgctgattttta

SEQ ID NO: 823735 - DNA, 75 bp, synthetic construct
  source 1..75: mol_type = other DNA
atgtcggagatgtattcttttactggtatatgcctgcgggttattttagcgctgttttcctgaccggttatctca

SEQ ID NO: 823736 - DNA, 75 bp, synthetic construct
  source 1..75: mol_type = other DNA
gtgcaggcctctctggtgaactgtccggcaatgcggcgacagcaacaaagctgaaaacagcccgtaaaattaata

SEQ ID NO: 823737 - DNA, 75 bp, synthetic construct
  source 1..75: mol_type = other DNA
caaaatgcaggtgtctattcctttaatctggcattgtcatataacccgataaccacaacctgcaaaccggacgat

SEQ ID NO: 823738 - DNA, 75 bp, synthetic construct
  source 1..75: mol_type = other DNA
cacaggtaacaaaacaacaataaatagtaaaaaaggggatattattctgcgttgtaaaaatttattaggtcaaca

SEQ ID NO: 823739 - DNA, 75 bp, synthetic construct
  source 1..75: mol_type = other DNA
tgccagttactatgtttatgataaaaataaagtaaaatctggcgcactacaggcaaccgcattaatcaacgtgaa

SEQ ID NO: 823740 - DNA, 75 bp, synthetic construct
  source 1..75: mol_type = other DNA
ccgatagtgtggatgcaatggctgtgtggcacgttgattgccagtacatccctacagaaagcctgattgagtcag

SEQ ID NO: 823741 - DNA, 75 bp, synthetic construct
  source 1..75: mol_type = other DNA
tgccagttactatgtctatgataaaaataaagttaaatcaggtgcaattgaggctaccgctctgatcaacgtgaa

SEQ ID NO: 823742 - DNA, 75 bp, synthetic construct
  source 1..75: mol_type = other DNA
ctatcaagctctgagctgttgcccggcagtaatacgatcctgaaaggctcagatgataatggtgtcggatttatc

SEQ ID NO: 823743 - DNA, 75 bp, synthetic construct
  source 1..75: mol_type = other DNA
ctaccgcttttttatggtgcgcatttcaggaaatccgggaagtcgcacgatcaccacaagacgtgtgccaatcat

SEQ ID NO: 823744 - DNA, 75 bp, synthetic construct
  source 1..75: mol_type = other DNA
aagttgtcccgccgcccagtttcgcgttaattataagaacggtggtattttttatcgttctgctcgtgacggtta

SEQ ID NO: 823745 - DNA, 75 bp, synthetic construct
  source 1..75: mol_type = other DNA
tctgggcatcggtggcgctgtggcaaaactctccagcctggactggcagacctacgactttgtgccgggcagtct

SEQ ID NO: 823746 - DNA, 75 bp, synthetic construct
  source 1..75: mol_type = other DNA
atggatagccatacgcttattcaggcgctgatttatctcggttcggcggcgctgattgtacccattgcggtacgt

SEQ ID NO: 823747 - DNA, 75 bp, synthetic construct
  source 1..75: mol_type = other DNA
tccgttgcgcattgtcattttgctgctcggtttcctcatcatcaaaatcgccatgctgtggctgattgcccggcc

SEQ ID NO: 823748 - DNA, 75 bp, synthetic construct
  source 1..75: mol_type = other DNA
ccattttggtcatgatgaccgggcacggctgttgcttgaggatcaactgaaacgtcacccaggagatgcccgact

SEQ ID NO: 823749 - DNA, 75 bp, synthetic construct
  source 1..75: mol_type = other DNA
atgtctgttaccgtcttactctcgcctcacccattaccctggattgttaatgcttaccaccctatttatcgtagc

SEQ ID NO: 823750 - DNA, 75 bp, synthetic construct
  source 1..75: mol_type = other DNA
gtgacgactgacagagggatacgtgcgtctcaacagggcgaactggactgtctatgcggtgcttattgcatggtt

SEQ ID NO: 823751 - DNA, 75 bp, synthetic construct
  source 1..75: mol_type = other DNA
aatatgctgagctggctgtatgacggcagagtgaaacgacgcccgttaatgaaccggcttattcaggcttaccag

SEQ ID NO: 823752 - DNA, 75 bp, synthetic construct
  source 1..75: mol_type = other DNA
gcagggtgaaacgacgcccgttaatgaaccggcttattcaggcttatcagcagcgctggcctttgcatgaatggc

SEQ ID NO: 823753 - DNA, 75 bp, synthetic construct
  source 1..75: mol_type = other DNA
cccacacggcgcaatgctcggcggtcatatgatgcctggctgtaccgtgcgcaccacccttgaactggtgatcgg

SEQ ID NO: 823754 - DNA, 75 bp, synthetic construct
  source 1..75: mol_type = other DNA
actgacgtcgccttacgctatgccgggcaagaaaacaccactcatcttcgcggtaagtttgaagtaatcgcactg

SEQ ID NO: 823755 - DNA, 75 bp, synthetic construct
  source 1..75: mol_type = other DNA
acaattacaaaccatccaaaggtggtcatgatttttatacagaatcaaaagtttctgacatactagaggatagtc

SEQ ID NO: 823756 - DNA, 75 bp, synthetic construct
  source 1..75: mol_type = other DNA
gaagctggaaggcaccgactggactatccataatcatgcgaatgtcttctcccgcaccgggctggatattggtgc

SEQ ID NO: 823757 - DNA, 75 bp, synthetic construct
  source 1..75: mol_type = other DNA
tacgcctcaacgggattgatgagtcgagcgtgaagtttctcgacagcaccgccgactacccgcaacagccgggtg

SEQ ID NO: 823758 - DNA, 75 bp, synthetic construct
  source 1..75: mol_type = other DNA
atccacaaccatgcgaatgttttctcccgcactgggctggatattgggcgcgcgcttctttatgcaacatctgcc

SEQ ID NO: 823759 - DNA, 75 bp, synthetic construct
  source 1..75: mol_type = other DNA
atgccccgtaaagctttctccctgcgtactggcgtaacccgccgccagctgtttcccgacgccatttacttcatt

SEQ ID NO: 823760 - DNA, 75 bp, synthetic construct
  source 1..75: mol_type = other DNA
gcgagctgtatatcgttgccaaccgtcacctggattacttccataaactgaagaaaattttcggcaactgcacca

SEQ ID NO: 823761 - DNA, 75 bp, synthetic construct
  source 1..75: mol_type = other DNA
atccacaaccatgcgaatgtcttctcccgcaccgggctggatattggcgcgcgcttctttatgcaacatctgcca

SEQ ID NO: 823762 - DNA, 75 bp, synthetic construct
  source 1..75: mol_type = other DNA
cggtacattcgaagtgatctcactaaacggcacgctggaacagagtggtgagcatcttcatctctgcgtttccga

SEQ ID NO: 823763 - DNA, 75 bp, synthetic construct
  source 1..75: mol_type = other DNA
ctgtcacgcttccagcctgacagaattaaaatcagtcaggaattgattaccaatgttcataaaagcgggccacgg

SEQ ID NO: 823764 - DNA, 75 bp, synthetic construct
  source 1..75: mol_type = other DNA
gtcgcctcaagcaaaattcgtaacggtgttgggattaataaacatgggaacgccgtgtttttgggtgatgctgcc

SEQ ID NO: 823765 - DNA, 75 bp, synthetic construct
  source 1..75: mol_type = other DNA
acggatttttctcgccctcgtcttactccccttgtttgctgttgctgctgatgactgcgcgctctcagatccgtc

SEQ ID NO: 823766 - DNA, 75 bp, synthetic construct
  source 1..75: mol_type = other DNA
tctattacctatgaccctggttaacgagcctgacgcagtctcttttttacttgatgaaataaaggccaatggtct

SEQ ID NO: 823767 - DNA, 75 bp, synthetic construct
  source 1..75: mol_type = other DNA
ggaattatttgatttgcgcctccacgagcgcaatgacgttttacaggccgtactcgacaaaggcacctcaaaatt

SEQ ID NO: 823768 - DNA, 75 bp, synthetic construct
  source 1..75: mol_type = other DNA
tctattacctatgaccctggttaacgaacctgacgcagtctcttttttacttaatgaaataaaggccaatgctct

SEQ ID NO: 823769 - DNA, 75 bp, synthetic construct
  source 1..75: mol_type = other DNA
gagttacaacatgcgtctggggaacggtatggaaattgaaccctgcctgaaggcggctgtgcgcaaagaatttgt

SEQ ID NO: 823770 - DNA, 75 bp, synthetic construct
  source 1..75: mol_type = other DNA
tacaacatgcgtctggggaacggtatggaaattgagccgtggctgaaggcggctgtgcgcaaagaatttgtcgat

SEQ ID NO: 823771 - DNA, 75 bp, synthetic construct
  source 1..75: mol_type = other DNA
ttatccatgcttcttgaaggtatcaactggaagcacccgaaacgaacggaacgcgctggaatccgcatataaccc

SEQ ID NO: 823772 - DNA, 75 bp, synthetic construct
  source 1..75: mol_type = other DNA
gatccgacgctgaccgtacaggcgtataccgttaatcctcaaacagagcgggtgaaaatgtactggcaaaaagcc

SEQ ID NO: 823773 - DNA, 75 bp, synthetic construct
  source 1..75: mol_type = other DNA
gctgaccgtgcaggcgtataccgttaatcctcaaaccgaacgggtaaaaatgtactggcaaaaggccaatggcga

SEQ ID NO: 823774 - DNA, 75 bp, synthetic construct
  source 1..75: mol_type = other DNA
aatgcccgtctgtccgcaccgggaaaagaccgcgcgccggtggcgctgaaaggggccgcgctcacgcgccgcccc

SEQ ID NO: 823775 - DNA, 75 bp, synthetic construct
  source 1..75: mol_type = other DNA
gtatctggtcgatggtctggaagagattggcgttgtctgccagcaggcgggcggtcacgcggcattcgttgatgc

SEQ ID NO: 823776 - DNA, 75 bp, synthetic construct
  source 1..75: mol_type = other DNA
atggtggcgttctctaactatttctttgataccacgcagggccatagccagattaacggctgtaccgtgcgtaac

SEQ ID NO: 823777 - DNA, 75 bp, synthetic construct
  source 1..75: mol_type = other DNA
aatatgccgatatgctggcaatgtccgccaagaaagatgcgatggtgccgatgggcggcctgctgtgcgtgaaag

SEQ ID NO: 823778 - DNA, 75 bp, synthetic construct
  source 1..75: mol_type = other DNA
aagaaagcgcattaccgccagaagaacagcgccgccgtcgtgccgggcgagaaaatggcaataagatctttaata

SEQ ID NO: 823779 - DNA, 75 bp, synthetic construct
  source 1..75: mol_type = other DNA
ccagtgcctggatgaaacataacggattcaataaagtctggcatattgaaggcgggattattgaatacgctcgta

SEQ ID NO: 823780 - DNA, 75 bp, synthetic construct
  source 1..75: mol_type = other DNA
aatattaaaggattaacctttacctacgaaccgaaagtattgcgtcacttcaccgcaaaactgaaagaagtttaa

SEQ ID NO: 823781 - DNA, 75 bp, synthetic construct
  source 1..75: mol_type = other DNA
aaagacagtgaggcactgggggcgctgggccaggcgtattctcagaaaggcgatcgcgccaatgcggtggcgaat

SEQ ID NO: 823782 - DNA, 75 bp, synthetic construct
  source 1..75: mol_type = other DNA
catatcaacagcctgccgcgcgcgcagtggaacaacaatattcaggagctggttaatcgcctgcaaagcgatcag

SEQ ID NO: 823783 - DNA, 75 bp, synthetic construct
  source 1..75: mol_type = other DNA
tatccagcaggcgaaagattacgcgcccagccatttcctgctctatgtacgttattccgccgccggatggcaggg

SEQ ID NO: 823784 - DNA, 75 bp, synthetic construct
  source 1..75: mol_type = other DNA
gaagaaatatgacattcctgtagtgatggactccgcgcgctttgctgaaaacgcctatttcatcaagcaacgtga

SEQ ID NO: 823785 - DNA, 75 bp, synthetic construct
  source 1..75: mol_type = other DNA
cgagcaggaaaaaggcctggatcgcagcaaaatggtggcgttctctaactatttctttgataccactcagggcca

SEQ ID NO: 823786 - DNA, 75 bp, synthetic construct
  source 1..75: mol_type = other DNA
aaacaacattctggttgtcgctcagggccatgaacacccgcggctgatgtctgtcgggttgattgcccagcagtt

SEQ ID NO: 823787 - DNA, 75 bp, synthetic construct
  source 1..75: mol_type = other DNA
gcgctgaatatttttgggcgagtgtatctggcgcatgaggggattaacgcgcaaatcagtgtacctgcgagcaat

SEQ ID NO: 823788 - DNA, 75 bp, synthetic construct
  source 1..75: mol_type = other DNA
ggtaaagaactggtcgctcatgccctgcatcgccacagtccgcgagccaaagcgccgtttatcgcgctgaatatg

SEQ ID NO: 823789 - DNA, 75 bp, synthetic construct
  source 1..75: mol_type = other DNA
cagcagccgcgtaatattcagcttaacggcccaacgaccgatatcatcggcgaagcgccagccatgcaggacgtg

SEQ ID NO: 823790 - DNA, 75 bp, synthetic construct
  source 1..75: mol_type = other DNA
gctggcgagcaaaacgccggatgtgctgctttcagatatccgtatgccgggaatggacgggctggcgctgctcaa

SEQ ID NO: 823791 - DNA, 75 bp, synthetic construct
  source 1..75: mol_type = other DNA
cttccggtcatcattatgaccgcgcactcggatctggatgccgctgtcagcgcctatcaacaaggggcgtttgat

SEQ ID NO: 823792 - DNA, 75 bp, synthetic construct
  source 1..75: mol_type = other DNA
gtgctgattcaggatttacctgctgaactgttcgaatcaaccgttgcggaaacccctcccactattcacccggac

SEQ ID NO: 823793 - DNA, 75 bp, synthetic construct
  source 1..75: mol_type = other DNA
aatcagaactgtttggtcacgagaaaggcgcgtttaccggcgcgaataccattcgtcaggggcgttttgaacagg

SEQ ID NO: 823794 - DNA, 75 bp, synthetic construct
  source 1..75: mol_type = other DNA
ccggcttattagcgatagggattatctgtaccgtgccaattatggctcgctggaaaaagctggtattgtggcaaa

SEQ ID NO: 823795 - DNA, 75 bp, synthetic construct
  source 1..75: mol_type = other DNA
aggcggcgaaattcgcctgcgcatgtggctttatccgtggctcacctggctggtgattggctttattacctttgt

SEQ ID NO: 823796 - DNA, 75 bp, synthetic construct
  source 1..75: mol_type = other DNA
atgagtatgaagtggggcactttgaaaacgcgctggaaattccggcagataccttccgtgagcagctgccaaaag

SEQ ID NO: 823797 - DNA, 75 bp, synthetic construct
  source 1..75: mol_type = other DNA
ccctcgccttaaccggaagtaatttattaagcgtcaaaaactacggcgaatttgagttctggttagcgatatgca

SEQ ID NO: 823798 - DNA, 75 bp, synthetic construct
  source 1..75: mol_type = other DNA
ttacgcgcctgcgaaagtgtttaaatttctgatcgacagctccggcgctatcgccctgctggtttatttagtcat

SEQ ID NO: 823799 - DNA, 75 bp, synthetic construct
  source 1..75: mol_type = other DNA
atgttgtctattgccggtgttatcggcgcaagtctgtttgtcggttccagcgtcgccatcgccgaagcgggcccg

SEQ ID NO: 823800 - DNA, 75 bp, synthetic construct
  source 1..75: mol_type = other DNA
tggcttgtgatcataagtacaaatgttgggggcactggagttcgacggatttattgcactggcagcatgaaccat

SEQ ID NO: 823801 - DNA, 75 bp, synthetic construct
  source 1..75: mol_type = other DNA
tgtggtcgctgtacgacggcagcgggtacgccgttaaagattgggctgacgctggctataagtgttattgcttca

SEQ ID NO: 823802 - DNA, 75 bp, synthetic construct
  source 1..75: mol_type = other DNA
ctggtagaaaaactggctgatatgcacaacgtgccgtggatggtggaaaatccggtgggagcactgtcaacgcta

SEQ ID NO: 823803 - DNA, 75 bp, synthetic construct
  source 1..75: mol_type = other DNA
gcatggcttcaggccgaacaacgacaaccgaacgcctggcaacatcgtgcggtagcctatcaggcgtatcaggtt

SEQ ID NO: 823804 - DNA, 75 bp, synthetic construct
  source 1..75: mol_type = other DNA
ggatggccgcgttcaaattcgaaacttgcacgccgaatttctactatagaggacacttatgaaacaattgaaaat

SEQ ID NO: 823805 - DNA, 75 bp, synthetic construct
  source 1..75: mol_type = other DNA
ctaacgccgcgcggctttgcccgtgctgtattcctggctaacgaccgggccatcactcgtactacgcttaaccgc

SEQ ID NO: 823806 - DNA, 75 bp, synthetic construct
  source 1..75: mol_type = other DNA
aagcgtgaaaaagatcctgacttccaggtgaaggcggcatataacgcaaaactggtagaaacgctggctgacatg

SEQ ID NO: 823807 - DNA, 75 bp, synthetic construct
  source 1..75: mol_type = other DNA
cgtcatatggactacggggtacaaatcaacaaactgatgtatacccgtctgctgaaaggtgaagatatcaccctg

SEQ ID NO: 823808 - DNA, 75 bp, synthetic construct
  source 1..75: mol_type = other DNA
ccgacgtaccggggctgtacgacgcgttcttcgccgatcaggaagagtttgaacgcctgtacaccaaatatgaga

SEQ ID NO: 823809 - DNA, 75 bp, synthetic construct
  source 1..75: mol_type = other DNA
gttgccgcgtgcctgttctcgaactacccgcgtgaaacgcgcctgcaatacgtgaagcgtttttacgacgcggtt

SEQ ID NO: 823810 - DNA, 75 bp, synthetic construct
  source 1..75: mol_type = other DNA
cgtggcgtgggataaaacaacgcatgacttccccagcgtgactggcgatacccgctcgttgcgcccgttaggtca

SEQ ID NO: 823811 - DNA, 75 bp, synthetic construct
  source 1..75: mol_type = other DNA
ttacagcacgcgcggacatcaaacatgatctgcgtgcgcgaatatttccccgataccttttcgactgcggttcga

SEQ ID NO: 823812 - DNA, 75 bp, synthetic construct
  source 1..75: mol_type = other DNA
ttacgagcgtgtaatcaagtctggcactgactattttaaatatttgcgaaagttaaaaaatggaggagaaaatga

SEQ ID NO: 823813 - DNA, 75 bp, synthetic construct
  source 1..75: mol_type = other DNA
cagaattgaagctgtgttacaagagaatggacttagatattatcgttttggtcgagtgttgcctgaaggccacat

SEQ ID NO: 823814 - DNA, 75 bp, synthetic construct
  source 1..75: mol_type = other DNA
gccccggcgagatcatcggtctggctggctggcttgctgggatccggacgtaccgaaaccgccgaagtgatcttc

SEQ ID NO: 823815 - DNA, 75 bp, synthetic construct
  source 1..75: mol_type = other DNA
gatcaggacgtaccgaaaccgccgaagtgatcttcggtatcaaacctgctgacagcggcacggcgttgatcaaag

SEQ ID NO: 823816 - DNA, 75 bp, synthetic construct
  source 1..75: mol_type = other DNA
ctgcgatcgccacatcaggcttcggtacttggcattggcttttgcccggaagacaggaaaaccgatggcatcatc

SEQ ID NO: 823817 - DNA, 75 bp, synthetic construct
  source 1..75: mol_type = other DNA
cgaaaaaataataaaataaaattagagaaagaagttaacaaatcgataaaatgggttaaagatattcaggatatc

SEQ ID NO: 823818 - DNA, 75 bp, synthetic construct
  source 1..75: mol_type = other DNA
aatgtcatccggagaaaagtcattcatcaggttatcaactcttaaaaaattttgcagagatccaatataatgctt

SEQ ID NO: 823819 - DNA, 75 bp, synthetic construct
  source 1..75: mol_type = other DNA
actgacccgaccgcaatttctgatcctcgacgagccaacccgcggcattgatgttggtgcccacgccgagatcat

SEQ ID NO: 823820 - DNA, 75 bp, synthetic construct
  source 1..75: mol_type = other DNA
cagtaatgcggtatctactggttcagtaaaacgcgcgacaggactcagcgatgatgttgatccattcaacaccag

SEQ ID NO: 823821 - DNA, 75 bp, synthetic construct
  source 1..75: mol_type = other DNA
ctttcttgccattactgcagtcgcgcttatctttctggcatgggggggtaactgggtttatcgcaatatcctgtg

SEQ ID NO: 823822 - DNA, 75 bp, synthetic construct
  source 1..75: mol_type = other DNA
gctcgaaacgaaaatcgtacgcgatcgtaaccatgcaaaaaaagttggtgacgagcttattattgatatcgagca

SEQ ID NO: 823823 - DNA, 75 bp, synthetic construct
  source 1..75: mol_type = other DNA
acgttggtgcgcatgccgagatcatccgcctgattgaaacgctgtgcgctgacggtctggcgctgctggtgatct

SEQ ID NO: 823824 - DNA, 75 bp, synthetic construct
  source 1..75: mol_type = other DNA
tctggagaacgactctgccgtcgatgcccaaatgctgcttggtttgatttacgccaacggcgtgggcattaaggc

SEQ ID NO: 823825 - DNA, 75 bp, synthetic construct
  source 1..75: mol_type = other DNA
ctggtcagggagggagtcagactggcgcgagtggcagcagcaggacatcagagccacaggaagaaaggaaagaat

SEQ ID NO: 823826 - DNA, 75 bp, synthetic construct
  source 1..75: mol_type = other DNA
acagcgtggtcgttttttctcgctgttgatgatgcaggacagtgccggtgcggtcattggcgcattgttggggag

SEQ ID NO: 823827 - DNA, 75 bp, synthetic construct
  source 1..75: mol_type = other DNA
gatcaggaaaacagccgtatttttctgccgaaacttggttggatgcgctaccggaatagccgtcaggtcacggga

SEQ ID NO: 823828 - DNA, 75 bp, synthetic construct
  source 1..75: mol_type = other DNA
cggcgagatggctaaatttatgcttggcctgattgctgaccagaaaacccgcatgttgctgctggggcagccatt

SEQ ID NO: 823829 - DNA, 75 bp, synthetic construct
  source 1..75: mol_type = other DNA
atggtagcgcatgagttttttttgcttataaccaatgcatttatttgtactggcatagcaattcgcgttgtcaca

SEQ ID NO: 823830 - DNA, 75 bp, synthetic construct
  source 1..75: mol_type = other DNA
attcctgtccgtgccgcttacgctatctggtatcacacgccaatggctgccgatttatcggaggtcgtcatcaac

SEQ ID NO: 823831 - DNA, 75 bp, synthetic construct
  source 1..75: mol_type = other DNA
tggtatagcaattcgcgttgtcacattccggcgcaacggttctcaacaccgaagatggggagggtggcttgctta

SEQ ID NO: 823832 - DNA, 75 bp, synthetic construct
  source 1..75: mol_type = other DNA
cacagccggctgaagccattgcccgcgtggaacagcactttgcaattcacgcgctggaaattgaccgtaccgacg

SEQ ID NO: 823833 - DNA, 75 bp, synthetic construct
  source 1..75: mol_type = other DNA
aactccggcaacggcgcggcgggcccggtgatagatgcgctggaagcgcgctttaaagcactgaacgtgccggtg

SEQ ID NO: 823834 - DNA, 75 bp, synthetic construct
  source 1..75: mol_type = other DNA
gaatgttgagtcaaatgcaaatagagaacttatgatagcgaaaactactgaaatattgaagttactacagcttta

SEQ ID NO: 823835 - DNA, 75 bp, synthetic construct
  source 1..75: mol_type = other DNA
cgtaatatgctgctgtatggcgtgaatgcagctaataacgaggggatcaccaactccccgaacgcagtgacgctg

SEQ ID NO: 823836 - DNA, 75 bp, synthetic construct
  source 1..75: mol_type = other DNA
cgtaatatgctgctgtacggtgttgaagcgaagaataacgaagggatcaccaactccccgaatgcagtgacactg

SEQ ID NO: 823837 - DNA, 75 bp, synthetic construct
  source 1..75: mol_type = other DNA
acttcccgccggtggatgaaagtcagcgcggcagctatcagaaaattgacctgcgcgatgcgtatatcgatcacc

SEQ ID NO: 823838 - DNA, 75 bp, synthetic construct
  source 1..75: mol_type = other DNA
atggtaacgcatgagttttttttgcttatcactaatgcagtcatttgtactggtatagcaattcgcgttgtcaca

SEQ ID NO: 823839 - DNA, 75 bp, synthetic construct
  source 1..75: mol_type = other DNA
gcttttaacgctgcggagcaactgatccgcgatattaatgacgttgccagccagtcgccgtttcgccagatggtc

SEQ ID NO: 823840 - DNA, 75 bp, synthetic construct
  source 1..75: mol_type = other DNA
caggggacatccgggattcagctgtatgaggcatacaacaatggctacccttccccctatggcaatgtgcttcac

SEQ ID NO: 823841 - DNA, 75 bp, synthetic construct
  source 1..75: mol_type = other DNA
tttattcgtaatgatggttcaaatacatacttcatgttgacaaactccggtgacaacatggggacttataacgga

SEQ ID NO: 823842 - DNA, 75 bp, synthetic construct
  source 1..75: mol_type = other DNA
gttgttggaacatggcgatgtggtggtatggggcggtgaatcgcggctgttttatcacggtattcaaccgttgaa

SEQ ID NO: 823843 - DNA, 75 bp, synthetic construct
  source 1..75: mol_type = other DNA
ggcgactgccgctacaacctgacattccgtcaggcaggtaaaaagaataaaaataagaattattattgctgtgcg

SEQ ID NO: 823844 - DNA, 75 bp, synthetic construct
  source 1..75: mol_type = other DNA
aaagcggggtttcatccactcaccgccgactgccgctacaacctgacattccgtcaggcaggtaaaaaagaataa

SEQ ID NO: 823845 - DNA, 75 bp, synthetic construct
  source 1..75: mol_type = other DNA
gtgtgcggacgttgctcccgtgagtttgtttactccaacctgcgtgagcttaccgttcaccacattgatcatgac

SEQ ID NO: 823846 - DNA, 75 bp, synthetic construct
  source 1..75: mol_type = other DNA
taccgttcaccacattgatcacgaccataccaataacccggaagacggcagtaactgggagttattgtgtcttta

SEQ ID NO: 823847 - DNA, 75 bp, synthetic construct
  source 1..75: mol_type = other DNA
ttgtttattccaacctgcgtgaacttaccgttcaccacattgatcacgaccataccaataacccggaagatggca

SEQ ID NO: 823848 - DNA, 75 bp, synthetic construct
  source 1..75: mol_type = other DNA
ttatcaccaatgcggttatttgcgccggtatagcagttcgagttgccacatttcggagaaacggttctcaacaca

SEQ ID NO: 823849 - DNA, 75 bp, synthetic construct
  source 1..75: mol_type = other DNA
atggctatcatcccaaaaaactatgcgcggttagaaagcggctatcgaaaaatctatccgtgggtctgcggtcgc

SEQ ID NO: 823850 - DNA, 75 bp, synthetic construct
  source 1..75: mol_type = other DNA
cgcggttagaaagcggttatcgtgaaaaggcgctgaaactctatccgtgggtgtgtggacgttgttcccgcgagt

SEQ ID NO: 823851 - DNA, 75 bp, synthetic construct
  source 1..75: mol_type = other DNA
tgttcggttatatcaatgtcaaaaatctcacgccgctcaagctggtgattaactccgggaatggcgcagcgggtc

SEQ ID NO: 823852 - DNA, 75 bp, synthetic construct
  source 1..75: mol_type = other DNA
aagaagacaacaatgccgtgcttaaagcgcgtcaaatcactattaccgccgaaacgcaaggcgccaaaatcgaat

SEQ ID NO: 823853 - DNA, 75 bp, synthetic construct
  source 1..75: mol_type = other DNA
tgacacaaaatccattagcagtccttgacgttttacgcgatttgcataaaaccgcagttcccttacgtatcagtt

SEQ ID NO: 823854 - DNA, 75 bp, synthetic construct
  source 1..75: mol_type = other DNA
ggtttgtacaacgacgccgatattttcgcatctccgccccactccatccgccttatttttgccagaccaaactgg

SEQ ID NO: 823855 - DNA, 75 bp, synthetic construct
  source 1..75: mol_type = other DNA
ttctgccaggcgcgagcctgacgcaggctgcggaggttgcagaacgtattcgcctgaagctaaatgaaaaagaga

SEQ ID NO: 823856 - DNA, 75 bp, synthetic construct
  source 1..75: mol_type = other DNA
ggctgcggaagtcgcagaacgtattcgcctgaagttaaatgaaaaagagatgttgattgctaagagtacgacgat

SEQ ID NO: 823857 - DNA, 75 bp, synthetic construct
  source 1..75: mol_type = other DNA
cgaacgcaaattgattgatggcaaaaatgaaaccatctccactccccgtctgagctttcgttttcttaacgtcgg

SEQ ID NO: 823858 - DNA, 75 bp, synthetic construct
  source 1..75: mol_type = other DNA
atgaatactctccctgaacattcatgtgacgtgttgattatcggtagcggcgcagccggactttcactggcgcta

SEQ ID NO: 823859 - DNA, 75 bp, synthetic construct
  source 1..75: mol_type = other DNA
accgattgtgcctgctgcacactatacctgcggtggtgtaatggttgatgatcatgggcgtacggacgtcgaggg

SEQ ID NO: 823860 - DNA, 75 bp, synthetic construct
  source 1..75: mol_type = other DNA
ggatatttcttctggcgatggcattgctatggcgtggcgcgcgggctgccgggtcgccaatctcgaatttaatca

SEQ ID NO: 823861 - DNA, 75 bp, synthetic construct
  source 1..75: mol_type = other DNA
tcgacccggcgcgcccgattgtcgggctgaatgattccaaaaagctgagcgaaaaacgccgtctggcgttgtatg

SEQ ID NO: 823862 - DNA, 75 bp, synthetic construct
  source 1..75: mol_type = other DNA
ctggagtctgggccgcgcggaacctcacgaaatcgacgaactgaatattttacatgcgaccatgctggcgatgca

SEQ ID NO: 823863 - DNA, 75 bp, synthetic construct
  source 1..75: mol_type = other DNA
cggaagcactgcgcggcgaaggcgcttatctcaagcgaccggatggcacgcgtttcatgcctgattttgacgaac

SEQ ID NO: 823864 - DNA, 75 bp, synthetic construct
  source 1..75: mol_type = other DNA
gccggtcgataataataattactggtatggcgtattggggatgagtattcccgtgcgttcaatgcagcaattttt

SEQ ID NO: 823865 - DNA, 75 bp, synthetic construct
  source 1..75: mol_type = other DNA
caaggaaggggaactgtcatgacaatgcggtgatggaaagcttcttcggcacgctgaaatctgagtgtttttacc

SEQ ID NO: 823866 - DNA, 75 bp, synthetic construct
  source 1..75: mol_type = other DNA
cctggcgtaacggctggcacctgaatggacgcccggcacatgttgcagagatccaacctatttttgatgggcgta

SEQ ID NO: 823867 - DNA, 75 bp, synthetic construct
  source 1..75: mol_type = other DNA
gggcgagcgggtagcgaaagcctgcgatggtgcaaccgtaatctatctgtatggcgatttaggcgcaggtaaaac

SEQ ID NO: 823868 - DNA, 75 bp, synthetic construct
  source 1..75: mol_type = other DNA
cctgttcggttatatcaacgtcaaaaaccttacgccgctcaagctggtgatcaactccgggaacggcgcggcggg

SEQ ID NO: 823869 - DNA, 75 bp, synthetic construct
  source 1..75: mol_type = other DNA
tggaattaatcaaagtgcacaacacgccggacggcaatttccccaacggtattcctaacccgctactgccggaat

SEQ ID NO: 823870 - DNA, 75 bp, synthetic construct
  source 1..75: mol_type = other DNA
acgccgctcaagctggtgatcaactccgggaacggcgcagcgggtccggtggtggacgccattgaagcccgcttt

SEQ ID NO: 823871 - DNA, 75 bp, synthetic construct
  source 1..75: mol_type = other DNA
aggtcgaccttgaccattttaaagcgattaatgaccgctttggtcaccaggcaggcgatcgtgtgttgtcacatg

SEQ ID NO: 823872 - DNA, 75 bp, synthetic construct
  source 1..75: mol_type = other DNA
ctctttgatcctcgtgaactggcatcacttgcgcaggacattgaacacgatacgcgcggtggtattcggatgaac

SEQ ID NO: 823873 - DNA, 75 bp, synthetic construct
  source 1..75: mol_type = other DNA
gcctcgctgggggtaagcagcagcgaggaaaccggtgattatgattttgaacaactccagtcactggccgaccgt

SEQ ID NO: 823874 - DNA, 75 bp, synthetic construct
  source 1..75: mol_type = other DNA
ctgacgagcaggcaacattagacctgggcgaacgggtagctaaagcctgcgatggcgctaccgtaatctatctgt

SEQ ID NO: 823875 - DNA, 75 bp, synthetic construct
  source 1..75: mol_type = other DNA
ttaatgaccgctttggtcatcaggcgggcgaccgtgttctttctcatgctgccggattaattagcagttccttgc

SEQ ID NO: 823876 - DNA, 75 bp, synthetic construct
  source 1..75: mol_type = other DNA
ctctttgagcctcgagaactggcatcgctggcgcaggcgatggaacacgatacacgtggcggcattcggatggat

SEQ ID NO: 823877 - DNA, 75 bp, synthetic construct
  source 1..75: mol_type = other DNA
cgtggctggtatcgacacatgcagatagcattgatcttattgatcctgctccgggaacctattccggacgcacag

SEQ ID NO: 823878 - DNA, 75 bp, synthetic construct
  source 1..75: mol_type = other DNA
acatggtagtgcgtgtcgataccagcagcaggcagcccattgattccacctgccgcttccagtacacgctcaacg

SEQ ID NO: 823879 - DNA, 75 bp, synthetic construct
  source 1..75: mol_type = other DNA
ttgtcgcctggtatcacaattaatgacgtttagtgtccagggttgtgataacaataaagtgaacgtaacggcaaa

SEQ ID NO: 823880 - DNA, 75 bp, synthetic construct
  source 1..75: mol_type = other DNA
tgatcacaacgtatgatgaggcttctgtgccattagaacacagtgttggcccctatgttggcccgcaggcgcgta

SEQ ID NO: 823881 - DNA, 75 bp, synthetic construct
  source 1..75: mol_type = other DNA
tgagaaaacgctcccgaccttcctgatggaaaacggcaagctttgcgacggcagccagttggatgaacgcggtgc

SEQ ID NO: 823882 - DNA, 75 bp, synthetic construct
  source 1..75: mol_type = other DNA
atgaaaaaaatacgctggatttttggcctgataatgttgttttttttcagttcagcagtacaggcgaataccatt

SEQ ID NO: 823883 - DNA, 75 bp, synthetic construct
  source 1..75: mol_type = other DNA
tcggcgcgcatgcttttatggtcggtagcagctttctccagagccgtaatctgttagccattgtccatcctattc

SEQ ID NO: 823884 - DNA, 75 bp, synthetic construct
  source 1..75: mol_type = other DNA
cgtagtcgccgcgctcctaaccttaagaaccgtaccgatgaggcaactgaacaggctgttgttgattacgccgtc

SEQ ID NO: 823885 - DNA, 75 bp, synthetic construct
  source 1..75: mol_type = other DNA
atgggcgtttcgcgtgatacattttatcgttaccgcgaactggtcgatgaaggcggtgtggatgcgctgattaat

SEQ ID NO: 823886 - DNA, 75 bp, synthetic construct
  source 1..75: mol_type = other DNA
gcaacaacagggctttgtgcgtcaggtcggtgagctgggtcactgggcgatcggcgcgcatgcatttatggtcgg

SEQ ID NO: 823887 - DNA, 75 bp, synthetic construct
  source 1..75: mol_type = other DNA
gcagcaacagggctttgtccgtcaggtcggcgaactgggtcactgggcgatcggcgcacacgcctttatggtcgg

SEQ ID NO: 823888 - DNA, 75 bp, synthetic construct
  source 1..75: mol_type = other DNA
tgcgcaatctgatggaagagtccggcgaaaccgtgaatatggcggtgctggatcaaagcgatcatgaagcgatta

SEQ ID NO: 823889 - DNA, 75 bp, synthetic construct
  source 1..75: mol_type = other DNA
caaggggaatgtaggggctacctatgtcggccctaaagtccataactccgtctgtccgtcaattccgctgacgac

SEQ ID NO: 823890 - DNA, 75 bp, synthetic construct
  source 1..75: mol_type = other DNA
tagccaggcagcgtgtaaagcggcctgtaacgcctttaccgatgccgtgctggaaatcgcgcgtaatccaatcca

SEQ ID NO: 823891 - DNA, 75 bp, synthetic construct
  source 1..75: mol_type = other DNA
atgaaaatactacgatggttgttcgctctggtcatgctgatgactgcaacagaagctctggctgccgggcatagc

SEQ ID NO: 823892 - DNA, 75 bp, synthetic construct
  source 1..75: mol_type = other DNA
ggtcctcctcctgccccttcggttaagctgattggctaccatcaaaatatcaacaaagcaagttgtcctggatta

SEQ ID NO: 823893 - DNA, 75 bp, synthetic construct
  source 1..75: mol_type = other DNA
aaagaatagcagcgacttcgattttgtgtttttctgttctgtattcaaatacagcttttgctgtctggcccgtca

SEQ ID NO: 823894 - DNA, 75 bp, synthetic construct
  source 1..75: mol_type = other DNA
cacgcttggcgatccgatggcgtatctggtggcaccgccgctggaagcgacctacggcattgatgcagcgttgaa

SEQ ID NO: 823895 - DNA, 75 bp, synthetic construct
  source 1..75: mol_type = other DNA
cccggcggaagtgcgtgctggtctggatgcgatggttgcgcatattgaaaatggcgctgctttccagtgggctaa

SEQ ID NO: 823896 - DNA, 75 bp, synthetic construct
  source 1..75: mol_type = other DNA
gaggtgcacggttgcccgtggttgatctcgacatatactgacagcaatatctcttcggtagatggtgttggtcta

SEQ ID NO: 823897 - DNA, 75 bp, synthetic construct
  source 1..75: mol_type = other DNA
cctgtggacggttgcccatggttgatttcgacatatacagatagcattattctgatggatggcatcggcccctat

SEQ ID NO: 823898 - DNA, 75 bp, synthetic construct
  source 1..75: mol_type = other DNA
atgatgccaaagtgacggtgacgccggttccgcatccgattactgacaggcaactgcatgatattgtggtgcgcg

SEQ ID NO: 823899 - DNA, 75 bp, synthetic construct
  source 1..75: mol_type = other DNA
actgcaaccggttgataagcaaatgctgaatcatttaaaaactaatgctacaagagcgactcaggcaacaaaata

SEQ ID NO: 823900 - DNA, 75 bp, synthetic construct
  source 1..75: mol_type = other DNA
aataaagtttcaaaccagtcttattctgttgagcagatggaagttgctgaagcggcaaaaagaaatctgataggg

SEQ ID NO: 823901 - DNA, 75 bp, synthetic construct
  source 1..75: mol_type = other DNA
atgaaaatactacgctcgttagtttgtatatttttattggggggagggtgttcgggggcacaggcggccacaaaa

SEQ ID NO: 823902 - DNA, 75 bp, synthetic construct
  source 1..75: mol_type = other DNA
gcgtgcgcgaagaacgtcgtatcgtcgatgaagtgcgcaaaattttgcaggatgaagggctgatgatttcggcaa

SEQ ID NO: 823903 - DNA, 75 bp, synthetic construct
  source 1..75: mol_type = other DNA
cttcgttgggtggggtgtcttttgttgcatctggcatatttgtttggatcgggaaagtttatttagaaagatata

SEQ ID NO: 823904 - DNA, 75 bp, synthetic construct
  source 1..75: mol_type = other DNA
atcatccacgtcactgaatgcggcaacaataacgaccggattcaatatgactctgcttccatacattcagccgga

SEQ ID NO: 823905 - DNA, 75 bp, synthetic construct
  source 1..75: mol_type = other DNA
gtacgctgcttggcgtactggtgattacgctaatcggtaacggtctggtgctgctcgggattaactcctttttcc

SEQ ID NO: 823906 - DNA, 75 bp, synthetic construct
  source 1..75: mol_type = other DNA
atgaacaagcagcagcaaaccgcactcaacatggcaggattcataaaaagccagagcctgacgctgctcgaaaaa

SEQ ID NO: 823907 - DNA, 75 bp, synthetic construct
  source 1..75: mol_type = other DNA
tgtttgaaaccagagaaagcgtgcttaagctgaggcctgcgctggatcatgttgaccccaacgaaccatttgaag

SEQ ID NO: 823908 - DNA, 75 bp, synthetic construct
  source 1..75: mol_type = other DNA
actaatgaaagaataaaggctaagttagacaattctgtttatgtaacgaaagcgtattttgataaggagttatca

SEQ ID NO: 823909 - DNA, 75 bp, synthetic construct
  source 1..75: mol_type = other DNA
cccttttcagcagtgaagtaaaaatatcgacagtcaatgcactgaggatatttaattcatcttttggtgctattt

SEQ ID NO: 823910 - DNA, 75 bp, synthetic construct
  source 1..75: mol_type = other DNA
ggattcatatgcgtgaccagaatgttattttgggacgcaatgcggtatccaccgatggtgcgcaggcattacttc

SEQ ID NO: 823911 - DNA, 75 bp, synthetic construct
  source 1..75: mol_type = other DNA
tgtcaacgtgcggctacggcggcgggctatccagatttccagccagatgcttgtcttatcaaccgctacgctcct

SEQ ID NO: 823912 - DNA, 75 bp, synthetic construct
  source 1..75: mol_type = other DNA
tgccagtgccaattaacgaaaacgaagtgctggactggctgggcggacaatttctcggggtgccggtatccgcgc

SEQ ID NO: 823913 - DNA, 75 bp, synthetic construct
  source 1..75: mol_type = other DNA
tagccgcaaaactgccttcgggcgctcggtttttgctgttggcggtaatgccactgcagcgcagttgtgcggtat

SEQ ID NO: 823914 - DNA, 75 bp, synthetic construct
  source 1..75: mol_type = other DNA
tctatacgtcaaaagattccgttcccggcgttaatgccaaagggaatcaggacacctctggtaatgcggctacag

SEQ ID NO: 823915 - DNA, 75 bp, synthetic construct
  source 1..75: mol_type = other DNA
attatattatttgctcaccggccccggaaacaccgttattaggtcgtaatgcctcggcaagaatattacaactaa

SEQ ID NO: 823916 - DNA, 75 bp, synthetic construct
  source 1..75: mol_type = other DNA
cggtcatgcccagatggtcaactttgaagctctgcgtccgctggcggcagaagaagcgcgtgatgcgtttgctca

SEQ ID NO: 823917 - DNA, 75 bp, synthetic construct
  source 1..75: mol_type = other DNA
ttctgttggttgcgtgcgtaatgactatggtatgccggagcaaattcagttctggtcggtggctgataacgttcg

SEQ ID NO: 823918 - DNA, 75 bp, synthetic construct
  source 1..75: mol_type = other DNA
tcacgtatcagcgtcaccagcctgatttctgcctccgcccagggtaaaaaagcggtcgatgcgttagcagggcag

SEQ ID NO: 823919 - DNA, 75 bp, synthetic construct
  source 1..75: mol_type = other DNA
tctggtctgttgccgataacgttcgctttggcggtgcgctaatggctgtgaaaatcgctgaaaaactggtgcagg

SEQ ID NO: 823920 - DNA, 75 bp, synthetic construct
  source 1..75: mol_type = other DNA
ggtaagacaatcaccgtgcaggatgctgctgaattcgactggacgcaggcgcagctggcattttttgtcgcaggc

SEQ ID NO: 823921 - DNA, 75 bp, synthetic construct
  source 1..75: mol_type = other DNA
gcgtcagctggcgttcaacatgctgccgttactgccggatagcgaaggtagcgtgcgtgaagaacgtcgtatcgt

SEQ ID NO: 823922 - DNA, 75 bp, synthetic construct
  source 1..75: mol_type = other DNA
cggcgaactgaaagacgaagcgctgatccgtaaagcgtctgaaatatccatcaaagcgggtgctgatttcatcaa

SEQ ID NO: 823923 - DNA, 75 bp, synthetic construct
  source 1..75: mol_type = other DNA
cggcgaactgaaagacgaagcgctgatccgcaaagcgtctgaaatctccatcaaagcgggtgctgacttcatcaa

SEQ ID NO: 823924 - DNA, 75 bp, synthetic construct
  source 1..75: mol_type = other DNA
gtacacgatatggtggtgcatgtggatacgacagaacgacaaccaatagactcaacttgccggttcacgtatgtg

SEQ ID NO: 823925 - DNA, 75 bp, synthetic construct
  source 1..75: mol_type = other DNA
gtgacggtaaaaatgcgtctggctgtggttgcgctcctgctgtttctggtagtgatggtggtgatggtggacttc

SEQ ID NO: 823926 - DNA, 75 bp, synthetic construct
  source 1..75: mol_type = other DNA
atccgtaaagcgtctgaaatctccatcaaagcgggtgctgacttcatcaaaacctctaccggtaaagtggcagtg

SEQ ID NO: 823927 - DNA, 75 bp, synthetic construct
  source 1..75: mol_type = other DNA
gggaggtgcgtgttccgcatcggggaaatgtggtggacagagtcattgaaggggcttacgaggtggtgggcgtgt

SEQ ID NO: 823928 - DNA, 75 bp, synthetic construct
  source 1..75: mol_type = other DNA
tgccatgcagtcgctgtttctgccgccaccggcacgccaggcgctggcacaggcggcactgacttaccgttatgg

SEQ ID NO: 823929 - DNA, 75 bp, synthetic construct
  source 1..75: mol_type = other DNA
gggaaatgtggtggacagagtcattgaaggggcttacgaagtggtgggcgtttttgaccggattgaggaaaagcg

SEQ ID NO: 823930 - DNA, 75 bp, synthetic construct
  source 1..75: mol_type = other DNA
tgaacggtacacatatatacccacgatttctctcctcgacagtctgcagcgcgaaggctttcagcccttctttgc

SEQ ID NO: 823931 - DNA, 75 bp, synthetic construct
  source 1..75: mol_type = other DNA
atcgacggcgatgtgaagctcaaccgggctctctgggtgatggcggaagcgatgctgagtgggtttcagtcctga

SEQ ID NO: 823932 - DNA, 75 bp, synthetic construct
  source 1..75: mol_type = other DNA
cacaggctgcactgacgtatcgttttggtgagaaccaccagccggtgacagcacctcaggtgctttcaccccggc

SEQ ID NO: 823933 - DNA, 75 bp, synthetic construct
  source 1..75: mol_type = other DNA
acaccccgctggcagaaggcgcaagcccggcttccggtactgatcatcttggccctactgcggtcattggctcgg

SEQ ID NO: 823934 - DNA, 75 bp, synthetic construct
  source 1..75: mol_type = other DNA
ggtccggttggcggcaactattacgcgggtacgtcgtctatctccgctaacgtaccgtttggcgcgcagactatg

SEQ ID NO: 823935 - DNA, 75 bp, synthetic construct
  source 1..75: mol_type = other DNA
gggcaaaatttgattgatggtcagccgatggatgcggtgaatccgctctcctacgcgatcctcgaatcctgcggt

SEQ ID NO: 823936 - DNA, 75 bp, synthetic construct
  source 1..75: mol_type = other DNA
gggaaatgtagtggagaaagttatcgaaggggcttacgaggtggtgggcgtgtttgaccggatacccgggcaggc

SEQ ID NO: 823937 - DNA, 75 bp, synthetic construct
  source 1..75: mol_type = other DNA
acgactacgcagcgattggctgtatcgaaaccgccgttggcggtaaatggggctatcgctgcaccgggatgagct

SEQ ID NO: 823938 - DNA, 75 bp, synthetic construct
  source 1..75: mol_type = other DNA
acatctcgataagccgatcccggttcgtcgcgcgctggcgctggcgcatcacctggcgaatcgcaccatctggat

SEQ ID NO: 823939 - DNA, 75 bp, synthetic construct
  source 1..75: mol_type = other DNA
aaccggtaagcaggttccggaaataattctgctcaacagccatgacggctccagctcataccagatgttgccggg

SEQ ID NO: 823940 - DNA, 75 bp, synthetic construct
  source 1..75: mol_type = other DNA
aaaggtcttcaggaaacgtctctgactccctacaaagccctgcatttcggcacgttgaccatcgatcccatcaac

SEQ ID NO: 823941 - DNA, 75 bp, synthetic construct
  source 1..75: mol_type = other DNA
tgacgaacatcagcccgtcaccaccgccgacattctgacgccacgacgccgaactgccggtgaactggtgggtac

SEQ ID NO: 823942 - DNA, 75 bp, synthetic construct
  source 1..75: mol_type = other DNA
gggaagtccgtgttccacaccggggaaatgtggtggacagagtcattgaaggggcttacgaagtggtgggcgttt

SEQ ID NO: 823943 - DNA, 75 bp, synthetic construct
  source 1..75: mol_type = other DNA
ccagaactatacgtacatccccaccatcaccgtactggaaagtctgcagcgggaaggcttccagccattcttcgc

SEQ ID NO: 823944 - DNA, 75 bp, synthetic construct
  source 1..75: mol_type = other DNA
cgcgtagtcacccttgctaacactgagatttcactctctaccgccgatttcgaactgctctgggaattagccact

SEQ ID NO: 823945 - DNA, 75 bp, synthetic construct
  source 1..75: mol_type = other DNA
tgaattgttatgggaattagccacccatgccgggcaaatcatggaccgcgatgcgctgctgaagaatttacgcgg

SEQ ID NO: 823946 - DNA, 75 bp, synthetic construct
  source 1..75: mol_type = other DNA
aaacgtggtggaaaaagttatcgaaggggcttacgaagtggtgggcgtttttgaccagattgaggaaaagcgtga

SEQ ID NO: 823947 - DNA, 75 bp, synthetic construct
  source 1..75: mol_type = other DNA
gcggtatgcgtacattcccaccatcaccgtcctggaaaaactgcagcaggaaggctttcagccattcttcgcctg

SEQ ID NO: 823948 - DNA, 75 bp, synthetic construct
  source 1..75: mol_type = other DNA
gccattcacagcattgacactggcattaagctcaaccgcgcattgtgggtgatggcggaaaccctgctggagagc

SEQ ID NO: 823949 - DNA, 75 bp, synthetic construct
  source 1..75: mol_type = other DNA
aagagaaacacacatccagaagcgagaactatacctggatccccaccatcacagtgctggaaagcctgcagcggg

SEQ ID NO: 823950 - DNA, 75 bp, synthetic construct
  source 1..75: mol_type = other DNA
accgttctggaaaacctgcagcaggaaggcttccagccgttcttcgcctgccagacccgtgtgcgcgacccgggc

SEQ ID NO: 823951 - DNA, 75 bp, synthetic construct
  source 1..75: mol_type = other DNA
ggcacagtgcaaaaggaaaacgtatccatacccgtgccattcaccgcatcgacactgacattaagctcaatcgcg

SEQ ID NO: 823952 - DNA, 75 bp, synthetic construct
  source 1..75: mol_type = other DNA
gcgcgataggtcagcaacaactggctgccgcactggcagatgacttcgacggcctgacgcacgagcaactgcgtc

SEQ ID NO: 823953 - DNA, 75 bp, synthetic construct
  source 1..75: mol_type = other DNA
ggggaaatgtggtggacagagtcattgaaggggcttacgaggtggtgggcgtgtttgaccggatagaggagaagc

SEQ ID NO: 823954 - DNA, 75 bp, synthetic construct
  source 1..75: mol_type = other DNA
tccgctgacatatgaagagctgatgcaccatgtgccgggaattttcggggaagagaaacacacgtcccgaagcca

SEQ ID NO: 823955 - DNA, 75 bp, synthetic construct
  source 1..75: mol_type = other DNA
ggcctggtctgcggtcagtctctgggagaagtgcgtgttccacaccggggaaacgtggtggacagggtcatcgaa

SEQ ID NO: 823956 - DNA, 75 bp, synthetic construct
  source 1..75: mol_type = other DNA
ccgtccactgacacatgaagagctgatgcaccatgtgccggggattttcggagaagataaacacacgtcccgaag

SEQ ID NO: 823957 - DNA, 75 bp, synthetic construct
  source 1..75: mol_type = other DNA
ctagccagtcgttttggttatgcgaaccagatacgccgtgaccgtccgctgacacacgaagaactgatgcactat

SEQ ID NO: 823958 - DNA, 75 bp, synthetic construct
  source 1..75: mol_type = other DNA
gggatttccggtcgcagcgctaaaggaaaacgtatccacacccgtgccattcacagcatcgacacggacattaag

SEQ ID NO: 823959 - DNA, 75 bp, synthetic construct
  source 1..75: mol_type = other DNA
tgtttgaccggatagaggagaagcctgatgccatgcagtcgctggtcctgccgccaccggcacgccaggcgctgg

SEQ ID NO: 823960 - DNA, 75 bp, synthetic construct
  source 1..75: mol_type = other DNA
tgtttgaccggatagaggagaagcatgatgccatgcagtcgctggtcctgacgccaccggcacgccaggcgctgg

SEQ ID NO: 823961 - DNA, 75 bp, synthetic construct
  source 1..75: mol_type = other DNA
gtaaggacctgtggagtgcttatcagaccattcaggagaatatgctgaaaggcggaatttccggtcgcagtgcca

SEQ ID NO: 823962 - DNA, 75 bp, synthetic construct
  source 1..75: mol_type = other DNA
atgaaacaagaagttatcctggtactcgactgtggcgcgaccaatgtcagggccatcgcggttaatcggcaggga

SEQ ID NO: 823963 - DNA, 75 bp, synthetic construct
  source 1..75: mol_type = other DNA
tgctgaaaggcgggatttccggtcgcagtgcaaaaggaaaacgtatccatacccgggccattcacagcattgata

SEQ ID NO: 823964 - DNA, 75 bp, synthetic construct
  source 1..75: mol_type = other DNA
tgtttgaccggatagaggagaagcgtgatgccatgcagtcgctggtcctggcgccaccggcacgccaggcgctgg

SEQ ID NO: 823965 - DNA, 75 bp, synthetic construct
  source 1..75: mol_type = other DNA
gacattctgacaccacgacgccgggaggattacggtaaggacctgtggagtgcttatcagaccattcaggagaat

SEQ ID NO: 823966 - DNA, 75 bp, synthetic construct
  source 1..75: mol_type = other DNA
ttatcaacttcgcccgcgtgatgctggcagcgctggaaggcggtcgtgacgccaccagcggcaacgtgttcctgc

SEQ ID NO: 823967 - DNA, 75 bp, synthetic construct
  source 1..75: mol_type = other DNA
tgaacatattaaacgtttcgctactctggcgcgtgaaatggccgccactgaaacccgcgaaaaccgtcgagatga

SEQ ID NO: 823968 - DNA, 75 bp, synthetic construct
  source 1..75: mol_type = other DNA
atgacaacactgaaactggacacgctcagcgaccgcattaaagcgcacaaaaatgcgctggtgcatattgtgaaa

SEQ ID NO: 823969 - DNA, 75 bp, synthetic construct
  source 1..75: mol_type = other DNA
gtgaacaaaatccgctccggttcgcactccaaagcctctgccggtagcccgctgtatcagaacgtcaccatcggt

SEQ ID NO: 823970 - DNA, 75 bp, synthetic construct
  source 1..75: mol_type = other DNA
gaaagccgtcgcgatgaactgctggcgatggcagaaaactgcgatcttatcgcccaccagccgccgcagactttc

SEQ ID NO: 823971 - DNA, 75 bp, synthetic construct
  source 1..75: mol_type = other DNA
agacctatatcgacgaactgaaacagtaccataacccgcgctacggtcgtggtccggttggcggcaactattacg

SEQ ID NO: 823972 - DNA, 75 bp, synthetic construct
  source 1..75: mol_type = other DNA
ctgcaaacgcgtcaggccgaacgtcaggcatcgcctggatgctgccgcacagttggagaaagtcgcagacggtcg

SEQ ID NO: 823973 - DNA, 75 bp, synthetic construct
  source 1..75: mol_type = other DNA
gatttgctggcgcgggtgaaattaagtcacgataaactgaaagatttacgcgaacgcaaagccagtctggaagcc

SEQ ID NO: 823974 - DNA, 75 bp, synthetic construct
  source 1..75: mol_type = other DNA
ctgaaaggcgggatttccggccgtagtgcaaaaggaaaacgtatccatacccgcgccattcacagtatcgacacc

SEQ ID NO: 823975 - DNA, 75 bp, synthetic construct
  source 1..75: mol_type = other DNA
tgctgcgcctgcgccgtaacggagagataaacggagaacatgtccctgaaattattctgctcaactctcatgacg

SEQ ID NO: 823976 - DNA, 75 bp, synthetic construct
  source 1..75: mol_type = other DNA
atgtaaatcagatacgccgtgatcgtcccttaactcgtgaagaactgatgtaccacgtcccgagtatttttggag

SEQ ID NO: 823977 - DNA, 75 bp, synthetic construct
  source 1..75: mol_type = other DNA
gagaatctcattaccgctgaagaacaagtattgtcgaatctggaagtctcccgcgatggcgtagaaaaagcggtt

SEQ ID NO: 823978 - DNA, 75 bp, synthetic construct
  source 1..75: mol_type = other DNA
attatctgtggcgtccgggtattgagctgggtcagccttcttctctggcagggtatggcatcgttgagaatgagc

SEQ ID NO: 823979 - DNA, 75 bp, synthetic construct
  source 1..75: mol_type = other DNA
taaaggccgtgaagatggtctgcgcgatctggagcgcaaggcattacaggtgggcaccgatgaagacggtggcta

SEQ ID NO: 823980 - DNA, 75 bp, synthetic construct
  source 1..75: mol_type = other DNA
gatgacgctttcttcaatgtggaagactggatcaacagtgagctggcgctggaatttgccgaacaggaagaaatg

SEQ ID NO: 823981 - DNA, 75 bp, synthetic construct
  source 1..75: mol_type = other DNA
gaatttacatcagccaacttttcggctgatgttcaaactgtcgaaattggcaactgcgcagaacgtgaatcacga

SEQ ID NO: 823982 - DNA, 75 bp, synthetic construct
  source 1..75: mol_type = other DNA
tctggtagaacttaaccaggacgcacagcggatgcgtgagcgcattcaagcgctggaagacatccttgatgctga

SEQ ID NO: 823983 - DNA, 75 bp, synthetic construct
  source 1..75: mol_type = other DNA
agggtaactatctgtggcgtccggggctggaactggggcagccgtcctctctggcgggttacggtatcgctgaaa

SEQ ID NO: 823984 - DNA, 75 bp, synthetic construct
  source 1..75: mol_type = other DNA
gccagaagatgttagaaactttattgcaaagaacaaagttgattttttaaatgccattggtttatgcggggagac

SEQ ID NO: 823985 - DNA, 75 bp, synthetic construct
  source 1..75: mol_type = other DNA
gaacaacaacagcctgtttgccatccgtctgctgaaagacagcgagggtaactatctgtggcgtccggggctgga

SEQ ID NO: 823986 - DNA, 75 bp, synthetic construct
  source 1..75: mol_type = other DNA
tgcctgccgggttacaccttcttcctcattgatctgaacgaccaaactctggagaggggagctgtttacgccttc

SEQ ID NO: 823987 - DNA, 75 bp, synthetic construct
  source 1..75: mol_type = other DNA
acctcaaaactggggctgattgaaccctttatgggggaaatctacggcaacccgcaggccacccagaaaatgctc

SEQ ID NO: 823988 - DNA, 75 bp, synthetic construct
  source 1..75: mol_type = other DNA
atatactccggctctgtttgttgataaacaagtagcggcaccatcagtgaatgtggaaaatttatgtgctataag

SEQ ID NO: 823989 - DNA, 75 bp, synthetic construct
  source 1..75: mol_type = other DNA
atcagcgtttccgaagcctctcagctggccgttctttttcagactgatgaggatttctggattaacctgcaggcc

SEQ ID NO: 823990 - DNA, 75 bp, synthetic construct
  source 1..75: mol_type = other DNA
aatccagcgacctgaaggtggccaggcttcaatgaccctgtccggacttctgagtctgttgtggactgaagccgg

SEQ ID NO: 823991 - DNA, 75 bp, synthetic construct
  source 1..75: mol_type = other DNA
tcaaaaataattcttataattataatcattacattattgctactattaccaattgcgtgcattatcaataaaaat

SEQ ID NO: 823992 - DNA, 75 bp, synthetic construct
  source 1..75: mol_type = other DNA
taaagaatatgacttacatggcaactcaaaaatattttttataattataatattgatattattaccgattgcgta

SEQ ID NO: 823993 - DNA, 75 bp, synthetic construct
  source 1..75: mol_type = other DNA
aagaaacttatcagcaaataaaagaaaaaacaaagatgaaaccagaagattatatcaaaaaattgattactgata

SEQ ID NO: 823994 - DNA, 75 bp, synthetic construct
  source 1..75: mol_type = other DNA
ccgatgatttatgaaaaattgctcgggctggggattgatctcacacaagaaccggtaccgattgtgcctgctgca

SEQ ID NO: 823995 - DNA, 75 bp, synthetic construct
  source 1..75: mol_type = other DNA
gctgactggctgacagcgattgagatgtacaaaccaacagtgcgcatcgtggaagttaatgtgccacgcaccgct

SEQ ID NO: 823996 - DNA, 75 bp, synthetic construct
  source 1..75: mol_type = other DNA
gatgattgaagggctgcccgcctctgatgcgctgacgcctgccgatcgctatctcgaactgttcgagcatgttca

SEQ ID NO: 823997 - DNA, 75 bp, synthetic construct
  source 1..75: mol_type = other DNA
acgctgaaatacacctgggacagcgtcagtcgggatgccatcccgacaacaaacgtggaatatcagtacggtgat

SEQ ID NO: 823998 - DNA, 75 bp, synthetic construct
  source 1..75: mol_type = other DNA
cttctcccttgatgcccggcataccggcctgaaaggatatgcgagtggtgtggtccggattacaaccgaaggtga

SEQ ID NO: 823999 - DNA, 75 bp, synthetic construct
  source 1..75: mol_type = other DNA
gggcaaagttgttgtttttgctcttacctctcccgtatcggtgaccagtcgagggctctctgcacgagctcatca

SEQ ID NO: 824000 - DNA, 75 bp, synthetic construct
  source 1..75: mol_type = other DNA
atgagcttcatgtcacatcgacaagttgtggacatactgccagttactgtgtttcagctccgggcactgacattt

SEQ ID NO: 824001 - DNA, 75 bp, synthetic construct
  source 1..75: mol_type = other DNA
gatgatagtgaaaaagccttaagactaagtaaaatactacgtgataatagacatacatatatgaatcttcttaaa

SEQ ID NO: 824002 - DNA, 75 bp, synthetic construct
  source 1..75: mol_type = other DNA
atgaagattgaatatacgccagaacgtgggcggggattcgttcgccctggtgaaactggaaaaccacaaaattgg

SEQ ID NO: 824003 - DNA, 75 bp, synthetic construct
  source 1..75: mol_type = other DNA
accgcactggcgcgaagttcatgatgaacaacaacagcctgtttgccatccgtctgcttaaagacagcgagggta

SEQ ID NO: 824004 - DNA, 75 bp, synthetic construct
  source 1..75: mol_type = other DNA
gaaggggcttacgaggtggtgggtgtctttgaccggatcgaggacaagcgtgatgccatgcagtcgctgctactg

SEQ ID NO: 824005 - DNA, 75 bp, synthetic construct
  source 1..75: mol_type = other DNA
aacggctgcgtctgtgggcagtctctgggggaagtgcgtgttccgcaccggggaaatgtcgtggaaacagtgatt

SEQ ID NO: 824006 - DNA, 75 bp, synthetic construct
  source 1..75: mol_type = other DNA
aacggctgcgtctgtggccagtctctgggggaagtgcgtgttccgcaccggggaaatgtcgtggaaacagtcatt

SEQ ID NO: 824007 - DNA, 75 bp, synthetic construct
  source 1..75: mol_type = other DNA
cactatgtacccagtatttttggggaagatcggcatacctcccgcagtgaacgctatgcgtacattcccaccatc

SEQ ID NO: 824008 - DNA, 75 bp, synthetic construct
  source 1..75: mol_type = other DNA
gaaggggcttacgaggtggtgggcgtttttgaccggatagaggacaagcgtgatgccatgcagtcgctgctactg

SEQ ID NO: 824009 - DNA, 75 bp, synthetic construct
  source 1..75: mol_type = other DNA
gaaggggcttacgaggtggtgggcgtatttgaccggattgaggacaagcgtgatgccatgcagtcgctgctactg

SEQ ID NO: 824010 - DNA, 75 bp, synthetic construct
  source 1..75: mol_type = other DNA
aacggctgcgtctgtggacagtctctgggggaagtgcgtgttccgcaccggggaaatgtcgtggaaacagtaatt

SEQ ID NO: 824011 - DNA, 75 bp, synthetic construct
  source 1..75: mol_type = other DNA
gggaaggctttcagccgttcttcgcctgccagacccgcgtacgtgacccggaccgccgggaatacaccaaacaca

SEQ ID NO: 824012 - DNA, 75 bp, synthetic construct
  source 1..75: mol_type = other DNA
atgctgaaaggcgggatttccggtcgcagtgcaaaaggaaaacgtatccatacccgggccattcacagcattgat

SEQ ID NO: 824013 - DNA, 75 bp, synthetic construct
  source 1..75: mol_type = other DNA
aacggctgcgtctgtggtcagtctctgggggaagtgcgtgttccgcaccggggaaatgtcgtggatacagtgatt

SEQ ID NO: 824014 - DNA, 75 bp, synthetic construct
  source 1..75: mol_type = other DNA
aacggctgcgtctgtggacagtctctgggggaagtgcgtgttccgcaccggggaaatgtcgtggagacagtgatt

SEQ ID NO: 824015 - DNA, 75 bp, synthetic construct
  source 1..75: mol_type = other DNA
aacggctgcgtctgtggacagtctctgggggaagtgcgtgttccgcaccggggaaatgtcgtggacacagtcatt

SEQ ID NO: 824016 - DNA, 75 bp, synthetic construct
  source 1..75: mol_type = other DNA
agtcattgaaggggcttacgaagtggtgggcgtttttgaccggattgaggaaaagcgtgatgccatgcagtcgct

SEQ ID NO: 824017 - DNA, 75 bp, synthetic construct
  source 1..75: mol_type = other DNA
caaggggcgtgaagacggtctgcgtgagcttgagcgtaaggcgctgcaggtgggcaatgatgaagatggtggtta

SEQ ID NO: 824018 - DNA, 75 bp, synthetic construct
  source 1..75: mol_type = other DNA
tagccgcgattattgcctgctggatcaaaatcaaacccaccacctcacgcctgcgcagcgttcttttccgcgggg

SEQ ID NO: 824019 - DNA, 75 bp, synthetic construct
  source 1..75: mol_type = other DNA
ctatccgccacagttcaggaaatttaccccaacctgcgacactaacgagatccagacctgtacccaagagcaact

SEQ ID NO: 824020 - DNA, 75 bp, synthetic construct
  source 1..75: mol_type = other DNA
tggtgatgcgccaggaagccaccgtgatcaccctcggtggctcggattataaaaaactggtgaatctgggcggca

SEQ ID NO: 824021 - DNA, 75 bp, synthetic construct
  source 1..75: mol_type = other DNA
tacaaaaaactggtgaatctgggcggcacggcttccggatgggttggcgagactgacgcgcgctcccagactgcc

SEQ ID NO: 824022 - DNA, 75 bp, synthetic construct
  source 1..75: mol_type = other DNA
catggatcaacagcgagctggcaaccgaatttgccgaacaggaagaaattgcctttacctcaggcgatggcacca

SEQ ID NO: 824023 - DNA, 75 bp, synthetic construct
  source 1..75: mol_type = other DNA
acgtatccatacccgtgccattcacagcatcgacaccgacattaagctcaaccgggcgttgtgggtgatggcaga

SEQ ID NO: 824024 - DNA, 75 bp, synthetic construct
  source 1..75: mol_type = other DNA
tctgcagcgggaaggctttcagccgttcttcgcctgccagacccgtgtgcgcgacccgggccgccggggatacac

SEQ ID NO: 824025 - DNA, 75 bp, synthetic construct
  source 1..75: mol_type = other DNA
tttttgaccggattgaggaaaagcgtgatgccatgcagtcactgattttaccaccaccggctcgtcaggcgctgg

SEQ ID NO: 824026 - DNA, 75 bp, synthetic construct
  source 1..75: mol_type = other DNA
gcatcttgcggcacggcaacggcagtttcagtaccgtgcatgttctcggatatgccgcgtgagcattacaaagaa

SEQ ID NO: 824027 - DNA, 75 bp, synthetic construct
  source 1..75: mol_type = other DNA
aacccgttaatgcagaacgaaaaacgtaaaaatttgaccatcctgattgtcggcgaaacctcgcgggcggagaac

SEQ ID NO: 824028 - DNA, 75 bp, synthetic construct
  source 1..75: mol_type = other DNA
tggccgcgattattgcctgctggatcaaaatcaaaccctccacttcacgtttgcgaagcgttcttttacgcggag

SEQ ID NO: 824029 - DNA, 75 bp, synthetic construct
  source 1..75: mol_type = other DNA
gctatccatatctgatgctcaggggaataaagtttcaaaccaatcatatgacgttaaacagatgaaagtggctga

SEQ ID NO: 824030 - DNA, 75 bp, synthetic construct
  source 1..75: mol_type = other DNA
aacgaacttagcaaaagaggaattctgtctaacataacttccccgatcgactcgaacaaaattaaggctaattgc

SEQ ID NO: 824031 - DNA, 75 bp, synthetic construct
  source 1..75: mol_type = other DNA
aacaagcaggcggtaaagcgagcgatggcaaagagcgtattctggatatcatcccggaaacccgtgcatcagcgc

SEQ ID NO: 824032 - DNA, 75 bp, synthetic construct
  source 1..75: mol_type = other DNA
acccaagcaccgccagccacccggacggtaaactgcgtttgctgtatgagtgcaacccgatggcattcctggcgg

SEQ ID NO: 824033 - DNA, 75 bp, synthetic construct
  source 1..75: mol_type = other DNA
actccgcactggcagaaccgggggttccgcgattgggtgagcctgattgaattacttcgggattcatggttagcc

SEQ ID NO: 824034 - DNA, 75 bp, synthetic construct
  source 1..75: mol_type = other DNA
ctggtttctggatgtgtcagtgctagcaaatgggatgacgtaatgtcccatatagcccgttggctagttcgttat

SEQ ID NO: 824035 - DNA, 75 bp, synthetic construct
  source 1..75: mol_type = other DNA
gacttgatttacttctcggcagcgtttgttgtttaatgctggctattatggtcggtattgcttgctggcaagtta

SEQ ID NO: 824036 - DNA, 75 bp, synthetic construct
  source 1..75: mol_type = other DNA
tggcggtacctttatgggcacgacatctctggtgatgactatcgcccgccaactgagcgtaccgggaaatctcaa

SEQ ID NO: 824037 - DNA, 75 bp, synthetic construct
  source 1..75: mol_type = other DNA
caaccacagctttattctgccggggttgattggtgtgagcgtatcgtgcgtcttcggctggatcttcgccgcgat

SEQ ID NO: 824038 - DNA, 75 bp, synthetic construct
  source 1..75: mol_type = other DNA
taatactgatatgtctgttttatggtgccagaaaggggggtatcgcgctgggtttattaggcggtatcggtctgg

SEQ ID NO: 824039 - DNA, 75 bp, synthetic construct
  source 1..75: mol_type = other DNA
tccgaacaacacgtccttccctggacacccctgatactgaaaaaagtccgccgcacggataaagtctgtggttac

SEQ ID NO: 824040 - DNA, 75 bp, synthetic construct
  source 1..75: mol_type = other DNA
tgccttgcctgacggcgaatttgctggtgcaggctatcagtgtgctgcttactctcgccagcgactctcctctct

SEQ ID NO: 824041 - DNA, 75 bp, synthetic construct
  source 1..75: mol_type = other DNA
ggcacgacatctctggtgatgactatcgcccgccaactgagcgttccgggaaatctcaatcttttaggctttgtg

SEQ ID NO: 824042 - DNA, 75 bp, synthetic construct
  source 1..75: mol_type = other DNA
cccgtcgaagcaaaagctgtgtgggaaggcttcctctggtcgccacgcctgtatgaaccgttgctgatagctttc

SEQ ID NO: 824043 - DNA, 75 bp, synthetic construct
  source 1..75: mol_type = other DNA
ttttgccgaccacggcctggaacgtgaccctacgaagaagaacgtctattttcatggaggcagggaggctagcca

SEQ ID NO: 824044 - DNA, 75 bp, synthetic construct
  source 1..75: mol_type = other DNA
gttggctgcaaaggtggccgacattctggagaacaacggcggtcgaatgcgtcaggttagctatctggctgaata

SEQ ID NO: 824045 - DNA, 75 bp, synthetic construct
  source 1..75: mol_type = other DNA
tccggtatggattgggtatgacgcaaacggcagcagtggcaacggcgacagcggcgctgtgtccgtggtggttcc

SEQ ID NO: 824046 - DNA, 75 bp, synthetic construct
  source 1..75: mol_type = other DNA
gaaggcgatgacccatgcggcttacgcccagtgcttctttgttctggcccaagcaatagcgtttccttccttggg

SEQ ID NO: 824047 - DNA, 75 bp, synthetic construct
  source 1..75: mol_type = other DNA
atggaaaaagtcaaaaacgtagatgccgttgagttcacggcagcagataagaaggcgatgacccatgcggcttac

SEQ ID NO: 824048 - DNA, 75 bp, synthetic construct
  source 1..75: mol_type = other DNA
tttaaatatttgtgctctgatgcatttatgccaggtaagtgtgtaaacaaaaacagaggagggtgtaatgagtaa

SEQ ID NO: 824049 - DNA, 75 bp, synthetic construct
  source 1..75: mol_type = other DNA
atgatggcagggatatatcgctgcattttgctgttgatagttgggctttttttctcttcgttgagttatgcgaaa

SEQ ID NO: 824050 - DNA, 75 bp, synthetic construct
  source 1..75: mol_type = other DNA
gtgcgttacgccataagcccaagctggaggatatcagctttacgctacgtcgtggcgaagtgcttggcattgctg

SEQ ID NO: 824051 - DNA, 75 bp, synthetic construct
  source 1..75: mol_type = other DNA
ctatgccaatcgttatccggtcacgattgaagctatttcctcagggcgattcgatgtgaaatcgatggtgacgca

SEQ ID NO: 824052 - DNA, 75 bp, synthetic construct
  source 1..75: mol_type = other DNA
ggtaatccatttagcgaaatcgatctctttactggagaagagggcgacacatatcgaaatgaaccgccccgggtt

SEQ ID NO: 824053 - DNA, 75 bp, synthetic construct
  source 1..75: mol_type = other DNA
cggcttttatcgtgatttaccacgactctggatgcagcctgatggggacgctgcactgctgaactatcatattgt

SEQ ID NO: 824054 - DNA, 75 bp, synthetic construct
  source 1..75: mol_type = other DNA
gtttgtgtatatgtgtcagataaaattggccattggctatcgaggacagtcggtgggccatttttgataaaatga

SEQ ID NO: 824055 - DNA, 75 bp, synthetic construct
  source 1..75: mol_type = other DNA
aattcaaaagtcctgatgctgactaaagtaggtgatgatatttttgcggataatactattcgtaatcttgaatct

SEQ ID NO: 824056 - DNA, 75 bp, synthetic construct
  source 1..75: mol_type = other DNA
ttaaatgatgaatccgcaagcgtagatgccagtttcgattttacgccggtatggaacagtatgcctgcaggggcc

SEQ ID NO: 824057 - DNA, 75 bp, synthetic construct
  source 1..75: mol_type = other DNA
cgccagtacgccagcgcatcgtggtcagtgcaaatttgctgggttttggctaccagcgattaatgccttcttttg

SEQ ID NO: 824058 - DNA, 75 bp, synthetic construct
  source 1..75: mol_type = other DNA
ctgaataaaacccgcccggcaatggtggatgtaatacccactgatggcatcgttccgctctatatcaatccacaa

SEQ ID NO: 824059 - DNA, 75 bp, synthetic construct
  source 1..75: mol_type = other DNA
ttcctgtgctttctgattttattgtgtcatttatgttagggattaataaaacaaaaattcctaaggaaggtgcga

SEQ ID NO: 824060 - DNA, 75 bp, synthetic construct
  source 1..75: mol_type = other DNA
atgagtggtgaaaaaaaggcgaaaggctggcagttttatggccttgtaggtgtcggtgttgttgcgctcctttcc

SEQ ID NO: 824061 - DNA, 75 bp, synthetic construct
  source 1..75: mol_type = other DNA
cgcccggcaatggtggatgtgatacccactgaaggcatcgttccgctctatatcaatccacaaggcgtggcgaaa

SEQ ID NO: 824062 - DNA, 75 bp, synthetic construct
  source 1..75: mol_type = other DNA
agataagctcttttcttcattgttagaccagccagcgcaagcggcgctgtggcacgacaaacaaggccatctgtc

SEQ ID NO: 824063 - DNA, 75 bp, synthetic construct
  source 1..75: mol_type = other DNA
ttagacggtgccgcggggctgtgctggtatgcagactcaaaattgcaaaccccgctgtttgtcggtcagtttgat

SEQ ID NO: 824064 - DNA, 75 bp, synthetic construct
  source 1..75: mol_type = other DNA
actcttcctggggccaccgtcgcgacgtcgccggttatgctgcgggtctggaactgttcgaccgccgtctgccgg

SEQ ID NO: 824065 - DNA, 75 bp, synthetic construct
  source 1..75: mol_type = other DNA
taaagatgaccagcaggataccgaagccacggcgatcgcaagtgatttgttgagcggcaaaaaacgctggcaagc

SEQ ID NO: 824066 - DNA, 75 bp, synthetic construct
  source 1..75: mol_type = other DNA
tgttgtttaaagatgatcagcaggataccgaagccacggcgatcgcaggtgatttgttgagcggcaaaaaacgct

SEQ ID NO: 824067 - DNA, 75 bp, synthetic construct
  source 1..75: mol_type = other DNA
aacgccctgatgttcgcgacatatcaggacaagatgctggtgttttccagcacggatatgctgtttaaagatgat

SEQ ID NO: 824068 - DNA, 75 bp, synthetic construct
  source 1..75: mol_type = other DNA
ggcctggactatattagtggaggtgtatacggctttggtcataataataatattgcggtggcgtatgtaaaggaa

SEQ ID NO: 824069 - DNA, 75 bp, synthetic construct
  source 1..75: mol_type = other DNA
aggaaaagacagtccggttgattcctacgtcctgattcaggctgcagatactgatctggcttttgccaccagtat

SEQ ID NO: 824070 - DNA, 75 bp, synthetic construct
  source 1..75: mol_type = other DNA
aggggcctggcgtggtacatggatatgatgtgcgaagcgcgtggcgcggcggatctccgcactcaggactcgctt

SEQ ID NO: 824071 - DNA, 75 bp, synthetic construct
  source 1..75: mol_type = other DNA
gggggcgggtactctttggcatgacgcggcatctaatggataacgtagccgggcaatgtggcgcaacatggcaat

SEQ ID NO: 824072 - DNA, 75 bp, synthetic construct
  source 1..75: mol_type = other DNA
agtataaagctgattgacttgttggtgcaggagctgccaaagcgtggagggtggcctgatgatgtgctcgattgt

SEQ ID NO: 824073 - DNA, 75 bp, synthetic construct
  source 1..75: mol_type = other DNA
attatgaataacgtcattactgtgcagaagaatgctccggataatgttattcatataaaatttgggaacagatga

SEQ ID NO: 824074 - DNA, 75 bp, synthetic construct
  source 1..75: mol_type = other DNA
cgggtactctttggcatgacgcggcatctaatggataacgtagccggacaatgtggcgcaacatggcaattcgtg

SEQ ID NO: 824075 - DNA, 75 bp, synthetic construct
  source 1..75: mol_type = other DNA
tactgatatagatgataaaattattcagcgcgcccgtgatacgggagaggactggcgcagcctgacagagcggat

SEQ ID NO: 824076 - DNA, 75 bp, synthetic construct
  source 1..75: mol_type = other DNA
atattaataaaccccctatatcccccaaaaaagtttctcagaagttcgacccgctagaaacagagttgcctgatt

SEQ ID NO: 824077 - DNA, 75 bp, synthetic construct
  source 1..75: mol_type = other DNA
tacgtcctgattcaggcagcagatactgatctggcttttgccaccagtataacctcacagacgctggctgccggt

SEQ ID NO: 824078 - DNA, 75 bp, synthetic construct
  source 1..75: mol_type = other DNA
tcgaacaacgatatcgcgatggctggtgggcagatcaccgatcagaacacggacggaaatatcacactcagcggc

SEQ ID NO: 824079 - DNA, 75 bp, synthetic construct
  source 1..75: mol_type = other DNA
ggcaatcaataccgacggtgattacattgtcggcagcattgactatactggcgatactcgcgggcaggcgtggta

SEQ ID NO: 824080 - DNA, 75 bp, synthetic construct
  source 1..75: mol_type = other DNA
aatgtcctttcaaccatgggccctcaggaagtcaactcactggaggttgattttaatcgcaatctgaaacctctc

SEQ ID NO: 824081 - DNA, 75 bp, synthetic construct
  source 1..75: mol_type = other DNA
tcagcggatgaaaaaaacatacaaccagaatttgtttcgggaaaacattgctgacaaaaaagtgattaacactta

SEQ ID NO: 824082 - DNA, 75 bp, synthetic construct
  source 1..75: mol_type = other DNA
ttgaccttaaaaaccataaacaatgtgcatgggcatttaaatatgttatggagcatatcaaacccgattacatgc

SEQ ID NO: 824083 - DNA, 75 bp, synthetic construct
  source 1..75: mol_type = other DNA
tctggggcaaatagtctttcttggttctgtaccagcacgagtggttggcatcgctaaaagtaacaaccgtagtga

SEQ ID NO: 824084 - DNA, 75 bp, synthetic construct
  source 1..75: mol_type = other DNA
gtcgaaaaattaacgaagagctggaagttatcattatgaatgcctggcaccatgccagatatgcagaagataaat

SEQ ID NO: 824085 - DNA, 75 bp, synthetic construct
  source 1..75: mol_type = other DNA
gtcgaaaaattaacgaagaactggaggttatcattatgaatgcctggcatgcagcccgatatgcagaagataaat

SEQ ID NO: 824086 - DNA, 75 bp, synthetic construct
  source 1..75: mol_type = other DNA
ctttagacaactcaacactgatgggtgatgttgttttctccagtaatttcgatgaaaacttcttcccgcaaggtg

SEQ ID NO: 824087 - DNA, 75 bp, synthetic construct
  source 1..75: mol_type = other DNA
agcgattattgcacatccaaatgctgacaacgcgatgcagacgactgcaacgtttgataattctaccctgatggt

SEQ ID NO: 824088 - DNA, 75 bp, synthetic construct
  source 1..75: mol_type = other DNA
acactgtcagcactggtgtaaacagcggcgaagtgtttaacaacaccatcaatgttgcgaactctactgtcactt

SEQ ID NO: 824089 - DNA, 75 bp, synthetic construct
  source 1..75: mol_type = other DNA
ggcgtctgatgattcaacggatgaaaaaaacatataatcagaatgtattccgggaaaacattgcggacaaaaaag

SEQ ID NO: 824090 - DNA, 75 bp, synthetic construct
  source 1..75: mol_type = other DNA
ttattttgcatggaatatactttcaaccatgggccctaaggaaatcaatccactagaggttgatttttaccgtga

SEQ ID NO: 824091 - DNA, 75 bp, synthetic construct
  source 1..75: mol_type = other DNA
gttataccagtccacccacgttagtgtggccagttccacttctgcacggtttttccagctcttacggtgtattac

SEQ ID NO: 824092 - DNA, 75 bp, synthetic construct
  source 1..75: mol_type = other DNA
tcagcaacaaaacgtcggggtatcagattaaaggcatgggttgatcgatatctgaaaatacaggacacgcgactg

SEQ ID NO: 824093 - DNA, 75 bp, synthetic construct
  source 1..75: mol_type = other DNA
cggctaactcctttaaagtgggaagttatacggtcgtggatgcgttagtgcgttatgatctggcacgagtcggca

SEQ ID NO: 824094 - DNA, 75 bp, synthetic construct
  source 1..75: mol_type = other DNA
cccggtttccgtgctgtatgggaaaagcagcccaggcggcctgttgaacatggtcagcaagcgcccgaccactga

SEQ ID NO: 824095 - DNA, 75 bp, synthetic construct
  source 1..75: mol_type = other DNA
gccgataaacgtgatgacaaacagtttacctggcgtggtggtgttaactacctgtttgataatggtgtaacacca

SEQ ID NO: 824096 - DNA, 75 bp, synthetic construct
  source 1..75: mol_type = other DNA
ctcacctgaaacttataacgatgatgagcaggaattgattactcgctttcgagcagcttcgttagatgtgaaaaa

SEQ ID NO: 824097 - DNA, 75 bp, synthetic construct
  source 1..75: mol_type = other DNA
aagtttcgcaaaagagcgtatatggctacggtatgtgttcagatccgctgtataccaaagaccaggaggcactca

SEQ ID NO: 824098 - DNA, 75 bp, synthetic construct
  source 1..75: mol_type = other DNA
gcgttcacctggcgtccggacgataaaaccaatttcaccttcctttcttacttccagaacgagccggaaactggt

SEQ ID NO: 824099 - DNA, 75 bp, synthetic construct
  source 1..75: mol_type = other DNA
gtttttcagatgtgtggaacgaacacttgcatatcacccagggaaaaaccggaatgcgtctggcgttaccgctta

SEQ ID NO: 824100 - DNA, 75 bp, synthetic construct
  source 1..75: mol_type = other DNA
atgtcaccgaggccacgaaaaaacagcactgacatagcatgtctttacgaaaagttcgatcgcagaactggcaag

SEQ ID NO: 824101 - DNA, 75 bp, synthetic construct
  source 1..75: mol_type = other DNA
acaaccaaaaccgatgagtaaagacaacctgagcgattacttcgccaaagcgcgagatctggctggaataattcc

SEQ ID NO: 824102 - DNA, 75 bp, synthetic construct
  source 1..75: mol_type = other DNA
actggcaaaaaatttacaatgcaacgcctgaaaaacactttatccgtaacgcaatgcttcttgcgattgttactg

SEQ ID NO: 824103 - DNA, 75 bp, synthetic construct
  source 1..75: mol_type = other DNA
agcgactactttgccaaagcacgggatctggctgggataattccaccagcaggaaaaactccgccaacatttcat

SEQ ID NO: 824104 - DNA, 75 bp, synthetic construct
  source 1..75: mol_type = other DNA
aacaccagaacaggatgctgccgcccgcgccagtctggaacgtttccaggccgcgatgcttgccgccgatgacga

SEQ ID NO: 824105 - DNA, 75 bp, synthetic construct
  source 1..75: mol_type = other DNA
ctaactttgtcaccgtagatactgacggagatggtgttgctgatatagactggccccctgaatctccagacaacc

SEQ ID NO: 824106 - DNA, 75 bp, synthetic construct
  source 1..75: mol_type = other DNA
gatcaaagatgagcagccgtctaaaagcacacttgacgattggaataatgatgccatcagggttaaagaattttt

SEQ ID NO: 824107 - DNA, 75 bp, synthetic construct
  source 1..75: mol_type = other DNA
cgcagcaaagaggtttcacaccccactcaggttgcaccagactatttgagtcggtcattttcagctacgcgcgac

SEQ ID NO: 824108 - DNA, 75 bp, synthetic construct
  source 1..75: mol_type = other DNA
aaacgtaggactgatgagaagaaaagacaacgcctatcattcgagcatttcatggctatacgccgcgccgcggca

SEQ ID NO: 824109 - DNA, 75 bp, synthetic construct
  source 1..75: mol_type = other DNA
tggttgatatgatcgatctggagttatttaccggcgatgatcaggttaaagaaaccgtcgcctacgcccacgcgc

SEQ ID NO: 824110 - DNA, 75 bp, synthetic construct
  source 1..75: mol_type = other DNA
tttgcggatgtgtatggttcgatcaggaagaggctggcatattcggaacgctttacattcatcggcaaaaagtgc

SEQ ID NO: 824111 - DNA, 75 bp, synthetic construct
  source 1..75: mol_type = other DNA
tcgatcaaggaacctcaagaaggggtttgcggctgtgtatggttcgatcaggaggaggctggcatattcggaacg

SEQ ID NO: 824112 - DNA, 75 bp, synthetic construct
  source 1..75: mol_type = other DNA
ccagccgcattgatggagccacctgtagactcactccagacgctgaatcggcttatctatccctcagagaacaac

SEQ ID NO: 824113 - DNA, 75 bp, synthetic construct
  source 1..75: mol_type = other DNA
atggggggaaacgtggacaaggtgaaggcgttaattatcgccgctgttgtttgcattattgccggactgaccgcc

SEQ ID NO: 824114 - DNA, 75 bp, synthetic construct
  source 1..75: mol_type = other DNA
ggttactaccaacttatgaagagatcggtatatgggctccagcattattaatatttatacgagtcttacaaggtt

SEQ ID NO: 824115 - DNA, 75 bp, synthetic construct
  source 1..75: mol_type = other DNA
accacaaaatggcatatatggtacactatacatccataggcaaaaagtacaaaaaaaggaggcatctagactggc

SEQ ID NO: 824116 - DNA, 75 bp, synthetic construct
  source 1..75: mol_type = other DNA
gcttatctatccctcagagaacaactaaaaacgaaagacgctcagatcgtagggctacaggactacatcaaaacg

SEQ ID NO: 824117 - DNA, 75 bp, synthetic construct
  source 1..75: mol_type = other DNA
cgcactgaaaacagcaagtaacactattcagcagatgaaggagcgaaacgccgaactgtcaaaacttgataagag

SEQ ID NO: 824118 - DNA, 75 bp, synthetic construct
  source 1..75: mol_type = other DNA
ggcgcagtaaaaaaagcctctgcccccgggcaaatatcggttaatgatttacgcacagtattaagtattttgcac

SEQ ID NO: 824119 - DNA, 75 bp, synthetic construct
  source 1..75: mol_type = other DNA
tcgtcggtatcggttatgcgattgtttactacaccatcttccgcgtgctgattaaagcactggatctgaaaacgc

SEQ ID NO: 824120 - DNA, 75 bp, synthetic construct
  source 1..75: mol_type = other DNA
gataacacagtgttaataaaaggacttaaggaggttgtgaatgttaaatttcgcagagacacgcgacttatagaa

SEQ ID NO: 824121 - DNA, 75 bp, synthetic construct
  source 1..75: mol_type = other DNA
cggcgggtgggggcgtcggatattcatatcacggttttcgttgcccacacacgcatcgagatgcgtatcaacggc

SEQ ID NO: 824122 - DNA, 75 bp, synthetic construct
  source 1..75: mol_type = other DNA
atggtcagtaacacggatataccggacggactccggcatctggtacaggtgctgccggccgcagcggggaagccc

SEQ ID NO: 824123 - DNA, 75 bp, synthetic construct
  source 1..75: mol_type = other DNA
gtctgcatcatatctggaacgtacctttccagatgcagattggtgagtacaccaacgcggctggccaggtattcc

SEQ ID NO: 824124 - DNA, 75 bp, synthetic construct
  source 1..75: mol_type = other DNA
taggacgtagtcaggatgcgcaacaaaagtatgcaaaaactacacggtatgcagtagctccctcattcagctggc

SEQ ID NO: 824125 - DNA, 75 bp, synthetic construct
  source 1..75: mol_type = other DNA
acaataagatgtctcgtcgtcaacaattaattggctacagctttgctcatgaatttaatgatacttttactgtac

SEQ ID NO: 824126 - DNA, 75 bp, synthetic construct
  source 1..75: mol_type = other DNA
acggcaataaccgcgccatccgtctgccccgcgatctggattttgaaggggtaagtaaactcgaaatcatccggg

SEQ ID NO: 824127 - DNA, 75 bp, synthetic construct
  source 1..75: mol_type = other DNA
ccgcagcgctgactgcaacaaggccgaatatagagctgcaacctaccgtcaacgtcaaaaccacgagtgccttgc

SEQ ID NO: 824128 - DNA, 75 bp, synthetic construct
  source 1..75: mol_type = other DNA
gctcgaaaaagccgatccggattttatggcggagcgcgagaatgttgtcagcgacgaaggtcgatttgacctgtg

SEQ ID NO: 824129 - DNA, 75 bp, synthetic construct
  source 1..75: mol_type = other DNA
atgctgtaattaaccgtcaggaacagacagggctttatattcaggatcagtctgagtggaataagtgggtattga

SEQ ID NO: 824130 - DNA, 75 bp, synthetic construct
  source 1..75: mol_type = other DNA
tcagtaaatttactggtcaatggctggctgttatatcagacagtcgcctgtcgccttatggcccgcagtggttac

SEQ ID NO: 824131 - DNA, 75 bp, synthetic construct
  source 1..75: mol_type = other DNA
tgctgccgaaaacataacgttttcggcgaacgatcctgccggtgaaagctcgccgcggtcagaactcttttcgac

SEQ ID NO: 824132 - DNA, 75 bp, synthetic construct
  source 1..75: mol_type = other DNA
ataatgaaactgccctgatgtcatggagcggatccatgtttgaatatctgatgccgaatctggtgatgcccacct

SEQ ID NO: 824133 - DNA, 75 bp, synthetic construct
  source 1..75: mol_type = other DNA
ggatcgttttcagcccaccaccatagtgaacaccgatgatgccatttttggcaccggttatttcgtggcaggtaa

SEQ ID NO: 824134 - DNA, 75 bp, synthetic construct
  source 1..75: mol_type = other DNA
taccggagggttgatcaacatcgtgaccaaaaaaggtcagccggaaaccatgatggagtttgaggctggcacaaa

SEQ ID NO: 824135 - DNA, 75 bp, synthetic construct
  source 1..75: mol_type = other DNA
acagcgggatttgtacggtgccggaggatcaaatgctatctgtgctgatgtacagcacaagtttttgcgcattgg

SEQ ID NO: 824136 - DNA, 75 bp, synthetic construct
  source 1..75: mol_type = other DNA
acgcgctgtcgttacctctgacctgggttgatcagtgccttcgggaacaggggatcaccactgacgttctcatac

SEQ ID NO: 824137 - DNA, 75 bp, synthetic construct
  source 1..75: mol_type = other DNA
gcctgaccagctatctcactgcctatcaacaggtgacgccgctgacgctgggtgaagtctgggcgttaccgggaa

SEQ ID NO: 824138 - DNA, 75 bp, synthetic construct
  source 1..75: mol_type = other DNA
tggagattttcctcgcgacccaggcgttgctgggaattggcctgggcatagccatcagtcgccagcaacatctgg

SEQ ID NO: 824139 - DNA, 75 bp, synthetic construct
  source 1..75: mol_type = other DNA
ggagcactaccggggccatctctacaactggtatgacacccgtacgctggcccccctaagtccacgctatatctc

SEQ ID NO: 824140 - DNA, 75 bp, synthetic construct
  source 1..75: mol_type = other DNA
acatttgccacagcaaaagagaactggcttccgcctgataattatcaggaaataccacaaccgacggtggcacac

SEQ ID NO: 824141 - DNA, 75 bp, synthetic construct
  source 1..75: mol_type = other DNA
aggatgatgttgaattgcgacggctcacactgattcatcgtggtcgcaagcctcgctctctggagctgacaacct

SEQ ID NO: 824142 - DNA, 75 bp, synthetic construct
  source 1..75: mol_type = other DNA
aacgtcagcgacagtaagctggaaggcgtgaaagtcgattcttatgaactgggctggcgctttatcggtgacaac

SEQ ID NO: 824143 - DNA, 75 bp, synthetic construct
  source 1..75: mol_type = other DNA
ccggtacgctgaacatcgatgaatcccggcagcttcagttgatcacacagtactataaaagccagggcgacgacg

SEQ ID NO: 824144 - DNA, 75 bp, synthetic construct
  source 1..75: mol_type = other DNA
gcggcacctatggcgctgcggtgaacggtcaccttcctctgaccaacagcgtgaacgtcggcgacagtaagctgg

SEQ ID NO: 824145 - DNA, 75 bp, synthetic construct
  source 1..75: mol_type = other DNA
actcttcacgttccgacagtcggcaactggactctgtcgatccttttaatatcgaccatattgaagtgatctccg

SEQ ID NO: 824146 - DNA, 75 bp, synthetic construct
  source 1..75: mol_type = other DNA
gccggagaatggcccacagggggtattcctgctgaccggccccagcggcaccggtaaaaccgaaactgcgctcac

SEQ ID NO: 824147 - DNA, 75 bp, synthetic construct
  source 1..75: mol_type = other DNA
gggaacagagaaaactatggtacatatatacctccagccactgcgcatcctaatggtaataaagcctatgcttcc

SEQ ID NO: 824148 - DNA, 75 bp, synthetic construct
  source 1..75: mol_type = other DNA
gtggtgagcccgtccaaagcggccgcctacgtcggctgggcatcggacccgtggagtctgcgcgtgcagagcacc

SEQ ID NO: 824149 - DNA, 75 bp, synthetic construct
  source 1..75: mol_type = other DNA
agcgagcaactgttgaacggctatctcatgctggcaacgccggttattagcctgcttcctgccatcattgcacaa

SEQ ID NO: 824150 - DNA, 75 bp, synthetic construct
  source 1..75: mol_type = other DNA
tctccgggcttttgggcagcatgatgatcaccatcgcccgccagattggcgtgggctttagtaacctggtggagc

SEQ ID NO: 824151 - DNA, 75 bp, synthetic construct
  source 1..75: mol_type = other DNA
gagtctgcgtgtacagagcaccacttctttcgacgtaagcgatgcagagggtaacgatattaatggttacactac

SEQ ID NO: 824152 - DNA, 75 bp, synthetic construct
  source 1..75: mol_type = other DNA
tggcgaataaagatctgaccatcagcgtggtggacgacaaacgccgtatttacggcgtggaaggtgcggtggact

SEQ ID NO: 824153 - DNA, 75 bp, synthetic construct
  source 1..75: mol_type = other DNA
cgcaacattcatcatgataattgcaaaattattgccatcgacaactccccggcgatgatcgaacgctgccgtcgc

SEQ ID NO: 824154 - DNA, 75 bp, synthetic construct
  source 1..75: mol_type = other DNA
catattgacgcctataaagcccctacgccagtagacgttattgaaggtgatattcgcgatatcgccattgaaaac

SEQ ID NO: 824155 - DNA, 75 bp, synthetic construct
  source 1..75: mol_type = other DNA
aagcctggctcgcgagctgcacgacgaaatcggtcagaacattaccgccattcagatccagtcgcaactggtgac

SEQ ID NO: 824156 - DNA, 75 bp, synthetic construct
  source 1..75: mol_type = other DNA
ggcttttccctactcctcgccagtacacaacatcacctacgagaatggcgaaaaaaggtgatattttactcagtg

SEQ ID NO: 824157 - DNA, 75 bp, synthetic construct
  source 1..75: mol_type = other DNA
cgaaaaaatccaacgccaaccgatcatcgcacaccttattcgcgcgacagaacgctttaacgatcggctgggtaa

SEQ ID NO: 824158 - DNA, 75 bp, synthetic construct
  source 1..75: mol_type = other DNA
atgacgcaggaaaacgagatcaaacgtcccacccaggatctggagcacgagccgattaagccgttggataatagc

SEQ ID NO: 824159 - DNA, 75 bp, synthetic construct
  source 1..75: mol_type = other DNA
acagactcagctaatgagcaggcttcaaaagtgcttaagtcgggtaatgctttacggaaatttagtgtgaatcct

SEQ ID NO: 824160 - DNA, 75 bp, synthetic construct
  source 1..75: mol_type = other DNA
tcagatgccgctaatgagcaagctgcaaaggtgcttaataatgctggtacaggtaatgttttgaagaggctgtct

SEQ ID NO: 824161 - DNA, 75 bp, synthetic construct
  source 1..75: mol_type = other DNA
cgacactcttgaaaactggcgtgaccagaagcaaattatttcagtcatctgtaaagatggaattaaaattgacga

SEQ ID NO: 824162 - DNA, 75 bp, synthetic construct
  source 1..75: mol_type = other DNA
tcagtttggtgcggctatcacctatttctcatttttgtcgatgattccgattttgatggtgtcgtttgccgccgc

SEQ ID NO: 824163 - DNA, 75 bp, synthetic construct
  source 1..75: mol_type = other DNA
ggcggtggcgctttattccggcatcaactggatgggtaacctgcgtgaagcgattcgcgcccagtcgcgcgatgt

SEQ ID NO: 824164 - DNA, 75 bp, synthetic construct
  source 1..75: mol_type = other DNA
agattctgcaaaacatcagcgatccgacgcttgccgccacgttgaaaaacaccatcaacactgccgttcagcagc

SEQ ID NO: 824165 - DNA, 75 bp, synthetic construct
  source 1..75: mol_type = other DNA
caggatctggagcacgagccgattaagcagttggataatagcgagaaaggcggcaaagttagccaggcgctggaa

SEQ ID NO: 824166 - DNA, 75 bp, synthetic construct
  source 1..75: mol_type = other DNA
cgttgttttgcgcggcgtggattgccactgccgagtacaaagacgacccgcgaatgccgggaaaaacgcagcggt

SEQ ID NO: 824167 - DNA, 75 bp, synthetic construct
  source 1..75: mol_type = other DNA
caccgaccgcgtaaaaaggcgctgatccgcgggacactcctcgccgctattggttttgaagtgattaaaatcgtg

SEQ ID NO: 824168 - DNA, 75 bp, synthetic construct
  source 1..75: mol_type = other DNA
aatgaacttaccgacgaacagttaaaagcccgtctgaattgttctaggaatgttacggtaaaaaatggtgaaagt

SEQ ID NO: 824169 - DNA, 75 bp, synthetic construct
  source 1..75: mol_type = other DNA
cgttaaaaatggtgagagcaccttctcagatgccgctaatgagcaagcttcaaaggtgcttaagccgggtaatgc

SEQ ID NO: 824170 - DNA, 75 bp, synthetic construct
  source 1..75: mol_type = other DNA
gtcttcgtattcagatgaccttccaaggtgtagaatttcgttcaatcgtagggcaaactgatatttcatctgcga

SEQ ID NO: 824171 - DNA, 75 bp, synthetic construct
  source 1..75: mol_type = other DNA
agttgagaatggaaaaagcaccttctcagatgccgctaatgcgcaagcttcaaaagtgcttaagtcgggtaatgc

SEQ ID NO: 824172 - DNA, 75 bp, synthetic construct
  source 1..75: mol_type = other DNA
atgacggcgttactctccaactgggttgacgcgtgctgcctgttaatggctccgctgaatgatgccctataccgt

SEQ ID NO: 824173 - DNA, 75 bp, synthetic construct
  source 1..75: mol_type = other DNA
tttattgacactgtagaaacttggcgagaccagaaacagattatcaccgtagttgctaaggatggaatctctatc

SEQ ID NO: 824174 - DNA, 75 bp, synthetic construct
  source 1..75: mol_type = other DNA
gaaggaagcttattattaactcgtcagggtcaattagtagaaaacttcatcgacactctggaaagctggcgtgac

SEQ ID NO: 824175 - DNA, 75 bp, synthetic construct
  source 1..75: mol_type = other DNA
atagtggcaaagacggcatctatttccacttaagagataatgtagatgccttcttaaccttatcagcaactgaaa

SEQ ID NO: 824176 - DNA, 75 bp, synthetic construct
  source 1..75: mol_type = other DNA
cttactaatgagcaacttcaagcccgtatcaattgtggtagaagtgtcaaagttgagaatggaaaaagcaccttc

SEQ ID NO: 824177 - DNA, 75 bp, synthetic construct
  source 1..75: mol_type = other DNA
atgtttgatacaaaacaactccgatatagcggaaaggatggggtttatttccatctgcaaggtaacccagataac

SEQ ID NO: 824178 - DNA, 75 bp, synthetic construct
  source 1..75: mol_type = other DNA
agataatgtagaatcttttcttgccttaacagctactgaacagatggactatgactcaccgatgatggtgacaac

SEQ ID NO: 824179 - DNA, 75 bp, synthetic construct
  source 1..75: mol_type = other DNA
ggtcagactgatatttcagcagctactggtaaaacagctactacgaatgatggtggttctaccagtaaaaagaat

SEQ ID NO: 824180 - DNA, 75 bp, synthetic construct
  source 1..75: mol_type = other DNA
acagtggcaaagatggcgtttacttccacttaagagataatgtagatgccttcttaaccttaacagctactgaac

SEQ ID NO: 824181 - DNA, 75 bp, synthetic construct
  source 1..75: mol_type = other DNA
tcactggtggtactggttcatttgggaatgctgtattaaatcgctttctttccacagatgtaaaagaaatacgca

SEQ ID NO: 824182 - DNA, 75 bp, synthetic construct
  source 1..75: mol_type = other DNA
aaatggtgatacatttgtacaaaaagcccctgctgcaactattgatattttggttaaatctctcctttctttttt

SEQ ID NO: 824183 - DNA, 75 bp, synthetic construct
  source 1..75: mol_type = other DNA
tgatgccatgttggttcatgaaatggcgaaggctttattgccgctggtggctgataaaattccgaataaagccga

SEQ ID NO: 824184 - DNA, 75 bp, synthetic construct
  source 1..75: mol_type = other DNA
gcgaattgtatgtctgagtacagataaagccgtatatcctattaatgcaatgggcatatctaaagcaatgatgga

SEQ ID NO: 824185 - DNA, 75 bp, synthetic construct
  source 1..75: mol_type = other DNA
aaaagtaatgattgctaaatctagaacagtaaacccaaataaaactgttatttgcggaactcgttatggcaatgt

SEQ ID NO: 824186 - DNA, 75 bp, synthetic construct
  source 1..75: mol_type = other DNA
ccactgtttataagacaggttgttaatggtgaggctattactattacagaccctaatatgacccgtttcatgatg

SEQ ID NO: 824187 - DNA, 75 bp, synthetic construct
  source 1..75: mol_type = other DNA
gaaagaatgcttgatgccttggatgaccaggagctggtaaaactggttactgaacgcagcagtcagcctctgcat

SEQ ID NO: 824188 - DNA, 75 bp, synthetic construct
  source 1..75: mol_type = other DNA
gaaaaacccgatggcgacagtcagcgccggtgatggtttcccggtcgctatcctgaaccgtaatcagcctgcttt

SEQ ID NO: 824189 - DNA, 75 bp, synthetic construct
  source 1..75: mol_type = other DNA
ttgctatatttcttttttcctgtattgccggaatgggcagcgtgctggatgaattccagactcatcgcccgttaa

SEQ ID NO: 824190 - DNA, 75 bp, synthetic construct
  source 1..75: mol_type = other DNA
agacgccggaactatggagaagatcgaacgctatcagcagttcatcaaagataatcacccgggtatgccagtgcc

SEQ ID NO: 824191 - DNA, 75 bp, synthetic construct
  source 1..75: mol_type = other DNA
atgaaaaacgaaactgaagaaggttctgtaacaaataataacgagggaagttttaatggaaccaatattgaagat

SEQ ID NO: 824192 - DNA, 75 bp, synthetic construct
  source 1..75: mol_type = other DNA
ctactgtgttcctgctgaattgtatgaaaggatgcttgatgctatggatgaccaggagctggtgaaactggttac

SEQ ID NO: 824193 - DNA, 75 bp, synthetic construct
  source 1..75: mol_type = other DNA
ctggtaaaccattgaccattaccgatcccaatatgactcgtttcatgatgacgcttgaggatgctgttgatctgg

SEQ ID NO: 824194 - DNA, 75 bp, synthetic construct
  source 1..75: mol_type = other DNA
ggcttattgataccgggatgatcgaaatggaagaaagcgctctgaaagaggcaatgtcgatgatccccatgaaac

SEQ ID NO: 824195 - DNA, 75 bp, synthetic construct
  source 1..75: mol_type = other DNA
ttctatctgcgccagcacggcgaggaggaaggccgtcagattgcctgtgcattactggaagatttaatggaagcc

SEQ ID NO: 824196 - DNA, 75 bp, synthetic construct
  source 1..75: mol_type = other DNA
tacgcgccgcgctctatcgccgcgccgtggcctgtgcatggctgaccctgtgcgaacgtcagcaccgctacccgc

SEQ ID NO: 824197 - DNA, 75 bp, synthetic construct
  source 1..75: mol_type = other DNA
atgatgcaacatcaggtcaatgtatcggctcgcttcaatccagaaaccttagaaagtgtttttagcgtggggcgt

SEQ ID NO: 824198 - DNA, 75 bp, synthetic construct
  source 1..75: mol_type = other DNA
atgatgcaacatcaggtcaatgtatcggctcgcttcaatccggaaaccttagaacgtgttttacgcgtggtgcgt

SEQ ID NO: 824199 - DNA, 75 bp, synthetic construct
  source 1..75: mol_type = other DNA
atgagtgtgcaactggaagaacagtcacctgaggcgcaaataggaccgcatgacgtgatggcaggcattatcaag

SEQ ID NO: 824200 - DNA, 75 bp, synthetic construct
  source 1..75: mol_type = other DNA
gatccgaagttgaagttttatattggcgacgtaagggattataacagtattttgtctgcaactcgcggggttgat

SEQ ID NO: 824201 - DNA, 75 bp, synthetic construct
  source 1..75: mol_type = other DNA
taatggcgacatttttgtacaaaaagcgcctgcagctacgattgaaacattagcaattgctctgaaagagcttct

SEQ ID NO: 824202 - DNA, 75 bp, synthetic construct
  source 1..75: mol_type = other DNA
attattggaactcgacacggggaaaaactttacgaagcgttattgagccgagaggaaatgatagcagcggaagat

SEQ ID NO: 824203 - DNA, 75 bp, synthetic construct
  source 1..75: mol_type = other DNA
ggaccactcaaagccgcgccgtcgctgtcctttttcgggctggccgtgatggatgagctttgcgcccgtcatatc

SEQ ID NO: 824204 - DNA, 75 bp, synthetic construct
  source 1..75: mol_type = other DNA
atgaaatgctgtgaatctcatctggcacttcgtgccgctctgtatcgccgtgccgttgcctgtgcctggctggct

SEQ ID NO: 824205 - DNA, 75 bp, synthetic construct
  source 1..75: mol_type = other DNA
tccggccctctaatgtcctgtcccgcactctcccagctcggaatagccgtaatggatgagttatgcgtccgtcac

SEQ ID NO: 824206 - DNA, 75 bp, synthetic construct
  source 1..75: mol_type = other DNA
cgtagtgttccagcacgcggcggataaagcagcggaagaggcgcggtttcgcactctcgatattctgcatgtctc

SEQ ID NO: 824207 - DNA, 75 bp, synthetic construct
  source 1..75: mol_type = other DNA
ttgtgactggtggcctgaaattaattgataaaacactggcaacatcacaggtatttccactgccgggcctcctct

SEQ ID NO: 824208 - DNA, 75 bp, synthetic construct
  source 1..75: mol_type = other DNA
aaccgtatttgcgcttgctgtgagttgcatatggatattcgtccgctgccaggcatgacactcaatgaacttaat

SEQ ID NO: 824209 - DNA, 75 bp, synthetic construct
  source 1..75: mol_type = other DNA
ttgcggacagggggctggcggtttgttgctggcggggcataccgatacggtgccatttgatgacggacgctggac

SEQ ID NO: 824210 - DNA, 75 bp, synthetic construct
  source 1..75: mol_type = other DNA
taaagttgacatactgaaaggtgccattacaacgcgccctgcggccccttctcttctcaatgtgtacattgatga

SEQ ID NO: 824211 - DNA, 75 bp, synthetic construct
  source 1..75: mol_type = other DNA
cactgatgccagtactgagtgctaacaaagctcaggaagaacagattaacacctcctatgaaccactgactccct

SEQ ID NO: 824212 - DNA, 75 bp, synthetic construct
  source 1..75: mol_type = other DNA
taacggtaaatgcgaataaacaggcgacggctttctcctcgtcacagcaggataccgaccagtacggcatgaaac

SEQ ID NO: 824213 - DNA, 75 bp, synthetic construct
  source 1..75: mol_type = other DNA
aggcatgacactcaatgaacttaatggtttgctcaacgatgcattggctccggtgagcgaacgctggccgggtcg

SEQ ID NO: 824214 - DNA, 75 bp, synthetic construct
  source 1..75: mol_type = other DNA
aatatctggaaacgcgttttatcaagcccacccgtgagctgatcactcaggtaattcatcatttctgctggcatt

SEQ ID NO: 824215 - DNA, 75 bp, synthetic construct
  source 1..75: mol_type = other DNA
aaccgtaggtaaaagcagggctgttatcctctcatcattcctgattgtctatgccgtcagatttaatggcgtgtt

SEQ ID NO: 824216 - DNA, 75 bp, synthetic construct
  source 1..75: mol_type = other DNA
aatatctggagacgcggtttatcaagcccacccgtgagctgatcacccaggtaattcaccatttttgctggcatt

SEQ ID NO: 824217 - DNA, 75 bp, synthetic construct
  source 1..75: mol_type = other DNA
taccggacagggagctggcggtttgctgctggcggggcataccgatacggtgccatttgatgacggccgctggac

SEQ ID NO: 824218 - DNA, 75 bp, synthetic construct
  source 1..75: mol_type = other DNA
gaagtggtgaactactgtaccgaagcaccgtttattcagacgctatgcccgacgctggtgttagggcctggttca

SEQ ID NO: 824219 - DNA, 75 bp, synthetic construct
  source 1..75: mol_type = other DNA
gccagtcagtgaagcccgttgtggcgaaagaaacgactcgcgcaactaaaaactttggctatgaagagatgttga

SEQ ID NO: 824220 - DNA, 75 bp, synthetic construct
  source 1..75: mol_type = other DNA
ccagcgcaagcgtcagtgagctgaaaaaaaatccgatggcaacagtcagtgccgaagaggggtatcctgtcgcca

SEQ ID NO: 824221 - DNA, 75 bp, synthetic construct
  source 1..75: mol_type = other DNA
gaagctctgcaacaagccattgacgataatttctggcaagccgaataccgcgactaccgccgtacctccatctaa

SEQ ID NO: 824222 - DNA, 75 bp, synthetic construct
  source 1..75: mol_type = other DNA
tttcttattcgcagtggcggcttccatcattaattgattttaataaactatgcgaattatttcgcaggaaggcag

SEQ ID NO: 824223 - DNA, 75 bp, synthetic construct
  source 1..75: mol_type = other DNA
caggagctggtgaaactggttactgaacgcagcaatcagccacttcatgatgtggacctggacagttatttatga

SEQ ID NO: 824224 - DNA, 75 bp, synthetic construct
  source 1..75: mol_type = other DNA
caagcgccagtgtcagcgagctgaagaaaaacccgatggcgacagttagcgccggtgatggtttcccggtcgcta

SEQ ID NO: 824225 - DNA, 75 bp, synthetic construct
  source 1..75: mol_type = other DNA
atcaggagctggttaaactggtaaccgaacgcagcaaccaaccgctgcatgatgtagacctggataaatacctat

SEQ ID NO: 824226 - DNA, 75 bp, synthetic construct
  source 1..75: mol_type = other DNA
atgccatctcgttggattttcgctctgatcatcgcactcttagcgccaggcgcggcggcacacaatttcgtcact

SEQ ID NO: 824227 - DNA, 75 bp, synthetic construct
  source 1..75: mol_type = other DNA
agctatgaatggtcagccactcccaacaaccttaaacgcgggcaaggttgcccgaaatgcgctaaacacggtttt

SEQ ID NO: 824228 - DNA, 75 bp, synthetic construct
  source 1..75: mol_type = other DNA
aatttaatggtagtaatgagtttttctattacagtccggaagtattctacatggtagaagaagcatacaaagaga

SEQ ID NO: 824229 - DNA, 75 bp, synthetic construct
  source 1..75: mol_type = other DNA
tttctctctgtatatctttatggtggtattgttttccttgcatggggagtaatacgcaaggggtttgaaattaaa

SEQ ID NO: 824230 - DNA, 75 bp, synthetic construct
  source 1..75: mol_type = other DNA
cgatgagattgcccgtatggatacctgggatttttgccagctagccaacgcggtggttgattttttgcaaccctc

SEQ ID NO: 824231 - DNA, 75 bp, synthetic construct
  source 1..75: mol_type = other DNA
ctcgccctatacctgttaaggaagttaatccgccagcaatcattgaatcatctcatcaggtaattaatcctgacg

SEQ ID NO: 824232 - DNA, 75 bp, synthetic construct
  source 1..75: mol_type = other DNA
ttcagggagcaacaaacgcatatcgttccgcgtcagtatgtgagtggcgaaagccattactatcttggcaaacaa

SEQ ID NO: 824233 - DNA, 75 bp, synthetic construct
  source 1..75: mol_type = other DNA
gttttgatctgcgcggtacgcttactcacgggcgcgatgttgaaattgatactaacgttatcatcgagggcaacg

SEQ ID NO: 824234 - DNA, 75 bp, synthetic construct
  source 1..75: mol_type = other DNA
aacggtgcagatatgaaacgctggctggcgaagctgaccaataataatgctcagggcgagtactacatcaccgac

SEQ ID NO: 824235 - DNA, 75 bp, synthetic construct
  source 1..75: mol_type = other DNA
atgttgaataatgctatgagcgtagtgatccttgcagcaggcaaaggcactcgcatgtattctgatattccaaaa

SEQ ID NO: 824236 - DNA, 75 bp, synthetic construct
  source 1..75: mol_type = other DNA
tctattttcttgatgaaccggtagcgtggaaactgcatgcggcggggcggttggatattgataccaccggtctgg

SEQ ID NO: 824237 - DNA, 75 bp, synthetic construct
  source 1..75: mol_type = other DNA
agcaactcggcgttagccgtgctattgccgggcgtgaaatccgcggcaatcgtgtcaccgtcgatggcgaaatcg

SEQ ID NO: 824238 - DNA, 75 bp, synthetic construct
  source 1..75: mol_type = other DNA
tttacgtatgataataattactttcgcgataaataccaagggatacctgtcggcgggtatactcagattgttgat

SEQ ID NO: 824239 - DNA, 75 bp, synthetic construct
  source 1..75: mol_type = other DNA
aaagtcgatcttagctggccggacaaccttacggctctgttaaaagatgttgataccgtctattttctggtgcac

SEQ ID NO: 824240 - DNA, 75 bp, synthetic construct
  source 1..75: mol_type = other DNA
tctggtgcaaacgctcagccagcaagggcatcagatcctggcagcggcacgtcatgtcgacaggcttgcaaagtg

SEQ ID NO: 824241 - DNA, 75 bp, synthetic construct
  source 1..75: mol_type = other DNA
ataattttcaaggtaacgccgttataaattatacagagtcaacggttccatatacaagaataattgagcataaac

SEQ ID NO: 824242 - DNA, 75 bp, synthetic construct
  source 1..75: mol_type = other DNA
ccttccctttaatatgaatacattttatcaattgtgggggactattacaccggagcaagctcaagctaagattaa

SEQ ID NO: 824243 - DNA, 75 bp, synthetic construct
  source 1..75: mol_type = other DNA
gctttcgatgacgcggtacgtagcacgttgaaagaggaagaaaaactggtcaactccagcgactggggctacgac

SEQ ID NO: 824244 - DNA, 75 bp, synthetic construct
  source 1..75: mol_type = other DNA
tgcgcgatatggtttacaacctgccagtattaacgccaccacgctgggtacgttcacgcaccacgcccatcgcgc

SEQ ID NO: 824245 - DNA, 75 bp, synthetic construct
  source 1..75: mol_type = other DNA
gcctcagggctatgtttgttctactgacgatccggatcacccaacggtgctctattttctggatgaacctgtggc

SEQ ID NO: 824246 - DNA, 75 bp, synthetic construct
  source 1..75: mol_type = other DNA
gttcaggctgcgtatttgcatcgccttaaaatctggttatccagtgctttcggtttgagtatgggacctgaacgg

SEQ ID NO: 824247 - DNA, 75 bp, synthetic construct
  source 1..75: mol_type = other DNA
ttgtcgctaatgactataacctgtcggtgagcagctatgttgaagcgaaagatactcgcgaaattatcgatatcg

SEQ ID NO: 824248 - DNA, 75 bp, synthetic construct
  source 1..75: mol_type = other DNA
aattttgggacgataaggacttcatacatcatgttcagcaagagaacaatgaattggagttgctaatagtttgtg

SEQ ID NO: 824249 - DNA, 75 bp, synthetic construct
  source 1..75: mol_type = other DNA
gatggatgggattttaagcagtacgttctgggcgcgcttttctaccgttttatcagcgaaaatttttccagctat

SEQ ID NO: 824250 - DNA, 75 bp, synthetic construct
  source 1..75: mol_type = other DNA
gttatgcgaaactggatgacagcgtaattactgatgacattaaagacgatgccatcaaaaccaaaggctacttca

SEQ ID NO: 824251 - DNA, 75 bp, synthetic construct
  source 1..75: mol_type = other DNA
cgatgagcgttttgccccggctggcgttctggcccccaaatccaaagctgacttcgcgtttgtattacatgcgct

SEQ ID NO: 824252 - DNA, 75 bp, synthetic construct
  source 1..75: mol_type = other DNA
agcttcatcgccagatctggcaaattgctaacgatgtcagaggttcggtcgatggatgggactttaagcaatacg

SEQ ID NO: 824253 - DNA, 75 bp, synthetic construct
  source 1..75: mol_type = other DNA
tcccttggttcttcaacagttaatatggacagtctttcagtagcggatttaaaaattaattttgaaaacaaaaaa

SEQ ID NO: 824254 - DNA, 75 bp, synthetic construct
  source 1..75: mol_type = other DNA
ttgtcgcgaatgactataacctgtcggtgagcagctatgtggaagcgaaagataaccgcgaaattatcaatattg

SEQ ID NO: 824255 - DNA, 75 bp, synthetic construct
  source 1..75: mol_type = other DNA
tgctaacgatgtcagaggttcggtcgatggatgggattttaagcaatacgttctgggcgcgcttttctaccgttt

SEQ ID NO: 824256 - DNA, 75 bp, synthetic construct
  source 1..75: mol_type = other DNA
cactggcaccgaacctgttctttggcaccaccattgcagtaaacattctggttctgtccaaacataaaacggata

SEQ ID NO: 824257 - DNA, 75 bp, synthetic construct
  source 1..75: mol_type = other DNA
taacaccgttaaagataaaaatgcccgcttggctgcggttctgaaaggggttgaagggctaaaacttggtgactt

SEQ ID NO: 824258 - DNA, 75 bp, synthetic construct
  source 1..75: mol_type = other DNA
gagcaattttagaaaaatgggaactgttgtaatttatactggaccgattgatgaatattttgaatactgctacgg

SEQ ID NO: 824259 - DNA, 75 bp, synthetic construct
  source 1..75: mol_type = other DNA
ccacgtgcctgcgggaaaatgggttttctacggtctggctgctattctgacagttgtcacgctggtcggtatcgt

SEQ ID NO: 824260 - DNA, 75 bp, synthetic construct
  source 1..75: mol_type = other DNA
accacgcgatgcacgatctgaaaattcacgtgcctgcgggcaaatgggttttctacggtctggctgctatcctga

SEQ ID NO: 824261 - DNA, 75 bp, synthetic construct
  source 1..75: mol_type = other DNA
gccgtcaggcgctgcgttcagcttcccactggtatgccgtgctaagcggcgagtgcgtcagcccacaacaggaag

SEQ ID NO: 824262 - DNA, 75 bp, synthetic construct
  source 1..75: mol_type = other DNA
attgcccgcaaactgaatcgcgaaaaagagctggcactggagcaaacctgcgccttactcgattacgcgcggctg

SEQ ID NO: 824263 - DNA, 75 bp, synthetic construct
  source 1..75: mol_type = other DNA
attgccgaaaccttgcgcgtgctggggtatcaacgcgcggcagtggtgcacagcggcgggatggatgaagtttca

SEQ ID NO: 824264 - DNA, 75 bp, synthetic construct
  source 1..75: mol_type = other DNA
cgtcgagcattgaacatgacggtcaggcgatgtttgccggattaacaaacccgctgccagtggcgcgttatcact

SEQ ID NO: 824265 - DNA, 75 bp, synthetic construct
  source 1..75: mol_type = other DNA
cgatcttacccgcgatgcttacggcttctactgtcgtgaggttgtgaaacgaatgtttgaagtgtggtgtcattg

SEQ ID NO: 824266 - DNA, 75 bp, synthetic construct
  source 1..75: mol_type = other DNA
tgcgccagcgttatggcaatcgctacgatcttacccgcgatgcttacggcttctactgtcgtgaggttgtgaaac

SEQ ID NO: 824267 - DNA, 75 bp, synthetic construct
  source 1..75: mol_type = other DNA
ttcgcagtgccgcacatgccttcaacgaactggatgaacactggttacagcatcttgctaaccagtttccgcctg

SEQ ID NO: 824268 - DNA, 75 bp, synthetic construct
  source 1..75: mol_type = other DNA
agtaatagtgtgtcagcgattgatctggtgacttatcagcatgtggcggatatcccgctggagaaatacgacggg

SEQ ID NO: 824269 - DNA, 75 bp, synthetic construct
  source 1..75: mol_type = other DNA
gtgaaacacgatacgcgtgaagcggaagatgtgctggatgtggcggtggccattgcggaggcagaaggcgaaatt

SEQ ID NO: 824270 - DNA, 75 bp, synthetic construct
  source 1..75: mol_type = other DNA
tgcgccagcgttatggcaatcgctatgacctgacgcgagatgttgaaggtttctactgtagtgaaattgtgaaac

SEQ ID NO: 824271 - DNA, 75 bp, synthetic construct
  source 1..75: mol_type = other DNA
gcacgtacaagccaccgtttcccaggcgttgaaaaaaggcgatgtacaaatcgctatctcttacagcggcagtaa

SEQ ID NO: 824272 - DNA, 75 bp, synthetic construct
  source 1..75: mol_type = other DNA
aattaatttgagcaagcgagcgaaaagaattatttatacaggccccattgatgaatattatgattattgtttcgg

SEQ ID NO: 824273 - DNA, 75 bp, synthetic construct
  source 1..75: mol_type = other DNA
aaaggataagtataattctatggcggaacgaattatatatactgggcctatagatgcttattttgataaaaagtt

SEQ ID NO: 824274 - DNA, 75 bp, synthetic construct
  source 1..75: mol_type = other DNA
cagattaccgcaccgccaaaggcacagtcagccgtcagcaactggaagatggctccctgctcacgctgaataccc

SEQ ID NO: 824275 - DNA, 75 bp, synthetic construct
  source 1..75: mol_type = other DNA
acatttgacaataattatttttctgacaaatatcagggtattcctgttgggggatatacgaatttaattgaaaaa

SEQ ID NO: 824276 - DNA, 75 bp, synthetic construct
  source 1..75: mol_type = other DNA
aaagagtggagtaatggtgatgagccatactaccctatcaatgatgagaaaaacatggctttatatagaaaatat

SEQ ID NO: 824277 - DNA, 75 bp, synthetic construct
  source 1..75: mol_type = other DNA
cgatattcagaccgcggcgttttgccttgtgtgcttgctttggccaacagcggcagtaaccgttaagcgcttgca

SEQ ID NO: 824278 - DNA, 75 bp, synthetic construct
  source 1..75: mol_type = other DNA
aagccaccagcttttttcagcagtggtacgtggtgaactgaagccggaacaactggcggcggcgctggtgagcat

SEQ ID NO: 824279 - DNA, 75 bp, synthetic construct
  source 1..75: mol_type = other DNA
ataaatcgcgccaggcgctggacgagttaggtgtctgtttcctcttcgcgccgaagtaccacagcggttttcgcc

SEQ ID NO: 824280 - DNA, 75 bp, synthetic construct
  source 1..75: mol_type = other DNA
actgactgattcttcgctgcggcggttggcacatttcaccctcgataccgtttctggtgaaaccgaatggcgtag

SEQ ID NO: 824281 - DNA, 75 bp, synthetic construct
  source 1..75: mol_type = other DNA
gaaaattcgcggtgagcacccgaatgagatcgccggggcggcaaccgcgctactggaaaacgccgcgccgttccc

SEQ ID NO: 824282 - DNA, 75 bp, synthetic construct
  source 1..75: mol_type = other DNA
accgcagcgtctccagtaaatcgggttcgtcggatctgctggcagcgtttggtatcaacctggatatgaatgccg

SEQ ID NO: 824283 - DNA, 75 bp, synthetic construct
  source 1..75: mol_type = other DNA
aagccaccagctgttttcagcggtggtacgtggcgagctgaaaccagaacaactggcggcggcgctggtgagcat

SEQ ID NO: 824284 - DNA, 75 bp, synthetic construct
  source 1..75: mol_type = other DNA
agtcgcgtcattaacaaatcggtgttcctggcactgggcatcaatatcgaaggtcagaaagaactgccaggtatg

SEQ ID NO: 824285 - DNA, 75 bp, synthetic construct
  source 1..75: mol_type = other DNA
caccttcttcggttacccaccggatatccgcaaggccatctacacgacgaatgccatcgaatcgctgaacagcgt

SEQ ID NO: 824286 - DNA, 75 bp, synthetic construct
  source 1..75: mol_type = other DNA
gatgcacggtacccgcagataagtcgcagctggcgggcaaactggccgaatgttgccaccttcttcgtgtattcg

SEQ ID NO: 824287 - DNA, 75 bp, synthetic construct
  source 1..75: mol_type = other DNA
aatcgcaatctggtttgtatgctggagttgcaaatcaatgcatactgggccacgcgccccagccatttcgtgtta

SEQ ID NO: 824288 - DNA, 75 bp, synthetic construct
  source 1..75: mol_type = other DNA
cggtcagaaagagctgctgggtatgtggctggcagaaaatgaaggtgcaaagttctggctgggtgtactgactga

SEQ ID NO: 824289 - DNA, 75 bp, synthetic construct
  source 1..75: mol_type = other DNA
aaaaatcagcccaaatcgggaaccaattcccgtaatggctattccacgaaaaccgtcaccactaccgacgggccg

SEQ ID NO: 824290 - DNA, 75 bp, synthetic construct
  source 1..75: mol_type = other DNA
ccacgctgatatccaaagtgaccgatgcggttaaagagcaggtctctgaatggcaaaatcgaccgttggatgcac

SEQ ID NO: 824291 - DNA, 75 bp, synthetic construct
  source 1..75: mol_type = other DNA
aacacgccgcgtgaccgtgaaaataccttcgaaccgcaactaattaagaagcatcagacacgcatcacccagatg

SEQ ID NO: 824292 - DNA, 75 bp, synthetic construct
  source 1..75: mol_type = other DNA
tggctaacgaactggccaaatacctcaaaacccctgaagacctcagtcagtttgatcggctgctgaaaaagctca

SEQ ID NO: 824293 - DNA, 75 bp, synthetic construct
  source 1..75: mol_type = other DNA
gcaggctaactggccgaatcttgccacgttcttcgcttatccaacggacatccgcaaagtgatctatacgacgaa

SEQ ID NO: 824294 - DNA, 75 bp, synthetic construct
  source 1..75: mol_type = other DNA
gctcaatgtgctgactgaactgaaaaaccgcggtctgaacgatatcctcatcgcctgtgtggatggcctgaaagg

SEQ ID NO: 824295 - DNA, 75 bp, synthetic construct
  source 1..75: mol_type = other DNA
tgtacgcttacctgatgtctcaccggcgctggtatcgaaggtcaccgatgccgttatggagcaggtagtcgaatg

SEQ ID NO: 824296 - DNA, 75 bp, synthetic construct
  source 1..75: mol_type = other DNA
tcgttgaagtatggattgctagtcgctggtacggctacggctggctgaaccgcgttaacggacgcgagactgacg

SEQ ID NO: 824297 - DNA, 75 bp, synthetic construct
  source 1..75: mol_type = other DNA
gcagaagtctcatccataaccaagcctggtgcagaaattcatgagtatcagttacgcctggctttacgtaataac

SEQ ID NO: 824298 - DNA, 75 bp, synthetic construct
  source 1..75: mol_type = other DNA
gatatggccaaaaacgtggctggagatgctgcagaagtctcatccataaccaagcctggtgcagaaattcatgag

SEQ ID NO: 824299 - DNA, 75 bp, synthetic construct
  source 1..75: mol_type = other DNA
gcgccggtaaggcagctgaaagccattcgccccgagctggtacaaacacccatcttccagcccattgttgcgttc

SEQ ID NO: 824300 - DNA, 75 bp, synthetic construct
  source 1..75: mol_type = other DNA
cactgagaaatcgtcgaccaaatcacacaaagatgattttggatatctggaactggaaggcggcgctaactttag

SEQ ID NO: 824301 - DNA, 75 bp, synthetic construct
  source 1..75: mol_type = other DNA
ccaggatgcgataatctactccatcaaatttaacttccgattgattactgccggggctcccggcagtatgaattc

SEQ ID NO: 824302 - DNA, 75 bp, synthetic construct
  source 1..75: mol_type = other DNA
acggtatcggctacaatttcaccggcagcggttggtggttcaaaccgttctttgctaagcgttatacagatcaaa

SEQ ID NO: 824303 - DNA, 75 bp, synthetic construct
  source 1..75: mol_type = other DNA
gatctcagccggtatagtgaaggtaaccctgctataccgggtatgtacgacgtcagtgtttatgtcaacgattaa

SEQ ID NO: 824304 - DNA, 75 bp, synthetic construct
  source 1..75: mol_type = other DNA
atgatcgtcatgataaaccgggtagcgagcagcgttatacatttaaaaaataccaaccgtatttacctgggtgac

SEQ ID NO: 824305 - DNA, 75 bp, synthetic construct
  source 1..75: mol_type = other DNA
cacaaagatgattttggttatctggaactggaaggcggtgccaactttagttggggagaaatgtacgggtttttc

SEQ ID NO: 824306 - DNA, 75 bp, synthetic construct
  source 1..75: mol_type = other DNA
cggcgctgatctcaaaggtcaccgatgcggtcatggagcaggttaccgaatggcagaatcgcccactggatgcag

SEQ ID NO: 824307 - DNA, 75 bp, synthetic construct
  source 1..75: mol_type = other DNA
cgaagatgtggctggtttctgtgcgtcagtagacattgatgaagttgctaaactcgattatgtgctgactccggg

SEQ ID NO: 824308 - DNA, 75 bp, synthetic construct
  source 1..75: mol_type = other DNA
tagcggattaagttttgaaacgggaaaatgcattactgacctcaaacaaccatttaaagtagtcccacagagcca

SEQ ID NO: 824309 - DNA, 75 bp, synthetic construct
  source 1..75: mol_type = other DNA
ggtaagcagctatgtggaagcgaaagataaccgcgaaattatcgatatcggtgagctgaatgctgagctgaaaac

SEQ ID NO: 824310 - DNA, 75 bp, synthetic construct
  source 1..75: mol_type = other DNA
gatttctaaggccaagcttcctgaaatcggtaagatggttgatgatgcgatggagcttatcgaagcgggcaatcc

SEQ ID NO: 824311 - DNA, 75 bp, synthetic construct
  source 1..75: mol_type = other DNA
catcggggtgtactaatcaacggggagcaggtcatcattatgagttgctgaaggctggtgaaggcgagttcgcag

SEQ ID NO: 824312 - DNA, 75 bp, synthetic construct
  source 1..75: mol_type = other DNA
gaatctcattatgagttgctgaaagccggtaaaggcgagttcgcaggtgctgatccggaagacaaagacgagtac

SEQ ID NO: 824313 - DNA, 75 bp, synthetic construct
  source 1..75: mol_type = other DNA
ttgaagggcttaacctggggaattttaacgagcaccagattgacctattcggcgatgcctatgagttcctgattt

SEQ ID NO: 824314 - DNA, 75 bp, synthetic construct
  source 1..75: mol_type = other DNA
atgacaagccttcagcagcgtgcagagctacaccgtcaaatctgggccattgccaatgatgtcagaggctccgta

SEQ ID NO: 824315 - DNA, 75 bp, synthetic construct
  source 1..75: mol_type = other DNA
acttcgcctttgtactacatgcgctgaactttctttctgccaaaggtcgtgctgcgattgtttgcttcccgggta

SEQ ID NO: 824316 - DNA, 75 bp, synthetic construct
  source 1..75: mol_type = other DNA
gataaccgcgaaattatcgatattgctgagctgaatgcggaactgaaaaccacggtcagcaaaatcgaccagttg

SEQ ID NO: 824317 - DNA, 75 bp, synthetic construct
  source 1..75: mol_type = other DNA
gccagcttttctgcaacgtagcggcgaaagcaaataccaatgacagactgaatgcagatttaaacagtatcttcg

SEQ ID NO: 824318 - DNA, 75 bp, synthetic construct
  source 1..75: mol_type = other DNA
taccgtcagcaaaatcgatcagttgcgcaaagacattgatgcaattgtggctgagattgaaggtgacgaggtgca

SEQ ID NO: 824319 - DNA, 75 bp, synthetic construct
  source 1..75: mol_type = other DNA
attccttaacgatgcccataaagatttaagatccgattttatcattgctaaccctccgtttaacgtctccgactg

SEQ ID NO: 824320 - DNA, 75 bp, synthetic construct
  source 1..75: mol_type = other DNA
atgtccagagttaccgatgccgtgatggagcaggttgtagaatggcaaaaccgaccactggatgctgtttacccc

SEQ ID NO: 824321 - DNA, 75 bp, synthetic construct
  source 1..75: mol_type = other DNA
cgggctgccgtgaaagcggggcttggcgtaacagcaaggcccgtagagatgatgagtcccgatcttcgcgttctc

SEQ ID NO: 824322 - DNA, 75 bp, synthetic construct
  source 1..75: mol_type = other DNA
gtgaaccgatccctcttgtgctgctggatgatcctagtccgttccgtgacatggttctggcaacgctcaataaag

SEQ ID NO: 824323 - DNA, 75 bp, synthetic construct
  source 1..75: mol_type = other DNA
gttggataagtttgcaggcgtctgggatgaaaaatacccgcaaatcagcaagagctggcgcacacactgggaaaa

SEQ ID NO: 824324 - DNA, 75 bp, synthetic construct
  source 1..75: mol_type = other DNA
cggcggcagttacacagaattatttacagggtcttaaatgtatccctttgttctctaaagcataaccacttagcc

SEQ ID NO: 824325 - DNA, 75 bp, synthetic construct
  source 1..75: mol_type = other DNA
caaagccgtcaccagcgggctgaaagcggtatatcaggccccgacagaggaagcggcgttgatggcgttggataa

SEQ ID NO: 824326 - DNA, 75 bp, synthetic construct
  source 1..75: mol_type = other DNA
ggtttacggctcttaaagcggagtttgaggcgcaactggaagaagaagcgcgtctaaataaatctatcgctgaaa

SEQ ID NO: 824327 - DNA, 75 bp, synthetic construct
  source 1..75: mol_type = other DNA
tcgccaaaaggtcaggctggcattgtgctggcaaaaggagctttgacttcgaaaagttctggtgaaggtgatatc

SEQ ID NO: 824328 - DNA, 75 bp, synthetic construct
  source 1..75: mol_type = other DNA
cctgtcgccaaaaggtcaggctggcgttgtgctggcaaaaggggctttaacctctaaaagttcgggtgaaggtga

SEQ ID NO: 824329 - DNA, 75 bp, synthetic construct
  source 1..75: mol_type = other DNA
ttggcgcaggtgatataccaggcgatggagagttatcacaacccatggcaatacagcccgctgactacccaggag

SEQ ID NO: 824330 - DNA, 75 bp, synthetic construct
  source 1..75: mol_type = other DNA
gtcgcgtcatcaacaaatctgtgttcctggcaccgggcatcaatatcgaaggtcagaaagaactgccaggtatgt

SEQ ID NO: 824331 - DNA, 75 bp, synthetic construct
  source 1..75: mol_type = other DNA
ctggtgaaggcgagttcgcaggcgctgacccggaagataaagacgagtacaccgcttacaacattttctttgtcc

SEQ ID NO: 824332 - DNA, 75 bp, synthetic construct
  source 1..75: mol_type = other DNA
gttgatcaccttgggatggctgcgcttggtccagaacaatattttcaggcgcaagacagaatcgttgggcgtgag
